United States Patent Application Publication US 2012/0005773 A1 - sequence listing, part 2

SEQ ID NO: 4061 - protein, 499 aa, Zea mays
MASGGAVREVGSAAELQAAVAGARAAAVHFWASWCEASKQMDEVFAHLAVDFPHAAFLRVEAEEQPEISEAYGVTAVPYFVFCKEGKTVDTLEGANPASLANKVAKVAGPASVAESAVPASLGVAAGPAVLENIQKMAQRNGSSAVESISSGSTEDALNKRLEQLVNSHPVFLFMKGTPEQPRCGFSRKVIDILKQEGVKFGSFDILTDNDVREGMKKFSNWPTFPQLYCKGELLGGCDIVVAMHESGELKDVFEEHNITLKPQGSKNEEAGEPESATEKGSAVSESIKLTDAQKTRLESLINSSPVMVFIKGTPEEPKCGFSGKLVHILKQENIPFSSFDILSDDEVRQGLKVFSNWPSYPQLYIKGELVGGSDIVMEMHKSGELKKILSEKGVRQKGNLEDRLKSLISSAPVMLFMKGTPDAPRCGFSSKVVNALKKEGVSFGSFDILSDEEVRQGLKTYSNWPTFPQLYYKSELIGGCDIILEMEKSGELKSTLSM

SEQ ID NO: 4062 - protein, 178 aa, Zea mays
MCDAAPRYRGVRKRPWGRFAAEIRDPAKRARVWLGTFDSAEAAARAYDVAARALRGPLARTNFPALTTTSRRPAPTCSSGSTVESSSGPRAGDPRARAAHRGRAAAKPRRPPRQAPPPPTDADCHSDCASSASVVDDGDDASTVRSRARPSLDLNLPAPLDLDGGHDLGFCTDLRLCL

SEQ ID NO: 4063 - protein, 254 aa, Zea mays
MLPPHLTENGAVMIQFGHQMPDYDSPATQSTSETSHQEASGMSEGSLNEHNNDHSGNLDGYSKSDENKMMSALSLGNPETAYAHNPKPDRTQSFYAPFQAISYPYADPYYGGAVAAAYGPHAIMHPQLVGMVPSSRVPLPIEPAAEEPIYVNAKQYHAILRRRQLRAKLEAENKLVKSRKPYLHESRHLHAMKRARGTGGRFLNTKQQPESPGSGGSSDAQRVPATASGGLFTKHEHSLPPGGRHHYHARGGGE

SEQ ID NO: 4064 - protein, 253 aa, Zea mays
KTRVKNFREMRQNGAVMIQFGHQMPDYDSPATQSTSETSHQEASGMSEGSLNEHNNDHSGNLDGYSKSDENKMMSALSLGNPETAYAHNPKPDRTQSFAISYPYADPYYGGAVAAAYGPHAIMHPQLVGMVPSSRVPLPIEPAAEEPIYVNAKQYHAILRRRQLRAKLEAENKLVKSRKPYLHESRHLHAMKRARGTGGRFLNTKQQPESPGSGGSSDAQRVPATASGGLFTKHEHSLPPGGRHHYHARGGGD

SEQ ID NO: 4065 - protein, 197 aa, Zea mays
  misc_feature (74)..(74): Xaa can be any naturally occurring amino acid
  misc_feature (143)..(143): Xaa can be any naturally occurring amino acid
  unsure (1)..(197): unsure at all Xaa locations
QHQHSSLSTTSTRSLLSHDRLTPHPRGRLQELEDIEELERRMWRDRMKLKRLRELQQTRGKDSLASGAGLADGXSKPRQSQEQARRKKMSRAQDGILKYMLKMMEVCRAQGFVYGIIPEKGKPVSGASDNLRAWWKEKVRFDXRNGPAAIAKYQADNAVPGAENELASGAASPHSLQELQDTTLGSLLSALMQHCEP

SEQ ID NO: 4066 - protein, 193 aa, Zea mays
MTTISNCSLLFLFLFLSTLHIASTLSTPTNFIKSSCSTTQYPALCIQSLSVYASTIQQDPHELVQTALSLSLNHTEATKTFVAKCNKFRGLKPREYAALKDCAEEISDSVDRLSRSLKELKLCKVKGEDFTWHISNVETWVSSALTDESTCGDGFAGKALNGKIKEAIRARMVNVAQVTSNALSLINQYAAQH

SEQ ID NO: 4067 - protein, 679 aa, Zea mays
MALLSATSPAKAHLPALLVYHDEPQQHQHALPPAHPQCFGGGGGKARQRARGRCAAAMRPLDAAVAPTPTPAAGEAPRKRPRVLVAGGGIGGLVLALAARRKGYDVTVFERDLSAVRGEGQYRGPIQIQSNALAALEAIDMSVAEEVMRVGCVTGDRINGLVDGMSGSCFKTDISLRWRQPFDSAKLDSAERGLPVTRVISRMTLQQILARAVGNDAILNGSHVVDFTDDGSKVTAILEDGRIFEGDLLVGADGIWSKVRKTLFGHSDATYSGYTCYTGIADFVPPDIDTVGYRVFLGHKQYFVSSDVGAGKMQWYAFHKEEAGGTDPENGKKKKLLEIFDGWCDNVIDLVNATDEEAVLRRDIYDRPPTMNWGKGRVTLLGDSVHAMQPNLGQGGCMAIEDGYQLAVELENAWQESVKTETPIDIVSSLRRYEKERRLRVAIIHGLARMAAIMATTYRPYLGVGLGPLSFLTKLRIPHPGRVGGRFFIKYGMPAMLSWVLGGNSSKLEGRLLSCRLSDKANDQLYQWFEDDDALEEAMGGEWYLIATSEGNCNSLQPIHLIRDEQRSLFVGSRSDPNDSASSLSLSSPQISERHATITCKNKAFYLTDLGSEHGTWITDNEGRRYRVPPNFPVRFHPSDVIEFGSDKKAMFRVKVLNTLPYESARSGNRQQQQVLQAA

SEQ ID NO: 4068 - protein, 621 aa, Zea mays
  misc_feature (103)..(103): Xaa can be any naturally occurring amino acid
  unsure (1)..(621): unsure at all Xaa locations
LGDTIEQVCTKKQAGTGPEFPGSPPPPLRSPFPRSRAPAPAPENPPHAGLVPRWRRRCASRGSRGSLCLWTRPSPPPSSGGSGARPPRARTRGRNAGGGGGAXAVRCQTGSTAPPVLRTEEAPAAAAGARNAQAGFTVVMKFGGSSLASAERMREVAGLILSFPDETPVVVLSAMGKTTNNLLLAGEKAVSCGAPKASEIPELAVIKDLHLRTVDELGLDRSIVSGLLDELEQLLKGVAMMKELTLRTRDYLVSFGECMSTRIFAAYLNKLGKKARQYDAFDIGFITTDDFTNADILEATYPAVAKRLHEDWMDDPAIPIVTGFLGKGCKSCAVTTLGRGGSDLTATTIGKALGLREIQVWKDVDGVLTCDPNIYANAIPVPYLTFDEAAELAYFGAQVLHPQSMRPARDGDIPVRVKNSYNRHAPGTVITKSRDMSKSILTSIVLKSNVTMLDIVSTRMLGQYGFLAKVFSIFEDLGISVDCVATSEVSISLTLDPSKLWSRELIQQELDHVVEELKKFAVVHLLQRRSIISLIGNVQRSSLILEKAFNVLRRNGVNVQMISQGASKVNISLVVNDSEAKQCVQALHSAFFENGFLSEVEGAEVPQNGASLNSNGAVYGN

SEQ ID NO: 4069 - protein, 326 aa, Zea mays
MEPHHANKPRPKLSATKHSKFISCKLYISESRNATAVDAVERASKSDPQVVVVSQFGDHHYNRFRYTLVSYIVVVDGGGSSAAGEATVVHSPIRKVLLAMIEAAFSSIDLESQSGAHPRIGVVDDLSFHPVGQATIEDAASLARQVASDIACIAAVPVFLYAAAHPAGKSVGAVRRELGYYRPNYRGNQWSGSVLPDVLPVKPDVGPAHVVSRKRGGTTVGVTPWIENYNVPVLCKDVATVRRITRGVTGRSGGLPPVQALALFHGDDCTEIACLLDPDHASAYQVQTVVEQIAGDQGLEVEQGYYSDITKDEALDKYLKIACADD

SEQ ID NO: 4070 - protein, 111 aa, Zea mays
  misc_feature (25)..(25): Xaa can be any naturally occurring amino acid
  unsure (1)..(111): unsure at all Xaa locations
LTVKHGHAKCHFAAIDIFNGKKLDXIVPSSHNCDIPHVNRTEYQLIDISEDGFASLLTSDGNTKDDLRLPTDETLVAQIKEGSESGKDLAVTAQSAMGEEQICALEDDGPK

SEQ ID NO: 4071 - protein, 252 aa, Zea mays
NSNALLDPCAENGAVMIQFGHQMPDYDSPATQSTSETSHQEASGMSEGSLNEHNNDHSGNLDGYSKSDENKMMSALSLGNPETAYAHNPKPDRTQSFAISYPYADPYYGGAVAAAYGPHAIMHPQLVGMVPSSRVPLPIEPAAEEPIYVNAKQYHAILRRRQLRAKLEAENKLVKSRKPYLHESRHLHAMKRARGTGGRFLNTKQQPESPGSGGSSDAQRVPATASGGLFTKHEHSLPPGGRHHYHARGGGE

SEQ ID NO: 4072 - protein, 580 aa, Zea mays
TDDSTDKAPTRHPPATMPSRSDSDSLLVRAEGMRDAALDYHGRPADRGATGGWRSALFIIAVEIAERFTFYGVSANLINYLTGPLGQGTAAAAAAINAWNGVAQLLPLLGGALADKWLGRYRTIVVASLLYVIGAGMLAFSTLLSSGSGHQCTTAGGQTCAPSTIKVTFFYVSLYIVAVAQGGHKPCVQAFGADQFDQSDPKETVSRSSFFNWWYFGMCAGTAVTLLFLNYVQDNIGWGLGFGIPCAVMAAALAVFLLGTRRYRYYVTAGERGLFARAGEAFVEWRSRRKALQHGDRPVAEGAPGFSAGVDEEEQAAVSHDAGLVKETKDILRLFPIWATCLLYAVAFSQSSTFFTKQAATLDRRVGRHLQVPPAALQSFISITIVVFIPLYDRVLVPVARRYSGNPSGITMLQRIGTGMFLSLLSMVIAALVEKHRLRVAVDAGLVDKPMVPLPMSLWWMVPQYVLFGAADVYTMVGLQEFFYDQVPDKLRSLGLALYLSIFGVGSFISSTLVSIIDSVTTARGGSWFSNNLNRGHVDYFYWLLAALSALELLAYVFFAVTYKYKNKATVHATVVGQSL

SEQ ID NO: 4073 - protein, 260 aa, Zea mays
CATQEYYSSPAEEYQSPPAVASQKVYVIGGVAGGSLACTVALGSFFVCFNKRERRSPKKDCSSTTIQQLSLKAIQTATSNYKTMIGEGGFGAVYRGALANGQEVAVKVRSSSSTQGTREFNNELRLLSAVWHENLVPLIGYCCEKDQQILVYPFMSNGSLQDRLYGEASKRKVLDWPTRLSVCIGAARGLVYLHNFAGRCIIHRDIKSSNILLDHSMCGKVADFGFSKYAPQESDSNPSMEVRGTAGYLDPEYYSTQVLS

SEQ ID NO: 4074 - protein, 405 aa, Zea mays
MYSNFKEQAIEYVKQAVQEDNAGNYVKAFPLYMNALEYFKTHLKYEKNPKIKEAITAKFTEYLRRAEEIRAVLDEGGAGPGANGGDAAVATRPKTKGKDGDGGNGGDDSEQSKLRAGLNSAIITEKPNVKWNDVAGLESAKQALQEAVILPVKFPQFFTGKRRPWRAFLLYGPPGTGKSYLAKAVATEADSTFFSISSSDLVSKWMGESEKLVANLFQMARENAPSIIFIDEIDSLCGQRGEGNESEASRRIKTELLVQMQGVGHNDDKVLVLAATNTPYALDQAVRRRFDKRIYIPLPDMKARQHMFKVHLGDTPHSLTESDFESLARRTDGFSGSDVAVCVKDVLFEPVRKTQDAMFFFKADGDMWMPCGPKQPGAVQTTMQELASKGLAAKGHFIREGIFWR

SEQ ID NO: 4075 - protein, 463 aa, Zea mays
CKESWVRVSLGPSRDTLERPRRTGTFWTASAHIITAVIGSGVLSLAWAIAQLGWVAGPAAMLLFAFVTYYTATLLAECYRTGDPDTGKRNYTYMDAVRSNLGGAKVAFCGAIQYANLVGVAIGYTIASSISMQAVSRAGCFHKRGHAVPCKSSSNPYMILFGAVQILFSQIPDFDQIWWLSIVAAVMSFTYSAIGLSLGIAQTVANGGFKGSLTGISIGADVTSTQKVWHSLQAFGDIAFAYSFSNILIEIQDTIKAPPPSESKVMQKATRLSVATTTIFYMLCGCMGYAAFGDKAPDNLLTGFGFFEPFWLIDVANVAIVVHLVGAYQVFCQPIFAFVERRAAAAWPDSAFVARELRVGPLALSVFRLTWRSAFVCATTVVAMLLPFFGNVVGFLGAVSFWPLTVYFPVEMYIKQRRVPRGSTKWVCLQTLSVACLVVSIAAAAGSIADVIEALKVYHPFSS

SEQ ID NO: 4076 - protein, 435 aa, Zea mays
MYSNFKEQAIEYVKQAVQEDNAGNYVKAFPLYMNALEYFKTHLKYEKNPKIKEAITAKFTEYLRRAEEIRAVLDEGGAGPGANGGDAAVATRPKTKGKDGDGGNGGDDSEQSKLRAGLNSAIITEKPNVKWNDVAGLESAKQALQEAVILPVKFPQFFTGKRRPWRAFLLYGPPGTGKSYLAKAVATEADSTFFSISSSDLVSKWMGESEKLVANLFQMARENAPSIIFIDEIDSLCGQRGEGNESEASRRIKTELLVQMQGVGHNDDKVLVLAATNTPYALDQAVRRRFDKRIYIPLPDTKARQHMFKVHLGDTPHSLTESDFESLARRTDGFSGSDVAVCVKDVLFEPVRKTQDAMFFFKADGDMWMPCGPKQPGSVQTTMQELASKGLAAKILPPPISRTDFEKVLSRQRPTVSKKDLEVHERFTKEFGEEG

SEQ ID NO: 4077 - protein, 544 aa, Zea mays
  misc_feature (354)..(354): Xaa can be any naturally occurring amino acid
  unsure (1)..(544): unsure at all Xaa locations
MASSTGSLEHGGFTFTPPPFITSFTELLSSAGDMLGAGADQERSSPRGLFHRGARGVPKFKSAQPPSLPISPPPMSPSSYFAIPPGLSPAELLDSPVLLHSSSNILASPTTGAIPAQRFDWKKAADLIASQSQQDGDSRAAAGGFDDFSFHTATSNAVRAHTTTTSLPSFEEEQQQQVEKAAVPSSNRASGGGNGNTKLEDGYNWRKYGQKQVKGSENPRSYYKCTYHSCSMKKKVERALADGRITQIVYKGAHNHPKPLSTRRNSSGGGAAEELQAGNSSLSAVAAAGCTGPEHSGATAENSSVTFGDDEAENGSQRSDGDEPDAKRWYVRDPARASERDSLFATRGPRFTSXACITTVSSCSCNSCIYVCLIRKQEDGENEGSSAGAGGKPVREPRLVVQTLSDIDILDDGFRWRKYGQKVVKGNPNPRSYYKCTTAGCPVRKHVERASHDKRAVITTYEGKHNHDVPVGRGAASRAAAAAAAAGSGALMATGGGQLGYHHQQQQQPYTLEMLSSGSYGGGGGYAAAKDEPRDDLFVDSLLC

SEQ ID NO: 4078 - protein, 470 aa, Zea mays
MVGAMRGGAMELEDRLATLPRFRGDHDDDGKERRTGTVWTATAHIITAVIGSGVLSLAWAMAQLGWVAGPLTLVLFAAITFYTCGLLADCYRVGDPVTGKRNYTYTEAVKSNLGGWYVWFCGFCQYVNMFGTGIGYTITASISAAAINKSNCFHWHGHDADCSQNTSAYIIGFGVVQVIFSQLHNFHKLWWLSIIAAIMSFSYSTIAVGLALGQTISGPTGKTTLYGTQVGVDVGSAEEKIWLTFQALGNIAFAYSYTIVLIEIQDTLRSPPAENKTMRQASVLGVATTTAFYMLCGCLGYSAFGNAAPGDILSGFYEPYWLVDFANVCIVIHLVGGFQVFLQPLFAAVEADVAARWPACSARERRGGVDVFRLLWRTAFVALITLCAVLLPFFNSILGILGSIGFWPLTVFFPVEMYIRQQQIPRFSATWLALQALSIFCFVITVAAGAASVQGVRDSLKTYVPFQTRS

SEQ ID NO: 4079 - protein, 353 aa, Zea mays
SPSPSSSLHAASALTLVELARGTVPSLVFRSGSSSVSASPALSLGSSKVQNLIERCLQLYMNQKEVVDTLSFQAKIEPSFTELVWQKLEEENRDFFKAYYVRLMLMNQITAFNKLLEQQYEIMTKDHPSGMPSVPPAAPNGSNSNTLNQNMPFLPDTIPSTALQDNSLRNGGSSSIVNGAPSDDQFMYTGKVVHGLPGGMDASSSLLTAHNPAVGQFNGHNGATIKTEFGYSSNSDFGFSNEAVFLEQSVGDVSGASFSSSELNGQPLGGPILDTDSSSYGFLSQIPRNFSFSDLTEDFSQSAEILENYGRSPFIPSDANNFPESTAGEHTEIGNRRLDTISEGIHFEDFGSD

SEQ ID NO: 4080 - protein, 467 aa, Zea mays
  misc_feature (215)..(215): Xaa can be any naturally occurring amino acid
  unsure (1)..(467): unsure at all Xaa locations
MASGGAVRDVGSPAELEAAVAGARAVAVHFWASWCEASKQMDEVFAHLAVDFPHAAFLRVEAEEQPEISEAYGVTAVPYFVFCKEGKIVDTLEGVNPASLANKVAKVAGPASVAESAVPASLGVAAGPAVLENIQKMAQQNGSSAAESTNSGSTQDALNKRLEQLVNSHPVFLFMKGTPEPPRCGFSRKVVNILKQEGVEFGSFDILTDNDVREXGELKDVFEEHNIPLKPQGSKNEEAGQPESATEKGAAVAEPMGLTDAQKSRLESLINSSPVMVFIKGTPEEPKCGFSGKLVHILKQENIPFSSFDSLSDDEVRQGLKVLSNWPSYPQLYIKGELVGGSDIVMEMHKSGELKKVLFEKGVIPKESLEDRLKSLVSSAPVMLFMKGTPDAPRCGFSLKVVNPLKKEGVSFGSFDILSDEEVRQGLKTYSNWPTFPQLYYKSELIGGWDIVLEMEKSGELKSTLSE

SEQ ID NO: 4081 - protein, 578 aa, Zea mays
LEKGSGGGEALRSSFKTPTASRKTVPPCALTARRFVPKAPRTPSNPHKSPAPKSELVAPPNPRIESRPDPRPQPPTRSPITPTPRLCTKPHFVSHCNPPANRSHPHLFGAMTAVATPTPPPPRQLSLEDLKAISVLGRGAKGVVFHVVHAPGEPDGEGEGGAAAMALKAVSREAARHKKAASGDGDGDGHRRIWFERDVLLSLRHPLLPSLRGILATEAVVGFAIDRCGGGDLNSLRRRQTEKMFSDSVIRFYAAELVLALEYLHSLGIVYRDLKPENVLIQDSGHIMLVDFDLSTRLPARPQEPDAPVTSPKPAPPVAAPSPSRGSARKPAGGALCFPFRTATATKPAAPATDSPSPLSTSRTASSSSSSSSSSTSRTTASSAASAGAGSRTPAKSNSFVGTEDYVAPEIIAGRGHDFTVDWWGLGVVLYEMLYGRTPFRGQSRKETFYRVLTKQPELVGEQTPLRDLIARLLEKDPEKRIGARGVKAHPFFRGVDWDRILQVARPPFIPTPPQDEGEDEDGGEALDVEKVVREVFASNDAEGGKAWPVADGGRVGGDGDCDGRGDQSKDGDFSVFF

SEQ ID NO: 4082 - protein, 388 aa, Zea mays
  misc_feature (240)..(240): Xaa can be any naturally occurring amino acid
  unsure (1)..(388): unsure at all Xaa locations
MADQANQPTVLHKLGGQFHLSSSFSEGVRARNICPSFSPYERRFATRNYMTQSLWGPSMSVSGGINVPVMPTPLFANAPAEKGGKNFMIDFMMGGVSAAVSKTAAAPIERVKLLIQNQDEMIKSGRLSEPYKGIADCFKRTIKDEGFSSLWRGNTANVIRYFPTQALNFAFKDYFKRLFNFKKDRDGYWKWFAGNLASGGAAGASSLFFVYSLDYARTRLANDAKAAKGGGDRQFNGLVXDVYRKTLKSDGIAGLYRGFNISCVGIIVYRGLYFGLYDSIKPVVLTGSLQDNFFASFALGWLITNGAGLASYPIDTVRRRMMMTSGEAVKYKSSLDAFQQILKKEGPKSLFKGAGANILRAIAGAGVLSGYDQLQIPFFGKKYGSGGA

SEQ ID NO: 4083 - protein, 207 aa, Zea mays
WPLGGYPGPQGPYYCAVGADKSYGRDIVDAHYKACLYAGIDISGINGEVMPGQWEFQVGPAVGVSAGDQLWVARYILERITEIAGVVVSFDPKPIPGDWNGAGAHTNYSTKSMRSDGGYEVIKKAIGKLGLRHREHIAAYGDGNERRLTGRHETADINTEKEGKGYFEDRRPASNMDPYVVTSLIAETTMLWEPSHSNGDGKGAAAP

SEQ ID NO: 4084 - protein, 173 aa, Zea mays
MARVYVGNLDSRVTSGELEDEFRVFGVLRSVWIARKPPGFAFIDFDDRRDAEDAIRDLDGKNGWRVELSRNSSGRGGRDRYGGSESKCYECGETGHFARECRLRIGSGGLGSGRRRSRSRSRSRSRSRSRSRSRSPRYRRSPSYSRRSYSPRYRSPRRRSPSPTRARSYSRSP

SEQ ID NO: 4085 - protein, 165 aa, Zea mays
  misc_feature (59)..(59): Xaa can be any naturally occurring amino acid
  unsure (1)..(165): unsure at all Xaa locations
MASDRVLGTVKWFNGTKGFGFITPDDGSEDLFVHQSSIKSDGYRSLNDGDVVEYTVSAXRDPGRGYGGGGDRGYGGGDRGYGGGGDRGYGGDRGYGGGGGYGGGYGGGGGGGGRGCFKCGEEGHMARDCSQGGGYGGGGGGGRGSECYNCGQEGHISRDCPNKRR

SEQ ID NO: 4086 - protein, 313 aa, Zea mays
MESLGVLLLHPFNAYLEQELDRRFRLYRFWETPREEFLRAHAGAVRAVVGNASYGADAALIDALPALEIVASFSVGIDRVDLAKCRDRGIRVTNTPDVLTDDVADLAVGLAIAVLRRIPQADRYVRAGLWKSRGDYTLTTRLSGKRVGILGLGRIGSAIAKRAEAFGCSISYSSRSEKPFPDYKFHVSAVDLAANCDVLIVTCSLTAETHHVVSREVIDALGPEGVLVNVGRGAHVDEPELVAALLEGRLGGAGLDVYEHEPLAPEQLLGLDNVVLVPHVGSDTEETCRAMADLVLANLEAHASDEPLLTPVI

SEQ ID NO: 4087 - protein, 67 aa, Zea mays
MVEGKVKWFNSEKGFGFIEVEGQDDVFVHFSAIQGEGFKTLEAGQAVSFEIVEGNRGPQAANVTKEA

SEQ ID NO: 4088 - protein, 358 aa, Zea mays
  misc_feature (244)..(244): Xaa can be any naturally occurring amino acid
  unsure (1)..(358): unsure at all Xaa locations
NLTLPCPRPCWQICTEHKTILSVDDILALIGDRCDGVIGQLTEDWGDVLFSALKRAGGTVFSNMAVGYNNVDVEAANRNGIAIGNTPGVLTETTAELAASLSLAAARRIVEADQFMRAGLYDGWLPHLFVGNLLKGQTVGVIGAGRIGSAYARMMIEGFKMNLIYYDLYQATRLENFVTAYGQFLKANGEEPVTWKRAATMEDVLREADVISLHPVLDKTTYHLINPERLAIMKKEAVLVNASXRGPVIDEAALVEHLKANPMFRVGLDVFEDEPYMKPGLADMKNAVVVPHIASASKWTREGMATLSALNVLGKIKGYPVWGNPNQVEPFLQENLTPPPACPSIVNAKQIGLPSAKL

SEQ ID NO: 4089 - protein, 272 aa, Zea mays
  misc_feature (197)..(197): Xaa can be any naturally occurring amino acid
  unsure (1)..(272): unsure at all Xaa locations
MRSLLTRLFTSTHIVMASSSFSSSPSRRLVHLTRHLVSSSSGELSSVGAPAAAASDADPVKSPRSTASRVHAAVLVCLFEDPSSGPRVLLTKRASSLSSHSGEVSLPGGKVDDGDADPKATALREAKEEIGLDPALVSVVTVLEPFLSKNGLTVVPVIGMVPDKALYKPVLNKAEVEDIFDAPLEMFLKFSTCIASXDDHRRTRQMNWMGIDIPVQFFDYEADGKKFVIWGLTAHILTRAAAVIFGRKPSFVELPRPKYAGAPVAGTGKSNF

SEQ ID NO: 4090 - protein, 439 aa, Zea mays
MASSTGSLEHGGFTFTPPPFITSFTELLSGAAADMVGAAGADHQERSPRGLFHRGATRGGGVGVPKFKSAQPPSLPISPPPMSPSSYFSIPPGLSPAELLDSPVPLHSSSNFFASPTTGAIPAQRFDWKQAADLIASQSQQDDSRAAVGGAFNDFSFHAPTMPAQTTSFPSFKEQQQQQVEAATKSAVPSSNKASGGGGGTKLEDGYNWRKYGQKQVKGSENPRSYYKCTYHSCSMKKKVERSLADGRVTQIVYKGAHNHPKPLSTRRNSSGGVAAAEEQAANNSSLSGCGGPEHSGGATAENSSVTFGDDEAENGSQRSGGDEPDAKRWKAEDGENEGSSGAGGGKPVREPRLVVQTLSDIDILDDGFRWRKYGQKVVKGNPNPRSYYKCTTAGCPVRKHVERACHDARAVITTYEGKHNHDVPVGRGAASRAAALYR

SEQ ID NO: 4091 - protein, 106 aa, Zea mays
MSATQEEDKKPGGDGGVHINLKVKGQDGNEVFFRIKRSTQLKKLMNAYCDRQSVDMNAIAFLFDGRRLRAEQTPDELDMEDGDEIDAMLHQTGGCGGGGSLTLSRV

SEQ ID NO: 4092 - protein, 482 aa, Zea mays
MAQHHGSHSLEVGGVGAGGVELDDDGHAARTGNLWTCFAHIITAVIGCGVLALSWSVAQLGWVGGPVAMLCFAFVTYLSAFLLSHCYRSPASDDGSLKRQRNYTYMDAVRTHLELARATRPGEKRTWLCGLFQYLNMYGTAIAYTITTATCLRAIVRANCYHSQGHSAPCGAGGDHLYMLLFGAAQAVLSLIPNFHSMAWLSAVAAVMSFTYATIGLGLGLAKTIENGAIKGSVAGVPMSTAPQKVWRVAQAIGDIAFAYPYTIVLLEIQDTLKSPPPESETMQKGNVLAVLATTFFYLAVGCFGYAAFGNAAPGNLLTGFGFYEPYWLIDFANACIVLHLLGGYQMFSQQIFTFADRSLAARFPNSAFVNKSYAVKVPGAPASWSYSLNLQRLCFRTAYVASTTGLALLFPYFNEVLGVLGAVVFWPLAIYLPVEMYCVQRGVLPWTRTWVALQAFSVVCFVVGTFAFVGSVEGVIRKRLG

SEQ ID NO: 4093 - protein, 156 aa, Zea mays
  misc_feature (19)..(19): Xaa can be any naturally occurring amino acid
  misc_feature (41)..(42): Xaa can be any naturally occurring amino acid
  misc_feature (61)..(61): Xaa can be any naturally occurring amino acid
  misc_feature (89)..(89): Xaa can be any naturally occurring amino acid
  misc_feature (135)..(135): Xaa can be any naturally occurring amino acid
  unsure (1)..(156): unsure at all Xaa locations
MSDSEEHDFESYADAGASXTYPQHAVTVRKNAFIVIKNRPXXVAEASTSKTGKHGHAKCHXMYAIHIVHGKKIEDMVPSSHNCDIPHVXNRTDYQLIDISEEGFVRLLTSDGNTTDGLILPADETLVVQIKEGFXSSKDLVVTDHSAMKDDYICAL

SEQ ID NO: 4094 - protein, 246 aa, Zea mays
MSGGNVWSPLPSHGFGSESSGMANRAGEPVARTNSDGGGGGSKDSGSFECNICLDLAQDPVVTLCGHLFCWPCLYEWLHVHAHSQECPVCKAVVEEGKLVPLYGRGGSSAVPRARSVAGVEIPSRPTGQRPSTAPQPDHNNHFPHQNPWFNGAGAPPVANGRWGSYTFSAAIGGLFPLLSFQVHGFPQATAYGPAAGFPYGYGHSFHGWHGHGFPRQAPQGQQVDAYLKVLLLAVGVLVIASLIAF

SEQ ID NO: 4095 - protein, 1132 aa, Zea mays
MSSSRPAHSSSSSSRTRQSSRARILAQTTLDAELNAEYEESGDSFDYSKLVEAQRSTPPEQQGRSGKVIAYLQHIQRGKLIQPFGCLLALDEKSFRVIAFSENAPEMLTTVSHAVPNVDDPPKLGIGTNVRSLFTDPGATALQKALGFADVSLLNPILVQCKTSGKPFYAIVHRATGCLVVDFEPVKPTEFPATAAGALQSYKLAAKAISKIQSLLGGSMEALCNTVVKEVFDLTGYDRVMAYKFHEDEHGEVFAEITKPGIEPYIGLHYPATDIPQAARFLFMKNKVRMICDCRARSVKIIEDEALSIDISLCGSTLRAPHSCHLKYMENMNSIASLVMAVVVNENEEDDEPEPEQPPQQQKKKRLWGLIVCHHESPRYVPFPLRYACEFLAQVFAVHVNKEFELEKQIREKNILRMQTMLSDMLFKESSPLSIVSGSPNIMDLVKCDGAALLYGDKVWRLQTAPTESQIRDIAFWLSEVHGDSTGLSTDSLQDAGYPGAASLGDMICGMAVAKITSKDILFWFRSHTAAEIKWGGAKHDPSDKDDNRRMHPRLSFKAFLEVVKTKSLPWSDYEMDAIHSLQLILRGTLNDASKPAQASGLDNQIGDLKLDGLAELQAVTSEMVRLMETATVPILAVDGNGLVNGWNQKVAELSGLRVDEAIGRHILTLVEDSSVSLVQRMLYLALQAGREEKEVRFELKTHGSKRDDGPVILVVNACASRDLHDHVVGVCFVAQDMTVHKLVMDKFTRVEGDYKAIIHNPNPLIPPIFGADQFGWCSEWNAAMTKLTGWHRDEVVDKMLLGEVFNSSNASCLLKSKDAFVRLCIVINSALAGEEAEKASFGFFDRNEKYVECLLSVNRKVNADGVVTGVFCFIHVPSDDLQHALHVQQASEQTAQRKLKAFSYMRHAINKPLSGMLYSRETLKSTGLNEEQMRQVRVGDNCHRQLSKILADLDQDNITDKSSCLDLDMAEFVLQDVVVSAVSQVLIGCQAKGIRVACNLPERSMKQRVYGDGIRLQQIVSDFLFVSVKFSPAGGSVDISSKLTKNSIGENLHLIDFELRIKHRGAGVPAEILSQMYEEDNKEQSEEGFSLAVSRNLLRLMNGDIRHLREAGMSTFILTAELAAAPSAVGR

SEQ ID NO: 4096 - protein, 369 aa, Zea mays
MAHSTTLALVIVVVLALTFGATVSVSAPVNKSCVSGSAGASVSIGYGGARASAGAGVSLGADAYRSTCPRAEEIIRAAVERAVAADPRMAASLLRLHFHDCFVNGCDGSVLLDDKPFFIGEKTAVPNANSIRGFEVIDAIKTELERECPDTVSCADLLAIAARDSVVVSGGPSWEIEVGRKDSRTASLQGANTNLPAPTSGVDTLVQKFRNVGLSTKDMVALSGAHTIGKARCTSFSARLAGAGGVSEGGAGAFKDLTFLQSLQQLCTGSAGSALAHLDLATPATFDNQYYINLLSGDGLLPSDQALASSAAVPGVEADVASLVATYAFDASVFFQDFAESMLRMGRLAPGVGTSGEVRRNCRVVNSSE

SEQ ID NO: 4097 - protein, 419 aa, Zea mays
LAHPVGQPKPSRNRKDLARPPFPSSSLCRSCHPPSVHPTNNPSATTPRCGDVRRRHPLGFHPAVRGAGGGSGGQEETAAARLAFAAAVGAPRTAVDGVMTPKDGEGDMPTTATNSAANKRRRKNQYRGIRRRPWGKWAAEIRDPSKGVRVWLGTYSTAEEAARAYDAEARRIRGKKAKVNFRDEAAAAAGAQKAPAATTPTACGNAARLGPPPPPPKFRADEVFGNMNGGTGSNDLFAIMFAFSDSSSKVVRVEPGEGAAGFLPADLLPGSKRSAANMLLLSDQSSDSYGSCDLGWEWDWDDDTMTSDYASVFAPAAPSNVVPAWYTQGGPVSKRTRSSYGYGAAMPGGFDPETNYQYQPLPYVVESSPSDGASTDDMDCLQMMRAGDVPQDGASSGGGGGDGGDIWSLDELLMAAGAY

SEQ ID NO: 4098 - protein, 268 aa, Zea mays
MNRPVAYRHFVEMVLLTLSLCKSRFGIEQEYTLLQKDTKWPLGWPLGGYPGPQGPYYCAVGADKSYGRDIVDAHYKACLYAGIDISGINGEVMPGQWEFQVGPAVGVSAGDQLWVARYILERITEIAGVVVSFDPKPIPGDWNGAGAHTNYSTKSMRSDGGYEVIKKAIGKLGLRHREHIAAYGDGNERRLTGRHETADINTFVWGVANRGASVRVGRDTEKEGKGYFEDRRPASNMDPYVVTSLIAETTMLWEPSHSNGDGKGAAAP

SEQ ID NO: 4099 - protein, 129 aa, Zea mays
MALPIEHSSRPTLGFPLGTALLLLVIFALSGMFSCCYHWDKLRSLLRSRHPGMFQEGTSVASSPSKTTCDHKLDRACGLPVIMPGDKVPRFFARPCPHETSLCLPQAAEKTAGVPSETRSCMSRPSVSV

SEQ ID NO: 4100 - protein, 285 aa, Zea mays
MRPVFCGNLDYDVRISEVERLFGKYGRVERVDLKTGISWSIWFAFVYMEDERDAEDAISRLDGIDFGRKGRRIRVEWTKEDRTVGRKSSSRRSPTNTKPTKTLFVINFDPINTRIRDLERHFDKYGRVANVRIKKNFAFIQFEVQEDATRALEGTNGSHFMDRVISVEYALRDDDEKGERGNGYSPDRRGRERSPGRRRSPSPYGRGRERGSPDYGRSKERGSPDYGRGGRSPDNGRGVSPAGGGRGDHARGGGRSPDYDRQRREASPPGYDRSPSRSPGREARE

SEQ ID NO: 4101 - protein, 76 aa, Zea mays
  misc_feature (38)..(38): Xaa can be any naturally occurring amino acid
  unsure (1)..(76): unsure at all Xaa locations
PHVNRPEYQLIYIFEDGFLSLLTSNGNPKDDFKLPPDXTLVAPIKEGFENGKDLVFPVQSAMGEEQICPFKNFGPK

SEQ ID NO: 4102 - protein, 161 aa, Zea mays
  misc_feature (41)..(41): Xaa can be any naturally occurring amino acid
  unsure (1)..(161): unsure at all Xaa locations
MRGILTALGCSDWPQAKRARILACSRRMKHRGPDWTALYQXEGNFLAQQRLTVISPLSGDQTLFSEDRTVVAAASGEIYNHKNVRKKVTGTPNFSTGSDCEVIIPLYYKYEENFVDTLDGEFAVVVYDTRDRTYTTDRDAIGVKPLYIGCGSDRSGCIAAE

SEQ ID NO: 4103 - protein, 155 aa, Zea mays
  misc_feature (128)..(128): Xaa can be any naturally occurring amino acid
  misc_feature (143)..(143): Xaa can be any naturally occurring amino acid
  unsure (1)..(155): unsure at all Xaa locations
EHHFESKADAGASNTYPQHAATGRKNGFIVIKNRPCKVVQVSTSKTGKHGHAKCHFVAINIFSVKKLGDIVPSSHNCDIPYVNRTEYQLIDISEDVFVSLLTSYGNTKDDLRLPTDDTLVVQINESFXSGKDLVVTVQSAMGXEQICALNDVAPK

SEQ ID NO: 4104 - protein, 339 aa, Zea mays
MRLPSGARLALLLVRRSLSSASSSAAAPASRLSRAHRARMLRPPALACCKLYISEARNSGALRAIEHAAAALRPLAVLVNTFADDAYNRVGYTLVSPLAGGAASPPLRCAAFRVVAAAIEAVDLDAHAGAHPRLGVVDHIAFHPLASAHLEDVTALARAVAADIGDRLQVPTYLYGAAHRDGRTLASIRRQLGYFTPTSPGGEQWHGAPDSLLPVAPDAGPRTSSASNGVVVVGATPWVDNYNVPLTTADVSVARRIARAVSERGGGLACVQAMGLAHGDGATEVACNLLHPDAVGADQVQERVSRLAAGLGVGVGQGYFTDFSREKVVELYLQAAQAA

SEQ ID NO: 4105 - protein, 355 aa, Zea mays
CLTDLVNLNLSDNTEKIIAEYIWIGGSGMDLRSKARTLSGPVTDPSKLPKWNYDGSSTGQAPGEDSEVILYPQAIFKDPFRKGNNILVMCDCYTPQGEPIPSNKRYKAATVFSHPDVAAEVPWYGIEQEYTLLQKDVSWPLGWPVGGYPGPQGPYYCAAGADKAFGRDVVDAHYKACLYAGINISGINGEVMPGQWEFQVGPSVGISAGDEIWVARYILERITEMAGIVLSLDPKPIKGDWNGAGAHTNYSTKSMREAGGYEVIKEAIEKLGKRHREHIAAYDGGNERRLTGRHETADINTFKWGVANRGGSIRVGRDTEKEGKGYFEDRRPASNMDPYVVTGMIADTTILWKGN

SEQ ID NO: 4106 - protein, 157 aa, Zea mays
  misc_feature (21)..(21): Xaa can be any naturally occurring amino acid
  misc_feature (70)..(70): Xaa can be any naturally occurring amino acid
  misc_feature (96)..(96): Xaa can be any naturally occurring amino acid
  unsure (1)..(157): unsure at all Xaa locations
MEEHHYQYNADAGACNTYPHXAGTVHKNGFIVIKSRPCKVVEVSTSKTGKHGHAKCRFVAIHIFYGKNLXNIVSSSHNCDIANVNPTEYQVIDLSXDGFVSLLTSDGNTKDDLRLPTEETLVAHIKEGFERQKDLVGTGQSAMGDEQICALNDVGPN

SEQ ID NO: 4107 - protein, 130 aa, Zea mays
LISASRRSDSGGMGSRAGEPVARTNSGGGSSSKDSGSFECNICLDLAQDPVVTLCGHLFCWPCLYEWLHVHAHSQECPVCKAVVEEGKLVPLYGRGGNSTSPRARSVAGVEIPSRPTGQRPSTAPQPDHI

SEQ ID NO: 4108 - protein, 575 aa, Zea mays
LAEDLPDDPRAVRRLKHRGPDWSGLYQHEGNFLAQQRLAVVSPLSGDQPLFNEDRTVVVVANGEIYNHKNVRKQFTGTHNFSTGSDCEVIIPLYEKYGENFVDMLDGVFAFVLYDTRDRTYVAARDAIGVNPLYIGWGSDGSVWIASEMKALNEDCVRFEIFPPGHLYSSAGGGFRRWYTPHWFQEQVPRTPYQPLVLREAFEKAVIKRLMTDVPFGVLLSGGLDSSLVASVTKRHLVETEAAEKFGTELHSFVVGLEGSPDLKAAREVADYLGTIHHEFHFTVQDGIDAIEEVIYHDETYDVTTIRASTPMFLMARKIKSLGVKMVLSGEGSDELLGGYLYFHFAPNKEELHRETCRKVKALHQYDCLRANKATSAWGLEVRVPFLDKEFINVAMGMDPEWKMYDKNLGRIEKWVMRKAFDDDEHPYLPKHILYRQKEQFSDGVGYNWIDGLKSFTEQQVTDEMMNNAAQMFPYNTPVNKEAYYYRMIFERLFPQDSARETVPWGPSIACSTPAAIEWVEQWKASNDPSGRFISSHDSTAIDHTGGKPAVANGGGHGAANGTVNGKDVAVAIAV

SEQ ID NO: 4109 - protein, 174 aa, Zea mays
FEAARRGLRVIIENKQPLVLGHATSGSKHSLKEVLAPPGGGALLKDTKAAPGVRVLRDFFNMLFNESARACFGPKHVEFALHQFAFPTFLINDTLFWNAALVSGQRYGKLVEDVKKNRGPVPIFSSMHVLGEQLGQLPGIGGFFCFFFPELGGRGGGGNPPFCFSITFFLVGIC

SEQ ID NO: 4110 - protein, 208 aa, Zea mays
MASDRVLGTVKWFNGTKGFGFITPDDGSEDLFVHQSSIKSDGYRSLNDGDAVEYTVGSGNDGRAKALDVTAPGGGPLAGGERPDGGNGGGRGGYGGGDRGYGGGGDRGYGGGGDRGYGGGDRGYGGGGDRGYGGDRGYGGGGGYGGGYGGGGGGGGRGCFKCGEEGHMARDCSQGGGYGGGGGGGRGSECYNCGQEGHISRDCPNKRR

SEQ ID NO: 4111 - protein, 177 aa, Zea mays
  misc_feature (117)..(117): Xaa can be any naturally occurring amino acid
  unsure (1)..(177): unsure at all Xaa locations
SVCPLHLPFFSGILAVLGCSHWSQAKSARILACSTKLKHRGPDWSGLYQHEGNFLAQQRIAVVSPLSGDQPLFNEDRTDEVVANGHIYNHKNVRKQFTGTHDFCTGSDCQALIPLYXKYGENFVDMLDGVFAFVLYDTRDRTYVAARDAISVNPLYIGWGSEGSVWIASDMKALNED

SEQ ID NO: 4112 - protein, 214 aa, Zea mays
MRWYKKVAVAFKKKKKKDEVEDYDEKLIAYHPRLYISSLSAPPPPPDPSKTGIAMSDSEEHHFESKADAGASKTYPQQAGTVRKNGFIVIKNRPCKVVEVSTSKTGKHGHAKCHFVAIDIFNGKKLEDIVPSSHNCDIPHVNRTEYQLIDISEDGFVSLLTSDGNTKDDLRLPTDETLVAQIKEGFESGKDLVVTVQSAMGEEQICALKDVGPK

SEQ ID NO: 4113 - protein, 264 aa, Zea mays
MRSLLTRLFTSTHIVMASSSFSSSPSRRLVHLTRHLVSSSSGELSSVGAPAAAASDADPVKSPRSTASRVHAAVLVCLFEDPSSGPRVLLTKRASSLSSHSGEVSLPGGKVDDGDADPKATALREAKEEIGLDPALVSVVTVLEPFLSKNGLTVVPVIGMVPDKALYKPVLNKAEVEDIFDAPLEMFLKDDHRRTRQMNWMGIDIPVQFFDYEADGKKFVIWGLTAHILTRAAAVIFGRKPSFVELPRPKYAGAPVAGTGKSNF

SEQ ID NO: 4114 - protein, 566 aa, Zea mays
  misc_feature (46)..(46): Xaa can be any naturally occurring amino acid
  misc_feature (434)..(434): Xaa can be any naturally occurring amino acid
  misc_feature (543)..(543): Xaa can be any naturally occurring amino acid
  unsure (1)..(566): unsure at all Xaa locations
MAKALLGGLSAILVVAVVVGVVATVTRSGKKAGDNFTVPGEASLAXTSGKSVKSLCAPTLYKESCEKTLSQATNGTENPKEVFHSVAKVALESVQTAVEQSKSIGEAKASDSMTESAREDCKKLLEDAADDLRGMLEMAGGDIKVLFSRSDDLETWLTGVMTFMDTCVDGFVDEKLKADMHSVLRNATELSSNALAITNSLGGILKKMDLGMFSKDSRRRLLSSEQDEKGWPVWMRSPERKLLASGNQPKPNAIVAKDGSGQFKSIQQAVDAVPKGHQGRYVIYVKAGLYDEIVMVPKDKVNIFMYGDGPKQSRVTGRKSFADGITTMKTATFSVEASGFICKNMGFHNTAGAERHQAVALRVQGDLAAFYNCRFDAFQDTLYVHARRQFFRNCVVSGTIDFIFGNSAAVFQNCLIITRRPMDNQQNSVTAHGXRTDPNMKSGLVIQNCRLVPDQKLFPDRFKIPSYLGRPWKEFSRLVIMESTIADFVKPEGYMPWNGDFALKTLYYAEYNNRGPGAGTSKRVNWPGFHVIGRKEAEPFTAXGPFIDGAMWLKYTGAPHILGFKF

SEQ ID NO: 4115 - protein, 802 aa, Zea mays
MESGRLIFNAPGSGAGQMLFLDCGAGGGPGGGLLHRGGRPMLGLEEGRGVKRPFYTSPDELLEEEYYDEQLPEKKRRLTPEQVHLLERSFEEENKLEPERKTELARKLGLQPRQVAVWFQNRRARWKTKQLERDFDRLKASFDALRADHDALLQDNHRLRSQVVSLTEKLREKEATEGDANGAAAALPAVGVVRASVADDVEEPEPEPEPEAEAAAFEERQVKSEDRLSTGSGGSAVVDAADALLYNGRIGGAAVDSSVESYFPGAEVQDQYHGCGTMGPVTHGAGGIQSDDDDGAGSDEGCSYYADEEAAAAFLSEHTHHADGDDEDAGQMKDMYREALWQKRGRPRELYPDVSSKDALVPPEFSVPNCDCGRLAWGHQMCFFFQWIDGPDKFDPRYLLFVNWLSGRTSHERFKRWVPPPPNPPPMTDAEKEVATERRMDSPPRCDCGDRVVIDENYEKQFCCPNIDYPYGWRKCRFREWLYGPLCHWPEPEVKEKRYNQWAEEEVKFDPVLCKCGIEAKYGLVPSELGVGYFCGHMVDYDEETRKCSWESYDNKGEVMRTIESKRIMGQKMRCGSRLVDSYINDRIRDMRREAKSAFYDSSKRAEYRRLKAADEKRAQDAREWEAAQAEKQMLDNLADRLKGKIGSGVNYLADEAHARYVQDKMATVELMEEKEDDTSRLSELITLAEAGLHEEEEDDTSRLSELIALAEAGLRAQEEEDEFMSQAAEEVEAANYKKKSDEAEAEDELFSQAADEAEANYYKRTGDKCDAGQCSKWNEVVVEDCATDDSEDELLIDCDSD

SEQ ID NO: 4116 - protein, 421 aa, Zea mays
MASSSSAATTSGDSQGLKARDACIVGVARTPIGALLGSLSSLPATKLGSIAIQGALKRAKVDPALVQEVFMGNVLSANLGQAPARQAALGAGLPNSVPCTTVNKVCSSGMKAVMFAAQSIQLGINDVVVAGGMESMSNAPKYVAEARRGSRFGHDVLVDGMLKDGLWDVYNDFPMGMCAELCSDQHSISREEQDSYAILSNERGIAAQDSGAFSWEIVPVEISSGRGKPPVVVDKDESLAKFDPVKLKKLGPTFKTNGSVTAGNSSSISDGAAAIVLVSGEKAKNLGLEVIARITGYADAAQAPELFTTAPALAIPKAISNAALQTSQIDYYEVNEAFSVVAIANQRLLGIPSGKLNLSGGAVSLGHPIGCSGARIIVTLLGILRQKNGKFGVAGVCNGGGGASALVLELMQPSSHIHSSL

SEQ ID NO: 4117 - protein, 181 aa, Zea mays
  misc_feature (169)..(169): Xaa can be any naturally occurring amino acid
  unsure (1)..(181): unsure at all Xaa locations
MVRGKTQMKRIENPASRQVTFSKRRNGLLKKAFELSVLCDAEVALVVFSPRGKLYEFASGSAQKTIERYRTYTKDNVSNKTAHQDIEQVKADAEGLAKKLEALEAYKRKLLGERLEECSFEELHSLEVKLEKSLHCIRGRKCKKQPPPPPPMLMAPPPPPAPAAIDHTXPEDVGMDVETEL

SEQ ID NO: 4118 - protein, 531 aa, Zea mays
  misc_feature (219)..(219): Xaa can be any naturally occurring amino acid
  unsure (1)..(531): unsure at all Xaa locations
EPASTEDPALSIAGAVQSQKLAVRAISRLQALPGGDVKLLCDTVVEHVRELTGYDRVMVYRFHEDEHGEVVAESRRDNLEPYLGLHYPATDIPQASRFLFRQNRVRMIADCHATPVRVIQDPGLSQPLCLVGSTLRAPHGCHAQYMANMGSIASLVMAVIISSGGDDEQTGRGGISSAMKLWGLVVCHHTSPRCIPFPLRYACEFLMQAFGLQLNMELXLAHQLSEKHILRTQTLLCDMLLRDSPTGIVTQSPSIMDLVKCDGAALYYHGKYYPLGVTPTESQIKDIIEWLTVFHGDSTGLSTDSLADAGYLGAAALGEAVCGMAVAYITPSDYLFWFRSHTAKEIKWGGAKHHPEDKDDGQRMHPRSSFKAFLEVVKSRSLPWENAEMDAIHSLQLILRDSFRDAAEGTNNSKAIVNGQVQLRELELRGINELSSVAREMVRLIETATVPIFAVDTDGCINGWNAKIAELTGLSVEEAMGKSLVNDLIFKESEATVEKLLSRALRGISISVSYMDAIAFILRFMKTAECC

SEQ ID NO: 4119 - protein, 338 aa, Zea mays
  misc_feature (105)..(105): Xaa can be any naturally occurring amino acid
  unsure (1)..(338): unsure at all Xaa locations
MFYFLSIQEHHIQTNHGPVSVAVYGDHDKPALVTYPDIALNYMSCFQGLLFCPEAASLLLHNFCIYHISPPGHELGAAPISPNAPIPSVDDLADQVADVLDFFGXLGSVMCFGVTAGAYILTLFAAKYRERVLGLILVSPLCKGPTWTEWLYSKVTSNLLYYYGMCGLVKECLLQRYFSKEVRGFSELPESDIVQACKSLLEQRQSMNVWRFVQTMNERYDLSEHIKRLQCRTLIFVGDNSQFHTEAVHLTSKLDRRYCALVEVQACGSLVTEEQPHAMLIPMEYFLMGYGLYRPPSQVVECSPRSPLSPFCISPDLLSPESMGVKLKPIRTRVRLEV

SEQ ID NO: 4120 - protein, 499 aa, Zea mays
MASGGAVRDVGSPAELEAAVAGARAVAVHFWASWCEASKQMDEVFAHLAVDFPHAAFLRVEAEEQPEISEAYGVTAVPYFVFCKEGKIVDTLEGANPASLANKVAKVAGPASVAESAVPASLGVAAGPAVLENIQKMAQQNGSSAAESTNSGSTQDALNKRLEQLVNSHPVFLFMKGTPEQPRCGFSRKVVNILKQEGVKFGSFDILTDNDVREGMKKFSNWPTFPQLYCKGELLGGCDIVIAMHDSGELKDVFEEHNIPLKPQGSKNEEAGQPESATEKGAAVAEPMGLTDAQKSRLESLINSSPVMVFIKGTPEEPKCGFSGKLVHILKQENIPFSSFDILSDDEVRQGLKVLSNWPSYPQLYIKGELVGGSDIVMEMHKSGELKKVLSEKGVIPKESLEDRLKSLVSSAPVMLFMKGTPDAPRCGFSSKVVNALKKEGVSFGSFDILSDEEVRQGLKTYSNWPTFPQLYYKSELIGGCDIVLEMEKSGELKSTLSE

SEQ ID NO: 4121 - protein, 594 aa, Zea mays
  misc_feature (176)..(176): Xaa can be any naturally occurring amino acid
  misc_feature (511)..(511): Xaa can be any naturally occurring amino acid
  misc_feature (543)..(543): Xaa can be any naturally occurring amino acid
  unsure (1)..(594): unsure at all Xaa locations
MSMPQSFLLLPSFLPPPPLVRLASRPPSSPSLTALRFHRVDAKLSPPLLAASHSPPGGFRGYCDSGDSDGGSGGDGGRGMDSPGPGDGWWWERWLQALHPEFLLLFLLLQSGAASALAEALSTSGDDAGDVWEVRGGKRTRLMPDPTWTSYLIAGDDGTKREDGDEKVGSISKDLXALQRQLGRSWRRYAEVAVHLLLPDGYPHSVSSDYLNYSLWRGVQGVASQISGVLSTQALLYAVGLGKGAIPTAAAVNWVLKDGLGYLSKIMLSKFARRFDVNPKGWRLFADFLENMAYGLEILTPVFPHLFVPIGAAAGAGRSAASLIQSATRSCFYAGFAVQRNFAEVIAKGEAQGMVSKFVGIGLGIALANHIGSSVPLALISFAGITAVHMYCNLKSYQSIQLRTLNPYRASLVFSEYLLSGQVPSVKEVNDEEPLFFNLSLGASRKSKILSAEAKDAADRICRRLQMGSKLSEIIESKEDACALFDLYKNEQFLLMDYKGKFCIVLKEGSXSPEDMLKSLFHVNYLYWLERYMGFKPSNVASXCRPGGRLEVSLDYAQREFSHVKHDGSDGGWVMDGLIARPLPVRIRIGDGTS

SEQ ID NO: 4122 - protein, 406 aa, Zea mays
MDRWIWHGSQEQSQGKITDSQHWEDPPGILVVVTRLVVTYHLSLSSSADLLFGLYIHQSSAHHYHCNYFCFSVLLRSKIILIWLVLVQTLPGPVTDPSKLPKWNYDGSSTGQAPGEDSEVILYPQAIFKDPFRRGNNILVMCDCYTPAGEPIPTNKRYSAAKIFSSPEVAAEEPWYGIEQEYTLLQKDTNWPLGWPIGGFPGPQGPYYCGIGAEKSFGRDIVDAHYKACLYAGINISGINGEVMPGQWEFQVGPSVGISSGDQVWVARYILERITEIAGVVVTFDPKPIPGDWNGAGAHTNYSTESMRKEGGYEVIKAAIEKLKLRHKEHIAAYGEGNERRLTGRHETADINTFSWGVANRGASVRVGRETEQNGKGYFEDRRPASNMDPYVVTSMIAETTIVWKP

SEQ ID NO: 4123 - protein, 424 aa, Zea mays
MARASLRQRPPQTGTDKASNATTSTRVESTVLQSASASGPRTAAAPAVFVDQRTAWPSQQPKEVRFPCAAAAPPPTPTAGNLQQERPSNNNMTPPQKEVETRKASEAAGATATSSVCSGNGAGTGKDDESWRQQKRKTLQAECSASQDDDPDDESGGMRRSCSRGAKRSRTAEVHNLSERRRRDRINEKMRALQELIPNCNKIDKASMLDEAIEYLKTLQLQVQMMSMGSGLCIPPMLLPPAMQHLQIPPAAAHFPHLGMGLGYGMGVLDMNSAAAAAAAVPFPHMPGAHFPCPMIPGAPLPRGLGIGMPARNTMPVFGVPPGQPIQPPFPSLAGLPVRPNLAPPHASSAAMANMVQEQQQQQQHQSLNNGASTAAATASDPQTIVQAERQHFSVPSSAQTESDQFLDGGGNRAICTGRNEAET

SEQ ID NO: 4124 - protein, 294 aa, Zea mays
MMPQASASLDLGLSLGLTLTSQGSLSSSTTTAGSSSPWAAALSSVVADVARARGDAYAQHHAGAAMTMRASTSPDSGDTTTAKREREGELERTGSGGVRSDEEDGADGGAGGRKKLRLSKDQAAVLEECFKTHSTLNPKQKVQLANRLGLRPRQVEVWFQNRRARTKLKQTEVDCEYLKRWCDRLADENKRLEKELADLRALKAAPPSSAAAQPASAAATLTMCPSCRRVAAAASHHHQPPPPQCHPKPTVAAGGGSVVPRPSHCQFFPAAAVDRTSQGTWNTAAPPLVTRELF

SEQ ID NO: 4125 - protein, 504 aa, Zea mays
  misc_feature (182)..(182): Xaa can be any naturally occurring amino acid
  misc_feature (206)..(206): Xaa can be any naturally occurring amino acid
  misc_feature (256)..(256): Xaa can be any naturally occurring amino acid
  misc_feature (277)..(277): Xaa can be any naturally occurring amino acid
  misc_feature (343)..(343): Xaa can be any naturally occurring amino acid
  unsure (1)..(504): unsure at all Xaa locations
MASSTGSLEHGGFTFTPPPFITSFTELLSSAGDMLGAGADQERSSQRGLFHRGARGVPKFKSAQPPSVPISPPPMSPSSYFAIPPGLSPAEVLDSPVVLHSSSNIVASPTTGAIPAQRFDWKKAADLIASHSQQDGDSRGAAGGFEDFSFHTDTSNAVRAHTKKTSLPSFEEEQQQQVEKAXSRRATGASGGGNGNTKLEDGYNWXRKYGQKQVKGSENPRSYYKCTYHSCSMKKKVERGPWPTAASTQIVYKGAXHNHPKPLSTRRNSSGGGAGGXSCRAGNSSLSAVAAAGCTGPEHSGATAENSSVTFGDDEAENGSQRSDGDEPDAKRWKQEDGENEGXSSAGGGGKPGPRAPGWVVQTMSDIDILDDGFRWRKYGQKVVKGNPNPRSYYKCTTAGCPVRKHVERASHDKRAVITTYEGKHNHDVPVGRGAASRAAAAAAAAGSGALMATGGGQLGYHHQQQQQPYTLEMLSSGSYGGGGGYAAAKDEPRDDLFVDSLLC

SEQ ID NO: 4126 - protein, 322 aa, Zea mays
METLLAGNPANGVAKPTCNGVGALPVANSHAIIATPPAAATLAPAGATLGRHLARRLVQIGASDVFAVPGDFNLTLLDYLIAEPGLTLVGCCNELNAGYAADGYARSRGVGACAVTFTVGGLSVLNAIAGAYSENLPVVCIVGGPNSNDYGTNRILHHTIGLPDFSQELRCFQTITCYQAIINNLDDAHEQIDTAIATALRESKPVYISVSCNLAGLSHPTFSRDPVPMLIEVEIHDGPYNVIKNWNYTGFVDAIHNGLGKCWTSKVKSEEELTAAIETALGEKKDCLCFIEVIAHKDDTSKELLEWGSRVSAANSRPPNPQ

SEQ ID NO: 4127 - protein, 227 aa, Zea mays
  misc_feature (62)..(62): Xaa can be any naturally occurring amino acid
  misc_feature (113)..(113): Xaa can be any naturally occurring amino acid
  misc_feature (122)..(122): Xaa can be any naturally occurring amino acid
  unsure (1)..(227): unsure at all Xaa locations
FFFLGEEPESEQQWRLEGGDPDLLSQRGGEDRRRKMAAQEQEQEKQQAKTSTTSSLPSSSDXSSSSARNNLTEGGAESDEEIRRVPEMGGASASASSGAGADERPKGEDGKQXAGGGGGAAXAGGKKRGRTAGDKEQNRLKRLLRNRVSAQQARERKKAYLTELEAKAKGLELRNAELEQRVSTLQNENNTLRQILKNTTAHASKRSGGGAGGKGGDGGKKHHLAKS

SEQ ID NO: 4128 - protein, 470 aa, Zea mays
  misc_feature (20)..(20): Xaa can be any naturally occurring amino acid
  misc_feature (158)..(158): Xaa can be any naturally occurring amino acid
  misc_feature (180)..(180): Xaa can be any naturally occurring amino acid
  unsure (1)..(470): unsure at all Xaa locations
MGFGMGNNNNGASSSSSRLXRRAPLLPRHGSSGGREGGGLSSQPKTFANVFIAVVGAGVLGLPYTFSRTGWAAGSLLLFSVAALTFYCMMLLVACRRRLADEHPKIASFGDLGDAVFGAHGRFAVDVMLVLSQFSFCVGYLIFISNTMAHLYPITARXSSSSALLSPKALVIWAMLPFQXWGLNSIKTLTLLAPLSIFADVVDLGAMGVVLGQDVAAWLAKPVPVVAFGGAGALLYGLGVSVYAFEGIGMVLPLEAEAANKSKFGVTLGLSMAFIAVMYGLFGVMGYVAFGDATRDIITTNLGAGWLSAAVQLGLCINLFFTMPVMMNPVYEVAERLLHGKRYCWWLRWLLVVVVGLAAMYVPNFTDFLALVGSSVCVLLGFVLPASFHLKVFGAEMEWPGVLSDVLLVVIGLALAVFGTYTSLLQIFQSSIIAFSRATTIHVLSVVREWLVLDGGNLYAFRTTDFSYSR

SEQ ID NO: 4129 - protein, 413 aa, Zea mays
  misc_feature (355)..(355): Xaa can be any naturally occurring amino acid
  unsure (1)..(413): unsure at all Xaa locations
SRSPPAMASNGIAPRDVCVVGVARTPLGGFLGALSSLPATKLGSIAIEAALKRANVDPALVQEVFFGNVLSANLGQAPARQAALGAGIPNTVVCTTVNKVCASGMKATMFAAQSIQLGINDIVVAGGMESMSNAPKYIAEARKGSRFGHDTLVDAMLKDGLWDVYNDCAMGMCAELCADNHALTREDQDAFAIQSNQRGIAARDSDAFAWEIVPIEVPVGRGKPPVLIEKDESLDKFDPAKLKKLRPSFKENGGTVTAGNASSISDGAAALVLVSGQKAQELGLQVLARIRGYADAAQAPELFTTTPALAIPKAISNAGLESSHVDFFEINEAFSAVALANQKLLGIPSHMWGCXEKINVHGGAVSLGHPLGCSGARILVTLLGVLREKGGKIGVAGVCNGGGGASALVLELA

SEQ ID NO: 4130 - protein, 520 aa, Zea mays
  misc_feature (299)..(299): Xaa can be any naturally occurring amino acid
  misc_feature (315)..(315): Xaa can be any naturally occurring amino acid
  unsure (1)..(520): unsure at all Xaa locations
MDRRGNPAVKTTTGRWRSAILLLANYGLATCAFFGVGVNLVVFLRRVLHQGNAEAANSISKWTGTVYIFSLIGAFLSDSYWGRYVTCAVFQIIYVMGLVVLSLASWLLLVKPSGCGGVKAHCDGPSAPGVALFYLSTYMIAFGNGGYQPSIATFGSDQFDETDPEEARSKVAFFSYFYLALNVGSLLSNTVLVYYEDSGRWVMGFWVSAAAAALALVLFLLGTPGYRHFKPSGNPLTRVAQVFVAALRKWRAEVPRGELLHEVVEAGEDPKVSGIRKILHSDGLRFLDKAATITEEEEXEGPWRLCTVTQVEEVXMASLFVEQGATMDTNIGSFHFPAASMSLFDVLSVLAFIAIYRRVLVPVMARLSGNPQGLTELQRMGVGLVIGMAAMVVAGVVEVERLKRVAAPDQPSSLSVLWQVPQYALIGASEVFMYVGQLEFFNGQAPDGVKSFGSALCMASISLGNYVSIMLVSVVTSLTAGEKRPGWIPGNLNSGHLDRFYFLLAALSLVDLAVYVACAM

SEQ ID NO: 4131 - protein, 772 aa, Zea mays
KLGTRKLGPLEGYSRAAAPRLVRAVTDATDVSAINGLYMSLGSPLLPGWTGNGGDPCGESWQGVVCTGSSITGITMNAANLGGQLGSLGNFTAITSLELNNNNIGGTIPEDLPVTLQSLFLSAKQLTGSIPSSLSKLENLTAMSVNGNHLNGDLPDTFDSLNRLVNLDISSNNLSGVLPSSMKNLASLTSLHMQDNQLSGTLNVLQDLPLKDLNIENNLFSGPVPASLLNIPNFKKDGNPFNTSIVPSASPPSTGPAPTPAASKPAPTPAPTTSNSTPPAPAPSFPSRSPPPPKTTSNSSEGSTTRDSTSPSKKHSTSTLKIVGFVLAGVVLFIIIVLLVLFCLSKYQERRSRYDHNRSQQARVHHRVEPQIKPPPVQQSNDLKKGSGEVLDRRGHELSSSTAALAKKSPENQKEHVINFDRTDSDLFPVSLPPPPPPPPLPPIERVIANPIVPPEKRYSPPPKTSSSTSATSFSIASLQQYTNSFREENVIRESRLGKVYLAELPDGKLLEVLKIDNANGRISVDDFLEEVECILDIKHPNILELVGYCAEYGQRLLVYNHFSRTTLDDTLHDGEDTESALSWNARLQVALGSGKALEYLHASFQPPIVHQNFEPANVLLDKKFSVCVAECGLAELMPPSSVTQLSGRMRALLNYEAPELQDSGVVSERGDVYSFGVVMLELLTGRKPYDSSRPRHEQHLVRWASSQLHDIESLSKMVDPSIRGQCSEKALSRFADIISRCIQQQPEFRPPMSEIVQDLARLVNATGEESE

SEQ ID NO: 4132 - protein, 257 aa, Zea mays
MQEFQSIPGLAGRLFGGAAAAGLRRAQGQGLGALCGGGGSGGASPAAAVKCPRCESTNTKFCYYNNYNLSQPRHFCKGCRRYWTKGGVLRNVPVGGGCRKAKRSSAPSTPTSAVGDAKSPRRASASSPRGSISSGSGSASPTPNGFAFSSTADVVAPPPAPIFADQAAALASLFAPPPPLPAFSFVAAQAKEETSSTPAGFAAPYSSVSEDMAPFASLDAAGMFEIGEDASAAAAYWNAGSCWTDVPDPSMMMYLLP

SEQ ID NO: 4133 - protein, 233 aa, Zea mays
  misc_feature (63)..(63): Xaa can be any naturally occurring amino acid
  misc_feature (140)..(140): Xaa can be any naturally occurring amino acid
  unsure (1)..(233): unsure at all Xaa locations
MDKRGGICSGGSGSSGETEVRKGPWTMEEDLILINYIANHGDGVWNTLAKSAGLKRTGKSCRXLRWLNYLRPDVRRGNITPEEQLIIMELHAKWGNRWSKIAKHLPGRTDNEIKNFWRTRIQKYIKQTDVAATATSSVGXSQSSEINDHAASTSAHNVFCAQDQAMETYSPTTTSYQHTNMDFNYGNFSAAAATVTATTTADYSIPMTVDDQNGENYWGMDDIWSSMHLLNGN

SEQ ID NO: 4134 - protein, 497 aa, Zea mays
MASSTGSLEHGGFTFTPPPFITSFTELLSGAAADMVGAAGADHQERSPRGLFHRGATRGGGVGVPKFKSAQPPSLPISPPPMSPSSYFSIPPGLSPAELLDSPVLLHSSSNFFASPTTGAIPAQRFDWKQAADLIASQSQQDDSRAAVGSAFNDFSFHAPTMPAQTTSFPSFKEQQQQQVEAATKSAVPSSNKASGGSGGSTKLEDGYNWRKYGQKQVKGSENPRSYYKCTYHSCSMKKKVERSLADGRVTQIVYKGAHNHPKPLSTRRNSSGGVAAAEEQAANNSSLSGCGGPEHSGGATAENSSVTFGDDEAENGSQRSGGDEPDAKRWKAEDGENEGCSGAGGGKPVREPRLVVQTLSDIDILDDGFRWRKYGQKVVKGNPNPRSYYKCTTAGCPVRKHVERACHDARAVITTYEGKHNHDVPVGRGAASRAAAAAPLLGSGGALMGTGGGQMDHRHQQPYTLEMLSGGGGGYGGGYAAKDEPRDDLFVDSLLC

SEQ ID NO: 4135 - protein, 320 aa, Zea mays
MESLGVLLLHPLDTYLEQELDRRCRLLRLWEVPHDRRGEFLRAHASSIRAVVIGGGSGFGGNPALIDDLPRLEIIACYAVGYDCVDLTRCRERGVRVTNTPDVLTDDVADLAVGLAIAALRRIPHADSYVRAGLWKANDGHYGLTTRFSGKRVGIIGLGRIGLSIAKRVEGFGCPVCYYQRTRQDAYPNYIYLPTVLQLAANSDVLVVACSLNEQSRGIVSREVIEALGPTGVLVNVGRGAHVDEPELVAALADGRLGGAGLDVFQAEPDVPQALMALDNVVLAPHMGSGTHETRKAMADLVLANLEAHALNMPLLTPVV

SEQ ID NO: 4136 - protein, 540 aa, Zea mays
MALLLHPRLPSHPFRAAAHHHHAISDASCFLTLHGPGRKRRMLLAAVTCRAARVKEPAPSAGASPPPPPQALTKEAHKYFDHAVVTVRAGDGGHGAVLAMPPAPSADAAKPRGRFNRGEKKSKKVSYKRNYDGSVALPTGGHGGDVVVYADEAEETLLRFHEKARYCAKRGGNVGAAGGTLSSRMHSGFAGETLRIPVPVGTVVKRKKGAVLADLAHHCDEVLVARGGQGGISLIDVPEYKRRKAMALSPNIMRDTSDKLKDFEVILLSTIVKSKVLTHGQPGEEVSLELILRVVADVGLVGLPNAGKSTLLSAITLARPDIADYPFTTLMPNLGRLGGDPALGALQFSSEATLADLPGLIEGAHLGKGLGRNFLRHLRRTRVIVHVVDAAADDPVNDYKIVREYYNVHDLSDLLVTLALIELRMYNPQYLERPYVEDLNKIDLPKAQDRLSALVLEISSIGCEEGHEQSGSKDNLNGRVSDHQVLSEAKAEGVEKELGDYPRPEAVVAASVLRHIGIDEMLKEIRAALRKCFDHKLPEH

SEQ ID NO: 4137 - protein, 300 aa, Zea mays
MQEFQSIPGLAGRLFGGAAAPGDLRRAQAAQHGPGGARCGGASPAAPEAVKCPRCESTNTKFCYYNNYNLSQPRHFCKSCRRYWTKGGVLRNVPVGGGCRKAKRASPSASASASSPASSSAPSTPASADAAKNPRRASASPRSNSGSASPTAAAATTPTPTDPSTSATPSSNGVAFTGSHHSSNPFSTIDVAAAPPAPIFADQAAALASLFAPPPPPPLPVFSFAAAQPKEEEAPTNSELQQHLAAQAAPSSSVSEDIMAPFASLDAAGIFELGDAASAAAYWSAGSCWADVQDPSLYLP

SEQ ID NO: 4138 - protein, 263 aa, Zea mays
MSSLTTAASSSSSMEEHCYSVSAEEVVGTHLSLGIGGGGGGGDKRMLTTLPPSRTVVQLFGEVLSVQDGDEAQALRHHHTGRPTAASRKKKRRDAAAGGASATDAAANGHHHQSKKTKTTAARRDDGGGGGGGGRKKLRLTAAQATLLEDSFRAHNILSHGEKQELARQAGLSARQVEVWFQNRRARTKLKQTEVDCDLLRRWCARLSDDNDRLRRDLADLRRAAAASAGLGAVVVCCASCGADRQLALAAAADNVLPSVASP

SEQ ID NO: 4139 - protein, 313 aa, Zea mays
MPPPPPLVLLAKPLFPNFAAALEGRYRLVLAGDADAATAAEARVLLVPGLVAVTAELVDRLPALELVAATSVGLDHVDLRACRRRGLAVTNAGAAFSVDSADYAVGLVVAVLRRVAAAEAHLRRGGWATDGEYPLTTKVSGKRVGIVGLGSIGSLVARRLAAMGCRVAYHSRAPKPSCSCPYAFFPTARALALASDVLVLSCALTEETRRVVGREVLEALGQGGVLVNVGRGGLVDEPELVRCLREGVFGGAGLDVFEDEPDVPAELLAMDNVVLSPHRAVLTPESMRGLLDVVAGNLDAFFAGRPLFSPVSL

SEQ ID NO: 4140 - protein, 266 aa, Zea mays
  misc_feature (152)..(152): Xaa can be any naturally occurring amino acid
  misc_feature (161)..(161): Xaa can be any naturally occurring amino acid
  unsure (1)..(266): unsure at all Xaa locations
HRLFLSPPLSRPFSLVRSASAFLPPCLSPSCPWRAQRFDFFFLGEEPESEQQWRLEGGDPDLLSQRGGEDRRRKMAAQEQEQEKQQAKTSTTSSLPSSSERSSSSARNNLTEGGAESDEEIRRVPEMGGASASASSGAGADERPKGEDGKQXAGGGGGAAXAGGKKRGRTAGDKEQNRLKRLLRNRVSAQQARERKKAYLTELEAKAKGLELRNAELEQRVSTLQNENNTLRQILKNTTAHASKRSGGGAGGKGGDGGKKHHLAKS

SEQ ID NO: 4141 - protein, 362 aa, Zea mays
MEGAMTTRSKHRRHEEDQEMTMVELRRGPWTLEEDNLLMNYIACHGEGRWNLLARCSGLKRTGKSCRLRWLNYLKPDIKRGNLAPEEQLLILELHSKWGNRWSRIAQHLPGRTDNEIKNYWRTRVQKQARQLRVDANSAVFRDAVRCYWMPRLLEKTMAAAAASTSGEVLLPPLPPPPQLHPSRVAGLLASSSSSPVQRDTSDSDYLPQRYHHHPVDPSPSASSTVSSSAALAPVPCFSELSWVDQYGYGPYYSYGANLDDGAGVFDDSAALEEGLGLDALDLGPADDSDVAHSDATLLDYLNSACAGGGTMMMAVTGGGGGVQSSGCGATGGADADYRPSPCTWRTDELGDPRQHQWGGGI

SEQ ID NO: 4142 - protein, 407 aa, Zea mays
SRPPPAMASNGIAPRDVCVVGVARTPLGGFLGALSSLPATKLGSIAIEAALKRANVDPALVQEVFFGNVLSANLGQAPARQAALGAGIPNTVVCTTVNKVCASGMKATMFAAQSIQLGINDIVVAGGMESMSNAPKYIAEARRGSRFGHDTLVDAMLKDGLWDVYNDCAMGMCAELCADNHALTREDQDAFAIQSNQRGIAARDSGAFAWEIVPIEVPVGRGKPPVLIEKDESLDKFDPAKLKKLRPSFKENGGTVTAGNASSISDGAAALVLVSGQKAQELGLQVLARIRGYADAAQAPELFTTTPALAIPKAISNAGLESSHVDFFEINEAFSAVALANQKLLGIPSEKINVHGGAVSLGHPLGCSGARILVTLLGVLREKGGKIGVAGVCNGGGGASALVLELA

SEQ ID NO: 4143 - protein, 900 aa, Zea mays
MKSLFKSKIRWQHRSNDPASPSGQPQPQPQQALGPPSPSPSSSPSSAAPLSVSTAATSSPSSPPSAAATPTGAGAAAAAGAGAAGEDYIASEEEFQMQLAMALSASSNSDCVGDLDGEQIRKAKLISLDRFAAHRDEGHTAESLSRRYWDYNFLDYHEKVIDGFYDIFGSSIESSRQGKMPSLADLQTGIGDLGFEVIVVNRAIDSTLQEMEQVAQCILLDFPVANIALLVQRIAELVTDNMGGPVKDANDMLTRWLEKSTELRTSLQTSLLPIGCIKIGLSRHRALLFKILADSVGIPCKLVKGSNYTGGDDDDAINIIKMDNEREFLVDLMAAPGALIPADILSWKGNSLNSNRKLGLNRTAGSSSTVDANVDPTVLPLEPKGGQLPLFSSGDWMSDIDSGYEAAEIAASTQTSSGVTPSVSAGSVFGSSWMLVNHDQSDGPSTSAGTSSQQKVVPQSEHQRNLNRLPDLQEIPESKYLFADLVPSGDNKSKKTSVPFKGPDHRNNELQKRRENIVPNAGRPQQRLVMKNWSPYNDVSNNKQYNYVEDSFARRNVGNNAASSSSQMPRPAVRSNLNSGLHNDASYHNYDSIMAGTSAMKITSTAETGKVPERVLRGDLDKGQTNYRLEDQHVIVQPPQGRLPWGNPAEGRVPMNRVQSQAKQHLENMDAKQDHKKLLPDPKKSPLDRFMDTSLPSRNMDMRSQRLDFDDVSECEIPWEDLVIGERIGLGSYGEVYRADWNGTEVAVKKFLDQDFYGDALDEFRSEVRIMRRLRHPNIVLFMGAVTRPPNLSIVSEYLPRGSLYKILHRPNCLIDEKRRIKMALDVAKGMNCLHTSMPTIVHRDLKSPNLLVDNNWNVKVCDFGLSRLKHSTFLSSKSTAGTPEWMAPEVLRNEQSNEK

SEQ ID NO: 4144 - protein, 866 aa, Zea mays
  misc_feature (415)..(415): Xaa can be any naturally occurring amino acid
  misc_feature (437)..(437): Xaa can be any naturally occurring amino acid
  unsure (1)..(866): unsure at all Xaa locations
EQVCTKKQAGTGPEFPGPCSCAKLIPLLDRILKNNQLTGPIPSTLSQIPNLKTLDLAQNKLTGDIPRLIYWNEVLQYLGLRGNSLTGTLSPDMCQLTGLWYFDIRGNNLTGTIPEGIGNCTSFEILDISYNQISGEIPYNIGYLQVATLSLQGNRLIGKIPEVIGLMQALAVLDLSENELVGPIPPILGNLSYTGKLYLHGNKLTGHIPPELGNMSKLSYLQLNDNELVGTIPAELGKLTELFELNLANNNLEGHIPANISSCSALNKFNVYGNRLNGSIPAGFQKLESLTYLNLSSNSFKGQIPSELGHIVNLDTLDLSYNEFSGPVPPTIGDLEHLLELNLSKNHLTGSVPAEFGNLRSVQVIDMSSNNLSGYLPEELGQLQNLDSLILNNNSLAGEIPAQLANCFSLVSLNXVIQQLLWARPVIEKLLKVPNGXFMGNLMLHVYCQDSSCGHSHGTKVSISRTAVACMILGFVILLCIVLLAIYKTNQPQLPEKASDKPVQGPPKLVVLQMDMAVHTYEDIMRLTENLSEKYIIGYGASSTVYRCDLKSGKAIAVKRLYSQYNHSLREFETELETIGSIRHRNLVSLHGFSLSPHGNLLFYDYMENGSLWDLLHGPSKKVKLDWDTRLRIAVGAAQGLAYLHHDCNPRIVHRDVKSSNILLDGSFEAHLSDFGIAKCVPAAKSHASTYVLGTIGYIDPEYARTSRLNEKSDVYSFGVVLLELLTGRKAVDNESNLHQLILSKADDDTVMEAVDPEVSVTCTDMNLVRKAFQLALLCTKRHPADRPTMHEVARVLLSLLPPAAKPPASKAAAASAAAGDYTRFLATAADLRRGGVADDDTGDNSSSDEQWFVRFGEVISKHTLS

SEQ ID NO: 4145 - protein, 317 aa, Zea mays
TLYRKLGTRKLGPLEGYSRAAAVERHCAGTLHRDVCASTLGSIPDLARKPAREVISAVVARAASAVRASASNCSAYLRRPAGALRVRDRLALADCVELLGHTLAQLGTAEAELSAGNFTAAEAEVESESLAAVQTVLSAALTNQYTCLDGFAGPSASEDGRVRPYIQGRMYHVAHLVSNSLAMLRRLPQRRRRRQGRGALELEGYGRVRRGFPSWVSGADRRRLQQQQVVPGPDLVVAKDGSGNFTTVGEAVAAAPNNSETRFVIYIKAGGYFENVEVGSEKTNLMFVGDGMWRTVIKASRNVVDNSTTFRSATLGQ

SEQ ID NO: 4146 - protein, 451 aa, Zea mays
  misc_feature (298)..(298): Xaa can be any naturally occurring amino acid
  unsure (1)..(451): unsure at all Xaa locations
MRRPPKAKRVAAAAKLPLPLTATFLSLLLLPLGFVATHRAFSGVVSAASTPAAKRVLLEDDGRASASASASANANGSAGAEHAAAVERHCAGTLHRDVCASTLGSIPDLARKPAREVISAVVARAASAVRASASNCSAYLRRPAGALRVRDRLALADCVELLGHTLAQLGTAEAELSAGNFTAAEAEVESESLAAVQTVLSAALTNQYTCLDGFAGPSASEDGRVRPYIQGRMYHVAHLVSNSLAMLRRLPQRRRRRQGRGALELEGYGRVRRGFPSWVSGADRRRLQQQQVVPGPDXVVAKDGSGNFTTVGEAVAAAPNNSETRFVIYIKAGGYFENVEVGSEKTNLMFVGDGMWRTVIKASRNVVDNSTTFRSATLAVVGTGFLARDLTVENAAGPSKHQAVALRVNADLSAFYRCAFAGYQDTLYAHSLRQFYRDCDVYGTVDFVFGD

SEQ ID NO: 4147 - protein, 681 aa, Zea mays
MASPDDESAQPPSKRPRRDAEPEVDAAEPSPRVVLNPADCDLDFDVGGGGLRGSALHEGGFAYCWSGARATVGARGGGRYCFGCRIVAEQPVEMDPTTSGERHLCRIGVSRGDDPVGALGESQHSFGFGGTGKFSHQRRFVNYGVKFGVGDTVVCAVDLDSKPMASIGFARNGEWLGIARHFDAGEKGLGLVDAPLRPMRWGSALFPHVLLKNVIVEMQFSREDGLLPVDGYEPWASAFSQRNSVFGPSFEQNKCEVMMMVGLPASGKSTWAEKWVKEHQEKRYILLGTNLVLEQMKVPGLLRKNNYGERFERLMDYATWIFNKLLTRAANTPRNFIIDQTNVYKNARIRKLRPFANYRKTAVVMFPTPSELKSRAAKRFNEMGKEIPAEAVNEMTANFVLPLSKDMPHSKEPFDEVIFTELSRDEAQRTLDDMQRVLPRNVTPSYGNSGNQKHYSSTYAGTAAPLDPSARSSMPGFYPPTANSYGVGDLRSSAATFSTGVHTEGNTTHGQTPCSVRSFRSPTGNQHGIHSSYPSAPNQYQMPSSYLSNSNQYEVRASYRSTPLPGYGQSTYASRRNPSPYNSEMHQGIQAPMSSRNLYRAPGSAEAYVAPCYAAGNLIGRPHQVLSPSTFPAHGPQPAAQWVPNQGCMSLGFCQNLTIIDAPFYDRALSTILLNMEAIFC

SEQ ID NO: 4148 - protein, 350 aa, Zea mays
MVGRMTGEMGGLRSRILRTLQSFPTAAPAQSPNLILAPLPPGAGPSPQPPAAPCVRLQEPAPLGDEARAAPEVPGGGGDDDKENVSPGATPRKAKKMKLSSDHHDRSPGLGEEQRADGATRYRRPDLASATLFDPDLLAAFRRAVDAYAQALDAARRRDVDVDDGDGVPGGGGGPGVADPLDAFERRCPPGGERAVVLYTTSIRGVRRTFEDCARVRRLLGGLRVAFLERDVSMHAPYREELRALLLCERGEDGGGAFPVPPRLFVDGRYLGGADEVVALHERSQLRPVLRRAAWRGAGEGPCAVCGGAWFVVCGACGGSHWLHDASAGAGRVPCSACNENGLVPCPLCS

SEQ ID NO: 4149 - protein, 1135 aa, Zea mays
MSLPSNNRRTCSRSSSARSKHSARVVAQTPVDAQLHAEFEGSQRHFDYSSSVGAANRPSASTSTVSTYLQNMQRGRYIQPFGCLLAVHPDTFALLAYSENAPEMLDLTPHAVPTIDQRDALGIGVDVRTLFRSQSSIALHKAAAFGEVNLLNPILVHARTSGKPFYAILHRIDVGLVIDLEPVNPADVPVTAAGALKSYKLAAKAISRLQSLPSGNLSLLCDVLVREVSELTGYDRVMAYKFYEDEHGEVISECRRSDLEPYLGLHYPATDIPQASRFLFMKNKVRMICDCCATPVKVIQDDSLAQPLSLCGSTLRASHGCHAQYMANMGSVASLAMSVTINEDEEEDGDTGSDQQPKGRKLWGLVVCHHTSPRFVPFPLRYACEFLLQVFGIQLNKEVELAAQAKERHILRTQTLLCDMLLRDAPVGIFTRSPNVMDLVKCDGAALYYQNQLLVLGSTPSESEIKSIATWLQDNHDGSTGLSTDSLVEAGYPGAVALREVVCGMAAIKISSKDFIFWFRSHTTKEIKWGGAKHEPVDADDDGRRMHPRSSFKAFLEVVKWRSVPWEDVEMDAIHSLQLILRGSLPDEDANRNNVRSIVKAPSDDMKKIQGLLELRTVTNEMVRLIETATAPVLAVDIAGNINGWNNKAAELTGLPVMEAIGRPLIDLVVTDSIEVVKQILDSALQGIEEQNMEIKLKTFHEHECNGPVILKVNSCCSRDLSEKVIGVCFVAQDLTRQKMIMDKYTRIQGDYVAIVKNPTELIPPIFMINDLGSCLEWNKAMQKITGIKREDAINKLLIGEVFTLHDYGCRVKDHATLTKLSILMNAVISGQDPEKLFFGFFDTDGKYIESLLTVNKRTDAEGKITGALCFLHVASPELQHALQVQKMSEQAATNSFKELTYIRQELRNPLNGMQFTCNLLKPSELTEEQRQLLSSNVLCQDQLKKILHDTDLESIEQCYMEMNTVEFNLEQALNTVLMQGIPLGKEKQISIERNWPVEVSCMYLYGDNLRLQQILADYLACALQFTQTAEGPIVLQVMSKKENIGSGMQIAHLEFRIVHPAPGVPEALIQEMFQHNPGVSREGLGLYISQKLVKTMSGTVQYLREADTSSFIILMEFPVAQLSSKRSKPSTSKF

SEQ ID NO: 4150 - protein, 221 aa, Zea mays
MARRASLLLAAALLVAVAAAAVPPTCERIECPPYVVVDSANGFEIRRYTDAMWITTAPIEDISFVAATRTGFLQLFDYIQGKNAYNETIEMTAPVLTRVSPSDGPFCASAFAVSFYVPAKNQADPPPAEGLRVDRWAGARYAAVRRFGGFVADADVGEQAARLEASLQGTRWAAAVNDARRADPASPYTVAQYNSPFEFTGRVNEIWMLFDAADADDDASM

SEQ ID NO: 4151 - protein, 235 aa, Zea mays
MSAAWEGGKEKGAATPAPGGACELCGAMARVYCGADEATLCWGCDAQVHGANFLVARHARALLCRGCARPTSWRAAGPRLGPSASLCDRCVRRGSGAVGVGGDVEMGGTGDGRGDEEEEEDDDEEDDDVVVEDDDDEEEGEGENQVVPWTEEAEATPPPVASSTSSSSREAPANGASGGECAKENMPCSTSQTGLLCHNSSSARHGGRSGVALEGRNGGRFLAFRPQEEITLRLH

SEQ ID NO: 4152 - protein, 663 aa, Zea mays
TIEQVCTKSRPGTGPEFPGTDTNHEREARPTSNRPRTTMAASRALLPSPQASPASARVRLAAAVPSSLTLAARGGAGARLRVRCAILSSPAPVAPTESRPARRISPSAPDGALRPKPAVLVAEKLSEAGLAVLRQFADVECAYGMSPAELLAKAAQFDALIVRSGTKVTREVLEAGQGRLRVVGRAGVGIDNVDLQAATEVGCLVVNAPTANTIAAAEHGIALLASMARNVSQADAALKAGKWQRNKYVGVSLVGKTLAVMGFGKVGSEVARRAKGLGMHVIAHDPYAPADRARALGVELVSFDEAIARADFISLHMPLIPTTSKIFNDESFAKMKNGVRIINVARGGVIDEDALVRALDSGKVAQAALDVFTVEPPPKDSKLVLHENVTVTPHLGASTVEAQEGVAIEIAEAVVGALRGELAATAVNAPMVPAEILSELAPYVSLAEKLGRLAVQLVAGESGIKGVKGVKVVYTTARGPDDLDTRLLRAMVTKGLVEPVSSTFVNLVNADYTAKQRGLRLTEERVAHDSPAAEAPLESVQVRLSHVQSKFAGAISDGGDDIVLEGRVKYGVPHLTLVGPYEVDVSLEGNLILCRQIDQPGMIGKVGNILGDTNVNINFMSVGRTFRGKQAIMAIGVDEEPDKDTLEKIGAIPAIEEFVFLEL

SEQ ID NO: 4153 - protein, 277 aa, Zea mays
GADKESACIRARSVSTPATGGRRGGAQMLLFGGGGSANSNGFFRGVPMAVLAMDDATRVGKRPFFTTHDELLEEEYYDEQAPEKKRRLTAEQVQLLERIFEEENKLEPERKTELARRLGMAPRQVAVWFQNRRARWKTKQLETDYDRLKAAYNALAADHQGLLADNDSLRAQVICLTEKLQGKETSLSATMATQEVDQPDEHTTGTEKLLAQQLKDDLHSSCGCTGHGALSSEEEDGGVVSDEGCSFDLPDAMFAVGVTNHGAEEAQLANWTSWFWN

SEQ ID NO: 4154 - protein, 323 aa, Zea mays
  misc_feature (165)..(165): Xaa can be any naturally occurring amino acid
  unsure (1)..(323): unsure at all Xaa locations
RAGGRVGSIRSLLPFQFPHTHVSAHSLLQFRQLVIINRTQSSRFHSRMLLNPASETSVLDTIRQHLLEEPAAAEARPADESFGSLVADQWSGSLPFRTDDADDMVVFGVLQDAFAYGWLPDGSFVHVKPEPVRSPDSSSYHPCSYDGSPCFGLLDPEPPLTPGSXTPGRGQEEAAAAMARGKHYRGVRQRPWGKFAAEIRDPARNGARVWLGTYDTAEDAALAYDRAAYRMRGSRALLNFPLRIGSGDKRPSPAPPEPATSSDSSSSASGSHKRRKRGEAAAANMAMALVPPPSQLNRPPQPWFPAAPVEQAAMAPRVEQIVV

SEQ ID NO: 4155 - protein, 310 aa, Zea mays
MEPQFCSSYYYGHAGGAAYAHSDSSHYGLRRYDDDSVVVDSHCYSSSTMASSGFVQQAASSAYYYYDPTAYSSDHHQHQQQHPSSSSTAWASSPSGATTPSSSHHQQQLLRFGGGAVDEYYQEDGMGAVGMDQSSAHMVMGAASSTSSGASSTTNTPDYLLLQEEEAAAGGGGDAPLIGVRRRPWGKFAAEIRDSTRNGQRVWIGTFDTPEAAALAYDQAAYSMRSTAAVLNFPVEHVQASLRALGLSVDAGGSPVLALKRRHCIRKRLPKNKTAAGAKEERTKQAAPCVLELEDLGADYLEELLALSDQ

SEQ ID NO: 4156 - protein, 204 aa, Zea mays
  misc_feature (98)..(98): Xaa can be any naturally occurring amino acid
  unsure (1)..(204): unsure at all Xaa locations
KKHNYVLLTCTDLEWEQLRVRGPCQHRWDEIDNLNTPREERDPESFCTFKERLCYLQKTEHGRVCFGRSGIHRWGLFARRDIQEGEMVLEYRGELVRXSVADLREEKYRVQGEDCYLFKISEEVVVDATDKGNMARLINHSCTPNCYARIMSVGHDESRIVLIAKKNVCAGDELTYDYLFDPDEGDEREVPCLCQTANCRKFMN

SEQ ID NO: 4157 - protein, 221 aa, Zea mays
MYSTREEEGVGKSWLGLGIGGGSGGCDLMQRNNRPPVQFDLLFPPQGVVEGVAASKKAEKGGGGRKRLKVVTGTADEDGQQPPGARKKLRLTKAQSTLLEDTFRAHSILSNAQKQELARQVDLSARQVEVWFQNRRARTKLKQTEADCEILKRCCESLTGENQRLRLELAQLQGSEAGLYLQSSFPPLAAAMASVCPSCDKVITVASGGETSGRSSTSYSS

SEQ ID NO: 4158 - protein, 270 aa, Zea mays
MHAFILHCSSCSLHRDRVKKGGGNKLAEMATCATTLAPLLGPAANATEYLCNQFADTTSAVDSTYLLFSAYLVFAMQLGFAMLCAGSVRAKNTMNIMLTNVLDAAAGALFYYLFGFAFAYGTPSNGFIGKHFFGLKRLPQVGFDYDFFLFQWAFAIAAAGITSGSIAERTQFVAYLIYSAFLTGFVYPVVSHWVWSADGWASPSRTSGKLLFGSGIIDFAGSSVVHMVGGIAGLWGALIEGPRIGRFDHAGRSVALRGHSASLVVLGTFL

SEQ ID NO: 4159 - protein, 598 aa, Zea mays
  misc_feature (248)..(248): Xaa can be any naturally occurring amino acid
  unsure (1)..(598): unsure at all Xaa locations
MASSASLQRFLLPSPHAAATAASPSSRLRRTGRARAAVSVPPPAAAGEQVPTERLEPRVEERAGGYWVLKEKYRAGLNPQEKVKLEKEPMALFMEGGIQDLARVPMEQIDAAKLTKDDVDVRLKWLGLFHRRKHQYGRFMMRLKLPNGVTTSEQTRYLASVIEAYGADGCADVTTRQNWQIRGVTLPDVPAILDGLRAVGLTSLQSGMDNVRNPVGNPLAGVDPHEIVDTRPYTNLLSSYVTNNSQGXTPTITNLPRKWNVCVIGSHDLYEHPHINDLAYMPAVKDGEFGFNLLVGGFISPKRWAEALPLDAWVAGDDVVPVCKAILEAYRDLGSRGNRQKTRMMWLIDELGMEVFRSEVEKRMPNGVLERAAPEDLVDKRWERRDYLGVHPQKQEGLSYVGLHVPVGRLQAADMFELARLADEYGTGELRLTVEQNIVLPNVSNERLDALLAEPLLQEQRLSPRPSMLLRGLVACTGNQFCGQAIIETKARALQVAREVEKRVAVPRPVRMHWTGCPNSCGQVQVADIGFMGCLTKDSDGKIVEAADIFVGGRVGSDSHLADVYRKSVPCKDLVPIVADLLVERFGAVPREREEDEE

SEQ ID NO: 4160 - protein, 257 aa, Zea mays
  misc_feature (38)..(38): Xaa can be any naturally occurring amino acid
  misc_feature (67)..(67): Xaa can be any naturally occurring amino acid
  misc_feature (76)..(76): Xaa can be any naturally occurring amino acid
  unsure (1)..(257): unsure at all Xaa locations
AKTSTTSSLPSSSERSSSSACNNLTEGGAESDEEIRRXVPEMGGASASASSGAGADERPKGEDGKQXAGGGGGAAXAGGKKRGRTAGDKEQNRLKRLLRNHVSAQQARERKKAYLTELEAKAKGLELRNAELEQRVSTLQNENNTLRQVIDVSGKEFKFTWASGRGELCDIYEERQSGEDGNGLLLECGSTWRKVHVNPIAWAVPTKHEGDASEEASLADETLASEVVLTRKRKIGSSLSVEPNHLSDELEPKLEDA

SEQ ID NO: 4161 - protein, 390 aa, Zea mays
  misc_feature (187)..(187): Xaa can be any naturally occurring amino acid
  unsure (1)..(390): unsure at all Xaa locations
CQPPGTARFSRREPELQEREGGSEEAGRGSALLQRGRTGAAAAPVARRAQGDPARDHGGPGAATWGQSGPDYAPAGFVHRLRQRCGADELFPCLPLQSSPRVCCSLLSVISAAKPAIANYPFTTLLPNLGVVSLDFDATMVVSDLPGLLEGTHRGYGLGHEFLRHSERCSVLVHVVDGSAQQPEYEXEAVRLELELFSPSLVDKPYVVVYNKMDLPEASDRWNTFKERLQSEGIEPFCISAINRQGTQDVIHAAYKLLQKERQRMKETEGWSGTENLNHVSEAIKKERRAPMNEFEVFHDKGTNTWNVVGAGIQRFVQMTNWQYSDSLKRFQHALEACGVNRALMKQGVKEGDTVIIGEMEMVWNNETDRARPSKTMNTQDDAVRWPEFG

SEQ ID NO: 4162 - protein, 225 aa, Zea mays
MESGRLIFNAPGSGAGQMLFLDCGAGGGPGGGLFHRGGRPMLGLEEGRGVKRPFFTSPDELLEEEYYDEQLPEKKRRLTPEQVLLLERSFEEENKLEPERKTELARKLGLQPRQVAVWFQNRRARWKTKQLERDFDRLKASFDALRADHDALLQDNNRLRSQVVSLTEKLQEKEDATDGGATADTAAPAVDVEASSGDHAEEPAEHAATPHALQEAKLDDRPEHG

SEQ ID NO: 4163 - protein, 228 aa, Zea mays
MVRGKTQMKRIENPASRQVTFSKRRNGLLKKAFELSVLCDAEVALVVFSPRGKLYEFASGSAQKTIERYRTYTKDNVSNKTAHQDIEQVKADAEGLAKKLEALEAYKRKLLGERLEECSFEELHSLEVKLEKSLHCIRGRKTQLLEEQLHKLKEKEMNLRKSNEDLREKCKKQPPPPPPMLMAPPPPPAPAAIDHTGPKDVGMDVETELYIGLPGRDYRSNNKDMTAQ

SEQ ID NO: 4164 - protein, 364 aa, Zea mays
  misc_feature (260)..(260): Xaa can be any naturally occurring amino acid
  unsure (1)..(364): unsure at all Xaa locations
MCGGAILSDIIPPPPPRRVTAGHLWPESKKPRRAASGRRGAPVEQHEQEEDFEADFEEFEVESGESELESEDEPKPFAAPRSALARGGLNTGAAGVDGPAANSVKRKRKNQFRGIRRRPWGKWAAEIRDPRKGVRVWLGTFNSPEEAARAYDAEARRIRGKKAKVNFPDEVPTAVSQKRRAAGPASLKAPKMDVEEEKPIIKLAVNNMTNSNAYHYPAVVGHHNIIPEPFMQTQNMPFAPLVNYAALVNLSSDQGSNSFXCSDFSLENDSRTPDITSVPAPVATLAAVGESVFVQNTAGHAVASPATGNTGVDLAELEPYMNFLMDGGSDDSISTLLSCDGSQDVVSNMDLWSFEDMPMSAGFY

SEQ ID NO: 4165 - protein, 385 aa, Zea mays
MAMRGAAQQVARFAMGPHVPHVIAPAERSLHASAGSKKIVGVFYKGGEYADRNPSFVGCAEHALGIRGWLESQGHQYVVTDDKDGPNCELEKHIADAHVLITTPFHPAYVTADRIARAKNLELLLTAGIGSDHVDLAAAAAAGLTVAEVTGSNTVSVAEDQLMRVLVLTRNFLPGHRQAVGVGWDVAAVAHRAYDLEGKTVGTVGAGRIGRLVLQRLKPFNCRLLYHDRLRIDPALEAEIGAQFEADLDAMLPKCDVVVINMPLTEKTRGMFDKERIARMKKGVIIVNNARGAIMDTQAVADACATGHIAGYGGDVWHPQPAPKDHPWRYMPNNAMTPHISGTTIDGQLRYAAGVKDMLERYFKGQDFPVQNYIVKEGKLACQYQ

SEQ ID NO: 4166 - protein, 376 aa, Zea mays
MAMWRAAARQLVDRALGSRAAHTSTGSKKIVGVFYKAGEYADKNPNFVGCVEGALGIRGWLESQGHQYIVTDDKEGPNCELEKHIEDMHVLITTPFHPAYVTAERIKKAKNLELLLTAGIGSDHIDLPAAAAAGLTVAEVTGSNTVSVAEDELLRILILLRNFLPGYQQVVQGEWNVAGIAHRAYDLEGKTVGTVGAGRIGRLLLQRLKPFNCNLLYHDRLQIDPELEKEIGAKFEEDLDAMLPKCDVIVINTPLTEKTRGMFNKERIAKMKKGVIVVNNARGAIMDAQAVADACSSGHIAGYGGDVWFPQPAPKDHPWRYMPNHAMTPHISGTTIDAQLRYADGVRDMLDRYFKGEDFPVQNYIVKEGQLASQYQ

SEQ ID NO: 4167 - protein, 431 aa, Zea mays
RRAGAAIRSGRFAGDSIFQVGWFWHFGPAAMASDGIGPRDVCVVGVARTPMGGFLGALSPLPATKLGSIVIQAALERANVDPALVQEVYFGNVLSANLGQAPARQAALGAGIPNSVVCTTVNKVCASGMKATMFAAQSIQLGINDIVVAGGMESMSNAPKYIAEARKGSRFGHDTLVDAMLKDGLWDVYNDCAMGMCAELCADNHALTREDQDAFAIQSNERGIAARDSGAFAWEIIPVQVPVGRGKPPTLIERDESLDKFDPVKLKKLRPSFKENGGTVTAGNASSISDGAAALVLVSGQKAQELGLQVLARIKGYADAAQAPELFTTTPALAIPKAIANAGLESSRVDFYEINEAFSAVALANQKLLGIPSEKINVHGGAVSLGHPLGCSGARILVTLIGVLRAKSGKIGVAGVCNGGGGASALVLELA

SEQ ID NO: 4168 - protein, 390 aa, Zea mays
  misc_feature (358)..(358): Xaa can be any naturally occurring amino acid
  unsure (1)..(390): unsure at all Xaa locations
MATPLRATAVLAWGSGEDGQLGMGGNEEKDWPHFVEALGPYAVTAVVAGSRNSLAICDDGRLFTWGWNQRGTLGHPPETKTESSPGPVDALAGFKIVQAAIGGWHCLAVDDKGRAYAWGGNEYGQCGEEPERKEDGTRALRRDIPIPQRCALKLKVRQVAAGGTHSVVLTQEGHVWTWGQPWPPGDIKQISTPVRVQGLEKVRVIAVGAFHNLALTEDVILWAWGNNEYGQLGTGDTQPRSQPIRVEGLSDLSLVDIAAGGWHSTALTIDGEVYAWGRGEHGRLGFGDDKSSHMVPLKVELLAGEDIVQVSCGGTHSVALARDGRMFSYGRGDHGRLGYGRKVTTGHPMELPINLAAXSAAAGDGRWQAKYVACGGRHTLAIAEWTEATD

SEQ ID NO: 4169 - protein, 609 aa, Zea mays
MISLLRRALAASASSPAATYRRLLVVAPLSPPAAPPGPCQAPAAGSQEPPRRAFHCSTPPLGFRSTPASWAGPCPGEGEGEGVDTGAEKGLEIARLGTSPRIVEKLAARGITRLFPIQRAVLEPAMQGKDMIGRARTGTGKTLAFGIPIMDKILSYNEKNGNGRNPLAIILAPTRELARQVEKEFRESAPLDTLCVYGGVPINQQMRALNYGVDIVVGTPGRVIDLLRRGVLNLSQIQFVVLDEADQMLAVGFDEDVEVIMEQLPQNRQSMLFSATMPSWIRKISNKYLKDPVIIDLVGDSDQKLPEGISLYSIASDNFGKPSIIGPLIKEHANVGKCIVFTQTKREADRLAYVMGRSYQCQALHGDISQNQRERTLSGFRDGRFNILVATDVAARGLDIPNVDLVVHYEIPNTSELFVHRSGRTARAGKKGSAILIYTYEQTRAVRVIEQDIGCRFTELPKMPVSDEAADMFNVMRDTRSRSVGSRRTGGPFSREGYGDFEDHRSRGFGDFDRFGGSSDRGGGFRDSGSRYHGGSGGFRRSSSDFGRPSFSRSDRFGDFGDSDFSRRGNADFGRSRSSDDSGSSRYPRGYGGSGTSDSGNFGGFKGSK

SEQ ID NO: 4170 - protein, 142 aa, Zea mays
NSRADPRVHPRVRGRVGALVRLAFPVFFFLAAAEFAAGTRSPSAFVQNAIYSNRITIFSKTYCPYSMRAKHIFRDLKEDPYVVELDTRVDGRDIQSVLLDLVGRRTVPQVFVNGQHIGGSDDTVNALSNGQLQKLLGKSQSQ

SEQ ID NO: 4171 - protein, 423 aa, Zea mays
MDGNARSAATNQKKPVVADDDLVELLWHNGSVVAQPQAHQRPAPTYDPDRPGTSGLTGEETAAWFPDTLDDALEKDLYTQLWYSTIADAAPQHEGTLPGPTSQPSPSPPVGSSGVESSWAGDICSTFCGSNQVLRTPARIRGKDAALQSELPSNTGAHDGTSSSGGSGSNYGGSGLPSDSVHVQKRKGRCRDDSDSPSEDAECEEASEETKPSRRYGTKRRTRAAEVHNLSERRRRDRINEKMRALQELIPHCNKTDKASILDETIEYLKSLQMQVQIMWMTSGMAPMMFPGVHQFIPQMALGMNPGCIPAAQGLSQMPRLPYMNHTLPNHIPLNSSPAMNLMNPLNAANQVQIGHLRDAGSHVLHLDGGRAAVVPQVPGPGPHVVHGHQIAQAEEHNKILEVAASTVIPTSKAGQPPTFHGV

SEQ ID NO: 4172 - protein, 1134 aa, Zea mays
  misc_feature (502)..(502): Xaa can be any naturally occurring amino acid
  misc_feature (594)..(594): Xaa can be any naturally occurring amino acid
  unsure (1)..(1134): unsure at all Xaa locations
MSSSRPAHSSSSSSRTRQSSRARILAQTTLDAELNAEYEESGDSFDYSKLVEAQRSTPPEQQGRSGKVIAYLQHIQRGKLIQPFGCLLALDEKSFRVIAFSENAPEMLTTVSHAVPNVDDPPKLGIGTNVRSLFTDPGATALQKALGFADVSLLNPILVQCKTSGKPFYAIVHRATGCLVVDFEPVKPTEFPATAAGALQSYKLAAKAISKIQSLLGGSMEALCNTVVKEVFDLTGYDRVMAYKFHEDEHGEVFAEITKPGIEPYIGLHYPATDIPQAARFLFMKNKVRMICDCRARSVKIIEDEALSIDISLCGSTLRAPHSCHLKYMENMNSIASLVMAVVVNENEEDDEPEPEQPPQQQKKKRLWGLIVCHHESPRYVPFPLRYACEFLAQVFAVHVNKEFELEKQIREKNILRMQTMLSDMLFKESSPLSIVSGSPNIMDLVKCDGAALLYGDKVWRLQTAPTESQIRDIAFWLSEVHGDSTGLSTDSLQDAGYPGAXASLGDMICGMAVAKITSKDILFWFRSHTAAEIKWGGAKHDPSDKDDNRRMHPRLSFKAFLEVVKTKSLPWSDYEMDAIHSLQLILRGTLNDXASKPAQASGLDNQIGDLKLDGLAELQAVTSEMVRLMETATVPILAVDGNGLVNGWNQKVAELSGLRVDEAIGRHILTLVEDSSVSLVQRMLYLALQAGREEKEVRFELKTHGSKRDDGPVILVVNACASRDMHDHVVGVCFVAQDMTVHKLVMDKFTRVEGDYRAIIHNPNPLIPPIFGADQFGWCSEWNAAMTKLTGWHRDEVIDRMLLGEVFDSSNASCLLKSKDAFVRLCIIINSALAGEEAEKASFGFFDRNEKYVECLLSVNRKVNADGVVTGVFCFIHVPSDDLQHALHVQQASEQTALRKLKAFSYMRHAINKPLSGMLYSRETLKSTGLNEEQMRQVRVGDNCHRQLSKILADLDQDNITDKSSCLDLDMAEFVLQDVVVSAVSQVLIGCQAKGIRVACNLPERSMKQRVYGDGIRLQQIVSDFLFVSVKFSPAGGSVDISSKLTKNSIGENLHLIDFELRIKHRGAGVPAEILSQMYEEDNKEQSEEGFSLAVSRNLLRLMNGDIRHLREAGMSTFILTAELAAAPSAVGR

SEQ ID NO: 4173 - protein, 1162 aa, Zea mays
ASDSRFPKRSPSARPVAPRHAHHHHSQSSGGSTSRAGAGGGGGGAAATESVSKAVAQYNIDARLHAVFEQSGASGRSFDYSQSLRAPPTPSSEQQIAAYLSRIQRGGHIQPLGCTLAVADDSSFRLLAFSENTTDLLDLSPHHSVPSLDSVALPPVSLGADARLYFSPSSAVLLERAFAAREISLLNPLWIHSRASSKSFYAILHRIDVGVVIDLEPARTEDPALSIAGAVQSQKLAVRAISRLQALPGGDVKLLCDTVVEHVRELTGYDRVMVYRFHEDEHGEVVAESRRDNLEPYLGLHYPATDIPQASRFLFQQNRVRMIADCHAIPVRVIQDPGLSQQLCLVGSTLRAPHGCHAQYMANMGSIASLVMAVIISSGGDDERTGRGAISSSMKLWGLVVCHHTSPRCIPFPLRYACEFLMQAFGLQLNMELQLAHQLSEKHILRTQTLLCDMLLRDSPAGIITQSPSVMDLVKCDGAALYYRGKYYPLGVTPTESQIKDIIEWLTVCHGDSTGLSTDSLADAGYLGAVALGDAVCGMAVAYITPSDYLFWFRSHTAKEIKWGGAKHHPEDKDDGQRMHPRSSFKAFLEVVKSRSLSWENAEMDAIHSLQLILRDSFRDAAEGTSNSKAIVNGQRQLGELELRGINELSSVAREMVRLIETATVPIFAVDTDGCINGWNAKIAELTGLSVEEAMGKSLVNDLIFKECDDIGEKLLSRALRGEEDKNVEIKLKTFGSEQSKGAIFVIVNACSSRDYTQNIVGVCFVGQDVTGQKVVMDKFINIQGDYKAIVHNPNPLLPPIFASDENTSCSEWNTAMEKLTGWSREEVVGKFLIGEVFGNCCRLKGPDALTKFMVIIHNAIGGQDYEKFPFSFFDKNGKYVQALLTANTRSKMDGKSIGAFCFLQIASAEIQQAIEIQRHQEKKCYARMKELAYICQEIKNPLSGIRFTNSLLQMTDLNDDQRQFLETSSACEKQMSKIVKDASLQSIEDGSLVLEQSEFSLGDVMNAVVSQAMLLLRERDLQLIRDIPDEIKDASAYGDQCRIQQVLADFLLSMVRSAPSENGWVEIQVRPNVKQNSDGTNTELFIFRFACPGEGLPADVVQDMFSNSQWSTQEGVGLSTCRKILKLMGGEVQYIRESERSFFLIVLEQPQPRPAAGREIV

SEQ ID NO: 4174 - protein, 394 aa, Zea mays
MLVTLMNLLRACWRPSSNRHARTGSDVTGRQDGLLWYKDAGQHVNGEFSMAVVQANNLLEDQCQIESGPLSFLDSGPYGTFVGVYDGHGGPETACYINDHLFQNLKRFASEQNTMSADVLKKAYEATEDGFFSVVTKQWPVKPQIAAVGSCCLVGVICGGMLYVANVGDSRVVLGRHVKATGEVLAVQLSAEHNVSIESVRKELQSMHPEDRHIVVLKHNVWRVKGLIQVCRSIGDAYLKKQEFNREPLYVKFRLREPFHKPILSSEPSINVQPLQPHDQFLIFASDGLWEHLTNQEAVDIVHSSPRSGCARRLIRAALQVAAKKREMRYSDLKKIDRGVRRHFHDDITVIVVFLDSSLVSKASTHRGPTLSLRGGGASAGLRSNTLAPTSMWL

SEQ ID NO: 4175 - protein, 290 aa, Zea mays
MEQGDPTPAASACNCDPAAAPPAWIPLHDHDDTLLQQLDAILLGMDDDDVATADDRCCSGWLSSSPSPSPSSSSEATTTASPPPSTREQHRRHAAKDAAANAALAGGGDEKRALTTAAFIGVRKRPWGKFAAEIRDSTRKGARVWLGTFDTPEAAALAYDQAALAARGAAAVLNFPVERVVESLGALALAGAGSPVLALKRRHSKRTRRRKLSAVATTDGDGKDTMKQPRQCSGLPVAVPSYTTVAAVPPQQQHATARGQSHTRYGVVELEDLGTDYLDELLRVSSELEY

SEQ ID NO: 4176 - protein, 481 aa, Zea mays
MASARGPCGISVRSDFSSACLIHKAGAPSNSVSGVMAVQVHRHRNKVRNGQAIRCAMATGKEQGAISTASSGDQTKGGLRGKLNKVVLAYSGGLDTSVIVPWLRENYGCEVVCFTADVGQGAIELEGLEKKAKASGACQLVVKDLKEEFVSEYIYPCLRAGAVYERKYLLGTSMARPVIAKAMVDVAKEVGADAVAHGCTGKGNDQVRFELTFYALNPELKVVAPWREWDITGREDAIEYAKKHNVPVPVSKKSIYSRDRNLWHLSHEGDILEDPANEPKEDMYMMSIAPENAPSKPEYLEIGIIAGVPVSINGRDLSPASLLAELNEIGGKHGIGRIDMVENRLVGMKSRGVYETPGGTIMAAAVRELESLTLDRETMQWKDIIALKYAELVYAGRWFDPLRQSFDAFMEKVTATTTGSVTLKLYKGSVNVASRKSPYSLYREDISSFENGEIYNQADAEGFIRLYGLPTRVRAMLEKGI

SEQ ID NO: 4177 - protein, 402 aa, Zea mays
  misc_feature (242)..(242): Xaa can be any naturally occurring amino acid
  unsure (1)..(402): unsure at all Xaa locations
MAATAAVAGTGSSLSSRRSRSVVSSSFRAAASRFRSPRCVLGSEQLRVAHEGKRMSGAESRTAWAPKVPAPESRLAALPRELRDSRMKIFSGTANRPLAQEIAAYLGIELGKILIKRFADGEIYVQLQESVRGCDVFLIQPTCSPVNENLMELFIMIDACRRASARSITVVIPYFGYARADRKAQGREPITAKLAANLLTEAGSDRVIVCDIHSTQALGYFDIPVDHIYGQPVISMRGILKXLCLCKTISEDLVVVSPDVGGVVRARAFAKKLLNARLAIVDKRRQGHNMSEVMNLIGDVKGKVAILIDDMIDTAGTITSAAALLKQEGAEAVYACCTHAVFSPPAIERLSGGVFEEVIVTNSILLPEDKCFPQLTVLSMANLVGETIWHVHRDGSVSSIFQ

SEQ ID NO: 4178 - protein, 289 aa, Zea mays
MARVFVGNLDPRVTAREIEDEFRTFGVLKSVWVARKPPGFAFIDFDDRRDAQDAIRDLDGKNGWRVELSTKDGGGRGRDRNGSDMKCYECGEVGHFARECRLRIGSGGLGSGRRRSRSPRYRSRSRSRSRSPRHRRSPSYGRRSYSPRDRSPRRRSYSRSPPRSRARSLSRSPPLPPPPPRNNSMSPRGAREMSRSSPPPPKNNSSSPREAREMSRSPPPPAKNNSSSPREAREMSRSPPPPPPRNNSRSPPGARDVSRSPPPPPDARRSYSRSPEQQPQHESPYANDA

SEQ ID NO: 4179 - protein, 277 aa, Zea mays
MARVFVGNLDPRVTAREIEDEFRTFGVLKSVWVARKPPGFAFIDFDDRRDAQDAIRDLDGKNGWRVELSTKDGGGRGRDRNGSDMKCYECGEVGHFARECRLRIGSGGLGSGRRRSRSPRYRSRSRSRSRSPRHRRSPSYGRRSYSPRDRSPRRRSYSRSPPLPPPPPRNNSMSPRGAREMSRSSPPPPKNNSSSPREAREMSRSPPPPAKNNRSSPREAREMSRSPPPPPPRNNSRSPPGARDVSRSPPPPPDARRSYSRSPEQQPQHESPYANDA

SEQ ID NO: 4180 - protein, 342 aa, Zea mays
MSSAGISGCVPTTEHHIQTNHGPVSVAVYGDHDKPALVTYPDIALNYMSCFQGLLFCPEAASLLLHNFCIYHISPPGHELGAAPISPNAPIPSVDDLADQVADVLDFFGLGSVMCFGVTAGAYILTLFAAKYRERVLGLILVSPLCKGPTWTEWLYSKVTSNLLYYYGMCGLVKECLLQRYFSKEVRGFSELPESDIVQACKSLLDQRQSMNVWRFVQTMNERYDLSEHIKRLQCRTLIFVGDNSQFHTEAVHLTSKLDRRYCALVEVQACGSLVTEEQPHAMLIPMEYFLMGYGLYRPPSQVVECSPRSPLSPFCISPDLLSPESMGVKLKPIRTRVRLEV

SEQ ID NO: 4181 - protein, 387 aa, Zea mays
MADQANQPTVLHKLGGQFHLRSIISEGVRARNICPSVSSYERRFATRNYMTQSLWGPSMSVSGGINVPVMQTPLCANAPAEKGGKNFMIDFMMGGVSAAVSETAAAPIERVKLLIQNQDEMIKSGRLSEPYKGIVDCFKRTIKDEGFSSLWRGNTANVIRYFPTQALNFAFKDYFKRLFNFKKDRDGYWKWFAGNLASGGAAGASSLFFVYSLDYARTRLANDAKAAKGGGERQFNGLVDVYRKTLKSDGIAGLYRGFNISCVGIIVYRGLYFGLYDSIKPVVLTGNLQDNFFASFALGWLITNGAGLASYPIDTVRRRMMMTSGEAVKYKSSLDAFQQILKKEGPKSLFKGAGANILRAIAGAGVLSGYDQLQILFFGKKYGSGGA

SEQ ID NO: 4182 - protein, 205 aa, Zea mays
MMERVEDLGLSLSLSSSLASPRTHHVATMLLRAPEKRFLEMPLLLPAKRTTEVTGEDGLRGGSDEEDGGCGIDGSRKKLRLSKDQSAVLEDSFREHPTLNPRQKAALAQQLGLRPRQVEVWFQNRRARTKLKQTEVDCEYLKRCCETLTEENRRLQKEVQELRALKLVSPHLYMHMSPPTTLTMCPSCERVSSSNGNSAAATAAA

SEQ ID NO: 4183 - protein, 141 aa, Zea mays
HIKNPVPGRAAACRTKLKQTEVDCEHLKRCCEKLTGENRRLHKELAELRALKAVRPLLHMHLPATTLSMCPSCERVASTSSVAPAAPAPASPSPAAGIAASAPDPEQRPSSFAALFSSSPRNRALAAQAQRQPRPQAPGGS

SEQ ID NO: 4184 - protein, 115 aa, Zea mays
MASGGAVRDVGSPAELEAAVAGARAVAVHFWASWCEASKQMDEVFAHLAVDFPHAAFLRVEAEEQPEISEAYGVTAVPYFVFCKEGKIVDTLEGVNPASLANKVAKVAGPASVAE

SEQ ID NO: 4185 - protein, 201 aa, Zea mays
ASDLQLSGYEADDILYEGHQIVSELVGTRAVTFAVNLGTRVQDAEKLVQSAKHLSEKHFFANSLKPVKENRVHGPLENISVHLSPREAFFTEKRRVKIEDSLGEICGELICPYPPGIPVLIPGEVVTHDSLSYLMSVRHQGITISGAADAELNSILRYRGWERSSMVYAKSRAQCFLFASLLNWEVRSELAVKLKHHMQGF

SEQ ID NO: 4186 - protein, 365 aa, Zea mays
  misc_feature (239)..(239): Xaa can be any naturally occurring amino acid
  unsure (1)..(365): unsure at all Xaa locations
MGSIMEQRCNNDQQALLDAQLELWHSTFAFIKSMAFKSALELGIADAIHCHGGTATLTQIATKAALHPSKTPCLRRLMRALTVAGIFSVAKNSSDDDGDQHVYGLTPASRLLVGSSQNLAPTLSLILNNVFVAPFLDLGTWFESALPATDLPLFELSHRKNVWDVVGHDPSVSQLFNAGMVADTRFLMDIAVRECGDVFQGIRSLVDVGGGHGAAAQAISAAFPAIQCTVLDLAHVVAXTPACAGLSFVAGDMFEAIPPANAVFLKWIMHDWGDTECVTILKNCKKAIPPRDAGGKVIIVDTVVGAGPPNLKNKETQVMSDLFFMIVNGLERDEQEWRNIIFEAGFSDYIIIPVLGVRSIIELYP

SEQ ID NO: 4187 - protein, 580 aa, Zea mays
METLLAGNPANGVAKPTCNGVGALPVANSHAIIATPPAAATLAPAGATLGRHLARRLVQIGASDVFAVPGDFNLTLLDYLIAEPGLTLVGCCNELNAGYAADGYARSRGVGACAVTFTVGGLSVLNAIAGAYSENLPVVCIVGGPNSNDYGTNRILHHTIGLPDFSQELRCFQTITCYQAIINNLDDAHEQIDTAIATALRESKPVYISVSCNLAGLSHPTFSRDPVPMFISPRLSNKANLEYAVEAAADFLNKAVKPVMVGGPKIRVAKAREAFAAVADASGTTFCAEIVESADAYLFAGPIFNDYSSVGYSLLLKREKAVIVQPDRMVVGDGPAFGCILMPEFLRALAKRLRRNTTAYDNYRRIFVPDREPPNGKPNEPLRVNVLFKHIKGMLSGDSAVVAETGDSWFNCQKLRLPEGCGYEFQMQYGSIGWSVGATLGYAQAAKDKRVIACIGDGSFQVTAQDVSTMLRCGQKSIIFLINNGGYTIEVEIHDGPYNVIKNWDYTGLVNAIHNSEGNCWTMKVRTEEQLKEAIATATGAKKDCLCFIEVIVHKDDTSKELLEWGSRVSAANSRPPNPQ

SEQ ID NO: 4188 - protein, 107 aa, Zea mays
MALPKAKEIVSSNSVVVFSKTYCPFCVEVKQLFGNLGVTYKAIELDSEADGSEIQAALVEWTGQRTVPNVFIGGNHIGGCDSTTALHNQGKLVPLLTSAGALAKSTA

SEQ ID NO: 4189 - protein, 369 aa, Zea mays
MMMMSEGVGMPPWSHHVPVSGVDEGDEMTPYLLAALRQYLPCNDAGAEAEAEEDEAAAAMAAGVDGYGCDEFRMYEFKVRRCARARSHDWTECPFAHPGEKARRRDPRKYHYSGAACPDFRKGGCKRGDGCDMAHGVFECWLHPARYRTQPCKDGTACRRRVCFFAHTADQLRVLPPTPQQQSSPRGAACSSPLAESYDGSPLRRQAFESYLTKSIMCSSPTSTLLSPPKSPPSESPPLSPDFRRGCWPGAGSPVNDVLASLRQLRLSRANSSPSGGWCGYPASAVAYGSPTGGALYGLSSTPRSTAGSGYMANLDPLDVTFGGDEEPVERVESGRALRAKVFERLSREGAVSGDAGGPDVGWVSDLIN

SEQ ID NO: 4190 - protein, 279 aa, Zea mays
  misc_feature (260)..(260): Xaa can be any naturally occurring amino acid
  unsure (1)..(279): unsure at all Xaa locations
MDTAIGSVPAASDAARLPAPSASAPRDATLGRHLARRLAEVGARDVFTVPGDFNLTLLDELEAEPGGVRLVGCCNELNAAYAADGYARARAGGVGACAVTFTVGGLSAINGVAGAFSENLPVVCIVGGPNSNDYGSNRILHHTIGLPDFTQELRCFQNVTCYQAVVNNLEDAHEQIDTAISTAIKESKPVYISISCNLPSIPHPTFSRHPVPFFLSPRLSNQMNLEAAVEAAAAFLNKAVKPVLVGGPKMRVSQACEALXELADACGYPVAVMPSAKGL

SEQ ID NO: 4191 - protein, 175 aa, Zea mays
SAPARMQEQAASSRPSSSERSSSSGHHVDMEVKEGMESDDEIRRVPELGLELPGASTSGREAGPGAAGADRALAQSSTAQASARRRVRSHADKEHKRLKRLLRNRVSAQQARERKKAYLTDLEVKVRDLEKKNSEMEERLSTLQNENQMLRQILKNTAVNRRGSGSTASGEGHGQ

SEQ ID NO: 4192 - protein, 260 aa, Zea mays
NSRVDPRVRPRVRPRVRLKSPTGSSSGDGFDVMTLATDQPAGPVSATPKVPNARDDDKFNDGMYEDLCVDDADLTFEDYEELFGTSHIRTEELFDDAGIDGYFELKETPPFYFNEQPKAMQIECGNVVSADCAMSNPGARADSSLCIPVRQVRSSISHSLSGLTGESSAGDHHDCGVSPMLLMGEPPWHSPGGPEGSVAGGSRDSALTRYKEKKKRRKFDKKIRYASRKARADVRKRVKGRFIKAGEAYDYDPLSQTRSY

SEQ ID NO: 4193 - protein, 171 aa, Zea mays
MTELFDTAVTSLLHLPEVLDRLAAADGDRRSAGHHAAHGHGHGRVHGLGGGGGAPVDIVESPREYAFVLDVPGLSKSDIQVTLEEDRVLVMKGGSGKRKRDEEEDMNGEGCRYIRLERGAAPRSFVRKFRLPEDADTGGVAARCENGVLTVTVKKLPPPEKKAKTVQVTIA

SEQ ID NO: 4194 - protein, 256 aa, Zea mays
MAARPDARSGYCAATRTFRSKRADVPLPADADLDVVRFLASRRHAGVVALVDAATGHRVTFQELWRAVEGAATALAAPPLSLRKGQVALILSPNSVHFPVATIGEISATPPDPTRRRDRVTQDDPATLLYSSGTTGPSKGVVATHRSLISMVQIIMSRFRLEASDRTETFLCTVPMFHVYGLVAFATGLLGCGATIVVLSKYELPEMLRAINEYGVTKYCDRVNALSRYLLPHITNNINTHHSRRHPLDHYSHTTD

SEQ ID NO: 4195 - protein, 250 aa, Zea mays
  misc_feature (238)..(238): Xaa can be any naturally occurring amino acid
  unsure (1)..(250): unsure at all Xaa locations
MLLRAAWRRASLAATSLALGRSSVPTRGLRLRVVDHGPHSPVHSEAEAVLRPLYMDVQATTPLDPRVLDAMLPYLVNYYGNPHSRTHAYGWESEAAMERARQQVASLIGADPREIIFTSAATESNNIAIKGVARFYRSRKKHLVTTQTEHKCVLDSCRSLEAEGFRVTYLPVQKSGIIDLKELEAAIQPDTSLVSVMTVNNEIGVKQPIAEIGQICSSRKLYFHTDAAQAVGKIPLDXHDMKIDLMSISG

SEQ ID NO: 4196 - protein, 268 aa, Zea mays
  misc_feature (195)..(195): Xaa can be any naturally occurring amino acid
  unsure (1)..(268): unsure at all Xaa locations
MVRGKTQMKRIENPASRQVTFSKRRNGLLKKAFELSVLCDAEVALVVFSPRGKLYEFASGSAQKTIERYRTYTKDNVSNKTAHQDIEQVKADAEGLAKKLEALEAYKRKLLGERLEECSFEELHSLEVKLEKSLHCIRGRKTQLLEEQLHKLKEKEMNLRKSNEDLREKVMGAKTFCRRCTAASGMPTTQENRLXILPLTSTSCAVISYCKKQPPPPPPMLMAPPPPPAPAAIDHTGPKDVGMDVETELYIGLPGRDYRSNNKDMTAQ

SEQ ID NO: 4197 - protein, 193 aa, Zea mays
  misc_feature (83)..(83): Xaa can be any naturally occurring amino acid
  unsure (1)..(193): unsure at all Xaa locations
VRRSRRSQSIAIRPLFSPCSSASFLIQPTQGSPCRDSEEHHFESKADAGASKTYPQQAGCARRNGFIAIKNRPCKAVEASTSXTGKHGHAKCHFVAIDIFNGKKLEDIVPSSHDCDITHVNRTDYHLIDISEDEFVSLLTSHGYTNDDVILPSDETLVRQIQERLESEKDLVVTDQSAMGEVHICALNDVGPK

SEQ ID NO: 4198 - protein, 1317 aa, Zea mays
MSLPSNNRRTCSRSSSARSKHSARVVAQTPVDAQLHAEFEGSQRHFDYSSSVGAANRPSASTSTVSTYLQNMQRGRYIQPFGCLLAVHPDTFALLAYSENAPEMLDLTPHAVPTIDQRDALGIGVDVRTLFRSQSSVALHKAAAFGEVNLLNPILVHARTSGKPFYAILHRIDVGLVIDLEPVNPADVPVTAAGALKSYKLAAKAISRLQSLPSGNLSLLCDVLVREVSELTGYDRVMAYKFYEDEHGEVISECRRSDLEPYLGLHYPATDIPQASRFLFMKNKVRMICDCCATPVKVIQDDSLAQPLSLCGSTLRASHGCHAQYMANMGSVASLAMSVTINEDEEEDGDTGSDQQPKGRKLWGLVVCHHTSPRFVPFPLRYACEFLLQVFGIQLNKEVELAAQAKERHILRTQTLLCDMLLRDAPVGIFTRSPNVMDLVKCDGAALYYQNQLLVLGSTPSESEIKSIATWLQDNHDGSTGLSTDSLVEAGYPGAVALREVVCGMAAIKISSKDFIFWFRSHTTKEIKWGGAKHEPVDADDDGRRMHPRSSFKAFLEVVKWRSVPWEDVEMDAIHSLQLILRGSLPDEDANRNNVRSIVKAPSDDMKKIQGLLELRTVTNEMVRLIETATAPVLAVDIAGNINGWNNKAAELTGLPVMEAIGRPLIDLVVTDSIEVVKQILDSALQGIEEQNMEIKLKTFHEHECNGPVILKVNSCCSRDLSEKVIGVCFVAQDLTRQKMIMDKYTRIQGDYVAIVKNPTELIPPIFMINDLGSCLEWNKAMQKITGIKREDAINKLLIGEVFTLHDYGCRVKDHATLTKLSILMNAVISGQDPEKLFFGFFDTDGKYIESLLTVNKRTDAEGKITGALCFLHVASPELQHALQVQKMSEQAATNSFKELTYIRQELRNPLNGMQFTCNLLKPSELTEEQRQLLSSNVLCQDQLKKILHDTDLESIEQCYMEMNTVEFNLEQALNTVLMQGIPLGKEKQISIERNWPVEVSCMYLYGDNLRLQQILADYLACALQFTQTAEGPIVLQVMSKKENIGSGMQIAHLEFRIVHPAPGVPEALIQEMFQHNPGVSREGLGLYISQKLVKTMSGTVQYLREADTSSFIILMEFPVAQLSSKRSKPSTKEYGAKSRGRQAHDHERESGNKASERPPELQPATAGDPSKSDADGGEQSTAIGSRSSIRSSPPPVTASDPACSRTPSQSSASALGVGGRSPQLSRLRGAIPCVHVAVSVARATCDYVRMAPSLRLRLVPRRSRQATPKYHTRRAQLSLPISLSRLPCSRHLTLFLLTLPASTVTHTHTHSTAALG

SEQ ID NO: 4199 - protein, 193 aa, Zea mays
SIDPSTTTTPLRRCAAAAAKKKQQQRCRVTADLLWPGPGSKGAPQDKEEDFEADFREFERGLGEDDVDSAGEGGDPEVQELPPPEPTRFAFATAAKAAVDGVMTTTPKDVQGDRAVKKRGRKNQYRGIRQRPWGKWTAEIRDPNKGVRVWLGSYYTVEEAARVYDAEARKIRGKKAKVSFPDDDATSTRHMPT

SEQ ID NO: 4200 - protein, 133 aa, Zea mays
MSDSEEHHFESKADAGASKTYPQQAGTVRKNGFIVIKNRPCKVVEVSTSKTGKHGHAKCHFVAIDIFNGKKLEDIVPSSHNCDIPHVNRTEYQLIDISEDGFVSLLTSDGNTKDDLRLPTDETLVAQVCLKTF

SEQ ID NO: 4201 - protein, 163 aa, Zea mays
MDAVMFGLETPLMAALQHLLDVPDGDAGAGGDSDNKTGGGATRTYVRDARAMAATPADVKELPGAYAFVVDMPGLGTGDIRVQVEDERVLVVSGERRREEREDAKYLRMERRMGKFMRKFVLPDNADVDKVAAVCRDGVLTVTVEKLPPPEPKKPKTIEVKVA

SEQ ID NO: 4202 - protein, 145 aa, Zea mays
  misc_feature (141)..(141): Xaa can be any naturally occurring amino acid
  unsure (1)..(145): unsure at all Xaa locations
MESGRLIFNAPGSGAGQMLFLDCGAGGGPGGGLFHRGGRPMLGLEEGRGVKRPFYTSPDELLEEEYYDEQLPEKKRRLTPEQVHLLERSFEEENKLEPERKTELARKLGLQPRQVAVWFQNRRARWKTKQLERDFDRLKAXFDAP

SEQ ID NO: 4203 - protein, 101 aa, Zea mays
MSASRSSSPNSMSQWSQKENKMFEEALAYYGEGTPNRWDKVSSAMGGIKSAEEVRCHYENLDYDVKMIESGNVPYPKYKTQGFWTRGKVHGTSKANWKHIT

SEQ ID NO: 4204 - protein, 81 aa, Zea mays
  misc_feature (17)..(17): Xaa can be any naturally occurring amino acid
  misc_feature (43)..(43): Xaa can be any naturally occurring amino acid
  misc_feature (54)..(54): Xaa can be any naturally occurring amino acid
  misc_feature (71)..(72): Xaa can be any naturally occurring amino acid
  unsure (1)..(81): unsure at all Xaa locations
PNCDIPHVNRTEDQLIXISKDGFVSLLTSDGNPKDDFRLPTDXTLVAQIKEGFXNGKDLFVAVQSAMGEEXXCALKDVGPK

SEQ ID NO: 4205 - protein, 288 aa, Zea mays
EPLGTSPDELLEEEYYDEQLPEKKRRLTPEQVHLLERSFEEENKLEPERKTELARKLGLQPRQVAVWFQNRRARWKTKQLERDFDRLKASFDALRADHDALLQDNHRLRSQVVSLTEKLREKEATEGDANGAAAALPAVGVVRASVADDVEEPEPEPEPEAEAAAFEERQVKSEDRLSTGSGGSAVVDAADALLYNGRIGGAAVDSSVESYFPGAEVQDQYHGCGTMGPVTHGAGGIQSDDDDGAGSDEGCSYYADEEAAAAFLSEHTHHADGDDEDAGQVSWWWMWN

SEQ ID NO: 4206 - protein, 167 aa, Zea mays
MPPPQSGMTLCRLPKATLGLPLSLPSLLYRPSLSLAARRTKAVSARASSSSPSPDSSFGSRMEDSVKKTVADNPVVIYSKSWCSYSMEVKSLFKRIGVQPHVIELDNLGAQGPQLQKVLERLTGQSTVPNVFIGGKHVGGCTDTVKLYRKGELASMLSDLDINIDNS

SEQ ID NO: 4207 - protein, 407 aa, Zea mays
SRPPPAMASNGIAPRDVCVVGVARTPLGGFLGALSSLPATKLGSIAIEAALKRANVDPALVQEVFFGNVLSANLGQAPARQAALGAGIPNTVVCTTVNKVCASGMKATMFAAQSIQLGINDIVVAGGMESMSNAPKYIAEARKGSRFGHDTLVDAMLKDGLWDVYNDCAMGMCAELCADNHALTREDQDAFAIQSNQRGIAARDSGAFAWEIVPIEVPVGRGKPPVLIEKDESLDKFDPAKLKKLRPSFKENGGTVTAGNASSISDGAAALVLVSGQKAQELGLQVLARIRGYADAAQAPELFTTTPALAIPKAISNAGLESSHVDFFEINEAFSAVALANQKLLGIPSEKINVHGGAVSLGHPLGCSGARILVTLLGVLREKGGKIGVAGVCNGGGGASALVLELA

SEQ ID NO: 4208 - protein, 156 aa, Zea mays
MDAVMFGLETPLMAALQHLLDVPDGDNKTGGGATRTYVRDARAMAATPADVKELPGAYAFVVDMPGLGTGDIRVQVEDERVLVVSGERRREEREDDAKYLRMERRMGKFMRKFVLPDNADVDKVAAVCRDGVLTVTVEKLPPPEPKKPKTIEVKVA

SEQ ID NO: 4209 - protein, 321 aa, Zea mays
  misc_feature (201)..(201): Xaa can be any naturally occurring amino acid
  unsure (1)..(321): unsure at all Xaa locations
MCGGAILSGLIPPSGVPAAAAAAKKKQQRRATADLLWPGPGKKGAPREEDFEADFREFERGLGEDDVDGAGDEVQELALPEPARLAFAAAVGAPRTAVDGVMTPKDGEGDMPTTANNSAANKRRRKNQYRGIRRRPWGKWAAEIRDPSKGVRVWLGTYSTAEEAARAYDAEARRIRGKKAKVNFRSPTRAATPLELAAAGXEWDWDDDTMTSDYASVFAPAAPSNVVPAWYTQGGPVSKRTRSSYGVAMPGGFDPETNYQYRPLPYVVESSPSSDGASTDDMDCLQMMRAGDVPQDGASGGGGGAGDIWSLDELLMAAGAY

SEQ ID NO: 4210 - protein, 157 aa, Zea mays
MAFASFLGRVLFASVFILSAYQEFNEYGVVGGPAAKAIRPKFDAFMHQVHSRVGFHLPEIDMKFLVAGAIALKGVGGILFIFGSSFGAFLLLLHQMIATPIFYDFYNHDNEDQQFFQLFNKFTQNMALAGALLFFIGMKNSIPRRQPKKNVPKTKTF

SEQ ID NO: 4211 - protein, 654 aa, Zea mays
MRTLERHFVLMMGWTMRGGGAGTGWFCRVHLLVAWSMTALDADNLGVGGSSGLTRQSAPVVVAKKSRVSNLMRLPMMNADEAATGLRDVAWHTNHLLTWDVFSTTSSSVIHLSSPFIMRRRTSGTAYCPVPSDGYVSDVVLDRDHSVLAYRFHSPGHGSVMSHHVDLGGPFEEVFWAFTPSCSADVPSLEGVMKSSSNPGRSSALVMNVDGVYMCSTARPLAPYELWVSPPNPRLLEMVVAVASCQSSSTPLSPYPSSPSLRSFIRDAPPYSTQTPPQVQTAGVGGGGGNGKISPAVLFIIVILAVIFFISGLLHLLVRILMRKQHGRGATMGESAPSPPRTGARAAAMDRQLQELFHLHDSGLDQAFIDALPVFAYREVIGGNKEPFDCAVCLCEFDGEDRLRLLPVCGHAFHLQCIDTWLLSNSTCPLCRGTLFVPGMTVDDLLFDDFDERLEEPLPEECEDGHQVSRQKPMDEEQPMAEKRVFPVRLGKFKSVANQGAIGGVVVNGNEAGIVSKEAGESSSSSLDARRCFSMGTYQYVLGVSELRVALQTGHGRNGASSRFKGRVAGLSSVNADIMEGKRICARSKGESFSVSKIWQWSSLKGKLPAPPDTCSDTGSLAWMKRNAAGDKSNMVSQQSFIKGSILTGLLYCT

SEQ ID NO: 4212 - protein, 330 aa, Zea mays
MESGRLIFNAPGSGAGQMLFLDCGAGGGPGGGLLHREGRGVKRPFYTSPDELLEEEYYDEQLPEKKRRLTPEQVHLLERSFEEENKLEPERKTELARKLGLQPRQVAVWFQNRRARWKTKQLERDFDRLKASFDALRADHDALLQDNHRLRSQVVSLTEKLREKEATEGDANGAAAALPAVGVVRASVADDVEEPEPEPEPEAEAAAFEERQVKSEDRLSTGSGGSAVVDAADALLYNGRIGGAAVDSSVESYFPGAEVQDQYHGCGTMGPVTHGAGGIQSDDDDGAGSDEGCSYYADEEAAAAFLSEHTHHADGDDEDAGQVSWWWMWN

SEQ ID NO: 4213 - protein, 420 aa, Zea mays
MAMRRAAQQAARFAMGPHVPHVIAPAERSLHASAASKKIVGVFYKGGEYADRNPSFVGCAEHALGIRGWLESQGHQYVVTDDKDGPNCGKRAVRARAHVTITTEQQAVCRVVLTRCRAGNPRAELEKHIADAHVLITTPFHPAYVTADRIARAKNLELLLTAGIGSDHVDLAAAAAAGLTVAEVTGSNTVSVAEDQLMRVLVLTRNFLPGHRQAVGGGWDVAAVAHRAYDLEGKTVGTAGAGRIGRLLLQRLKPFNCRLLYHDRLRIDPALEAEIGAQFEADLDAMLPKCDVVVINMPLTEKTRGMFDKERIARMKKGVIIVNNARGAIMDTQAVADACATGHIAGYGGDVWHPQPAPKDHPWRYMPNNAMTPHISGTTIDGQLRYAAGVKDMLERYFKGQDFPVQNYIVKEGKLAGQYQ

SEQ ID NO: 4214 - protein, 157 aa, Zea mays
MGFVSFVGRVLFVAAFLLSAYQEFNEFGADGGPAAKALQPKFNVFVKNISAHLGVAVPHIELKHVIAATIALKGLGSLLFILTSSLGAYLLLLYLALISPIVHDFYNYDTEKEEFARLFAKFTQDVALVGALLVFLGMKNSTPKRQGKKKAHKAKTN

SEQ ID NO: 4215 - protein, 392 aa, Zea mays
MLVTLMNLLRACWRPSSNRHARTGSDVTGRQDGLLWYKDAGQHVNGEFSMAVVQANNLLEDQCQIESGPLSFLDSGPYGTFVGVYDGHGGPETACYINDHLFQNLKRFASEQNTMSADVLKKAYEATEDGFFSVVTKQWPVKPQIAAVGSCCLVGVICGGMLYVANVGDSRVVLGRHVKATGEVLAVQLSAEHNVSIESVRKELQSMHPEDRHIVVLKHNVWRVKGLIQVCRSIGDAYLKKQEFNREPLYVKFRLREPFHKPILSSEPSINVQPLQPHDQFLIFASDGLWEHLTNQEAVDIVHSSPRSGCARRLIRAALQVAAKKREMRYSDLKKIDRGVRRHFHDDITVIVVFLDSSLVSKASTHRGPTLSLRGGGASAGLRSNTLAPTSM

SEQ ID NO: 4216 - protein, 350 aa, Zea mays
MGDSGGSVVSVDVERISFGGKEHHIQTNHGPVSVAVYGDHDKPALVTYPDIALNYMSCFQGLLFCPEAASLLLHNFCIYHISPPGHELGAAPISPNAPIPSVDDLADQVADVLDFFGLGSVMCFGVTAGAYILTLFAAKYRERVLGLILVSPLCKGPTWTEWLYSKVTSNLLYYYGMCGLVKECLLQRYFSKEVRGFSEVPESDIVQACKSLLEQRQSMNVWRFVQTMNERYDLSEHIKRLQCRTLIFVGDNSQFHTEAVHLTSKLDRRYCALVEVQACGSLVTEEQPHAMLIPMEYFLMGYGLYRPPSQVVECSPRSPLSPFCISPDLLSPESMGVKLKPIRTRVRLEV

SEQ ID NO: 4217 - protein, 348 aa, Zea mays
LTARALLVCSYVSGCSAVGCRRAILKANCYHEHGHDAHCDYDGNYYMLIFGGVQLLLSFIPDFHDMAWLSVVAAAMSFSYAFIGLGLGLARTIANGTIKGSITGVRMRTPMQKVWRVSQAIGDIAFAYPYSLILLEIQDTLKSPPAENKTMKRASMISIIVTTFFYLCCGCLGYAAFGSDAPGNLLTGFGLYGPYWLIDFANACIILHLLGGYQVYSQPIFQFAERLLAERFPDSGFVNGGSYTVRFACLRACRVNPLRVCLRTLYVASTTAVAVALPYFNEVLALLGALSFWPLAIYFPVEMYFIQRNVRRWSARWVVLQTFSVVCLLVSAFALVGSIEGLISKKLG

SEQ ID NO: 4218 - protein, 589 aa, Zea mays
MCGILAVLGCSDCSQARRARILACSRRLKHRGPDWSGLYQHEGNFLAQQRLAIVSPLSGDQPLFNEDRTVVVVANGEIYNHKNVRKQFTGAHSFSTGSDCEVIIPLYEKYGENFVDMLDGVFAFVLYDTRDRTYVAARDAIGVNPLYIGWGSDGSVWMSSEMKALNEDCVRFEIFPPGHLYSSAAGAGFRRWYTPHWFQEQVPRTPYQPLVLREAFEKAVIKRLMTDVPFGVLLSGGLDSSLVASVTKRHLVKTDAAEKFGTELHSFVVGLEGSPDLKAAREVADYLGTTHHEFHFTVQDGIDAIEEVIYHDETYDVTTIRASTPMFLMARKIKSLGVKMVLSGEGSDELLGGYLYFHFAPNREELHRETCRKVKALHQYDCLRANKATSAWGLEVRVPFLDKEFVDVAMGMDPEWKMYDKNLGRIEKWVLRKAFDDEEHPYLPEHILYRQKEQFSDGVGYNWIDGLKAFTEQQVTDEMMNSAAQMFPYNTPVNKEAYYYRMIFERLFPQDSARETVPWGPSIACSTPAAIEWVEQWKASNDPSGRFISSHDSAATDRTGDKLAVVNGDGHGAANGTVNGNDVAVAIAV

SEQ ID NO: 4219 - protein, 591 aa, Zea mays
MCGILAVLGVAEVSLAKRSRIIELSRRLRHRGPDWSGLHCHEDCYLAHQRLAIIDPTSGDQPLYNEDKTVVVTVNGEIYNHEELKAKLKTHEFQTGSDCEVIAHLYEEYGEEFVDMLDGMFSFVLLDTRDKSFIAARDAIGICPLYMGWGLDGSVWFSSEMKALSDDCERFITFPPGHLYSSKTGGLRRWYNPPWFSETVPSTPYNALFLREMFEKAVIKRLMTDVPFGVLLSGGLDSSLVASVASRHLNETKVDRQWGNKLHTFCIGLKGSPDLKAAREVADYLSTVHHEFHFTVQEGIDALEEVIYHIETYDVTTIRASTPMFLMSRKIKSLGVKMVISGEGSDEIFGGYLYFHKAPNKKEFHEETCRKIKALHLYDCLRANKATSAWGVEARVPFLDKSFISVAMDIDPEWKMIKRDLGRIEKWVIRNAFDDEERPYLPKHILYRQKEQFSDGVGYSWIDGLKDHASQHVSDSMMMNAGFVYPENTPTTKEGYYYRMIFEKFFPKPAARSTVPGGPSVACSTAKAVEWDASWSKNLDPSGRAALGVHDAAYEDTAGETPASADPVSDKGLRPAIGESLGTPVASATAV

SEQ ID NO: 4220 - protein, 130 aa, Zea mays
  misc_feature (22)..(22): Xaa can be any naturally occurring amino acid
  unsure (1)..(130): unsure at all Xaa locations
MGDSGGSVVSVDVERISFGGKXYGDHDKPALVTYPDIALNYMSCFQGLLFCPEAASLLLHNFCIYHISPPGHELGAAPISPNAPIPSVDDLADQVADVLDFFGLGSVMCFGVTAGAYILTLFAGKYRERV

SEQ ID NO: 4221 - protein, 332 aa, Zea mays
  misc_feature (242)..(242): Xaa can be any naturally occurring amino acid
  unsure (1)..(332): unsure at all Xaa locations
MAHSTTLALVIVVVLALTFGATVSVSAPVNKSCVSGSAGASVSIGYGGARASAGAGVSLGADAYRSTCPRAEEIIRAAVERAVAADPRMAASLLRLHFHDCFVNGCDGSVLLDDKPFFIGEKTAVPNANSIRGFEVIDAIKTELERECPDTVSCADLLAIAARDSVVVSGGPSWEIEVGRKDSRTASLQGANTNLPAPTSGVDTLVQKFRNVGLSTKDMVALSGAHTIGKARCTSFSARLAXLATPATFDNQYYINLLSGDGLLPSDQALASSAAVPGVEADVASLVATYAFDASVFFQDFAESMLRMGRLAPGVGTSGEVRRNCRVVNSSE

SEQ ID NO: 4222 - protein, 305 aa, Zea mays
  misc_feature (111)..(111): Xaa can be any naturally occurring amino acid
  unsure (1)..(305): unsure at all Xaa locations
MAPQSLDLGLSLGLGVAAFQPSLCHPAGNDAAEREASPTADERERRCSPAGSPTSSGSGKRVAAERSAGSGSGDEDDDGGARKKLRLSKDQAAVLEECFKTHHTLTPVRAXLRLHPFDPTSPFLAACRSADLILAVAGGGGGWLTKVLSVSALQKQKAALASRLGLRARQVEVWFQNRRARTKLKQTEVDCEYLRRWCEQLAEENRRLGKEVAELRALSAAPAPAAPLTALTMCLSCRRVSSSSCSSSPPNTHAHAAAAGTGRSVAAAAATTLPAHRQFLCGFRDGGAAALEYPSRGPSLRVPSF

SEQ ID NO: 4223 - protein, 259 aa, Zea mays
WTPAVPVRNVPYPPRPVEVTKKAQCLQLLQSSSPSYLLLSSLDAARDQLSQNRNIFDEPLAIASETKDKLARIPGISVLDLPCFASDFPAIDPLRITLSASNLLFFGYEADDILYEGHQIVSELVGTRAVTFAVNLGTRVQDAEKLVQSAKHLSEKHFFANSLKPVKENRVHGPLENISVHLSPREAFFTEKRRVKIEDSLGEICGELICPYPPGIPVLIPGEVVTHDSLSYLMSVRHQGIKISGAADAELNSILVCDL

SEQ ID NO: 4224 - protein, 369 aa, Zea mays
  misc_feature (197)..(197): Xaa can be any naturally occurring amino acid
  unsure (1)..(369): unsure at all Xaa locations
MAAVTAAAVSLPSSSSSPAAAKAKASASASPSSPCGHLQFPRRHGGPRAVRLRVQVSTTETAEAEPVKKLEKVSKKQEEGLVTNKYKPKEPYVGRCLLNTRITGDQAPGETWHMVFSTEGEVPYREGQSIGVIADGEDKNGKPHKLRLYSIASSALGDFGDSKTVSLCVKRLVYTNDQGEVVKGVCSNFLCDLKPGXAEVKITGPVGKEMLMPKDPNATIIMLATGTGIAPFRSFLWKMFFEEHEDYKYTGLAWLFLGVPTSDTLLYKEELEKMKEMAPDNFRLDFAVSREQTNAAGEKMYIQTRMAEYKEELWELLKKDNTYVYMCGLKGMEKGIDDIMLDLAAKDGINWLDYKKQLKKSEQWNVEVY

SEQ ID NO: 4225 - protein, 98 aa, Zea mays
TAQNKVQQLIDDNGVVVFSKSYCPYCNNTKRLLDGYGAKYATYELNQESDGDDLQQALLKITGQRTVPNVFINKQHIGGNSDFEAVIKNGKDGKKIEE

SEQ ID NO: 4226 - protein, 187 aa, Zea mays
MAAAARQRGTVKWFNDTKGFGFISPEDGSEDLFVHQSSIKSEGFRSLAEGEEVEFSVSEGDDGRTKAVDVTGPDGSFVRGGGGGYGGGGYGGGGYGGGGGGGGGCFKCGEPGHMARDCSSGGGGYGGGGGGGGGGCYNCGQAGHMARDCPSGGGGGGGRFGGGGGGGGDRSCYNCGEAGHIARDCPT

SEQ ID NO: 4227 - protein, 231 aa, Zea mays
MTGFARDFGQCADVAAVLRQHRRIRVQLQRISHRYRSFILYSLILVTASQFTALLAATRPHARVNFATAGELALCSMSLVTGLLVCLHSAAKITHKTQSITSVAAAWHADATVHAFDNDQENPDPDLPPTAGYLAPANAYRVAAGDESGSGGDDDDDSRSECSSLDDPKYVPFQANNISFQKRQALVTYLENNRAGITVYGFVVDRAWLHALFMIEFSLVMWLLGKTVGIS

SEQ ID NO: 4228 - protein, 180 aa, Zea mays
MYPAKPTVATASEPVTGMAAPPVTGIPISSPGPAVAASQWSSGLCACFDDCGLCCMTCWCPCVTFGRIAEVVDRGATSCAAAGAIYTLLACFTGFQCHWIYSCTYRSKMRAQLGLPDVGCCDCCVHFCCEPCALCQQYRELRARGLDPALGWDVNAQKAANNNAGAGMTMYPPTAQGMGR

SEQ ID NO: 4229 - protein, 190 aa, Zea mays
  misc_feature (68)..(68): Xaa can be any naturally occurring amino acid
  unsure (1)..(190): unsure at all Xaa locations
WSEWFYNKVMSNLLSYYGMCNVVKDILLQCYFRKGVRGGSAEPESDIVQACRSFLDQQQCINVWRFIXTINERKDLTENLKQLQCRTLIFVGENSQFHAEAVHMTAKLDRRYSALVEVQACGSVVTEKQPHAMLIPMEYFLMGYGLYRPSQINCSPRSPLNPFCISPELLSPESMGVKLKPIKTRANLKA

SEQ ID NO: 4230 - protein, 164 aa, Zea mays
MDAVMFGLETPLMAALQHLLDVPDGDAGAGGDNKTGGGGGATRTYVRDARAMAATPADVKELPGSYAFVVDMPGLGTGDIRVQVEDERVLVVSGERRREEREDDAKYLRMERRMGKFMRKFVLPDNADVDKVAAVCRDGVLTVTVEKLPPPEPKKPKTIEVKVA

SEQ ID NO: 4231 - protein, 663 aa, Zea mays
MDRARGSAFLLGVLLAGSLFAFSVAKEETKKLGTVIGIDLGTTYSCVGVYKNGHVEIIANDQGNRITPSWVAFTDSERLIGEAAKNQAAVNPERTIFDVKRLIGRKFADKEVQRDMKLVPYKIINKDGKPYIQVKIKDGENKVFSPEEISAMILGKMKDTAEAYLGKKINDAVVTVPAYFNDAQRQATKDAGVIAGLNVARIINEPTAAAIAYGLDKKGGEKNILVFDLGGGTFDVSILTIDNGVFEVLATNGDTHLGGEDFDQRIMEYFIKLIKKKYSKDISKDNRALGKLRREAERAKRALSNQHQVRVEIESLFDGTDFSEPLTRARFEELNNDLFRKTMGPVKKAMEDAGLEKSQIHEIVLVGGSTRIPKVQQLLRDYFDGKEPNKGVNPDEAVAFGAAVQGSILSGEGGDETKDILLLDVAPLTLGIETVGGVMTKLIPRNTVIPTKKSQVFTTYQDQQTTVSIQVFEGERSMTKDCRLLGKFDLNGIAPAPRGTPQIEVTFEVDANGILNVKAEDKGTGKSEKITITNEKGRLSQEEIDRMVREAEEFAEEDKKVKERIDARNQLETYVYNMKNTVGDKDKLADKLEAEEKEKVEEALKEALEWLDDNQSAEKEDYEEKLKEVEAVCNPIVSAVYQRSGGAPGGDADGGVDDDHDEL

SEQ ID NO: 4232 - protein, 318 aa, Zea mays
MAVLWKGSSSSPCDWPEATVTTVSDADDDAAAAAELRRGPWTVEEDAVLAGHVAAHGEGRWNELACAAGLRRTGKSCRLRWLNYLRPGVRRGGFTPREQLLVLDLHSRWGNRWSRIAAHLPGRTDNEVKNYWRTRVQKHARQLGCAVGSRQFNDAVRNLWVPRLLERIHADDSAAAAAADADADASRCCYSASPSHDELSSSHPAHRNAAPITGDDCARAPSPDVSSVVTGSSWSREASPTSQLFKSSSSTVEGCSTSTETEQCQNGCSSSATSVDMFDESWSELLARAIHDDDAEFGSGETGDSWWSLEDIWEQPLY

SEQ ID NO: 4233 - protein, 913 aa, Zea mays
  misc_feature (726)..(726): Xaa can be any naturally occurring amino acid
  unsure (1)..(913): unsure at all Xaa locations
MNPDNFTHKTNEAIVGAHEIAVEAGHAQLTPLHLAAVLAADKGGILRQAITGASGGDGAAGDSFERVLSSSLKKLPSQSPPPDSVPASTALIKVIRRAQSAQKKRGDSHLAVDQLLLGLLEDSQISDCLKEAGVSAARVRAELEKLRGGEGRRVESASGDTNFQALKTYGRDLVEQAGKLDPVIGRDEEIRRVVRILSRRTKNNPVLIGEPGVGKTAVVEGLAQRIVRGDVPSNLLDVRLIALDMGALVAGAKYRGEFEERLKAVLKEVEEAEGKVILFIDEIHLVLGAGRTEGSMDAANLFKPMLARGQLRCIGATTLEEYRKYVEKDAAFERRFQQVFVAEPSVPDTVSILRGLKEKYEGHHGVRIQDRALVVAAQLSARYIMGRHLPDKAIDLVDEACANVRVQLDSQPEEIDNLERKRIQLEVELHALEKEKDKASKARLIEVRKELDDLRDKLQPLTMKYRKEKERIDEIRKLKQRREELQFTLQEAERRMDLARVADLKYGALQEIDAAISKLESETGENLMLTETVGPEQIAEVVSRWTGIPVTRLGQNDKERLVGLADRLHQRVVGQTEAVSAVAEAVLRSRAGLGRPQQPTGSFLFLGPTGVGKTELAKALAEQLFDDENLLVRIDMSEYMEQHSVARLIGAPPGYVGHEEGGQLTEQVRRRPYSVILFDEVEKAHVAVFNTLLQVLDDGRLTDGQGRTVDFRNTVIIMTSNLGAEXHLLAGMVGKNSMKVARDLVMQEVRRHFRPELLNRLDEIVIFDPLSHEQLRKVARLQMKDVAVRLAERGIALAVTDAALDIILSLSYDPVYGARPIRRWIEKRVVTQLSKMLIQEEIDENCTVYIDAAPGKDELVYRVDRSGGLVNAETGMKSDILIQVPTSSTRSDAAQAVKKMRIMEEDEDGMDEE

SEQ ID NO: 4234 - protein, 345 aa, Zea mays
MAESSEPPVVLLHRPPSLTFMDEILTREFRTLITDTSSSESLPSFLPRHASSARAFVITGRLPVTEELLSHLPSLQILVCTSVGIDHIDLAACKRRGIVITNAGNAFSDDVADCAVGLLISVLRRIPAADRYVRAGNWAKFGDFQLGSKVSGKRVGIVGLGSIGSFVAKRLESFGCVISYNSRSQKQSSPYRFYSDILSLAENNDVLVLCCSLTDETHHIVNREVMELLGKDGVVINVGRGKLIDEKEMVKCLVDGVIGGAGLDVFENEPAVPQELFGLDNVVLSPHFAVATPGSLDNVAQIALANLKAFFSNRPLLSPVQLDLERTSLEGGPGTQFALKGGGHN

SEQ ID NO: 4235 - protein, 155 aa, Zea mays
EMKETPPFDFEQPKIVQLQCSDVVPADCAMSNTGERADSSLCIPVRQVRSSISHPLSGLTGESSAGDHQDCGVSPILLMGEPPWYSPGPEGSLAGGSRDSALTRYKEKKKKRMFDKKIRYASRKARADVRKRVKGRFIKAGEAYDYDPLSQTRSY

SEQ ID NO: 4236 - protein, 370 aa, Zea mays
  misc_feature (207)..(207): Xaa can be any naturally occurring amino acid
  unsure (1)..(370): unsure at all Xaa locations
MALLSDLINLDLSGRTGKIIAEYIWVGGSGMDVRSKARTLSGPVDDPSKLPKWNFDGSSTGQAPGDDSEVILCPRAIFRDPFRKGQNILVMCDCYEPNGEPIPSNKRHGAAKIFSHPDVKAEEPWFGIEQEYTLLQKDTKWPLGWPLGGYPGPQGPYYCAVGADKSYGRDIVDAHYKACLYAGIDISGINGEVMPGQWEFQVGPAVXGVSAGDQLWVARYILERITEIAGVVVSFDPKPIPGDWNGAGAHTNYSTKSMRSDGGYEVIKKAIGKLGLRHREHIAAYGDGNERRLTGRHETADINTFVWGVANRGASVRVGRDTEKEGKGYFEDRRPASNMDPYVVTSLIAETTMLWEPSHSNGDGKGAAAP

SEQ ID NO: 4237 - protein, 276 aa, Zea mays
  misc_feature (244)..(244): Xaa can be any naturally occurring amino acid
  unsure (1)..(276): unsure at all Xaa locations
LYRKLGTRKLGPLEGYSRAAAVERHCAGTLHRDVCASTLGSIPDLARKPAREVISAVVARAASAVRASASNCSAYLRRPAGALRVRDRLALADCVELLGHTLAQLGTAEAELSAGNFTAAEAEVESESLAAVQTVLSAALTNQYTCLDGFAGPSASEDGRVRPYIQGRMYHVAHLVSNSLAMLRRLPQRRRRRQGRGALELEGYGRVRRGFPSWVSGADRRRLQQQQVVPGPDLVVAKDGSGNXMFVGDGMWRTVIKASRNVVDNSTTFRSATLGQ

SEQ ID NO: 4238 - protein, 365 aa, Zea mays
MARFRDSNGGGLARDDGGATAGESNQREKGREGTNLAPEASREMARTQKNKATAHHLGLLKQEGVKFGSFDILTDNDVREGMKKFSNWPTVPQLYCKGELLGGCDIVIAMHDSGELKDVFEEHNIPLKPQGSKNEEAGQPESATEKGGAVAEPIGLTDAQKARLESLINSSPVMVFIKGTPEEPRCGFSGKLVHILKQENIPFSSFDILSDDEVRQGLKVLSNWPSYPQLYIKGELVGGSDIVMEMHKSGELKKVLSEKGVIPKESLEDRLKSLVSSAPVMLLMKGTPDAPRCGFSSKVVNALKKEGVSFGSFDILSDEEVRQGLKTYSNWPTFPQLYYKSELIGGCDIVLEMEKSGDLKSTLSE

SEQ ID NO: 4239 - protein, 157 aa, Zea mays
MGFVSFVGRVLFVAAFLLSAYQEFNEFGADGGPAAKALQPKFNVFVKNISAHLGVAVPHIELKHVIAATIALKGLGSLLFILSSSLGAYLLLLYLALITPIVHDFYNYDTEKEEFARLFAKFTQDVALVGALLVFLGMKNSIPKRQGKKKAHKAKTN

SEQ ID NO: 4240 - protein, 183 aa, Zea mays
  misc_feature (111)..(111): Xaa can be any naturally occurring amino acid
  misc_feature (131)..(131): Xaa can be any naturally occurring amino acid
  misc_feature (157)..(157): Xaa can be any naturally occurring amino acid
  misc_feature (171)..(171): Xaa can be any naturally occurring amino acid
  unsure (1)..(183): unsure at all Xaa locations
MSANVGESTSGVSSSDAAGGSFECNICFELPQEPIVTLCGHLFCWPCLYRWLHIHAHSPECPVYKALVEEDKLVPLYGRGKDRVDPRSKNMPEGEIPHRPTGQRPATAGNXAFSAAFGGLFPMLSFQVHGXFPDAAAYAQPAGFHYGYGHGHGHGGXHGGHMGTAQAHGRXPTGTGWGNNSSR

SEQ ID NO: 4241 - protein, 193 aa, Zea mays
MAAQEQEHEKQQAKTSTTSSLPSSSERSSSSAPNNLREGAEAAGAGVESDEEIRRVPELGGASASASASSGAGKEDGARAVAAGAQGHPPAAGKKRGRAPGDKEQNRLKRLLRNRVSAQQARERKKAYLTELEARAKDLELRNAELEQRVSTLQNENNTLRQILKNTTAHASKRSGGGGKGGDGGKKHHFAKS

SEQ ID NO: 4242 - protein, 138 aa, Zea mays
MAAAARQRGTVKWFNDTKGFGFISPEDGSEDLFVHQSSIKSEGFRSLAEGEEVEFSVSEGDDPGHMARDCSSGGGGYGGGGGGGGGGCYNCGQAGHMARDCPSGGGGGGGRFGGGGGGGDRSCYNCGEAGHIARDCPT

SEQ ID NO: 4243 - protein, 368 aa, Zea mays
MESGRLIFNAPGSGAGQMLFLDCGAGGGPGGGLFHRGGRPMLGLEEGRGVKRPFFTSPDELLEEEYYDEQLPEKKRRLTPEQVLLLERSFEEENKLEPERKTELARKLGLQPRQVAVWFQNRRARWKTKQLERDFDRLKASFDALRADHDALLQDNNRLRSQVINHLQDSNQASFLPFVWLWPRSKHVADRRLHDCGFIKVVSLTEKLQEKEDATEGGATADTAAPAVDVEASLADDVEEPAEPAATFEVLQEVKSEDRLSTGSGGSAVVDADALLYGRFAAAVDSSVESYFPGGEDHYHDCGTMGPVNHGAGGGIQSDDDGAGSDEGCSYYADEAAAAAAAFFAGPAPPPPADEDEDAGQISWWMWN

SEQ ID NO: 4244 - protein, 320 aa, Zea mays
EASGTETRLLPRLPPMAPPLAAVSSSSPLFSPSSSRPIRRCHAPPPSISFGRSPTAAAAAAAAAAESSVSTLLEVRGLTASVKETGQQILAGVDLTIREGEIHAIMGKNGSGKSTLTKVLVGHPHYEVTGGTILFKGEDLVDMEPEDRSLAGLFMSFQAPIEIPGVSNFDFLLMAVNARRERSGLPALGPLEFYSVVSPKVDALKMDPKFLDRNVNEGFSGGERKRNEILQLSVIGADLALLDEIDSGLDVDALEDVANAVNGLLTPQNSVLMITHYQRLLDLIKPSYVPIMENGKIIKTGDSSIATQINEGGFKSIALV

SEQ ID NO: 4245 - protein, 638 aa, Zea mays
MATAATAAAALTGATTATPKSRRRAHHLATRRALAAPIRCSALSRATPTAPPATPLRPWGPNEPRKGSDILVEALERCGVRDVFAYPGGASMEIHQALTRSPVIANHLFRHEQGEAFAASAYARSSGRVGVCIATSGPGATNLVSALADALLDSVPMVAITGQVPRRMIGTDAFQETPIVEVTRSITKHNYLVLDVDDIPRVVQEAFFLASSGRPGPVLVDIPKDIQQQMAVPAWDTPMSLPGYIARLPKPPATEFLEQVLRLVGESRRPVLYVGGGCAASGEELCRFVELTGIPVTTTLMGLGNFPSDDPLSLRMLGMHGTVYANYAVDKADLLLAFGVRFDDRVTGKIEAFAGRAKIVHIDIDPAEIGKNKQPHVSICADVKLALQGMNTLLEGSTSKKSFDFGSWHDELDQQKREFPLGYKIFNEEIQPQYAIQVLDELTKGKAIIATGVGQHQMWAAQYYTYKRPRQWLSSAGLGAMGFGLPAAAGAAVANPGVTVVDIDGDGSFLMNIQELAMIRIENLPVKVFVLNNQHLGMVVQWEDRFYKANRAHTFLGNPENESEIYPDFVAIAKGFNIPAVRVTKKSEVHAAIKKMLEAPGPYLLDIIVPHQEHVLPMIPSGGAFKDMILDGDGRTVY

SEQ ID NO: 4246 - protein, 313 aa, Zea mays
  misc_feature (79)..(79): Xaa can be any naturally occurring amino acid
  misc_feature (97)..(97): Xaa can be any naturally occurring amino acid
  unsure (1)..(313): unsure at all Xaa locations
RHEAAFPCPVLKINNGLPSPRALRQPPPPTRESHVSPIPPLRLSRVQAIQAARALGVVRPDRAAAMGSNGIAPRDGCGXGGARTPLGGFLGALSSLXGTKVGSIAIEAALKRANVDPALVQEVFFGNVLSANLGQAPARQAALGAGIPNTVVCTTVNKVCASGMKATMFAAQSIQLGINDIVVAGGMESMSNAPKYIAEARKGSRFGHDTLVDAMLKDGLWDVYNDCAMGMCAELCADNHALTREDQDAFAIQSNQRGIAARDSGAFAWEIVPIEVPVGRGKPPVLIEKDESLDKFDPAKLKKLRPSFKENGG

SEQ ID NO: 4247 - protein, 419 aa, Zea mays
SGRDHCAWRGVACDAASFAVVGLNLSNLNLGGEISPAIGQLKSLQFVDLKLNKLTGQIPDEIGDCVSLKYLDLSGNLLYGDIPFSISKLKQLEDLILKNNQLTGPIPSTLSQIPNLKTLDLAQNKLTGDIPRLIYWNEVLQYLGLRGNSLTGTLSPDMCQLTGLWYFDIRGNNLTGTIPEGIGNCTSFEILDISYNQISGEIPYNIGYLQVATLSLQGNRLIGKIPEVIGLMQALAVLDLSENELVGPIPPILGNLSYTGKLYLHGNKLTGHIPPELGDMSKLSYLQLNDNELVGTIPAELGKLTELFELNLANNNLEGHIPANISSCSALNKFNVYGNRLNGSIPAGFQKLESLTYLNLSSNSFKGQIPSELGHIVNLDTLDLSYNEFSGPVPPTIGDLEIPGIPDRYQPAFLYKLVL

SEQ ID NO: 4248 - protein, 295 aa, Zea mays
MAMMGFDEDLDQVLAAMGPADSSATSSAPNAAAPAPLAVVPAGSSDDEEAAAADSADDLRRGPWTVDEDILLVNYIAAHGEGRWNSLARSAGLKRTGKSCRLRWLNYLRPNVRRGNITAEEQLLILDLHSRWGNRWSKIAQQLPGRTDNEIKNYWRTRVQKHARHLRCDVNSAHFRHIVRHVWMPRLRERAQAGGVQAPATTTASAPPACYNYCGSQHLLTLTPRRHTATPTTNDQGYEQTTTDDDVFAGSTTSELLVTATGGPDDEYSSMIGLQLQDFGFEDFEYGLWSLDDLC

SEQ ID NO: 4249 - protein, 146 aa, Zea mays
  misc_feature (96)..(96): Xaa can be any naturally occurring amino acid
  misc_feature (126)..(127): Xaa can be any naturally occurring amino acid
  unsure (1)..(146): unsure at all Xaa locations
AYGRAPQLVPEEEDDLWHAYNLIAIGDSLQAVTVRKVLREVASGGRDAERVKLKLEIVVESVDYDKEGSVLRVRGKNITENDHVKIGQFHTLELEXLKRPFVLRKEIWDWLALETIQQACDPAASXXDLAVILMQEGLAHLFLIGK

SEQ ID NO: 4250 - protein, 87 aa, Zea mays
MPQVHFRIAKEQLLRNRVSAQQARERKKAYLSELEVRVKELEKRNSELEEKLSTLQNENQMLRQILKNTTVNNRRGPGSSSAGGDSQ

SEQ ID NO: 4251 - protein, 177 aa, Zea mays
MCDAAPRYRGVRKRPWGRFAAEIRDPAKRARVWLGTFDSAEAAARAYDVAARALRGPLARTNFPALATTSRRPAPTCSSGSTVESSSGPRAGDPRARAAHRGRAAAKPRPPRQAPPPPTDADCHSDCASSASVVDDGDDASTVRSRARPSLDLNLPAPLDLDGGHDLGFCTDLRLCL

SEQ ID NO: 4252 - protein, 128 aa, Zea mays
  misc_feature (34)..(37): Xaa can be any naturally occurring amino acid
  misc_feature (40)..(41): Xaa can be any naturally occurring amino acid
  unsure (1)..(128): unsure at all Xaa locations
MASSLSSILFKGIAARSLTSPLTRSSYYGMRNFXXXXNDXXTHDDFKPANKLESSGISLSDVIEQDVKDNPVMIYMKGVPDFPQCGFSSLAVRVLKHYDVPLSARNILEDPELKNAAKAFSIWSTFSQ

SEQ ID NO: 4253 - protein, 160 aa, Zea mays
  misc_feature (44)..(44): Xaa can be any naturally occurring amino acid
  misc_feature (114)..(114): Xaa can be any naturally occurring amino acid
  unsure (1)..(160): unsure at all Xaa locations
PRVRPRVRPRVRARGLKSWAVMKKDAANLGLRFFLKVFEIAPSXEQMFSFLRDSDVPLEKNPKLKTHAMSVFVMTCEAAAQLRKAGKVTVRETTLKRLGATHLRYGVADGHFEXVTGFALLETIKEALPADMWSLEMKKAWAEAYSQLVAAIKREMKPDA

SEQ ID NO: 4254 - protein, 484 aa, Zea mays
MDKSGGEAAAAAAAADDVERRGGDYEQDEHERRGTVWTATAHIVTAVIGSGVLALAWSVAQLGWVAGPLALAGFACVTYYTSTLLAGAYRAPHPVTGHRNRTYMDAVRSYLSPREVFMCGVAQYVNLWGTMVGYTITATISMAAIRQADCLRRDGAGAGARCDAPGTVLMLAFSVVQVVLSQFPGLEHITWLSVVAAAMSFAYSFAGLGLSVGHWVSRGGGGLGGRVAGAAAASSTRKLWNVLLALGNIAFAYTFAEVLIEIQDTLKSPPPENRTMKKAAMYGIGATTIFYISVGCAGYAAFGSNAPGNILAAGGLGPLWLVDIANMCLILHLIGAYQVYAQPVFASVERWAASRWPEAKFMSSAYTVSVSIPLLQRGSVTVAPHKLVLRTAIVGATTAVALAIPFFNAVLGLLGAFSFWPLTVYFPISMHIAQGKIARGTKWWCLLQALSMVCLVISVAVGVGSVTDIVDSLKASSSPFKIVG

SEQ ID NO: 4255 - protein, 194 aa, Zea mays
MAASATAARPLAGTAVPLPLSTRTRPARVALLSLIPPAPAQRLALRRGAWLSPPERSRSVRCLAAMSPEMRATLDKVVGSSKVVLFMKGTKDFPQCGFSHTVVQILRSLDVPFETLDVLANEALRQGLKEYSSWPTFPQLYIDGEFFGGCDITVGLEVSLKAMKNASQQLLHNPNPTVEPPTAATASRVPYKTL

SEQ ID NO: 4256 - protein, 446 aa, Zea mays
  misc_feature (307)..(307): Xaa can be any naturally occurring amino acid
  unsure (1)..(446): unsure at all Xaa locations
MNYISFLHKELVWGFFRNACHIVRQLGEVHVTHKSGEPYDSWDLEHLASEPSFAMVDKVPFQREDYPGYNQKRGDGSEGSLGGSMKELGLPVPGFYRTTDGKDTEEQSHCSPSWSSEGNLKYTLIFILELLPMQKGVNILKQEGVKFGSFDILTDNDVREGMKKFSNWPTVPQLYCKGELLGECDIVIAMHDSGELKDVFEEHNIPLKPQGSKNEEAGQPESATEKGGAVAEPIGLTDAQKARLESLINSSPVMVFIKGTPEEPRCGFSGKLVHILKQENIPFSSFDILSDDEVRQGLKVLSNWPSXYPQLYIKGELVGGSDIVMEMHKSGELKKVLSEKGVIPKESLEDRLKSLVSSAPVMLLMKGTPDAPRCGFSSKVVNALKKEGVSFGSFDILSDEEVRQGLKTYSNWPTFPQLYYKSELIGGCDIVLEMEKSGELKLTLSE

SEQ ID NO: 4257 - protein, 428 aa, Zea mays
  misc_feature (288)..(288): Xaa can be any naturally occurring amino acid
  misc_feature (382)..(383): Xaa can be any naturally occurring amino acid
  misc_feature (406)..(406): Xaa can be any naturally occurring amino acid
  misc_feature (415)..(415): Xaa can be any naturally occurring amino acid
  misc_feature (419)..(419): Xaa can be any naturally occurring amino acid
  misc_feature (421)..(421): Xaa can be any naturally occurring amino acid
  unsure (1)..(428): unsure at all Xaa locations
MGKNMRIKTAPKANRVPLLGDGETSRALSDLEEGSDVQPANVGFCRVIKLAKHDAGKLVLATAALLVASLSNLLVPKYGGKIIDIVSRDVRRPEDKAQALEDVKGTILYIVTIVLVGSVCTALRAWLFNSASERVVARLRKDLFSHLINQEIAFFDVTRTGELLSRLSEDTQIIKNAATTNLSEALRNVTTTAIGLGFMFSTSWKLTLLALVIVPVISVAVRRFGRFLRELSHQTQAAAAVASSIAEESFGAIRTVRSFAQEYHEISRYGEKVEETLKLGLKQAKVVXGLFSGGLNAASTMSVVIVVIYGANLTINGYMTTGSLTSFILYSLTVGSSVSALSGLYTTVMKASGASRRVFQLLDRVSSMTNSGDKCPINEKDXXEVELDDVWFAYPSRPSHMILKGXTLKLAPVQXLHLXGXSGGGKTQ

SEQ ID NO: 4258 - protein, 219 aa, Zea mays
GQWSAVGRTAVTTTLAGSTAALTTLFGKRLQTGHWNVVDVCNGLLGGFAAITAGCSVVDPWAAVICGFVSAWVLIGLNALAARLRFDDPLEAAQLHGGCGAWGVLFTGLFARREYVEQIYGTPGRPYGLFMGGGGRLLAANVVMILVIAAWVSVTMAPLFLALNKMGLLRVSAEDEMAGMDQTRHGGFAYAYHDDDLSLSSRPKGMQSTQIADAASGEF

SEQ ID NO: 4259 - protein, 334 aa, Zea mays
GRVPRQTAVASHALRLVPCSARPNFAAGGSKDSGSFECNICLDLAQDPVVTLCGHLFCWPCLYEWLHVHAHSQECPVCKADDEEGKLVPLYGSWWQLRRTPCKVASRSGGLQQATAAASHPLRLVPCSASKDSGSFECNICLDLAQDPVVTLCGHLFCWPCLYEWLHVHAHSQECPVCKAVVEEGKLVPLYGRGGSSAVPRARSVAGVEIPSRPTGQRPSTAPQPDHNNHYPHQNPWFNGAGAPPVANGRWGSYTFSAAIGGLFPLLSFQVHGFPQATAYGPAAGFPYGYGHSFHGWHGHGFPRQAPQGQQVDAYLKVLLLAVGVLVIASLIAF

SEQ ID NO: 4260 - protein, 340 aa, Zea mays
MCGGAILSGFIPPSGVAAAAAAAKKQQQQQQRCRVTADLLWPGPGSKGAPQDKEEDFEADFREFERGLGEDDVDSAGEGGDPEVQELPPPEPTRFAFATAAKAAVDGVMTPPPKDVQGDRAVKKRGRKNQYRGIRQRPWGKWAAEIRDPNKGVRVWLGTYNTAEEAARAYDAEARKIRGKKAKVNFPDDATGTRHRPTTDEIFNNLKNDDNNNNDDLFAMFAFGDNKKKVPAAKPAAAEGGSGSGSFLVPAPAVAVVPGNKRRSSATNTMLSVSDDQRSNSYGSGSSDLVGSWSWDDDAAAALEYPSRGPKLTRTASWRRDERARGSCIRHPLSFCLSYI

SEQ ID NO: 4261 - protein, 164 aa, Zea mays
MDAVMFGLETPLMAALQHLLDVPDGDAGAGGDSDNKTGGGATRTYVRDARAMAATPADVKELPGAYAFVVDMPGLGTGDIRVQVEDERVLVVSGERRREEREDDAKYLRMERRMGKFMRKFVLPDNADVDKVAAVCRDGVLTVTVEKLPPPEPKKPKTIEVKVA

SEQ ID NO: 4262 - protein, 374 aa, Zea mays
MCGGAILAELREPAPRRLTERDIWQQKKKPKRGGAGGRRSFAAEDDEDFEADFEDFEADSGDSDLQLGEGVDYDAIEIKPFVAKSTFSREAMLLRFDSFLLADGLSTMTTAGYDAPAARLAKRKRKNQYRGIRQRPWGKWAAEIRDPQKGVRVWLGTFNSPEEAARAYDAEARRIRGKKAKVNFPDAPAVGQKCRSSSASAKALKSCVEQKPIVKTDMNILANTNAPFYQSVNYASNNPFVPAMNSTVSFEDPIMNLHSDQGSNSLGCSDLGWENDTKTPDITSIAPIPTIAEGDESVFVNSNSNSSMVPPVLENNAVDLTDGLTDLESYMRFFMDGGASDSIDSLLNLDGSQDLGSNMDLWTFDDMPIAGDFF

SEQ ID NO: 4263 - protein, 271 aa, Zea mays
  misc_feature (243)..(243): Xaa can be any naturally occurring amino acid
  unsure (1)..(271): unsure at all Xaa locations
KNGFVQDLDDESGGMRGSGGRGTKRSRTAEVHNLSERRRRDRINEKMRALQELIPNCNKIDKASMLDEAIEYLKTLQLQVQMMAMGSGLCIPPMLLPRAMQLQIPSIAHFHHLGMGLGYGMGVLDMNSTAAVPFQPIPGAHYTCPMIPGTPPQGLGIGMPGTNTMPVFGLPGQAIHPSASSVQPFPSLAGLPVRPNLAPQVPAVMANMVQEQQQGVATQQQQSLNNEAQQKANTGDPQILQKXDEEIFASNQFLDGGGNRTNTIGRNEAET

SEQ ID NO: 4264 - protein, 172 aa, Zea mays
MCGLVKECLLQRYFSKEVRGFSELPESDIVQACKSLLEQRQSMNVWRFVQTMNERYDLSEHIKRLQSRTLIFVGENSQFHADAVHMTTKLDRRYCALVEVQACGSLVTEEQPHAMVIPMEYFLMGYGLYRPSQQESSPRSTLSPFCISPELLSPESMGVKLKPIKTRISLNV

SEQ ID NO: 4265 - protein, 536 aa, Zea mays
  misc_feature (216)..(216): Xaa can be any naturally occurring amino acid
  unsure (1)..(536): unsure at all Xaa locations
VNYRTSLYKKAGWYRSGIPGMPVIGSLGALAGALPPHRALAALAARHGPLMHLRLGSYHAVVASSADTARLVLKVHDLAFADRPRTAAGEVASYGYLGIVHTPYGAYWRMARKLCATELFSARRVDSFERVRAQEMRALARGLFECAGRGAVAVREHVAGATLGNWARMAVGESWSDCSGSPEPEAFRRTLDEAFAVTGQVEHVGEWVPWLIWLDXQGCVRLMKRLGAQYDRFFEQILDDHDHKKTRRERGRPGAGDSAADDDLVDVLLRLVEEDEDRPETTEASRLTRDGVKAFVQDIVAGGTESSAVTIEWAMSELLRRPDALRAATAELDRVIGHGRWVTERDLPDLPYIDAVVKETMRLHPVGPLLVPHHAREHTVVAGYDVPAGARVLVNVWAIARDPASWPDAPDAFRPERFLNGSSGASVDVRGAHFELLPFGAGRRMCPAHGLAMKLVTAGVANLVHGFAWRLPDGMAPEDVSMEELFGLSTRRKVPLVAVAEPRLPAHLYTNVTPPQQVAGSTIANLSTRPEYKLVF

SEQ ID NO: 4266 - protein, 640 aa, Zea mays
MAEGSWTPTAELPLRQDPAVDDDLPQVVVQEKQHGGGAAARTAMATATATRDGSVGWSGKPCRRDRSGGWFAGFLMLANQALVTFAVNCVGTNLVTFMSVVMRLDNADAANKANNWAGTTYVFSIVGALVSDSYWGRYKACTIFQLIFLAGLVELAVACHVFLDKSCHFGGGGGGRQEHCRPPTTAQSLVFYVSIYQIALGNGAYQPAVTTFGADQFDETDARERRSKAAFFGYFFVANNLGGVLAVTALAYMEDEGQWVLAFWIATAAALLGFLLFAVGTIRYRHFLPSGNAVVSVCQVVVAAVRNRRVRATVRAQDMYDPDTDGDRGKKGVRKMVHTPEYRCLDKAAVIKDPASAFRAPAGQPQGHSSSKPNPWRLCTLTQVEELKCILRLVPIWLCSILYSTSYSQMSSVFIEQAQTMDDSLSKLTIPPAGMDVFEILGVTAFVFIYRFCIVRVMAKISHEPTELQRMGTGLVISAAAMVASGVVEQQRLARATAGVDASSSLSILWQIPQYLLIGASEVFMYVTMTEFFNDQLPEGLRSLGSAMSVASMSAGSFASSLLVTLVMAITCRGGRPGWIPQDLNKGHVDWFFYLIAALNAVDLLAFVVFAKRYRPAPVIIHGEDETGGVEKAQDAEECI

SEQ ID NO: 4267 - protein, 286 aa, Zea mays
MAPPLAAVSSSSPLFSPSSSRPIRRCHAPPPSISFQTRGRSPTAAAAAESSVSTLLEVRGLTASVKETGQQILAGVDLTIREGEVLVGHPHYEVTGGTILFKGEDLVDMGPEDRSLAGLFMSFQAPIEIPGVSNFDFLLMAVNARRERSGLPALGPLEFYSVVSPKVDALKMDPKFLDRNVNEGFSGGERKRNEILQLSVIGADLALLDEIDSGLDVDALEDVANAVNGLLTPQNSVLMITHYQRLLDLIKPSYVHIMENGKIIKTGDSSIATQINEGGFKSIALV

SEQ ID NO: 4268 - protein, 204 aa, Zea mays
EMNSLLPFRKSVHFRPGRGAPGMGQHQAGAKGEDVVVKVPPGTVVRPSEGGGGLFELMKPGQRAVLFPGGRGGRGNGGFNSGGAWAGTNKVPRIAEKGEKGPEMWLELELKLVADVGIVGAPNAGKSTLLSVISAAKPAIANFPFTTLLPNLGVVSLDFDATMVVGDLPGLLEGAHRGYGLGHEFLRHSEGCSVLVCSLFPSFL

SEQ ID NO: 4269 - protein, 478 aa, Zea mays
MDKSGGEAAAAAAAADDVERRGGDYEQDEHERRGTVWTATAHIVTAVIGSGVLALAWSVAQLGWVAGPLALAGFACVTYYTSTLLAGAYRAPHPVTGHRNRTYMDAVRSYLSPREVFMCGIAQYVNLWGTMVGYTITATISMAAIRQSNCFRRSGAGAHCDAPGTVLMLAFGVVQVVLSQFPGLEHITWLSVVAAVMSFAYSFIGLGLSVGQWVSHGGGLGGRIAGAAAASPTRKLWNVLLALGNIAFAYTFAEVLIEIQDTLKSPPPENRTMKKAAMYGIGATTIFYISVGCAGYAAFGSDAPGNILTAGGLGPFWLVDIAHMCLILHLIGAYQVYAQPIFASVERWAASRWPEAKFISSAYTVSIPLMQRGSVTVAPYKLVLRTVLVAATTVVALMIPFFNAVLGLLGAFSFWPLTVYFPISMHIAQDKITRGTKWYLLQALSMVCLMISVAVGIGSVTDIVDSLKVSSNPLKTVS

SEQ ID NO: 4270 - protein, 552 aa, Zea mays
MAADDAARSSRRMDLNLYLGLPRAPRAPRPDLGSDLALGTPMLSSSSPSSSAASADAPPLETDPLHPPYSPSRADLMRPPTPAHEPYNPFAPEAHPPYVPPPPLPVAGALPVLADELEFGFSDAHLGLVERLDRPSSSTASSSFRPDLAERYRHLMSLGGSRFFRPRRFRSDLPPLSSELPSLENDAAVQPPEPEEPVHDTVEENKVAAQGAVVGVSEDDGTEHGKSTPMFECNICFEMADEPVVTSCGHLFCWPCLYQWLHVHSSHKECPVCKGEVTEGNITPIYGRGNSGSEMEKKVAEDGNASGPKIPPRPHGNRLESFRQQFHHLRPISRRLGEAHGFLSTWRRILDRHLANSMSRFEGPPEPSVSETAQHASSLGRMTTRLRARRLQREAENPTSIVSSAPDSGQPRNNTPDLPRRSSSPFPSEGMDLLRQIAFAGLEDSERFATAVSELRRIARPSHYGASTSSNPPTNPEPIDGTHIAMALAADQASNSSTMAVIQEDAAFAESAGEPSNAGSSRSLRRRRGSGALGSLDVDGGDLHQNKRRRLN

SEQ ID NO: 4271 - protein, 97 aa, Zea mays
  misc_feature (78)..(78): Xaa can be any naturally occurring amino acid
  unsure (1)..(97): unsure at all Xaa locations
DAFIGVGYTLVSPLAEGAAWLLVRCQAFRVVALAIEAVDLHAHAGAHPRLGVVDHIAFHPVTSARLEDVTALARAVAXDIVDSLQVPTSLFGAAHKD

SEQ ID NO: 4272 - protein, 368 aa, Zea mays
LHENPVHTPLRHLARRLVQVGVNDVFAVPGDFNLTLLDHLIAEPGLRLVGCCNELNAGYAADGYARARGVGACAVTFTVGGLSVLNAIAGAYSENLPVICIAGGPNSNDYGTNRILHHTIGLPDFSQELRCFQTVTCHQAVVNNLDDAHEQIDTAIATALRESKPVYLSISCNLPGLPHPTFSRDPVPFFLEPSNSWFICQKLRLPEGCGYVFQMQYGSIGWSVGATLGYAQAAKDKRVIACIGDGSFQVTAQDVSTMLRCGQKSIIFFINNGGYTIEVEIHDGPYNVIKNWDYTGLVNAIHNSEGNCWTMKVRTEEQLKEAIATATGAKKDCLCFIEVIVHKDDTSKELLEWGSRVSAANSRPPNPQ

SEQ ID NO: 4273 - protein, 177 aa, Zea mays
MASLSPALLPGAGVTLLRAPPVFRVTASSSSSGSKKGKKPKSGSKGKDTKALEPPAPVVRRAPPGSASIFQQQKNEAASRAGGAGGKGPTEEELRQRQANENAFLLAWLGLGIIILVEGIALAASGFLPEEYDSFFVKYLYPSFTPTVVLFLAGTVGMFGAMMRVELANVLVMYEVA

SEQ ID NO: 4274 - protein, 243 aa, Zea mays
MGRGRVELKRIENKINRQVTFAKRRNGLLKKAYELSVLCDAEVALIIFSNRGKLYEFCSGQSITKTLERYEKNSYGGPDTAVQNKENELVQSSRNEYLKLKARVDNLQRTQRNLLGEDLGSLGVKELEQLEKQLDSSLRHIRSTRTQHMLDQLTDLQRREQMLCEANKCLRRKLEETSNQVHGQVWEHGANLLGYERHSPQQQAPSHVGNGLFFHPLEAAAEPTLQIGFAPEHMNNFMPTWLL

SEQ ID NO: 4275 - protein, 476 aa, Zea mays
MPLPMRRLAAAPSLPAVHPHDSPAPPSVRLRRQHGRVSMERSSTTTARGVSCVMASGKEHAATTSGDEKKGGLRGKLKKVVLAYSGGLDTSVIVPWLRENYGCEVVCFTADVGQGDVELEGLEKKAKASGASQLVVKDLTEKFVGEYIYPCLRAGAVYERKYLLGTSMARPVIAKAMVDVAKEVGADAVAHGCTGKGNDQVVRFELTFYALNPELKVVAPWRDRDITGREDAIEYAKKHNVPIPVSKKSIYSRDRNLWHLSHEGDILEDPANEPKEDMYMMSVSPENAPSKPEYLEIGIVAGVPTSINGKDLSPATLLAKLNEIGGKHGIGRIDMVENRLVGMKSRGVYETPGGTIMAAAVRELESLTLDRETMQWKDMLALKYAELVYAGRWFDPLRLSMDAFMETITATTTGSVTLKLYKGSVTVASRKSPYSLYREDISSFENGEIYDQADAEGFIRLYGLPTRVRAMLEKGI

SEQ ID NO: 4276 - protein, 386 aa, Zea mays
  misc_feature (147)..(147): Xaa can be any naturally occurring amino acid
  unsure (1)..(386): unsure at all Xaa locations
MSSSRPAHSSSSSSRTRQSSRARILAQTTLDAELNAEYEESGDSFDYSKLVEAQRSTPPEQQGRSGKVIAYLQHIQRGKLIQPFGCLLALDEKSFRVIAFSENAPEMLTTVSHAVPNVDDPPKLGIGTNVRSLFTDPGATALQKALXGFADVSLLNPILVQCKTSGKPFYAIVHRATGCLVVDFEPVKPTEFPATAAGALQSYKLAAKAISKIQSLPGGSMEALCNTVVKEVFDLTGYDRVMAYKFHEDEHGEVFAEITKPGIEPYIGLHYPATDIPQAARFLFMKNKVRMICDCRARSVKIIEDEALSIDISLCGSTLRAPHSCHLKYMENMNSIASLVMAVVVNENEEDDEPEPEQPPQQQKKKRLWGLIVCHHESPRYVPFPL

SEQ ID NO: 4277 - protein, 356 aa, Zea mays
MACLTDLVNLNLSDTTEKIIAEYIWIGGSGMDLRSKARTLPGPVTDPSKLPKWNYDGSSTGQAPGEDSEVILYPQAIFKDPFRRGNNILVMCDCYTPAGEPIPTNKRYSAAKIFSSLEVAAEEPWYGIEQEYTLLQKDTNWPLGWPIGGFPGPQGPYYCGIGAEKSFGRDIVDAHYKACLYAGINISGINGEVMPGQWEFQVGPSVGISSGDQVWVARYILERITEIAGVVVTFDPKPIPGDWNGAGAHTNYSTESMRKEGGYEVIKAAIEKLKLRHKEHIAAYGEGNERRLTGRHETADINTFSWGVANRGASVRVGRETEQNGKGYFEDRRPASNMDPYVVTSMIAETTIVWKP

SEQ ID NO: 4278 - protein, 416 aa, Zea mays
MGSQAIEAHRAGAEVYRGAALCAEKSTELLAEAHLPLGLLPLADMEEVGYNRATGFVWLRQRKSLTHTFRPIARQVSYAAEVTAFVEDRRMRRMTGVKTKELLIWVTLSDMFVDRDDPSKITFKTPTGLGRTYPVSAFAKEGAGDDGAAAKHKDDAPAPTAAANLTPADSSKSTNEGQALETQRRGSACAASILPERGAKAKQSLLLAAALLVAVAAAAVPPTCERIECPAYEVVDSANGFEIRRYTDAMWITTAPIEDISFVAATRTGFLQLFDYIQGKNAYNQTIEMTAPVLTRVSPSDGPFCASAFAVSFYVPAKNQADPPPAEGLRVDRWAGARYAAVRRFGGFVADADVGEQAARLEASLQGTRWAAAVNDARRADPASPYTVAQYNSPFEFTGRVNEIWMLFDADDDASM

SEQ ID NO: 4279 - protein, 407 aa, Zea mays
  misc_feature (251)..(251): Xaa can be any naturally occurring amino acid
  unsure (1)..(407): unsure at all Xaa locations
SRPPPAMASNGIAPRDVCVVGVARTPLGGFLGALSSLPATKLGSIAIEAALKRANVDPALVQEVFFGNVLSANLGQAPARQAALGAGIPNTVVCTTVNKVCASGMKATMFAAQSIQLGINDIVVAGGMESMSNAPKYIAEARKGSRFGHDTLVDAMLKDGLWDVYNDCAMGMCAELCADNHALTREDQDAFAIQSNQRGIAARDSGAFAWEIVPIEVPVGRGKPPVLIEKDESLDKFDPAKLKKLRPSFKXDGGTVTAGNASSISDGAAALVLVSGQKAQELGLQVLARIRGYADAAQAPELFTTTPALAIPKAISNAGLESSHVDFFEINEAFSAVALANQKLLGIPSEKINVHGGAVSLGHPLGCSGARILVTLLGVLREKGGKIGVAGVCNGGGGASALVLELA

SEQ ID NO: 4280 - protein, 163 aa, Zea mays
MDAVMFGLETPLMAALQHLLDVPDGDAGAGDNKTGGGGGATRTYVRDARAMAATPADVKELPGSYAFVVDMPGLGTGDIRVQVEDERVLVVSGERRREEREDDAKYLRMERRMGKFMRKFVLPDNADVDKVAAVCRDGVLTVTVEKLPPPEPKKPKTIEVKVA

SEQ ID NO: 4281 - protein, 513 aa, Zea mays
SYLRSGDGAVRRRRRGRRRRPAPPRQALGVVVVVQLVRREPGQENRLPVFVVVHACARGGAGTVWTAMAHIITAVIGSGVLSLAWSVAQLGWVGGPAAMVFFAGVTAVQSTLIADCYICHHPERGGVVRNRSYVDAVRIYLGSRRWLPRVPGDKSHLFCGFFLNLSLFGTGVVYTLTSATSMRAIRKANCYHREGHDAPCSVGGDGYYMLLFGLAQVLLSQIPNFHEMAGLSIFAAVMSCFYAFVGVGLGVAKVIDISLFEIIDRALARLPSANGVIMGGIGGIPLVSTTQKVWRVSQALGDILFAYPFSLVLLEIEDTLRSPPPESETMKKATRASIAITTLFYLCCGCFGYASFGDGTPGNLLTGFGFYEPYWLIDLANLAIVYTQPVFAFADRKFGGGATVVEAPLLPVPGARRVNANVFRLCFRTAYVAATTAMAVWFPYFNQIIGLLGSFTFWPLAVYFPVEMYLTRNKVAPWTNQWLTIHAFSLVCLLISAFASVGSAVGVFGSETS

SEQ ID NO: 4282 - protein, 73 aa, Zea mays
  misc_feature (30)..(30): Xaa can be any naturally occurring amino acid
  misc_feature (46)..(46): Xaa can be any naturally occurring amino acid
  unsure (1)..(73): unsure at all Xaa locations
NPTVYHLIHISNYGFRSPVTSDGNTNDDLXLPTDDTLVDHINEGFXSGKDLDGTVQSTIVEDQICALNDVGHK

SEQ ID NO: 4283 - protein, 448 aa, Zea mays
  misc_feature (233)..(233): Xaa can be any naturally occurring amino acid
  unsure (1)..(448): unsure at all Xaa locations
MERARARAPALALAPVEVPKFFVCPISLEVMRDPVTLSSGITYDRDSIERWLFTDGHGDCPVTKLPLGADDLEPTPNHTLRRLIQSWCAAHAVERFPTPRPPVDADRVAAIVGCAKKGGQQEVLAALRELADIIGESDRNRRCVEGVPEAVEFLVSVVKKHAAGTSSSKPLGGCRSQEEPMCGVPDSPKACSPEEAALSILHSLKLSEASLKRALESSDGFVDTLASVLRWPXNYRARTYAMHLLKAALSAMQPSQLSSASTDLVEGVVRVVADRTLSPKAIKVALHVLCRLCPWGRNRVKAVEAGAVAAVVELLLNVGCGCGGSNGKRAVELAVVAIDHLCGCAEGRLELVAHPAGLAVVARAATRLSPTATESAVRALHAVARHSATPAVLQEMLAVGVVARLLYLVQAGASGERPRERAREMLKMHARVWRGSPCLASHMASYPC

SEQ ID NO: 4284 - protein, 264 aa, Zea mays
PRVRGRVGGGAQMLLFGGGGSANSNGFFRGVPMAVLGMDDATRVGKRPFFTTHEELLEEEYYDEQAPEKKRRLTAEQVQLLERSFEEENKLEPERKTELARRLGMAPRQVAVWFQNRRARWKTKQLETDYDRLKAAYDALAADHQGLLADNDNLRAQVISLTEKLQGKETSPSATTAAQEVDQPDEHTAVSGTEELLAQQLKDNLHSSGDCTGHGTLSSEEDDGGVVSDEGCSFALPDAMFAAGFTHHGAEEVQLANWTSMFWN

SEQ ID NO: 4285 - protein, 196 aa, Zea mays
MKNVAKCDTWCELQNPVNHRVFERKLRPKPLGRGHACLGVTQFPAITWVRKRTRAERTERLGLIHRIRRGMALVRLAFPVFFFLAAAEFAAGTRSPSAFVQNAIYSNRITIFSKTYCPYSMRAKHIFRDLKEDPYVVELDTRVDGRDIQSVLLDLVGRRTVPQVFVNGQHIGGSDDTVNALSNGQLQKLLGKSQSQ

SEQ ID NO: 4286 - protein, 521 aa, Zea mays
MVVADSTSRRAKQADGGDGVLGAPVLGGLGMEGLGDQLSVVMKFGGSSVSSAARMAEVAGLILTFPEERPVVVLSAMGKTTNNLLLAGEKAVGCGVIHVSEIEEWNMVKSLHIKTVDELGLPRSVIQDMLDELEQLLKGIAMMKELTPRTSDYLVSFGECMSTRIFSAYLNKIRVKARQGPCNQPSCKSPYDAFDIGFITTDEFGNADILEATYPAVAKRLHGDWIQDPAIPVVTGFLGKGWKSGAVTTLGRGGSDLTATTIGKALGLREIQVWKDVDGVLTCDPNIYPHAKTVPYLTFEEATELAYFGAQVLHPQSMRPAREGDIPVRVKNSYNPKAPGTLITRQRDMDKVVLTSIVLKSNVTMLDIVSTRMLGQYGFLARVFAIFEDLCISVDCVATSEVSVSVSLDPSKIWSRELIQQELDHVVEELEKIAIVRLLQQRAIISLIGNVEQSSLILEKTGRVLRKSGVNVQMISQGASKVNMSLIVHDSDAKALVEALHQAFFEDDVLSQVEAENLLVG

SEQ ID NO: 4287 - protein, 190 aa, Zea mays
FSEVNQEIASYLGLELGKITIKRFADGEIYVQLQESVRGCDVFLVQPSCPPANENLMELLIMIDACRRASAKNITAVIPYFGYARADRKSQGRESIAAKLVANMITEAGANRVLVCDLHSSQAMGYFDIPVDHVYGQPVILDYLASKTICSDDLVVVSPDVGGVARARAFAKKLSDAPLAIVDKRRPGHN

SEQ ID NO: 4288 - protein, 219 aa, Zea mays
  misc_feature (149)..(149): Xaa can be any naturally occurring amino acid
  unsure (1)..(219): unsure at all Xaa locations
MARRASLLLAAALLVAVAAAAVPPTCERIECPAYEVVDSANGFEIRRYTDAMWITTAPIEDISFVAATRTGFLQLFDYIQGKNAYNETIEMTAPVLTRVSPSDGPFCASAFAVSFYVPAKNQADPPPAEGLRVDRWAGARYAAVRRFGXFVADVDVGEQAARLEASLQGTRWAAAVNDARRADPASPYTVAQYNSPFEFTGRVNEIWMLFDADDDASTS

SEQ ID NO: 4289 - protein, 436 aa, Zea mays
  misc_feature (107)..(107): Xaa can be any naturally occurring amino acid
  misc_feature (324)..(324): Xaa can be any naturally occurring amino acid
  misc_feature (342)..(342): Xaa can be any naturally occurring amino acid
  misc_feature (373)..(373): Xaa can be any naturally occurring amino acid
  unsure (1)..(436): unsure at all Xaa locations
MCGGAILSGFIPPSGVAAAAAAAKKKQQQQRCRVTADLLWPGPGSKEAPQDQEEDFEADFREFERGLGEDDVDSAGEGGDPEVQELPPPEPTRFAFATAAKAAVAFXIIDGVMTTTPKDVKGDRPVKRGRKNQYRGIRQRPWGKWAAEIRDPNKGVRVWLGTYNTAEEAARAYDAEARKIRGKKAKVNFPDDDAPGTGHRPANAAPRLVAPPPPPKACADEIFNNLKNDDDDDNNNNNDDLFAMFAFGDNKKKVPAAKPAAAEGGSGSGSFLVPAPAVAVVPGNKRRSSATNTMLSVSDDQRSNSYGSGSSDLVGSWSWDDDAXSAAMTSDYTSSVFAPASXSYMQGGAPKRMRSSYGGRRAASHMTRPCLAXGLDKVSYHYQALPPYYVGSSNASVGNLGLLQQADDAPAPQDGASAGDIWSLDELLMLAAAGAY

SEQ ID NO: 4290 - protein, 185 aa, Zea mays
  misc_feature (48)..(48): Xaa can be any naturally occurring amino acid
  unsure (1)..(185): unsure at all Xaa locations
EHHFKSKGDAGASKTYPQQAGTVRKNGFIVIKNRPCKAVEVSTSKTGXNGHAKCHFVAIDIFNGKKLEDIVPSSHNCDIPHVNRTEYQLIDISEDGFASLLTSDGNAKDDLRLPTDETLAGQIKEGFESGKDLVVTVQSAMGDEQICALKDGAPNQLPCLWRQNPTGSQLKSDQKCITRGLYTET

SEQ ID NO: 4291 - protein, 666 aa, Zea mays
MALGEGGDHGAALPLIADQAKHAAAGGIVRSGSMWTAAAHVITAVIGSGVLSLAWSIAQLGWVAGPAAMLVFAAVTALQSTLFADCYRSPDPEHGPHRNRTYAKAVDRNLGSNSSWVCMLLQHTALFGYGIAYTITASISCRYAACILLYTDMSDTAPQPAVHRPIAAPKPASRLSDVPIVWWNTRARSSRTGATAKAAHHSVEVLDGHPLRSLWPGGDSLIRPSRVRVPTFGPCLSYVSPPITARDGVRRARAGTAWTVYVRGAHQHGGDRLRGAVLGMERASVAQLGWVVGPSGMFCFALVITHVSAALLASPTATGAETPRRATEPLLNGRHLRVPRAILKANCYHEHGHDAHCDYDGNYYMLIFGGVQLLLSFIPDFHDMAWLSVVAAAMSFSYAFIGLGLGLARTIANGTIKGSITGVRMRTPMQKVWRVSQAIGDIAFAYPYSLILLEIQDTLKSPPAENKTMKRASMISILVTTFFYLCCGCLGYAAFGSDAPGNLLTGFGLYGPYWLIDFANACIILHLLGGYQVYSQPIFQFAERLLAERFPDSGFVNGGSYTVRFACLRACRVNPLRVCLRTLYVASTTAVAVALPYFNEVLALLGALSFWPLAIYFPVEMYFIQRNVRRWSARWVVLQTFSVVCLLVSAFALVGSIEGLISKKLG

SEQ ID NO: 4292 - protein, 353 aa, Zea mays
  misc_feature (104)..(104): Xaa can be any naturally occurring amino acid
  misc_feature (119)..(119): Xaa can be any naturally occurring amino acid
  unsure (1)..(353): unsure at all Xaa locations
MATGEEHVAAPAPAVEETPEKKQASTTELPAPSGWTKKLAPTRGGRGGRFEVIFVSPTGEEIKSKRQLTQYLKAHPGGPASSEFDWGTSDTPRRSRRLSDSGSXRVRDAEYAEGTRKDXVPSAEKTEEVDDKKDAENVEMKDAAEKTEEVEDKKEEAPTVDAAENTVEGDDKKEEPPAEKTDEKEEAPAVDAAEKNEEGDDKKEEEPPAEKKTVEKEVVPAVDAAENTEQSTGGQAQPNDVAAPESENKGDGKPAESESAPLAFVDDAAPLVIVGEEKTEDSQAAESAVPSLASSEGEKKENGGATEPAAPPPADAEKGAENSGQVNTAPQEPTAANCDKGQIQPGASAVRCT

SEQ ID NO: 4293 - protein, 351 aa, Zea mays
MAATQSCQSRSSACSKAAACFPAAVAVDEEHGHHSHQLKGGAQEEAENDNNKPELRRGPWTVDEDLTLVNYIADNGEGRWNNLARAAGLKRTGKSCRLRWLNYLRPDVKRGNFSADEQLLILDLHTRWGNRWSKIAQHLPGRTDNEIKNYWRTRVQKHAKQLNCDANSKRFKDAMRYLWMPHLADDVDTIAAANDDDEDHHHHLRLLVLHHHQAQHLQQAAAAAGGAANDLAAGAYDVRQLHALPSSGMAATSSSDSLASESYDDGGLLFANLRAGEMLMDGGDWAAQQEADQGLWPPPPPPPSDLDQSVVQAAGAGAGQFQDMELSGWVQGFSESITDNFWALEEIWKMQ

SEQ ID NO: 4294 - protein, 279 aa, Zea mays
MLLNPASMLDTIRQHLLEEPPAAADESFGILVADQWSDSLPFRTDDADDIVVFGALHDAFSYGWLPDGSFAHVKPEPVRSPDSYYSSSYDGSCFGGLPYPEQPLTPGSEGEAAATPSPRREEAAAAVARGKHYRGVRQRPWGKFAAEIRDPAKNGARVWLGTYDTAEDAALAYDRAAYRMRGSRALLNFPLRIGSEIAAAAAGDKRPLALPEPATSSDSSSSSTGGSPKRRKRGEAAAANMAMALVPPPSQLSRPAQPWFPAAPVEQAAMPPRVEQLVI

SEQ ID NO: 4295 - protein, 795 aa, Zea mays
MPHPPRATTTMASSPPPPRQEEDQQREEGHHHGDGGDDDQITTPLLVEAATTSSPSPSEGDDPENSPIEQVALTVPVGDDPSTPVLTFRMWVLGTASCALLSFLNQFFWYRKEPLTITAISAQIAVVPLGRLMAAALPARAVLRGTRWEFSLNPGPFSVKEHVLVTIFANSGAGTVYAIHVITAVRVFYGKHITFFVSLLVVLTTQVLGFGWAGIFRRYLVEPAAMWWPSNLVQVSLFRALHEKERRVKGGMTRNQFFLVAFVCSFAYYVFPGYLFQMLTSLSWLCWAFPRSVVAQQLGSGLSGLGVGAVGLDWSTISSYLGSPLASPWFATANVAAGFVLIMYVITPAAYYWLGLYGARSFPIFSDGLFTAAGQTYNISSIVDSNFRFDTQAYERNGPLYLSTFFAVTYGVGFASLTATVVHVFLFHGSEIWQLSRSAFQEKKVDVHTRLMRRYRQVPEWWFICILVANVAVTIFACEYYIEQLQLPWWGVLLACAIAFFFTLPIGIITATTNQVRSSIGVCTHARTQTPGLNIITEYIMGYLYPGRPVANMCFKVYGYISMTQALAFLQDFKLGHYMKIPPRTMFMAQVVGTLIAALVYIGTAWWLMDSVPNICSTELLPADSPWTCPMDHVFYDASVIWGLIGPRRIFGDLGTYSAVNWFFLGGAVAPLLVWLAHRVFPSQSWILLVNMPVLIGSTGMMPPATAVNYTTWIIAGFLSGYVVYRYRRHWWERHNYLLSGALDAGLAFMAVLIYLCLGLENVGLNWWGNDLDGCPLASCPTAKGIVVEGCPVYT

SEQ ID NO: 4296 - protein, 199 aa, Zea mays
VWLSLGCITYNVSEKRFLEMPLLLPAKRTTEVTGEDGLRGGSDEEDGGCGIDGSRKKLRLSKDQSAVLEDSFREHPTLNPRQKAALAQQLGLRPRQVEVWFQNRRARTKLKQTEVDCEYLKRCCETLTEENRRLQKEVQELRALKLVSPHLYMHMSPPTTLTMCPSCERVSSSNGNSAAATAAALEYPSRGPSLRVPSF

SEQ ID NO: 4297 - protein, 116 aa, Zea mays
LISASRRSDSGGMGSRAGEPVARTNSSGGGGSSKDSGSFECNICLDLAQDPVVTLCGHLFCWPCLYEWLHVHAHSQECPVCKAVVEEGKLVPLTAVVGTPLTPCRVVAGVEIPSRP

SEQ ID NO: 4298 - protein, 76 aa, Zea mays
EQYAAVQTLLITDTLFRNTDIATRQKYVNLVENVKKSNSPVHIFSSMHVSGEQLAQLTGIAAILRFPLPQLEDIEM

SEQ ID NO: 4299 - protein, 580 aa, Zea mays
  misc_feature (136)..(136): Xaa can be any naturally occurring amino acid
  misc_feature (287)..(287): Xaa can be any naturally occurring amino acid
  misc_feature (305)..(305): Xaa can be any naturally occurring amino acid
  misc_feature (546)..(546): Xaa can be any naturally occurring amino acid
  unsure (1)..(580): unsure at all Xaa locations
MASSASLQRFLLPSSHAAATAASPSSRLRRTGRARAAVSVPPPAAAGEQVPTERLEPRVEERAGGYWVLKEKYRAGLNPQEKVKLEKEPMALFMEGGIQDLARVPMEQIDAAKLTKDDVDVRLKWLGLFHRRKHQXGRFMMRLKLPNGVTTSEQTRYLASVIEAYGADGCADVTTRQNWQIRGVTLPDVPAILDGLRAVGLTSLQSGMDNVRNPVGNPLAGVDPHEIVDTRPYTNLLSSYVTNNSQGNPTITNLPRKWNVCVIGSHDLYEHPHINDLAYMPAVKDGXEFGFNLLVGGFISPKRWXARALPLDAWVAGDDVVPVCKAILEAYRDLGSRGNRQKTRMMWLIDELGMEVFRSEVEKRMPNGVLERAAPEDLVDKRWERRDYLGVHPQKQEGLSYVGLHVPVGRLQAADMFELARLADEYGTGELRLTVEQNIVLPNVSNERLDALLAEPLLQEQRLSPRPSMLLRGLVACTGNQFCGQAIIETKARALQVAREVEKRVAVPRPVRMHWTGCPNSCGQVQVADIGFMGCLTKDSDGKIVXEAADIFVGGRSRVSLEGAQAYAYPAFLYKVVPIV

SEQ ID NO: 4300 - protein, 149 aa, Zea mays
  misc_feature (48)..(48): Xaa can be any naturally occurring amino acid
  misc_feature (56)..(56): Xaa can be any naturally occurring amino acid
  misc_feature (130)..(130): Xaa can be any naturally occurring amino acid
  unsure (1)..(149): unsure at all Xaa locations
EHHFKSNDDAAAAETYPQQAGPARKNGFIAIENRPCKAVEVSTSQTGXYGHAKCHXVAIDIFNGKKLEDIVPSSLNCDIPHANRTEYHLIDISEDAFASLLTSDGNANGDLRLPTDETLAGQIKEGFESXKDLVATVQSALMDEQICAL

SEQ ID NO: 4301 - protein, 416 aa, Zea mays
MEGKIVDTLEGVNPASLANKVAKVAGPASVAESAVPASLGVAAGPAVLENIQKMAQQNGSSAAESTNSGSTQDALNKRLEQLVNSHPVFLFMKGTPEQPRCGFSRKVVNILKQEGVKFGSFDILTDNDVREGMKKFSNWPTFPQLYCKGELLGGCDIVVAMHESGELKDVFEEHNITLKPQGSKNEEAGEPESATEKGSAVSESIKLTDAQKTRLESLINSSPVMVFIKGTPEEPKCGFSGKLVHILKQENIPFSSFDILSDDEVRQGLKVFSNWPSYPQLYIKGELVGGSDIVMEMHKSGELKKILSEKGVSQKENLEDRLKSLISSAPVMLFMKGTPDAPRCGFSSKVVNALKKEGVSFGSFDILSDEEVRQGLKTYSNWPTFPQLYYKSELIGGCDIVLEMEKSGELKSTLSE

SEQ ID NO: 4302 - protein, 191 aa, Zea mays
GRRSGVRAVQICGGGGGGGGRARMQEQPASSRPSSSERSSSSAHHMDMEVKEGMESDEEIRRVPELGLELPGASTSGREVGPGAAGADRALAQSSTAQASARRRVRSPADKEHKRLKRLLRNRVSAQQARERKKAYLTDLEVKVKDLEKKNSEMEERLSTLQNENQMLRQILKNTTVSRRGSGSTASGEGQ

SEQ ID NO: 4303 - protein, 161 aa, Zea mays
SRLVPVRNSRDRARDYRLFDYIQGKNAYNKIIEMTMPVLTRVSPSDGPFCASAFAVSFYVPAKNQADPPPAEGLRVDRWAGARYAAVRRFGGFVADADVGEQAARLEASLQGTRWAAAVNDARRADPASPYTVAQYNSPFEFTGRVNEIWMLFDADDDASM

SEQ ID NO: 4304 - protein, 417 aa, Zea mays
MRGLSRYLPFCGGGCCCGDGAGRAGGVADGLVWDVALKAHASGDYSIAVAQANEALEDQAQVVAAPAATLVGVFDGHGGPEAARFVNRRLFSHIQGELCWSGDTRRSRYAAPVRDMSTHLAAFAAENGGLSAEVFQKAFGATEEEFIGLVQKSWPSQPRIVSVGSCCLVGAVDIENGTLYVANLGDSRAVLGRRRGKGRRVVAERLSQDHNVADEGVRREVAEMHPDDSHIVLNSHGVWRIKGIIQVSRSIGDVYLKKPDICRGNPVLQQSICPFPLRRPVMTAVPSITTRELRPGDRFIIFASDGLWEQLSDDAAVDVVASSPRKGVAMRLVRAAQLEAARKKEVKYDKIRTIEKGQRRHFHDDITVVVLFLDKCRGAARSGPDDIDGTYAPVDVFSCSPAGGGDHEDPTKPVLRR

SEQ ID NO: 4305 - protein, 493 aa, Zea mays
MAQAVVPAMQCRVGVKAAAGRVWSAGRTRTGRGGASPGFKVMAVSTGSTGVVPRLEQLLNMDTTPYTDKVIAEYIWVGGSGIDIRSKSRTISKPVEDPSELPKWNYDGSSTGQAPGEDSEVILYPQAIFKDPFRGGNNVLVICDTYTPQGEPLPTNKRHRAAQIFSDPKVAEQVPWFGIEQEYTLLQKDVNWPLGWPVGGFPGPQGPYYCAVGADKSFGRDISDAHYKACLYAGINISGTNGEVMPGQWEYQVGPSVGIEAGDHIWISRYILERITEQAGVVLTLDPKPIQGDWNGAGCHTNYSTKTMREDGGFEEIKRAILNLSLRHDLHISAYGEGNERRLTGKHETASIGTFSWVWMEHLSLFSFRESTECCLSGVANRGCSIRVGRDTEAKGKGYLEDRRPASNMDPYIVTGLLAETTILWQPSLEAEALAAKKLALKREAIMQGRGGEQEQQKQGLAYLQRRPAALLVQSNGTNYTASRQHKDKAGID

SEQ ID NO: 4306 - protein, 185 aa, Zea mays
MARSLSTALVRGLMRSSRASTSAAVSRPAIQQFMNYSSGLSGTPNANGDSVTTRVAADHDTHQDFQPTSKSSDMSFSDIVAQDVKEHPVVIYMKGYPDAPRCGFSALAVKVLQQYGVPISARDILSDLKLKESVKAYSNWPTFPQIFIKGEFVGGSDIILTMPQKGELKELLGDIAQKAEQSGSS

SEQ ID NO: 4307 - protein, 319 aa, Zea mays
PTRPSFSFSLSPSWTILSISFLSLHILRRAEAARDTIGKLLQQEIKLSPTQDQKKLCMEQEEVGLALGLSLGSGHHHQELKPQHPSHPCAALLEPSLSLSGPATKDDGPTAPVRRFAAVKRELQTMEGNDDEATGRVLVYSVASSAVVTADDDEGCNSSRKKLRLSKEQSALLEDHFKEHSTLNPKQKAALARQLNLSPRQVEVWFQNRRARTKLKQTEVDCEILKRCCETLTEENRRLHRELQQLRALSHPHPHPAAFFMPTAAAAALSICPSCQRLVATGASAAAATTAGADNKPKAGGPGGRAPHVFSPFTNSAAC

SEQ ID NO: 4308 - protein, 317 aa, Zea mays
MASAAYLDDIDAEVIDPPKIEMLDVTELVGDLIEHSPKPNVIVSSNVRELLECPVCLVAMYPPIHQCSNGHTICSGCKPRVHNRCPTCRSELGNIRCLALEKVAASLEVPCKFQNFGCVGIYPYYCKLKHESQCQYRPYTCPYAGSECTVTGDIPYLVNHLKDDHKVDMHSGSTFYHRYVKKVDMHNGSTFNHRYVKSNPHEVENATWMLTVFSCFGQYFCLHFEAFQLGMAPVYIAFLRFMGDDAEAKNYSYSLEVGGSARKMTWQGVPRSIRDSHRKVRDSYDGLIIQRNMALFFSGGDRKELKLRVPGRIWKEQ

SEQ ID NO: 4309 - protein, 238 aa, Zea mays
LISASRRSDSGGMGSRAGEPVARTNSGGGSSSKDSGSFECNICLDLAQDPVVTLCGHLFCWPCLYEWLHVHAHSQECPVCKAVVEEGKLVPLYGRGGNSTSPRARSVAGVEIPSRPTGQRPSTAPQPDHSNHYPPQNPWFMGAGAPPVAGGRWGNYTFSAAIGGLFPLLSFQVHGFPQVSAYGPAAGFPYAYGHSFHGWHGHGYGFPRQAPQGQQVDAYLKVLLLVVGVLVIASLIAF

SEQ ID NO: 4310 - protein, 326 aa, Zea mays
  misc_feature (14)..(14): Xaa can be any naturally occurring amino acid
  misc_feature (151)..(151): Xaa can be any naturally occurring amino acid
  unsure (1)..(326): unsure at all Xaa locations
QVAERLEKFKTTIXTQMSMLAIKHGAINLGQGFPNFDGPDFVKEAAIQAINAGKNQYARGFGVPELNSAIAERFLKDSGLQVDPDKEVTVTSGCTEAIAATILGLINPGDEVILFAPFYDSYEATLSMAGANVKAITLRAPDFAVPLEELXAAVSKDTKAIMINTPHNPTGKMFTREELESIAALCKENDVLLFSDEVYDKLVFEADHISMASIPGMYERTVTMNSLGKTFSLTGWKIGWAIAPPHLTWGLRQAHSFLTFATCTPMQAAVWAALRAPDSYYDELKRDYSAKKAILLEGLEAASPSAKDEGTLRAAVERLKAKLRRK

SEQ ID NO: 4311 - protein, 485 aa, Zea mays
  misc_feature (240)..(240): Xaa can be any naturally occurring amino acid
  unsure (1)..(485): unsure at all Xaa locations
MAPAPHNGVNNNHPVVPMEVSVEAGNAGAAEWLDDDGRPRRSGTFWTASAHIITAVIGSGVLSLAWAIAQLGWVAGPAAMLLFAFVTYYTATLLAECYRTGDPDTGKRNYTYMDAVRSNLGGAKVAFCGAIQYANLVGVAIGYTIASSISMQAVSRAGCFHKRGHAVPCKSSSNPYMILFGAVQILFSQIPDFDQIWWLSIVAAVMSFTYSAIGLSLGIAQTVANGGFKGSLTGISIGAXVTSTQKVWHSLQAFGDIAFAYSFSNILIEIQDTIKAPPPSESKVMQKATRLSVATTTIFYMLCGCMGYAAFGDKAPDNLLTGFGFFEPFWLIDIANVAIVVHLVGAYQVFCQPIFAFVERRAAAAWPDSAFVSQELRVGPFAVSVFRLTWRSSFVCVTTVVAMLLPFFGNVVGFLGAVSFWPLTVYFPVEMYIKQRRVPRGSTKWICLQTLSVSCLLVSVAAALAGSLEGPDAFAALKVYHPFSS

SEQ ID NO: 4312 - protein, 203 aa, Zea mays
  misc_feature (42)..(42): Xaa can be any naturally occurring amino acid
  unsure (1)..(203): unsure at all Xaa locations
NTVKIDDYGEPIKRPRLKVTVAHVDTIGTAFWENHPHILREXKIYARPNDETALRLMNESASLMMEQYPDIVFGYGFSNEYSFVFHEKSELYQRRESLILSSCSSYFTSLYMTKWKEFFPYTELMQTPHFEADALCYPKLKIICEYLSWRQAECHAGNQYNTCFWMLVKSGKSEKEAHEILKGTLSKDKNELLFQQFQMNYNN

SEQ ID NO: 4313 - protein, 776 aa, Zea mays
MASSSSLNPSSYSCFLFVTAAAVFFTASDAQVPGFVSIDCGGSTNYTDELGLQWTGDAGWFPFGQTATISVPSEKRAQYSTLRYFPSPSASSSSSSKHCYTLHVRTRTRYLVRATFLYGNFDSSNVFPEFDLYLGASHWSTIVIYDDSKVVTREAVVLAADPALSVCLSSTGTGTGTPFISTLELRQLNGSLYYTDYEADAFLALSARINFGAPTADPVRYPDDPYDRIWESDMVRRANYLVDVAAGTVNVSTDRPVFVAGSERPPQKVMQTAVVGSLGELTYRLDLPGFPGNGWAFSYLAEIEEFLVPETRKFKLYIPGLADVSKPTVDIGENAPGKYRLYEPGFPNISLPFVLSLALRKTNDSSKGPILNALEIYKYMHMELGSPDGPVMATLSLALASSSSSLADVAMEGGDPCLPSPWSWVKCNSEAQPRVVSINLSGKNLTGSIPPQVADLPCLAEIGFANNMLTGPIPDLSGSSNLSIIHLENNQLTGTVPSYFGSLPKLSELYSGNVYLGTAGKQKKKHVIIIISALLGASLLLAAALCCYMLTRKAMNSSSSPQAQEKALPAEQNKLQKYPSTQQLQSIATETAHPYSLCELEEATNKFASRIGSGGFGIVYYGKLSDGKEIAVKVPSNDSYQGKKQFSNEVVLLSRIHHRNLVAFLGYCHEDGRNILVYEFMHNGTLKEQLHRRDKHISWIKRLEIAEDAAKGIEYLHTGCTPSIIHRDIKTSNILLDKHMRAKVSDFGLSKLLAAEGKDSHASTNVRGTMGYLDPQ

SEQ ID NO: 4314 - protein, 267 aa, Zea mays
  misc_feature (213)..(213): Xaa can be any naturally occurring amino acid
  unsure (1)..(267): unsure at all Xaa locations
NPFPPPVPTLLCLNRHELGAAPILPSTPVASPDDLADQIADILDFFGLDSVMCLGVTAGAYILTLFATKYRERVLGLILVSPLCKAPSWSEWFYNKVMSNLLYYYGMCNVVKDILLQRYFGKGVRGGSAEPESDIVQACRSFLDQRQCVNVWRFIQTINERKDLTENLKQLQCRTLIFVGENSQFHAEAVHMTAKLDRRYIALVEVQACGSVXTEEQPHAMLIPMEYFLMGYGLYRPSQINCSPRSPLNPFCISPELLSPESMGVKL

SEQ ID NO: 4315 - protein, 165 aa, Zea mays
MALAEADDGAVVFGEEQEALVLKSWAVMKKDAANLGLRFFLKVFEIAPSAKQMFSFLRDSDVPLEKNPKLKTHAMSVFVMTCEAAAQLRKAGKVTVRETTLKRLGATHLRYGVADGHFEVTGFALLETIKEALPADMWSLEMKKAWAEAYSQLVAAIKREMKPDA

SEQ ID NO: 4316 - protein, 440 aa, Zea mays
LALVIVPVISVAVRRFGRFLRELSHQTQAAAAVASSIAEESFGAIRTVRSFAQEYHEISRYGEKVEETLKLGLKQAKVVGLFSGGLNAASTMSVVIVVIYGANLTINGYMTTGSLTSFILYSLTVGSSVSALSGLYTTVMKASGASRRVFQLLDRVSSMTNSGDKCPINEKDGEVELDDVWFAYPSRPSHMILKGITLKLAPGSKVALVGPSGGGKTTIANLIERFYDPLKGRILLNGVPLVEISHQYLHSKVSIVSQEPTLFNCTIEENIAYGLEGTTNFADVESAAKMANAHNFICGFPDQYKTVVGERGIRLSGGQKQRIAIARALLMNPRVLLLDEATSALDAESEYLVQDAMDSLMKGRTVLVIAHRLSTVKSADTVAVISDGLIVESGTHDELLDRDGIYTALVKRQLQGPKFEATSSISEASEIEAEPSSNGQ

SEQ ID NO: 4317 - protein, 410 aa, Zea mays
  misc_feature (127)..(127): Xaa can be any naturally occurring amino acid
  misc_feature (181)..(181): Xaa can be any naturally occurring amino acid
  misc_feature (252)..(252): Xaa can be any naturally occurring amino acid
  misc_feature (280)..(280): Xaa can be any naturally occurring amino acid
  unsure (1)..(410): unsure at all Xaa locations
MRKHTRINHTHSRPLSCPCVLCLFRRSTNQLLVTAMALLSDLINLDLSGRTGKIIAEYIWVGGSGMDVRSKARTLSGPVDDPSKLPKWNFDGSSTGQAPGDDSEVILCPRAIFRDPFRKGQNILLCXVMCDCYEPNGEPIPSNKRHGAAKIFSHPDVKAEEPWFGIEQEYTLLQKDTKWPXLGWPLGGYPGPQGPYYCAVGADKSYGRDIVDAHYKACLYAGIDISGINGEVMPGQWEFQVGPAVGVSAGDXQLWVARYILERITEIAGVVVSFDPKPIXPGDWNGAGAHTNYSTKSMRSDGGYEVIKKAIGKLGLRHREHIAAYGDGNERRLTGRHETADINTFVWGVANRGASVRVGRDTEKEGKGYFEDRRPASNMDPYVVTSLIAETTMLWEPSHSNGDGKGAAAP

SEQ ID NO: 4318 - protein, 160 aa, Zea mays
MASDRVLGTVKWFNGTKGFGFITPDDGSEDLFVHQSSIKSDGYRSLNDGDAVEYTVGSGNDGRAKALDVTAPGGGPLAGGERPDGGNGGGRGGYGGGDRGYGGGGDRGYGGGGDRGYGGGDRGYGGGGDRGYGGGGDRGYGGGGGYGGGYGGGGGGGGPR

SEQ ID NO: 4319 - protein, 293 aa, Zea mays
  misc_feature (176)..(176): Xaa can be any naturally occurring amino acid
  misc_feature (208)..(208): Xaa can be any naturally occurring amino acid
  unsure (1)..(293): unsure at all Xaa locations
MLGLEEGRGVKRPFFTSPDELLEEEYYDEQLPEKKRRLTPEQVLLLERSFEEENKLEPERKTELARKLGLQPRQVAVWFQNRRARWKTKQLERDFDRLKASFDALRADHDALLQDNNRLRSQVVSLTEKLQEKEDATEGGATADTAAPAVDVEASLADDVEEPAEPAATFEVLREXKSEDRLSTGSGGSAVVYADPLLFGRFAPAVDXQRGVVLPRRRGPLPRLRGGGPRESWPRGGHPVGRRRRRQRRGGQLFRRRSRRRPRRVFFRARPPPPRGGGGGRRPDQLGEVELDV

SEQ ID NO: 4320 - protein, 192 aa, Zea mays
HYRTSLYKKAGWYRSGIPGIAQPLATGIPFSGGGGYYQAGGAMAAAFAVQAQAPVAAWSTGLCNCFDDCHNCCVTCVCPCITFGQTAEIIDRGSTSCGTSGALYALVMLLTGCQCVYSCFYRAKMRAQYGLQVSPCSDCCVHCCCQCCALCQEYRELKKRGFDMSIGWHANMERQGRAAAAVPPHMHPGMTR

SEQ ID NO: 4321 - protein, 435 aa, Zea mays
MYSNFKEQAIEYVKQAVQEDNAGNYVKAFPLYMNALEYFKTHLKYEKNPKIKEAITAKFTEYLRRAEEIRAVLDEGGAGPGANGGDAAVATRPKTKGKDGDGGNGGDDSEQSKLRAGLNSAIITEKPNIKWNDVAGLESAKQALQEAVILPVKFPQFFTGKRRPWRAFLLYGPPGTGKSYLAKAVATEADSTFFSISSSDLVSKWMGESEKLVANLFQMARENAPSIIFIDEIDSLCGQRGEGNESEASRRIKTELLVQMQGVGHNDDKVLVLAATNTPYALDQAVRRRFDKRIYIPLPDTKARQHMFKVHLGDTPHSLTESDFESLARRTDGFSGSDVAVCVKDVLFEPVRKTQDAMFFFKADGDMWMPCGPKQPGAVQTTMQELASKGLAAKILPPPISRTDFEKVLSRQRPTVSKKDLEVHERFTKEFGEEG

SEQ ID NO: 4322 - protein, 358 aa, Zea mays
  misc_feature (218)..(218): Xaa can be any naturally occurring amino acid
  misc_feature (223)..(223): Xaa can be any naturally occurring amino acid
  misc_feature (258)..(258): Xaa can be any naturally occurring amino acid
  misc_feature (270)..(270): Xaa can be any naturally occurring amino acid
  misc_feature (281)..(281): Xaa can be any naturally occurring amino acid
  misc_feature (326)..(326): Xaa can be any naturally occurring amino acid
  misc_feature (337)..(337): Xaa can be any naturally occurring amino acid
  unsure (1)..(358): unsure at all Xaa locations
MCGGAILSGFIPPSGVPAAAKKKQQRRATADLLWPGPGKKGAPREEDFEADFREFERGLEEDDVDDGAGGEVQELPLPEPARLAFAAAVGAPRTAVDGVMTPKDAEGDMPTTANNSAANKRRRKNQYRGIRRRPWGKWAAEIRDPSKGVRVWLGTYSTAEEAARAYDAEARRIRGKKAKVNFRDEAAAAGAQKPPAATATTPTACASAARLAPRPPPXSSVLXDQSSDSYGSCYLGWELDWDDDTMTSDYASVFAPAXPSNVVPAWYTQXGPVSKRTRSSXGYGAAMPGGFDPETNYQYQPLPYVVESSPSDGASTDDMDCLQMMXAGDVPQDGASXGGGGAGDIWSLDELLMAAGAY

SEQ ID NO: 4323 - protein, 193 aa, Zea mays
  misc_feature (42)..(42): Xaa can be any naturally occurring amino acid
  misc_feature (133)..(133): Xaa can be any naturally occurring amino acid
  unsure (1)..(193): unsure at all Xaa locations
MSDSEDHHFQSKDDAGASKTYPQQAGTVRKNGFIVIKNRPCXVVEGSTSKTDKHGHAKCHFVAIDIFNVKKLEHIVPSSHNCDIPHVNRTEHHVIDISEDGFVRLLTSDDNAKDDVKLPTDETLVDHIKEGFXSVKDLGVTVQSAMMKGDIWTWKGVVPTCFLDFGDRTLLYLNLYPRRRVSPKDCYRDIHLP

SEQ ID NO: 4324 - protein, 199 aa, Zea mays
MTDVPFGVLLSGGLDSSLVASVTKRHLVETDAAGKFGTELHSFVVGLEDGIDAIEEVIYHDETYDVTTIRASTPMFLMARKIKSLGVKMEFHRETCRKVKALHQYDCLRANKATSAWGLEVRVPFLDKEFINVAMGMDPEWKMYDKNLGRIEKWVMRKAFDDDEHPYLPKHILYRQKEQFSDGVGYNWIDGLKSFTEQQ

SEQ ID NO: 4325 - protein, 194 aa, Zea mays
EHHIQTNHGSVSVAIYGEHDKPALITYPDIALNHMSCFQGLLFCPEAASLLLHNFCIYHISPPGHELGAAPILPSTPVASPDDLADHIADILDFFGLDSVMCLGVTAGAYILTLFAVCIYSLLQTTYRERVLGLILVSPLCKAPSWSEWFYNKVMSNLLHYYGMCNVLKDIMLQRYFGKVTKWLMLWYANAIFA

SEQ ID NO: 4326 - protein, 368 aa, Zea mays
  misc_feature (185)..(185): Xaa can be any naturally occurring amino acid
  unsure (1)..(368): unsure at all Xaa locations
MMMMGEGVSMPPWSHHVPVSGVDEGDEMTPYLLAALRQYLPCNDAGAEAEEDEAAAAMAAGVDGYGCDEFRMYEFKVRRCARARSHDWTECPFAHPGEKARRRDPRKYHYSGATCPDFRKGGCKRGDGCDMAHGVFECWLHPARYRTQPCKDGTACRRRVCFFAHTADQLRVLPPTPQQQSSPRXAPPALPPLAESYDGSPLRRQAFESYLTKSIMCSSPTSTLLSPPKSPPSESPPLSPDFRRGCWPGAGSPVNDVLASLRQLRLSRANSSPSGGWCSYPASAVAYGSPTGGALYGLSSTPRATAGSGYMANLDPLDVTFGGDEEPVERVESGRALRAKVFERLSREGAVSGDAGGPDVGWVSDLIN

SEQ ID NO: 4327 - protein, 238 aa, Zea mays
MAGDGECSSMHEQSFRWPSDQVDRSRSLTRAAALTKKTRPAARPPGWWANSRRALGIGRDDQANPNATAATAQHSTAQHVGMYPPKASGDPAAGAAPVTGFPVGGPAASSQWSSGLLDCFDDCGLCCLTCWCPCITFGRVAEIVDRGATSCGTAGALYAVLAYFTGCQWIYSCTYRAKMRAQLGLPETPCCDCLVHFCCEPCALCQQYKELKARGFDPVLGWDRNATMLPPSAQGMGR

SEQ ID NO: 4328 - protein, 317 aa, Zea mays
  misc_feature (167)..(167): Xaa can be any naturally occurring amino acid
  unsure (1)..(317): unsure at all Xaa locations
MASPHLPFLSFPKTLPPLPPPLKTHAHRTSLAAAPAPPPAPPDGAGPAAPTRGDRFLGRQLATEAAARVLAPEDADRRRRRKEKRRALARKPSGLASCYGCGAPLQTAEEAAPGYVDPDTYQLKKRHHQLRTVLCGRCKLLSHGHMVTAVGGHGGYPGGKKFVSAEXLREKLSYLRHEKALIVKLVDIVDFNGSFLARVRDFAGANPIILVITKATGLSSQLSRRSLSRKPFLTSRVLSVHLTSSKSLVGITGVISEIHQERKMLGGKMKRAISVQRYVHYIVYAIAIAININLTNFINSGNTTLENASCVSASQPL

SEQ ID NO: 4329 - protein, 263 aa, Zea mays
MSSMESRPGRTNLVEPIGHGAALPSGGQAVQPWWTSSGAVLGAVSPAVVAVAPGSGTGISLSSSPAGGSGGGGAAKGAASDESSEDSRRSGEPKDGSAIQEKNHATSQIPALAPEYLAPYSQLELNQSIASAAYQYPDPYYAGMVAPYGSHAVAHFQLPGLTQSRMPLPLEVSEEPVYVNAKQYHGILRRRQSRAKAELEKKVVKARKPYLHESRHQHAMRRARGNGGRFLNTKKSDSGAPNGENAEHLHVPPDLLQLRQNEA

SEQ ID NO: 4330 - protein, 160 aa, Zea mays
  misc_feature (50)..(50): Xaa can be any naturally occurring amino acid
  misc_feature (56)..(56): Xaa can be any naturally occurring amino acid
  misc_feature (126)..(126): Xaa can be any naturally occurring amino acid
  misc_feature (134)..(134): Xaa can be any naturally occurring amino acid
  unsure (1)..(160): unsure at all Xaa locations
MSDSEEHHFESKADAGASDTYPQHAATGRNNGFIFFKNRPCKGVQVSTSXTGKHGXHAKCHFGAINIFSVKKLGDIAPSSHYCDIPYVNRTEYQLIDISEDVFASLLTSYGKTNDDLRLPTDDTLXVQINEWFXSAKDLVVTVPSAMGEEHICALKDVAP

SEQ ID NO: 4331 - protein, 482 aa, Zea mays
MAPSVAVENLNPKVLKCEYAVRGEIVIHAQRLQQQLQTQPGSLPFDEILFCNIGNPQSLGQQPVTFFREVLALCDHPCLLEKEETKSLFSADAISRAKQILATIPGRATGAYSHSQGIKGLRDAIAAGITSRDGFPANADDIFITDGASPGVHMMMQLLIRNEKDGILCPIPQYPLYSASIALHGGALVPYYLDEKTGWGLEISDLKKQLEDARSKGIDVRALVVINPGNPTGQVLAEDNQYDIVKFCKNEGLVLLADEVYQENIYVDNKKFNSFKKIARSMGYGEDDLPLVSFQSVSKGYYGECGKRGGYMEITGFSAPVREQIYKVASVNLCSNITGQILASLVMNPPKVGDESYASYKAEKDGILQSLARRAKALEDAFNTLEGFSCNKAEGAMYLFPQIHLPHKAIEAAKAAKKAPDAFYALRLLESTGIVVVPGSGFGQVPGTWHVRCTILPQEDKIPAVITRFKAFHEAFMAEYRD

SEQ ID NO: 4332 - protein, 616 aa, Zea mays
  misc_feature (394)..(394): Xaa can be any naturally occurring amino acid
  misc_feature (407)..(407): Xaa can be any naturally occurring amino acid
  unsure (1)..(616): unsure at all Xaa locations
MRFDLDGLPVHFPYAAIYPEQHAYMGELKRALDARGHALLEMPTGTGKTAALISLITSYSLANPARPLRLIYCTRTVHEMEKTLAELRLLFAHLPPAASRSLLALGLSSRKNLCIHPQASAAAARDSVDTACRRLTASWVREKASSDPDSTPLCEFYETFDRAAAAGDLASFMPPGVYTLADLRALGRERRVCPYFLARQMVKYANVVVYSYQYLLDPKVASIVSREMQKECVVVFDEAHNIDNVCIEALSVSIRKQTLEGAERNLRRISQEIDSSQYYASCDEVSDAWLANPSLPDDILKEAVPGNIRRAEHFLAVLRRLVRFLDGRLETENVENEMPVSFVASIHSQAGIDQKMLRFCYDRLHSLMMTLEITDTDEFMHIQTICDFATLIGXTYTRGFSIIIEPXSCHDASLAIRPVFDRFETVVITSGTLSPIDLYPRLLNFNPVISRSFTMSLTRDCICPMVLTRGSDQLPVSTKFDMRSDPGVVRNYGRLLLEMASAVPDGIVCFFVSYSYMDGIVNSWHEMGILQDIMQHKLVFIETPDVVETTLALDNYRKACDCGRGAIFFSVARGKVAEGIDFDRHYGRLVIMFGVPFQYTLSRIFSRLEYLRETFR

SEQ ID NO: 4333 - protein, 643 aa, Zea mays
  misc_feature (173)..(173): Xaa can be any naturally occurring amino acid
  misc_feature (196)..(196): Xaa can be any naturally occurring amino acid
  misc_feature (229)..(229): Xaa can be any naturally occurring amino acid
  unsure (1)..(643): unsure at all Xaa locations
MATAATAAAALTGATTATPKSRRRAHHLATRRALAAPIRCSALSRATPTAPPATPLRPWGPNEPRKGSDILVEALERCGVRDVFAYPGGASMEIHQALTRSPVIANHLFRHEQGEAFAASGYARSSGRVGVCIATSGPGATNLVSALADALLDSVPIVAITGQVPRRMIGTDXAFQETPIVEVTRSITKHNYLVLXDVDDNPPASCREAFFLASSWVARGRCLVDIPQXTIQQQMAVPAWDTPMSLPGYIARLPKPPATEFLEQVLRLVGESRRPVLYVGGGCAASGEELCRFVELTGIPVTTTLMGLGNFPSDDPLSLRMLGMHGTVYANYAVDKADLLLAFGVRFDDRVTGKIEAFAGRAKIVHIDIDPAEIGKNKQPHVSICADVKLALQGMNALLEGSTSKKSFDFGSWHDELDQQKREFPLGYKIFNEEIQPQYAIQVLDELTKGEAIIGTGVGQHQMWAAQYYTYKRPRQWLSSAGLGAMGFGLPAAAGASVANPGVTVVDIDGDGSFLMNVQELAMIRIENLPVKVFVLNNQHLGMVVQWEDRFYKANRAHTFLGNPENESEIYPDFVAIAKGFNIPAVRVTKKSEVRAAIKKMLEAPGPYLLDIIVPHQEHVLPMIPSGGAFKDMILDGDGRTVY

SEQ ID NO: 4334 - protein, 251 aa, Zea mays
MAAAARQRGTVKWFNDTKGFGFISPEDGSEDLFVHQSSIKSEGFRSLAEGEEVEFSVSEGDDGRTKAVDVTGPDGSFVRGGGGGGGGGGGYGSRGGGGSGGGGRSYGGSWGGGRRSGGGGGPGACYKCGEPGHMARDCPSADGGGYGGGGYGGGGYGGGGGGGGGGGCFKCGEPGHMARDCSSGGGGYGGGGGGGGGGCYNCGQAGHMARDCPSGGGGGGGRFGGGGGGGGGDRSCYNCGEAGHIARDCPT

SEQ ID NO: 4335 - protein, 1246 aa, Zea mays
MSLPSNNRRTCSRSSSARSKHSARVVAQTPVDAQLHAEFEGSQRHFDYSSSVGAANRPSASTSTVSTYLQNMQRGRYIQPFGCLLAVHPDTFALLAYSENAPEMLDLTPHAVPTIDQRDALGIGVDVRTLFRSQSSVALHKAAAFGEVNLLNPILVHARTSGKPFYAILHRIDVGLVIDLEPVNPADVPVTAAGALKSYKLAAKAISRLQSLPSGNLSLLCDVLVREVSELTGYDRVMAYKFYEDEHGEVISECRRSDLEPYLGLHYPATDIPQASRFLFMKNKVRMICDCCATPVKVIQDDSLAQPLSLCGSTLRASHGCHAQYMANMGSVASLAMSVTINEDEEEDGDTGSDQQPKGRKLWGLVVCHHTSPRFVPFPLRYACEFLLQVFGIQLNKEVELAAQAKERHILRTQTLLCDMLLRDAPVGIFTRSPNVMDLVKCDGAALYYQNQLLVLGSTPSESEIKSIATWLQDNHDGSTGLSTDSLVEAGYPGAVALREVVCGMAAIKISSKDFIFWFRSHTTKEIKWGGAKHEPVDADDDGRRMHPRSSFKAFLEVVKWRSVPWEDVEMDAIHSLQLILRGSLPDEDANRNNVRSIVKAPSDDMKKIQGLLELRTVTNEMVRLIETATAPVLAVDIAGNINGWNNKAAELTGLPVMEAIGRPLIDLVVTDSIEVVKQILDSALQGIEEQNMEIKLKTFHEHECNGPVILKVNSCCSRDLSEKVIGVCFVAQDLTRQKMIMDKYTRIQGDYVAIVKNPTELIPPIFMINDLGSCLEWNKAMQKITGIKREDAINKLLIGEVFTLHDYGCRVKDHATLTKLSILMNAVISGQDPEKLFFGFFDTDGKYIESLLTVNKRTDAEGKITGALCFLHVASPELQHALQVQKMSEQAATNSFKELTYIRQELRNPLNGMQFTCNLLKPSELTEEQRQLLSSNVLCQDQLKKILHDTDLESIEQCYMEMNTVEFNLEQALNTVLMQGIPLGKEKQISIERNWPVEVSCMYLYGDNLRLQQILADYLACALQFTQTAEGPIVLQVMSKKENIGSGMQIAHLEFRIVHPAPGVPEALIQEMFQHNPGVSREGLGLYISQKLVKTMSGTVQYLREADTSSFIILMEFPVAQLSSKRSKPSTIGEASSSDAGGRSSPQLDVNTVSPVECRNHTCPTSVSEAEEYGAKSRGRQAHDHERESGNKASERPPGVAASNCSRTPSQSSASALGVGGRSPQLSRLRGAIPCVHVAVSVARA

SEQ ID NO: 4336 - protein, 146 aa, Zea mays
DAAANGHHHQSKKTRTAAARRDDDGGGGDGGRKKLRLTAAQATLLEDSFRAHSILSHVCRTHARIHPAPMHAYVFLQSCIRADGSNPIYQGEKQELARQAGLSARQVEVWFQNRRARTKLKQTEVDCDLLRRWCARLSDDNDRLRR

SEQ ID NO: 4337 - protein, 221 aa, Zea mays
MARPCRSSSSAAARLLLLLAAVAAALQAAAATPPVASGFIRKSCRATQYPSVCEQSLAAYGGSPPPRSPRELARAALAVSADRARAASAYVGRLCGSRSGSGDGSPRRGAGAGAKKGSAAAGPVRDCLENLADSVGHLRDAAQEIGGAGMARAGTRAFRWHLSNVQTWCSAALTDENTCLDGLSSRAVDAATRAAVRGRVVEVAQVTSNALALVNKVGPGY

SEQ ID NO: 4338 - protein, 987 aa, Zea mays
MADSMDMAQARADELLARNIASVVNRPVSVGASFCEDCDAPIPEQRRRAVRGVTRCVSCQDTAERYAKVSKGGDRLVEPFAGSCAVMMSTDYPSYLVADINPDLINLYRQIKEHTRPFIVVAASLFNQNTTGESYYSVREAFNHNPALPLLERAAHFLYLNRNGYRGLCRYNRRGEFNIPFGNYSKPYFPLAEIEAFAIKAQRATFICADFRETLRLTKSGDVVYCDPPYDGTFADYHSAGFGKDEHHDLVSMLLDVSERCPVVVSNSDTLYTRSILSDFSITSISVARSVGVAAGEGKRASEIIAVRQPKAALIFTGFDMAAGPNRSVIVEWLLAIEAGVTFEAAVADTGHEHPETVKYLEYLETKLGPLRRVRADFTQRIADKRTFVKDKWPVTLVRDLRFTEEEAAKIVRRALNALKPTGIPFLDMCIWKGTFPSTQRKFCSFELKQIPMQEQVVDPLVAEGKHVITWQGVRAQESAKRSELPEWEAGFDLGPGLSIYRPILKWTHDEVFALARRHGIKPNPLYQQGCSRVGCMPCVNVNKAELGEIFTRWPEEISRVAEWERIVALCSRRGNAAFFHSGMDPVKAETDGSKQRLSGGLRVIQEYAYPWNAPREAIASPYPTYEEMHSRSQMIAALVRAQELLEKQPTLIQFDVKRRVSELEKTQGIDRANAYLAKTFVERTLPRVETVNAQYRLGEMSHGTFNLLAGNATKQAGAASAGGTLWELMCRFNRLPDMARADVDLLAGDVANFILAELVQAHAQASDESDYKYTHRVYMTAATITRELSQTPPLWDKVTSRLFDPEEVTPAIMRMQTEKWWKGRLRRVDASWREHLQIALANVSKKHAPYASSMTVSEGLRSGDSKPPESYEKIDLDGMSRKERRRLLSRIRSEKPEKRHLRLRRSDKIESACEKLIGQVRDLSGETISRGLAVRLIGGTQTKIGGHFFRSLPDGELARPILEPKSTFVLERFNRLAEKQRSKSKH

SEQ ID NO: 4339 - protein, 156 aa, Zea mays
  misc_feature (18)..(18): Xaa can be any naturally occurring amino acid
  misc_feature (60)..(60): Xaa can be any naturally occurring amino acid
  misc_feature (141)..(141): Xaa can be any naturally occurring amino acid
  unsure (1)..(156): unsure at all Xaa locations
SLLDRDRHVWTRLEHHYXSKADTGASDIYPQHAATGRNNGFIFFINRPCKGVPVSTSPTXKHGHATCPVRPLNIFSVKKLGDIAPSSPCCDFPYVHLTEYQMIAISEDVSASLLTSCGMTIDDLRLPTDDTLEFRIIESFXARRIYVVTVPSALGE

SEQ ID NO: 4340 - protein, 157 aa, Zea mays
MGFVSFVGRVLFVAAFLLSAYQEFNEFGTDGGPAAKALQPKFNVFVKNISAQLGVAVPHIELKHVIAATIGLKGLGSLLFILSSSLGAYLLLFYLALITPIIHDFYNYDMEKAEFAQLFGKFTQDVALIGALLFFLGMKNSIPKRQGKKKAAKAKTN

SEQ ID NO: 4341 - protein, 409 aa, Zea mays
  misc_feature (268)..(268): Xaa can be any naturally occurring amino acid
  misc_feature (292)..(292): Xaa can be any naturally occurring amino acid
  misc_feature (383)..(383): Xaa can be any naturally occurring amino acid
  misc_feature (395)..(395): Xaa can be any naturally occurring amino acid
  unsure (1)..(409): unsure at all Xaa locations
GPSRDTLERPRRTGTFWTASAHIITAVIGSGVLSLAWAIAQLGWVAGPAAMLLAECYRTGDPDTGKRNYTYMDAVRSNLGGAKVAFCGAIQYANLVGVAIGYTIASSISMQAVSRAGCFHKRGHAVPCKSSSNPYMILFGAVQILFSQIPDFDQIWWLSIVAAVMSFTYSAIGLSLGIAQTVANGGFKGSLTGISIGADVTSTQKVWHSLQAFGDIAFAYSFSNILIEIQDTIKAPPPSESKVMQKATRLSVATTTIFYMLCGCMGYXAAFGDKAPDNLLTGFGFFEPFWLXPDSAFVSRELRVGPFALSVFRLTWRSAFVCVTTVVAMLLPFFGNGVGFLGAVSFWPLTVYFPVEMYIKQRRVPRGSTKWVCLQTLSVACLXVVSIAAAAGSIXDVIEALKVSPPFSS

SEQ ID NO: 4342 - protein, 317 aa, Zea mays
RSTCLHWPSGFRRTPPPTRTTGQSSSIKQVRSGPRLPRSLYSAVPGDFNLTLLDHLIAEPGLRLVGCCNELNAGYAADGYARARGVGACAVTFTVGGLSVLNAIAGAYSENLPVICIAGGPNSNDYGTNRILHHTIGLPDFSQELRCFQTVTCHQAVVNNLDDAHEQIDTAIATALRESKPVYLSISCNLPGLPHPTFSRDPVPFFLTPRTSNKMGLEAAVEATVEFLNKAVKPVLVAGPKLRVAKAGKAFVDMVDASGYAYAVMPSAKGLVPETHPHFIGTYWGAVSTAFCAEIVESADAYLFAGPIFHDYSSVGY

SEQ ID NO: 4343 - protein, 305 aa, Zea mays
MRNQERMRGALSLSDQLRSPRQTRVRGNGNKSHSQAEIDPYLGAITIDIEVTRLDANINDAKFSFLCVELALMWRIPSTAISARPRRSRSQRSPAIRSPCLGSAIREAGGDPFVAVGGHFQIPSSAAINALLIDPVIRCESPFSSPSRLRRRRFEFWFMGFVRYQVSLHELEKAIEQANSDVSNLPWYDDDKAVVTPSVPYDPLALRKAFEKAVVKRLMTDVPFGVLLSGGLDSSLLAAVAVRHLAGTEAARRWGTKLHSFCVGLEGSPDLKAAREVAEYLGTLHHEFHFIVQDGIENWITKVAI

SEQ ID NO: 4344 - protein, 93 aa, Zea mays
  misc_feature (50)..(50): Xaa can be any naturally occurring amino acid
  unsure (1)..(93): unsure at all Xaa locations
NGKKLEDIVPSSHNCDIPHVNRTEYQLIDIFEEGFVGLLSSDGNPKDDFXLPTDETFVAPIKEGFESGKDFFLSFPFSMGGGQICALKDVGPQ

SEQ ID NO: 4345 - protein, 181 aa, Zea mays
  misc_feature (162)..(162): Xaa can be any naturally occurring amino acid
  unsure (1)..(181): unsure at all Xaa locations
MVRGKTQMKRIENPTSRQVTFSKRRNGLLKKAFELSVLCDAEVALVVFSPRGKLYEFASGSAQKTIERYRTYTKDNVSNKTVQQDIERVKADADGLSKRLEALEAYKRKLLGERLEDCSIEELHSLEVKLEKSLHCIRGRKTELLEEQVRKLKQKCKKQPPXVPMASAPPRAPAVDKRRTV

SEQ ID NO: 4346 - protein, 357 aa, Zea mays
  misc_feature (341)..(341): Xaa can be any naturally occurring amino acid
  unsure (1)..(357): unsure at all Xaa locations
MAAVAAPAPPPPRQLSLEDLKVVSVLGRGAKGVVFHVVHAPGELDGEGEGGAAAAAMALKAVSREAARHKKAASGDGDGHRRIWFERDVLLALRHPLLPSLRGILATDAIVGFAMDRCGGGDLNSLRRRQTEKMFSDSVIRFYAAELVLALEYLHSLGVVYRDLKPENVLIQDSGHIMLVDFDLSTRLPAQPQEPDAPATSPKPAPPVAAPSPIRGRARKPAGAALCFPFRTTGSAAKPAADSPSPLSTSRTASSSSSSSTATTASSSAASAGARTPAKSNSFVGTEDYVAPEIIAGRGHDFAVDWWGLGVVLYEMLYGRTPFRGQNRKETFYRVLAKQPXELVGEQTPLRDLIARS

SEQ ID NO: 4347 - protein, 251 aa, Zea mays
  misc_feature (26)..(26): Xaa can be any naturally occurring amino acid
  misc_feature (192)..(192): Xaa can be any naturally occurring amino acid
  unsure (1)..(251): unsure at all Xaa locations
MAAAARQRGTVKWFNDTKGFGFISPXDGSEDLFVHQSSIKSEGFRSLAEGEEVEFSVSEGDDGRTKAVDVTGPDGSFVRGGGGGGGGGGGYGSRGGGGSGGGGRSYGGSWGGGRRSGGGGGPGACYKCGEPGHMARDCPSADGGGGYGGGGYGGGGYGGGGGGGGGCFKCGEPGHMAQGLPPAGGGGYGGGXGGGGGGGCYNCGQAGHMARDCPSGGGGGGGRFGGGGGGGGDRSCYNCGEAGHIARDCPT

SEQ ID NO: 4348 - protein, 84 aa, Zea mays
KLFAAWYERRQMRKIYSPLLEGILAFYLGFEWIQTDNILAPMITHGIYSTVVLGHGLWKIHDHRRRLRQRIQQVRSQESSSDTL

SEQ ID NO: 4349 - protein, 459 aa, Zea mays
MAAVAAGELAAFLTGANLIMEYVFSNAAVARSFTAYLGTAVGVDAPREWRIAVRGLPEGFNQVDLVAVAVILLVSVCICYSTKESSAVNLALTAVHVAFILFVIGMGFRHGDARNLTRPADPARSPGGFFPHGAAGVFNGAAMVYLSYIGYDAVSTMAEEVQRPARDIPAGVSGSVVVVTVLYCLMAASMSMLLPYDAIDPEAPFSGAFKGRERCAWVSNVVGAGASLGILTSLMVAMLGQARYLCVIGRSGVMPAWLARVNPRTATPVNASAFLGLFTAALALFTELDILLNLVCIGTLFVFYMVANAVVYRRYAGAGATWPTLAFLLVFSLAALAFTLAWKLAPPEPRGLRAGLLAACAALAAAAVAAFQALVPQARSPQLWGVPGMPWVPAASVFLNVFLLGSLDRPSYVRFAIFSAAALLVYVLYSVHASYDAEESGRLDVDAAGGKVQDEACTV

SEQ ID NO: 4350 - protein, 471 aa, Zea mays
MVGAMRGGAMELEDRLATLPRFRGDHDDDGKERRTGTVWTATAHIITAVIGSGVLSLAWAMAQLGWVAGPLTLVLFAAITFYTCGLLADCYRVGDPVTGKRNYTYTEAVKSNLGGWYVWFCGFCQYVNMFGTGIGYTITASISAAAINKSNCFHWHGHDADCSQNTSAYIIGFGVVQVIFSQLHNFHKLWWLSIIAAIMSFSYSAIAVGLSLAQIVMGPTGKTTMTGTLVGVDVDAAQKVWMTFQALGNVAFAYSYAIILIEIQDTLRSPPAENKTMRRATMMGISTTTGFYMLCGCLGYAAFGNAASGNILTGFGFYEPFWLVDFANACIVVHLVGGFQVFCQPLFAAVEGAVAARYPGSTREYGAAGLNVFRLVWRTAFVAVITLLAILMPFFNSILGILGSIAFWPLTVFFPVEMYIRQRQVRRFSTKWIALQSLSFVCFLVTAASCAASVQGVVDSLKTYVPFKTRS

SEQ ID NO: 4351 - protein, 161 aa, Zea mays
  misc_feature (36)..(36): Xaa can be any naturally occurring amino acid
  unsure (1)..(161): unsure at all Xaa locations
MAAAGVDGERRIGVAIDYSESAKKALDWAIDNLLHXLVVVHVLHHGAEETKHTLWAKSGSPLIPLSEFREPEVMQGYGVRPDAEVLDAIDTAARQKQLKVVAKLYWGDAREKLCDAVEDLRIDSLVMGSRGLGPIQRILLGSVTNYVLSNASCPVTVVKGK

SEQ ID NO: 4352 - protein, 388 aa, Zea mays
  misc_feature (5)..(6): Xaa can be any naturally occurring amino acid
  misc_feature (8)..(8): Xaa can be any naturally occurring amino acid
  misc_feature (12)..(14): Xaa can be any naturally occurring amino acid
  unsure (1)..(388): unsure at all Xaa locations
VGGKXXYXYMDXXXASLGGAKVRLCGAIQYANLFGVAIGYTIGGCISMLAIKRADCFHAKGHKHACRSSSNPYMILFGVGEVVFSQIPDFDQIWWLSIVAAVMSFTYATIGLVLGIMQTVANGGFQGSLTGISIGAGVTPTEKVWRSLQAFGNIAFAYSYSIILIEIQASRAALFCSDTVKAPPPSEAKVMKRATMVSVATTTVFYMLCGCMGYAAFGDAAPDNLLTGFGFYEPFWLLDIANVAIVVHLVGAYQVFCQPLFAFVEKWAAATWPDSAFIAREFRVGPFALSLFRLTWRTAFVCLTTVAAMLLPFFGDVVGLLGAVSFWPLTVYFPIEMYVVQRAVRRWSTHWICLQMLSAACLLVSVAAAAGSIADVIGALKVYRPFSG

SEQ ID NO: 4353 - protein, 132 aa, Zea mays
MALEKAKEIIASSPVDLALRKAKETVASHPVVVFSKTYCPFCTRVKQLLAKLGASYKAIELDVESDGAELQSALAEWTGQRTVPNVFVKGERIGGCDATMAMHDGGKLVPLLTEAGAIVTARATATTTTPSL

SEQ ID NO: 4354 - protein, 145 aa, Zea mays
FQVHASSGHKYSLKEVLCDLTVASRLSDTKAAGEVKALDDFYKMLQHDPDRAFYGFKQVERANEALAIDTLLFSDEFFRHQDVATRSRYVRLVDSVKENAGPVRIFSSLHVSGEQLGQLTGVAAIFRFPVPELSDQEDDSSSEED

SEQ ID NO: 4355 - protein, 141 aa, Zea mays
LVWFFQRITEMAGIVLSLDPKPIKGDWNGAGAHTNYSTKSMREAGGYEVIKAAIDKLGKRHKEHIAAYGEGNERRLTGRHETADINTFKWGVANRGASIRVGRDTEREGKGYFEDRRPASNMDPYVVTGMIAETTILWNGN

SEQ ID NO: 4356 - protein, 258 aa, Zea mays
MAASAPAVRPLARAAIPIPLSARPRTARVSLLPLAPLAPAQRLALGRTGQARLPARSRSVRCLAALSPEMRETLDKVVGSSKVLLFMKGTKDFPQCGFSHTVVQILRSLDVPFETLDVLANEALRQGLKEYSSWPTFPQLYIDGEFFGGCDITVGKLLYVLSLHSQMLEPVRFTELTISCGARTLERPQVLDRRHGTRRSPLAVAGEKPALTLSTSVLCPSHPHSPHRSCCFLYAFCSCYNVHSDTERHTRVENCRKL

SEQ ID NO: 4357 - protein, 270 aa, Zea mays
GSREVELDDVWFAYPSRPSHMILKGITLKLAPGSKVALVGPSGGGKTTIANLIERFYDPLKGRILLNGVPLAEISHQYLHSKVSIVSQEPTLFNCTIEENIAYGLEGTTNFADVESAAEMANAHNFICGFPDQYKTVVGERGIRLSGGQKQRIAIARALLMNPRVLLLDEATSALDAESEYLVQDAMDSLMKGRTVLVIAHRLSTVKSADTVAVISDGLIVESGTHDELLDRDGIYTALVKRQLQGPKFEATSSISEASEIEAEPSSNGQ

SEQ ID NO: 4358 - protein, 173 aa, Zea mays
  misc_feature (56)..(56): Xaa can be any naturally occurring amino acid
  unsure (1)..(173): unsure at all Xaa locations
MPDSEENHFESKDDAGASKTYPQQAGTVRKNGFIVINNRPCKDEEVSTSKTGKHGXHAKCHFVAIDIFNGKKIKDIVPSSHNCDIPHANRTENQLIDISKDGFVSLLTSDGNTKDDLRLPTDETLVAQIKEGFESGKDLDETVQSAMGEEQICALNDVGPKELPLLGILYLKT

SEQ ID NO: 4359 - protein, 654 aa, Zea mays
MCGILAVLGCADEAKQGSSKRSRVLELSRRLKHRGPDWSGLRQVGDCYLSHQRLAIIDPASGDQPLYNEDQSVVVAVNGEIYNHLDLRSRLAGAGHSFRTGSDCEVIAHLYEEHGEEFVDMLDGVFSFVLLDTRHGDRAGSSFFMAARDAIGVTPLYIGWGVDGSVWISSEMKALHDECEHFEIFPPGHLYSSNTGGFSRWYRSNPYEYDDDEEAVVTPSVPYDPLALRKAFEKAVVKRLMTDVPFGVLLSGGLDSSLVAAVAVRHLAGTEAARRWGTKLHSFCVGLEGSPDLKAAREVAEYLGTLHHEFHFTVQDGIDAIEDVIYHTETYDVTTIRASTPMFLMSRKIKSLGVKMVISGEGSDELFGGYLYFHKAPNKEELHRETCRKVKALHQYDCLRANKATSAWGLEARVPFLDKEFINAAMSIDPEWKMVRPDLGRIEKWMLRKAFDDEEQPFLPMHFLDKEFINAAMSIDPEWKMVQPAHGRIEKLVLRKAFDDEEQPLLPKHILYRQKEQFSDGVGYSWIDGLKAHATSNVTDKMLSNAKFIFPHNTPTPKEAYYYRMVFERFFPQKFAILTVPGGPSVACSTAKAIEWDAQWSGNLDPSGRAALGVHLAAYEHQHDPEHVPAAIAAGSGKKPRTIRVAPPGVAIEG

SEQ ID NO: 4360 - protein, 490 aa, Zea mays
MAGFTCSAADLRPLLGTAANATAAAEYICNAFDTVSNKLVAATYAIDNTYLLFSAYLVFSMQLGFAMLCAGSVRAKNTMNIMLTNVLDAATGSLFYYLFGFALAFGSPSNGFVGRHFFGLEKYPSPSGDYSFFLYQWSFAIAAAGITSGSIAERTQFVAYLIYSSFLTGLVYPIVSHWFWSTDGWASPVREGHLLFGSGVIDFAGSGVVHMVGGIAGLWGALVEGPRMGRFDGDGKPVLLRGHSGTLVVLGTFLLWFGWYGFNPGSFLSILKTYEHTNYSSYYGQWSAIGRTAVTTTISGSSAALTTLFGKRLLTGHWNVTDVCNGLLGGFAAITGGCSVVDPWAAIICGFIAAWVLIGCNKLAEMLKYDDPLEAAQLHGGCGAWGIIFTALFAKKDYVNEIYPGKPGRPHGLLMGGGARLLAAHLIQILVVIGWVSVTMGSVFWLLKVFGLLRISADEEMAGLDEPYNGKLEMAYNGMLIGAVVCPQHM

SEQ ID NO: 4361 - protein, 164 aa, Zea mays
MAAAGADGERRIGVAIDYSESAKKALDWAIDNLLHHGDTLVVVHVLHHGAEETKHTLWAKSGSPLIPLSEFREPEVMQGYGVRPDAEVLDAIDTAARQKQLKVVAKLYWGDAREKLCDAVEDLRIDSLVMGSRGLGPIQRILLGSVTNYVLSNASCPVTVVKGK

SEQ ID NO: 4362 - protein, 161 aa, Zea mays
  misc_feature (32)..(32): Xaa can be any naturally occurring amino acid
  unsure (1)..(161): unsure at all Xaa locations
KTTSCFHSQVSGVTTTSSLSLPPRTPLVLTHXPIFHFQPRQLKRSSTTIRCSSALTPQLKSTLDKVVTSNKVVLFMKGTKDFPMCGFSNTVVQILKSLNVPFETINVLDNDILRQGLKEYTNWPTFPQLYIEGEFFGGCDITVEAYKSGELQELLEKAMCS

SEQ ID NO: 4363 - protein, 289 aa, Zea mays
  misc_feature (262)..(262): Xaa can be any naturally occurring amino acid
  unsure (1)..(289): unsure at all Xaa locations
RVDPASAHAFERELLQLQANAYSPVCAKWTTERCAVCRWVEDWDYNKIIICNRCQIAVHQECYGARAVQDLTIWLCRACEFSQQKRECCLCPVKGGALKPTDVDGLWVHVTCAWFQPKVSFPVEETMEPAMGIMSIPAEYFKKTCVICKQMHGACTQCYKCSTYYHAMCASRAGYRMELQHYERSGRHITKMVSYCDFHSTPDPDNVLIVKTPEGVFSTKFFVQNGEKQTAARLARKENYQEKVLPPIVSDGLVAKCLTYEXVKIQKDQERLLPTDMGPRHTPRFIDGL

SEQ ID NO: 4364 - protein, 149 aa, Zea mays
  misc_feature (49)..(49): Xaa can be any naturally occurring amino acid
  misc_feature (140)..(141): Xaa can be any naturally occurring amino acid
  unsure (1)..(149): unsure at all Xaa locations
ESKADAGASKTYPQQAGTIRKNGYIVINNRPCKVVEVSTSKTGKHGHAXCHFVGIDIFTGKKLEDIVPSSHNCDVPHVNRTDYQVIDISQDGFLSLLTDSGGTKDDLRLSTDENLLTQIKDGFAEGKDLAVSVMSAMGEXXICALKDIG

SEQ ID NO: 4365 - protein, 106 aa, Zea mays
MALEKAKEIVASSPVDMALRKAKETVASHPVVVFSKTYCPFCTRVKQLLAKLGASYKAIELDVESDGAELQSALAEWTGQRTVPNVFVSWLYASVVRSTKLIRGKR

SEQ ID NO: 4366 - protein, 138 aa, Zea mays
MEPHHANKPRPKLSATKHSKFISCKLYISESRNATAVDAVERASKSDPQVVVVSQFGDHHYNRFRYTLVSYIVVATVVHSPIRKVLLAMIEAAFSSIDLESQSGAHPRIGVVDDLSFHLVGQATIEDAASLARQVASD

SEQ ID NO: 4367 - protein, 319 aa, Zea mays
MDIMALNARDEEQYGNNHLGLGLSLSLGLGVATAAPVEVEPPPPPRQQQQRAISVAPITSLPAPQWWKWNGPGLFFGTTMDQQQQPAAARHGHEMPFLRGVDVNRAPAGDTRRGSCSEDDEEPGGASSSPNSTLSSSLSGKRAAPARSGGEVADHTPRAGGGSDDEDSGGGSRKKLRLSKDQAAVLEESFKEHNTLNPKQKAALAKQLNLKPRQVEVWFQNRRARTKLKQTEVDCEFLKRCCETLTEENRRLQREVAELRVLKLVAPHHYARMPPPTTLTMCPSCERLASASASADQAGRAGPCWGPLPVFVDGPARRP

SEQ ID NO: 4368 - protein, 656 aa, Zea mays
MGQCYGKARGASSRADHDADPSGAGSVAPPSPLPANGAPLPATPRRHKSGSTTPVHHHQAATPGAAAWPSPYPAGGASPLPAGVSPSPARSTPRRFFKRPFPPPSPAKHIKATLAKRLGGGKPKEGTIPEEGGAGAGAGAGAGAAVGAADSAEADRPLDKTFGFAKNFGAKYDLGKEVGRGHFGHTCSAVVKKGEHKGHTVAVKIISKAKVRGDHGSRERGMLLMSNSTYGKFQIVALAVQMTTAISIEDVRREVKILKALSGHDNLVRFYDACEDALNVYIVMELCEGGELLDRILARGGRYTEEDAKAIIVQILSVVAFCHLQGVVHRDLKPENFLFTTRDESAPMKLIDFGLSDFIRPDERLNDIVGSAYYVAPEVLHRSYSMEADIWSIGVITYILLCGSRPFWARTESGIFRSVLRADPNFDDSPWPSVSAEAKDFVKRFLNKDYRKRMTAVQALTHPWLRDEQRQIPLDILIFRLVKQYLRATPLKTFGIKGTALSKALSEDELLYLRLQFKLLEPRDGFVSLDNFRAALTRYSTDAMRESRVLEFQHALEPLAYRKMDFEEFCAAAISPYQLEALERWEEIAGTAFQHFEQEGNRVISVGELAQELNLAPTHYSIVQDWIRKSDGKLNFLGFTKFLHGVTIRGSNTRRH

SEQ ID NO: 4369 - protein, 490 aa, Zea mays
MDEDRSADPARSGRLLSPTSGQPQTQTQSQPPLPMDLASQYQRLFAPSVFLPPMAPPPPRLASSSCFSAFSNYQSLPTLAPAVGAGSHLARSVPKPPLFSVDSLAPLPYSTSPAARAAAGAGAAVPRSPPSPGSSELQGPSASGLPPRGAGHRRSRSDFLVGFSGANQLHLPMTPAAGAYRPRDASALEELFRSYRDPNLGSSGDNNNERNDHLSRQLTGQRAWSPGDNSDNEAESWAVSGSADTSASHPRHCRSLSVDSIMANLNFGGLDQVSLRVPPLSPVADASVSLSRTGTGASGGAAAAASSELTNGEFSEAEMKKIMANDRLAEIALSDPKRVKRILANRISAAKSKERKVKYMGELERKVRVLQTETNTLSSKAALSQRECEALRTLNNEMKIRLQAMEQQAQLKDALNEALTAEVQRLKQMAGEASDLHVPNGSHHHMNRQILEQQLQQVQKQPSEAQQAQQQQQQPQEPEQFKAQQKQWNH

SEQ ID NO: 4370 - protein, 214 aa, Zea mays
IRHEFAWEIVPIEVPVGRGKPPVLIEKDESLDNFDPAKLKKLRPSFKENGGTVTAGNASSISDGAAALVLVSGQKAQELGLQVLARIRGYADAAQAPELFTTTPALAIPKAISNAGLESSHVDFFEINEAFSAVALANQKLLGIPSEKINVHGGAVSLGHPLGCSGARILVTLLGVLREKGGKIGVAGVCNGGGGASVLVSNSHKKHWLEALDM

SEQ ID NO: 4371 - protein, 547 aa, Zea mays
MWLWTRQKSPPVGRRPGKVSSIRPLRATQSASPTQGWIASADELYSLLTVLVTRLATRHELRALRFPNAGCWPMAQHHGSHSLEVGGVGAGGVELDDDGHAARTGNLWTCFAHIITAVIGCGVLALSWSVAQLGWVGGPVAMLCFAFVTYLSAFLLSHCYRSPASDDGSLKRQRNYTYMDAVRTHLGEKRTWLCGLFQYLNMYGTAIAYTITTATCLRAIVRANCYHSQGHSAPCGAGGDHLYMLLFGAAQAVLSLIPNFHSMAWLSAVAAVMSFTYATIGLGLGLAKTIENGAIKGSVAGVPMSTAPQKVWRVAQAIGDIAFAYPYTIVLLEIQDTLKSPPPESETMQKGNVLAVLATTFFYLAVGCFGYAAFGNAAPGNLLTGFGFYEPYWLIDFANACIVLHLLGGYQMFSQQIFTFADRSLAARFPNSAFVNKSYAVKVPGAPASWSYSLNLQRLCFRTAYVASTTGLALLFPYFNEVLGVLGAVVFWPLAIYLPVEMYCVQRGVLPWTRTWVALQAFSVVCFVVGTFAFVGSVEGVIRKRLG

SEQ ID NO: 4372 - protein, 165 aa, Zea mays
  misc_feature (30)..(30): Xaa can be any naturally occurring amino acid
  unsure (1)..(165): unsure at all Xaa locations
MAAAGADGERRIGVAIDYSESAKKALDWAXIDNLLHHGDTLVVVHVLHHGAEETKHTLWAKSGSPLIPLSEFREPEVMQGYGVRPDAEVLDAIDTAARQKQLKVVAKLYWGDAREKLCDAVEDLKIDSLVMGSRGLGPIQRILLGSVTNYVLSNASCPVTVVKGK

SEQ ID NO: 4373 - protein, 150 aa, Zea mays
  misc_feature (116)..(116): Xaa can be any naturally occurring amino acid
  unsure (1)..(150): unsure at all Xaa locations
MESGRLIFNAPGSGAGQMLFLDCGAGGGPGGGLFHRGGRPMLGLEEGRGVKRPFFTSPDELLEEEYYDEQLPEKKRRLTPEQVLLLERSFEEENKLEPERKTELARKLGLQPRQVXVWFQNRRARWKTKQLERDFDRLKASFDALRAGHD

SEQ ID NO: 4374 - protein, 497 aa, Zea mays
ELRIGDRRSPTTFSVHPPGDRTTALGEGGDHGAALPLIADQAKHAAAGGIVRSGSMWTAAAHVITAVIGSGVLSLAWSIAQLGWVAGPAAMLVFAAVTALQSTLFADCYRSPDPEHGPHRNRTYAKAVDRNLGSSSSWVCMLLQHTALFGYGIAYTITASISCRQEAYLGLRLAAANCYHEHGHDAHCDYDGNYYMLIFGGVQLLLSFIPDFHDMAWLSVVAAAMSFSYAFIGLGLGLARTIANGTIKGSITGVRMRTPMQKVWRVSQAIGDIAFAYPYSLILLEIQDTLKSPPAENKTMKRASMISILVTTFFYLCCGCLGYAAFGSDAPGNLLTGFGLYGPYWLIDFANACIILHLLGGYQVYSQPIFQFAERLLAERFPDSGFVNGGSYTVRFACLRACRVDPLRVCLRTLYVASTTAVAVALPYFNEVLALLGALSFWPLAIYFPVEMYFIQRNVRRWSARWVVLQTFSVVCLLVSAFALVGSIEGLISKKLG

SEQ ID NO: 4375 - protein, 242 aa, Zea mays
MGHPSSIHSFYLYSEYMATAAAAATSSSSSSSSDSLPFSMVCGDEAPAAVSWRAADAEVSVAAVPGAGLRQAPSKGAFIGVRRRPWGRFAAEIRDSTRNGARVWLGTFDSAEAAAMAYDQAALSARGSAAALNFPVERVQESLRALALGGNAAGASASAGGSPVLALKSRHSKRKRRKKSELLAAAAAKGAAAAAKATAAGGRSQIKNAAAAAEQQRFVVELEDLGAEYLEELLRISESYSS

SEQ ID NO: 4376 - protein, 547 aa, Zea mays
  misc_feature (495)..(495): Xaa can be any naturally occurring amino acid
  misc_feature (514)..(514): Xaa can be any naturally occurring amino acid
  unsure (1)..(547): unsure at all Xaa locations
MGEVATMSLEVMKLAAVPKANVDMFVAHRSKRRVVSSAGDSIEKATKLKAARNLDSSFAEVRRGRRDSIRGREGGSSLSQLAMAPAPHNGLNNNHPVAPMDVSVEAGNAGAAEWLDDDGRPRRSGTFWTASAHIITAVIGSGVLSLAWAIAQLGWVAGPAAMLLFAFVTYYTAALLAECYRTGHPETGKRNYTYMDAVRSNLGGVKVVFCGVIQYANLVGVAIGYTIASAISMKAVRRAGCFHAHGHADPCKSSSTPYMVLFGGVQILFSQIPDFDQIWWLSIVAAVMSFTYSSIGLSLGIAQTVSNGGFKGSLTGISIGAGVTSTQKIWHTLQAFGDIAFAYSFSNILIEIQDTIKAPPPSESKVMQKATRLSVATTTVFYMLCGCMGYAAFGDNAPDNLLTGFGFYEPFWLLDVANVAIVVHLVGAYQVFCQPIFAFVERRAAAAWPDSAFVSRELRVGPFSLSVFRLTWRSAFVCVTTVVAMLLPFFGDVVXGLLGAVSFWPLTVYFPVEXTLSVSCLLVSVAAAAGSIADVIAALKVYKPFSG

SEQ ID NO: 4377 - protein, 442 aa, Zea mays
MAAQTEADHTRCSGVGVDEVQATKTVDGWCWTADRPAKRGMHPSSCPLCDQEPESINHLLVSCVFARIFWYKLLRKFGLHSLAPQLGLTSLMVKKAIRCAMATGKEQGAISTASSGDQTKGGAVYERKYLLGTSMARPVIAKAMVDVAKEVGADAVAHGCTGKGNDQVRFELTFYALNPELKVVAPWREWDITGREDAIEYAKKHNVPVPVSKKSIYSRDRNLWHLSHEGDILEDPANEPKEDMYMMSIAPENAPSKPEYLEIGIIAGVPVSINGRDLSPASLLAELNEIGGKHGIGRIDMVENRLVGMKSRGVYETPGGTIMAAAVRELESLTLDRETMQWKDIIALKYAELVYAGRWFDPLRQSFDAFMEKVTATTTGSVTLKLYKGSVNVASRKSPYSLYREDISSFENGEIYNQADAEGFIRLYGLPTRVRAMLEKGI

SEQ ID NO: 4378 - protein, 151 aa, Zea mays
PYADPYYGGAGAAAYGPHAIMHPQLVGMVPSSRVPLPIEPAAEEPIYVNAKQYHAILRRRQLRAKLEAENKLVKSRKPYLHESRHLHAMKRARGTGGRFLNTKQQPESPGSGGSSDAQRVPATASGGLFTKHEHSLPPGGRHHYHARGGGE

SEQ ID NO: 4379 - protein, 162 aa, Zea mays
  misc_feature (14)..(14): Xaa can be any naturally occurring amino acid
  misc_feature (51)..(51): Xaa can be any naturally occurring amino acid
  misc_feature (60)..(60): Xaa can be any naturally occurring amino acid
  misc_feature (77)..(77): Xaa can be any naturally occurring amino acid
  misc_feature (108)..(108): Xaa can be any naturally occurring amino acid
  unsure (1)..(162): unsure at all Xaa locations
MADSEELIFNRSAXDALAPITYPQQAAIVRKNAFVFINNRPCQVAEGSTSXTGKHGHAKXHFVAIDIFNDKKLEDIXPSPHNCDIPHVNRTEYQLIDISKDGFVSLLXTSYGNTKDDLTVPTEETLVAQIKEGFESCKDLVVTVQSAMWDDHICALKDVGPK

SEQ ID NO: 4380 - protein, 245 aa, Zea mays
MAQEDVHLDDAGLALCLSLHGTSRSRLSTEAPRTLEPPSLTLSMPDEATATATGGSGGSGGAARSVSSRSVEGVKRERVDDAEGERASSTAAAARAGAGAEDDDDGSTRKKLRLTKEQSKLLEDRFKDHSTLNPKQKIALAKQLKLRPRQVEVWFQNRRARTKLKQTEVDCELLKRCCESLSEENRRLQRELQELRALKLAGPHPQAPSSSPAAATQGVPVPVPPPLYVQMQMQLSSCRCCRPPR

SEQ ID NO: 4381 - protein, 177 aa, Zea mays
  misc_feature (9)..(16): Xaa can be any naturally occurring amino acid
  misc_feature (57)..(58): Xaa can be any naturally occurring amino acid
  misc_feature (152)..(161): Xaa can be any naturally occurring amino acid
  unsure (1)..(177): unsure at all Xaa locations
MAGRDREPXXXXXXXXDVLDPFVRTTNLRVSYGARTVSNGCELKPSMVVHQPRVEVXXPDMRTFYTLVMVDPDAPSPSDPNLREYLHWLVTDIPGTTGAAFGQEVICYESPRPTMGIHRFVLVLFQQLGRQTVYAPGWRQNFNTRDFAELYXXXXXXXXXXFNCQREAGSGGRRMYS

SEQ ID NO: 4382 - protein, 197 aa, Zea mays
MELGKPLSAHRCSYTATYTHCSIGFSPRVVRTSWIRAAAEGGDGGADRRRRGASFAADGPRVVEVAAAPVATSGGAAGAAGSAGFGARDAELAMWDKLGAVVRLSYGIGIYGAMALAGRFICQMAGIDCTGGFHPSLTALVEGLGYAAPPIMALLFILDDEVVKYSPHARAIRDVEDEELRSFFCGMSPWQFILIVA

SEQ ID NO: 4383 - protein, 331 aa, Zea mays
  misc_feature (110)..(110): Xaa can be any naturally occurring amino acid
  unsure (1)..(331): unsure at all Xaa locations
MESGRLIFNAPGSGAGQMLFLDCGAGGGPGGGLFHRGGRPMLGLEEGRGVKRPFFTSPDELLEEEYYDEQLPEKKRRLTPEQVLLLERSFEEENKLEPERKTELARKLGXLQPRQVAVWFQNRRARWKTKQLERDFDRLKASFDALRADHDALLQDNNRLRSQVVSLTEKLQEKEDATEGGATADTAAPAVDVEASLADDVEEPAEPAATFEVLQEVKSEDRLSTGSGGSAVVDADALLYGRFAAAVDSSVESYFPGGEDHYHDCGTMGPVNHGAGGGIQSDDDGAGSDEGCSYYADEAAAAAAAFFAGHATHHHADEDEDAGQISWWMWN

SEQ ID NO: 4384 - protein, 204 aa, Zea mays
DGDEAQALRHHHGCWPPAASSRKKKRRDASAAGGASATDAAANGHHHQSKKTRTAAARRDDDGGGGDGGRKKLRLTAAQATLLEDSFRAHSILSHGEKQELARQAGLSARQVEVWFQNRRARTKLKQTEVDCDLLRRWCARLSDDNDRLRRDLADLRRAASSSSAGLGAVVFCASCGADRQLALAAAGNVLPSVASPSHSPHLT

SEQ ID NO: 4385 - protein, 171 aa, Zea mays
NDTDVELSGNSLFWAGLVRIDVIKALPRSRLTFYGPKKLKINMVPTTEADQFYETEVGVTLTPPTGKERAEGWTGLQGVRELKIKYEERDRPACDIAISGLGWISVEPSGVPSNSAEEVYDGGELHLVVHVPKPVEVFMRPPLPVGKAASQWYRYQELTEEEEELRPKWHY

SEQ ID NO: 4386 - protein, 475 aa, Zea mays
MEVCGAELGQGKPDKCFDDDGRPKRNGTMWTASAHIITAVIGSGVLSLGWAIAQLGWVAGPVVMLLFSLVTYYTSSLLADCYRSGDPSTGKRNYTYMDAVNANLSGIKVQICGFLQYANIVGVAIGYTIAASISMLAIRRANCFHQKGHGNPCKISSTPYMIIFGVAEIFFSQIPDFDQISWLSILAAVMSFTYSSIGLGLGVVQVIANRGVQGSLTGITIGVVTPMDKVWRSLQAFGDVAFAYSYSLILIEIQDTIRAPPPSESTVMKRATVVSVASTTLFYMLCGCMGYAAFGDGAPGNLLTGFGFYEPFWLLDVANAAIVVHLVGAYQVYCQPLFAFVEKWAAQRWPDSAYITGEVEVPLPLPASRRRCCKVNLFRATWRTAFVVATTVVSMLLPFFNDVVGFLGALGFWPLTVYFPVEMYVVQKKVPRWSSRWVCLQMLSLGCLVISIAAAAGSIAGIASDLKVYRPFKSY

SEQ ID NO: 4387 - protein, 430 aa, Zea mays
MPFRSIVRDVRDGFGSLSRRGFEVRFLSHRRGKSHGAVHELHDPVLVVQSSCWASLPPELLRDVIERLETKHGREMCREIVKSPEFSGKITFPVSLKQPGPRDGTIQCFIKRDTSTQIYSLYLSFSSAVPVENGKFLLSAKRNCRATYTEYIISINSGDTSRCTSNNTYIGKLRSNFLGTKFVIYDTHPPYNGTSQTVAGKTSQRFYSKKGSTKVSCRWYSIAQISYELNVLGTRGPRRMNCVMHSIPASCLEAGGSVPCQPDSIAAHSVGGSFSSVSLSKSSTMDHSMHFTSSRLSDAITGDGIVNRGQALNDADDEECKDMPLILRNKAPRWHEQLQCWCLNFRGRVTVASVKNFQLVAATQPAAGALTPSQAAPQPAPPPPPDQEKVILQFGKVGKDIFTMDYCYPLSAFQAFAICLSSFDTKLACE

SEQ ID NO: 4388 - protein, 269 aa, Zea mays
  misc_feature (188)..(188): Xaa can be any naturally occurring amino acid
  misc_feature (206)..(206): Xaa can be any naturally occurring amino acid
  misc_feature (214)..(214): Xaa can be any naturally occurring amino acid
  misc_feature (240)..(240): Xaa can be any naturally occurring amino acid
  unsure (1)..(269): unsure at all Xaa locations
MDWGKKSSCKIPRGFRASTPHDARIPAIRGPFAQSLSRHAGSSSRATHAQRQTQSEGDQGREGRGGGRRSSSSSCRAAGMEPHHANKPKPRPKLSAKHSKFISCKLYISESRDATAVDAVERASKSDPQVVVVSQFGDHHYNRFRYTLVSYIVVDDGGGGGGGSSAAGEATVAVHSPIKKVVVAMIQXAFSSIDLESQSGAHPEIXVVDDLSFXHPVGQATVEDAASLARQVASDIACIXQSPVFLYAATHPGGKSVGAVRRELGSTPN

SEQ ID NO: 4389 - protein, 569 aa, Zea mays
  misc_feature (134)..(134): Xaa can be any naturally occurring amino acid
  unsure (1)..(569): unsure at all Xaa locations
MYSNFKEQAIEYVKQAVQEDNAGNYVKAFPLYMNALEYFKTHLKYEKNPKIKEAITAKFTEYLRRAEEIRAVLDEGGAGPGANGGDAAVATRPKTKGKDGDGGNGGDDSVRQSQLGPRLRSALITEKPNVKRNXVAGLESAKPALQEAVILPVKFPQFFTGKRRPWRAFLLYGPPGTGKSYLAKAVATEADSTFFSISSSDLVSKWMGESEKLVANLFQMARENAPSIIFIDEIDSLCGQRGEGNESEASRRIKTELLVQMQGVGHNDDKVLVLAATNTPYALDQVTKKKKPRTILHCIQICKNKKGKSPLSCETLFSSLAYSSLQAVRRRFDKRIYIPLPDTKARQHMFKVHLGDTPHSLTESDFESLARRTDGFSGSDVAVCVKDVLFEPVRKTQDAMFFFKADGDMWMPCGPKHPGSVQPPMQELASKGLAAKIFPPPISRTDFEKVLSRQRPPVTKKDLGGHERFTKEFGGGGGYPARGPPPMPSCPPEMYIVYHFDCFAWKLHSQDCPFGSPTMSNHGSCFPVLGSRGASVVNLFQFLFMPRKIFRKKKKKKKKKKKKKKGRPL

SEQ ID NO: 4390 - protein, 424 aa, Zea mays
MCGGAILSGFIPPSGVAAAAAAAKKKQQQRCRVTADLLWPGPGSKEAPQDQEEDFEADFREFERGLGEDDVDSAGEGGDPEVQELPPPEPTRFAFATAAKAAVDGVMTTPPKDVQGDRAVKKRGRKNQYRGIRQRPWGKWAAEIRDPNKGVRVWLGTYNTAEEAARAYDAEARKIRGKKAKVNFPDDDAPPGTRHRPAPKACADEMFNNLKNDDDNNDDLFAMFAFGDNKKKVPAAKPAAAEGDSGSGSFLVPAPAVAAVPGNKRRSSATNIMLSVSDDQSSNSYGSGSGSSDLVGSWSWDDDAAAAAMTSDYTSSVFAPDNAVLPAASYSYMQGGAPKRMRSSYGGAPPSLAHDAAMPGFGLDKVSYHYQALPPYYVGSSNASVGNLGLLQQADDAPAPQDGASAGDIWSLDELLMLAAAGAY

SEQ ID NO: 4391 - protein, 232 aa, Zea mays
MSANVGESTSGGSSNDAAGGSFECNICFELPQEPIVTLCGHLFCWPCLYRWLHIHAHSPECPVCKALVEEDKLVPLYGRGKDRVDPRSKNMPEGEIPHRPTGQRPAPAPRADANNNFANAKSNPWFLGPGVPLANARWGNYAFSAAFGGLFPMLSFQVHGFPDAAAYAQPAGFHYGYGHGHGFHHGGHMGQAQAHGVHRQAPLGQQQQQADIYLKALLFMIVILVLASLLAF

SEQ ID NO: 4392 - protein, 232 aa, Zea mays
MVRGKTQMKRIENPTSRQVTFSKRRNGLLKKAFELSVLCDAEVALVVFSPRGKLYEFASGSAQKTIERFRTYTKDNVSTKPGQQDIERVKADADGLSKRLEALEAYKRKLLGGGWEGCSIEELHSLEVKLEKSLHCIRGRKTELLGGQVRKLKQKERGLRKSNEDLREKCKKQPPVPRASAPPRAPAVDNGGGGPREPKDDGMDVETELYIGLPGRDYRSSKDKAAGAVRSG

SEQ ID NO: 4393 - protein, 150 aa, Zea mays
  misc_feature (135)..(136): Xaa can be any naturally occurring amino acid
  unsure (1)..(150): unsure at all Xaa locations
MAPTAAYSDSLKPRDVCIVGVARTPMGAFHGALSSIPFSKLGSIAIEAALKRANVDPSLVQEVYIGNVLTANCGQAPARQAALGAGIPNTVVCTTINKLCASGLKATILAAHSIQLGINDVAVAGGMDSTSNVPXXLPEARKGSRLGHDM

SEQ ID NO: 4394 - protein, 285 aa, Zea mays
MPTSEVWSLSDFEISKYIAEGRFGKVYLAREKQSGYVVALKVIFKAKLKKHRFHAHLRREIEIQQSLDHPNVLRLFTWFHDEERVVLVLEYAARGELYKVLRAAGRFTERTSATYVASLAGALAYCHKKQVIHRDIKPENLLIDIEGRLKIADFGWAARSNAKRHTLCGTIDYLAPEMVEKKAHDHAVDNWTLGILCYEFLYGSPPFEADEQDDTLRRIVRVDLAFPSSPCVSSEAKDLISKLLVKDSSKRLCLEDIMKHPWIKKNADPSGSCIKQKDVTRSKLL

SEQ ID NO: 4395 - protein, 332 aa, Zea mays
MTDGARVETAPRLAQWRVDPLPCYTYRKSLPFLIGLWNWCISVERNNKQTCVKLFAENTSSLKNGSSAPIASFIAKLIVSLPPNQQTIVHPGIFDKQLKYDGFVWTIDSTVTGRFVIEIEFLDLKVADPSGGEPASIWASRQVKQCSDSTALSSLARMLHEDVLTDITINAADGSVGAHRAVLATRSPVFRSMFSHDLREKELSTVDITDMSLDACRAFLSYIYGDVRGGEEFLANRLALLRAADKYDIGDLREACHESLLEDIDARNVLERLQTAHLYRLPRLKGGCLRFLVDFRKVYEMHDDDLNAFLQTADRELVAEVFHGVLAAWSGR

SEQ ID NO: 4396 - protein, 432 aa, Zea mays
MDWDLNAAGAWDLAELEQDHAAAAPSSGGHAANAAAAGTGTESRPPAPGAAGAPAECSVDLKLGGMGECEPGAARREREAAAGAAKRPRPAGPGGQQQQQQCPSCAVDGCRADLGKCRDYHRRHKVCEAHSKTPVVVVAGREMRFCQQCSRFHLLAEFDADKRSCRKRLDGHNRRRRKPQPDTMASASFIASQQGTRFSPFAHPRLEASWPPGVMKTEESPYHITHQIPLGSSSSSRQQHFVALGAATPAYAKEGRRFPFLQEGEISFATGVVLEPPAAAPACQPLLRTGAPSESSGAGGSKMFSDQGLARVLDSDCALSLLSAPANSSGIDVSRMVRPTEHVPMAQQPVVPGLQFGSASWFPRPQASTGGSFVPSCPAAVEGEQQLNAVLGPNDSEVSMNYGGMFHVGGGSGGGEGSSDGGTSSSMPFSWQ

SEQ ID NO: 4397 - protein, 441 aa, Zea mays
MCGGAILSGFIPPSGVAAAAAAAKKQQQQQQRCRVTADLLWPGPGSKGAPQDKEEDFEADFREFERGLGEDDVDSAGEGGDPEVQELPPPEPTRFAFATAAKAAVDGVMTTTPKDVQGDRAVKKRGRKNQYRGIRQRPWGKWAAEIRDPNKGVRVWLGTYNTAEEAARAYDAEARKIRGKKAKVNFPDDDATGTRHRPTNAANAARLVAPPPPPKACADEMFNNLKNDDGDNNNNDDLFAMFAFGDNKKKVPAAKPAADEVGSGSGSFLVPAPAVAAVPGNKRRSSATNIMLSVSDDQSSNSYGSGSSADLVGSWSWDDDDAAAAAAAAAMTSVFAPDNAVLPAASYSYMQGGAPKRMRRSYGGAPPSLAHDAAMPGFGLDKVSYHYQALPPYYVGSSNASVGNLGLLQQADDAPAPQDGASAGDIWSLDELLMLAAAGAY

SEQ ID NO: 4398 - protein, 212 aa, Zea mays
MRRRGVAAADADGDVELRFRGVRKRPWGRYAAEIRDPAKKARVWLGTFDSAEDAARAYDAAARMLRGPKARTNFPLPAAAALHHPHMPAAAAAAAPPYTTYPTATGVVSTPPVARPACSSLSSTVESFSGARPRPVLPPRFPPPSIPDGDCRSDCGSSASVVDDDCTDAAASASCPFPLPFDLNLPPGSGGGAGVGFYADEEDELRLTALRL

SEQ ID NO: 4399 - protein, 324 aa, Zea mays
DAGGRVGSIRSLLPFQFPHTHVSAHSLLQFRQLVIINRTQSSRFHSRMLLNPASETSVLDTIRQHLLEEPAAAEARPADESFGSLVADQWSGSLPFRTDDADDMVVFGVLQDAFAYGWLPDGSFVHVKPEPVRSPDSSSYHPCSYDGSPCFGLLDPEPPLTPGTTTPGRGQEEAAAAMARGKHYRGVRQRPWGKFAAEIRDPARNGARVWLGTYDTAEDAALAYDRAAYRMRGSRALLNFPLRIGSGDKRPSPAPPEPTTSSDSSSSSASGSHKRRKRGEAAAANMAMALVPSPSQLNRPAQPWFPAAPVEQAAMAPRVEQIVV

SEQ ID NO: 4400 - protein, 296 aa, Zea mays
  misc_feature (241)..(241): Xaa can be any naturally occurring amino acid
  misc_feature (249)..(249): Xaa can be any naturally occurring amino acid
  unsure (1)..(296): unsure at all Xaa locations
RNNGDGHGQARPSHGPRGRQLQRRQRVGAADEPPPDADGAGRPVEVAKERLQEDYVVSAAAPLIHALRPLLGSAGDLGRRAGVPCDSWRLAVETYNKRDWTTVPASCERYVGHYMLGGHYRRDSRVVIDEAIAYAEGLKLGGNGKEVWVFDIDETSLSNLPYYATHGFGTKLYNATSFNEYVLEGSAPVLPETQRLFKKLVSLGIKPVFLTGRTEDQRAITVTNLRRQGYSGWMTLLLKPXGLKATAIXYKSGERQKLQDAGYVIVGNIGDQWSDILGAPEGARTFKLPDPLYYIG

SEQ ID NO: 4401 - protein, 406 aa, Zea mays
MVPLCGFCGKQRSMIYCRSDAASLCLSCDRSVHSANALSRRHRRTLLCDRCGLQPASVRCLEDNTSLCQNCDWNGHDAASGASGHKRQAINCYSGCPSSAELSRIWSFIIDIPTVAAEPNCEDGLSMMTIDDSDVTNHHGASDDKRLLEIANTALMSDPPSPDKLKPLIGSSSGDGFDVLPLATDQPAGPVSATPKVPYARDDNKFNDGMYEDLCVDDADLTFENYEELFGTSHIRIEELFDDAGIDSYFEMKETPPFDFNEQPKIVQLQCSDVVPADCAMSNTGERADSSLCIPVRQVRSSISHPLSGLTGESSAGDHQDCGVSPILLMGEPPWYSPGPEGSLAGGSRDSALTRYKEKKKKRMFDKKIRYASRKARADVRKRVKGRFIKAGEAYDYDPLSQTRSY

SEQ ID NO: 4402 - protein, 333 aa, Craterostigma plantagineum
MNQQQVKVSKNNKQVNNCEDDDDSSDLRRGPWTVDEDFTLINYIAHHGEGRWNSLARFAGLKRTGKSCRLRWLNYLRPDVRRGNITLEEQLLILELHSRWGNRWSKIAQHLPGRTDNEIKNYWRTRVQKHAKQLKCDVNSKQFKDTMRYLWMPRLVERIQASATTDDGAPPAVVSSPSSAMNTACYTTAMAAGDHRRQFMLMPQYYATTTTTHNNSMIAQENSSTVASSESFGSLSSELTAEANYANYHRVINGADHQQIDSSTTSYGWQNCAVGNNGNSDQLGMGFADDRRSNEQWMMMTDDVVDNGGSSDQDNNLWNVDDVWFLQQFSSCF

SEQ ID NO: 4403 - protein, 335 aa, Craterostigma plantagineum
MNQQQVVKVSKNKQINSEDDDDSSDLRRGPWTVDEDFTLINYIAHHGEGRWNSLARFAGLKRTGKSCRLRWLNYLRPDVRRGNITLEEQLLILELHSRWGNRWSKIAQHLPGRTDNEIKNYWRTRVQKHAKQLKCDVNSKQFKDTMRYLWMPRLVERIQRAATTDDGAPPLASSASSPSSAMNTACYSTAMAAGDHRRQFMLMPQYYAMTTHSNLMIAQENSSTVASSESFGSLSSELTEANYANYHQVINGADHQQIDSSTTTSYGWQNDFAINTVGNNGNSDQLGMGSVDDRRSNEQWMMMDDVDNGGSSDKDNNLLWNVDDVWFLQQFSSCF

SEQ ID NO: 4404 - protein, 268 aa, Prunus persica
NSAREDDQYCRDTHPTTGAYGRAGYTGGEHQEKKGIIGQVKDKLPGGQKDDQYSHDTHKTTGAYGGAGYTGDDTREKKGIIDQVKDKLPGGQKDDHYSHDTHPTTGAFGGAGYTRDDTREKKGIIDQVKDKLPGGRQDDHYSHETHPTTGAYGGAGYTGDDTREKKGVVEKVKEKLPGGQNVHPTTGPYGGGGAAGIGETRERKGVGEKVEEKLPGGHKDDQYLHDTHPTKPTSAARGGVGHTGGEPQLHEKKGLIEKIKDKLPGRNN

SEQ ID NO: 4405 - protein, 587 aa, Nicotiana tabacum
MLRSLTSKRSLQSLLLHHHHPLRRPNPQLTPFNPRPFSSTPGPTTSESELRKYIGYTLLLLGCGAATYYSFPFPENAKNKKAQLFRYAPLPDDLHTVSNWSGTHEVQTRTFLQPESIEELEGIVKAANEKKQRIRPVGSGLSPNGIGLTRAGMVNLALMDKVLNVDEEKKTVTVQAGIRVQQLVDAIKEYGITLQNFASIREQQIGGIVQVGAHGTGAKLPPIDEQVISMKLVTPAKGTIEISKEKDPELFYLARCGLGGLGVVAEVTLQCVERQELVEHTFLSNMKDIKKNHKKFLSENKHVKYLHIPYTDAVVVVTCNPISKSRGPPKHKPKYTTEEALQHVRVLYRESLQKYRGQVADSGSPEPEIDELSFTELRDKLLALDPLNKEHVIEINKAEAEFWRKSEGYRVGWSDEILGFDCGGHQWVSETCFPAGTLSKPSMKDLEYIEELMQLIEKESVPAPAPIEQRWTACSRSRMSPAYSSADDDIFSWVGIIMYLPTMDARQRRQITEEFFHYRHMTQAQLWDHYSAFEHWAKIEVPKDKEELAALQERLKKKLPVDAYNQARKELDPNRILSNNMLEKLFI

SEQ ID NO: 4406 - protein, 355 aa, Pseudomonas sp.
MCNQLTIEPLGRTLDVAEGQTLLDAALRSGVYIPHACGHGLCGTCKVQVTSGEVDHGAANPLRRSWISSGEEGKTLACCATALSDVCIEADVDDEPDARASFPCGLWWATVTRIDTLTPTIKGLRLKLDQPIDFQAGQYVMVEIPGLGQRRAFSMPMPSDGGPCGEIELQVRRVPGAAGTGVLHEQLAVGDTLHVTGPYGRFFVRQSAAKPMLFVAGGSGLSSPRSMILDLLEQGCTLPITLVNGQRSREELYGHAEFVALADRHPNFSYVPVLSNEPEGSAWDGARGFAHDAAKAHFNGQFAGHKAYLCGPPPMVEAAIGALMQGRLFEDDIYTEKFLSAADANARAQPLFKRV

SEQ ID NO: 4407 - protein, 603 aa, Oryza sativa Indica Group
METHIGSVDGAAAAADNGAVGCPASAVGCPMTSARPGVSARRGVAGTAPGEAAGAGGRQRRVRVPGDFNLTLLDHLIAEPGLLVGCCNELNAGYAADGYARSRGVGACAVTFTVGGLSVLNAIAGAYSENLPVICIAGGPNSNDYGTNRILHHTIGLPDFSQELRCFQTVTCTQAVVTNLEDAHEQIDTAIATALRESKPVYLSISCNLPGLPHPTFSRDPVPFFLAPRLSNKMGLEAAVEATVEFLNKAVKPVLVGGPKLRVAKAGKAFVDLVDASGYPYAVMPSAKGLVPETHPHFIGTYWGAVSTAFCAEIVESADAYLFAGPIFNDYSSVGYSFLLKKDKAIIVQPERVIVGNGPAFGCVMMKEFLSELAKRVNKNTTAYENYKRIFVLRASAGEEPNEPLRVNVLFKHVQKMLNSDSAVIAETGDSWFNCQKLKLPEGCGYEFQMQYGSIGWSVGALLGYAQGAKDKRVIACIGDGSFQVTAQDVSTMIRCAQNSIIFLINNGGYTIEVEIHDGPYNVIKNWNYTGLVDAIHNGEGKCWTSKVKCEEELTEAIGMALGEKKDCLCFIEVIAHKDDTSKELLEWGSRVSAANSRPPNPQ

SEQ ID NO: 4408 - protein, 300 aa, Arabidopsis thaliana
MTNAQELGQEGFMWGISNSDDSGGGCKRIEKEPLPSHPSHPSPEIQTTTVKKGKKRTKRNDKNHEEESPDHEIHIWTERERRKKMRDMFSKLHALLPQLPPKADKSTIVDEAVSSIKSLEQTLQKLEMQKLEKLQYSSASTNTTPTTTFAYAPSSSSSPTALLTPISNHPIDATATDSYPRAAFLADQVSSSSAAAANLPYPCNDPIVNFDTWSSRNVVLTICGNEAFFNLCVPKHKPGVFTSVCYLFEKYNMEVLFANVSSNVFWSTYVIQAQVSYTYNHFYHMICGDIYYLPWFFFFM

SEQ ID NO: 4409 - protein, 605 aa, Fragaria x ananassa
MDTKIGSIDVCKTENHDVGCLPNSATSTVQNSVPSTSLSSADATLGRHLARRLVQIGVTDVFTVPGDFNLTLLDHLIAEPGLTNIGCCNELNAGYAADGYARSRGVGACVVTFTVGGLSVLNAIAGAYSENLPVICIVGGPNSNDYGTNRILHHTIGLPDFSQELRCFQTVTCFQAVVNNLEDAHEMIDTAISTALKESKPVYISIGCNLAGIPHPTFSREPVPFSLSPKLSNKWGLEAAVEAAAEFLNKAVKPVMVGGPKLRSAHAGDAFVELADASGFALAVMPSAKGQVPEHHPHFIGTYWGAVSTAFCAEIVESADAYLFAGPIFNDYSSVGYSLLLKKEKAIIVQPDRVTIGNGPTFGCVLMKDFLLGLAKKLKHNNTAHENYRRIFVPDGHPLKAAPKEPLRVNVLFKHIQNMLSAETAVIAETGDSWFNCQKLKLPPGCGYEFQMQYGSIGWSVGATLGYAQAVPEKRVISFIGDGSFQVTAQDVSTMIRNGQRTIIFLINNGGYTIEVEIHDGPYNVIKNWNYTGLVDAIHNGEGKCWTTKVRCEEELIEAIETANGPKKDSFCFIEVIVHKDDTSKELLEWGSRVSAANSRPPNPQ

SEQ ID NO: 4410 - protein, 151 aa, Oryza sativa Japonica Group
MRCDDDDESAADLAGSGGAAAAADRSVGWTVRLLPVVSSPNSTLSSLSGKRGAPSAAAAAVGGSDDEDSDDGSRKKLRLSKDQAAVLEDTFNKHNTLNPKQKAALARQLNLKPRQTEVDCELLKRCCETPTDMKLKRGPPLPLPPPPPPLL

SEQ ID NO: 4411 - protein, 623 aa, Cyanophora paradoxa
MEVKHMGKIVGIDLGTTNSVVAVMEGGKPTVITNAEGFRTTPSVVAYTKTGDRLVGQIAKRQAVLNPGNTFYSVKRFIGRKFDEVTEEAKQVPYKVTGTQNVRIECPALQTSFTPEEISAQVLRKLAEDASKYIGEPVTQAVITVPAYFNDSQRQATKDAGKIAGLEVLRIINEPTAASLAYGLDKKKNETILVFDLGGGTFDVSILEVGDGVFEVLSTSGDTHLGGDDFDKKLVDFFIEEFQKLENINLREDQQALQRLTEAAEKAKIELSSVTQTEITLPFLSLTPSGPKHFDTTLNRAKFEELCSTLIDRCRIPVETALKDAKLTKEDIDEVVLVGGSTRIPAVRELVQKVLDKVPKQSVNPDEVVAVGAAVQAGVLAGEVKDIVLLDVTPLSLGVETLGGVMSKIIVRNTTIPTQKSELFSTATDGQTNVEIHVLQGERGFAKDNKSLGTFRLDGIAPAPRGVPQIEVTFDIDANGILSVTAKDKGTGKEKSITITGASTLSQDEVERMVQEAEKNAAQDKENRQKIELRNQAESLINQAERQLKEFKLEPNVQAPIEQTIQQLQTALKEDNLEQVQSLCQELQNSLLEIGKQVYSKTETTTPNKNEEDVIDASFSEEK

SEQ ID NO: 4412 - protein, 353 aa, Arabidopsis thaliana
MALLDDYEMEELGHTPNTHHRSGLFVFSLNPILTEKLKFGYYDWETEFGDYGCYIGYVAVVGMPNVGKSTLSNQMIGQKISIVTDKPQTTRHRILGICSSPEYQMILYDTPGVIEKKMHRLDTMMMKNVRDAAINADCVVILVDACKTPTNIEEVLKEGLGDLEKKPPMLLVMNKKDLIKPGEIAKKLEWYEKFTDVDEVIPVSAKYGHGIEDVKEWILSKLPFGPPYYPKDIVSEHPERFFVSEIVREKIFMQYRNEVPYACQVNVLSYKTRPAAKDFIQVEVVVDKNSQKIILIGKEGKALKTLATAARLDIEDFLQKKVFLEVEVKVKENWRQDEGLLKYYGYGGQIRAM

SEQ ID NO: 4413 - protein, 655 aa, Arabidopsis thaliana
MGNKKLLTGGSSKTHGSGSSYRDPLLQNQEDKPKANGSENGLNDLEHGVVEAANVGFGRVFALICQYSSIMVSQAKPDAGKLVIGTIALLIGSTTNLLVPKFGGMIIDIVSRDVKTPEQQTESLIAVRNAVVIILLIVVIGSICTALRAWLFNSASERVVARLRKDLFRHLMHQEIAFYDVTKTGELLSRLSEDTQIIKNAATTNLSEALRNVTTALIGVGFMFTSSWKLTLLALVVVPVISVAVKQFGRYLRELSHTTQAAAAVAASIAEESFGAVRTVRSFAKESYMVSQYSKKVDETLKLGLKQAVLVGLFFGGLNAAFTLSVITVVSYGAYLTIYGSMTVGALTSFILYSLTVGSSVSSLSSLYTTAMKAAGASRRVFQILDRVSSMSSSGDKCPVGNPDGDVELNDVWFAYPSRPSHMILKGISLRLTPGSKVALVGPSGGGKTTIANLIERFYDPLKGKILLNGVSLMEISHQYLHKQISIVSQEPILFNCSVEENIAYGFDGEASFTDIENAAKMANAHEFIEAFPDKYNTVVGERGLRLSGGQKQRIAIARALLTNPSVLLLDEATSALDAESEYLVQDAMDSLMAGRTVLVIAHRLSTVKTADCVAVISDGEVAEKGTHDELLSLNGIYTNLVKRQLQSSSSVTTL

SEQ ID NO: 4414 - protein, 400 aa, Candida rugosa
RPIYLDMQATTPTDPRVVDKMLPFSIGLYGNPHSSTHSYGWETEKEVEAARAHIANVIKADPKEIVFTSGATESNNTAIKGVARFYGKTKRHIITTQTEHKCVLDTCRRLQDEGFDVTYLAVNEDGLINLEELEKAIRKDTALVSVMSVNNEIGVVQPLAEIGAICRKNKVFFHTDSAQAFGRLDLDVNAQQIDLMSISSHKIYGPMGIGALYVRRRPRVRIEPLINGGGQERGLRSGTLAPALIAGFGEAARLMTSEYASDMAHITKLSEKLKAGLLSIPETTLNGSAIHRYAGCVNISFAYVEGESLLMALKDIALSSGSACTSASLEPSYVLHAIGKDDALAHSSIRFGIGRFTTEEEIDYVVKAINERVEYLRELSPLWEMVQEGIDLSTIEWSGH

SEQ ID NO: 4415 - protein, 99 aa, Tulipa gesneriana
MAKNHKLPAAALKQMLMRCSSIGRRQNCQGLPVDVPKGHFVVYVGEKRSRFIVPISYLARPEFQQLLRHAEEEFGFEHDIGLTIPCEEVVFRLLTLALR

SEQ ID NO: 4416 - protein, 107 aa, Tulipa gesneriana
MAVRKSSNLPQAAVIRHILKRCSSFGRKNGACSDKGHSLPLDVPKGHFAVYIGEKRSRFIVPISLLAHPEFQSLLRAAEEEFGFDNDMGLTIPCEEVVFRSLTAVLC

SEQ ID NO: 4417 - protein, 107 aa, Tulipa gesneriana
MAVKKSPKISEAAAIKQILKRCSSIGRKHGAYSEENYCLPLDVPKGHFAIYVSEKRSRFVVPISLLAHPEFQSLLRDAQEEFGFDHDMGLTIPCEEIVFKSLTAVLW

SEQ ID NO: 4418 - protein, 261 aa, Ipomoea nil
MVNSSSAWPPPSSSRLMRKGAWTEEEDNLLRKCIQKYGEGKWHLVPLRAGLNRCRKSCRLRWLNYLRPDIKRGDFSVDEVDLIMRLHRLLGNRWSLIAGRIPGRTANDVKNYWNTHIQKKVFAMARMQDNWKGKAPEIRENTVVRPRPRRFLNTSLSPTSKTGKATAVTYDAQIQGHTLPQPPEAIITTSDLVMENVQLNNTIATLPSELETTTSDDRVRWWEDLLFDKEFNDDEGNACMHEGQVGWTNLPIDMDLLELLS

SEQ ID NO: 4419 - protein, 251 aa, Ipomoea nil
MANSSAWSGVRKGAWSEEEDNLLRKCIQEYGEGKWHLIPIRAGLNRCRKSCRLRWLNYLRPDIKRGDFKLDEVDLIMRLHKLLGNRWSLIAGRIPGRTANDVKNYWNTHIQKKVFAMASSMQDNWKGKAPEMRENNVVRPRPRRLFLNTTSSLLSGTPPLTGKATAVTFDAQIQGHNKIPQPEATSELVTKNLQENNTIITASELETTTSNDRVQWWEDFLFDNAGSTCMNQGQVDWPNFPTDMDLSELLS

SEQ ID NO: 4420 - protein, 305 aa, Musa acuminata
MYEFVTAGYVAVLGRPNVGKSTLSNQMIGQKLSIVTEKPQTTRHRILGICSGPEYQMILYDTPGVIEKKMHMLDSMMMKNVRSAAINADCVLVVVDACKVPHKIDDVLEEGIGTLRDNLPILLVLNKKDLIKPGEIAKRLEWYQKFTNVDDVIPVSAKFGQGVDDVKDWILSKLPFGPAYYPKDIASEHPERFFVAEIVREKIFTQYRNEVPYACQVNVLNYISRPTSKDFIQVEIVVEKESQKIILIGKGGKALKVLATAARLDIEDFLQKKVFLEVEVKVKENWRQDEGLLRYYGYGGQIRAL

SEQ ID NO: 4421 - protein, 314 aa, Musa acuminata
MEEGRGYPRPIGPGVTRVGWIGAGVMGAAMAARLQTAGYAVAIYARTPSKADHLRRLGAHLVPSPADAARSADVLFTMVGHPFDVREALLDPASGALAAIPPGGVLVDCTSSDPALAREVAAAARARGCWAVDAPVSGGDVGARDGTLAILAGGDEGVVHWLSPLFEALGRATWMGPAGSGQSSKIANQITIGGTILGLSEAIVFAGRAGLDVPRFLDAVRGGAAGSRAMEIFGERMARRDFAPGGFAEYMVKDLGMGLRGGEDGGEEETGKGVVLPGAALCQQLYLAMVANGDGKMGGQGLITVIERLNGKHA

SEQ ID NO: 4422 - protein, 278 aa, Musa acuminata
MAMSHLSMVEARLPPGFRFHPRDDELVCDYLERKVSGENGNGGMHGWPVIVDVDLNKCEPWELPEMACVGDKEWYFFNLRDRKYATGQRTNRATRSGYWKATGKDRRVARRGMLVGMRKTLVFYRGRAPKGRKTDWVMHEFRIEPSSNPPNFSFEEDWVLCRVSSKTRGVITKPDVKNYDDDTTSSSLPPLRNTYITFDQAPRSLEGFEQVPCFSNFTAQLAAAAPPVGSPDLSYYDNKFSTRPAFDHFPKLNPPNIIQENLESYFGENAVSHMRNPF

SEQ ID NO: 4423 - protein, 278 aa, Musa acuminata
MRCPTAPPSSNKLSAGLQHQQQQQPPPSAHDFTKTIVLASTPFGMVPDGWTGVADGAQIQYPVLGAANVGQENASANSFENSTEKRKAPKSKQESRSSGAEEEGTARGGATSKNKKKASGSDAPKETDYIHVRARRGQATDSHSLAERVRRERISERMKYLQELVPGCSKIMGKASTLDEIINYVQSLQRQVEFLSMKLAAAEPRMHLSSSNFFDREEVHGCSTWDAGLHGFHDGEIHRVSHLCPGNQCKVNNNTSIAVCNQAETAPFALWEVSYPTI

SEQ ID NO: 4424 - protein, 623 aa, Musa acuminata
MEVTEFLTSALVNQTIAEVLDYLRVTKFKVDSPEEEAGRALLDLLRRTDSSEDVEFKAFHIAASRQDGSEFKENGKAGSESIIIDTNRARSTSSSSNNDAPSIRGEAPIDIRQAAVPPEEFCCPISSRLMYDPVVIASGQTYERKYIEKWFDEGHDTCPKTRRKLVNLAVVPNSCMKDLIANWCRRRGISVPEPCSDCSPADFCSWEPSHSYSISSLKNVSAALLDGSVRHYFLQNDHSNVSVLSSDASYCSDSSQISGIKSTQDNQTHLFSWSDDYQQHQSFSNFNHEMFLRFFYRLLELPIDVQDKAVKKVKFLLESDEEICCAMLANGFAEALISFLKNAREEANVRAIRAGNQLFLAFLNENWVKISSLTEDALQLLVSFLDSDIRMEVLMLMQKLAQNPSCRSSIMAPGVVAPIIKSLDSEDTGLLELSLKILLDLSADEDVKSSILSSGCITTLASFLTDGRLAHLCLKIIQNISRHEEGATTVVKAKACLAAIVELLDTGSKEEQEHAVDILYAICSKSYENCLLVMDEGVIPALVDINVNGNVKGQEIATRLLHLLRDVRRSDRFVNSYIKPESIPEPTVTVVQHSADRVPLSRSLGKVGKKLRFFSKSGSSTPC

SEQ ID NO: 4425 - protein, 506 aa, Musa acuminata
MDVTGTTFLFASFLVLLLLLLRKHSYSRRGNARLPPGPFKLPLIGSLHHVLGPLPYRSLAALSEKFGAVMLLKLGEVPTLVVSSPEAAAEIMKTQDVSFASRPMISSVRIIAYGDKSPVFAPYGSYWREVRKMSILELLSVKRVLSFRSIREEEVLNFVRSMDLSSNSGSTVNLSSKFALMTNDIAARAIIGRKCKYQKQFLQVINRALEASGGFSLADLFPSSSLVSLLSGIPLKLPRLHREMDAILSSIIQEHRERNSTEQVEEDLVDVLLKVQREGSVPFAFTDVAVKAIILDLFGAGGETTATTLEWIMSELMRNPGAMKRVQQEVRETVGGKGRVREEDINEMKYLRMIIKETLRLHPPLPLLLPRECQEPREILGYQIPEKTRVLVNVWALGRDPRHWDDAAMFKPERFDRGSSTVDFKGNNFEFIPFGAGRRMCPGIAFGMASVELPLASLLYHFDWELPARDGVKPNELDMTENFSLTCRRRSELCLRAIHRNPCPMY

SEQ ID NO: 4426 - protein, 484 aa, Musa acuminata
MRLFSISSASFLLVLLFSCSLVRGGRSRELDREALRQQEADRVVGLPGQPPVSFRQYAGYVTVNESHGRALFYWFFEATHDVEKKPLLLWLNGGPGCSSIGYGAAEELGPFLMQKGVPELRFNQHSWNKGKKPIPKANLLFLESPVGVGFSYTNTSSDLQSLGDKITAEDSYIFLVNWLKRFPQYKSHDFYIAGESYAGHYVPQLSEKIFDENKKASKETYINFKGFMIGNALMDDDTDQTGMIDYAWDHAVISDRVYHDVKSNCNFGIEPATEACNNALREYFAVYRIIDMYSLYAPVCTSITSTRKSFQIEGAAPKLFSRYSGWHQKPAGYDPCVSDYSEVYFNRPDVQEALHANTTKIGYNWTHCSEVVTKWNDSPATMLPVIRKLINGGLRVWVFSGDTDGRIPVTSTRYTLNKLGMKTIQEWKPWYDRKQVGGWTIVFEGLTFVTVRGAGHQVPTFAPRQAQQLIHHFLANQQLPPSAF

SEQ ID NO: 4427 - protein, 969 aa, Musa balbisiana
MRPASGQPPDEQRGMQGSKYGGSRNPTRVERLLRDRELRKINRAFQQDEAGGNGGREAESSEHLPEDCGREVGGEPDEEIVDGSLAPVITTGQGSRRSGGRPMKQRLLVVANRLPVSAVRRGEDSWSLEISAGGLVSALLGVKDVDAKWIGWAGVSVPDEVGQRALTKALAEKRCIPVFLDEEIVHQYYNGYCNNILWPLFHYLGLPQEDRLATTRSFQSQFDAYKRANQMFADVVNQHYQEGDVVWCHDYHLMFLPKCLKEYNSKMKVGWFLHTPFPSSEIHRTLPSRSELLRSVLAADLVGFHTYDYARHFVSACTRILGLEGTPEGVEDQGRLTRVAAFPIGIDSDRFKRALELPAVKEHINELTHRFAGRKVMLGVDRLDMIKGIPQKILAFEKFLEENPSWRDKVVLLQIAVPTRTDVPEYQKLTSQVHEIVGRINGRFGTLTAVPIHHLVCLTTILMDRSLDFHALCALYAVTVYIFHFFSDVALVTSLRDGMNLVSYEFVACQGSKKGVLILSEVHLGKQLEKYLTIFIGAILQMGGDGKSYALNMSPDEREKRHRHNYAHVTTHTAQDWAETFVSELNDTVVEAQLRTRQVPPLLPTNIAIERYLQSMNRLLILGFNATLTESVESSGRRGGDQIKEMELKLHPELKVPLTTLCNDAQTTVVVLSGSDRSVLDDNFGEYNMWLAAENGMFLRHTGGDWMTTMPEHLNMDWVDSVKHVFEYFTERTPRSHFEHRETSLVWNYKYADVEFGRLQARDMLQHLWTGPISNTAVDVVQGSRSVEVRSVGVTKGAAIDRILGEIVHSKSMVTPIDYVLCVGHFLGKDEDIYTFFEPELPAEPASSTRMKISETSKASPDKRSTGRSSNIRNNSRMSHVRPQRAPVGSERRMPANHNILTGWRSPQETMSWREGSSVLDLKGDNYFSCAVGRKRSNARYLLNTSDDVVVFLREMAEAACQGALAALF

SEQ ID NO: 4428 - protein, 301 aa, Musa balbisiana
MESDSIECVSSIDGIDEEATSLPHHSSKSHGAAAPPAGIVPSTSVHELLECPCQNGHTLCSTCKTRVHNRCPTCRQELGDIRCLALEKVAESLELPCKYYSLGCPEIFPYYSKLKHESQCNYRPYSCPYAGSECSVVGDIPCLVTHLRDDHKVDMHTGCTFNHRYVKSNPREVENATWMLTVFNCFGQYFCLHFEAFQLGMAPVYMAFLRFMGDENEARNFSYSLEVGANGRKLIWEGTPRSIRDTHRKVRDSHDGLIIQRNMALFFSGGERKELKLRVTGRIWKEQQNNDAGVCMPNLCS

SEQ ID NO: 4429 - protein, 949 aa, Musa balbisiana
MAMACLFSSAKMAAVWCMVILGFAMAAVRVHCQSTDTLGFISIDCGIAAGSTYVDPTTNIPYVSDTQYIDAGVNQNISAAYVTNFMGRRYLNVRSFPNGTRNCYTINSITPDSKYLIRASFFYGNYDGLGSQSRLFDLYVGVNLWKTINITDPGSGYRTDVITVAASDSFSVCLVNTGHGTPFISGLDVRPLKEILYPAVNASRSLVLTRRLNMGPTDTFIRYPDDSHDRIWDPFNNIPFWAEISTNSTVENFVDDKFEAPSAVMQTAVIPVNSTKLMMSWEPEPGDVNEYYVVMYFSEFLTLTGNMSRQFYVYLNGHLWYAKPFTPDYLFSDAIFGTNPTEGYHQYNVTIQALDNSTLPPILNAMEVYSRMSDVNVPSDAGDVDAMMAVKAWYKIKRNWMGDPCSPKALAWDGLNCSSSLSNPPRITALNLSSSGLTGEIATSFASLTAIQILDLSHNNLTGTIPAILAQLPSLKILDLTNNNLAGSVPSPLLTKAQNGELVLRLALCLKDQVACRFSQQSVDLYNDRIESNPSLCGNGTSCEITPTTKKKKLSTPIIVIICLAPLLLLLVVVSIIWRLRKPPSKGNSVEPQNEETLKRVKEHQDGLLQLENRQFTYMELKSITNNFERVIGKGGFGTVYHGCLEDGTQVAVKMRSQSSSQGTKEFLAEAQHLTRVHHRNLVSMVGYCKDEPCLALVYEFMAQGTLQDHLRGSQPPLLRGGRALSWRQRLQIAVQAAQGLEYLHKGCKPPLVHRDVKTGNILLSESLEAKIADFGLSKAFQSEINNTHVSTAVMGTPGYLDPEYYATNQISEKSDVYSFGVVLLELLTGQPPVITAAGNAHIAHWVRQRLARGNIEDVVDGRLQGESDVNSMWKCADVALRCASPVAHQRPDMAEVVTQLKESLQLENPYDSRTESLYAEAASDVSQNSALEIERVAAMSMADRPSAR

SEQ ID NO: 4430 - protein, 206 aa, Fagus sylvatica
DGHGVLETSRYVNNHLFQHLKRFTLEQHSMSVEVIRKAYQATEEGFLSQVTKQWPLKPQIAAVGSCCPVGVICGGTLYIANLGDSRAVLGRVMKATGEVLSIQLSAEHNVAIESVRQELHSLHPEDPQIVNLKHNVWRVEGLIQISRSIGDVNLKKAESNREPLYAKFRLREPFKKPILSADPAISVHQLQPHDQFVILASDGLWD

SEQ ID NO: 4431 - protein, 509 aa, Enterobacter cloacae
MRIGVPKERFANETRVAATPKTVEQLLKLGFTVAIESGAGKLASFDDEAFIQAGADVVDGAEVWQSPVILKVNAPQESEIELLNPGTTLVSFIWPAQNPELMEKLAARGVTVMAMDSVPRISRAQSLDALSSMANIAGYRAIVEAAHEFGRFFTGQITAAGKVPPAKVMVIGAGVAGLAAIGAANSLGAIVRAFDTRPEVKEQVQSMGAEFLELDFKEEAGSGDGYAKVMSEAFIKAEMELFAAQAKEVDIIVTTALIPGKPAPKLITREMVDTMKPGSVIVDLAAQNGGNCEYTVPNQVSTTANGVKVIGYTDLPGRLPTQSSQLYGTNLVNLLKLLCKEKDGNITVDFDDVVVRGVTVVREGEITWPAPPIQVSAQPQAAPKAAPEPTEPAKPASPWRKYALMALAIILFGWLADVAPKEFLGHFTVFALSCVVGYYVVWNVSHALHTPLMSVTNAISGIIVVGALLQIGHGGWISFLSFIAVLIASINIFGGFTVTQRMLKMFRKG

SEQ ID NO: 4432 - protein, 633 aa, Agrobacterium tumefaciens str. C58
MAKVIGIDLGTTNSCVAVMDGKDTKVIENAEGARTTPSMVAFSDDGERLVGQPAKRQAVTNPTNTLFAVKRLIGRRYEDPTVEKDKALVPFEIVKGDNGDAWVKAQDKNYSPSQISAMILQKMKETAESYLGEKVEKAVITVPAYFNDAQRQATKDAGRIAGLDVLRIINEPTAAALAYGLDKKEGKTIAVYDLGGGTFDISVLEIGDGVFEVKSTNGDTFLGGEDFDMRLVEYLAGEFKKDQGIDLKNDKLALQRLKEAAEKAKIELSSSQQTEINLPFITADASGPKHLTPKLTRAKFESLVDDLVQRTVAPCKAALKDAGVTAAEIDEVVLVGGMSRMPKVREVVKQLFGKEPHKGVNPDEVVAMGAAIQAGVLQGDVKDVLLLDVTPLSLGIETLGGVFTRLIDRNTTIPTKKSQTFSTAEDNQSAVTIRVSQGEREMAQDNKLLGQFDLVGLPPSPRAVPQIEVTFDIDANGIVQVSAKDKGTGKEQQIRIQASGGLSDADIEKMVKDAEANAEADKKRRAGVEAKNQAESLIHSTEKSVKEYGDKVSETDRKAIEDAIASLKTAVEAAEPDADDIQAKTQTLMEVSMKLGQAIYEAQQAEAGDASAEGKDDVVDADYEEIKDDKKSA

SEQ ID NO: 4433 - protein, 228 aa, Streptomyces coelicolor
MSFMKGRVLVVDDDTALAEMLGIVLRGEGFEPSFVADGDKALAAFRETKPDLVLLDLMLPGRDGIEVCRLIRAESGVPIVMLTAKSDTVDVVVGLESGADDYIVKPFKPKELVARIRARLRRSEEPAPEQLAIGDLVIDVAGHSVKRDGQSIALTPLEFDLLVALARKPWQVFTREVLLEQVWGYRHAADTRLVNVHVQRLRSKVEKDPEKPEIVVTVRGVGYKAGPS

SEQ ID NO: 4434 - protein, 236 aa, Helianthus annuus
MDFHGFAEHALELRLSTTSSVAENTTNPIKKPSPSSDHCLEPSLTLALSGDSCGGSSFSIASAKREREVPSEESERGGENTSGEEDEDGGVNGKKKLRLTKAQSGLLEEAFKLHTTLNPKQKQELARDLKLRPRQVEVWFQNRRARTKLKQTEVDCEYLKRCCNTLTDENQRLRQEVQELKAQKVSPALYMQLPTTTLTVCPSCEQIGDTKSATSKNPCTKKPSFFNPFTSSSAAC

SEQ ID NO: 4435 - protein, 233 aa, Cicer arietinum
NNDGSDYGSWEGGSYLHDDGDDFDDLHDGTDVDEDDDEDDDNEDEYENEDAFDVHAHASAGEHDNPIIEFDPELFSSDEAYARALQEAEEREMAARLLALAGINDLSFSITEETEDMEEHGANSQDAWEDVDPDELSYEELLALGEVVGTESRGLSTDTIACLPSVNYKTGSDQHGSNDSCVICRVDYEDDESLTVLSCKHLYHPECINNWLKINKVCPVCSTEVSASSGSNL

SEQ ID NO: 4436 - protein, 1037 aa, Saccharomyces cerevisiae
MTVANTETHSAAKPSSTIGPWKLGETLGFGSTGKVQLAQHERTGHRTAVKVISKSIFNNNGNHSNDDSVLPYNIEREIVIMKLLSHPNVLSLYDVWETNNNLYLILEYAEKGELFNLLVDHGPLPEREAINCFRQIIIGISYCHALGIVHRDLKPENLLLDSFYNIKIADFGMAALQTDADLLETSCGSPHYAAPEIVSGLPYEGFASDVWSCGVILFALLTGRLPFDEENGNVRDLLLKVQKGQFEMPNDTEISRDAQDLIGKILVVDPRQRIKIRDILSHPLLKKYQTIKDSKSIKDLPRENTYLYPLADSNNHTSASIDDSILQNLVVLWHGRHADDIVSKLKENGTNKEKILYALLYRFKLDSVRGSNKKNRNKIKKTKKNKRSSTLSSSSSLLLNNRSIQSTPRRRTSKRHSREFSSSRKRSSFLLSSNPTDSSPIPLRSSKRITHINVASANTQATPSGVPNPHKRNSKKRSSKRLSYMPNTKRSSLTSKSLSNFTNLIDDDDWEYIEKDAKRTSSNFATLIDEIFEPEKFELAKREKAELQRKVQEAKRQSVNAQKINEDEFGSEVSDGMKELKKINDKVSSPLINYEFSQQELLQDIDTLLTNRYQLSSYTRPISRLDPGLTPVTETLPNNLKEKTALLQDTEKKIIETIRRSKFLGSLLNVRGGLSPGKSELAPIEESPIVSTTPLIYNDRMEPRRISDVEVPHFTRKSKHFTTANNRRSVLSLYAKDSIKDLNEFLIKEDPDLPPQGSTDNESRSEDPEIAESITDSRNIQYDEDDSKDGDNVNNDNILSDFPQGVGISQEYDMKDKNPNQSPISKSAEPTLVVKLPSLSSFQGKNASGLGLYQREPSKVTLPSLTSNNSSVGENIEDGAEKGTESEKIAASLSDDDLKEDNDKKDNDTVNAPTTVKKPPNSVLLKKFSKGKILELEIHAKIPEKRLYEGLHKLLEGWKQYGLKNLVFNITNMIITGKLVNDSILFLRSTLFEIMVLPNGDGRSLIKFNKKTGSTKTLTKLATEIQIILQKEGVLDK

SEQ ID NO: 4437 - protein, 497 aa, Saccharomyces cerevisiae
MLKSTATRSITRLSQVYNVPAATYRACLVSRRFYSPPAAGVKLDDNFSLETHTDIQAAAKAQASARASASGTTPDAVVASGSTAMSHAYQENTGFGTRPIYLDMQATTPTDPRVLDTMLKFYTGLYGNPHSNTHSYGWETNTAVENARAHVAKMINADPKEIIFTSGATESNNMVLKGVPRFYKKTKKHIITTRTEHKCVLEAARAMMKEGFEVTFLNVDDQGLIDLKELEDAIRPDTCLVSVMAVNNEIGVIQPIKEIGAICRKNKIYFHTDAAQAYGKIHIDVNEMNIDLLSISSHKIYGPKGIGAIYVRRRPRVRLEPLLSGGGQERGLRSGTLAPPLVAGFGEAARLMKKEFDNDQAHIKRLSDKLVKGLLSAEHTTLNGSPDHRYPGCVNVSFAYVEGESLLMALRDIALSSGSACTSASLEPSYVLHALGKDDALAHSSIRFGIGRFSTEEEVDYVVKAVSDRVKFLRELSPLWEMVQEGIDLNSIKWSGH

SEQ ID NO: 4438 - protein, 678 aa, Emericella nidulans
MSTEDNHDSQILTARHRSDASEQSFKSLFGGPSSEDGKETEPDTHDHNHSFSNAKAPAKFANQNVAPFLARHIPEQYAPLGAQSILPADLSSANSKYCYRHRPDQKCRRQADEPSMDKLQRELESLPQGDQQSISHVWSLFSAAPAKHRKLILQGIMAQCCFPQLSYISATVRDLIRIDFITALPPEIAFKILCYLDTTSLCKASQVSRGWRALADDDVVWHRMCEQHIHRKCKKCGWGLPLLDRKRLRESKREIELRATTWDKGVVGPRSPDASAESPPSGKRKLEDDEVAVVKRHCSSLGSDAGVDKDSDFFKTRYRPWKEVYKDRFKVGTNWKYGRCSIKTFKGHTNGVMCLQFEDNILATGSYDTTIKIWDTETGEELRTLRGHESGIRCLQFDDTKLISGSMDRTIKVWNWRTGECISTYTGHRGGVIGLHFDASILASGSVDKTVKIWNFEDKSTFSLRGHTDWVNAVRVDTSSRTVFSASDDCTVRLWDLDTKTCIRTFHGHVGQVQQVVPLPREFEFEEHDAECENDDLSTTSGDANPPSIQASMGLEPNAAYSQSSAFGTSFDNGRAAPPRYMVTSALDSTIRLWETTTGRCLRTFFGHLEGVWALGADTLRIVSGAEDRMIKIWDPRTGKCERTFTGHSGPVTCIGLGDSRFATGSEDCEVRMYSFQS

SEQ ID NO: 4439 - protein, 208 aa, uncultured Thermotogales bacterium
MCCGGDCMALVYVVDDELNVRRIVKKTMENEDNEVHTFVTAEEALEEIEKRKPDLLFTDLSLPSMNGIQFLKELKNRAYSIPVIVVSSDTSPESMRSAFKAGIVDFLTKPFTPQEIRDAFELALREEDSIYKRAREIRRLIEEGETGSAESLMSELFSDFPGSPFPHFLYALLVAKEKPKIAIKHLKASLSLDEDFKEASDELKKLEE

SEQ ID NO: 4440 - protein, 313 aa, Streptomyces clavuligerus
VERIDSHVSPRYAQIPTFMRLPHDPQPRGYDVVVIGAPYDGGTSYRPGARFGPQAIRSESGLIHGVGIDRGPGTFDLINCVDAGDINLTPFDMNIAIDTAQSHLSGLLKANAAFLMIGGDHSLTVAALRAVAEQHGPLAVVHLDAHSDTNPAFYGGRYHHGTPFRHGIDEKLIDPAAMVQIGIRGHNPKPDSLDYARGHGVRVVTADEFGELGVGGTADLIREKVGQRPVYVSVDIDVVDPAFAPGTGTPAPGGLLSREVLALLRCVGDLKPVGFDVMEVSPLYDHGGITSILATEIGAELLYQYARAHRTQL

SEQ ID NO: 4441 - protein, 625 aa, Bordetella parapertussis
MCGVAGLIHLDGAAVDPAVLQGMTDAIAHRGPDGEGHWIDGNVGLGHRRLAIIDLSPAGHQPMISADSRYVLSYNGEIYNFRELRAELETAGYRFKSRTDSEVLLYAVIAWGLEKALKRFNGMFAFALWDRHERRLILARDRYGIKPLYYAEQGGTLAFGSEQKAILALPGFRRKLDKAALLEYFTFQNIFTSKVLLEDIQILPAGHYAIVEPDRRASISLTQYWDFCFREPDVAATDQEYREELDRLFVQAVKRQLVSDVELGSYLSGGMDSGSIAAVAAAEHPYIKTFTCGFDLNSASGIELGFDERSKAEYMSYCFKTEHYEMVLKAGDMERILPHVACHLEEPRVGQSYPNFFAAKLASRFVKVVLSGAGGDELFAGYPWRYYRAVVNDDFEHYVDKYYNFWQRLLPNSELKRVFAPIAGEVEHVWTRDIFRNVFRHHADQLYRPEDYINHSLYFEAKTFLHGLLVVEDKLSMAHGLETRVPFLDNDLVEFAMRCPIRLKLNNLAEVVKINENETGNKVRKFFEKNRDGKTILREVMNHRLPADISKAEKQGFSAPDASWFKGESLEFVRRKLLDGHSPLYEIMDAATVRELVNEHLGGIRNRRLLIWSLLSVDAWMRQTF

SEQ ID NO: 4442 - protein, 628 aa, Bordetella parapertussis
MCGVLGAWWRHHDEHEDARFAAGLRKLAHRGPDDRGSEHFAASHGRLSLGHTRLAVIDLSAAGHQPMHADADRLAVVFNGEIYNYRELRSELRQIGAIFRGDSDTEVLLAAWQHWGVAALRRFKGMFAFALYDRRQQTLTLARDAFGIKPMYYHAAPERLLFGSELPAVQALLPHPPRLNWQRAYDYLAYGQYDQPPDTFIAGIRQLPAGHLLTLDLRTGQAGEPMAWDDPASQECRPIGFQEAAEELRARFLDNVRLHLRSDVPIGAALSGGIDSSAIVCAMRWLEPDLPIQTFSFISDDTHRSEERWVDLVNQHCGATGHKIHIAPHELLDDLDDLIRVQGEPVGSTSIYAQYRVFKLAREHGVVVTLDGQGADELLGGYGGYPTERLASLLETGRLGAAARLLRQQGRGAPARLLQAAALAAGGRHLANLRHATGRQHAPAWLDAQVLRDQGVTMREPAHAWAAATPLRGRRLVNELAHALYHRGLGALLRHGDRNSMRFSVESRVPFLTQDLAEFALRLPERYLVSDSGQTKHIFRKSMPRIVPDSNMDRDDKIGFATPEQQWMQATAPQMRQWLVDAADIPFLRNAEVTAQFDAMIAGATPFSWQAWRWVNFQRWMQHAQLCA

SEQ ID NO: 4443 - protein, 555 aa, Linum usitatissimum
MATSAYFLTLLNLLIIILASSTSTFVASTRTYSSLSASRCAILTSSCSNTRHPDLCFSSLASAPVHVSLNTQMDVIKASINVTCTSVLRNIAAVNKALSTRTDLTPRSRSALKDCVETMSTSLDELHVALAELDEYPNKKSITRHADDLKTLLSAATTNQETCLDGFSHDDSEKKVRKTLETGPVRVEKMCGNALGMIVNMTETDMASATNAVNTEGGSSGSWPIWMKGGDRRLLQAGTTVTPNVVVAADGSGKYRRVSEAVAAAPSKSSKRYVIRIKAGIYRENVEVPKDKTNIMFVGDGRSNTIITGNKNVVDGSTTFNSATVAVVGQGFLARDITFQNTAGPSKHQAVALRVGADLAAFYRCDFLAYQDTLYVHSNRQFFINCLVVGTVDFIFGNSAAVFQNCDIHARRPNPGQKNMLTAHGRTDPNQNTGIVIQKSRIAATSDLQSVKGSFGTYLGRPWKAYARTVIMQSTISDVVHPAGWHEWDGNFALNTLFYGEHKNSGAGSGVNGRVKWKGHKVISSDAEAAGFTPGRFIAGGSWLGSTTFPFTLGL

SEQ ID NO: 4444 - protein, 667 aa, Arabidopsis thaliana
MGSTPFCYSINPSPSKLDFTRTHVFSPVAKQFYLDLSSFSGRSGGGLSVFRSRKTLLGVKAATALVEKEEKREAVTEKKKSRVLVAGGGIGGLVFALAAKKKGFDVLVFEKDLSAIRGEGKYRGPIQIQSNALAALEAIDIEVAEQVMEAGCITGDRINGLVDGISGTWYVKFDTFTPAASRGLPVTRVISRMTLQQILARAVGEDVIRNESNVVDFEDSGDKVTVVLENGQRYEGDLLVGADGIWSKVRNNLFGRSEATYSGYTCYTGIADFIPADIESVGYRVFLGHKQYFVSSDVGGGKMQWYAFHEEPAGGADAPNGMKKRLFEIFDGWCDNVLDLLHATEEEAILRRDIYDRSPGFTWGKGRVTLLGDSIHAMQPNMGQGGCMAIEDSFQLALELDEAWKQSVETTTPVDVVSSLKRYEESRRLRVAIIHAMARMAAIMASTYKAYLGVGLGPLSFLTKFRVPHPGRVGGRFFVDIAMPSMLDWVLGGNSEKLQGRPPSCRLTDKADDRLREWFEDDDALERTIKGEWYLIPHGDDCCVSETLCLTKDEDQPCIVGSEPDQDFPGMRIVIPSSQVSKMHARVIYKDGAFFLMDLRSEHGTYVTDNEGRRYRATPNFPARFRSSDIIEFGSDKKAAFRVKVIRKTPKSTRKNESNNDKLLQTA

SEQ ID NO: 4445 - protein, 715 aa, Salmonella enterica subsp. enterica serovar Typhimurium
MNVIAIMNHMGVYFKEEPIRELHRALEGLNFRIVYPNDREDLVKLIENNSRLCGVIFDWDKYNLELCEEISKLNGILPLYAFANSYSTLDVSLNDLRMQVRFFEYALGAAADIARKIRQNTDEYIDNILPPLTKALFKYVPQGKYTFCTPGHMGGTAFQKSPVGSIFYDFFGPNTMKSDISISVSELGSLLDHSGPHKEAEEYIARVFNAERSYMVTNGTSTANKIVGMYSAPAGSTVLIDRNCHKSLTHLMMMSDITPIYFRPTRNAYGILGGIPQSEFQHATIAKRVKETPNATWPVHAVITKSTYDGLLYGADYIKKTLDVKSIHFDSAWVPYTNFSPIYQGKCGMSGDRVEGKIIYETQSTHKMMAAFSQASMIHVKGDINEETFNEAYMMHTTTSPHYGIVASTETAAAMMKGNACKRLINGSIERAIKFRKEIKRLKSESDGWFFDVWQPEHIDGAECWPLRSDSAWHGFKNIDNEHMYLDPIKVTILTPGMKKDGTMDEFGIPASLVAKYLDERGIVVEKTGPYNLLFLFSIGIDKTKALSLPARALTEFKRAFDLNLRVKNILPALYREAPEFYENMPIQELAQNIHKLVEHHNLPDLMYRAFEVCPKMVMTPYTAFQKELHGETEEVYLEEMVGRVNANMILPYPPGVPLVMPGEMITEESRPVLEFLQMLCEIGAHYPGFETDIHGAYRQADGRYTVKVLKENTK

SEQ ID NO: 4446 - protein, 718 aa, Karenia brevis
MAGASTAAVVTTAFVAPTPRAAALAAPTTLPAHCSARPRAPAVWGMFGRPSGRLGVAATAAAAAAAAASSGSSASRRSGSPRMAAGPPSTAGTGNLLNPEAYTEMAWSAMTRLAPLAREYSQQMIESEVLLASVLQDDLAKRILQKADEGNNSTTANLATSVAAKTTDFLRRQPKVSNVGENQVMGRSLREALEGAARLKKEMGDEFVSVEHLLLACWRDGRLQRGLLNTLPVGYDGLVKAVEGVRSGKKVTTQSPEGTYEALERYGRDLTAEAKRGALDPVIGRDEEIRRTIQILSRRTKNNPVLLGEPGVGKTAIAEGLAQRMNSNDVPANLQGRKLVSLDLGALLAGAKFRGEFEERLKAVLAEVTAADSNVILFIDELHTLVGAGKTDGAMDAGQLLKPLLARGELRCIGATTLDEYRKYIEKDAALERRFQPVPVAQPTATDTVSILRGLKGRYEVHHGVRISDSALVAAAMLSDRYIADRFLPDKAIDLVDESMAKLKMESTSKPAALDRLDRKIIQAEMEKLSLKSESGPAAARRRQRLDEELKTWSDEQRALEQQWETERSSLAEVTRIKEEMDRVRLEVDRAESNYDLNRAAELKYSTLSGLQAQLEKAEAALSSDGSSGSDSLLRVQVTEDDVAATVSAWTRIPVNKLLSTEREKLLSLPSVLGARVIGQPEAVRSVSEAVQRSRAGLSSPNRPIASLLFCGPSGTGK

SEQ ID NO: 4447 - protein, 398 aa, Karenia brevis
MMRTVLITLACMAYAGAGFRVQTEAAFQPTGVAPGRSHRATSPSMSYSGGGAWGQWLGNKGFPKAPSPAEVEAQIAARSGTVTAAAESAVQDFLEFEPYTDRSTMPDNTFKPKSPFEGKIISVERIVGPKATGETCNVVIDHFGKMPYIEGQSYGVIPPGLNPKNGKPNKVRLYSIASSRYGDDTKGTTTTLCVRRATYWCPEMEKEDPAKKGVCSNYLCDASAGDVVKLTGPTGKVMLLPEDKPETDIIMVATGTGIAPYRSFLKRMFIEKTPFAKDFKGLAWLFLGVANSDALLYDEDWKAIEKENPDNFRYDVALSREMTNKDGGKMYIQDKVEEYGDEVFDRLDKGAHIYFCGLKGMMPGIQGMLEKVAGAKGLNYEEFIKKLKKNGQWHVEVY

SEQ ID NO: 4448 - protein, 213 aa, Sinapis alba
MVRGKTQMKRIENATSRQVTFSKRRNGLLKKAFELSVLCDAEVSLIIFSPKGKLYEFASSNMQDTVDRYLRHTKDRVSSKPVSEENMQHFKHEAANMMKKIEQLEASKRKLLGEGIGSCSIEELQQIEQQLEKSVKCVRARKTQVFKEQIEQLKQKEKALAAENEKLAEKWGSHEIEVWSNKKQESGRGDEESSPSSEVETQLFIGLPCSSRK

SEQ ID NO: 4449 - protein, 437 aa, Saccharomyces cerevisiae
MSTGDFLTKGIELVQKAIDLDTATQYEEAYTSYYNGLDYLMLALKYEKNPKSKDLIRAKFTEYLNRAEQLKKHLESEEANAAKKSPSAGSGSNGGNKKISQEEGEDNGGEDNKKLRGALSSAILSEKPNVKWEDVAGLEGAKEALKEAVILPVKFPHLFKGNRKPTSGILLYGPPGTGKSYLAKAVATEANSTFFSVSSSDLVSKWMGESEKLVKQLFAMARENKPSIIFIDEVDALTGTRGEGESEASRRIKTELLVQMNGVGNDSQGVLVLGATNIPWQLDSAIRRRFERRIYIPLPDLAARTTMFEINVGDTPCVLTKEDYRTLGAMTEGYSGSDIAVVVKDALMQPIRKIQSATHFKDVSTEDDETRKLTPCSPGDDGAIEMSWTDIEADELKEPDLTIKDFLKAIKSTRPTVNEDDLLKQEQFTRDFGQEGN

SEQ ID NO: 4450 - protein, 353 aa, Halobacterium sp. NRC-1
MGNTTDELLDDITFDADEPDRAEIVSMGERTSVRMLKAALAARGVDATFLEPGTTDWPIVTNERGEVDADATAAGVDRLAGRLGDTVPVITGFLAEDPQGNVTTLGRGGSDTTAVMLGRYLDADEVVIVTDVEGIMTGDPQVVEGARNVGRITVDELRNLSFRGAEVIAPSALSFKDDALDVRVIHYQHGDLLSGGTRIEGTFESMIDMRDSPLACLTVAGRAIRNRPGITSALSTALSDSDINVDAVASGMDSMTFYVDESVAERAENILHQEVIAVSELSSVTVTDDIAAIRVLGGELPNRPGVLCRIIDPLADRNINVIDIISSATSVAVFVSWADREPALDVVQNGFGS

SEQ ID NO: 4451 - protein, 502 aa, Lotus japonicus
MAALPECSAANLAQLIGPNATDAAAVAGFICDQFTAVGQRFSDTAFAVDSTYLLFSAYLVFSMQLGFAMLCAGSVRAKNTMNIMLTNVLDAAAGGLFYYLFGFAFAFGAPSNGFIGRHFFGLKDVPTVAFDYSYFLYQWAFAIAAAGITSGSIAERTQFVAYLIYSSFLTGFVYPVVSHWFWSGDGWASATNTGNLLFGTGVIDFAGSGVVHMVGGVAGLWGALIEGPRIGRFDHAGRAVSLRGHSASLVVLGTFMLWFGWYGFNPGSFTKILSAYDSGNYYGQWSAIGRTAVTTTLAGCTAALTTLFGKRIISGHWNVTDVCNGLLGGFAAITAGCSVVEPWAAIVCGFVAAVVLIACNMLAEKVRYDDPLEAAQLHGGCGAWGIIFTALFAKEEYVNQVYPGKPGRPYGLFMGGGGKLLGAHVIQILVIIGWVSATMGPLFFILNKMKLLRISTEDELAGMDLTRHGGFAYAYEDDESHKPGIQLRKIEPNSSSTPSAES

SEQ ID NO: 4452 - protein, 497 aa, Thermoplasma acidophilum
MMASVTGMIGSGWLFSAFYASSMAGPYSIFSWLVGTGIVAILALIYADLSGRVPMAGAAAGYPFLTNGTVAGSLNAWSLFLGYASTPPLEVIASISYLSFLVPGLLNNNGLLTTTGILLAVALLVAFFILNATGIRNTSRFNNIISYMKIAIPIITSFFFIFTIFSIRNFTLVGTVKPEGIFTAVPGAGIAFSFLGFRQAVELSGEAKNPQKTVPIAIMLSVAVASAIYMIVQIAFIGSLQWGSIKPGDWAALADSGYSSGPMLVLASTLGLGALATVLLFDGIISPLGTSSIYQTTTSRISYRISEMGFFPKKISTTNSRSVPIFALILDLVVMILFVLPFPSWQSLVSVNSDLTIIAYMSGPISLAIFEKYGIEAKGFRLPASKILAPLGFALSALIVYWSGYPTTLYMSAIAIAGLVLFVFARKNPIRDISQGSYMIAILAILPVVSYLGSYGIGIIPFPLDLIVISAVALAIFYAGTRAAPQSVALMENFISS

SEQ ID NO: 4453 - protein, 377 aa, Thermoplasma acidophilum
MQYINESATVSASNNVEKLRKQGLKIYNFGIGEPDFTTPEGIIDYAFEMAKQGKTHYTPSAGIMELREKIASKLKTRNRIDANAENVLVTPTKFGINLAMMVILNPGDEVIIPDPYYVSYPDIVKLAGGKPVPVRTTDDYDIDLDEMRKFVTPRTRAIILNNPNNPTGKVLSEKEIRDLVDFALENDIYIVSDEIYEDLIYEGSLYSPASMGKEAFEHTITLNGFSKGYAMTGWRIGYFVATEEIVEAANIIQQQTITCASSISQYAALRALDDNESPARMRSEFRKRRDLAYGILSESTDMKVHKPEGAFYMFPGYSKDIPSEKIAEMLLNQEHVVVTPGSAFGDRGRHHFRISFATSEDIIKEGLERLVKFMHTL

SEQ ID NO: 4454 - protein, 268 aa, Thermoplasma acidophilum
MKWAGGKRQLLPILLKYSPAKFNTYYEPFIGGAALLISLYSLNKIKSAVVSDTNKDLYNLYKTMKENPLKLIAALKDLKFKNNREDYYEARSLFNSTEDPVKRSALLIYLNRHGYNGLYRVNSENKFNVPFGRYSNPRMPSSENIMAFSNILKSCTILNLDFEMAVSHATRGDFVYFDPPYMPLNRTSYFTEYTNSGFDEKDQERLFRVYYELSKRGVYVMESNSSTEFIKELYKDFCIIEVDAKRNINSIGNRRNGIKELIITNYDV

SEQ ID NO: 4455 - protein, 876 aa, Pinus sylvestris
DDHGEVISEMRRYDLEPYLGLHYPATDIPQASRFLFMRNRVRMICDCYAQPVAVIQDERLPRDLSFCGSTLRAPHGCHAQYMANMGSIASLVMAVVINEKELDGDSEGQMQQKGRRLWGLVVCHHTSPRYVPFPLRYACEFLMQVFGIQLNKEVELAAQIREKQILRTQTLLCDMLLRDTPLGIVTQKPNIMDLVRCDGAALYYERNFWLLGVTPTEAQIQDIVAWLSEHHMDSTGLSTDSLVYAGYPGAESLGNAVCGIAAVRINSKDFLFWFRSHTAKEIKWGGAKHDLQERDDGKKMHPRSSFNAFLEVVKMRSLSWEDVEMDAIHSLQLILRGSRKETDGSGRNISINRQLNDLKLQEMDELNAVTNEMVRLIETATAPILAVDAYGVVNGWNRKAAELTGLSVEEVLGEPLINLVEETSAENVKRMLHLALQGVEEQNVQIELKRHGSEEDKGPVVLLVNACSSRDLKENVVGVCFVAQDVTGQKIVMDKFTRIQGDYRAIVQNPSPLIPPIFGTDECGCVPENSAMEKLSGWKREEIIDKMLLGEVFGTRTACCRLKGQNALTQLRIILNSSMTGQETEKFPFGFFDRHGKYVETLLSANKKLDEEGKITGVFCFLHIASPELQQALYVQHMLEQAAMKRLQALTYLRLEIKNPLYGIMFTQKMMERTDFLREDQRQLVETSALCQKQILKILDDMDLESIEDRYLDLDTVEFTLGALLDAVISQGMIQSEEKGLEIGYDLPREITTTGLYGDQSRLQQILANFLVTVIQFTPAEKWVRIKVSPTKRHLGGGVYVIGIEFRITHPGPGLPEKLVQQMFNFDPDMSQEGFGLLICRKLVRLMNGDVQYLRGGGTSSFVIVVELATSQNEEC

SEQ ID NO: 4456 - protein, 312 aa, Arabidopsis thaliana
KLKLFSGTANPALSQEIAWYMGLELGKVSIKRFADGEIYVQLKESVRGCDVFLVQPTCTPTNENLMELLIMVDACRRASAKKVTAVIPYFGYARADRKTQGRESIAAKLVANLITEAGADRVLACDLHSGQSMGYFDIPVDHVYCQPVILDYLASKSISSEDLVVVSPDVGGVARARAFAKKLSDAPLAIVDKRRHGHNVAEVMNLIGDVKGKVAVMVDDIIDTAGTIVKGAALLHEEGAREVYACCTHAVFSPPAIERLSSGLLQEVIVTNTLPVAEKNYFPQLTILSVANLLGETIWRVHDDSSVSSIFL

SEQ ID NO: 4457 - protein, 306 aa, Agrobacterium tumefaciens
MDIRLIGAPLQIGAGQLGCEMGPSAYRIAGLTRALEDLGHRVVDTGNVTPAPLREFSHPNPAVHHLAETVAWTEALTEAAYRESAAAVPIFLGGDHAISAGTVAGMARRVAQSGRPFFVLWLDAHTDYHTLETTRSGNLHGTPVAYFSGRDGFSGYFPPLSHAVPEENIGMIGIRSVDPAERAALEDSGITVHDMRSIDEHGVAVLLRAFLARVQAANGLLHVSLDVDFLEPSIAPAVGTTVPGGATFREAHLVMEMLHDSGLVCSLDLVELNPFLDERGRTATLMVDLAASLMGKRVMDRPTRAG

SEQ ID NO: 4458 - protein, 342 aa, Gordonia rubripertincta
MTTINVQPFSHEYSCEDGESLLDGALRNSLLLKYGCKHGGCGTCKVRLLDGDVEEPGSSFALTPEDRENDVILACASVPLEPCTIDVEPSGLTEEEFFSGDTSREFQTVVGGVEFLTADIARVRLRLEPGEEIAFTAGQFVNVEVPGTGLLRTFSLANAPDDPSVVELICKLYPDGLFSRFLRDEAAPGTPVRVFGPYGQLKIRLSHRPILMIAGGSGLAPLLSMLRDLAAKKCDRPVSMFFGARSVDDLYLIEEIREIGESLADFEFIPVLSESSPADWHGETGMVTDALLRWRAELAHDVYLCGPPPMIDAAVPLLVERGVRPRNIYYDAFTPAAQVVVV

SEQ ID NO: 4459 - protein, 337 aa, Brassica juncea
MLKQESNWAQTCDTCRSAACTVYCRPDSAYLCTSCDAQIHEANRLASRHERVRVCQSCERAPAAFFCKADAASLCTACDSQIHSANPLARRHQRVPILPISGSMVTNHSSETTEAEDIVVVGQEEEDEAEAASWLLPTSVKNCGDNNNNNNNSQDNRFSVGEEYLDLVDYSKYQQDYNVPQRRSYVADGVVPLQVEVSKSLSHMHHEQHNFQFGFTNVSSEASPIHMVSLVPESSLSETTVSNPRSPKAATEELPEAPVQMLSPMERKARVMRYREKKKTRKFEKTIRYASRKEYAEKRPRIKGRFAKRNEVDAEEADKAFSSMVMFDTGYGIEPSF

SEQ ID NO: 4460 - protein, 401 aa, Pseudomonas fluorescens
MNEALIIDAVRTPIGRYAGVLASVRADDLGAIPLKALIARHPQLDWSAVDDVIYGCANQAGEDNRNVARMSALLAGLPVSVPGTTLNRLCGSGLDAVGSAARALRCGEAGLMLAGGVESMSRAPFVMGKSEQAFGRSAEIFDTTIGWRFVNKLMQQGFGIDSMPETAENVAAQFGISRADQDAFALRSQHKAAAAIANGRLAKEIVPVEIPQRKGPAKLVEHDEHPRGDTTLEQLARLGTPFRQGGSVTAGNASGVNDGACALLLASSEAAQRHGLKARARVVGMATAGVEPRIMGIGPVPATRKVLELTGLALADMDVIELNEAFAAQGLAVLRELGLADDDERVNPNGGAIALGHPLGMSGARLVTTALHELEQRQGRYALCTMCIGVGQGIALIIERT

SEQ ID NO: 4461 - protein, 357 aa, Pseudomonas fluorescens
MSKFHSLTIKDVRPETRDAVSIAFDVPAELADSFRFTQGQHLVMRTQLDGEEVRRSYSICTGVNDGELRVAIKRVAGGRFSAYANESLKAGQRLEVMPPSGHFHVELDPARHGNYLAVAAGSGITPILSIIKTTLETEPHSRVTLLYGNRSSASALFREQLEDLKNRYLQRLNLIFLFSREQQDVDLYNGRIDADKCGQLFSRWIDVKALDAAFICGPQAMTETVRDQLKANGMAAERIHFELFAAAGSAQKREARESAAQDSSVSQITVISDGRELSFELPRNSQSILDAGNAQGAELPYSCKAGVCSTCKCKVVEGEVEMDSNFALEDYEVAAGYVLSCQTFPISDKVVLDFDQI

SEQ ID NO: 4462 - protein, 548 aa, Pseudomonas fluorescens
MTTLRSFTLVGGLLLSSTALAAEHLARPLNWHAIGMFMVFVVFTLGITRWAALRTRSASDFYTAGGGISGLQNGLAIAGDMISAASFLGISAMIFMAGFDGLLYSLGIVAAWPIILFLIAERLRNLGKYTFADVVSYRLEQTPIRITAAFGTLVVALMYLMAQMVGAGKLIELLFGMSYFQSVMLVGVLIICYVTFGGMLATTWVQIIKAVMLLSGATFMAFMVLRHFNFSTEAMFAGAAEVHAKGMSVMVPGGMLSNPIDTISLAVGMMFGTAGLPHILMRFFTVKDANEARKSVLYATGFIGYFYLLLIAIGFGTIVMVGTDPAFRDAAGAIIGGGNMVAVHLAQAVGGSLFLGFISAVAFATILAVVAGLALSGASAVAHDLYACVIRKGQATEKEEMRMSRIATLVIGVLAVILGLLFESQNIAFLSGLVLAIAASVNFPVLFLSMFWKGLTTRGAVAGSVFGLFSAVILLVLSPVVWVNLLHYDRALFPYSNPALFSMTLAFLGAWMFSVTDASERAKQERGRYLAQFIRSMTGIGAAKASNH

SEQ ID NO: 4463 - protein, 2194 aa, Medicago sativa
MSNSLSLTFTALNNPQINAISNPNARLRPLARFTRCSATCVERKRWLGTKLRSGGGPERIQLWESGGLGRLPKLRVAVKSSFSAVPDKPMGLYDPAFDKDSCGVGFVAELNGQSSRKTVTDALEMLVRMTHRGACGCEANTGDGAGILVALPHGFYQEVVDFQLPPQGNYAVGMFFLPKSDSRRMESKNIFTKVAESLGHKVLGWRSVPTDNTGLGKSAQLTEPVIEQVFLTPSSDSKVDLEKQMYILRKLSMVSITSALNLQSDGITDFYICSLSSRTVIYKGQLTPAQLGEYYYADLGNERFTSYMALIHSRFSTNTFPSWDRAQPFRVLGHNGEINTLRGNVNWIKAREGLLKCKELGLSENDLKKFLPIVDANSSDSGCFDGVLEFLLHSGKSLPEAVMMMIPEAWQNDKNMDPQRKAFYEYYSALMEPWDGPALISFTDGHYLGATLDRNGLRPGRFYVTHSGRVIMASEVGVVDIPPEDVCRKGRLNPGMMLLVDFEKQIVVNDDALKEQYSLARPYGDWLEKQKIELKDIIDSVHESDIVPPTISGVPPLSNDDVDMENMGIQGLLAPLKAFGYSVESLEILLLPMAKDGVEALGSMGNDTPLAVMSNREKLTFEYFKQMFAQVTNPPIDPIREKIVTSMRCMVGPEGDLTETTEEQCHRLSLKGPLLSTKEMEAIKKMNYRGWRSKVIDITYSKERGTKGLEEALDRICTEAHNAISEGYTTLVLSDRAFSKKRVAVSSLLAVGAVHQHLVKTLERTRVALMVESAEPREVHHFCTLVGFGADAICPYLAIEAIWRLQVDGKIPPKASGDFNSKDELVKKYFKASTYGMMKVLAKMGISTLASYKGAQIFEALGLSSEVIEKCFAGTPSRVEGATFEMLAQDALHLHELAFPSRIFSPGSAEAVALPNPGDYHWRKGGEVHLNDPLAIAKLQEAARTNSVDAYKQYSKTIHELNKACNLRGLLKFKDAASKVPISEVEPAGEIVKRFCTGAMSYGSISLEAHTALATAMNTIGGKSNTGEGGEQPSRMEPLADGSRNPKRSAIKQVASGRFGVSSYYLTNADELQIKMAQGAKPGEGGELPGHKVIGDIAITRNSTAGVGLISPPPHHDIYSIEDLAQLIHDLKNANPAARISVKLVSEAGVGVIASGVVKGHAEHVLISGHDGGTGASRWTGIKSAGLPWELGLAETHQTLVANDLRGRTTLQTDGQLKTGRDVAIAALLGAEEYGFSTAPLITLGCIMMRKCHKNTCPVGIATQDPVLREKFAGEPEHVINFFFMVAEEMREIMSQLGFRTVNEMVGRSDMLEVDKEVVKGNAKLENIDLSLLLRPAAELRPEAAQYCVQKQDHGLDMALDNKLISLSNAALEKGLPVYIETPICNTNRAVGTMLSHEVTKRYNLAGLPADTIHIQFTGSAGQSFGAFLCPGITLELEGDSNDYIGKGLSGGKVVVYPPKGSNFDPKDNILIGNVALYGATRGEAYFNGMAAERFCVRNSGAQAVVEGVGDHGCEYMTGGTVVVLGKTGRNFAAGMSGGIAYVLDVDGTFQSRCNLELVDLDKVEEEEDIITLRMLIQQHQRHTNSLLAKEVLVDFENLLPKFVKVFPREYKRVLASMKSDAASKDAVERAAEDVDEQDDEAQAVEKDAFEELKKLATASLNEKPSEAPKRPSQVTDAVKHRGFVAYEREGVQYRDPNVRLNDWNEVMMETKPGPLLKTQSARCMDCGTPFCHQENSGCPLGNKIPEFNELVYQNRWQEALERLLETNNFPEFTGRVCPAPCEGSCVLGIIENPVSIKNIECAIIDKAFEEGWMIPRPPVKRTGKRVAIVGSGPSGLAAADQLNKMGHIVTVFERADRIGGLMMYGVPNMKTDKVDIVQRRVNLMAEEGINFVVNANIGLDPLYSLERLREENDAIVLAVGATKPRDLPVPGRELSGVHFAMEFLHANTKSLLDSNLQDGNYISAKGKKVVVIGGGDTGTDCIGTSIRHGCTAVVNLELLPQPPPTRAPGNPWPQWPRIFRVDYGHQEAETKFGKDPRTYEVLTKRFVGDENGVVKGLEVVRVCWEKDETGKFQFKEIEGSEEIIEADLVLLAMGFLGPEATIAEKLGVERDNRSNFKADYGRFSTSVDGVFAAGDCRRGQSLVVWAISEGRQRAAQVDSYLTNEDHGIDGNQDEFVKRQQDLNKKHSKHTVMT

SEQ ID NO: 4464 - protein, 102 aa, Plantago major
MEKVLQMASENGIVIFSKSTCCLSYTVQMLFQQLGTHPCIHDLDHDPEGKEVEKALMRMGCGGPVPAVFIDGNLVGSTNEVMSLHLSGTLLPMLGAHRAKLH

SEQ ID NO: 4465 - protein, 221 aa, Plantago major
MVRGKTQMRRIENATSRQVTFSKRRNGLLKKAFELSVLCDAEVALIIFSPRGKLYEFASSSLQDTIERYQSHIKELQAENPPLEQNTQQLQYETAGLLRKIEQLEAAKRKLLGEGIGACSLEELQQLETQLERSVTSIRTRKTQLYKQQIEQLKEKTKALAAENASICQKYGLQPQKGGGAKLSEERGNAASAEISEVSDVETDLFIGLPESRANKHSLQK

SEQ ID NO: 4466 - protein, 161 aa, Plantago major
SNKSMAGQVSLSGPASAKASADDNGSANLSEKPRIRHQHSQSMDGSTSIKSEMFMSGSEDPSSVESKKAMSAAKLAELALIDPKRAKRVWANRQSAARSKERKMRYIAELERKLQTLQTEATTLSAQMTLLHEAQMLLHRKMVNLNCVCRQWNSKYTCKML

SEQ ID NO: 4467 - protein, 611 aa, Lysinibacillus sphaericus
MSKIIGIDLGTTNSCVSVLEGGEPKVIPNPEGNRTTPSVVAFKNGERQVGEVAKRQSVTNPNTIISIKSKMGTAEKVTVEDKDYTPQEVSAMILQYLKGYAEDYLGEKVTKAVITVPAYFNDAQRQATKDAGKIAGLEVERIINEPTAAALRYGLDKQDQDQKVLVFDLGGGTFDVSILELGDGVFEVLATAGDNKLGGDDFDDAIIEYLVAEFKKENGIDLSKDKMAMQRLKDAAEKAKKDLSGVTSTQISLPFITAGEAGPLHLEISLTRAKFDEITLPLVNRTVGPVRQALSDAGLSTSEIDQVILVGGSTRIPAVQEAVRKETNKEPHRGVNPDEVVAMGAAVQGGVLTGDVKDVVLLDVTPLSLGIETMGGVFTKLIDRNTTIPTSKSQVFSTAADNQPAVDIHVLQGERSMAADNKTLGRFQLADIPPAPRGVPQIEVTFDIDKNGIVSVKAKDLGTNKEQTIVIQSDSGLSEAEIERMVKDAEANRDADAKRKEEADLRNEADQLVFQVDKTITDLGEQITEDEKKSVEDARDELKKALEAGELEGIKAAKEKLEGVLQPLVMKVYEQAAAAAQARQGGEADAGAGKKDDGVVDADFEEVKDDK

SEQ ID NO: 4468 - protein, 682 aa, Magnaporthe grisea
MLRTVGRKALRGSSKGCSRTISTLKPATATIAKPGSRTLSTPATATATAPRTKPSASFNARRDPQPLVNPRSGEADESFIGKTGGEIFHEMMLRQNVKHIFGYPGGAILPVFDAISNSEHIDFVLPKHEPGAGHMAEGYARASGQPGVVLVTSGPGDTNVITPMADALADGTPLVVFSGQVVTSAIGSDAFQEADVIGISRSCTKWNVMVKSVDELPRRINEAFEIATSGRPGPVLVDPAKDVTASVLRRAIPTETSIPSISAAARAVQEAGRKQLEHSIKRVADLVNIAKKPVIYAGQGVILSEGGVELLKALADKASIPVTTTLHGLGAFDELDEKALHMLGMHGSAYANMSMQEADLIIALGGRFDDRVTGSIPKFAPAAKLAAAEGRGGIVHFEIMPKNINKVVQATEAIEGDVASNLKLLLPKIEQRSMTDRKEWFDQIKEWKEKWPLSHYERAERSGLIKPQTLIEELSNLTADRKDMTYITTGVGQHQMWTAQHFRWRHPRSMITSGGLGTMGYGLPAAIGAKVARPDALVIDIDGDASFNMTLTELSTAAQFNIGVKVIVVNNEEQGMVTQWQNLFYEDRYSHTHQRNPDFMKLADAMDVQHRRVSKPDDVGDALTWLINTDGPALLEVMTDKKVPVLPMVPGGNGLHEFITFDASKDKQRRELMHTRSNGLRG

SEQ ID NO: 4469 - protein, 575 aa, Vitis vinifera
SARAPSVISSSEATLGRHLARRLVQIGVSDVFSVPGDFNLTLLDHLIAEPGLKNIGCCNELNAGYAADGYARSRGVGACVVTFTVGGLSVLNAIAGAYSENLPVICIVGGPNSNDYGTNRILHHTIGLPDFSQEFRCFQTVTCYQAVVNNLEDAHEQIDTAISTALKESKPVYISISCNLPGIPHPTFSREPVPFCLAPKVTNQMGLEAAVEAAAAFLNKAVKPVMVGGPKLRVAKACEAFVELADACGYPVAVMPSAKGLVPECHPRFIGTYWGAVSTAFCAEIVESADSYIFAGPIFNDYSSVGYSLLLKKDKAILVQPERVVIGNGPAFGCILMKDFLKALSKRLKCNTTAYENYHRIYVPEGQPLRSDPKEPLRVNVLFQHIQKMLSSETAVIAETGDSWFNCQKLKLPKGCGYEFQMQYGSIGWSVGATLGYAQAVPNKRVISCIGDGSFQVTAQDVSTMIRCEQRTIIFLINNGGYTIEVEIHDGPYNVIKNWNYTGLVDAIHNGEGKCWTTKVVCEEDLINAIETATGSKKDCFCFIEVIAHKDDTSKELLEWGSRVSAANSRPPNPQ

SEQ ID NO: 4470 - protein, 225 aa, Klebsiella pneumoniae
MGDKFSISTGDVYYRRGRRWAARCCSPAIMQAAWAAGSDKPEQTTVRVGFIPLTDCAPLAIASLKGFDKKYGITLVPSKEASWAAVRDKLVAGELDAAHILYGMLYGLELGIASKPQAMANLMTLNRNGQAITLSSELQEQGVTDLSGLEKTDRSARAGQLHLRPTPFPTGTHAMWLYYWLASGGINPFADIRTVVVPPPQMVMNMRIGNMTAFASASRGTRGAI

SEQ ID NO: 4471 - protein, 445 aa, Haemophilus influenzae
MDEHGSAILGITSTGYRRAWRERYYGLLYDRTYLHRTNFYYWFIFLIEKELKMENVVIVSAVRTPIGSFNGALSSVSAVDLGAIVIQEAIKRANIESALVNEVIMGNVLQAGLGQNPARQAALKAGIEKEIPSLTINKVCGSGLKSVALGAQSIISGDADIVVVGGMENMSQAPYLLDSKVRQGVKMGNLTLRDTMIEDGLTCASNHYHMGITAENIAEQYGISRQAQDELALRSQTLASQAVQLGVFDKEIVPVMVKTRKGDIIVSRDEYPKADTTAEGLAKLKPAFKKEGTVTAGNASGINDGAAALILVSESKAHALGLKAIAKIRSYASGGVDPSVMGLGPVPATQKALKKAGINLDDIDLIEANEAFASQFLGVGKDLNLDMNKTNIHGGAIALGHPIGASGARILVTLLHNLIEKDKKLGLATLCIGGGQGISMIVERL

SEQ ID NO: 4472 - protein, 177 aa, Ceratodon purpureus
MAPPTVGTQAQAAPAMVPARVYSKDDEVLVKKSWDILKKDAQRNGINFFRKVFEIAPGAKSMYSFLRDSTIPFEENPKVKNHARYVFMMTGDAAVQLGEKGAYQVLDSKLQKLAATHINAGVTDDQFEIVKEAILYAIEMGVPELWSPELKSAWGDAYDMLAAAVKAEMHAQRAAAQ

SEQ ID NO: 4473 - protein, 177 aa, Carboxydothermus hydrogenoformans
  misc_feature (38)..(38): Xaa can be any naturally occurring amino acid
  misc_feature (47)..(47): Xaa can be any naturally occurring amino acid
  misc_feature (63)..(63): Xaa can be any naturally occurring amino acid
  misc_feature (73)..(73): Xaa can be any naturally occurring amino acid
  misc_feature (137)..(137): Xaa can be any naturally occurring amino acid
  unsure (1)..(177): unsure at all Xaa locations
FADPWPSVDRNVCYQLIAMVADVGHGAIIRPFKGKGDXQRRCQNIYXRMLRNSLSGILFSPCXKHERCTKINXFVGTSVPRPLIAKKLVEIAEKERAVAVAHGATGKGNDQVRFELTVKALNPDLKIIAPWREWEIXSREDAIDYAQNRGIPVPVTMQAALHHGIETSGIFPTKGVF

SEQ ID NO: 4474 - protein, 432 aa, Nicotiana sp.
MAQILAPSGEWQMRMTKSSTDANPLTSKMWSSVVIKIIKELAVKSSAKFRVFALESDSGTVNQSEQLLNLDVTPYTDLIIAEYIWIGGSGIDMRSKSRTISKPVKHASELPKWNYDGSSTGQAPGEDSEVILYPQAIFKDPFRGGNNILVICDAYWPAGEPIPSNLRHKAAQIFSDSLVVSEVPWFEIEQEYTLLQQNVKWPLGWPVGGYPGTQGPYYLCAGADKSFGLDISDAHYKACLYAGINISGTNGEVMPGQWEFQVGPSVGIEAGDHIWCARYILERITGQAGVVLSLDPLPIEGDTNGAGCHTNYSTLSMREDGGFEVIKKANLNLSLRHLEHINAYGEGILEKLTGNHETASIDYFSWGVAFRGASIRVGADTEKQGKGYLEDRRPASNMDPYVVTGLLAQTTILWEPTLEAEALAAQKLALKV

SEQ ID NO: 4475 - protein, 241 aa, Nitrosospira sp.
MATLALSTLDISPAAAHGERSQEPFLRMRTIQWYDMKWGPETTKVNDFATMTGKFHLAEDWPRAAGKPGRAFFNVGSPSPVFVRLSTKLNGEPTMISGPLEIGRDYAFEVKLKARIPGRHHMHAMVNIKDAGPIAGPAAWMNITGSWDDFTNPIKLLTGETIDTETFNFSNGIFWHVLWLSLGVFWIGYYVARPMFLPRSRVLLAYGDDLLLDPMDKKVAWIVLILTFGIVWGGYRYTETK

SEQ ID NO: 4476 - protein, 78 aa, Saccharomyces bayanus
AEYGAINYLLLTDKVLHSDDIAHRGKYLKLMDSVESNGGKALVFSTLHSLGEELDQLTGIACILKYPLPDLDEDNNEV

SEQ ID NO: 4477 - protein, 209 aa, Oryza sativa Japonica Group
MQSLFASTLLKLCDISFLLVLMLGNLDGYTKSDEGKMMSALSLGKSETVYAHSEPDRSQPFGISYPYADSFYGGAVATYGTHAIMHPQIVGVMSSSRVPLPIEPATEEPIYVNAKQYHAILRRRQLRAKLEAENKLVKNRKPYLHESRHQHAMKRARGTGGRFLNTKQQPEASDGGTPRLVSANGVVFSKHEHSLSSSDLHHRRAKEGA

SEQ ID NO: 4478 - protein, 166 aa, Oryza sativa Japonica Group
MSRMINLVILMVTRRVMKGISYPYADSFYGGAVATYGTHAIMHPQIVGVMSSSRVPLPIEPATEEPIYVNAKQYHAILRRRQLRAKLEAENKLVKNRKPYLHESRHQHAMKRARGTGGRFLNTKQQPEASDGGTPRLVSANGVVFSKHEHSLSSSDLHHRRAKEGA

SEQ ID NO: 4479 - protein, 501 aa, Oryza sativa Japonica Group
MEFQPFPQGVHPNTSEPAMEPMASESSVPIGTAFADLLLQGPEHPSLWNDLTGMFRKAFRWQGADKRFTLSVYVMSVLQGLFPILDWWKTYNLKFFRSDLMAGLTLASLSIPQSIGYATLAKLDPQYGLYTSVVPPLVYAVTGSSREIAIGPVAIVSLLLSSMIQKIVDPSVDPAFYRKMVFTVTFLTGVFQFAFGLFRLGFLVDFLSHAAIVGFMGGAAIVIGLQQLKGLLGLSHFTNRTDVVSVTKAVWVSVHETWHPENVFIGCSFFMFILAMRFIGRKYKKLFWVSAIAPVLSVALSTLFVYATRADKHGVKIIQKVNSGINASSVEQIDLKGGYAAECAKIALVCAVIALTEAVAVGRSFSAINGYRLDGNKEMVAMGFMNIAGSLSSCYVATGSFSRTAVNFAAGCKTTVSNIIMAATVMVALELLTKLLYYTPVSILASIILSALPGLINVQEVCFLWKVDKMDFLTCMGSFLGVLFGSVEIGLSVAVLIPHLI

SEQ ID NO: 4480 - protein, 256 aa, Oryza sativa Japonica Group
MNQSPPHMSRPSVIIKLILGLLWFIVHLAISLCSLWFDLIYSIECYLISFGLIPKYRKFQLDRLKHLAVVVDSREAKNVAKINQLLCWLSNVGVKYVCLYDIDGVLKKTFAPAMNGSRYGNSGKYLDVGANTKALTCCHKEMTIECISGSDGKDGIAKAASLLCSTCVNGNRNTCGNGEIVFTEADMSGALKAIGCGGPEPDLLLVYGPARCHLGFPAWRLRYTEIMHMGPLNSMKYGAIVKAFYKFSKKYQNFGK

SEQ ID NO: 4481 - protein, 249 aa, Oryza sativa Japonica Group
MSRPSVIIKLILGLLWFIVHLAISLCSLWFDLIYSIECYLISFGLIPKYRKFQLDRLKHLAVVVDSREAKNVAKINQLLCWLSNVGVKYVCLYDIDGVLKKTFAPAMNGSRYGNSGKYLDVGANTKALTCCHKEMTIECISGSDGKDGIAKAASLLCSTCVNGNRNTCGNGEIVFTEADMSGALKAIGCGGPEPDLLLVYGPARCHLGFPAWRLRYTEIMHMGPLNSMKYGAIVKAFYKFSKKYQNFGK

SEQ ID NO: 4482 - protein, 604 aa, Oryza sativa Japonica Group
MCGILAVLGAADWSQAKRAHVLSCSRRLKHRGPDWSGLYQCEGNFLAQQRLAIVSPLSGDQPLYNADRTIVVVANGEIYNHKKIRKQFASKHTFSTGSDCEVIIPLYEEYGEDFVDMLDGVFAFVLYDTRTKTYMAARDAIGVNPLYIGRGSDGAVWISSEMKALNEDCVEFEIFPPGHLYSSAAGGLRRWYKPQWFAENVPATPYQPLLLREAFEKAVIKRLMTDVPFGVLLSGGLDSSLVAAVTKRHLIKTEAAEKFGAELHSFVVGLEGSPDLIAAREVADHLGTIHHEFHFTVQDGIDAIEEVIYHDETYDVTTIRASTPMFLMARKIKALGVKMVLSGEGSDELLGGYLYFHFAPNKEEFHKETCRKVKALHQYDCLRANKATSAWGLEVRVPFLDKEFINVAMSMDPEWKMYNADLGRIEKWVMRKAFDDEEHPYLPKHILYRQKEQFSDGVGYNWIDGLKAFTEQQVSDEMMKNAAKVYPHNTPVNKEAYYYRMIFERLFPQESARETVPWGPSIACSTPAAIEWVEQWKASHDPSGRLIASHNSASASANHTNHANANANGNSNGKANGNCAMAANGTNGVGLVVANGTANGKMEA

SEQ ID NO: 4483 - protein, 326 aa, Oryza sativa Japonica Group
MVSSAMAAVAVAFAVVVAATMSSAQLDPHFYDGLCPAALPTIKRIVEEAVAAEPRMGASLLRLHFHDCFVNGCDGSILLDDTPFFTGEKNAAPNMNSVRGFDVIDRIKDAVNAACRRNVVSCADIVAVAARDSIVTLGGPSYHVPLGRRDARTASQAAANSSIPAPTLNLDGLVSSFAAQGLSVQDLVLLSGAHTLGFSRCTNFRDRLYNETATLDASLAASLGGTCPRTAGAGDDNLAPLDPTPARFDAAYYASLLRARGLLHSDQQLFAGGGLGATDGLVRFYAANPDAFRRDFAESMVRMASLSPLVGSQGEVRVNCRKVNYY

SEQ ID NO: 4484 - protein, 68 aa, Oryza sativa Japonica Group
MGSLQALERRLAGLGWERYYEDRAVVQLHRRDGGADLISLPRDFARFRSTHMYDVVLKNRDHFKVLDN

SEQ ID NO: 4485 - protein, 301 aa, Oryza sativa Japonica Group
MASVTYIDDSGSEVIDPPKTEVLDVTELAGDPVPHSPKPNVVVSSSVRELLECPVCLSAMYPPIHQCSNGHTLCSGCKPRVHNRCPTCRHELGNIRCLALEKVAASLELPCKYQNFGCVGIYPYYCKLKHESQCQYRPYSCPYAGSECTVAGDIPYLVNHLKDDHKVDMHNGCTFNHRYVKSNPHEVENATWMLTVFSCFGQYFCLHFEAFQLGMAPVYIAFLRFMGDDLEAKNYSYSLEVGGTGRKMIWQGVPRSIRDSHRKVRDSYDGLIIQRNMALFFSGGERKELKLRVTGRIWKEQ

SEQ ID NO: 4486 - protein, 957 aa, Oryza sativa Japonica Group
MSSSRSNNRATCSRSSSARSKHSARVVAQTPMDAQLHAEFEGSQRHFDYSSSVGAANRSGATTSNVSAYLQNMQRGRFVQPFGCLLAVHPETFALLAYSENAAEMLDLTPHAVPTIDQREALAVGTDVRTLFRSHSFVALQKAATFGDVNLLNPILVHARTSGKPFYAIMHRIDVGLVIDLEPVNPVDLPVTATGAIKSYKLAARAIARLQSLPSGNLSLLCDVLVREVSELTGYDRVMAYKFHEDEHGEVIAECKRSDLEPYLGLHYPATDIPQASRFLFMKNKVRMICDCSATPVKIIQDDSLTQPISICGSTLRAPHGCHAQYMASMGSVASLVMSVTINEDEDDDGDTGSDQQPKGRKLWGLMVCHHTSPRFVPFPLRYACEFLLQVFGIQINKEVELAAQAKERHILRTQTLLCDMLLRDAPVGIFTQSPNVMDLVKCDGAALYYQNQLWVLGSTPSEAEIKNIVAWLQEYHDGSTGLSTDSLVEAGYPGAAALGDVVCGMAAIKISSKDFIFWFRSHTAKEIKWGGAKHEPIDADDNGRKMHPRSSFKAFLEVVKWRSVPWEDVEMDAIHSLQLILRGSLQDEDANKNNNAKSIVTAPSDDMKKIQGLLELRTVTNEMVRLIETATAPILAVDITGSINGWNNKAAELTGLPVMEAIGKPLVDLVIDDSVEVVKQILNSALQGIEEQNLQIKLKTFNHQENNGPVILMVNACCSRDLSEKVVGVCFVAQDMTGQNIIMDKYTRIQGDYVAIVKNPSELIPPIFMINDLGSCLEWNEAMQKITGIKREDAVDKLLIGEVFTHHEYGCRVKDHGTLTKLSILMNTVISGQDPEKLLFGFFNTDGKYIESLMTATKRTDAEGKITGALCFLHVASPELQHALQVQKMSEQAAMNSFKELTYIRQELRNPLNGMLELEAMLQKGVKFEIEALSACSISFLSEEYIPKKIKQGRHI

SEQ ID NO: 4487 - protein, 162 aa, Oryza sativa Japonica Group
MSDSEEHHFESKADAGASKTYPQQAGTIRKNGHIVIKNRPCKVVEVSTSKTGKHGHAKCHFVAIDIFNGKKLEDIVPSSHNCDVPHVNRTDYHYLLIISEDGFVSLLTESGGTKDDLRLPSDEALLTQIKDGFAEGKDLIVTVMSAMGEEQICALKDIGPKN

SEQ ID NO: 4488 - protein, 162 aa, Oryza sativa Japonica Group
MSDSEEHHFESKADAGASKTYPQQAGTIRKNGHIVIKNRPCKVWIPVSTSKTGKHGHAKCHFVAIDIFNGKKLEDIVPSSHNCDVPHVNRTDYQLIDISEDGFVSLLTESGGTKDDLRLPSDEALLTQIKDGFAEGKDLIVTVMSAMGEEQICALKDIGPKN

SEQ ID NO: 4489 - protein, 421 aa, Oryza sativa Japonica Group
MDGNARSAANQTKQIVTDNELVELLWHNGGVVAQPQAAQARVVSSSGRGQSASVLTGDDTETAAWFPDTLDDALEKDLYTQLWRSVTGDAFPAAAAAGPSSHHAPPPDLPPPAARPPMRSGIGSSWTGDICSAFCGSNHIPETAAQRCRDAGAALPPERPRRSSTHDGAGTSSSGGSGSNFGASGLPSESASAHKRKGREDSDSRSEDAECEATEETKSSSRRYGSKRRTRAAEVHNLSERRRRDRINEKMRALQELIPHCNKTDKASILDEAIEYLKSLQMQVQIMWMTTGMAPMMFPGAHQFMPPMAVGMNSACMPAAQGLSHMSRLPYMNHSMPNHIPLNSSPAMNPMNVANQMQNIQLREASNPFLHPDGWQTVPPQVSGPYASGPQVAQQNQIPKASASTVLPNSGAEQPPTSDGI

SEQ ID NO: 4490 - protein, 342 aa, Oryza sativa Japonica Group
MLGALLRLLSACGGVWPTSPAPPARSSSSSSAAAAADQAAAEGRDGLLWWRDLARCHAGELSVAVVQGNHVLEDQCRVESGPPPLAATCIGVFDGHAGPDAARFACDHLLPNLREAASGPEGVTADAIRDAFLATEEGFLAVVSRMWEAQPDMATVGTCCLVGVVHQRTLFVANLGDSRAVLGKKVGRAGQITAEQLSSEHNANEEDVRQELMAQHPDDPQIVALKHGVWRVKGIIQVSRSLGDAYLKHSQYNTEQIKPKFRLPEPFSRPILSANPSIIARCLQPSDCFIIFASDGLWEHLSNQQAVEIVHNHQRAVRFCTFNLFIYCFTFWSLLLPKGLFS

SEQ ID NO: 4491 - protein, 1100 aa, Oryza sativa Japonica Group
MRMRVSLLLLAAAAVAAAAEAAPSSTLAGPTRPVTVPPRDRGHAVDLPDTDPRVQRRVKGWAPEQIAVALSAAPSSAWVSWVTGDFQMGAAVEPLDPTAVASVVRYGLAADSLVRRATGDALVYSQLYPFDGLLNYTSAIIHHVRLQGLEPGTEYFYQCGDPAIPAAMSDIHAFRTMPAVGPRSYPGKIAIVGDLGLTYNTTSTVEHMVSNQPDLVLLLGDVSYANLYLTNGTGTDCYSCSFANSTPIHETYQPRWDYWGRYMEPVTSRIPMMVVEGNHEIEEQIDNKTFASYSSRFSFPSTESGSFSPFYYSFDAGGIHFIMLAAYADYSKSGKQYKWLEKDLAKVDRSVTPWVIAGWHAPWYSTFKAHYREAECMRVAMEELLYSYAVDVVFTGHVHAYERSNRVFNYTLDPCGPVHISVGDGGNREKMATSYADEPGRCPDPLSTPDPFMGGGFCGFNFTSGPAAGSFCWDRQPDYSAYRESSFGHGILEVKNETHALWRWHRNQDLYGSVGDEIYIVREPDNLQPVQLGGGGGGRRRGGGGAGMVSLAAYSPCSTVAGVPKNKGNGAASSTHKESIMRHVVVQCATSWDTPRTSTTNGSHAEPSAVVKAGTAPLIQALKSTANQDVSCFHFPGHNRGKASPPSLSELIGSRTFLHDLPELPELDDLFSPKGVILDAQKRAAELFGSFKTWFLVNGSTCGIQASVMATCSPGDYLIIPRNCHISVISALVLSGAVPKYIVPEYNSGWDIAGGITPSQVDKVVKELEEDRKKVGAVLVTSPTYHGICSNIQGIVNVCHLQGIPVIVDEAHGAHFRFHRNFPSSATEQGADLVVQSTHKVLCSLTQSSMLHMAGDLVDADKVSQCLQLLQSSSPSYLLLSSLDAARAQLSENAESFDEPVSMALETKHQLRIIPGISVLDLSSFLSDFPAIDPLRITLSASDLQLSGYEADDFLAEEHQIVSELVGTQAVTFAVNLGTRRHDVQRLVHSVKHLSEKYFSENGSSSRKENPASSPLDKFSIKLTPREAFFLKKRRVSIEDSLGEICGELICPYPPGIPVLIPGEIVTQDSLSYLMDVRDNGIAISGAADGELKSIMVCNV

SEQ ID NO: 4492 - protein, 495 aa, Oryza sativa Japonica Group
MAVALRFAAVARDSPAAAAPPRVGREQQYLACAAAARPGGRCSRRRGLVVRCQSGAAAVVLNKDDAASVAAAAASSATGFTVAMKFGGSSVASAERMREVADLILSFPEETPVVVLSAMGKTTNNLLLAGEKAVSCGAPKASEIPELAVIKELHVRTIDELGLDRSIVSGLLEELEQLLKGVAMMKELTPRTRDYLVSFGECMSTRIFAAYLNKLGKKARQYDAFDIGFITTDDFTNADILEATYPAVAKRLQGDWIDDPAIPIVTGFLGKGWKSCAVTTLGRGGSDLTATTIGKALGLREIQVWKDVDGVLTCDPNICANAIPVPYLTFEEAAELAYFGAQVLHPQSMRPAKEGDIPVRVKNSYNRRAPGTVITKTRDLSKSILTSIVLKSNITMLDIVSTRMLGQYGFLAKVFSIFEDLGISVDCVATSEVSISLTLDPSKLWCRELIQQELDHVVEELEKIAVVHLLQHRSIISLIGNVQRSSLILEKVIIS

SEQ ID NO: 4493 - protein, 463 aa, Streptomyces kanamyceticus
MHDTGTAAPSAPAPDQSEGQEAQSRHARRFGLPIATCLVMGNIIGGGIFLLPASVAPFGTISLVAFAVLTAGAIALALVFGRLAERDPRTGGPYVYARAAFGDFAGFLAAWSYWITTWVSNAALAVAAVGYLNVLIPVNDHKWSACLAALVLQLLPALANFAGTRYVGAVQLVATVLKFLPLLLVAVGGLFFFDSANLGPFQASDDSPMGAVSAAAAILLFSYLGVESAAVSAGEVRDPRRNVGRATILGTLGAAVVYLLGTLAVFGTVAHDKLITSTAPFSDAVDVMFGGSWGGTAVAFAALISMVGALNGWTLLSAQTPYAAAKDGLFPAAFGRKKRGVPTVGVLVTVVLASLLTVYNYTAGSSGVFESLVLITTFTATVPYLLATVAQIYFLVSGQRERVNRGRLVRDAVLAGAAFAFAMWLVAGSGYAAVYQGVLFLFVGVLVYAWMAARKQRAATSND

SEQ ID NO: 4494 - protein, 309 aa, Streptomyces kanamyceticus
MPDNPSTKGRMMRNQQAEHTPVTVIGLGLMGQALAGAFLGAGHPTTVWNRTAAKAEPLVARGAKSAGSVAEAVAASPLVVVCVSDYDAVHALLDPLDGTALQGRTLVNLTSGTSAQARERAAWADGRGADYLDGAILAGPAAIGTADAVVLLSGPRSAFDPHASALGGLGAGTTYLGADHGLASLYDAAGLVMMWSILNGFLQGAALLGTAGVDATTFAPFITQGIGTVADWLPGYARQIDDGAYPADDAAIDTHLATMEHLIHESEFLGVNAELPRFIKALADRAVADGHGGSGYPALIEQFRTHSGK

SEQ ID NO: 4495 - protein, 669 aa, Myxococcus xanthus DK 1622
MHGAALQPRLRQGMEGGANSPSFPSGDACSGPALPPRCHCASCVEPPRPQPPLSSPTCAGSCHCARPRAPPSAGRIAPLRARGDSLIGTRSRHEAGLASRLCALVLLDPSSETDMHRSPGSILPSRGASPRPFLPVNVLLVSVLLALGSGCGDSEPDKTNDCPNPSVGCGQQDSGTPDAGAPDAGNPDAGIPDAGDPDAGNPDAGHPDACNPDAGNPDGGGPLPTVPTLIESSQSAHQVSAGQTVTFHVTGRDDLACPLQFSWDASSGTLGSPETSAATSDVTWTAPHCVLWSSEVTITLTVTNNARLSTSKSFTVSAPRCPGPVVSGGVSHSLAIRGNGTLWSWGHNSFGQLGDETNATRHAPVQVPGLTDATAVAGGHAHSLASRADGTVWAWGLNGGALGDGTTSTQYAPVQVSGLTGAISVAAGSSFSLALDADGTVWAWGMNGSGELGDGTTTDRLTPVRVSGLSNITALAAGTGHSLALGADGTVWAWGLNFHGELGDGTTVSRPLPVQVPGLTGVIAVAAGMYHSVALRNDGTVWAWGWNLKGELGDGTTTQRESPVQVPGVTGAIAVAAGGYHSLALLSDNTLRAWGKNEDRQLGDGTNTDRHTAVQVSGLTGVTSVFAGGGHSLILRNDQAVWAFGSDVSGQLGDGNTPSGHGPVQVSLP

SEQ ID NO: 4496 - protein, 396 aa, Myxococcus xanthus DK 1622
MSRPVAAQRVTRFATTVFSEFSALAARHGAVNLGQGFPDFDGPAAIKEAAQRAIRDGGNQYAMGAGARELRVAIAEHSARFYGQTVDPDTMVTVTSGATEAILDTLLGLVDPGDEVVAFEPFYDSYDANITFVGATARFVPLRPPDADHAQWWFDRDEVRAAFSPRTRLLILNTPHNPTGKVFTRDELTFLGELCAEFDVKVLSDEVYEHLVFEPARHLRPATLPGLAERTVTVSSGGKTFSLTGWKVGWVIAPPPLRDAVQRAHQFVTFATAAPLQAAMAEALRLPDAYFTELTASYAAKRERLLTGLREAGLTAFAPEGSYFILADITRQGFADDVAFCRHLVSKVGVAAIPPSVFYGPAHRHLGQGLARFAFCKTDAVLDEAVRRLRAGLSPR

SEQ ID NO: 4497 - protein, 197 aa, Myxococcus xanthus DK 1622
MSVEALFQTLESRLSSRPAREVHLPGWTLREASVLVPVFERDGVPHVLFTRRPATLRTHADQYSFPGGGRDPEDATPLHTALRETEEELGIDRRGVRVLGMLDEVPTISQYRVRPFVGVIPGDGKYRPSAEEVAFILEVPLSGLLDPSILRVEQKEIMGAERDLYFYTYGTHVIWGATARILRDFLNHVTQVPGGAG

SEQ ID NO: 4498 - protein, 332 aa, Myxococcus xanthus DK 1622
MAKVKHESDWYPLESGESVLDALLRQGVSIPNACRAGACQSCLMRAVAGTVPEAAQVGLKDTLRAQGYFLACACRPPEGTQLEVTGAEALRIPARIQALSLLSTSVLRVRLVTDSPLAYHAGQYISLVREDGLARSYSLASLPHEDALELHVRLQPGGAMSGWLAHDAQPGDRLQVQGPAGSCFYVPGRPEQPLLLAGTGTGLAPLYGIVRDALAAGHTGPIWLFHGARTPEGLYLTSELRALAEQHPQFLYRPGVLEGGSRDVAEGALDVLIRAECPKPLGWRAWLCGDGPLVLSLRKKLFLAGLSLKDLHTDAFLPSVPSGQRTSDAGAR

SEQ ID NO: 4499 - protein, 1399 aa, Myxococcus xanthus DK 1622
MQLCFLPQLPRATFLIAVEYWAAMPKDIIDFQLERGRHEQLLGRQDALTTLDSFLLSGESARGWLLVKGGPGRGKSALLSSWLGARELAGQRVPHHFLRRGVEDWDRPEVVVRNLAAQVEALYPLHADLEAKPESRLREVLQRVSTAVLVPQRKQLVLLVDGLDELDASGPNPLPRFLPHALPPGVKVLCSSRPMYPHLSWLEARDNVRTLDLDGQRWAASNEEVVREYWAHVAPKFTPSLEPSLMAQAIKNAQGNVLHAVKLAEWLLEQPAEERRAAMLPSGLDAFLEDAWQRIQDQPMEVRGIVLEGLELVAVAREALPLSVLADVAEWKGISAREQFLRVARPFLLEESGHWGGEKAWRLFHKAFHDFILSKLGEQGELQQHRRLAENICKWSVDAPISGFRRNYTLRHGVTHWLKAQEWQHVRKLCMDLSFLEAKCQEIGIFAVEEDMPQAVDGVGELYKTALRDLHQAVRAESHWLREDAAAFPRLIYNRLLSQGWKAARIAEMLHFPGGLPALRLRHPVRLRHGEVRTLKGHDGPVNGCTVTPSGWVVSASDDKTLRVWELETGKELARMEGHEGWVRSCAVIPDGRVVSASDDKTLRVWELETGKELARMEGHKGPVWGCSVTPDGRLVSASFDEMLRVWELKTGIKLAQLVGHKGAVNGCAVTVDGRVVSASSDGTLRVWELETGKELARMEGHEGPVNGCAVTVDGRVVSASSDGTLRVWELETGKELARMEGHEEPVNGCAVAADGWVLSASNDKTLRVWELDTGREVAQLEGHEGPVKSCAVTEDGWVVSASDDKTLRVWELETARQSARRQDHKGPVWGCTATSDGRLVSASSDKTLKVWELKTKKELARLEGHDGWVRGCAVTANGRLVSASSDRTLRVWNLEAGKELMRLEGHAGPVNDCAVTARGQVVSASSDRTLRVWDLETGKELMRLEGHDGPVWDCAVTARGQVVSASSDRTLRVWDLETGKELVRLEGHDGPVLGCVMTADGRLVSASSDKTLRIWEPTTGKELARLEGHRGPVWDCAMTADGMVISASDDKTLGVWDIASGQRIHTFHGMSGFRSVAVTRDTVCAGDTLGNIWMTEIEPARVNQERSPKEKLESGTTVSVKIPAPVLEAYRSNKLALFVGSGLSLGKDVQGDFPTWGKLPERLLDACKRYDSLDEETIRLKHALFRNRMRLESMLSELGTLRTSLGRDYQNALNHIFRPPDAAPGKAQHAVIQLGVRAILTTNYDQLLELTPEMPRRQPYTWKDSDKALADLRAGRKILLKVHGTSEHHDTVVMSEVEYREAHSNSGYQAVLRHLLQEHLFLFVGYGMNDPLDLDLALKSNVESFGITTQRHYVLLRDAAANDHDRIEREYNIRIIDCSRHEQVPEFLESLAAAKAIP

SEQ ID NO: 4500 - protein, 393 aa, Myxococcus xanthus DK 1622
MARDVVIVGAARTPIGAFQGALAKLTAPQLGAIAIKAALERAGVKPEAVQEVILGCVLTAGVGQAPARQAAIFAGLPETVPATTLNKVCGSGLKAVSAGAQAIALGDADVVVVGGMESMSNAPYISHTMRGGARMGNVEFKDAMIHDGLWDVYGNVHMGICAEECATTQDISRSQQDEYALESTRRAIQAQKEGLFKAEIVPVQIPGKKPEDVVTVSDDEGPRNAKPEKIPGLKPVFKKDGTVTAANASSINDGAAALVLMSEERAKAEGRAILGRITGYAQAARKPVEFTIAPTDAINKLLKKQGISAGDVDLWEINEAFAVVSIANNRLLGLDVSKVNVRGGAVALGHPIGASGARVLVTLLQTMQDLDKKRGVASLCIGGGEGIALMVER

SEQ ID NO: 4501 - protein, 220 aa, Myxococcus xanthus DK 1622
MTSPNFIPSTKPLPFELHPSSIQGQGAFAIRRIRKGTRIIEYLGERITQAEADVRYDDESMARHHTFLFNLDKRTVLDAGTIHNEARYINHSCAPNCEALIEKGHIYIYALTSIEPGEELVYDYGYERTEDMGPEAEALYVCRCGAPNCRGTILAPAKKAPARKTSAKKAKTSSTSRKKSASKSRGNKGAGGKKAAGKKSSAGTRKSTQRAKSPSRKRAS

SEQ ID NO: 4502 - protein, 66 aa, Myxococcus xanthus DK 1622
MAIGTVKWFNDAKGFGFIAQDNGEDVFCHHTAINMDGFRTLQEGQQVEFEVTRGPKGLQAQNVRAV

SEQ ID NO: 4503 - protein, 396 aa, Myxococcus xanthus DK 1622
MSNKKNVVLAFSGGLDTAFCAVYLREQGYDVTTVTVDTGGFPPEQLERIAALSKQLGAVEHVTVDARETLFQGYLRYLIAGNVLRGQVYPLSVSAERACQAAEVVRVAREKGTQALAHGSTGAGNDQVRFDVAFRSLAPELELLTPIRTLSLSRQQELTYLAERGVHMPPKLGSYSVNEGMWGTSVGGAETLDSWKALPEAAFPGGELSQDLKPRPLTVSFEKGVPVALDGEKLGPVKLVEALNALGRTYGIGRGVHLGDTILGIKGRVGFEAPAAHLLVTAHRELEKLVLSGKQLFWKESMGNLYGSLLHEGHFFDPLVKDLEAFLTSSQERVTGDVRLVLHPRTQVVEGVRSPHSLMDAKVATYGEANVLWNGSEAAGFAKLYGVAQMLSHRAK

SEQ ID NO: 4504 - protein, 323 aa, Myxococcus xanthus DK 1622
MNDILRVRVARVTREAEDILSYELVATEGGPLPPFEAGAHLEVRVPGPGDFLRAYSLCNDPEETHHYVIAVARDAKGRGGSNAMHERVHEGDVLEVKPPRNNFPLLFARSYVLVAGGIGITPILSMARVLQRTGADYTLHYCARAPGRTAFHELLSQAPFAEHVRFSFDGGDPARGLDVKGLLATRQPGARLYCCGPTGLMKAVRDAATLHRWPWEKVHFESFTAEGTSAATGREEQGFEVTIRSTGQVLQVPVGQSVLNVLRRNGVRIPSDCEAGTCGTCVTRVCDGQPDHRDTFFQAEPAGDQRMLVCVSRARSKRLVLDL

SEQ ID NO: 4505 - protein, 398 aa, Myxococcus xanthus DK 1622
MKSVSKNEEIYFLSGKRTPFGTYGGSLKDLSATDLAVESAKAALAQAKVSPEDVQHVVYGNVVQTSADAIYLPRHVGLRTGVPVPVPALGVNRLCGSGFQAFITAAELMLTEQAAVVLAGGTESMSQAPHVIRGARWGLPLGKGSLEDMLWTALTDSYTGQPMALTAEQLAVDYSLTQDQVDEYAVLTQKRFAAAQEAGRFQDEIAPVTLKTKKGETVVSRDEHNRPETSVESLRKLPKVFKKDGVVHAGAASGICDGAGSMVMATGSFVKKHGLQPIGRLVNWGVSGCDPKIMGIGPAPAIRQLLERAQCQLSDIDLFEVNEAFAPQYLAVEKELGLPRERTNVNGGAIAVGHPLGASGARITTTLVYELKRRGARYGIGSACIGGGQGIAVLVEAL

SEQ ID NO: 4506 - protein, 629 aa, Myxococcus xanthus DK 1622
MPTSATRSAASWLSRAVPFLESVRGYRATWLKRDTVGALTVTALLIPEGMAYAELAGLPPTAAFYAAPAGLVLYALFGSSRQLIVAVSAAVAVLSAATVGALAQAGSPRFVVLTAALALMAGLISLLAGVLRLGRIAQFFSASVLTGFVFGLALIIAIKQVPKLFGVKGGDGNFFERLWFLVTHLGSTHLVTLLVGAGSLIMLLALDRVSKRLPAALVVLALSIVVTALLGLDARGVSVVGKVQAGLVPPQVPDVGLGDLLRLLPGASGIALVAFAEAIGPARMLAARHGYEVDANRELVGLGAANMGAGLFQGFSIGCSLSKSAANDAAGARTEVSAMLAAGFTLLVALFLTPLFRLLPEATLGAIVVVAVSGMMDVREMRRLHRMRRADFLGALVALVGVLALDVLPGLLVAVGVSLFLTVYRASVPRLSELGRVPGTLAFGDVRHAPRPLTVPGMLILRPNEGIFFANATALRDEVMTRVRHAGPSLHAVLLDMEVTADLDVPGADMLAALHDDLARRRVTLMLTRVMAPTGRMLERTGVTAKVGAEHLYAQVLDAVVEHLARASAATPEAQGLVRDGLRRLRMLVEEASTTLDADEGADRERLQTLGRRLGRAESALGEERPGPH

SEQ ID NO: 4507 - protein, 498 aa, Myxococcus xanthus DK 1622
MPASVLIVDDEKNILLTLSQSLQLAGYQTHLANSGQVALDVVSARPVDAVLMDVKMPDMDGLTALAKLTELKPELPVIMMSGHGTIDTAVKATQLGARDFLEKPIARERLLVALRNVLKHQAAMAELQELRAQLGRYDMVGSGPAMQRIFSLIQRTAPSEGRVLITGENGTGKELIARALHQHSKRKGQPFVKLNCAAVPHELIESELFGHEKGAFTGAVSVRRGKFELAHEGTLFLDEIGDMPQAMQAKLLRVLQEGELERVGGAETHKVDVRVVAATNKNLEAEIAAGRFREDLYYRINVVQIHSPPLRERREDLPDLIKTFLDEACAKNGRRPLTLSPDALAVMSAYDYPGNVRELRNLVERLAILCEGPIVTRTDALELLPRGRNVPPPAPVETPASPLPPPSPEAAVVLASSTPAPAIAAPVATEPPAPVGFRPRADRTFREQVEDAEREIIQHVLSHTHDNVTEAARLLDLERGHFYKKMKALGLRRGSSES

SEQ ID NO: 4508 - protein, 67 aa, Myxococcus xanthus DK 1622
MATGTVKWFNDAKGFGFIVQDGGGEDVFVHHSAINMDGFRTLQEGQKVEFEVGRGPKGLQAQNVRAA

SEQ ID NO: 4509 - protein, 130 aa, Myxococcus xanthus DK 1622
MRRILFKSKIHRATVTQADLDYEGSVTIDRDLLRAADIVENEKVAVWNITQGTRLETYALEGEAGSGVICINGAAAHLNKPGDLVILATFAEVEEAEVANWKPTVVFVDKDNRVVPGQTKEIPGPQRRSA

SEQ ID NO: 4510 - protein, 711 aa, Myxococcus xanthus DK 1622
MTVATREHTRTLRAAESLGKDLGRGLARMDPADMKRLGAHVGDIVTLSGKRRSAAKVMPSYPDARGRGILQIDGVTRANTGVQLDEPVKLTLAPARHAEKVVLAPLEFTPAQRDLAYIGTLLDGLPVVKGDRVRALLFGSRTADFRVVETTPVGAVVIHPNTLLEVAKAPEKEKVTHERARAVSYEDVGGLKRELGRIREIVELPLRYPEVFERLGIDAPKGVLLYGPPGCGKTLIARAVAHETAAAFFTITGPEIMHKFYGESEAHLRQIFDEAQRRAPAIIFVDEIDAIAPRRENVQGEVEKRVVAQLLSLMDGLAQRRHVIVLAATNIPNVLDPALRRPGRFDREIAISIPDRTARKEILAIHSRGMPLAEDVDLDHLAAVTHGFVGADLQALCREAAMLCLRRLIPHIDFASAEIPYDELIQVQVTMADFQAALHEVGPSAIREVFVETPDVGWKDVGGLGQLKQRLIEAVEWPLRYPEEFARAKVRPPKGVLLSGPPGCGKTLMAKAAAHESQVNFISVKGPALLSKFVGESERGVRETFQKARQAAPCIIFFDEIDSLVPTRSAGGMDERVTERVVSQFLAEMDGIEELTGVLVLAATNRADLLDPALLRPGRFDLLVDVPLPDREARRDIFQVHLRDKPVEKDLDLGGLAARSESFSGADIQAVCNQAAWEAVRHVISGKGKRLVITSESLLKAIRGHKEARRP

SEQ ID NO: 4511 - protein, 819 aa, Myxococcus xanthus DK 1622
MRVMKFGGTSVGNAERMRGVADLAAAARKQTRVMMVASAVSGITNLLLEAARAAQEGQPVESLHGRFEDVHRGIIRELAPELGEARQRSLEEGLSTLASELRGLLQGVGLLRECSPSVLAHLSGLGERAACLILGALMHARGLEPHAVEPRDVILCAGDPLQATPLQEETRARFTPLREAGGPGLMLMPGFFGGDTRGKTMCLGRGGSDYSAALAAAALDAELLEIWTDVDGIFSADPRLVPEAFPLPEVSFEEAMELAYFGAKVLHPKTIAPARERGIPVRVCNSFRPDHPGTRVTDDAAPPEHPVRGLSFLPGIALVNLGGAGLKGVPGTAARVFESMALANISVVLITQGSSECSISFCVQQADAERAVQALEVAFEMERAAGKVDTIEQQRGLAVLSIVGDGMRHRVGVAGTFFSALADVGCSIAAIAQGSSERSISAVIAETDGPRALAHVHGRCFGTTEVVELLLAGVGSVGGELLKQVHQQAPKLRAHGVDLRVCVIANSKRVATASEGIPLEDWKQRLAASSDGAPLDAFRDWARAKRPGRPVFVDCTSSEDIALAYPSLMEAGLHVVTANKKANAGQWSHYRKLRETASRHQRRFLYETNVGAALPVIDTLKNMLRTGDRVLRVEGILSGSLSFILGLTEEGVPLSQAVGTAMEKRFTEPDPRDDLHGTDVARKVLILARELGRQVELEQVTLDSLLPSDFDATGPLDDFLARLPQVDAAFQRRVETLRAEGKVLRYVGSVTEDGCFVGLVPVPLTHPLAAVKGGENALSFTSERYSPTPLVIRGYGAGAAVTAAGVLADVLRLVDGPLP

SEQ ID NO: 4512 - protein, 200 aa, Myxococcus xanthus DK 1622
MATQQAGLDANALNQLFLDARTHNAWLDKPVADDVLQQLYALTRMAPTAANSQPVRIVFVKSREAKERLKPTLSPGNVDKTMNAPVTAIIAYDTAFYEKFPQLFPLRDMKAGFLAMPAEAREKTAYMNSSLQGGYFILAARALGLDCGPMAGFDNAKVDAAFFPEGKWKSNFLINLGYGDAEKLFPRNPRLDFSEACRIE

SEQ ID NO: 4513 - protein, 485 aa, Myxococcus xanthus DK 1622
MKFVDEVRIFVKAGDGGNGAVSFRREKYIERGGPNGGDGGNGGSVVFVADPQLTTLLDYRYQQHHRARNGEHGMGSDCNGRAAEDMVLKVPVGTLVKDANTGELLVDLSEAGQRWVAAKGGRGGLGNMNFATSTRQTPRFAQDGTKGEELTLRLELKLLADVGLLGFPNAGKSTFISRVSRARPKVADYPFTTLVPNLGMVQYKDGLSFVMADIPGIIEGASEGVGLGHQFLRHVERCKVLIHLIDMGAEGEGRAPLHDFDVLNAELGKYSPELASKPQVVAANKLDLPDAQARLEGFTEALRERGIRVYPVSCATGEGMQPLMDSVAEVLFTGRTEKLHVEIPAKAARAGKAKTKAAEKKALARNAGAAAATKSATKKSAAAKKAVTKKAPARKAGAVAKTSAARKAGTAAAKKAPARKSGTAPVKKAAAKKAPARKSGTAPAKKSAVKKASARKSGSSGKAAAKKASAATKRAPARKSGGGRS

SEQ ID NO: 4514 - protein, 585 aa, Myxococcus xanthus DK 1622
MGLIQNPPLSHASLRRVLALARPEWRLLLLGTCFLFIGSAGGLLFPQAIRVILDEALTTATLDMVNDTTLWMLGVCFIQSVAIGLRFAFFNIAGERIVSDLRERLYRSLLEQEIAFFDQHRTGGLTSRLSTDTALIQGAVSTHIAIMLRNATTLIGGLALLLYTSPRLTLVMLAVVPPVTLGALFYGRKARQLARDAQAAVAEANEVAAESLYGIQTVQAFVAEDAERRSYGRAIGKALALARTRIVSSGFFMGGTGFTGLASTLLVFWYGTHMVVSGDITVGGLTSFLMYTLMVVMAVGALSELWAEFMKAGGATERVFELIDRTPAISVSGGERPANMEGNLRFRDVNFSYPTRRDVPVLQGLDMDVAPGEVVALVGHSGAGKSTVASMLMRFYDPDRGAILVDETDLRTLDVRWLRQNIGIVSQEPTLFSGSIADNIRYGRTDATDAEVEAAARVANAHDFVSRFPEGYRTRVGERGIQLSGGQKQRVAIARAVLKDPRLLILDEATSALDSESEHLVKEALDRLMVGRTTLIIAHRLSTVAGVDRIFVLDQGRVVQHGNHEALITQDGLYKRLVERQFIAA

SEQ ID NO: 4515 - protein, 602 aa, Myxococcus xanthus DK 1622
MKTCKHGPNCSGSGLPPFWERTKPLLVVQARAVKAPQPPAPVEATFDSLGLKPALVEALSALGYEEPTPIQAAALPPLLAGKDLLGIAATGTGKTAAFALPLLNHVEPGACRPNTTSALVLVPTRELAMQVSEAIHRYGQKLGISVLPLYGGQVIGQQLRVLKRGVDVVVATPGRALDHLRRGTLQLDDVRVVVLDEADEMLDMGFAEDLEAILSGTPEDRQTALFSATLPPRIASIAERHLHEPVRVKIAREKVEQGEIPRVRQTAYVVPRAFKIATLGRLLDVESPTAAIIFCRTRTEVDDLTVSLNGRGWRAHALHGGMTQEQRDRVIKQLKSQGTDLLVATDVAARGLDIPRLSHVVNFDVPNAPEAYVHRIGRTGRAGREGVAITLVEPREHRLLRNIERVTGQRIEVATVPTVADMREKRQEMLRASLRETLVTGEYDSLRNVVESLASEFDAMDIAAAAVKLLHEAQDEGRDTEETEIPVVAPPQERRERTGKFGAPTGRPGRPERGPKARGGPPTWDVTRLWIGAGRHAGVRPADLVGAIAGEAGVESSKIGAIQIGDAFSLVEVPESDANRIIAALKNATLRGKKVLVRKDRS

SEQ ID NO: 4516 - protein, 638 aa, Myxococcus xanthus DK 1622
MRSTYKTIGLWVILIVLFVAFYNFFSQGNDQVQEPSFTQLLTKVEEKKVQEVAVKGNTYSGKFTDTSEKFRTTGPAPDAAMLNQLRSNGVDVKYEREEQNSLWLTILGQWMPVVFLFLFFIFFMRQLQGGSGKAMTFGKSKAKLLSESHNKVTFADVAGADECKEELEEIVAFLKDPKKFTKLGGRIPKGVLMMGSPGTGKTLLARAVAGEAGVPFFSISGSDFVEMFVGVGASRVRDLFEQGKKNAPCIIFIDEIDAVGRHRGAGLGGGHDEREQTLNQLLVEMDGFESNDGVILIAATNRPDVLDPALQRPGRFDRRIVVPRPDVKGRLGVLKVHTRRVPLAPEVDLEVIARGTPGMTGADLENLVNESALMAARQNKERVDLSDFEAAKDKVFMGPERRSMIMTEKEKKNTAVHEAGHALLAKLLPGCDPLHKVTIIPRGQALGVTWSLPTEDKVNGYKKQMLDQISMAMGGRIAEELMFNEMSSGAANDIERATETARAMVCRWGMSEKMGPLAFGKSDGEVFLGRDFNSSKDYSEDTARQIDAEVRNIVVGCYERGKNLLTENIEALRRVSDALVEYETLDAEDVNILLQGGQLTRERPPPRVNAPPKATEKKDKRKILDALEGLPAMEPKKA

SEQ ID NO: 4517 - protein, 67 aa, Myxococcus xanthus DK 1622
MATGTVKWFNDAKGFGFIMQDGGGEDLFCHHTAIQTQGFRTLQEGQKVEFDVARGPKGLQAQNVRPV

SEQ ID NO: 4518 - protein, 374 aa, Myxococcus xanthus DK 1622
MIVGVPKEIKTREYRVGMVPAGAAALIAAGHTVLIETNAGVGSGIPDSEYQRVGAQIISTADEVWKRSEMIIKVKEPIAPEYARIQPGQIIYTYFHLAGVDPELTKTLLQKKAAAVAYETLQPDDGSLPLLKPMSEVAGKMAIQVGAKCLERAHGGKGILLGGVPGVRRGRVTVIGGGVVGLCAAKVAVGMGAEVTIIDVNMERLTYLDDVFLGRVGVLASDSESISRSVREADLVVGAVLIPGRKAPKLVSEALISEMSPGSVVVDVAVDQGGCIETCKPTTHDNPTFEVHGVVHYCVANMPGAVPQTSTYALTNVTRPYSLRIANVGLAAAVKEDRALARAMNTYNGHVTYEAVAKDMGYAYMPIADALAGK

SEQ ID NO: 4519 - protein, 545 aa, Myxococcus xanthus DK 1622
MKAADLFVKALEAEGVRSVFGLPGEENLDVIEAMRAAGMRLVLTRHEQAAGFMAATYGRLTGRAGVVLSTLGPGATNLVTAAAYAQLGAMPMVMVTGQKPIRAGKQGHFQIVDVVGMMRPLTKLTRTLVSAEHVPSAVREAFRRAEEERPGATHLELPEDVARESTDAVLLAPSAHRRPVADEASIALAVEAIASARRPLLMIGAGANRKLTSEMLRVFVDKTGIPFFSTQMGKGVVDESHPLWLGTAALSEGDFVHRAIEASDCIINVGHDVIEKPPFFMRDSRRTVVHLNFSSAAVDPVYFPQLEVTGDIANAVWRIGEGLGPRAHWDFVPFEKFRAGLEAQLAHGGDDDRFPIYPARLVAELRRALPDDGIVCLDNGMYKLWFARYYRTRRPNTLLLDNALATMGAGLPSAIAAKLVHPRRKVVAVCGDGGFMMNSQELETAVRLGLDLTVVVVRDDGYGMIRWKQGEMGLPDFGMALGNPDFVRYAEAYGAHGHRPTSATEFGATLARCLASSGVHVIDVPIDYSDNARALGAGAEELAAL

SEQ ID NO: 4520 - protein, 721 aa, Myxococcus xanthus DK 1622
MLGVGSATGSCAGRRGLCRGHAPGDESGMRLRSWWWVLVLLTVSCAGRRSSSEDLGGRDARSELFRARGDAAIETKQWALAAGYFASARHTEDSPTARWGQVWAEKRASSLEWAKQFEGSVLALAFSPDGRLLASGGYDAVVRVWDVAAGAQVAELKGHEAELHAVAFSPDGRWLAAAGRPGALWLWDWKQGRRVALLSGHTDVVRGLAFSPDGEWLASGGLDRTVRVWRIRDGAEVLRFTHDDIVIAVAFSPDGGRLVSSSMDRTARVWELTARRELHRLTGHGDKVESCAFSADGERVMTASADRAIRFWDARTGALLDVQRNTGALSAVAIDAGFQQLVQAGWEGRVQRVDVRGGGEVLERLDAHRTFVMAVALSPDGRTFASGGMDGVLKVWSRPEVPPDVLLRELPAWPEVLTSVGPDAFVSGGEDGLRSWSVSAGGELHSRLEAPDAVGAVAVSADRRLLAVGTLKGEVRVRDVRSGNQLMVIPAARESIRALAFSPDGALLAAGVAQDVVLWAVPSATQVARLTGHTGKAWALAFDATGQRLASGAADHTVRIWDVARGTVIRVLEAGDRVRAVTFLASGELLTAGMRQPIRLWSPDDGRVLTSMDSLTVGVLSLAMAPQGAFVASGGVGGEMKVWRLPDGALMGEVPGLQGFVSAVTFSSDGAWLAAAASDRTFHLLGFDAFALPPPVEPDLTRILRRHGLAWDDLRGAFTLH

SEQ ID NO: 4521 - protein, 106 aa, Myxococcus xanthus DK 1622
MTPELKARLEQETRSHKIVLFMKGNALFPQCGFSARALQLLQPLGQVHTVDVLADPEIRQGIKDFTNWPTIPQIFINGQFVGGSDILMELAERGELADLVAGKSPA

SEQ ID NO: 4522 - protein, 425 aa, Myxococcus xanthus DK 1622
MALIVQKYGGTSVGDVARIKSVALRCLAAQEAGHDVVVVVSAMSGETNRLMKLVAQITDRPDEREQDVVVATGEQVSIGLLAMAIHAQQGKATSFLGQQVRIVTDSTFAKARIKSIDAQPIRAALARGHIVVVAGFQGVDESGSVTTLGRGGSDTTAVALAAALNADACEIYTDVDGVYTSDPNMVPSARKLDRITYEEMLELASVGAKVLQIRSVEFAMKYKVPLWVKSSFTDDPGTLVCEEDSSMEDVLVRGVAYDRNEAKITVCGVPDVAGAAAKIFGPLDEKHIVVDLIVQNPSKDGRTDVTFTVGKADFLTAQEVVRKVAEEIGASGIETDGDIAKVSIVGVGMRNHSGVAARMFRALSAEGINIQMISTSEIKVSCVVQAKYTELAVRALHTAFGLDQPMPPEGVSAVSEMAALMGEKV

SEQ ID NO: 4523 - protein, 396 aa, Myxococcus xanthus DK 1622
MKLAHRLQAIKPSPTLALNSRAKALVAKGVDVVVLAAGEPDFDTPDYVKQAAVDALRAGFTKYTPTNGIPELREAICAKLERDNGLRYTPDQVLVTSGGKQGLYNFCQAALEEGDEVIIFAPFWVSYPDMVRLAGATPVIVPTREEDGFAPDPDAIRRALTPRTRAVIINSPGNPTGAVYSRAALERIAEVLRPHDCLIVTDDIYEKLLYTDERLGISDVAPDLVPRLVVVNGMSKAYSMTGWRMGYVAGPKPLLAGMQMVQDQSTSNASSIGQKAALAALQGPPDTIAAMVKEYRERRDFFIAGLNALDGVRCRMPEGAFYAFADVRGLLGRSYKGKPVTSAMQLSEILLDDFRVAAVPGEPFGAEGYVRMSFVTSREVLQKGLARLGELVKALS

SEQ ID NO: 4524 - protein, 433 aa, Myxococcus xanthus DK 1622
MASEKRNGPRRVAIVRGLRTPFVKAGSVFSGLTALDLGRLVVQELVQKTDLDPNVIDQVVFGQVIPTLTAPSIAREVVIAAGLPKKIDAFTVSRACATSIQALTTAANAIATGEADVIIAGGTESMSDAPIFTSRPLAHALVAASKGRSLPDKLKPFQRLKAKDLLPVPPAIAEYSTGMTMGESAEKMAKENGISREEQDRIAFNSHRNAAKAWKDGLFDNEVMHVVVPPKFDKTAERDNIVREDSSMEALGQLKPAFDRKYGTITAGNASPLTDGAAALLLMSEEKARALGYEPLGFLRSHAYAATDPGDQLLQGPAYAVPTALKRAGMTLADIDLVEMHEAFAAQVASNIQALASQAFAKKAGWSAPVGEIDRERLNVTGGSIAIGHPFGATGARIVTQAINELKRRNKNTAMCTVCAAGGLGAVVILERA

SEQ ID NO: 4525 - protein, 636 aa, Myxococcus xanthus DK 1622
MGKIIGIDLGTTNSVVAIMEGREPKVIVNEEGSRITPSVVAFTKDGERLVGQVAKRQSITNPERTIYSSKRFMGRRHDEVSEEATLVPYKVARGPNGDARVDIDGKQYSAPEISAQVLLKLKRAAENYLGEKVTEAVITVPAYFNDAQRQATKDAGEIAGLTVRRIVNEPTAAALAYGLDKKKDEKIAVYDFGGGTFDVSILEVGENVVDVLATNGDTHLGGDNIDLRIMDWLITEFKKDTGLDVSKDKMVLQRLKEAAEKAKIELSAAMETDINLPFLTADATGPKHLNVKLTRAKFEAMIDDLIERSLEPCRKCLKDAGVEPKDLNEIVLVGGTTRIPKVQEAVKRLFGKEPNRSVNPDEVVAVGAAVQAGVLSGEVKDILLLDVTPLSLGVETLGGVMTKLIERNTTIPTRKSETFSTAADGQTQVEIHVLQGEREMAGDNRSLGRFHLTGMPPAPRGVPQIEVTFDIDANGILNVSAKDKATGKEQKVTITHSSGLAKDEVEKMVADARSNEAADKGRRELVEMKNQAESQSYAAEKLLKENKDKLSADTAKALEDAVAELNKVRDGQDKDAIKTALDALQAASYKAAEEMYRATGGAPGAEGAPGAGPSAAPGSQASAKKDDVVDAEFRQS

SEQ ID NO: 4526 - protein, 607 aa, Myxococcus xanthus DK 1622
MGKVIGIDLGTTNSCVAVMEGGEPVVIPNSEGSRTTPSMVGFTDSGERLVGQIAKRQAITNPENTVFAAKRLIGRKFDSPEGKKAIGVSPFKVASSPNGDAWVEIRGKGYSPPEVSAIVLMKMKQTAEDYLGEQVSEAVITVPAYFNDSQRQATKDAGRIAGLSVLRIINEPTAAALAYGLDKVQDGGTERIAVYDLGGGTFDISILELNAGVFEVKSTNGDTFLGGEDFDQRLIDYLAKRFAESNNGLDLRKDRMALQRLKEAAERAKHELSSAPETEVNLPFITADASGPKHLTETVDRATFEALVTDLIDRTIEPCRIALKDAGIPAQQINQVLLVGGMTRMPRVQQKVKEFFGREPHKGINPDEVVAVGAAIQGGVLKGEVKDVLLLDVTPLSLGVETAGGVFTKIIDKNTTIPCKKSQVFSTAVDNQPLVSVHVLQGEREMAADNKTLARFELVGIPPAPRGVPQIEVSFDIDANGIVHVSAKDLGTGKVQQVRVVSNSGLSEAEIQAMISDAQSHASDDKKKKELAELRNNADGLIYTTEKSLEEYASLLSEKDREEIKADLERLKEVLNTSDAAVLKESFQRLEGSAYRIADAIYTGQAS

SEQ ID NO: 4527 - protein, 1466 aa, Myxococcus xanthus DK 1622
MHHLLEETPMPPDMMAGTRRLLTCLLSALLMVGCEPSGALAKPETPHATRTQRVVVTAPPMRIAAGTQHSLYLSPGGDVWAWGGNGSGQLGGAETSLQGLAPVRLAALENIVSVVSGDAHSLALGADGSVWTWGGNSSGQLGDGTTTDRATPMRVAGLDSVVAVAAGDFHSLALREDGTVWAWGTNFHGQLGRGHTQPGLTPEQVPGLNGVVALAAGFDFTLAVLEDGTVRAWGSNGSGQLGDGTSTQRLSPVKVSELSGITEVRAGTYHALALGKDGGVWTWGSNASGQLGDGTWNDRAVPMQVPGLERVKAVASMDSDSLALLDTGAVFAWGANGSGQLGDGDTTDRATPGPVPGLNAVASVVGGAQHALVLRKDGTLWAWGGGLSGQLGHGGSERHVVPAPVMRLAGVTSMATGSFHSLAALGDGSVWAWGRNTYGQLGDGSTAERHAAVRVEGLGGVRSVASAAHHSLAVGMDGTVWAWGRNAAGQLGDGTTLDRARPVAVPGLTSVTAVAAGGSHVLALRSDGSVWAWGYNALGQLGDGTTVDRLTPVRVSGLGAVVAVAAGSYFSMALQSDGTVWTWGEGFEGQLGDGGGVQRLSPVRVEGLANITRVAAGSAHALAVRGDGTVWAWGDNGEGQLGDGSWADRFRPVQVPGLQGITAVSGGRSHSMALQGDGTVRAWGYNGYGQLGDGTLTSRVRPALIPGLTGIQALHPSHLHVLALHADGTLRGWGYNRFGQLGLGAAGWSAVPVQVRGIGRVDRLSVGRAHTLMVRADGTVMAWGENGSGQLGDGTSTHRTGPVSVPGVPCVRSVASGIQHSLALACDGTVWAWGANARGQLGDGTTTPRVTPGLVEGLRGVVALAAGGDASVALRADGSVWSWGGNASGQLGDGTLTDRALPAHVEHLSNAVAVAVGETHALAVGEDGALWAWGANGSGQLGDGGTAPSLTPVRVKGLERVASVAAGRAFSVAVRDDGTAWAWGTNPSGQLGDGTNHARSVPNQVTSLKGIRAMSAGAHHVVALSADGTVWTWGDNTLGQLGDGSSSPTGMWPRQVPELRGVEAVAAGEQFTVAVLLDGTARAWGSNEYGQLGDGKTGPQLTPMAVKIEGPKIRPPVRTVRAWGQHAVVQMSDGTVQTWGDNTFGQLGDGTTTRRAVPLTVYGLASVVAVSSGAWHSLALLSDGTVWAWGANGFGQLGDGTSTPRTRPVQVAGLGDVVAIGSGGYHALAVCSDGSVWTWGYNAFGQLGDGTAESRSLPTRVEGLEGVVAVAGGDHYSLALHSDGTLSAWGNNASGQLGDGTGTTRYSRVAVKGVDGVVDVRAGATHTVALRGDGTVWTWGDNAFGQLGDGASGTRMRLVPRPVPNLSSVSAVGAGARHTFAVALKGTVWTWGRNSHGQLGLGDNTNRTEPLRVRELSDVTVVSGGADFSLAMKRDGTVLSWGSSLYGSLGLGATGHRSSPGQVALP

SEQ ID NO: 4528 - protein, 67 aa, Myxococcus xanthus DK 1622
MATGTVKWFNDAKGFGFLTQDGGGEDVFCHHTAINMDGFRTLQEGQKVEFEVTRGPKGLQAQNVRAA

SEQ ID NO: 4529 - protein, 603 aa, Myxococcus xanthus DK 1622
MNDPLSPQSNDSQKRLLAALALSFAATAVYTFFFAPTPPPPGSEIPDAGVVATAPADAGTPPAVQPPEGGTGTGATAEAPPPPARKVELQRDEATYAFSSEGAGLTAAVLKGAKMREQQELTVTQGFQKLFGKEIPPAPQMDLARPTPGQPLPLAVSITGASPLPADLNYTLDEGAPGNADGVTFTGRRGPWEVVKTVKWPMDGFELSYTLQVRNTSGQPQSGELQVHHNRAIDPNFEHAPSFFGGVGNLSRSACWVGDKLQKMSPGDDHPDAEDTRGQIQFFGIDQQYFLSALYPLEGPRAGSCSFEATPTLRKVTASFPITAAPGETVTLRFGGYFGPKDTDLLAQVPGASLRAATGQTDATFHPPLAETVDFGIWAVICKVLLWVMKFFYGVTGNWGVAIILLTVVVKLVLLPLTYRSMVSMEEVKKLQPRMEEIRKKHADNREQQNLEIMKLYQEAKVNPLGGCLPLLIQMPVWIALFTALRNSFDIYGEPFIGPIWRDLTYKDPTYLLPLALGVSMVITQKMQPQMMDATQAKIMTWFLPIIFTLTLLQYPAGLSLYIFTNNILSIAQQYGLRKWLDRNKPQTGGGTPAVAGAGGRRK

SEQ ID NO: 4530 - protein, 425 aa, Myxococcus xanthus DK 1622
MGPFQLLSLGVNGIVGVGIFFAPAEVAALAPGASAIAAFALTGLALIPVALAFAVLGRRFDADGGPVLFARAAFGERASFLVGWVAYVSAFLSTAAVVAGLSQAVAPSLGLEGALGRSVLASVLVTALAGVVASGIRVSAGTWTALTVFKLLPLAALLVAFLALSGPPPAAAVAAGPVVDVSWLRAGLTVMFAYQGFEIVPVIAGQVRSSSRTVPLATVGSLLVAVLLYVGLVWACVAALPELASQAAPLAAAAGVWGGPGLEGWVKAGTSVSALGICLGMMVTTPRYLSALASGAHTLLGLDGMSAGGVPVRALAVTWALVLLFVNLGDLSELFALSSIAVLMQYGVTSAALAALAWRRERGLRPLHALLAVPTLGLGLTLVAFGANPREGVTMALTLIAGVVLLRLSRPRASEPSAALRGEPL

SEQ ID NO: 4531 - protein, 465 aa, Myxococcus xanthus DK 1622
MKRGESAPSPSLRVLDVMALTVGIVLGAGIFKAPSLVAAQSGSGEAMLLTWLLGGVASLVGALCYAELASAWPHPGGDYHYLYRALGKGPAFLFAWARLTVIPTGSIALLAFVFGDYATQLFPLGLYSSPVYAAMLVVGLTAVNIAGLRQGTRTQNLLTALEVLGVGAVVIVGLLFTPALVPAAAPPAPAASSGTAWGLAMVFVLLTYGGWNEVAYLSSEVRGSRRTIAWSLLASIGLVTALYLLVNVAYLRGLGLEGMARSEAVAADLMQRAVGSGGALVLSVIIAISALTSANATVLTGARTHYAFGRDSVLFNGLGQWHAKSNGPSRALLVQGAISLALVGLGTLTRQGFETMVEYTAPVFWLFFLLTGVSLMVLRVREPDAPRPFRVPLYPLTPLLFIGICAYVLYSSLAFTGLGALAGLAVLGTGGVLLAVEAVRTRRGSQGTSPKASSSPRLQRTKEAT

SEQ ID NO: 4532 - protein, 316 aa, Myxococcus xanthus DK 1622
MQPRDFKVFAGNSNPGLAHRICEYLKRPLGKAEVGRFSDGEIHVEIGENVRGHDVFILQSTCPPANDHLMELLIMCDALKRASAGSITAVIPYYGYARQDRKVAPRTPITAKLIADLLESAGAGRVVSMDMHAGQIQGFFNIPSDHLYGSPVFLEDLRKRFPESQELVIVSPDAGGVERARAYSKRLNTGLAIIDKRRPRPNASEVMNLIGDVSGKDAVLVDDMVDTAGTLAQAAAALKAKGARRVVAYAVHPILSGPAIQRIQDSVLEEVVFTDTVPLSPAAQACSKIRLLTTERLFGEAIARIHRADSLSSLFV

SEQ ID NO: 4533 - protein, 722 aa, Myxococcus xanthus DK 1622
MSRLLLVSNRLPVTVKVEKDTVSVVRSAGGLATGLRRPHERSGGLWIGWPGDVSRLSESQRARVDAQLAELRCVPLTLSASEVSRYYEGYSNRVLWPLCHYMLERIPRQDRDWEVYRKVNERFADLVAKHYEPGDTIWVHDYQLMLVPGMLRQRLPGARIGYFHHIPFPSSEIFSTLPRRRELLKGLLGADLIGFHTVSYVRHFSGALLRHLGLDTDIDRIIWEGRDVRVGAFPMGIDAQAFESIASEPGMQEEVANLRRSSEGQRILLGIDRLDYTKGIPRRLLAVQRVLERTPAWRGRLRFIQVTVPSRTQVEAYANYRELVNELVGRINGLYGTVHNVPVHYLYRSFNERQLVGLYRGADVMLVTPVRDGMNLVAKEFCAARPDDDGVLVLSEFAGAAAELGGALIVNPYDVDAMADAIEKALGMAEEERRTRMHTLRKQVKSRDVHWWTSSFLDRLQSLPAVDVRAEASAPEALAQMKQVERLQLLLDYDGTLVGYAPRPELAAPDAALKELLAKLVARPGISVSIVSGRPKETLEEWLGDLAMGLYAEHGLWSRPAPGEAWRMLEGVTFDWKERVRPELETFSARVPGSFVEEKTASLAWHYRLVDAEFGAIQSRELRLYLAEKFAGQSMDILPGDKVVEIRPRGVHKGRVVGEATKDAAPGALVVAIGDDRTDEDLFASIPPGGLTIHAGNKPTRAAFRVNGPDEVRALLAGLLEP

SEQ ID NO: 4534 - protein, 232 aa, Myxococcus xanthus DK 1622
MSDKTRSILVVEDDLSILTGLSMNLRFEGYEVLQAQDGRTGLARALDESPDLVVLDVMLPELNGFEVLKELRQRGRDTPVVVLSAKGMETDKIVGLNLGADDYVVKPFGLQELLARIKAVLRRRYPSAGAGSPPPVTFGDVSVDMAARTVARARTPVELTAQEFKLLAHFLAHPGRTFTREELLSGAWGYHYEGSARTVDNFMRQLRLKFEPDPEAPRHFLTVRGLGYRFER

SEQ ID NO: 4535 - protein, 452 aa, Myxococcus xanthus DK 1622
MSVEGRILVVDDHVDMGLMLREPLTDAGYVVDLATGGEAAIRMARAQAYDAVLCDLRMEGVDGLDVLEAVRALDSDIPVLMMTAFGGVESAVEAMKRGAYHYFTKPFRLDEVLLFLERALKERRLQVENRALRRAAAERSGLGALVGRSAAMRNLYELIDRVAYAQAAVLLRGPSGTGKELVARALHFQGPRASGPFVAVNCTALPHDLLESELFGHLKGAFTGATHARRGLFVEADGGTLFLDEIGDMPLELQARLLRVLEDGEVRAVGADGSRTVDVRIVAATHQDLDARVREGRFRADLFYRLNVVTLLLPPLAERREDIPLLVEHFTARARARNPRSRMQSLSPEAVAALATLPWPGNVRELENLIERLAVMVASEVVGLEELRPHLPPEAPEVQPLVMAQHALWPLRRLEAEYIAWMVTRCGGNKTRAAEVLGIDVSTIHRRERERG

SEQ ID NO: 4536 - protein, 345 aa, Myxococcus xanthus DK 1622
MATHFDPSAAAQPDSGVFGLPHSPEEAHVILIPVPFEATTSYGGGTSEGPTAVLEASRQVDLFDVETGRPYERGIAMLPEPQELRDWNTRAKERAQVVIEAGGIHSGEAALIQAAQDVNVLCDQMNEHVYRTTKHWLDQGKRVAAVGGDHSISYGIIRAHAEKYPGLGVLHLDAHADLRVAYEGFTWSHASIMYNVAERIPGVKTLVQVGLRDMSAEEYQYIADSNGRVHGFFDAVLQNKRFDGVPWNRQVDEMVALLPKQVYLSFDIDGLDPVLCPHTGTPVPGGLSFAEAVALIAGVVRSGRTIVGFDLTEVAPDPEGGEWDGNVGARLLYKMIGWMLKSQQA

SEQ ID NO: 4537 - protein, 262 aa, Myxococcus xanthus DK 1622
MALLTVRNLHARVAGKDILKGIDLEVAPGEVHAIMGPNGSGKSTLASVLAGRDGYEVTQGEVLFDGKPLLELSPEARAAAGVFLAFQYPVEIPGVGNIHFLRTALNAQRRAKGLEELDAMDFLQLAKEKSKLVQLDAAFMNRSVNEGFSGGEKKRNEIFQMAVLEPRLAILDETDSGLDIDALRTVAGGVNALRSPERGMVLITHYQRLLDYIVPDKVHVIAAGRIVRSGGRELALELEEKGYGWLGLDGGKAKAPVAEARR

SEQ ID NO: 4538 - protein, 267 aa, Myxococcus xanthus DK 1622
MAFASNPGWRNPMDPDELAARARQGEVFHGQRMLPGAWVVLRVDGRGFSRFTEARYEKPFDPVFHQFMVRTASVMLEELQGVYAYTQSDEISVLFRPDWALFDRSVEKVVSLAAGLASATFTHAAGVPAVFDGRAWLGASERAVLDYFIWRQADGSRCSLHGWCYWTLRKEGRSAAQATRELDGKPVSYKNELLFQRGINFNDVPLWQRRGSGVWWEAYQKEGVDPRDGRRTQTLRRRLKVDSELPMKEAYEHLVRGLLAAPGAEAD

SEQ ID NO: 4539 - protein, 562 aa, Myxococcus xanthus DK 1622
MTTTNETQGLNFLQEIIEEDQRTGKYAGRVHTRFPPEPNGYLHIGHAKSICLNFGLAQQYGGKCNLRFDDTNPVTEDTDYVEAIQRDVKWLGFEWEDRKFFASDYFPKLYDFAVQLIKQGKAYVCSLSPEEIREYRGDFTTPGRNSPYRERSVEENLDLFHRMRAGEFSDGQHTLRAKIDMASPNPVLRDPPIYRIRHAHHHRTGDAWPIYPLYDFAHCLSDAIEGITHSICTLEFENRRVLYDWIVDNLVSGDRPYQYEFNRLNLNYTVMSKRKLLKLVTEGFVAGWDDPRMMTITGLRRRGFTPASIRDFATRVGVGKAQQLIDMSLLELCIREDLNETAPRAMAVMRPLKVVLENYPEGQTELLEVQNHPQKPEMGTRQVPFMRELYIEADDFMEDPPKGFFRLAPGKEVRLRSAYFIKCEQVIKDAAGNVVELRCSYDPATRGGNAPDGRKVKGTLHWVPGNAPVAEVRLYDRLFSVEAPDADDSKDFTTFLNPTSLQTLRDARVEPMLVDAAVESRYQFERTGYFYVDPKDSKPGKPVFNRTVTLKDSWTKEQAKGK

SEQ ID NO: 4540 - protein, 689 aa, Myxococcus xanthus DK 1622
MTNRSTPRGWLPRERAARSTLRRAGVRHFPLPMVEDSHSERQVIGDRYVLERRLAGGGMGTIWVALDPKLQRRVALKLMAAHCAPAPLARRQFEWEAQAIARLQNPHVIQVHDCDLSGETPYIVMEWLVGEDLEALLNRRGRLSLAMVERLVAQTARALTAAHAAGVIHRDLKPANLFLARTEHGEQVKVLDFGLALLMSGGAARPHPEEEMAGTPRYMSPEQLRGLEPRLDHRCDLWALAVVAYRALTGQHPFPLESLRQMRLGNVPPPATPSSLSPELGMEVDAFFARALDVDPAHRFQSAHELASALTSAVDAGRPSRPAKILVVDDEPDIVVLMEQSFRKQIRRSVYQFLFAADGEEALEEMRQHPDIEVVLCDINMPRMDGLTFLSRVGEISSLTRVVIVSAYGDMNNIRTAMNRGAFDFITKPIDFPDLEATLVKTLKHVRELRRTVRYTEENGLLRMFVPGAVLERLPPLLQGSDAMAGEWVDGTVVFIDVDAFTPVLHQEAPPESLRRLNANFEAIVPELLARGGIVDKFMGDAVMAVFRGPGHVDLALEACHAIHRQLGALASRGGEGAPYAHGVCMGLDSGDLVAGSVGAKASGRLDFTVLGDVVNTAARLAARAGRGQVLVSGRAQARAASRFRLSPVETGLFELARDEGHGSPGPDDATAFLAPDAAAEGRGTTQGG

SEQ ID NO: 4541 - protein, 588 aa, Myxococcus xanthus DK 1622
MSSPANDSKSSASPGVTVRRLLKLARPELLPLAAGTLFLLISSGATLAYPRAIGDLVDQALTARDRYVVDRLAMLMLAVFTVQGIAMALRIYLFTNAGERVVSRLRKDLFRALLSQEVGFFDSRRTGELTSRLSSDTTVLQTTVTANVSMMLRYVVTALGGVGLLLYTSVQLTLVMLAVIPPVAIGGVFYGRRVRVISRQAQDALAASGEVAEEDLSGIRTVRSFAAERHEVERYSVAVERSFTLAKKRALQTSVFMGVASIAGYGSIAAVLWYGGRLVVEGGLSVGELTSFLIYTMLVAFSFSGIAELWADFMRASGAAERVFELLDRKPAIGAGGEQLTDLRGHVQFRGVHFAYPSRPDVPVLQGLDLELRPGEVVAVVGPSGAGKSTLASLLSRFYDPQNGEVLLDGHPLTALEPEWLRRNIGMVAQEPQLFSCSIADNIRYGRPGATDAQVEEAARAANAHAYIERFPEGYGTQVGERGVQLSGGQKQRVAIARAVLKDPRLLILDEATSALDAESEHLVKDALERLMKGRTTLIIAHRLSTVANADRVLVLDGGVVIQSGTHASLMSQEGLYRRLVERQFVAA

SEQ ID NO: 4542 - protein, 223 aa, Myxococcus xanthus DK 1622
MKFFIDSADVEEIRKAHAMGCVDGVTTNPSLLAKVGRGLEETIREICSIVDGPISAECVSMEADELIKEGRSLAKIHDNVVVKIPMGVEGMKATKALTAEGIRTNVTLCFSANQALLCAKAGATYVSPFVGRLDDISQDGMELISHILEIYRNYEHFNTQVLVASVRNPVHVLQAARLGADVATLPYNVITQLANHPLTDAGIKKFLADWEKVPKAAKPPAAK

SEQ ID NO: 4543 - protein, 248 aa, Myxococcus xanthus DK 1622
MHGFNRPLGPIGSNVVAPLQTTSSGMMVTANKLVPGQEAIDFKGYFKVESFPHNSTIYRPGDNTDRVYLLKSGRVRLMRIGKNSTRSVVSILRPGDLFGELFRPEGTPIEEMAIAAGEAEVWSIEGRDFRAQLEARPALAVDVVRAYAERVRALRKRVLGLTFKEVPARLADTLLTLVEAHGERCPHGGETDLRGITQQDLADLVGASRSFVSTLINEMKREGVLGNVGRILCVRDQKALRKIAGKEK

SEQ ID NO: 4544 - protein, 338 aa, Myxococcus xanthus DK 1622
MRVAVFDTHRYDRDALEAANARFGHALTYFEPRLTLQTAPLAEGFPAVCSFVNDKVDAATLEVLHAGGVRLVAARSAGYNHVDLEAARRLDMRVTRVPEYSPHAVAEHAVALVLSLNRHIPRAFSRVRDWNFSLDGLVGFDLAGKTVGVVGTGRIGRVAARIFKGFGCNVLCCDVAPDAAFERELGVRYAPLDTLFAESDILSLHVPLTPGTRHLVDAAALARMKRGVVLVNTGRGALIDSKALVAALKSGHIGGAGLDVYEEEEGVFFQDLSGQVLQDDVLARLLTFPNVLVTSHQAFLTHEALANIAETTLASLQAFERGEPLVNEVRAEQVLRAR

SEQ ID NO: 4545 - protein, 417 aa, Myxococcus xanthus DK 1622
MSPPQFPPSPTRAISSDGPFRALLLENIHPSAGEMLAAEGFQVERVSSALKPDELAERLKGVHLLGIRSKTTVPLAALEHAENLLAIGAFCIGTNQVDLTSANTHGIPVFNAPFSNTRSVAEMVIAEVIVLTRQLFERSQEVHAGQWRKVATGSHEVRGKTLGIIGYGHIGSQLGVIAEALGMRVLYFDVMTKLPLGNAQPAVTLEELLGASDFVTLHVPALPTTHMMMGAEQIAQMKKGACLINASRGTVVDIDALARALQSQHLGGAAVDVYPEEPESNSDGFVTALQGLPNVVLTPHIGGSTEEAQASIGKEVATSLLKYFKAGASTGAVNFPNIEAPLIPGTHRILNVHRNIPGVLRDINRIVSDLNANIHAQVLSTDANIGYLLMDLDQDVSTPVCEAIAGLETDIKTRILS

SEQ ID NO: 4546 - protein, 397 aa, Myxococcus xanthus DK 1622
MPIVVQKYGGSSVAGVEKLRKVAQRVKDKREAGYQVVVVVSAMGDTTDELLALAKGVSVDPPRRELDMLLTCGERISMALLSMALQEMDVPAISFTGSQSGIITTDAHAQARIVEVRPYRIHDELARGKVVIVAGYQGVSFKKEVTTLGRGGSDTTAVALAAALDAEACEIYSDVDGVFSADPRVVPDARKLESLSYDEMQELASAGATVLNAQAVEWAKARGITILARTAHGQGTGTAVQELAVPTDHRLKGVTADAEMAVLSASEPIRLAELLEFLDARAVRGRTLDCEGSVGGVRRTVITVPLADIHGADALRRELATRFGDAVSWREDLGTVTCVGVGLNADWAPLRRALAAAEELGAHVHAAHTSPLQLTLLVDKAHLKALTARLHRELLGG

SEQ ID NO: 4547 - protein, 399 aa, Myxococcus xanthus DK 1622
MPPGQGDIKMAGRVVIASAVRTPFTRAHKGEFKDTRPDTLAAVAIKEAVAQVPGLKPEDIGDVVLGCAMPEAEQGMNVARVATLLAGLPVTVPAMTINRFCSSGSQAIAQVAQAIQAGMYDVGIGGGTESMTMVPMGGNKASANPEAMERLPEIYTSMGATAENIASRYGVSREDSDKFAAESQRRAATAREQGKFKEEIVPVTTTYYDDDGVAQNVTVTVDTILRPETTQEGLAKLRPAFNPKGVVTAGNASPLTDGAAAAVVMSEAKAKELGVKPLGYFIDAAVAGVPPEIMGIGPVPAVRKLLEKNKLKVEDIDVFELNEAFGAQALYCVRELGIPADKVNPNGGAIALGHPLGVSGARMVATILRELKRRNGRYGVVSMCIGGGMGFAALIEAPK

SEQ ID NO: 4548 - protein, 824 aa, Myxococcus xanthus DK 1622
MMKFGGTSVGSPTRLRQVVELIGKHARQGPLAVVVSAMGDTTDWLLDAAHLATEGDLEGALAVATRIADLAKANAAALAPGQATALAERVDGLLAPLRQLLHGVSLTRECSAPTRDRVLSFGELVSATLLAELLTAHRTPATFRDARQLLVTDDRFGAARVDLVRTRERLQAARETWGVEVPVLPGFIAATPDGRTTTLGRNGSDYTAALVAQGLGASEVTVWTDVLGLHTADPELVTDAYPVAHLTHGEGLELAAVGARMLHPRTMIPLIESGISLRIRNTMEPEHPGTLIDAIGSRDGQRPACIATREDLALLGIEVRKLSDQFQLGERVLAALREARVTVWMTAQSANGQSLAVVVPRPDAEHARSVLVTELAQELSRREVEPLEVRQPVTLLTLVAETMGHGVNVAGRFFSALGAVGVNVRASAQGASSRSLSCVVDAADTAVAARTTHAAFNLAHQQVSLFVLGRGTVGGQLLAQLRAQQALLRDRHGIALRVVGLADSKRALFDAAGLTLDGVEARLEGVTPEAPQARTLVPLLDALRRLPVPILVDCTAAGGLEALYTEAFQRGIHVVAANKKPLALPWEAREALVDTARRNHVAYHYETTVASSLPVIDTLANLVRTGDTVRLITASLSGSLGFICNELTAGVPLSRAVRTARERGFTEPDPREDLSGTDVARKALILARELGLPLSLSDVALEPFVATDECASVDSFFQVLATQDAAYAERVARCRHAGTVLRYLARIDPSKAGTGSPVIRVGPVGVEAGHPAADLRGSESFVSFTTTRHSDFPLTVRGAGAGGAVTASGVLADILRISQTLRGR

SEQ ID NO: 4549 - protein, 226 aa, Myxococcus xanthus DK 1622
MSTRVLLIDDDTRMYELLEQYLGQNGLSVTHAADGGRGLAALEASAFDAVLLDVMMPGMDGLEVCKRIRAKSRIPVIMLTAKGDETDRVVGLELGADDYLPKPFSPRELLARLRAVLRRSQPSAVADRLESGGVSIDVAGREVRVEERAVELTGLEFDLLVALVRRAGRVVPRDALLGEAGRSDTVVGERTVDVHISHLRQKLGDVGTRLIKTVRGVGYVFAKEGP

SEQ ID NO: 4550 - protein, 68 aa, Myxococcus xanthus DK 1622
MATGTVKWFNDAKGFGFIAQDDGGADVFCHHTAIQTDGFRTLAEGQKVEFETRKGPKGLQAENVRVVG

SEQ ID NO: 4551 - protein, 352 aa, Myxococcus xanthus DK 1622
MARPSRSAAKKPRLRALPGRPAQPPAVLPDAEATLAYARSVLEAEARAILGVTERLGDDFLRAVQLVRDCRGQVIVTGMGKAGHIGQKLSATLASTGIRSVYLHPAEAVHGDLGRVGRGDVILALSNSGSTEELIRLLPSFKRMETPVIALTGDAKSPLGRGADVVLDIGAIAEACPMGLVPTASTAALHAIGDALAMTVLRSRPFGTEDYALLHPGGKLGRSVQRVFELMRTGNANPLVRDTSPLSAVVGVMTKTPGRPGAACVVDKAGKLVGIFTDGDLRRRVEAGLTDFTVPVRELMGKNPRCVTPETLVLAAATQMRELRVDQLPVVDVEGRAVGLLDVQDLLAAKFV

SEQ ID NO: 4552 - protein, 301 aa, Myxococcus xanthus DK 1622
MRPMDPVLLVGTASPHLGRALGQALGVAPADCHFERFPDGEMHVEVPEQVRGRTVILVQSTTPPAGEHLLELLLMADACWRMGAARLEAVVPYLGYARQDRRARPGEPLGGRLVADLLSQGRFARVLVVDLHSPALEGCFGAPLEHLTSLPLLAEALREHVTDTSVVVAPDLGAVKRAEALARLLNRPWAVIHKVRLSGDEVHASGLMGEVRGRRPILVDDMVSTGGTLAAAAGTLRDAGCTEDFTVATTHALLVGPAVERLRTLPLTRLVSTDSVEPVLGLPFQHQVVTLAPLVARALRP

SEQ ID NO: 4553 - protein, 68 aa, Myxococcus xanthus DK 1622
MATGTVKWFNDAKGFGFITQDGGGEDVFCHHTAINMDGFRTLAEGQKVEFEVTRGPKGLQAQNVRAAG

SEQ ID NO: 4554 - protein, 455 aa, Myxococcus xanthus DK 1622
MPGRVLVVEDEREMRAMLEKGLTRRGFTPVALPSADEALVRLAAEDFDVVLTDLRMPGMDGLALCERIALNRPDIPVVVVTAFGSLETAVAAIRAGAYDFVTKPIDVDALVLVLERAVQHRALREEVRRLRQELGRREDSGTVVGESPAMKQAYALIDRVADLDSTVLITGESGTGKEVAARAVHTRGRRKDGPFVAINCAAMPEALLESELFGHAKGAFTDAKAARTGLFVQANGGTLFLDEVGELPLTLQPKLLRALQERTVRPVGGDTELPFDARIVAATNRDLELAVEEDRFREDLYYRLNVIGVELPPLRARGNDVLALSQRFIEQFASRTGKRVLGLSPAAAQRLLAYGWPGNVRELQNCLERAVALTSFEEITVDDLPERVRNYSQPRVVPETQDASELVTLEQLERRYIHRVLEAVGGSRTLAARILGVDRKTLYRKLERDDDTRKG

SEQ ID NO: 4555 - protein, 314 aa, Myxococcus xanthus DK 1622
MAPPKTHRSGFAALIGRPNVGKSTLLNALTGEKIAIVSPKPQTTRNRILGVVTRPEGQVAFIDTPGIHQAKGELNRYMVEVALQAAEEVDLVLFLIEPPASEKPEVSPGNRAILDRLQKIGKPTFLVINKIDSVPKSQLLPLIDLYRQEFPFAEVVPISAREKDGVERLFHTVLGHLPEGENVFDEDMLTDQQERALVAEYIREQVLRHCRQEIPYSTAVVVDIFDESEREPRPGTPPNQLGGLIRIAASIFVERDSQKAIIIGKQGQMLKTIGTDARKSVQRLLGAHVYLDLRVRVEPRWSERPEGLKKLGYD

SEQ ID NO: 4556 - protein, 296 aa, Myxococcus xanthus DK 1622
MKVGFIGLGNMGLPMAASLAAAGHELTVWNRTESKAAPLKEKGARVARSPAEAARGAEVVFSMLADDAAVTSAVFGQDGLLAGLAPGAVHVSSSTLSVALSERLAEAHASAGQRYLAAPVFGRPTAAASKQLWVVAAGPKQDMDRCRPLLETLGRGLTVLGDRAPAANVVKLSGNFLIASMMEALAESFALTRKSGIEPKVFLEVFQSVFARAPIFEGYAQLIAEEKYSPAGFKMRLGLKDVELVLGAARTAEVPMPLASLVKDQFLGGVAQGHGDLDWSALGALVAERAGLKQGD

SEQ ID NO: 4557 - protein, 381 aa, Myxococcus xanthus DK 1622
MTYWDYNAAAPIRAEVATLLSRAFASSGYGNASSVHQEGRAARARLDAARAQVARVLGCEPKEVSFTGSGSEADALALVGAWHMRPQPERRRVVTSAVEHPALLGAVAQLEREGAYVVRVAPGPDGRVREADMLEALTPDAALCSLMWANNETGVLQPAREVALACRQRGVLFHTDAVQAAGKVPLSLREVDADLLSLSAHKFGGPPGVGVLMVRKSVDVRALTPGHQEGGRRGGTQNVPYAEALALALALADAELTETTARLTTLRDAFEREVTARLPGVHINGGAAPRVPNTSNLRFDGVEGEALLIALDLEGICVSSGAACASGTLTPSHVLRAMGLSPAQARGSLRFSMGPGTTEADVARVVDALVRHVPHVRALAG

SEQ ID NO: 4558 - protein, 580 aa, Myxococcus xanthus DK 1622
MARTWWAARRGLPGLRQARGYQRRWFRADLLSALTIGAMLIPQGLAYAQLVGVRPAAGLYAGVVGMLAYALFGPSRHLIIGPEAGAAILTAAALAPVAAGAAPARYASLAALLALLVGVLSLLGGLLKVGALADFLSKPILIGYINGAALIIIGSQLARLFGQERQSDTFSGQVFEVATHLERTHVPTLLLGLGVITALVLLRQLLPKVPGPLILVVLTTVAGGLFQLEHGGIKVVGPLAAEPPAPGLPSLRFEDVRSLLPAAFSLALVNYASSVLTGRFYADRFRYRLDSNQEFLGQAAANLATAFSQGFPVTGSDSRTAVNVSMGGRTQLVGVLAAGVVLVFALFLTPLLHDLPMVTLGAIVFVAAVYLLEFRAIIDLWRVRRVEAVLACVTMAGVLVLGILQGILVAVALALADLIRRAARPHDAVLGEREGVPGYHDIERFENAETVPGLVIYRFDAPLFFANARHLREQARALVSSADAPVRWFVLDASAVFDMDVTAADGLEKLRREFEEEGVVLGVAEARAPLRALLRRTGLLERLGPENVHATVEAAVHHFLKDADARHARDGEPPALPPVH

SEQ ID NO: 4559 - protein, 555 aa, Myxococcus xanthus DK 1622
MSASSLPLSGLRAVLAPSALRFYRALRHPEAAQAVCLQRVLRSAVGSVQAERIPGFHRISDARDFQAAVPWVTPDALTPDVERIAAGEARVLTREPVLRFELSGGSSGASKRVPMTRGLLAEFQRALAPMLFELLHRRPALREGASYWSISPLARKQVRTAGGIPVGSAEDSAYFSRVLRPLLSRIFAVPGEVGALPDVESCRYVTLWHLVAREDLSLISVWNPSFLTLLMDALERHGERLADDLMRGHCRPPASGAAYDEAATQAVLDRMRFSPRPERASLLREVLRGGWSARALWPRLSLLSMWTDAQAAHALPAACRRFPGVEVQGKGLLATEGVVTVPLFDAPAPVLAVRSHFFEFIDSEQPTSRPRLAHELEQGRTYTVLLSTSGGLLRYRLGDLVRVEGFQHATPCLRFVGRADAICDLVGEKLAGTRVGAVLDAVLPDFFGGARPGFSMLAPEWTPAPSYVLFLETDAPASRLAAAAEAVEHALCEGHHYRYARALGQLGPVRAVRVADGARRYEARCVALGQRAGDIKPVDLHRLTGWSDHFSGAAT

SEQ ID NO: 4560 - protein, 385 aa, Myxococcus xanthus DK 1622
MSTSSPRHVLVAGAGIGGLTLACALRRAGLSVTVFERSDALKWVGAGLTVQMNASAALRRIGLCDEVAQAGACPTDSAILKPSGSALTRLPVTRIQEELGLPLVCVHRARLQSVLMAHAGEENVRLGLTVTAFHDDGQTVTVRLSDGSSVTGDALVGADGLRSVVRGALLGDAPLRYSGYTSWRGVCPDVPSATPGLVSETWGRGARFGVVPIGFGQTYWFATQNAPAGEQDAPGETRARLQSLFGGWHAPIADLIAATDEANIIRTDIHDRPPASRWSRGRVTLLGDAAHPMTPNMGQGGCQAIEDAVVLAELLAGEGPVDAALAAYEQRRLGRANSFVTRSWSLGRVAQWESSAGRFIRNALFQLVPQGFAARQVRALVRDAE

SEQ ID NO: 4561 - protein, 458 aa, Myxococcus xanthus DK 1622
MLEAMVKLPIYMDNHATTPLDPRVLEAMLPYLREDFGNAASRNHVFGWKAEAAVNKARQQVAELIGAAEQEIVFTSGATESDNLAIKGVIEFYKSKGDHIITLKTEHKAILDTCKRLERVRQERLDELKLLRLAQLAGQDVTEDNQSELLSKYDVDSDETYRKWAELPTGGARVTYLDVEPDGRVSLEKLAAAMTPKTVLVSIMFANNEIGVVQPIAEIGALCRSKGVLFHCDAVQGIGKVPFDVEAMKVDLASITSHKMYGPKGIGALYVRRRPRVRIAPSIDGGGHERGMRSGTLNVAAIVGFGVAAELARKELPEESARLLRLREKLRKGLTDALDMTVINGSLEHRLPGNLNISFAHAEGESLMMGIKDVAVSSGSACTSASLEPSYVLRALGVDEELAHSSIRFGLGRFTTEEEVDYVVNLVVDKVRKLRDMSPLYEMAKEGIDLKSIEWTAH

SEQ ID NO: 4562 - protein, 118 aa, Zygnema circumcarinatum
MKTYAIIEAGGEQLQVEPGRFYNIRHLSLRGVNFWGQNTKLLLYRVLMIRHQSATVLGNPWVQNATVKGRILDARRDDKLVIYKMRAKKKTRRKRGHRQGLTRFVVDAICLNGKVLLD

SEQ ID NO: 4563 - protein, 507 aa, Mycobacterium sp. MCS
MLIAIPRESQPGETRVAATPQTVGQITKLGYSVVVESGAGVASSFPDAAYVEAGAEIGDPWSADVVLKVNAPTDAEIAALRDGATLVGLISPALNPELVEKMSTRRITVLAMDAVPRISRAQSLDVLSSMANIAGYRAVVEAAHTFGRFFTGQVTAAGKVPPAKVLVVGAGVAGLAAIGAAGSLGAIVRATDPRPEVADQVASLGGEYLAVDPAAAEVSATGYAKEMGEDYKVREAALYAEQCKDVDIIITTALIPGRPAPRIITADMVASMKSGSVIVDMAAANGGNVEGTVKDQAIVTDNGVTIIGYTDLAGRLPATASQLYATNLVNLLKLLTPNKDGQLTLDFDDVVQRSVTVIRDGEVTWPPPPVQVSAAPAAKAAAPVEHKPAKQPMSMGRRLGITFAAAAALFVLIALSPAALQVHLTVFALAIVIGYYVIGNVHHALHTPLMSVTNAISGIIVVGALLQIGHGDPVVTAIATVAILLASINVFGGFSVTRRMLAMFSRS

SEQ ID NO: 4564 - protein, 484 aa, Mycobacterium sp. MCS
MDSDRHTRAPLFEALRRFVERDQAPFYSPGHKGGRTLDPWFREHIAAVDLNNLADLDTLHCPSGPILEAEELIADAWGAKASFILVQGSTGGNIAVALSALRPGDPVLVQRNAHKSVLAGLVQSGARPIWLTPQWDADFGVAHGLPVDRVEAALTAETAAALWILHPTYFGTTADIAALTAVCRRHGIPLLADGAHSPHFAFHPDLPAAAETAGAAATVQSVHKILSGLSQAAVLHVDTDQLDVPTVRRALQLVQTTSPHFAIMASIDLARRQMVEDGRRLLDETLRRARDTAARLAQIPGLRVLSDHDLTGPGSGLHQRDETKLLIGTHGLAADASDILARLTREHGVQPELAGAGHILCITTIGNTDADMDRLVDGLTDVALAVGRRDGGCPPDVGGALDLAPEIVLTPREAFFADVDTVSLRAAVGRIAAEPITPYPPGIPLVMPGERLSAEVVDVLDGLRGAGNPISAADPTLERVTVVR

SEQ ID NO: 4565 - protein, 346 aa, Mycobacterium sp. MCS
MIADVDSPSEPRTVRLTVTDVIEESHDARSLVFAVADGARFDYRPGQFLTLRVPGEQGGAVARCYSLASSPHTDAAPKVTIKRVDGGYGSNWLCDNVVAGQVIEALPPSGVFTPGDLDRDLVLWAGGSGITPVMSILKSALAVGSGRVVLVYANRDERSVIFAAELRDLTARHPDRLTVVHWLESVQGLPRQDQIATLARRFTGGEAYLCGPAPFMAAVQAALAEAGVPRDAVHTEVFRSLTGDPFAEVAPVPVDGDAADLQVELDGGKHSLRWPRQATLVDAMIAAGLDVPYSCREGQCGSCAATLLRGRVDMPDTEILEPEDIEAGTILGCQARPASDEIHIEF

SEQ ID NO: 4566 - protein, 428 aa, Mycobacterium sp. MCS
MDDVTMPQTPAERTWHPQGHQPRPRTFTQSSKLQDVLYEIRGPVHEHASRLEAEGHRILKLNIGNPAPFGFEAPDVIMRDIIQALPYAQGYSDSKGIMPARRAVFTRYELVDGFPRFDVDDVFLGNGASELIQMVLQALLDNGDQVLIPAPDYPLWTACTSLAGGTPVHYLCDETQGWNPDVADIESKITDRTKAIVVINPNNPTGAVYSRETLERIADLARKHQLLLLADEIYDKILYDDAKHISLASVAPDVLTLTFNGLSKAYRVAGYRSGWLVITGPKEHASSFIEGISLLANMRLCPNVPAQHAIQVALGGHQSIDDLVLPGGRLLEQRDVAWEKLNEIPGVSCVKPAGALYAFPRLDPEVYEIHDDELLVLDLLLQEKILVVQGTGFNWPTPDHLRIVTLPWARDLANAIERLGNFLVSYRQ

SEQ ID NO: 4567 - protein, 622 aa, Mycobacterium sp. MCS
MARAVGIDLGTTNSVVAVLEGGDPVVVANSEGSRTTPSVVAFARNGEVLVGQPAKNQAVTNVDRTIRSVKRHMGTDWNTEIDGKKYTAQEISARTLMKLKRDAESYLGEDITDAVITVPAYFNDAQRQATKEAGQIAGLNVLRIVNEPTAAALAYGLDKGEKEQTILVFDLGGGTFDVSLLEIGEGVVEVRATSGDNHLGGDDWDERVVTWLVDKFKASSGIDLTKDKMAMQRLREAAEKAKIELSSSQSTSINLPYITVDADKNPLFLDEQLTRAEFQRITQDLLDRTRQPFQSVIKDAGISVGDIDHVVLVGGSTRMPAVSELVKEMTGGKEPNKGVNPDEVVAVGAALQAGVLKGEVKDVLLLDVTPLSLGIETKGGVMTKLIERNTTIPTKRSETFTTADDNQPSVQIQVFQGEREIASHNKLLGSFELTGIPPAPRGVPQIEVTFDIDANGIVHVTAKDKGTGKENTIRIQEGSGLSKEEIDRMIKDAEAHADEDRKRREEADVRNQAETLVYQTEKFVKEQREAEGGSKVPEDVLTKVDGAISEAKTALAGTDIGAIKAAMEKLGTESQALGQAIYEATQAEQAAGGGAGGADGSSSSSDDDVVDAEVVDDDRENK

SEQ ID NO: 4568 - protein, 492 aa, Mycobacterium sp. MCS
MADSSETRSYGDVGSAPHGELTPEQERGLRRGAINWRQVAVLSVAGCGPASVIALNLQFMGQFAGAALVLAFVLVWPGILLLVNTFAEFSKRLPTSGGLYTWNSKAWGPNVGFVYGWTFIGAYLVFSAAGFAVFGGWVQEWLQTQFGISVPWWLFTFAALAYVCVLAYLGITQSLHAALGLLAFEIIVLLALAAWIFITGPQSGSGFGVAPFQVSSAGALALGGVGLAMTYGVLSHVGIEEGATLGQEVKDPKRQIPRGLWVAAVVVPVFYIVVAYAMVYGYGIDDMTAFGEDPAPLQTIAQTYWGQVGLTVIVLATLSSILAFSQTAFLAGARVLYTLGREGVLPTRLGAVSRRQTPAVGIAVMGVLSMLLGVPLAFLVGPFNVWGYFGFLISIAFLVSYIFTNIGLVRYMLRIGVFHWFRHGVLGALGSLVFLYPLYKTVWPLQTGIYGALPFVYLAWIVLGIGLLIYTLRRRPEVMSRIGTSLADDDVS

SEQ ID NO: 4569 - protein, 704 aa, Mycobacterium sp. MCS
MSLMRQAVRVPDQTDSRVSAIYVASPEGDTGKSTIALGLLDRLTATAPRVGVFRPITRSGPARDYILELLLAHSTAGLTYEDSVGVTYHQLHEDPDSALADIVDRFHRVADRCDVVLIVGSDYTDVASPSELSMNARIAANLGAPVVLAVKARGRTPDDVVQVVEVCLDEIAAQHAYTAAVVANRCDPDQLTEVREALKRDGAPQVYVLPEEPLLVAPSVAELRDAVDGSMVSGDESLLDREALDVLVAGMTAEHVLERLTEGVTVVTPGDRSDVVLAVVSAHAAEGFPSLSSIILNGGLELHPSIAKLVAGLGLRLPIVATGYGTFETASRVAGTRGRVTAASVRKIDTALTLMETHVDTAELLSRLAIPIPTVVTPQMFTYQLLDQARSDRKRIVLPEGDDDRILKAAGRLLQRGVADLTILGEEGPVRARAAELGVDLAAATVLDPRTSELCDQFAEQYAELRRHKGVTVEQAREIIHDVSYFGTMLVHNDMVDGMVSGAAHTTAHTVRPAFEIIKTLPDVSTVSSIFLMCLADRVLAYGDCAIVPDPTAEQLADIAISSARTAAQFGIEPRVAMLSYSTGTSGTGADVEKVREATDLVHKREPDLLVEGPIQYDAAVEPSVAKTKMPDSPVAGRATVLIFPDLNTGNNTYKAVQRSAGAIAIGPVLQGLNKPVNDLSRGALVEDIVNTVAITAIQAQGDR

SEQ ID NO: 4570 - protein, 399 aa, Mycobacterium sp. MCS
MTRTVLVLNSGSSSLKFQLLEPDSGASLADGIVERIGEDSSSASLVCGEREVTHSERVPDHEAALRTAYGLFDEAGAELGSVGLVAVGHRVVHGGPDLYQPTLIDDALVDTLESLAPLAPLHNPPAVLGIRGARKAFPDLPHVAVFDTAYFHDLPVAAATYAIDRDLSEQWHIRRYGFHGTSHQYVSEQAALFLDVPLSSLSQIVLHLGNGASASAILGGRPIDTSMGLTPMEGLVMGTRSGDVDPGVLVYLWRTAGMSVDEIETMLNKRSGVRGLGGEIDFRVLHQRIESGDESDRENAQLAYDVYIHRLRKYIGAYLALLGSTDVIVFTAGVGENDAAVRRDALSGMGRLGIELDEHLNESPSHTARRISAETSPTTVLVIPTNEELAIARACVEVI

SEQ ID NO: 4571 - protein, 331 aa, Mycobacterium sp. MCS
MSARAKNRQRVMKRLLALLSATVLVLAGCGQAASVVPTPGVTLAPPTPAGMEELPPEQARLPIPETDDCNRRASLRPFPTRAEADAAVAYIRERGRLIVGLDIGSNLFSFRDPITGDITGFDVDIAGEIARDIFGSPAQVDYRILSSADRIVALQNNQVDVVVKSMTITCERKKKVGFSTVYLNADQRILAPRDSAITRAADLSGRRVCVVKGTTSLRRVQQISPPPIIVSTVTWADCLVALQQRQVDAVSTDDAILAGLVAQDPYLHIVGPSMNQEPYGIGVNLENTGLVRFVNGTLQRIRNDGTWYALYRKWLTVLGPAPAPPVARYVD

SEQ ID NO: 4572 - protein, 415 aa, Mycobacterium sp. MCS
MNPPGGPALSRRLGLVDAIVIGLGAMIGAGIFTALAPAAAAAGGGLLVGLAVAAVVAYCNATSSARLAARYPESGGTYVYGRERLGPFWGYLAGWGFVAGKTASCAAMALTVGVYVWPGGARLIAVAAVVALTAVNYAGIRKSALLTRLIVAVVLAVLAVVVVIVLGFGDPVGDRLDFGADVTVGGALQSAGLLFFAFAGYARIATLGEEVCDPARTIPRAIPIALGLTLAVYAVVAVTVLAQLGPAALAGSTAPLADAVRAAGFPGWVPVVGAGAAVAALGSLLALILGVSRTALAMARDRHLPSGLAAVHARHGTPHRAEVAVGVLVAALAATVDLRDAIGFSSFAVLMYYAIANASAWTLGARVVPAVGLAGCLLLAFALPWTSVLAGVAVLAVGALAYAVRRARSTGNGAR

SEQ ID NO: 4573 - protein, 284 aa, Mycobacterium sp. MCS
MSYVNPAQFVTKMIDAGETKAFMSTRDTVIRAYMAGAILALAAAFAVTITVQTGNALAGAVLFPVGFCLLYLLGFDLLTGVFTLVPLALLDKRRGVTVGSVMRNWGLVFLGNFAGALTVAFMMAIVFTYGFSVDPNEVGQKLGEIGHSRTVGYAEHGAAGMLTLFIRGVLCNWMVSTGVVAAMMSTSVSGKVIGMWMPIMLFFYMGFEHSVVNMFLFPSGLMLGGDFSIMDYLVWNEIPTVVGNLVGGLAFVGLTLYATHARTGTEWNRPVDPEQFTLPVEARA

SEQ ID NO: 4574 - protein, 294 aa, Mycobacterium sp. MCS
MSSSVTTHGIVVGVDGSAAGKVAADWAARDAARRGVPLTLVHVIAPKDLQMWIEVPAPQEYLRWQSERSERVMAEATAIAERAAENRQLTVVRQVVPGEAKATLIDMSKDADMVVVGSRGLGAWGRRLLGSVSTAVVHHAQCPVAVIHDEDPLMDHPDQAPVVVGVDGSKAAEQAIAIAFEEASLRGVDLVAVHAWNDVDYEFPDIKWVDYTARGERIVAECLAGYCETYPDVTVRKVLVRDRPAHQLLQQSEAAQLLVVGSHGRGGFPGMLLGSVSSEVVQSARMPVIVARSN

SEQ ID NO: 4575 - protein, 400 aa, Mycobacterium sp. MCS
MTVTANVAVGEELDPQHAEIITATLPLVGAHIDEITTVFYSRMFAARPELLRNLFNRGNQAQGAQQRALAASIATYATHLVDPNLPHPAELLSRIGHKHASLGITADQYEIVYEHLFAAIVEVLGADTVTAPVAEAWDAVYWMMARTLIELERHLYAEAGVDDGDVYRRARVVAREDDPSGAVLLTVRSTAQPFSGFRPGQYVSVGVTLPDGARQLRQYSLINTPGGNGDLTFAVRPLGEVSNWIRANVRAGDVLDVTVPFGDLPDPEQHHRPLVLVSAGIGITPMIGILEHLASVAPATSVQVWHADRSAATHPLKDRQQELVAALPDATLELWYEEADAHARPGLLNVADVELPEDAEVYLCGGNGFVQAVRAQLQERGVPNERLHCELFSPNDWLLA

SEQ ID NO: 4576 - protein, 355 aa, Mycobacterium sp. MCS
MFTETRTRSLRERVLRSPLLDLLTGPHGVDRYTELVTPTWTLGEARARVVAVRRQTARSVTLTLEPNQVFTGFRAGQHINLSVEIDGRRRTRCYSPASAEGAALIELTVGRHDGGLVSTYLSDHARPGMVVGLDSVGGDFTMPTTRPRRILFVAGGSGITPVLSMLRTLRAEGSDREVAFVHYARSAAEACYRDELAAMSGVRVLHGYTRDTTGSDLTGRFDADHLAAAMPDADAVFVCGPPDLVDAVRRIRPDALAESFVPPTWDAPAEASGGQVSFADSGVAVTDDGRPLLEQAEAAGLTPESGCRMGICHSCTRRKTSGVVKNLITGAVSGVDEEDVQICVSAPVGDVEIAL

SEQ ID NO: 4577 - protein, 490 aa, Mycobacterium sp. MCS
MAGRWRTKSVEQSIADTDEPGTRLRKDLSWWDLTVFGVSVVIGAGIFTITASTAGNLTGPAISISFVLAAIACGLAALCYAEFASTVPVAGSAYTFSYATFGEFVAWIIGWDLILEFAVAAAVVAKGWSSYLGTVFGFGGGVANFGGFEVDWGALVIIAVVTLLLARGTKLSAEVSLIITVIKVAVVLLVVIVGSFFIKAANYSPFIPPAESGEGGTGTEQSLFSLITGAEGSAYGWYGLLAGASIVFFAFIGFDIVATTAEETKNPQRDVPRGILSSLAIVTVLYVAVAVVLSGMVSYTELRDAGSGANLATAFAANGVDWAATVISIGALAGLTTVVIVLMLGQTRVLFAMSRDALLPRQLAQTGEHGTPVRITVIVGVVVAVAATVFPIGKLEEMVNIGTLFAFVLVSAGVIVLRRTRPDLKRGFKAPFVPLLPIAAIIACVWLMLNLTGLTWIRFLIWMAIGVVVYFLYGRRHSLVGRREQEAVTE

SEQ ID NO: 4578 - protein, 228 aa, Mycobacterium sp. MCS
MDSMRQRILVVDDDPSLAEMLTIVLRGEGFDTAVVGDGTQALSAVRELRPDLVLLDLMLPGMNGIDVCRVLRADSGVPIVMLTAKTDTVDVVLGLESGADDYVMKPFKPKELVARVRARLRRNEDEPAELLSIGDVEIDVPAHKVTRQGEQISLTPLEFDLLVALARKPRQVFTRDVLLEQVWGYRHPADTRLVNVHVQRLRAKVEKDPENPQVVLTVRGVGYKAGPP

SEQ ID NO: 4579 - protein, 582 aa, Mycobacterium sp. MCS
MTVSSEKDNEKHRRRRVEAIRSPTDEAIPHPILDIPVDEEAYTGYRGLDWVVFGVTAVIAVAFLAWGFVSTESLATASGNALTWVMDNTGWLFVLTASGFVVFVLWLALGRYGNIPLGRDDEEPEFRSVSWVAMMFSAGMGIGLMFFGVAEPLTHFATPPPGVVPQGGAEAGAEAVESAMATTLFHWTLHPWAIYAVVGLAIAYGVYRKGRLQLISAAFEPLIGSRANGPWGKVIDMLAIFATLFGSAASLGLGALQIRSGLQIVGGIGETGNTILIVIITALTVAFVLSAVSGVARGIQWLSNINMVLALLLALFIFVVGPTVFILNLLPTSMGSYLADLAMMSARTGAEGPDVDTWLQSWTIFYWAWWISWTPFVGMFIARISRGRTIRQFVTGVLLVPSLVSLVWFCILGGAAIDTQQGGVDLAGEGSNEEQLFTLLAQYPIATVASIVVMVLVAIFFVSGADAASIVMGSLSERGTIKPTRGVVIFWGVTTGAVAAVMLLVGGADALTGLQTITIIAALPFVLVMVGLAVALVKDLRNDPLVVRKKYAAEAVDSAVIHGVIEHGDDFIISVEKDPDAR

SEQ ID NO: 4580 - protein, 376 aa, Mycobacterium sp. MCS
MAKSQIKVSARVADTVRPRVAAKNPALNALRSIATKITTPLLPDDYLQLANPLWSARELRGRVIDVRRETEDSATLVIKPGWGFTFDYQPGQYIGIGLLIDGRWRWRSYSLTSSPRSGGRTITITVKAMPEGFLSTHLVGGVAPGTIVRLAAPQGNFVMPDPAPAKVLFLTGGSGITPVMSMLRTLVRRDQITDVIHVHSAPTEADVMFGGELAALQGSHAGYRLHLRTTRTQGRLDLSRLDEIVPDWRERQAWACGPEGMLNDAERVWGQAGIADELHLERFAVAKAAPHGAGGTVTFARSGKTVDADAATSLMDAGEKAGIQMPFGCRMGICQSCVVPLVDGHVRDLRTGAEHEAGSRIQTCVSAASGDCVLDV

SEQ ID NO: 4581 - protein, 881 aa, Mycobacterium sp. MCS
MTSTESRIHQVALSFEDGVTRFISCRDDQTVADASYRQRINIPLDCRDGACGTCKALCESGTYDGGTYIDDALPADEAAAGYVLPCSMRPRSDLVLQIASSSKVAKTAAATFEGTLVELHRLSPTTVAFGVEIPNREDLAFLPGQYVNVAVPGTDVTRSYSFSNAPHEQRLTFLVKLTPGGAMSTYLAERAAVGDAITFTGPHGSFFLRETERPVLLLAGGTGLAPVLSMLRTLRAAGSPRKAHLVYGVSSDADLVELDTLRAVAADLPGFTWDHCVADPASTAANKGPERAYVTSLIRPEHLYDGDVAVYLCGPPPMVESVRKHVAAEGIEPFGFYYEKFALAAPAAATSAAAAPASVAPAPREELRFAPDARSVAGRTVFRDASIGPAPGNVTAADDGDTARRIAGQLIGVSGGGTAPATPLDDDTALIGGADRAVAGQHLFPAQTAPAPPEVAPDGYQIGEEHPELHESDAIFQAREALELGALELTIGRLSPSQLSGYRLLAESTLAYVDGDRFVDAAQYTETNAAFHDHLFTLTGNDHLLQAYQALGVKARMSDVLRNATWCHPLCAQDHVDIVAAFEAGDRVAARSLIAAHAERSKQTMRRAMADARAARRPRFVTPGRFAGKVVLVTGAAQGIGEQTARRISAEGGRLVLADRSELVKELADELAAGGPDTLPVTTDLEHPDGAESMVAQALSAFGRIDVLINNVGGAINFKPFTEFTDREIRAEVDRSLMTTLYACRAALPSMVSRGAGVIVNISSAATRGIHRIPYSAAKGGINAITASLAVEYAGDGIRVVAAAPGGTAAPPRRISRGTPDFAGETERAWFQAHVDQTVDSSLMKRYGTLDEQAAAICFLASDEASYITGSVLPVAGGDQG

SEQ ID NO: 4582 - protein, 507 aa, Mycobacterium sp. MCS
MTPLTTSVDMTFASLGVRDEICRALAEEGIHQPFAIQELTLPMALAGDDLIGQARTGMGKTYAFGVPLLQRVTTDTEKELSGIPRALIVVPTRELCLQVHSDLSLAAKYLTAGDRKLSVVSIYGGRPYEPQIESLRKGADVVVGTPGRLLDLAQQGHLQLGGLSVLVLDEADEMLDLGFLPDIERILRQTPDTRQAMLFSATMPDPIITLARTFMNQPTHIRAESPQSSATHDTTAQFAYRAHALDKVEMVSRILQAEGRGATMIFTRTKRTAQKVADELAERGFKVGAVHGDLGQGAREKALKSFRTGEVDVLVATDVAARGIDIDDITHVINFQIPEDEQAYVHRIGRTGRAGKTGVAVTLVDWDELPRWSMIDKALGLNTPDPAETYSSSPHLYEELGIPTEAGGSVGEPKARAAAKRSERPARGERDGDRDGDDKPARSRSRNRRRTRAGKPVTGHVEGSAEQPAVEAADGNGDGDTEAGGESGQAGRRRRRRRPRKAAPATS

SEQ ID NO: 4583 - protein, 404 aa, Mycobacterium sp. MCS
MRDTVICEPVRTPIGRYGGMFKDLTAVELGVTALQGLLTRTGIAPDAVEDVIVGHCYPSMEAPAIGRVIALDAGLPVTVPGMQIDRRCGSGLQAVLQGAMQVASGNNDLVVAGGAESMSNVVFHSTDMRWGGARGGIAVHDALSRGRTTAGGKNHPVPGGMLETAENLRREYGITRAEQDELAVTSHQRAVAAQKNGVFAEEIIPVTVRTRRGEDVVDTDEHPRADTSMETLSRLKPILAKQDPEATVTAGNASGQNDAASMCVVTTPEKAAELGLEPLVRLVSWGLAGVPPKVMGIGPVPATEAALARAGLDLADIDLIELNEAFAAQALAVMREWKFTAADMERTNVHGSGISLGHPVGATGGRMLATLARELTRRQGRYGLMTMCIGGGQGLAAVFERVTP

SEQ ID NO: 4584 - protein, 365 aa, Mycobacterium sp. MCS
MASSAFGPDITFLGVPRCDLSDASTYTDADIVILGAPLDGGTTYRSGARFGPSALRQACYLPQDGSRPSLALRVDGLKDLRVYDAGDVALYSGNVEQAVQLIEEEVFTISAAGAIPIILGGDHTIAWPDHTGVARQHGFGKVSMIHFDAHADTGDIHAGSLVGHGTPMRRLIESGALRGDRFLQLGLRGYWPDEPVLQWMAAQGLRSYEMTEIVARGLETCLTEAFEIATDDCGGVFLSVDIDVCDPGHAPGTGTPEPGGFSARQLLDAVRRICYELPVLGVDVVEVAPPYDHADITALLGNRVVLEVISAIARRRKDAAAGTTWDPSQPLLAGREVDEQMRLIAEGEDARRRGEGGGRPHHHHH

SEQ ID NO: 4585 - protein, 397 aa, Mycobacterium sp. MCS
MTSPKSVYLDHAATTPMHPAAIEAMTAVLTTVGNASSLHGAGRLARRRMEEARETLAGLLGARPSEIIFCAGGTESDNLAVKGIFWARRDAERRRNRIVTTPIEHHAVLDAVQWLVEHEGAEVTWLPVQADGSVTAAALREVLQSCDDVALVSVMWANNEVGTVQPIAELAAVAAEFGVPMHSDAVQAVGQLPVDFAASGLSAMSVTAHKFGGPTGIGALLLRRDTACVPLLHGGGQERDVRSGTADVAGAVAMAAAARVAIDGLDAHRARVSALRDRLIEGVLATIDDVSFNGSRVDRLPGNAHFTFRGCEGDSLLMLLDAKGIECSTGSACTAGVAQPSHVLIAMGADPASARGSLRLSLGHTSTDADVDAALEVLPAAVDRARQAALAASGVTD

SEQ ID NO: 4586 - protein, 619 aa, Mycobacterium sp. MCS
MSAPTTRPPHATPPDTAQAVSAVQSTSPKTVRPRTLAPEQMTGAQAVIRSLEELDVDTIFGIPGGAVLPVYDPLFDSQKLRHVLVRHEQGAGHAASGYAHATGKVGVMMATSGPGATNLVTPLADAQMDSIPVVAITGQVGRGLIGTDAFQEADISGITMPITKHNFLVRNGDDIPRALAEAFHIAKTGRPGAVLVDIPKDILQGQCRFSWPPQIDLPGYKPNTKPHNRQIREAAKLIAASRKPVLYVGGGIIRGEASEQLLDLAELTGIPVVTTLMARGAFPDSHPQNLGMPGMHGTVSAVAALQKSDLLIALGTRFDDRVTGQLDSFAPDAKVIHADIDPAEIGKNRHADVPIVGDVKAVITELIEVLRKDGVSLSLDNWWSYLREVQSTYPLSYGPQSDGSLSPEYVIEQLGKLAGPDAIYVAGVGQHQMWAAQFISYEKPKTWLNSGGLGTMGFAVPAAMGAKMGRPDTEVWAIDGDGCFQMTNQELATCAIEGIPIKVAVINNGNLGMVRQWQTLFYEERYSQTDLATHSRRIPDFVKLAEALGCVGLRCEREEDVVEVIRQAQAINDRPVVIDFTVGADAQVWPMVAAGTSNDEIMAARDIRPLFDDNDEGHA

SEQ ID NO: 4587 - protein, 528 aa, Mycobacterium sp. MCS
MSLPVVLIADKLAESTVAALGDQVEIRWVDGPDREKLLAAVPEADALLVRSATTVDAEVLAAAPKLKIVARAGVGLDNVDVDAATARGVLVVNAPTSNIHSAAEHALALLLSAARQIPAADSTLRERTWKRSSFNGTEIYGKTAGVVGLGRIGQLVAARLAAFGTHVVAYDPYVSHARAAQLGIELLSLEDLLARSDFISVHLPKTPETAGLIGREALAKTKKGVIIVNAARGGLIDEQALADAVTGGHVRAAGLDVFATEPCTDSPLFELPQVVVTPHLGASTAEAQDRAGTDVAASVRLALAGEFVPDAVNVGGGVVGEEVAPWLDLVRKLGLLAGTLATEPTTTLSVRVCGELAAEEVEVLRLSALRGLFSTVTDQQVTFVNAPALAAERGVQSELTTASESPNHRSVVDVRAVGSDGSVTNVAGTLSGPQQVEKIVQINGRNFDLRAEGVNLIVNYIDQPGALGKIGTLLGTAEVNIHAAQLSEDAEGPGATILLRLDRDVPAELRSALAEAVDAKTLEVVDLS

SEQ ID NO: 4588 - protein, 321 aa, Mycobacterium sp. MCS
MTTPAGHVYVSRLLTDGAMERLRRLDRPLRVGGEDPPTRDELAAGFTGACAAVVTLTERVDAEILDAAGDGLRVVANVAVGYDNIDVAAAHAAGVTVTNTPGVLDNATADHTFALILAVTRRVVDGDRFLRSRRPWIWGPRMLTGLDVSAGATLGILGYGRIGRAVARRARAFDMTVLATSRRRTSGADDDVWFVDTDTLLADSDVVCVLTPLTPETRHLIDAAALDRMKSTAYLVNTARGGVVDESALIDALRAGRIGGAALDVFENEPHVNPALLDAPNLVLTPHIASAGEATRDAMGVLAVDNVAAVLAGRPALTPVR

SEQ ID NO: 4589 - protein, 601 aa, Mycobacterium sp. MCS
MCGATGEVRLDGRTPDLAAVSAMAETLSPRGPDGAGAWSQGRVALGHRRLKIIDLSEAGAQPMVDSDLGLAIAWNGCIYNYQQLRDELRGHGYSFFSTSDTEVLLKAYHHWGDRFVDRLYGMFAFAIVERDSGRVLLGRDRLGIKPLYISEDAHRIRFASSLPALVAGGGVDTRIDPVALHHYLSFHSVVPPPLTILRGVKKVPPASLVAIEPDGRRTTTTYWTPDFTRHADRADWSEQDWEDAMLTALRRAVERRLVSDVPVGCLLSGGVDSSLIVGLLAEAGQTGLQTFSIGFESVNGVAGDEFKYSDIVAQRFGTDHHQIRIDTARMLPALDGAIGAMSEPMVSHDCVAFYLLSQEVAKYVKVVQSGQGADEVFAGYHWYPPMAEPGAASVEGSVASYRAAFFDRDPAALGGLVTPPYFADGDPSGRFVTEHFAREGAATGVDRALRLDTMVMLVDDPVKRVDNMTMAWGLEGRVPFLDHELVELAATCPPEYKTAQGGKGVLKEAARRVIPAEVIDRPKGYFPVPALTHLEGPYLDMVRDALSAPAAKERDLFRPEAVDRLLADPNGRLTPLRGNELWQMALLELWLQRHGITGPAA

SEQ ID NO: 4590 - protein, 371 aa, Mycobacterium sp. MCS
MRVGIPTEIKNNEYRVAITPAGVAELTSRGHDVLIQSGAGEGSAISDADFKAAGAQLIAGADEVWAEADLLLKVKEPIEPEYSRMREGQTLFTYLHLAASQPCTDALLASRTTSIAYETVQTADGALPLLAPMSEVAGRLSAQVGAYHLMRTQGGRGVLMGGVPGVAPAKVVVIGGGMAGDNAAAVAWGMGAHVTVFDVNINILRKIDAEYGGAIETRYSSRLELEEAVTQADLVIGAVLIPGAKAPKLVTNSTVAQMKSGAVLVDIAIDQGGCFEDSRPTTHDDPTFKVHDAVFYCVANMPGAVPRTSTFALTNATMPYVLKLADKGWRAACQADPALAKGLSTHAGALLSEQVAADLDLPFTDPATVLA

SEQ ID NO: 4591 - protein, 319 aa, Mycobacterium sp. MCS
MNLDNGRAIVGPADPQVQPRYAGWTTFARLPRLEDVSHADVVVVGVPFDSAVTYRPGARFGPNAIRQGSRLIRGYNPELDVKPFEVCQFADAGDLACNPFDIAEAVDQVAEQLSQLLANGTRAVILGGDHSVALPSLRAAHSVHGPMALVHFDAHLDTWDRYYGADITHGSPFRRAYEEGLLLDRNMHVGVRGSIYDKQDLVDDANFGFSVVTCRDIGTLGAEGIVDKIRARVGDAPVYVSVDIDVLDPAHAPGTGTPEAGGMTSRELLEVVRGLDSVNLVGVDVVEVSPAYDHAEITAIAAANVTWEFLSVFGRKAQR

SEQ ID NO: 4592 - protein, 360 aa, Mycobacterium sp. MCS
MPNPVPRGRRLLLRAVRHLFNPLRPDDYLEMVNPLWTTKELRGKVERVEPQGSEAASVLIRPGYEWPGHKPGQYVRLGLVIDGRYHWRAYSLTSDPHPDDGLISVTPKKVDNGVVSPYLVQKIQPGELVRLGEIEGVFTLPEPLPAKMLFISAGSGITPIISMLRSLDHRGEMGDVVVIHSARTREQVMFLSALEDLDRRHENLRLDLRLTSERGRMSAGDLDEVCPDWREREAFCSGPSELLDDMIEHWEDNGDRDRLHFERFQPKIGGDAGDGEGGQITFLDSDTTTESDGGTPILESGEQAGLKLAYGCRIGICHTCVGTLKSGRVRDLRSGEVTEPTGQDVRICIHAAEGDVEFEL

SEQ ID NO: 4593 - protein, 570 aa, Mycobacterium sp. MCS
MTVSGGDLLARALADAGVTEVFTLHGGHLDAFLVACGKHDVRLTDTRHESSAGHAADAYARVTGSLGVCVVTSGPGFTNAYTAIANGYLDRTPTLFIVGGPPLRESATNPLQGGFDQVAAAAPVTKWAYRLTEAARIPEIVSLAVRKATTGAPGPVLLEVPIDVMFGEADEAEVRYPARYALDARSVPSDSVVHQALDVLQGAQHPVIVIGGGVTFSRAADALVAFAETVGVPVFYPGKSDGAIPASHRLAAGGLLGLGALSALGAPTPDVVLLVGARAGMFTGGRASMFPGARIVQVDLDAAEIGRMQDVAVAIVADCRETLRALQAAAADRDWPDWSEWVHTAVQAQRFHRALYPDAATPSGRMHPYFAARAVVEACPPGTTFVLDGAEAPAWAEFFATTETVGGVLRLGYLGTLGVGPGFAIGAARARPAAPVVLITGDGAAGFHLGEFDTMARHGMPVLTVVFNNAVWGMSVHGQQAVYGDGGVVVSELADSSYEKVAEAFGGYGERVGEVDEIAAAVQRAFAAQVPACLNLEIDPHTVHPLTTMMLGDVTATDAIVVPYYENLPR

SEQ ID NO: 4594 - protein, 67 aa, Mycobacterium sp. MCS
MTQGTVKWFNSEKGFGFIAPDGGSDDVFVHYSEIQGGGFRSLEENQRVEFEIGQGAKGPQATSVTAI

SEQ ID NO: 4595 - protein, 394 aa, Mycobacterium sp. MCS
MSGFTGRDAVIVGAVRTPIGKGKPGGGLHEVLPADLLAHSLRELVTRTGVDPAQVDDVIAGAVTQVGDQAVNIARNALLGAGFPESVPGTTVDRQCGSSQQAISFAAQGVASGAYDIVIAAGVESMSRVPMGSSVLPGSNPFGDDFARRYPDGLVPQGISAELIAAKWGLSRTALDEFSAGSHEKAAAATKAGLFEGELAPIAGLATDEIIRPGTTVETLAGLKPAFYHPTYEERFPQIGWEITAGNSSPLSDGSAAVLITTTEAAKRLGLRPLARIHTAVAVGSDPLYMLTGVIPATEKVLAKAGLTLADIDLFEVNEAFAPVVLAWAQDTGADLDKTNVNGGAIAIGHPLGASGVRIMTTLVNALEQRGGRYGLQTMCEAGGMANATIIERL

SEQ ID NO: 4596 - protein, 263 aa, Mycobacterium sp. MCS
MTTLEIKDLHVTVAAGADASGADGGAKEILKGVNLTVNSGETHALMGPNGSGKSTLSYAVAGHPKYTVTSGSITLDGQDVLEMTVDERARAGLFLAMQYPVEVPGVSMSNFLRTAATAVRGEAPKLRHWIKEVKGAMTDLDIDPSFSERSVNEGFSGGEKKRHEILQLSLLKPKIAILDETDSGLDVDALKVVSEGVNRYAKENDGGVLVITHYTRILRYIQPQFVHVFVGGRIVESGGPELADELEAKGYERFTAQAASTGV

SEQ ID NO: 4597 - protein, 345 aa, Mycobacterium sp. MCS
MGHAHDREPQRDVPPGMAEQLDLPHSGMATFGHRPFLTETAQLDSWRPDVAIVGAPFDVGTTNRPGARFGPRAIRATAYEPGTYHMDLGLEIFDWLEVVDFGDAYCPHGQTEVSHANIRERVAAVASRGIVPVVLGGDHSITWPAATAVADVHGHGNVGIVHFDAHADTADTIEGNLASHGTPMRRLIESGAVPGTHFVQVGLRGYWPPQDTFEWMLEQGMTWHTMQEIWERGFQEVMRDAVAEALARADKLYVSVDIDVLDPAHAPGTGTPEPGGITSADLLRMVRRLCYEHDVAGVDVVEVAPAYDHAELTVNAAHRVVFEALAGMAARRRDAAGAQPGPPAR

SEQ ID NO: 4598 - protein, 214 aa, Mycobacterium sp. MCS
MRVGPEDAGLTALAGEVLAREADAVSALAGTVEGGVVAVARRLLDVTGKVVTTGSGTSGIMAERLAHLLSVCGTPAVYLPAMDALHGGMGAVTAHDLVLAISKTGRSAELTRLTERLVDRGVDVVAITEDAQSPFALAATQVQALPRTPGDADPGGMIALASTLVVGAWGDALAVVSMALRGHTLHDVVHSHPAGGVGARGHRPGDESAPVVRT

SEQ ID NO: 4599 - protein, 582 aa, Mycobacterium sp. MCS
MNDSTVGTAFRSRVVDHIVNYLSAGGVRYLFGVDGANIEDVYDAAHLSGDVTAVLAKHEFSAAAMADGYSRSGAGLGVVMATSGGGSLNLVPGLGESLASRVPVLALVGQPPLALDGRGSFQDTSGCNGSLDALALFSTVSVFCERITEPADILTALPRAVRAAFSGGPAVLLLPKDVQQAVLDVRHSTEGHERAPVTRQIGDPRPIARALQKVDGPVTIVVGSQVIHDDARAELEQLRAVLRARVAVTPDAKDAAGTPGMGSSSLVGVTGVMGHPGTAEAIGDSALCLLVGSRLPVTARAGLDAVLAGTRTLSIGSAPPFVPCTHIHSDDLRASLPLLTRGLIGRRRPRGLQVADTIPRKELSPPIFDGEGVRFRDAMKALDRLLPADVDIVVDAGNTGASAVHYLPVRRRGRFLVALGMGGMGYSFGAGIGVAFGRRRRTVVIAGDGSFFMHGLELHTAIQHRLPVTFVLFNNNAHGMCVTREQLYYDGTYSYNRFAPSHLGAGLNAMFPGMPSVDVADVTELAGAVTSALDAHGPSVVSVECSADEIPPFAPFLAAGPPAAPDPATVHEEESIDVPASA

SEQ ID NO: 4600 - protein, 399 aa, Mycobacterium sp. MCS
MTSRMNGISSLDAGVMVGALIGGDGVESRPGPGHAPLTKPVRLPPARLARIVETLRTALHRVRFKVVPPFAGILDLTMGFAVAQAIYAAARLGVADVLRDGPMTAADVADRVHADPSAVHRLMRVLAAHQIFRERRDGPFEMTALSQALCSDAAVSIRPLLLMLSHPFYWQHFGRLTDVVRTGRTSLETEYGKGLFECLDEDPEVARVFNDAMSCVTAMSIPPVLAAYDFSRFRTIIDVGGGDGHMLTAILEVATASRGVLFELPALAEQARETVRSVGLTDRATIESGSFFDHVPRGGDLYVLKHVIHDWRDDRAREILRHVRDAMSPRAVLLLVETVIPPGNGMHFGKLLDLDMLIFAGGRERTRAEFSSLLFETGFHLDRIVPTVTHLSLIEATAC

SEQ ID NO: 4601 - protein, 400 aa, Mycobacterium sp. MCS
MSERVILAYSGGLDTSVAISWIGKETGREVVAVAIDLGQGGEDMDVVRQRALDCGAVEAVVIDARDEFAEDYCLPAIQSNALYMDRYPLVSALSRPLIVKHLVDAAREHKGGIVAHGCTGKGNDQVRFEVGFASLAPDLEVLAPVRDYAWTREKAIAFAEENAIPINVTKRSPFSIDQNVWGRAVETGFLEHLWNAPTKDVYDYTEDPTLNWSTPDEVIVGFDKGVPVSIDGRDVTVLQAIEELNRRAGAQGVGRLDVVEDRLVGIKSREIYEAPGAMVLITAHTELEHVTLERELGRFKRTTDQKWGELVYDGLWFSPLKTALESFVAKTQEHVSGEIRLVLHGGHIAVNGRRSQESLYDFNLATYDEGDTFDQSSAKGFVHVHGLSSSISARRDLGIK

SEQ ID NO: 4602 - protein, 247 aa, Mycobacterium sp. MCS
MTKSIEDRKVLLEVRDIVVHYGRIRALHGVSLKVHEGELVTLLGSNGAGKTTMMRAISGLRPLTSGSVWFDGRDISRVKAHRRVTDGLIQAPEGRGVFPGMTVTENLEMGCYARKFDTKAEHREQLDWVFETFPRLAERRSQVGGTLSGGEQQMLAIGRALMARPKVLLLDEPSMGLAPMVISQIFKIIADINSQGTTVLLVEQNAQQALSRSDRAYILETGEVTRTGNARELLHDDSVRAAYLGVA

SEQ ID NO: 4603 - protein, 313 aa, Mycobacterium sp. MCS
MDTPIGPVDATKVPRFAGPATFARLPRIDEVTRTDVAVVGVPFDSGVSYRPGARFGPAHIRASSKLLRTYHPRLDVEPFAVQQVVDAGDIAVNPFDIAEAITAIERHSDELRSGGAKLVTLGGDHTIALPLLRSLHREHGPIAVLHFDAHLDTWDTYFGAPFTHGTPFRRAGEEGLLDPEHCLHVGIRGPLYAPTDLSDDRVLGFQVVGSDDYQLEGLATVIERMRARIGDAPVYVSVDIDVLDPAHAPGTGTPEAGGMTSRELLLSLRSLVGANVVGADIVEVAPAYDHAEITGIAAAHVAYELISVLAANR

SEQ ID NO: 4604 - protein, 343 aa, Mycobacterium sp. MCS
MLKLHGRIVSNVDATRIGAGRRLRSMTGHILGAVPATEVPRYAGKSTFARIADIGEVSDYDIAILGVPFDGGTSYRPGARFGPMGVRQAARTLRPGYHVELGVAPLERVQVVDAGDVTVTPYDIAEACRQIQNHAADILGGGSRRIVAIGGDHTIALPNLRALHAVHGPVALVHFDAHLDTWDTYFNAPVTHGTIFRRAFEEGLLVEDHSIHVGIRGPIYDQIDLHEDAEMGFKIIRAGDLDVIGIDAAVDTVRRRVGDAPVYLSVDIDVLDPAFAPGTGTPESGGLTARELLRMLRRLHGLNIVGGDVVEVAPAYDHAEITCVAAATVVFDLVSLMVAGGAG

SEQ ID NO: 4605 - protein, 655 aa, Mycobacterium sp. MCS
MCGLLAFLKDPSAQSSPALVGAVSGAAELMRHRGPDEPGTWADDTDDPGIVLGFNRLSIIDIAHSHQPLRWGPPEAPLRYVLVFNGEIYNYLELREALRTEHGAEFATDGDGEAIVAAYHHWGPAALSRLRGMFAFALWDTVTGELFCARDPFGIKPLYIATGPGGTAVGSEKKCLMAVADQLGIDTGLDERAVQHYTVLQYVPEPETLHRGVRRLESGSYLRMRPGQAPVVTRYFTPRFDAVPFRAASAPGSAGGVDQARYDEITAVLEDSVAKHMRADVTVGAFLSGGIDSTAIAALAMRHNPRLITFTTGFEREGFSEVDVAVASAEAIGARHVTKVVSQAEFVEALPAIVWYLDEPVADPALVPLYFIAREARKHVKVVLSGEGADELFGGYTIYREPLSLRAFDYLPRPVRRSLRRASAPLPEGMRGKSLLHRGSQTLEERYYGNARSFSDEHLRAVLRRFSPDWTHTDVTAALYRESDGWDPVARMQHIDLFTWLRGDILVKADKMTMANSLELRVPFLDPEVFAVASRLPLEQKITRATTKFALRRALEPVVPAHVLNRPKLGFPVPIRHWLRAGELLEWAYETVAASQTGDLIDAEAVRTMLDEHRTGVSDHSRRLWTVLIFMLWHAIFVEGSVTPRIEEPHYPVQL

SEQ ID NO: 4606 - protein, 299 aa, Mycobacterium sp. MCS
MSEFRSGFVCFVGRPNTGKSTLTNALVGTKVAITSNRPQTTRHTIRGIVHRDEFQIILVDTPGLHRPRTLLGQRLNDLVKTTYSEVDVIGLCIPADEAIGPGDRWIHEQIRAVAPRTTLVVIVTKIDKVPRDRVAAQLMAVSELVGPDAEIVPVSATTGEQLDVLTDVLAGKLPPGPAFYPDGELTDEPEETLMAELIREAALEGVRDELPHSLAVVIDEVSPREDRDDLIDVHAILYVERDSQKGIVIGKGGARLREVGTAARLQIEKLLGTKVYLDLRVKIAKNWQRDPKQLGRLGF

SEQ ID NO: 4607 - protein, 560 aa, Mycobacterium sp. MCS
MTETPTRPAKPVKRPRGEGQWALGYREPLNANEQSKKDDNPLNVRERIENIYAPGGFDTIDKGDLRGRFRWWGLYTQRKPGFDGTWTGDENTDMLEDEYFMLRVRSDGGALTAKALRTLGEISTEFARDTADISDRQNVQYHWIDVRNMPEIWRRLDEVGLQTTEACGDCPRVVLGSPLAGESLDEVIDGTPAVNEIVKRYIGKPEYSNLPRKFKTAISGLQDVVHEVNDVAFIGVVHPEHGPGFDLWVGGGLSTNPMLGQRVGAWVPLDEVPDVWEGVVSVFRDYGYRRLRSKARLKFLIKDWGVEKFRQVLETEYLKRPLIDGPAPDPVTRPIDHVGVQKLKNGLNAVGVAPIAGRVSGTILSKVADLAEAAGSDRIRFTPYQKLIVLDVPDEKLEELRAGLDALGLPSTPSHWRRNLMACTGIEFCKLSFAETRSRSQVLVPELEKRLEDINAQLDVPVTININGCPNSCARIQVADIGFKGQMVDDGDGPQEGFQVHLGGSLGLDSGFGRKLRQHKVLATELGDYIERVVRNFVKQREDGERFATWALRADEADLR

SEQ ID NO: 4608 - protein, 485 aa, Mycobacterium sp. MCS
MPRFVDRVVIHARAGNGGNGCASVHREKFKPLGGPDGGNGGRGGSIVLVVDPQVHTLLDFHFHPHVVAPSGKQGAGSNRDGAAGADLEVRVPDGTVVLDEEGRVLADLVGAGTRFEAAAGGRGGLGNAALASRSRRAPGFALLGEKGQVRELTLELKTVADVGLIGFPSAGKSSLVSTISAAKPKIADYPFTTLVPNLGVVSAGDHTFTVADVPGLIPGASEGRGLGLEFLRHIERCAVLVHVVDCATMEPGRDPISDIEALEAELAAYRPTLQGDSTLGDLAERPRAVVLNKIDVPDARELADFVRDEVAERFGWPVFEVSTVAREGLRPFIFALWDMVRTYREAQPPVVPRRPIIRPIAVDETGFSVHPDGQGGFVVRGTRPERWINQTDFDNDEAVGYLGDRLARLGVEEELLRLGARPGCAVTIGDMTFDWEPQTPAGVDVQMSGRGTDTRLEQTDRVSAAERKIARRERRQSTDEPGGEE

SEQ ID NO: 4609 - protein, 389 aa, Mycobacterium sp. MCS
MSQQILVVGAGIAGLATAVALQRIGHPVTVVEEKADTSAGAGISIWPNALAALDAFGLGDAVRASGGRVTAGALRWHDGTWLRRPSADRMVRALGEPLVVTRRADLTAILAGALAPGTVQRGVAARVIDTTPAGVRITLSDGSVRDAAAVIGADGVGSMVARHLNGPLRHRYAGYTAWRGIAAHRLDPQLAGQTLGAGTEVGHVPLGPDHTYWFATERTAEGGSIPQGELDYLRRKYRGWAEPIPTLLATTAARDVLRNDLYDREQIRVWSRGPVTLVGDAAHPMRPHLGQGGCQGLEDAAVLARFVAAATGTETDFATAFVRFAGFRRARVRALVRESKLIGRVVNLRPAVLSALASRATVVIPEAVLGRHLAAVAAGSAFTLPEAPG

SEQ ID NO: 4610 - protein, 339 aa, Mycobacterium sp. MCS
MSEPVADFSPLRVKRVVRETSDAVSLVLDVPRHCSGRFRYQAGQFLTLRVNLDGQELRRCYSMSSAPVEEELRITVKRDPGGLVSNWLNDTVSEGAEIHAAPPEGRFLLRDTDSEIVAFAGGSGITPIMSLIRTALATSARSIRLFYANRNRGSVIFADDLARLVEHNADRLVLTHHYDDDSGVVTPAAIESFVAGAGDADFYICGPGPFMDTVEGALATRGAPRDRVHLERFQVAQVPAGADASEAQATEEIVIELDRKTTTVPYRSGNTLLQTARTAGLRAPSSCETGSCGTCMAQVVSGSARMLNNDALDDDEVADGWVLTCQSLPTSRSVHVVYE

SEQ ID NO: 4611 - protein, 383 aa, Mycobacterium sp. MCS
MRETVIVEAVRTPVGKRNGGLSGMHAADLSAVVLNELVLRAGIEPDVVDDVIWGCVSQVGDQSSNIGRFAVLAAGWPEHIPGTTVNRACGSSQQALDFAVHAVMSGQQDIVVAGGVEVMSRVPLGSARATGMPYGPKVLERYRDFSFNQGISAELIAEKWGFSRTRLDEYSARSHELAAKAQDAKAFDAQIVPVFTGEDTAPVVADEGVRRGTSVEKLAGLKPAFRDDGVIHAGNSSQISDGAAALLVMTADNAVQLGLTPIVRYRAGAVAGADPVLMLTGPIPATEKVLHKAGVGIDEIGVFEVNEAFAPVPLAWLADTGAAEERLNPLGGAIALGHPLGASGAVLMTRMVHHMRDNGIRYGLQTMCEGGGTANATLVELIA

SEQ ID NO: 4612 - protein, 383 aa, Mycobacterium sp. MCS
MPEAVIVSALRTPIGTAMKGTLRDTDAYRLAEHVVAAAAEDLPTGQIDDVVLGEGLYGGGVIARHAAITAGLISVPGLSNNRHCAAGQAAVQSAAASIRAGMDQLVIAGGVNSASTTPRFTRRASSAKDAAMLDWFPPTHPDRADAPNMDMSITVGWNAAVRAGVSREEMDQWALDSHRKAIQAIDEGRFKEEIVPIDTPYGLFDTDEHPRRDTSIEKLASLKPLHPEIEGFSITAGNACGANDGAAVLALASDRLGLPALGAVKAWASVGVDPAFTGLAPVEAIPKALKRAGISLSDVDLFEINEAFAAMCVATVKMLDIDPAKVNVSGSGCSLGHPVAATGARMLVTLVHELRRRGGGIGVAAMCAGGGMGSATVIEVPAP

SEQ ID NO: 4613 - protein, 393 aa, Mycobacterium sp. MCS
MTTSVIVAGARTPVGKLMGSLKDFSGSDLGGIAIKAALEKAGVAPSAVDYVIMGQVLTAGAGQMPARQAAVAAGIPWDVPALTINKMCLSGIDAIALADQLIRAGEFDVVVAGGQESMTQAPHLLVNSRSGYKYGDVTALDHMAYDGLHDVFTDQPMGALTEQRNDVDQFTRAQQDEFAATSHQKAAAAWKDGVYADEVVPVSIPQRKGDPIEFSEDEGIRANTTAESLAGLKPAFRKDGTITAGSASQISDGACAVVVMNKAKAEELGLTWLAEIGAHGVVAGPDSTLQSQPANAIKKAIAREGISTDQLDVIEINEAFSAVALASTKELGVDPERVNVNGGAIAIGHPIGMSGARITLHAALELARRGSGYAVAALCGAGGQGDALILRRP

SEQ ID NO: 4614 - protein, 557 aa, Mycobacterium sp. MCS
MTSPEPDAPGTETTFADLQIHPEVLRAVTDVGYETPSAIQAATIPAMLAGSDVVGLAQTGTGKTAAFAIPILSKIDPNSRATQALVLAPTRELALQVAEAFGRYGAHLPVNVLPVYGGSSYGPQMAGLKRGAQVVVGTPGRVIDHLEKGSLDLSHLDYMVLDEADEMLQMGFAEDVERILSDTPEYKQVALFSATMPPGIKKITKKYLHDPVEVTVKSKTQTAENITQRYIQVSYPRKMDALTRLLETEQGDGMIVFVRTKQATEEVAEKLRARGFAAAAINGDIPQAVRERTISQLKDGSIDILVATDVAARGLDVERISHVVNFDIPHDPESYVHRIGRTGRAGRSGTALLFVTPRERHLLNSIERVTRQKLVEIQLPSVEDVNAQRVEKFRDSIGEALNAPGIDLFRRLIEDYERDNNVPLADIAAALAVQSRNGEEFLMTEPPPEKRRERPVRDESGPRKARDRTRSDLATYRIAVGKRHKVMPGAIVGAIANEGGLNRSDFGHIAIKPEYSLVELPADLPKDTLKKLERTRIQGVLINLEPDRGPKARYKGK

SEQ ID NO: 4615 - protein, 541 aa, Mycobacterium sp. MCS
MTVLAAETIGNPVANMSIFALFVLVTLFIVIKASKKNATATEFFTAGRAFTGPQNGIAISGDYLSAASFLGIAGAIAVYGYDGFLYSIGFLVAWLVALLLVAELLRNTGKFTMADVLSFRLKQRPVRLAAATNTLAVSLFYLLAQMAGAGVLVALLLNIESDLGQSIVIAVVGVLMIVYVLVGGMKGTTWVQIIKAVLLIGGAGIMTIMVLAKFNFNFSEILGSAQAMVSSSEDAKVASRDVLAPGAQYGASLTTQINFISLALALVLGTAGLPHVLMRFYTVPTAKEARRSVVWAIALIGAFYLFTLALGYGAAALVGPDRILAAPGGVNSAAPQLAFELGGVVLLGVISAVAFATILAVVAGLTITASASFAHDIYASVMKSHQVTESEQVKISRITAVVLGTLAIGLGILAREQNVAFLVALAFAVAAAANLPTILYSLYWRRFNTRGALWSMYGGLISTIVLIVFSPAVSGTATSMIKGADFAWFPLANPGIVSIPLAFILGIVGTLTSPDDEDPTIAAEMEVRSLTGVGAEKAVSH

SEQ ID NO: 4616 - protein, 385 aa, Mycobacterium sp. MCS
MAEAVIVEAVRSPVGKRNGGLSGVHPAELSAQVLNGLVERAGVDPALVDDVIWGCVMQAGEQALDIARTAVLSAGWPETVPGVTVDRQCGSSQQSLHFAVAGVVAGHYDVVVAGGVESMSRTPMGSSLANGGNPYGESFKARYSQTPNQGVGAEMIAEQWGFSRTELDEFSLRSHEKAAAAQDSGAFKDQIVGIETKDADGNDTVVLEDGGIRRGGTVESMAKIKPAFREDGVIHAGNSSQISDGSAALLIMSADKAKDLGLKPLAKVHTAVLAGADPVIMLTAPIPATQKALKKSGLSLDQIGAFEVNEAFAPVPMAWLKDIGADESKLNPNGGAIALGHPLGGSGARILTTLLYHMRDNNIQYGLQTMCEGGGQANATILELL

SEQ ID NO: 4617 - protein, 405 aa, Mycobacterium sp. MCS
MPEAVIVSTARSPIGRANKGSLVDMRPDDLAAQMVRAALDKVPSLDPRDIDDLIMGCGQPAGESGFNIGRAVAVQLGYDFMPGTTVNRYCSSSLQTSRMAFHAIKAGEGHAFISAGVETVSRFAKGNADGWPDTKNPKFADAQERSNQAAAGGDEWHDPREDGNLPDVYIAMGQTAENVALFTGVSREDQDHWGVRSQNRAEEAINNGFFEREISPVTLPDGTVVSKDDGPRAGTTYEKISQLKPVFRPNGTITAGNACPLNDGAVAVVIMSDEKARDLGLTPLARIVATGVSGLSPEIMGLGPIEAVKKALGNAGMGIADIDLYEINEAFAVQVLGSARALGMDEDRLNVSGGAIALGHPFGMTGARITATLLNNLQTHDKQFGLETMCVGGGQGMAMIIERLS

SEQ ID NO: 4618 - protein, 326 aa, Mycobacterium sp. MCS
MGTEWTDNRKNLMLFSGRAHPELAEQVAKELDTPVTAQTARDFANGEIFVRFDESVRGCDAFVLQSHPAPLNQWLMEQLIMIDALKRGSAKRITAILPFYPYARQDKKHRGREPISARLVADLLKTAGANRILTVDLHTDQIQGFFDGPVDHMRAQKLLTGYIAEHYPSEDMVVVSPDSGRVRVAEKWADSLGGTPLAFIHKTRDPLVPNQVVSNRVVGDVRGKTCVLTDDMIDTGGTIAGAVKLLKQEGAGDVIIAATHGVLSHPARERLAECGAREVIVTNTLPIGEDKQFPQLTVLSIAPLLANTIRAVFDNGSVTSLFDGSA

SEQ ID NO: 4619 - protein, 574 aa, Mycobacterium sp. MCS
MTDLVADALVARLRDWGADRVFGYAGDGVNTLLGALQRSGAPEFISTRHEELAAFMACGHAKYTGRVGVCMATQGPGAIHLLAGLYDAKLDKRPVVAIVGQVVSTALGSGYLQEVDLHTLFKDVCGQYVQTVFAPEQALMALDNAMRTAIATSTPTCLIIPHDVQQAEMPDELAHSHGVVPSAAVSAPTRITAPDDQIRSAADILNAGRRVALLVGRGAAGAADEIARVVETLGAGVTTSLLGKPVLDEGQPWHTGVMGHLGTTASAELMANCDTLLIVGSNDPWTEFYPAPGQAKAVQIDIQPRVIGAKYPVDAPVVGQAAQALSALSALLEPKPDRAWQEQVRQWREQWHAEAARRAAAETSDANPEAVVRALSDHLPADARVAVDTGSSTYWYARHLRLPPGVPAHHSGYLASMGCALPYGVAAKLDAPQRPVVALVGDGAMQMSGLLELVTIADRWRSWQDPRFVVLVLHNADLTEVSWEQREMEGNPRFAPSQDVPRFPYAGYAELLGLRGIRVTSSQEADDAWATAFSADRPTVIEAVVDAATPLLPPLMPDSKADKVRAALEQEART

SEQ ID NO: 4620 - protein, 457 aa, Mycobacterium sp. MCS
MSSTTPLNPSVGEGEGQLRRVLGVPSLVLFGLVYMVPLTVFTTYGIVTVESGGRVPLAYVVTLAAMIFTARSYARMAAAYPVAGSAYAYTQKTFGAPVGFLAGWSLLLDYLFLPMLNYLVIGLYLNAAVPAIPQWLIVVVTIAIVTVLNIIGIVSVARANLLIIAIQAIFIVVFIVMAVAAVSGSGSVDVMAPFRGDGTADGMAPVLAGAAILCLSFLGFDAVSTLSEEARDARRDVPKAIMLATIICGVLFIILSYVSQLVFPSNAFTDVDSGSLDVMQSAGGAFLAAFFTAAYVAGASGSALTSQASVARILYAMGRDGVLPRKVFGHVSVKFGTPTWAVLVISIVSLLALVIDLAILASVVSFGALVAFSAVNLTVIKHYFVDAGEKNVVNNLVLPLIGFVLTVWLWTSLSAESLTIGLIWLAIGFLWLLGVTRGFRRPTPVLDLEELPAQPAK

SEQ ID NO: 4621 - protein, 627 aa, Mycobacterium sp. MCS
MSIETVARQTLYRQAHARGGDLHSLADRALLRRIWRFAGRHHRRLAAFVAVSVVSATLAVATPVLAGRVVDEITRGGAASVVIGLAAVIATVALAEAGVSLLTRWLSSNIGEGLIFDLRTAVFEHVQKMPVAFFMRTRTGALVSRLGNDVLGAQRAFSDTLSGVVSNLVTLTLTLGVMLAISWQITVVALVLVPVFVLPARRIGARMAHLSRESAIHNATMNTQMTERFSAPGATLVKLFGRPESESHEFAVRAGRVRDIGVRSAMLQSTFMNSLTLMSALALALVYGLGGVIALGGHLQAGAIVSLALLLTRLYAPLTALANARVEIASALVSFERVFEVLDLEPIIREEPDAVAVPDGPVRVEFDHVRFSYPTADKVSLASLEEVAVLDDRDDGEVLHDISFTAEPGQMVALVGSSGAGKSTIAALLARLYDVDSGAVRLAGMDVRDVTFESLRDTVGMVTQDGHLFHESIRANLLLAAPETESDDRLWEVLRRARLADVVAAMPDGLDTVVGERGYRLSGGQRQRLTIARLLLGRSRVVVLDEATASLDSASEAAVQQALGEALAGRTSLVIAHRLSTVRAADLILVVEDGRIVERGTHRQLIGRGGRYAELYETQFAEPEAVA

SEQ ID NO: 4622 - protein, 467 aa, Mycobacterium sp. MCS
MDTTHSESSDYLAKRTLKQGTAGWLLLAGLGVGYVISGDYSGWNFGLAEGGFGGLLIAGVIIAGMYLAMVLGMAEMSSALPAAGGGYTFARRALGPWGGFATGTAILIEYAIAPAAIATFIGAYVESLGLFGITDGWWVYLAVYLLFIGIHLSGVGEALKVMFVITAIALAGLIVFAIGAVGRFDAANLTDIAPTDAAGASSFLPFGYLGIWAAVPFAIWFFLAIEGVPLAAEEAKDPSRNVPRGILAAMGVLLVTGSTVLVLAAGSGGAELISASGNPLVEALGDTTTSKVVNYIGLAGLVASFFSIIYAYSRQLFALSRAGYLPRRLSVVNSRKAPTLALVVPGIIGFILSLTGQGAMLLNMAVFGAALSYVLMMVSHIALRVREPDMPRPYRTPGGVVTTGFALVIAALAVVATFLVDSTAATWCLVVFAAFMAYFGLYSRHHLVANSPDEEFAALADAEKDIL

SEQ ID NO: 4623 - protein, 470 aa, Mycobacterium sp. MCS
MTHPDTVREQPELRRVMGPGLLLLFVVGDILGTGVYALTGDVAAEVGGAAWLPFLVAFLIATITAFSYLELVTKYPQAAGAALYAHKAFGLQFVTFLVAFVVMCSGITSASTASRFFGANLIEGFGLEWGTAGVAAVALGFMALLAAVNFRGVGESIKLNVVLTIIEATGLMLVLFVGLWAFTRGGDVDFSRVVAFDTAGDKNAFMAVTAATSLAFFAMVGFEDSVNMAEETKDPVKTFPKVLLSGLTIAGIVYMLVAVVAVALVPVGRLEESDTPLVEVVKAGAPNLPIDTLFPFISMFAVSNTALINMLMASRLIYGMARQHVLPPVFGTVHPRRLTPWVAIVFTTLIAFGLIFYVSVFASSSAISVLGGTTSLLLLAVFAVVNVAVLRLRRDVQAGGAHFKTPTVMPVVGFIASLYLVLPFSGRPAQQYYVALILVAIGIVLFFINRLINRRLGVRDTEITDPTHLA

SEQ ID NO: 4624 - protein, 489 aa, Mycobacterium sp. MCS
MASEGDPGVGSGDSDFVVVANRLPIDMERLPDGSTSFKRSPGGLVTALEPLLRKRHGAWIGWAGIPDSAEDPIEDDGLQLYPVSLSADDVADYYEGFSNATLWPLYHDLIVKPIYHRKWWDRYVEVNRRFAEATARAAAEGATVWVQDYQLQLVPKMLRMLRPDLTIGFFLHIPFPPVELFMQMPWRTEIIEGLLGADLVGFHLPGGAQNFLYLARRLTGANTSRATVGVRSRFGEVQVGFRTVKVGAFPISIDSDELDGKARNRAVRQRAREIRNELGNPRKILLGVDRLDYTKGINVRLEALSELLEDGRVDSHDTVFVQLATPSRERVQSYIEMREDIERQVGHINGEFGDVGHPIVHYLHRPIPRDELIAFFVAADVMLVTPLRDGMNLVAKEYVACRSDLGGALVLSEFTGAAAELRQAYLANPHHLEGVKDAIEAALNQDPEEGRRRMRALRRQVLAHDVDRWARAFLDALADTRAGAKPVRD

SEQ ID NO: 4625 - protein, 350 aa, Mycobacterium sp. MCS
MTDEPLGSHVLELEVADVVEETADARSLVFKAGADIPAERLRYSPGQFLTLRVPSDRTGSVARCYSLCSSPFTDDPLTVTVKRTADGYASNWLCDNAHPGMKLHVLAPSGTFVPKSLDTDFLLMAAGSGITPMLAILKSALVEGSGKVVLVYANRDESNVIFAGTLRELGQKYSDRLTVVHWLESVQGLPTATALAGLAAPYTGHDAYICGPGPFMAAAEEALTSAGTAADKIHIEVFKSLESDPFAAVVIEEDDSDEGPATAVVTLDGETHEIRWPRNAKLLDVLLDKGLDAPFSCREGHCGACAVLKKSGEVEMAVNDVLEQSDLDEGLILGCQAMPRSDSVEVTYDE

SEQ ID NO: 4626 - protein, 135 aa, Mycobacterium sp. MCS
MLRTMLKSKIHRATVTQSDLHYVGSVTIDADLMDAADLIEGEQVTIVDIDNGNRLVTYAITGARGSGVIGINGAAAHLVHPGDLVILIAYGTMEDAEARAYQPRVVFVDADNRQVHLGADPAMVPDTAVDLMSPR

SEQ ID NO: 4627 - protein, 783 aa, Mycobacterium sp. MCS
MNRKNVIRTLIVIAVVLLLGWSFFYFSDDTRGFKPVDTSVAISQINSDNVKSAQIDDREQQLRLELKSGNGETEDSDKILTKYPTGYAVTLFESLQDKNVKINTVVNQGSVLGSLLIYMLPLLLLVALFVFFSRMQTGGRMGFGFGKSRAKQLTKDMPKTTFADVAGADEAVEELYEIKDFLQNPSRYQALGAKIPRGVLLYGPPGTGKTLLARAVAGEAGVPFFTISGSDFVEMFVGVGASRVRDLFEQAKQNSPSIIFVDEIDAVGRQRGAGLGGGHDEREQTLNQLLVEMDGFGDRQGVILIAATNRPDILDPALLRPGRFDRQIPVTSPDLAGRRAVLKVHSQGKPMAGDADLDGLAKRTVGMSGADLANVINEAALLTARENGTVITGLALEEAVDRVVGGPRRKSRIISEHEKKITAYHEGGHTLAAWAMPDIEPIYKVTILARGRTGGHAVAVPEDDKGLMTRSEMISRLVFAMGGRAAEELVFREPTTGAVSDIQQATKIARAMVTEYGMSSKLGAVRYGTEHGDPFLGRTMGTSSDYSHEVAQIIDDEVRKLIEAAHTEAWEILTEYRDILDTLAGELLEKETLHRVELEAIFGDVKKRPRLTMFDDFGGRVPSDKPPIKTPGELAIERGEEWPQPKPEPAFKAAIAAASKAAEEAAARSNGANGSSGANGSPNGAPNGATQPDYGAPAGWHAPGWPPQQQPSGQQGGYWYPPPSPNPGWGEPPRQQQPYPPYQQHYPQPGHGPQGANPPRDPQQERGRDGDRPGDRPNPPAQH

SEQ ID NO: 4628 - protein, 67 aa, Mycobacterium sp. MCS
MPQGTVKWFNAEKGFGFIAPEDGSADVFVHYTEIQGSGFRTLEENQKVEFEVGQSPKGPQATGVRTI

SEQ ID NO: 4629 - protein, 259 aa, Mycobacterium sp. MCS
MSATRDGHRLIPDAAPAWLKPLVHNTDSVPRAYRRRVPPDVLAAITAANATATVTRAKRDAAVLVLFSGPEKSGEGLPHDADLLVTVRASTLRHHAGQAAFPGGATDPDDEGPVHTALREATEETGLDTSRLQPLATLQRMFIPPSGFHVVPVLAYSPDPGPVAVVDESETAIVARVPVRAFVNPENRLMVYRDAKSRRWAGPAFLLNEMLVWGFTGQVISAILDVAGWAVPWNTDDVRELDEAMALVGDDDRYGESQQ

SEQ ID NO: 4630 - protein, 224 aa, Mycobacterium sp. MCS
MDEILARAGIFQGVEPSAVSALTKQLQPVDFPRGHTVFAEGEPGDRLYIIINGKVKIGRRSPDGRENLLTIMGPSDMFGELSIFDPGPRTSSATTITEVRAVSMDREALRAWIADRPEIAEQLLRVLARRLRRTNNNLADLIFTDVPGRVAKQLLQLAQRFGTQEGGALRVTHDLTQEEIAQLVGASRETVNKALADFAHRGWIRLEGKSVLISDSERLARRAR

SEQ ID NO: 4631 - protein, 421 aa, Mycobacterium sp. MCS
MALVVQKYGGSSVSDAERIRRVAERIVETKKAGNDVVVVVSAMGDTTDDLLDLAKQVCPAPPARELDMLLTAGERISNALVAMAIESLGAQARSFTGSQAGVVTTGTHGNAKIIDVTPTRLRSALDEGQIVLVAGFQGVSQDTKDVTTLGRGGSDTTAVAVAAALNADVCEIYTDVDGVYTADPRIVPNARKLDTVSFEEMLEMAACGAKVLMLRCVEYARRYDLPIHVRSSYSDKPGTIVKGSIEDIAMEDAILTGVAHDRSESKVTVVGLPDVPGYAAKVFRAVADADVNIDMVLQNISKIEDGKTDITFTCARDNAPGAVEKLTSLQDEIGFTRVLYDDHIGKVSLIGAGMRSHPGVTATFCEALAEVGVNIDLISTSEIRISVLVKDTELDKAVAALHEAFGLGGDEEAVVYAGTGR

SEQ ID NO: 4632 - protein, 451 aa, Mycobacterium sp. MCS
MSPETSSEATEQVQDEPATGGKLKRKITGPLLFLFILGDVLGAGIYALMGVLAQDVGGVLWAPLLVALLLALLTAGSYAELVTKYPRAGGAAVFAERAFKRPVVSFLVGFSMLAAGVTSAAGLALAFAGDYLSTFIDVPAIPAAMVFLGLVAALNARGINESVKSNVVMTVIELSGLLIVIVAVAMMVGGGRGEVGRVVEFPDGATPALAILAGAIVAYYSFVGFETSANVAEEIRNPSKVYPTALFGALITAGVVYALVGVASAVALPADQLSESSGPLLDVVSAAGVGVPDWLFSAIALVAVANGALLTMIMSSRLTYGMAEHGLLPSVLSRVLPQRRTPWVAIVATTVVAMCLTLVGELSTLAETVVLLLLFVFISTNVAVLVLRRDHVGHDHFRVWTAVPVLGVASCVLLMTQQTAKVWAFAAIMLAVGAVLYGLARIATKRQRTAV

SEQ ID NO: 4633 - protein, 326 aa, Mycobacterium sp. MCS
MTTEGGHVQYVQSETGVLGQVDAQAVPRYAGIATFARLPQRHEVGDYDIAVVGVPFDSGVTYRPGARFGPSAIRQASRLLKPYHPALDVSPFAAAQVVDAGDIAANPFDIATAVDEIRAGVLGLLTRPEQRVVLLGGDHTIALPALQAVNEVHGPVALVHFDAHLDTWDTYFGAPCTHGTPFRRASEQGLLVKDRSAHVGIRGSLYDRADLLEDAELGFTVVHCRDIDRIGVDGVIERVLDRVGDHPVYVSIDIDVLDPAFAPGTGTPEIGGMTSRELVAVLRAMRGCNIVAADIVEVAPAYDQAEVTAVAGANLAYELITLMADR

SEQ ID NO: 4634 - protein, 367 aa, Mycobacterium sp. MCS
MFNWFSLDIIYYPVSAIMWVWYKAFAFLLGPDNFFAWALSVMFLVFTLRAILYKPFVRQIRTTRQMQELQPQIKALQKKYGKDRQRMALEMQKLQKEHGFNPILGCLPMLAQIPVFLGLYHVLMSFNRTQTGIGRLGLSVEENRSLPNYLFSATDVGHFLDANLFGAPLGATMIQQHGLEAFTEFNRVAVVVVGVPIMLLAGIATHFNSRASVARQTPEAAANPQTALMNKLALYVFPLGVVVGGPFLPLAVIMYWLANNIWTYGQQHYVFGKIEKEEEAKKVEALERRAANAPAPGAKPKRTRKAQEAADAGADAVDGSVTDAAGADEAAGGPAAKASGNGAAKPSGGQAVSRTPKPGARPKKRKR

SEQ ID NO: 4635 - protein, 1055 aa, Arabidopsis lyrata
MSSNTSRSCSTRSRKNSRVSSQVLVDAKLHTNFEESERLFDYSASINLNMPSSSSCEIPSSAVSTYLQKIQRGMLIQPFGCLIVVDEKNLKVIAFSENTQEMLGLTPHTVPSMEQREALSIGTDVKSLFQSPGCSALQKAVDFGEISILNPITLHCRSSSKPFYAILHRIEEGLVIDLEPVSPDEVPVTAAGALRSYKLAAISISRLQALPGGNMLLLCDALVKEVSELTGYDRVMVYKFHEDGHGEVIAECCREDLEPYLGLHYSATDIPQASRFLFMRNKVRMICDCSAVPVKVVQDKSLSQPISLSGSTLRAPHGCHAQYMSNMGSVASLVMSVTINGSDSDEMNRDLQTGRHLWGLVVCHHASPRFLPFPLRYACEFLTQVFGVQVNKEAESAVLLKEKRILQTQSVLCDMLFRNAPIGIVTQSPNIMDLVKCDGAALYYREKLWSLGVTPTETQIRDLIDWVLKSHGGNTGFTTESLMESGYPDASVLGESICGMAAVYITDKDFLFWFRSGTAKQIQWGGARHDPNDRDGKRMHPRSSFKAFMEIVRWKSMPWDDMEMDAINSLQLIIKGSLQDEHSKTVVNVPFVDNRVQKVDELCVIVNEMVRLIDTAAVPIFAVDASGVINGWNSKAAEVSGLAIEQAIGKPVSDLVEDDSAETVKNMLALALEGSEERGAAIRIRAFGPKRKSSPIELVVNTCCSRDRTNNVLGVCFIGQDVTGQKTLIENYSRVQGDYARIMWSPSTLIPPIFMTNENGLCSEWNNAMQKLSGIKREEVVNKLILGEVFTSDDYGCRLKDHDTLTKLRIGFNAVISGQKNIEKLLFGFYHRDGSFIEALLSANKRTDIEGKVTGVLCFLQVPSPELQYALQVQQVSEQVIACAFNKLAYLRQEVKNPEQAISFLQDLLHSSGLSEDQKKLLRTSVLCREQLAKVIRDSDIDGIEEGYVELDCSEFNLEESLEAVVKQVMELSIERKVQIICDYPQEVLSMRLYGDNLRLQQILSETLLSSIRFTPALKGLCVSFKVIARIEAIGKRMKRVELEFRIIHPAPGLP

SEQ ID NO: 4636 - protein, 422 aa, Rubrobacter xylanophilus DSM 9941
MERRHRQRERPLGIVVQKYGGSSVATAEHIKAVAGKIQRARKAGLDLVVVASAMGKTTDRLLRLAGEVSSDPSPREIDQLLATGEEQSVALLAMALHDRGVPAVSLTGPQAGMRATGRYGSGVISEIRPGRIRRLLGEGRVVIVAGFQGMNALGDVMTLGRGGSDTTAVALAAALGADRCEIYTDVDGVYTADPRIVPGARRIPVISYAEMSEMAWRGAKVMHPRAVELGALYGVEIHVLSSFDEESPGTIITGGEKVEHLETRETVAGIVHDTDVARITLNGVRTGPGTLSKVFTPLAERGISVDVIVESGIKEGVADIAFTVSRADFAEARSAAGEVARALGGSVEGEEGLAKVSVVGTGMLNRPGYAARMFSALGSEGIPIRMVSTSEIQVTCVIPAERVQEAVRRLHRDFELEEREDV

SEQ ID NO: 4637 - protein, 385 aa, Rubrobacter xylanophilus DSM 9941
MEIYLDYNATTPLDERVLEAMLPYLRERFGNPASAAHPFGWEAQAATELAREELAGAIGASPEEILFTSGATESDNWALKGLLRPGDHLVTAATEHEAVLEAARSLSRAGVRVTVLPVDGRGVVRPEALREALSPETRLVSVMLANNETGTLNPVRELAEVAHERGVPLHTDAAQALGKVPVDVGRLGVDLMSLSAHKCYGPKGVGALYVRRRPHPGVRRVRPLPLLDGGGQERGLRSGTLNVPGIVGFGRAAALAAEALPEEARRISSLREALFEGLRAGVPGLRLNGHPDLRLPNTLNVSFPGVEVGELLGAVPEVAASAGSACASLRAGPSHVLEAMGAVREDWAAVRFSLGRFTTREEVERAAELVVRAWRGLAVSGAPNP

SEQ ID NO: 4638 - protein, 250 aa, Rubrobacter xylanophilus DSM 9941
MLKIENLHAEVEGKEILKGLTLEVGRGEIHAIMGPNGSGKSTLANVLMGHPRYEVTEGSVTFEGEDVLELEPDERAKLGMFLAFQYPSEVPGVSVANFLRTAVNSVREQEVPPMEMYKLLQEKMRLMDMDPSFAERYLNEGFSGGEKKRNEILQLLVLQPKLAILDETDSGLDIDALQVVARGVNQMRGPEFSAVVITHYQRILRYIEPDFVHVMLDGRIVTSGGKELAEELESKGYDWVRQEFGAGTQS

SEQ ID NO: 4639 - protein, 67 aa, Rubrobacter xylanophilus DSM 9941
MAQGTVKWFSDEKGYGFISPDDGSEDLFVHYTGIEGTGFKTLEEGARVSYETTRGRKGMQAVKVSRI

SEQ ID NO: 4640 - protein, 611 aa, Rubrobacter xylanophilus DSM 9941
MGKTWRKRLRLGLGWLAGDMREGGGPVAAAPAMPLREILRRFWPHARPYRRWLVPLLLLAALGPAVETATIWMYKVLVDGVLIPGEFGLLPWVVLAYLGLTLLDGAISFLDGYLSEWVGGRFILRLRTGLFRHLQTLSLDFFDRRKLGDTVARISDDVEEIEELLLSGAVSAVTYAFQLLFFVGALFYLEWRLALVSLLVAPLFWLVARRFSRRIKRAAREERRKAGSIGAVAEESLSNAALVQAYNRQEHEVARFHRENEEGFAAQMVAARLSALFSPLVNLIELLGALTVVSFGAYLLSRGALTVGGLLAFLVYLGMLYRPIRGFSRLANSFFSAAAAAERVAELLQMRPAVRGGALEPGRLRGEVRFREVTFRYPGAAEPALRGVSFEARPGEVVALAGPSGAGKSTVVRLLLRFYDPEGGSISIDGYELRELSLRALRENVAVVLQEAMIFDGTVRENIAYGRPGATEREIREAARAADAHEFIERLPQGYDTVVGQKGRLLSGGQRQRIAIARAMLRDAPVLVLDEPAAGLDAGSQERIMKPLRRLMAGRTTIVISHDLLAVREATRIVVLEGGRVAGSGTHAELLERGGLYAGLFRRQSPERGAV

SEQ ID NO: 4641 - protein, 513 aa, Rubrobacter xylanophilus DSM 9941
MELQVRFPLGASGPLGCASEIAARHPSYRVEGGGDGARVSVRLELPGDWRLLDDFSTLLRGEEVSYAADGTPVPGEELLRGLRCFLRKQRSGKTAREWCTPASLGDRQLFPCRQIRVYDNDHLTPNSWYAFGSVGGDGAFRVDKEALTERVLEDLGPCVRCPLLDLEAVAETVAALPDRIDPAREAGWRYREGGGGWKVTKAGAAGPSPEEAAAEESRREGLLERLARSVRGGGVPVVGGPVGSRNVPDTGYGDVGGMDETIALVREAVELPITHPEIFQRLGIRPHKGILFHGPPGTGKTLLARAVARESGAHFIAVSGPEILNKYWGQSEARLRGIFAEARAKAPSIILFDEIDSFASARDAMSESFEATLVSQLLSLMDGLNSLGRVCVIATTNRPEALDPALRRPGRFDHEIEIGLPDAGARLHILQIHTRRMPTDPDLDLEQIARLTGGYSGADLEALCREAALACMRRTLNLRDFERRITPRQLAALSVTTYDFRTAMKRVGASIRR

SEQ ID NO: 4642 - protein, 67 aa, Rubrobacter xylanophilus DSM 9941
MAQGTVKWFSDEKGYGFISPDDGSEDLFVHYTGIAGEGFKTLEEGARVSYEATRGRKGMQAENVSPL

SEQ ID NO: 4643 - protein, 234 aa, Rubrobacter xylanophilus DSM 9941
MARVLIVEDDPAVRDVVEHTLSREGIETETVPDGETALELLSDSKPFDLVLLDVMLPGMDGISVCRELRESHSPHRTVPVVMLTARDDETSIVVGLEVGADDYITKPFSPRQLASRVRAQLRRQRMNAQASPEQRKLEFPGLEIDLLRRRVTARGEQVELTAREFEVLALLASNPGRVYSREQIMDHLWGGEFFGEPRSADVHIQHLRQKIEPDPKNPRYIQTVRGMGYRFAEL

SEQ ID NO: 4644 - protein, 294 aa, Rubrobacter xylanophilus DSM 9941
MNGNVSVAVLGTGIMGSAMARNLLKAGMEVRVWNRTRSRAEPLAAEGARVADSPREAARGAGVLLTMLADAGAVAGAVGGGALEALSPGAVWLQMSTVGVEGTGRLQRMALERGVAYVDAPVLGTRQPAEAGELVVLASGPEEVRPACEPVFEAVGKKTLWVGPVGAGTRLKLVVNNWITGLLGVLGETFALAQKLGVDPSLFFEAVEGGPLDLPYARAKGKMMAEGEYPTSFSVRLARKDAGLVLEAAEDLRLPVCEAVAYHLDRAAETGHAEDDMAAIYEGVRTAAEPGGAG

SEQ ID NO: 4645 - protein, 327 aa, Rubrobacter xylanophilus DSM 9941
MPRRVVVTRRIPRAGLEALGDLRASVLGEGPPAREELLSAARGASGILSTVTERIDAEVMDAAGPSLRVVANMAVGYDNVDVAAASARGVVVTNTPGVLDETTADTAFMLLMAAARRLGEAERLVRSGRWEGWGPEQLTGPDVWGKTLGIVGFGRIGRAVARRATGFGMRILYASRSRKEEAERELGARRVSLEELLRESDFVSLHTPLTPETRHLIGERELSLMKPAAVLVNTARGPVVDEAALAAALARRRIFAAGLDVYEREPEVHPALLGLENAVLAPHIGSASIETRARMAALAAENLRAVLSGRRPPSPVNPEVLERLPLD

SEQ ID NO: 4646 - protein, 501 aa, Rubrobacter xylanophilus DSM 9941
MSRPAVDVVVPTAGRPSLRALLEALARQPPPGRLLLVDDRRNPGGPLLPEGPPAGLAGRVEVLRGPARGPAAARNAGWRASGAGWVAFLDDDVVPEPGWTRDLLRDLSGLGPRVAASQGQLRVPLPAGRRPTDAERGVKGLETARWITANIAYRREVLERLGGFDERFPRAYREDVELGLRAVRSGLRIVGGERTVLHPARPAGPLESVRRQAGNADDALMLLLHGRAWRREAGVPPGRRPRHLLVTAAGAAALAALAAGRRRDAALGALLWLLGTTEFAASRILPGPRTLPEVSSLLLSSALIPPAASACFALGLLRARRLAPGGARRLPEAVLFDRDGTLVHDVPYNGDPEKVVPVPGARRALRRLRAAGVPAGVISNQSGVGRGLISAEQVARVNRRVEELLGPFGAWALCCHRPEDGCGCRKPAPGLVLRAAAQLGADPRRCVVIGDIGADVEAARAAGARGILVPTPATRPEEVEAAPEVAPDLESAVELALGGGA

SEQ ID NO: 4647 - protein, 525 aa, Rubrobacter xylanophilus DSM 9941
MLGKLRASSVDPGVFYVSVAVAAAFVVWGVFFTESLSAAASAALGYVISNFGWVFVLSTFGFLVFVLFLAFSRYGRIRLGREGEEPEFSTPSWVAMMFSVGMGIGLMFYGVAEPISHLTAPPHGLAEPGSEEAARLAMQYSYFHWALHPWAIYAVVGLSLAYFVFRKGRSNLISTAFYPLLGDRVEGVPGKAIDVLAIFATLFGTATSLGLGALQINGGLSYLWGVPTGTGVAIAIIAVLTVAFVVSAVTGVHNGIQWLSNTNMVLAALLLLFVLVVGPTVFILNTFTESIGDYFSRLVPMSFQTAAFGDADWLAGWTIFYWAWWISWTPFVGTFIARISRGRTIREFVLGVLVVPSLVTFVWFAVLGGTALDLQLDGGADIAGAVSESPAAALFATLEQFPLSVPMSLLAVFLVGLFFVSGADAGAVVMGMLSSRGVLEPNRALVALWGILAGAAAAICLLSGGLEGLQQAAIISAAPFVVVMILMCYSLFRELRSETLPGIAPPEHDGAQSLSAPRQRARKEP

SEQ ID NO: 4648 - protein, 636 aa, Rubrobacter xylanophilus DSM 9941
MGKSIGIDLGTTNSCVAVLEGGDPVVIPNAEGERTTPSVVAFDRKSGERLVGQLARRQAVTNPERTVYSIKRFMGRRYNDVKQEAERVGYQVVPGPHGDVRVRLGDKDYSPPEISAMILQKLKRDAEDYLGEEVTDAVITVPAYFEDAQRQATKDAGRIAGLNVKRIINEPTAAALAYGLDKENDQTILVFDLGGGTFDVSILELGDGVFEVKATSGNNHLGGDDFDAKVVEWIVEEFKKAEGIDLSRDKMAMQRLVEAAEKAKKELSSTTSTNINLPFITADANGPKHLDLTLTRAQFNKLTADLVEATAGPVRQAMQDAGLKPGDVDQVILVGGSTRIPAVQEKVKELTGKEPHKGINPDEVVAIGAAIQAGVLAGEVKDVLLLDVTPLSLGIETKGGVFTKLIERNTTIPTRKSEIFTTAEDNQQSVEIKVYQGEREIAAHNKLIGNFQLVGIPPAPRGVPQIEVTFDIDANGILNVGAKDLGTGKEQKITITASSGLSDQEIEQMVRDAEAHAEEDRRKREEAEIRNNADNLVYSVERSLKEVDGKVDSSTREEIEKAIKEAKEALAGDDIEEIKRKQEALMSASHKLSQVLYQQAQEQQQSGSSGGSSDEDVVEDAEIVDEEDEEKRDDNR

SEQ ID NO: 4649 - protein, 527 aa, Rubrobacter xylanophilus DSM 9941
MRVLVTEKLAERGVELLRREFEVDVLLGLSPGELLERIGEYDGLIVRSATKVTAEVIEAAGRLKAIGRAGIGVDNIDIEAATKRGILVANAPESNTVAAAEHTLGLMLAVARRIPAADASLRRGEWNRAAFKGVEVAEKTLGLVGLGHVGSIVARGALGMGMRVLAYDPYVSEERMRSMNVERAGSLEEIFEEADFVSLHVPRTPQTTGMVGEEELARMKPTAYLINVARGGIVDETALYNALKQGEIAGAALDVFAEEPTTDSPLFALPNVVVTPHLGASTAEAQDRAGVTAAEQVAAALRGEVPIHAINAPVPAGEGAEFVSQFAGLCETLGRLLYQLTDRPGSRLKIEYRGEIGAYDTRLLDVSVQKGLLSRMVHEPLNYVNTPILAKERGLKVETSKTSESSDYTNLVVVRIESNGGESVVSGTLTGPRMQPRLVEALGYTLDIVPERHMLFIRNEDVPGMIGKVGTILGEHGINIGNMAVGRGEPGSRAAMAVTVDEPVPPEVVESLLNIPGFNDARAVTLY

SEQ ID NO: 4650 - protein, 234 aa, Rubrobacter xylanophilus DSM 9941
MLRHDTGGFAASSPPEGFDLKDFEEAGLRVVERRFEPKDLIFAPGDPDDQLYFLLSGVVRLYKIYGDYKEATTALLKDRGIFGKLSLVEGRWQDVFAEAVTEARVAAIQKAAIEQVIKTKPDFALKLFSSLSERLRQSDEVIESLLHREVSTRLATLLLNLGERFGREEGGRLVIEVRMTHQDLANMIASTREAVSKVMSEFQREGLIETRNRRIALLNREALAERAAGPTGLV

SEQ ID NO: 4651 - protein, 331 aa, Rubrobacter xylanophilus DSM 9941
MRQNGYLSQAAEKRLMLFSGGGYPELAERIADRLDLELGSVELVQFSNGEVYARYLESVRGSDVFIVQSLCDPVNKNLMELLVMVDAAKRASAESIVAVIPWYAYSRQDRKTKPREPITARLVAEMLKVAGADRIMTMDLHVGQIEGFFSFPVDHLTAMHTFVDHFVDEGFQNAPDTVVVAPDTGEVKMAKRLADHLGLPWAIVNKIRRGPGESEVTHVIGEVSGRRAILIDDIIDGGGTMVGAAEALLSEGATEVYAAATHAVFSGRAYERIEESPIREVVVTDTLPLKPGKPRSKIRTLTIAPILASTIRNVFTDDSVSAVFMGENQLF

SEQ ID NO: 4652 - protein, 551 aa, Rubrobacter xylanophilus DSM 9941
MRFLREGQRLNQVEKWKLERHPLDVREAVLEVYSKEGVEAIERVPGEHERLKWVGIYPQNQGGNNFMQRIKVPGGRLTPEQARVIGRIARDFARGPEPNPHFGNNFLDITTRQDIQMHWIQIEEVPEIWRRLEEVGMTTVQACGDSARNVLCCPVSGLDREEAFDAYPAAQAITAYFVGNREYANLPRKFKMSVTGCLEDCAQAEINDIGMLPARLPDGTLGFNVRVGGGLGDGPRMASDIDVFVLPGEAVEITRGIAQVYGELGNRENRWINRLRYLVQELGPEGFREELEKRVSIPLRPAGEDLTRRYRGDHVGVHPQKESGLYYVGLNVPVGRMSGEQFEEAGRLAGEYGRDIRLATDQNLIITGVPEGRLDDLLSEPLLRRYSPDPGPFERGIVACTGSEFCRFAIVETKIRALEWAREMDRRFGDEIGQEAVRMHFSGCSASCAQPQIADVGFRGETAKKGDRIVEGVDIGLGGSLGRDAAFIDWVEGARPAEDVPEALSRVFERFRRERREGERFHEWARRVRNAELRDTLRGTSVPVVGTREGR

SEQ ID NO: 4653 - protein, 425 aa, Rubrobacter xylanophilus DSM 9941
MSSAEPLVIKFGGTSVGDGEGFARAARITAGAAAEGRPVAAVVSAMSGVTDALLAAAAGTATAGTRTARGLARDLRRALGERHLAAARCAVSGDLLPEVEARVLSLLDRLEEELARRALPEAERRAEIAVCGERLSAEILAGALRAAGAPAAVAADPIATGPGGEEVLSEETRARCTRHVRPLLEEGLVAVVPGYAGRSPDGAVTTLGRGGSDLSATALGRGIGAGEVWIMTDVDGVLDADPRLVPGAATLPRLSYREAGAFAALGAEVLHPRTMEPAAAAGIEVLVRNTFDPHSPGTRISARECGPGLRALALRRGLSVEPLEALDGRSGDVFCLLGADVYGIRALVERPSGSAAAVIGVGSPGDEELAAGLRRLHRAGIRPLWAGNTAAGLAFVVAGSRAEEALRELHAALLRREALAGEAVA

SEQ ID NO: 4654 - protein, 446 aa, Rubrobacter xylanophilus DSM 9941
MDASEARGERAGDHPALRRAVTPLLLLFFIVGDMVGGGIYALVGEVGAITGGAIWSAFLLALVLALFTAFAYAELVSKYPRAGGAASYVHRAFKTPFFTFMVAFAVVMSGVTSASALSIAFGGDYLAEFIAGPTVIIALVFILVVGFVNFYGIRESVTLNAIFTCIELGGLLLIVLIGVVALVSGSGEPSRAFEFREGVSVPLAVLSGAALSFYALIGFEDSVNVAEEVQDPQRSFPRALFGGILLAGIIYLLVTFTAAMVVPVERLAASSGPLLEVVEASPLGVPTWLFALIALFALSNGALINMIMASRLIYGMGDQGVMPSVFARVHPLRRTPWVSIAFTTLIAVGLISTGDIEDLASTTVVLLLLVFVVVNATVLVLRRDRVEHEHFRAPSVFPVLGILVCVGLLTQQEADIWLRALVLLVVGAVLYGVNYLATRYLDRRGA

SEQ ID NO: 4655 - protein, 231 aa, Rubrobacter xylanophilus DSM 9941
MTRGLASHLRSMDPARRALLLRRAASRPLENWREVYESVSPVDLKTGERRPRVPPPGSRPRRAAVLMPVLMDRDGPRLVYTVRRDHLPDHAGQISFPGGGVEPQDGSPEETALREAQEEIALDPSLVEIAGRLEELYIHVSNFLVTPFVGLLPAGTELVLAPDEVEKIFAVPLEELLSPGTFRLAVRDLGGARVGVPVFSAAGHDIWGATAAMTAGLLARLGWEGYRNPAR

SEQ ID NO: 4656 - protein, 232 aa, Rubrobacter xylanophilus DSM 9941
MDVDLTLNEYTRLQEQECKDLLRLFHGMGIATADRVYAPGDAVYREGEYGDGLYILTSGVLKLFRPYSGSKEATLRLLKPWDIFGHLAFAGEARQLAYAEAVTECRVTKVPKVFVERGIRRDPQVAFKLATLLELRLVQYEELVRCLLPRETEVRLANLLPILAQKFGEPSGEGTITIALRLTHQDLAAMVASTRESVTKVLNDMRSRGLIEVRSGRITLKDARALVEIGQV

SEQ ID NO: 4657 - protein, 306 aa, Rubrobacter xylanophilus DSM 9941
MPERPPVAILGVPMDLGQDRRGVDMGPSAIRYARLQPALEELGYRVSDLGNVEVPIPEAASGGDGKAWRLRAVREVCSAVSRRAREAVARGALPVFLGGDHSISIGTVSGVCAAGRTGVLWVDAHADFNTPESSPSGNIHGMPLAALTGRGHPDLVGVGGEGASVRPEDAVLVGLRSVDREERDLLREAGVRVYTMKDIDAYGVAAVVRRALEHLSGLPRLHLSLDLDVVDPEVAPGVGTPVRGGLTYREAHLLMELVNEAGGVSSLDVVEVNPILDSRNRTAELAVELVASLMGRQILELPRRPL

SEQ ID NO: 4658 - protein, 238 aa, Rubrobacter xylanophilus DSM 9941
MRPGRWEERARRLSHVDILEPLPLEEIERLNWRLPVFRLERGELCYAPGDPADRLFLLHEGRVRLYKPVGGREFTLAVVGPGTVFGEMSLTGGVGRQGAYAEALEPAEVSVLGKEDLRRLIREHPEVGIRLITLLSRRLRDREERLAEMAGRDVAGRLAALLARLAEEEGVVTQEGYRIPFRYTHRQLGSMIGANREAVTKALGRLQKSGAVAVSDRRLLVRDLGLLKKLAGYVSEDT

SEQ ID NO: 4659 - protein, 389 aa, Rubrobacter xylanophilus DSM 9941
MTAEKSAVYLDNAATTPLDGRVLEAMLESLEGLRGNPSALHAPGAAAREAVEEAREAVAALVGASPEEIVFTSGGTEADNLAVLGLARAAPPGRRHAVISRVEHPAVREAGRRLEAEGFEVTWLGVDGDGVVDAGAFEAALREDTALAAVMWANNEVGSVQPVEELAAACAERGIPFHADAVQAAGRLPVDVRRVPVSTLALSAHKLYGPQGAGALYVREGVEVSPLILGGGQERGLRSGTENVAAISGFGVAARLAAGELEERARRERELRDRILAGVREMEGVRLNGHPRRRLPNNVHLTVEGVEAEGLVLFLDALGYAVGSGAACSSGGHKASPVLLAMGLGEREAFSSVRITVGKDNTFEEVDGFLTAFRQAVGRLRELSPLQAG

SEQ ID NO: 4660 - protein, 377 aa, Rubrobacter xylanophilus DSM 9941
MRIGVVREVAAGESRVALAPPAVHELCRAGHRVLVESGAGVASGISDADYAAAGARVLEEAGRVYREAELLVKVQGPVPEEHPRLREDLILMAFLSLPVNPALMEALLASRCVAFAMEAIRDGRGRLPVLTPMSEIAGRLVPQIGAHYLQRQSGGRGILLGGATGVLPGRVVILGSGIVGTAAARVASGLGAETVVVDRDLDRLRALEALRLRGVSTLASSRLAIQEAAAGADLLIGAVLVVSSRTPALVDAETVGLMREGSVIVDVDVDYGGCIETSRPTTLEDPTFVERGVIHYCVRNVPAAVPVTSTQALSNALLPHVRRIAALGLTDALNADEGLRQGVAVAEGRVVDPVLARSTGTEYHPISSVLPLHLEAR

SEQ ID NO: 4661 - protein, 301 aa, Rubrobacter xylanophilus DSM 9941
MAREGEGFRSGFVAVVGRPNVGKSTLVNRLVGQKISIISSRPQTTRSPIRGVRNGPGYQAVFVDTPGSQKPRDTLRARMQERVLDSLSESDVVLFMLDASQAKGGVGRGDRFVADLVARSRTPAIAAINKVDLLPRRDDALPIVDEVRGLADWEDVFLISATAGTNIEPLMDAVVRLLPQGPRYFPEGVVTDYPETLILAEYIREKALEVLREEVPHAVAVEIDEVERKGDLTVIYAIIHVERPSQRMIVLGKGGRTIKRIGTEARRDVERLLGTRIYLDLKVKVSPGWRSNRGFLERLGL

SEQ ID NO: 4662 - protein, 411 aa, Rubrobacter xylanophilus DSM 9941
MQFIDEARFVVRGGRGGDGAVSFHREKYRPRGGPDGGRGGDGGSVILRATEDLQTLERYSRRKVISAGRGGHGSGNNRAGERGRDVVLDVPVGTLVYDESGLLADLAEPGQTFVAARGGEGGRGNASFATSRRQAPAFRELGLPGEEREIRLELRVLSDVGLVGLPNAGKSSLLRALSAARPRVGDYPFTTLTPQLGVVEERGYARPFVVADIPGLISGASEGRGLGNRFLRHVARARLLVLVLDASEDPEGAERTLRAELGAAGLSGRPSLVVLNKVDLLDAELRAYLGEAFPGAPQVSARTGEGVGELARLLERRLRELERSAEAAPRPGHRVFRPSWRGLRVERENGAYVVSGREVERLALKTDWDNPEGVEHFQRELERRGVMGALRRAGAGEGDEVRIGDVSFEFR

SEQ ID NO: 4663 - protein, 424 aa, Rubrobacter xylanophilus DSM 9941
MAYERVKEAWIVGAVRTPIGRHGGSLSPVRPDDLGALVLEALMERSGVPPSEVEDVYFGCANQAGEDNRNVARMSLLLAGFPESVGGATVNRLCGSGLEAVAEAARAIMLGEAHVYVGGGVESMSRAPWVVPKPERAYPTGHTTMYDTTLGWRLTNPRMEALGHTDSLGMTAENLVQERFKLTAEEQRPEELADDYDISREKQDRFALRSHQKAVAAQDAKRFRDEIVPVPVKTRKEERLVEADEGPRRDTSLEKLARLKPVFKRGGTVTAGNSSPLNDGAAAVLVVSRDYAEAHGLEPLARIRSIGVAGVPPRVMGIGPVPATQKALERAGVTLDDVGLVELNEAFAAQSLAVLYEWGMDPEDERLNPNGGAIALGHPLGCSGARILTTLVHEMRRREEVELGLATMCIGVGQGIAMVVEKVD

SEQ ID NO: 4664 - protein, 558 aa, Rubrobacter xylanophilus DSM 9941
MAAVVIAAMLVPQGMAYALLAGLPASYGLYASTVPAVVYALFGTSRHMPVGPPALMALLTFTSVSELAEPRTPEYISLALLLALMVGVLQLVIGFLRMGFIVNFISHPVLSGFIYASAVLIALSQLEHMLGTPVSGGHSTVEVVLEHAKRIEEANPWTLAVGLGSLASLVVLGRALPRLPAALVVVAAATLVVYLSGLDDKGVNVVGRVPGGLPGLSLPALDPEAVRTLAPSAAVVAFVGFIESVSVAKAIAAREKYKIDSNQELRALGLANISAAFFSGFPVAGSFSRTAVQYQSGGRTQLASVATALLVLLVLLFLTPLFYYLPSAALAAVILVAVYKLLDFREAWRIFRIRRVDGYALLITFVFTLLVGVEQGIVVGAGFALLAFIRRTAYPRITELGYVPEKDAFLGVESNPGAKTFPEALIARFDARLYYANVPFLEEWLLKRVAERPELKWVFLDCRGVNDIDVTAIEGLEDLLSGYRSRGIEIIFTHMKLPVREQLEKAGWDTKFGGRGRRYCYQTTREAVRAVGLPVAGGASSPERRPWRRSVPGDGRSG

SEQ ID NO: 4665 - protein, 249 aa, Rubrobacter xylanophilus DSM 9941
MRRTTPLNKDHISPARCGPALRLSLLRRVPLFARLDDAQLADVDGVFRERGYAAGERIYSGGDPAGTFYVVAVGKVKLVRPSAQGRDVLLEILGPGDTLGTVPMFGDDVYPDSAEAQTDCCLLAITAADLRTVVERYPPVAHTLLEVLSGQLRSAREAIRQASAGSVESRVAASLLKLADRLGSDRRGETLIQVPLTRQDLADMTGAQVETVSRVMSRWRKEGLIRSGRGWVAVVDRERLAAIAAGTPA

SEQ ID NO: 4666 - protein, 302 aa, Rubrobacter xylanophilus DSM 9941
MLTDDRLLRDGEASESTVEPFLRWAGGKRWLASTLAPIIKSRLRGTYIEPFLGSGAMFFAVAPEKALLSDLNADLVGAFRAVAERPDELLEEVRALPVNAETYYKLRADEPLDPLQRAVRFVYLNRTCYGGIYRENKRGVFNTPYGGGSRTPAPLWERALIERCSPLLRKGGITLEVSDFELSLDAAGEGDVVYCDPAYRAATRAHFDRYGAVVFGWEDQVRLAAAARRAGARGALVIISNTYCPEVRELYGDVTRILLEKTKAIGNAAKDPNRCKEYLIVLDPEDDEGSARAWETVGRIER

SEQ ID NO: 4667 - protein, 501 aa, Rubrobacter xylanophilus DSM 9941
MGIMRTKSIEQSIRDTDHPDFRLRKALGALDLTLFGIGVIIGTGIFVLTGVAAATNAGPAIALSFVVAGVACALAALCYAEFASTVPVAGSAYTFSYAALGEFLAWIIGWDLVLEFIVGASAVSVGWSGYFNSVLQSFFGITLPESLLAAPGDGGVVNLPAVGIVVLLVIVLVLGITLSSRVNQVITTIKLLVVLFFIVYGIWFVNPENWSPFLPPREPAPAGEGFSFSQTTLWELLFGSAGSFGFTGMITGASIVFFAYIGFDIVATTAEETRNPQRDLPIGILGSLAICTVLYVLVSLIMTGLVPYQQLNTASPMATALSRLGLDWAAGLVSIGAICGLTTVTMILMLGQSRVAFAMSRDRLLPPWFAKVHPRFRTPYRITITTGVVVALLAGFVPLGTLAELVNIGTLFAFVLVSIGVIVLRRTRPDLHRAFRTPLVPVVPILAALVCIYLMLNLAVGTWIRFLVWMAIGLVLYFVYSMHHSRLAVGEDIEEVAEEAR

SEQ ID NO: 4668 - protein, 478 aa, Rubrobacter xylanophilus DSM 9941
MLRKTFVLAAASALLTLALPALGLAQEEAPPGNRELSLALDTVWVLVAAVLVLFMQAGFAMLEVGFSRMKNVGSVVAKILANLAIAAVLFWAVGFAVAFGTGNALFGTQGWFLAVPEGAVDEVYAGLAWTQVPLSAKFLFQVAFCAVSLAIVWGTMLERTKFAVYLVFAVVFAGIIYPMVGHWVWGGGWLTELGMQDFAGSTVVHLSGAMAALAGTLLLGPRLGKYDDEGRPVTIPGHNMPLAVLGVLILWIGWYGFNPGSTMAATPQIADIALTTTLAAACGVLGAMAMSYLYRRHVDVGMAGNGAIAALVAITAPCAFVAPWASAIIGFVAGVIMYATLLFVDRIGVDDPLGAIAAHGMGGVWGTLSAGLFTTPELAAVGRPGLLYGGGLYQLGVQALGILAAGGFVFLASLLVFAALKATIGLRVKPEQELNGLDVSEHGVYGYAGFPEHLIATDHPVNGNGGGAPRNAPAEGAA

SEQ ID NO: 4669 - protein, 385 aa, Rubrobacter xylanophilus DSM 9941
MLRRYALPASLIAAALVLPFVDRALGTDFLFTAIVVAVFVLLALGLNIVVGFAGLLDLGFVAFYALGAYVCGWLASTHFRQVSFSLGSTARSLTGEPLPGIHISFWLILIIAAAFTALCGVIIGAPTLRLRGDYLAIVTLGFGEIIPRFFLNGDNLFGFNLTNGTIGIKAIDAPGIPFVPFESWQRFSQLDLSPWYYTILALVLLTVFVNVRLQNSRLGRAWISVREDETAAAAMGINPVTTKLWAYALGAVFGGIAGAFYGAFIKNIFPTSFSFSISILILCMVILGGMGNIYGVILGAIVLQAINRYLLPQLNDLVHALGDALGSEALSQADIPKYNFLLFGLLLVLVMLLRPEGLIPNRQRAEELHDEDPSTGDAMGGPARA

SEQ ID NO: 4670 - protein, 392 aa, Rubrobacter xylanophilus DSM 9941
MKEAVIVSGARTAVGRAPRGTLRGMHPVDLAAAAIGEAVRRAEGLESEEIEDVILGCAMPEGTQGYNIARLASLRAGLPESVPAQTVNRFCSSGLQTIAIAAERIMVGHATAVLAGGVEHMSSTLEFPTFAPNPALVETNPAVYMGMGFTAEEVARRYKVSREDQDEFALRSHTLAKRAVESGLFDEEIVPLDVEYDYLDEEGNPQRFKTVFRRDEGPRDTSMEALAKLKPAFQQGGTVTAGNASQRSDGAAAVVVMEREEAERRGLEPLARFVGFALGGVPPEIMGIGPAVAIPRALEQAGLRLEDIDLIEFNEAFAAQALAVIREVGLDLERTNVNGGAIALGHPMGATGTKLTVQLIHEMKRRGSRYGMVTMCIGGGMGAAGIFENLQG

SEQ ID NO: 4671 - protein, 234 aa, Rubrobacter xylanophilus DSM 9941
MASPLEEAVRLLSRVYVLEPLSRDELEELARRAPGTRVGRGEVFLAAQEEPGEKLFILKEGRVRVYTVDTEGRELTLSVVGGGDIIREVALTDRRLPEVYMRAMEPSVVCSLRRKDLERIILRRPEVGVRLVGLLSERLRLAEIRLAELAYKDVRARLASLILRLIESEGVVTGEGYKVPTRYTHQQLATMIGAGRVAVSRAFARLREEGVVKLRERRIVVADLKALRRIAGNG

SEQ ID NO: 4672 - protein, 379 aa, Rubrobacter xylanophilus DSM 9941
MPAVRKVLVVGGGIGGLSAAIALRKRGVEVDVVEVNPKWDVYGVGIIQPANQIRALAAIGLGERCVQEGYPFEGSRFFDSQGNLLADVPFERIAGPEYPPMNGITRPRLHRILQEAVKESKAGVRTGLTVSALEQRDDGVEVEFTDDTSGRYDLVIGADGLYSLIRSLVFDPDLEPEFSGQVVWRYNVPRLPEVDRICVFQGMKRKAGFVPLAPDLMYILLIEKPPSDSPPGKKLPEDRLAEIFRERLAEFGGPVAEVRDRYITDSSKVVYRPVETLLVPPPWYRGRVVLVGDAAHATSPHIGQGASMAIEDAVVLAEELEKDVPVHEALEAFMRRRYERCKYVIDVSARIGRGEMDPSLGIDAAALTGQSAVVLAEPI

SEQ ID NO: 4673 - protein, 402 aa, Rubrobacter xylanophilus DSM 9941
MSFGNGNGREVVISTPLRTAIGTFGGSLRDVPATELGATVGREVISRSGVDPERVDQVVVGNILSAGQGMNPARQVGIKSGLPVEAPAMTLNRMCGSGLQAIVSAAQEIALGDAEVVMAGGIENMDQAPFLLPKGRYGYRMGMPKADLLDHMVYDGLWDIFNDYHMGMTAENVAERYGVSREDSDAYAVRSHQRAARAIAEGYFDEQIVPVEVRQKKETVKFTRDEHVRENATLEGLARLKPVFKRDGGTVTAGNASGINDGAAMMLVSSARKAEELGLPVAGRLVSAAVAGVDPAIMGVGMVPASRAALKKAGLSIEDMDVVEANEAFASIAVTVGRELKVPEEKLNPLGGAVALGHPIGATGAILTVKILHELARTGGRYGLVTLCIGGGMGIAAIFERV

SEQ ID NO: 4674 - protein, 483 aa, Rubrobacter xylanophilus DSM 9941
MENSAPRAAQQENRLTLLKVLSPIHIWALGVGIVLVGEFMGWNFTVEKGGMYGSLIAAWVIGILYTSLVMINSEITSTIPAAGGQYAQAKHTIGPLMAFNVGLYLTLAYTMLEAANANVLSYLLTELSTLLGSTEGLSAYPFATLAIMVLAWLNYRGVFASLSVNFIITAFAFITIIALFIGVQGWSPGTNLFHAGLTGKVENGLPYGWIGAIAALQFGMWYYLGIEGTSQAAEECRSASRSIPLGSMAGIITLVIAATLTWFVATGLLPWQYLGTAITPLFDAAVVTGNGVLIILLLLGTLAATLASANGCINDAARAWFSMGRDRYLPAWFGAVHPRYRTPFRAIVFLVPVAIAFAILPVLLNDDTLLSTVITFSILSGLLGYMFMVPNFFRFRRLWPIGSIRRGYIVPFHPLPAIALGMLSILVLFATFLGYGTSLLSILVFYFLASIWFVIRRYKYVKRGAQFTASLPRPKGYENGDAQ

SEQ ID NO: 4675 - protein, 391 aa, Rubrobacter xylanophilus DSM 9941
MERAVILGAARTPFGRFGGALAPLSAPELGGAAIREAVDRSGVEDGEIGHSVFGIVVQAGVGQIPSRQANRHAGLPFGLTTETLNQVCASGMRSVTLAETMIRAGDYEVVLAGGMESMSNCPYLLPKARWGARMGDFAAVDSMVHDGLLDAFERVNMVRFGTEGARRWGISREEQDRWALRSHRRAAAATDEGRLAEEIVGIKVPGGKGRAEFVERDEPIRRDTSLEKLAALPPLDEGGTVTAGNAPGVTDGAAALVVAGEGFARRRNLEPLGTIVAHAKVAEEPPNLPTVPGNAGLLALQKAGWRAEDLDLVEINEAFAVVAIHSARMLGVDEEIVNVNGGALALGHPIGASGARILMTLLYELRRRGGGRGLAAICSGGGQGDAVLVEV

SEQ ID NO: 4676 - protein, 389 aa, Rubrobacter xylanophilus DSM 9941
MAEAAAERGATEAPVRRLLVVDDDPVSNRLMQRRLERLGYEVFSAADGREALESLPDLRPDVLLLDVSMPGVGGLDVLEHVRESGLDAAVIMMTAYGTEEVAVESLRRGADDYLRKPLQQAEFEAVLERTVERLRLERQNRALRRQLDEKRRQLEAELSRAARVQAELLPVGTPEVPGFELAARCIPAREIGGDFYGWMRPDPQTLALTLGDVMGKGMPAALLMATARAVLRALSRQNPPERAVNLAARALEEDLMRSGSFVTLFHAQLDIPSGSLSYVDAGHGHAFVRRAGGSVEHLLEGGVPVGTIPGHAYREGRLRLEPGDTLVAYSDGLAEARPGSLMAVGEIAGSLSGASGAREMLERLVGLAGAGESLSDDLTVLVLHRAGEG

SEQ ID NO: 4677 - protein, 393 aa, Rubrobacter xylanophilus DSM 9941
MRLAGRMRRLGTESAFAVLARARELEAQGRDIIHLEIGEPDFDTPPHIVEAGCRALREGHTHYTPAAGIPELREAIAEEVSRSRGVPVHPSQVVVTPGGKPVMFFAILVLVEPGDEVLLPNPAFPIYESMVNFVGGRPVFVPLRQENGFRFDPEEFGERLGPKTRLVILNSPANPTGGVLTPEDTRALAEILRERPDVYVLSDEIYSRLVYPEASFASIASEPGLGPDGRTIILDGFSKTYAMTGWRLGYGVMPRRLAGEFAKLQVNSSSCANAAAQRAGLAALEGPQEPVEEMVREFGARRDMIVAGLNELPGVECRTPHGAFYAFPRVTGTGRSAGELARLLLEEAGVACLSGDGFGRYGEGHLRFSYANSRENISRALERVAKTLAGAAR

SEQ ID NO: 4678 - protein, 423 aa, Rubrobacter xylanophilus DSM 9941
MRASPTGAAHRDGRRERSSRGVTMNAMKKVLVIGGGIAGPVAAVALRRAGIEATVYEARVEPRDHEGFFLNLASNGLRVLKALGIDVAERADGFPAPRMVMWSGTGKRLGEVANGLRLPDGTASTIVRRGALRRALREEAERRGVEVAFGKRLVSYEAFPGGVVARFEDGAEAGGDLLVGADGIHSRVRTAMDPAAPRPSYTGLISVGGYARLPGLAPTPETQHFVFGRRAFFGYLVREGGEVWWFANLSRPGEPSRAELSGVPAEEWRRRLLEVFSGDMDLIGEIIRATRGEIGAYPVHDIPTAPVWHAGPAVLVGDAVHATSPNSGQGASLAVEDALVLARCLRDLPEPERAFAAYERLRRERVERVVAYSRRIGQSKAVGNPLARWLRDAILPFALKRFASPDAHAWLYDYRVDWDERVA

SEQ ID NO: 4679 - protein, 618 aa, Rubrobacter xylanophilus DSM 9941
MRYPNRVRKRWIALRSGLGHAGEVLSGFAPFFAPRRRGLALALAVLLAETASSLAQPWPLALAIDYVIGDKEPPAALPGSLAGEDAMLAGVALLVVLVFTATRAASAFRRYLLQRLGQETVFDLREALYAKVHELGLDYHGRRRTGDTITRVTSDVREVRTLLVDSVVEVASSLMVLAGMLAVMLWLDAGLTLLALLTVPFLFAAVVRYRSALIERMRVVRAREGAIASVAQEAITGIRAVKIFGREEEERGRFREESEASLRASVDAALIEARFGTVLGLAGGAGTALVVYFGVRQVLAGEMSVGDLTVFVSYLGLFLSPLWALSRQANQIGKSLVSGERIAELLRAEPAVRDAPDARPAPRLAGRVAFEEVRFSYDERAGEVLRGMSFEVEPGSRVALVGASGAGKSTVASLIARLYDPQGGRVLVDGRDIRRFTLASLRAQISFVPQEPMLFRGTVAENIAYGRPGVRREEVERAARLAGADGFIRRLPRGYDTVIGERGESLSGGQRQRVSIARAMLRESPILILDEPQAGLDAGSAAAVRESWRALSEGRTTFVISHELRLARDVDRILVIEDGRVAESGTHEELLALGGSYARLYALQERGTSPGTTGRRKR

SEQ ID NO: 4680 - protein, 250 aa, Rubrobacter xylanophilus DSM 9941
MYGENAPPSWAQLPGARCRAVQHLTKLEGLQEFELLSGLDEGFFQALALAAEVLEIGAGTPLYREGEPSGAVYFVREGRVKLFRSFSGRKPRDQILGVLGDGAVLGLDAALEGRPQSHGATALTDCALYAVFRDDLTGIMCRFPEASLRLSRALASRIRELEDLVSDLVFHSAPQRVARMLLRLATEEGRVTKQGVVFEPSLSRQEMAEATGISREALSRALSRLAQEGILDLEGRTITILKPAELRART

SEQ ID NO: 4681 - protein, 583 aa, Rubrobacter xylanophilus DSM 9941
MARMGVMDAVVKVLEDEGVEVAFGVPGAAILPLYKALSKSRRIRHYSVRHEEGGTHAADGYARVTGRVGVNIGTSGPAGTNMITGLYTAMADSIPMVCITGQAPTGVLHKEAFQAVDIVEIARPVTKWAVQVKEPAQLVWTFREAFRIAREGRPGPVLVDLPLDVQRSPLEVDFDPRRDGPLPFERPAPGSGAIREALAMILAAERPILMPGGGVILAGASEELVELAEYLQVPVSPTYMGKGAIPEDHPLYMGTVGIQTSQRYANALFLESDLVVGIGNRWAERHTGDLDVYRGNRKFVHIDIDPRQIGRVFPPDLGIVSDAKLALRALLEAAWATTPPREPGPWVRRVEELRSTLLRRDDFDSAPVKPQRVFRELNEFFDEDTIFVTAIGLYQIFSGQFQKTYRPRHYLCCGQAGPLGWEVPACLGAKLGRPEKLVVGVVGDYSFQFLMEEVAVAAQYRVPYVLVMINNAYMGLIRQGELPYGMNFAVDLGYSGPESEYGIDHVGIMEAMGALGRRVRRPEEIRDALRWAVRASEERRVPALVEVMVERETNAAMGPSIDKIREYEPVLDRLPAAQAAEGS

SEQ ID NO: 4682 - protein, 409 aa, Rubrobacter xylanophilus DSM 9941
MLGGKKVVLAYSGGLDTSVCLKWFEEQGAEPYALYLDLGQGEPAEDVREKALRIGAREVFVWDAREEFARDYVAPAIKANALYGGRYPLFTALGRPLIAKKLVEAARRVGATHIAHGSTGKGNDQVRFDVTTGSLAPDLTVVAPVRDWNMNRPEEIEYARKHGIPVPVTKESPYSVDQNLWGRSIEAGPLEDPEHEPTPDVFELTAEPEEAPDEPRYVEIGFERGLPTSLDGEKLPLVELIDRLNAIAGEHGVGRVDMIEDRLVGIKSREIYEAPAALVIIQAHRELESLTLTKDVLRFKPAVEQRFAELTYDGLWFTPLKSALDAFVEETQRTVTGSVRLKLYKGSSTVAGRSAPRALYSKDLATYDPESTFDESAAAGFIALWGLPARRWATVNPDPSQAPQPASRR

SEQ ID NO: 4683 - protein, 317 aa, Rubrobacter xylanophilus DSM 9941
MTRYEPEDSFVTPRFSGVRTFMRLPHNRDLDNADAAVVGAPFDTGATFRVGARFGPEAIRSVSHLLRRHNPSLGVTLFDHLSVIDYGDVPVVPGYIEESYARIEEGLAPLHEAGVFPVVLGGDHSIALPELRAAARAHGPLALVQFDSHPDTWDAYFGMRHTHGTPFRRAVEEGLLDPSRSVQVGMRGSIYDERDWDDAREMGFDLVPTDEVRELGIPAVIERIRERVGEAKAYVSFDVDFVDPAYAPGTGTPEIGGFTSREAQELVRGLAGLEIVGCDVVEVAPAYDSPGQITALLAANIAHELLSLHALRKKSLG

SEQ ID NO: 4684 - protein, 374 aa, Rubrobacter xylanophilus DSM 9941
MPAVVGVPKEVKDKEGRVSLQPDGVVELVHHGHEVVVQSGAGRISGFSDEEYERAGARVVGSAREVFEAAELIVKVKEPIPEEYELYREGQQLFTYLHLAADRRLTEFLLRKRINSIAYETVELEDGSLPLLAPMSEVAGRMSVQAAAHCLESPQGGAGLLLGGVPGTPAAKVTIIGGGVVGTEAAKIAVGMRAIVRVMDINPKRLAYLSDIFGGRLDLVLPNRARTAAYVRESDVVIGAVLVPGAKAPKLVSREMVASMRPGSVIVDVAIDQGGCVETARPTTHSDPTYVEEGVIHYCVANIPGAVARTSTLALTSATLPYLLRIADRGIEGAAREDPALMRGLSTLGGALVSRPVAEAHGLPCTEPEEALGL

SEQ ID NO: 4685 - protein, 473 aa, Rubrobacter xylanophilus DSM 9941
MSELLRKKDIPTLQREAAGDTGLKRTLGVWSLTFIGLGGIIGVGVFVLTGVVAANQAGPAVALSFVVAGIASAAAALCYAEFAGMIPVSGSAYTYGYAVLGEFFAWVIGWDLLIEYTLVVAVVAIGISGYINELLSGLGVGVPEWAASAPGGGDGGVVNLFAVLLCLFIAGLQIRGIRESANFNNAMVVLKLAIIAVIIALGAFFVDPANLTPFFPYGIGGVFTGAAVVFFAVFGYDTLTTAAEEATDPQRDLPRAVILSLAIALVLYVLMSLVVTGMVPYRQLDTPAPVAVAFQEAGLPWVARVISVAAIAGIISVLFAFMLGAARVWFAMSRDGLLPRWFCRLHPAYRTPYRPTAILGVATALVAGFFPITAVAELVNIGVLSAFIIVCASVWVLRHTRPDLPRAFRTPLVPLVPILGMAFSAVLIASLPPATWLRFVAWMAVGLVIYFLYSRRRSLLARGELGIERDLVE

SEQ ID NO: 4686 - protein, 431 aa, Rubrobacter xylanophilus DSM 9941
MVFVRIGVPREVAEGERRVGLVPETVSRLVGEGFEVLVETGAGWDYNLDEHYEEAGARVVGSAGEVYGEAEIVVKVAKPAEEEVGMLREGQVLICFLNGPQEPGLVERLAKRGVTVFSNEAIPRTSAAQSMDALSSMGSIAGYKSALIAANTLGKYVPMLSTAAGTTKAANVLVLGVAVAGLQAIAIMHRLGANVFAYDIRPETKEQARSLGATFIDSEDERREEEEDGWEEYEPTGWRRLMVSLGFYSFAEPPRDEYVVEGEEEEEAGGEEPEQWSREKLEADQRLVRERIKEMDIVITTALAPGRRAPKLVDREMVESMRAGSVIVDLAAEQGGNCELTRAGETVKHAGVAIVGPINLPSTMPIHASQLYARNMYNIIRHITSGGEEEGIRLELDFEDEIVSKMCIAHGGEIRDRLTREALEESRSGGG

SEQ ID NO: 4687 - protein, 484 aa, Rubrobacter xylanophilus DSM 9941
MAHSGGVVIVSNRAPVTFSRSGSGERTHSRGAGGLVTALNAVSRRAEGAVWIASAASDEDVRVARESEGPCEVDDLRLVLVEHDAGAYDLMYNRLANPLLWFVQHGLYDLPYAPELGEETLRAWEEGYLPVNRSFARAAAEAISGAEEPVVLLHDYHLYMVPELLREEVGEGPLISFFVHIPWPEPDLWRVLPSYIREGALRSLLRSDIVAFHTRRYARNFMAAASEILGAEADPARGTLRRGGREVWVRSYPISIDPAEFEEVAESPEVRREEEYVRNLPGALLVRVDRTDLSKNIVRGFRAYGRMLELHPEMRGRVTFFAQLQPSRGDIPEYAAYAEAIRRSAEEVNEAHGTPSWRPVELSMQDNFPRSVAAYKNYDALLVNAVRDGMNLVAKEAAVVNRRDGALILSENAGAHEELGEHALTVNPFDLDDQAAAIHRALTMPPEERARRARALRETVLSNTIEDWAAAQMRDIAARRAASS

SEQ ID NO: 4688 - protein, 564 aa, Rubrobacter xylanophilus DSM 9941
MENIAYKVEYKPRTGSEAMCEALLDEGVEYLFGYPGGAIMPFYDALPDYPLRHVLVRHEQAAAHAADGYARATGRVGVCVATSGPGATNLVTGLATAQMDSVPVVAITGQVGRGAMGKDSFQETNVMGMTLPFTKHSFLVEDPEELYETMRRAFAIARSGRPGPVLVDVPKDVQFAECGGDGYRALREAPPPVSSPALEAAALLLKKARRPIIVAGHGVILSGAERELIALAERTGAPVVTTLLGISAIPQDHPLYIGWPGMHGQASVNRAIDRSDLLFAVGMRFDDRITGDPSRFAPNARVVHIDIDPSELGKVIKPAVGIAADARAALRGVLRHIGRPQDNCAAWRAEIAESQRPERERAERARPEYGPIRIMDAIKAAAGEEVRLVTDVGQHQMWAAQFFRFTKRNSHITSGGLGTMGFALPAAMGVKLGCPEDPVWVVAGDGGFQMNLQELATIRDLGLDIKVAVLNNGYLGMVRQWQQFFHNRRYSETPITGPDYEHLARAYGIAGRTVRPGDDVEEAVRWAQRTPGCVVLDFHIDPEANVYPMIPSGMSVAEMIEEDA

SEQ ID NO: 4689 - protein, 507 aa, Rubrobacter xylanophilus DSM 9941
MIQDWMIVTGITVAYLIFILLIGLGARSAQSSTLVGYVAGGREIGLLILFFIMGAEIFSAFTFLGAPGWAYSRGAPAFYILAYVTLGLLPWWVLGPRTARLGRRCGYLTQADLMSDRYDSRWLSAIVALVSVGAFIPYLTLQITGSGYLFEFATGGNVPFWLGALAAFVVVTIYVYASGLRGIGWTNLIQGIIMVVVAWFLGMAVANRFFGGVGPMFQELRDRAPEYLTLPGAEGQEMSWAAFSTAILVSAIGFTMWPHLFMKSYGADNERTIKKTIVIYPLYAYLVVPVLIIGFAGVLVLQDNPLENPDDVLLELVVNVADFSPWIIGIMLSGALAAAMSTGSNLAHTAATVLVRDLFVTGLNRGMPERRVVLLTRVFVVVISVVAYVLALFNPATLVGLLLGAYGAVVQFFPLIVAAFFWKRATKAGAFAGLIGGSLVMLLFTFFITPAPLDIHAGIWGLIVNTVLLIGVSLATTPMPRGHVDRFVEGSKASLDDLSEPRLSTAQ

SEQ ID NO: 4690 - protein, 480 aa, Rubrobacter xylanophilus DSM 9941
MSRGERRGVQGVEYEHVGAEYLERRQLKKGAAGWVLLAGLGVAYVISGDFAGWNFGLAQGGWGGLLIATLLMATMYTTMVLALAELSSAIPVAGAGYGFARRAMGPWGGFLTGTAILIEYAIAPAAIATFIGAYVESLVGFGGPLVYLFFYALFVGIHLYGVGEALKLMFAITAVAALALVVFVIGMIPQFDAANLFDIAPADAAGASEFLPFGYLGIWAALPYAIWFFLAIEGVPLAAEETRDPATDMPKGLIGGMLVLLVFAALILIFGPGGAGSAAIQDSGNPLVEAVQAAYGGPNLLSGFINVVGLAGLVASFFSIIFAYSRQIFALSRAGYLPRWLSVTNRRRVPWVALVVPGVIGFLLSLSGQGDLLILIAVFGATISYVLMMLSHIILRYKEPEMERPYRTPGGVLTSGVALMLACAAVIAGFLVDPRVLVGTAIIYAILIAYFAFYSRHHLVAEAPEEEFEAVQRAEAELSG

SEQ ID NO: 4691 - protein, 278 aa, Rubrobacter xylanophilus DSM 9941
MQSLANAIADFFARVFDPIVDVLGAVLRFFHYDLGVEWWLSIALLTVVVRALLFPLTLKQMKSMRALQELRPEIQRIQRQYRDNPQLRNQEMMKLYQERNVNPLGGCLPLLVQMPIFIGIFYVIREFGGYSYGGRVVEPSEPTFETGGILWFQDLSQADPYYILPVLSALTMLAGTEISAKYMEPQQRWIMRIVPFAITLFLWNFPAGLFVYWISNNLVTIAQNYFIYNYGPGRREEGETKKLDQQGPAEPSSRSGNEEDPRKRAAKAAKRKRRKKKR

SEQ ID NO: 4692 - protein, 921 aa, Oryza sativa Japonica Group
MPSASAALVLLFVAFSLSNAQPGFISLDCGGDDDYTDGIGIQWTSDAKFVSAGQKANLLLQNQQLQQYTTVRSFPADNRKYCYTMNVRNRTRYLVRATFLYGNFDNSNVYPKFDLSLGPTPWTTVVIDDATTPVVQEAIILAAAPTLSVCLSNASTGQPFISTLELRQFNGSLYYTTDEKQFFLRLSARINFGAESNASVRYPDDPFDRIWESDLVRRANYLVDVAPGTERISTTKPIFVSTNEEPPQRVMQTAVVGKNGSLTYRIDLEDFPGNAWGVSYFAEIEDLTPNQTRKFKLVIPGKPEFSKPTVDVEENAQGKYRLYEPGYTNIPLPFVFSFGFKKTNDSSEGPILNAMEIYKYIEISVGSQDANIMASLVSRYPEAGWAQEGGDPCLPASWSWVQCSSEAAPRIFSISLSGKNITGSIPVELTKLSGLVELKLDGNSFTGQIPDFTGCHDLQYIHLEDNQLTGALPPSLGELPNLKELYIQNNKLSGEVPQALFKKSIIFNFSGNSDLRMGHSNTGRTIVIIVCAVVGAILILVAAIVCYLFTCKRKKKSSDETVVIAAPAKKLGSFFSEVATESAHRFALSEIEDATDKFDRRIGSGGFGIVYYGKLTDGREIAVKLLTNDSYQGIREFLNEVTLLSRIHHRNLVSFLGYSQQDGKNILVYEFMHNGTLKEHLRGGPDDVKINSWVKRLEIAEDAAKGIEYLHTGCSPTIIHRDLKSSNILLDKNMRAKVADFGLSKPVVDGSHVSSIVRGTVGYLDPEYYISQQLTEKSDMYSFGVILLELISGHEPISNDNFGLHCRNIVEWARSHMESGDIHGIIDQSLDAGYDLQSVWKIAEVATMCVKPKGVLRPSISEVLKEIQDAIAIELQRELPSSIHHLMSKTSPSEAVNTTGSLQDLEQNASFDELLMRPGLR

SEQ ID NO: 4693 - protein, 341 aa, Oryza sativa Japonica Group
MDRRAVVYDAEAVDDHERQGTVWTATSHIVAAVVGSGVLALAWTVAQLGWVVGPLVLVGFSCVTYYTSTLLANCYRYPDPVTGTANREYIDAVRCYLGPKNVMLCGCAQYVNLWGTLVGYTITASASMIAVKRVNCFHREGYGAGDCGASGSTYMVVFGVFQLLLSQLPSLHNIAWLSVVAVATSFGYSFISLGLCAAKWASHGGAVRGTLAGADLDFPRDKAFNVLLALGNIAFSYTFADVLIEIQDTLRSPPAENKTMKRASFYGLSMTTVFYLLLGCTGYAAFGNDAPGNILTGFAFYEPFWLVDIANICVIVHLIGAYQVITHHRLTSSLMAGGDRR

SEQ ID NO: 4694 - protein, 299 aa, Oryza sativa Japonica Group
MATAGDEQQQQAAAAQTAEVTEAAAKEVVSVEMPAPEGWTKKRGGRFEIVFVSPTGEEIKNKRQLSQYLKAHPGGPASSEFDWGTGDTPRRSARISEKVKAFDSPEGEKIPKRSRNSSGRKGKQEKKEATENEEAKDAEADKEAPSEDAPKETDVETKPAEEAKEAPSEDAPKDTDVEMKTAEDASKTADADTPAPAPAGTEKEDAKPAESEAAPPAPSEGGEKKEDAKPAEPEAAAAPPSNPTEPSAPKAAAAAPVENSADKGPHQDSQPPSAAAPAKESSPVNNGQLPAGASAVKCT

SEQ ID NO: 4695 - protein, 74 aa, Raphanus sativus var. niger
LRKGAWTTEEDSLLRRCIDKYGEGKWHQVPLRAGLNRCRKSCRLRWLNYLKPTIKRGKLNSDEVDLLLRLHKLL

SEQ ID NO: 4696 - protein, 332 aa, Mycoplasma genitalium G37
MKLSIDNKKHVIFSLSKSKTLVENICKKLNISEGKMVCEHFADGETYIRFDESVRNKDIYIFQSTCPNVNDSLMELLIAIDALKRGSAKSITAILPYYGYARQDRKTKGREPITSKLIADMLTKAGANRVVLTDIHSDQTQGFFDIPVDSLRTYHIFLFRVIELLGKKDLVVVSPDYGGVKRARLIANTLELPLAIIDKRRPSHNVAESINVLGEVKNKNCLIVDDMIDTGGTVIAAAKLLQKEQAKKVCVMATHGLFNNDAEQKFMEAFDQKLIDFLFVSNSIPQYKFKAVKQFEVVDLASLYEEVVLCYANSLSVSAIYERHIEWIKKHV

SEQ ID NO: 4697 - protein, 99 aa, Nicotiana tabacum
VLATTKKKKKKKDKIFKISNLAPCCYGCGAPLHTSEVDAPGYVDQETYDLKKKHHQLRKVLCGRCRLLSHGHMITAVGGNGGYSGGKQFVTAEELREKL

SEQ ID NO: 4698 - protein, 98 aa, Solanum lycopersicum
VLATTKKKKKKDNIFKISKLAPCCYGCGAPLHTSEVDAPGYVDQETYELKKKHHQLRKILCGRCRLLSHGHMITAVGGNGGYSGGKQFVTAEELREKL

SEQ ID NO: 4699 - protein, 161 aa, Oryza sativa Japonica Group
LLSHGHMITAVGGHGGYPGGKQFVSADQLRDKLSYLRHEKALIIKLVDIVDFNGSFLARVRDFAGANPIILVITKVDLLPRDTDLNCIGDWVVEAVVKKKLNVLSVHLTSSKSLVGVTGVISEIQQEKKGRDVYILGSANVGKSAFISAMLRTIAYKDPVA

SEQ ID NO: 4700 - protein, 523 aa, Botryotinia fuckeliana
MPSVAGEEPKASSRLLLVSNRLPITIKRTEDGQYDFTGSSGGLVTGLSGLAKTTTFQWYGWPGLEVPDAEAKPLVKRLKDEHGAHPVFVDDELADKHYNGFSNSILWPLFHYHPGEITFDESQWMAYKEVNRLFAKTIAKDVQDGDLIWVHDYHLMLLPEMLRDEIGTSKKNVKIGFFLHTPFPSSEIYRILPVRESLLLSVLHCDLIGFHTYDYARHFLSSCSRILETQTTPNGVEFRGKYVTVAAFPIGIDPEKFIETLKKPKVEERIAQLERKFEGVKLIVGVDRLDYIKGVPQKLHALEVFLTEHPEWIGKVVLVQVAVPSRQDVEEYQNLRAVVNELVGRINGRFGTVEFMPIHFLHQSVNFDELTALYAVSDACLVSSTRDGMNLVSYEYIATQRKRHGVMILSEFTGAAQSLNGALIVNPWNTEELADAIHDAVTMSPEQREINFKKLEKYVFKYTSSWWGESFVSELQRISEHAAKKSNSKGTVDKMPDLVEGVQQFNLGEQREEGRLEPGEFDD

SEQ ID NO: 4701 - protein, 713 aa, Escherichia coli
MSRIIMLIPTGTSVGLTSVAWRDPCNGTQRRSSERFQTYRSAAYRWRCADQTTTIVRANSSTTTAAEPLKMSYVEGLLSSNQKDVLMEEIVANYHANTKDAEVVLVEGLVPTRKHQFAQSLNYEIAKTLNAEIVFVMSQGTDTPEQLKERIELTRNSFGGAKNTNITGVIVNKLNAPVDEQGRTRPDLSEIFDDSSKAKVNNVDPANVQESSPLPVLGAVPWSFDLIATRAIDMARHLNATIINEGDINTRRVKSVTFCARQHSAHAGALRAGSLLVTSADRPDVLVAACLAAMNGVEIGALLLTGGYEMDARISKLCERAFATGLPVFMVNTNTWQTSLSLQSFNLEVPVDDHERIEKVQEYVANYINADWIESLTATSERSRRLSPPAFRYQLTELARKAGKRINLPEGDEPRTVKAAAICAERGIATCVLLGNPAEINRVAASQGVELGAGIEIVDPEVVRESYVGRLVELRKNKGMTETVAREQLEDNVVLGTLMLEQDEVDGLVEGAVHTTANTIRPPLQLIKTAPGSSLVSSVFFMLLPEQVYVYGDCAINPDPTAEQLAEIAIQSADSAAAFGIEPRVAMLSYSTGTSGAGSDVEKVREATRLAQEKRPDLMIDGPLQYDAAVMADVAKSKAPNSPVAGRATVFIFPDLNTGNTTYKAVQRSADLISIGPMLQGMRKPVNDLSRGALVDDIVYTIALTAIQSAQQQ

SEQ ID NO: 4702 - protein, 365 aa, Boehmeria nivea
MGSTGETQMTPTQVSDEEANLFAMQLASASVLPMVLKTAIELDLLEIIAKAGPGAWLSPAEIAAQLPTTNPAAPVMLDRILRLLACYSVVACQLRTLPGGAAERLYGLAPVCKFLTKNNDGVSISPLCLMNQDKVLMESWYYLKDAVLEGGIPFNKAYGMTAFEYHGTDPRFNKVFNRGMSDHSTITMKKLLETYKGFEGLNSVVDVGGGTGAVLSMIVSNYPSIKGINFDLPHVIEDAPAYPGVEHVGGDMFVSVPKGDAIFMKWICHDWSDEHCLKFLKSCYDALPNNGKVIVAECILPVAPDTSLATKGVAHIDVIMLAHNPGGKERAEKEFQALAKGAGFQGFRVVCSAFNTYVMEFLKKP

SEQ ID NO: 4703 - protein, 323 aa, Solanum bulbocastanum
MDRMYSGGGDMGYGYENGVVMTRDPKPRLRWTADLHDRFVDAVTKLGGPDSLEFCRSYSQVSTKVNGIEGLDIVSFEESFAGRVRLQHLYSSMFCPVENSLGGFVLFFILQKYRLGQQTKKQNAAEQNRENIGESFRQFSLHSSGPSITSSSMDGMQGCIYLNREAPISEALRCQIEVQKRLHEQLEVQQKLQMRIEAQGKYLQAILDKAQKSLSTDMNSPSAVDETRAQLTDFNIALSNLMDYMHGHNGDETSAGERTQDDTNKDLQRSTYLTEGEQKKIMNIKLEETSVSFDLNSRSSYDFIGMSSAALEAKHFSNGRLEI

SEQ ID NO: 4704 - protein, 668 aa, Corylus avellana
MAGSWRARGSLVVLAILLFGCLFAISIAKEEATKLGTVIGIDLGTTYSCVGVYKNGHVEIIANDQGNRITPSWVGFTDGERLIGEAAKNQAAVNPERTIFDVKRLIGRKFEDKEVQKDMKLVPYKIVNKDGKPYIQVKIKDGETKVFSPEEISAMILIKMKETAEAFLGKKIKDAVVTVPAYFNDAQRQATKDAGIIAGLNVARIINEPTAAAIAYGLDKKGGEKNILVFDLGGGTFDVSILTIDNGVFEVLSTNGDTHLGGEDFDMRIMEYFIKLIKKKHGKDISKDNRAIGKLRREAERAKRALSSQHQVRVEIESLFDGVDFSEPLTRARFEELNNDFVQKDHGTREEAMEDAGLAKNQIDEIVLVGGSTRIPKVQQLLKDYFDGKEPNKGVNPDEAVAYGAAVQGSILSGEGGEETKDILLLDVAPLTLGIETVGGVMTKLIPRNTVIPTKKSQVFTTYQDQQTTVSIQVFEGERSLTKDCRNLGKFDLTGVPPAPRGTPQIEVTFEVDANGILNVKAEDKGTGKSEKITITNDKGRLSQEEIDRMVQEAEEFAEEDKKVKERIDARNTLETYVYNMKNQVNDKDKLADKLESDEKDKIESAVKDALEWLDDNQSAEKEDYDEKLKEVEAVCNPIITAVYQRSGGAPGGGSGEEDEDSESHDEL

SEQ ID NO: 4705 - protein, 244 aa, Eucalyptus globulus
MGRGRLQLKRIENKINRQITFSKRRAGLLKKAHEISVLCDAEVALIVFSAKGKLFEYSTDSCMERILERYERYSYAEHQVLASETESIGSWTLEHAKLKARLEVLHRNYRHFMGEDLDSLSLKDLQNLEQQLESALKHIRSRKNQLMHESISVLQKKDRALQEQNNLLTKKIKEKERALAQQAQWEQQDHALDSPVVLPHYLPSLDINGSYQARHNGHDDGENLTQPRAGTLLPPWISASQLRL

SEQ ID NO: 4706 - protein, 501 aa, Lotus japonicus
MALPECSAANLAQLIGPNATDAAAVAGFICDQFTAVGQRFSDTAFAVDSTYLLFSAYLVFSMQLGFAMLCAGSVRAKNTMNIMLTNVLDAAAGGLFYYLFGFAFAFGAPSNGFIGRHFFGLKDVPTVAFDYSYFLYQWAFAIAAAGITSGSIAERTQFVAYLIYSSFLTGFVYPVVSHWFWSGDGWASATNTGNLLFGTGVIDFAGSGVVHMVGGVAGLWGALIEGPRIGRFDHAGRAVSLRGHSASLVVLGTFMLWFGWYGFNPGSFTKILSAYDSGNYYGQWSAIGRTAVTTTLAGCTAALTTLFGKRIISGHWNVTDVCNGLLGGFAAITAGCSVVEPWAAIVCGFVAAVVLIACNMLAEKVRYDDPLEAAQLHGGCGAWGIIFTALFAKEEYVNQVYPGKPGRPYGLFMGGGGKLLGAHVIQILVIIGWVSATMGPLFFILNKMKLLRISTEDELAGMDLTRHGGFAYAYEDDESHKPGIQLRKIEPNSSSTPSAES

SEQ ID NO: 4707 - protein, 1151 aa, Populus trichocarpa
MASQSQRQSNQRQHQNQAAQSSGTSNMRQHHHATESVSKAIAQYTVDAQLHAVFEQSGGSGKSFDYSQSVRTTSQSVPEEQITAYLSKIQRGGHIQPFGCMIAVDEGSFRVIAYSENAKEMLGLTPQSVPSLDKQEILSDGTDVRTLFRPSSSAMLEKAFGAREIILLNPIWIHSKNSGKPFYAILHRIDVGIVIDLEPARTEDPALSIAGAVQSQKLAVRSISQLQSLPGGDIKLLCDTVVESVRELTGYDRVMVYKFHEDEHGEVVAENKRADLEPYIGLHYPSTDIPQASRFLFKQNRVRMIVDCHATPVRVIQDEALMQPLCLVGSTLRAPHGCHAQYMANMGSIASLAMAVIINGNEEEAIGGRNSTRLWGLVVCHHTSARCIPFPLRYACEFLMQAFGLQLNMELQLASQLSEKHVLRTQTLLCDMLLRDSPTGIVTQSPSIMDLVKCDGAALYYQGQYYPLGVTPTEAQIKDIVEWLLALHGDSTGLSTDSLADAGYPGAASLGNAVCGMAVAYITKRDFLFWFRSHTAKEIKWGGAKHHPEDKDDGQRMHPRSSFKAFLEVVKSRSLLWENAEMDAIHSLQLILRDSFRDVEATNSKAVVHAQLEDTELQGMDELSSVAREMVRLIETATAPIFAVDVDGCINGWNAKVAELTGLSVDKAMGKSLVHDLVYKEYEETVDKLLHRALRGEEDKNVEIKLRTFGSEHQKKALFVVVNACSSKDYMNNIVGVCFVGQDVTGQKVVMDKYVHIQGDYKAIVHSPNPLIPPIFASDENTCCLEWNTAMEKFTGWSRGEVIGKMLVGEVFGSCCQLKGSDALTKFMIALHNAIGGQDTDKLPFSFFDRNGKYVQALLTANKRVNMEGEIVGAFCFLQIASNELQQALKVQRQQEKKCSARMKELAYICQEIRNPLSGLRFTNSLLENTDLTEDQKQFLETSAACEKQILKITRDVDLESIENGLLELEKAEFLFGSVINAVVSQAMLLLRERNLQLLRDIPEEIKTLVVYGDQARIQQVLADFLLNMVRYAPSSAGWVEIHVCPTLKQISDGHTLVHMEFKYALLNSFACLPPELVQDMFHSSRWVTQEGLGLSMCRKILKLMNGEVQYIRESERCYFLVILEVPMPNKCERYNCKKCCRLGCLVCNVY

SEQ ID NO: 4708 - protein, 761 aa, Agrobacterium rhizogenes
MDLPYNRPRFPPFAITGLPSAAKLKRAISRAFVCYDQFCDELLQYQQRWTDWVFDHGFAEAIEDMALVFQIEPCLHGPRTGTLEVLRPCRTKVFIYTSYRRLRHFVENQCIAQPGDAVLACMIPPYVSDLSLQEMSRAHNSFCPGSHTSIADVQCFIAIQLSSLFVEEGTCDVHGRNGLKTTCRFFRRPAECFSRYDIVAIGSVLFHNALHQPVNYNEDLSCFDLRYDYQVFLHERDANDGVGHYPEGTPLPSVAIVGGGLSGLVAAAELLDAGVREIALFTPVDEVRSLGVSPMPNGDARQVLTSFGVMPISGNQVCLSYYLDKFRIPSSLRFPCAGSDHTALYFRKKRYEWPAGQAPPGEFQRISAGWEKLLYHGCERNGRRLIAPMDIFSMLRGRRYEEASEARRAWLREFDNFTFHAALVEIFSCGVESPGGAAWQTTDFAAFGMMRLGGGRVSSCYTLLFSTVLDWIINGYEEDQHISVGGVHLLQALMRIEIFKRKVGFHFDPLRGLAKEGGKVKVCMKDGRSRVFDQVIIGGRGGPDATNITPVSHVTCVGYDIEAPAGNSSATVNAALFMITKQKFWLDDDIPALIWTDGLVRELCCIDIESPSGEGLVIFHYEMNDYLSRPFQSDEKKRRCLDLVRELAAVFPELACHLVPVNEDYEEYVFDGHLKDGFRASLWRENSLKKCQYSQDPHMYDSPLMEHGAVCQIDSKDCVNGALFEEQVKTGIITACTVIRSTGGTLSSLHPLDWNKIYFPA

SEQ ID NO: 4709 - protein, 175 aa, Agrobacterium rhizogenes
MGCCGMLHRTNIGGIANIPTGEGQAVEKYVGAKLHGLRVTDAKLNYHGSITIDADFCREVGLKPLEYVEIWNKMSGARISTYVLYGDPGSRCCILNGAAARTCQQGDEIIIASSVFCEVDDIIKLKPRVLVFGEKNEIIDRITYEVFRRADNSLDMAVSSELSDNSYGFPASISG

SEQ ID NO: 4710 - protein, 359 aa, Agrobacterium rhizogenes
MFVRSDALSRIKPSATIVVSQKFRELKAEGRDVVRLNIGEPDFDTPDNIKTAAIDAINRGETKYTPVSGIPELRKAIASKFKRENGLEYSWEQTIVGTGGKQILFNAFMATLNPGDEVVIPAPYWVSYPEMVALCGGTPVFVSATQEHDFKLQPADLEKAITPKTKWFIFNSPSNPTGAAYTHAELKALTNVLMQHPHVWVLTDDMYEHLTYSDFKFVTPVEVEPSLYDRTLTMNGVSKAYAMTGWRRLCRRPAPAHQGHGHDPGAADLGCDVDRPVGGCRSAERHPGLHPGEQEDLRRPPRPRRLHAEPGQGHRLPGAGRRLLRLSVLRRPDRQDGAVGQGHRDGRGFRFRASGIGRR

SEQ ID NO: 4711 - protein, 755 aa, Agrobacterium tumefaciens
MSASALLDNQCDHFSTKMVDLIMVDKADELDRRVSDAFSEREASRGRRITQISGECSAGLACKRLADGRFPEISAGEKVAALSAYIYVGKEILGRILESEPWARARVSGLVAIDLAPFCMDFSEAQLLQTLFLLSGKRCASSDLSHFVAISISKTARSRTLQMPPYEKGTTKRVTGFTLTLEEAVPFDMVAYGRNLMLKASAGSFPTIDLLYDYRSFFDQCSDSGRIGFFPEDVPKPKVAIIGAGISGLVVASELLHAAVDDVTIYEASDRVGGKLWSHAFKDAPSVVAEMGAMRFPPAASCLFFFLERYGLSSMRPFPNPGTVDTNLVYQGLRYMWKAGQQPPKLFHRVYSGWRAFLKDGFHEGDIVLASPVAITQALKSGDIRRAHDSWQTWLNRFGRESFSSAIERIFLGTHPPGGETWSFPHDWDLFKLMGIGSGGFGPVFESGFIEILRLVINGYEENQRMCSEGISELPRRIATQVVNGVSVSQRIRHVQVRAIEKEKTKIKIRLKSGISELYDKVVVTSGLANIQLRHCLTCDTTIFRAPVNQAVDNSHMTGSSKLFLLTERKFWLDHILPSCVLMDGIAKAVYCLDYEPQDPNGKGLVLISYTWEDDSHKLLAVPDKKERFCLLRDAISRSFPEFAQHLVPACADYDQNVVQHDWLTDENAGGAFKLNRRGEDFYSEELFFQALDMTNDTGVYLAGCSCSFTGGWVEGAIQTACNAVCAIIHNCGGILAKDNPLEHSWKRYNYRNRN

SEQ ID NO: 4712 - protein, 324 aa, Agrobacterium tumefaciens
MNGAGEINASRHRKENELKTCQILGAPVQSGASQPGCLMGPDAFRTAGLTQVLTELGWAVTDLGDATPTVEPELSHPNSAVKNLDALVGWTRSLSQKALEMARSCDLPVFLGGDHSMSAGTVSGVAQRTAELGKEQFVLWLDAHTDLHTLHTTASGNLHGTPVAYYTGQSGFEGLPPLAAPVNPRNVSMMGIRSVDPEERRRVAEIGVQVADMRVLDEQGVVRPLEAFLDRVSKVSGRLHVSLDVDFLDPAIAPAVGTTVPGGATFREAHLIMEMLHDSGLVTSLDLAELNPFLDERGRTARLITDLASSLFGRRVFDRVTTAF

SEQ ID NO: 4713 - protein, 755 aa, Agrobacterium tumefaciens
MSASPLLDNQCDHLPTKMVDLTMVDKADELDRRVSDAFLEREASRGRRITQISTECSAGLACKRLADGRFPEISAGGKVAVLSAYIYIGKEILGRILESKPWARATVSGLVAIDLAPFCMDFSEAQLIQALFLLSGKRCAPIDLSHFVAISISKTAGFRTLPMPLYENGTMKCVTGFTITLEGAVPFDMVAYGRNLMLKGSAGSFPTIDLLYDYRPFFDQCSDSGRIGFFPEDVPKPKVAVIGAGISGLVVANELLHAGVDDVTIYEASDRVGGKLWSHAFRDAPSVVAEMGAMRFPPAAFCLFFFLERYGLSSMRPFPNPGTVDTYLVYQGVQYMWKAGQLPPKLFHRVYNGWRAFLKDGFHERDIVLASPVAITQALKSGDIRWAHDSWQIWLNRFGRESFSSGIERIFLGTHPPGGETWSFPHDWDLFKLMGIGSGGFGPVFESGFIEILRLVINGYEENQRMCPEGISELPRRIASEVVNGVSVSQRICHVQVRAIQKEKTKIKIRLKSGISELYDKVVVTSGLANIQLRHCLTCDTNIFQAPVNQAVDNSHMTGSSKLFLMTERKFWLDHILPSCVLMDGIAKAVYCLDYESQDPNGKGLVLISYTWEDDSHKLLAVPDKKERLCLLRDAISRSFPAFAQHLFPACADYDQNVIQHDWLTDENAGGAFKLNRRGEDFYSEELFFQALDTANDTGVYLAGCSCSFTGGWVEGAIQTACNAVCAIIHNCGGILAKGNPLEHSWKRYNYRTRN

SEQ ID NO: 4714 - protein, 257 aa, Salmonella enterica subsp. enterica serovar Typhi
MPFLSKHFPHDKSRRWVEPFIGGGAVFLNMFATEALLADSNPDLINLYRNIQRNKPAFIREVQLLAERHFEEEDYYVLRNTFNSTSFDDAPLQRAAIFYAMNRLGYNGLCRYNLKRKFSVPWGKRYQFSLDIQKVDYLSFRLSSVELKTADFGQTLEFAGGGDQIYCDPPYDKISKTSFVSYDGIPFDKSAHVKLADMLVDANRKGASVAISNSMTPFTLELYEERGFDIHTHNAYRSVGSQSKSRKKEIEILAVLR

SEQ ID NO: 4715 - protein, 786 aa, Deinococcus radiodurans R1
MTAGAQRADKRPTQCKAVKPTFLGWSVTLTLSLCSASALGGGAAPVTAAPVSAAPSTAAPTASVPRPTLVGYAELKADTFAQGPASGAWNGGLRGEARFQGQPVQGFSGVQRDPQGQGFIFLSDNGFGAKNNSADYLLRLYRVSLTPGTPAARTGSVKVGSFIGLRDPDKKVPWQIVNEASGERLLTGADFDVEGFAFAPDGTLWIGDEFGPFLLHFSADGRLLEAPIATPNLPGLPTLRGQAPIVIGHRGSSGTRPEHTLESYRTAIEAGADFIEPDLVVTKDGVLVARHEPVIAAVDETGKVLEATTDVATRPEFRDRLTTKTLDGVKVHGYFVEDFTLAELRTLRAVERLPQLRGKAYDGQFTVPTLEEIIALVRDVEAKTGRKVGIYPETKHPTYMAEVAKVNTSQLLIDTLKRLNFTDPARVFIQSFEVGNLKDLNTRIMPAAGVKLPLVQLISSPDEAPYDWAAAGDGRKYDALTNDASLREIATYANGVGAYKRWIIDGEGHTTDFVTRAHTAGLLVHSWTFRNEPTYLLPTYKNDPEAEMRQALRAGVDGLFTDFPATGAKVVGQYTAPEVRSPQHPAFAQGLSSAAANLPASGGFEGFAIAPGGKLAYGLLEKTVAGDPAGQLRLMRYDLGTRHWALAGRYVLEQGGEAIGDLTPVNDSQMLVIERDNGQGETAKFKRLYLIDLAAKNADGTLRKTLVADLMALADPRGLAPSTRGGVFSFPYFTIENVLVLGPDTLLVANDNNYPATGGRGADVKDQTEFLWIKLPTALKLAPAYH

SEQ ID NO: 4716 - protein, 216 aa, Betula pendula
EIKRIENTTNRQVTFCKRRNGLLKKAYGLSVLCDAEVALIVFSTRGRLYEYSNNNIKSTIERYKKACSDDSGTSSMAEINAQYYQQESAKLRQQIQMLQNSNRHLMGDALTSLSIKDLKQLETRLERGISRIRSKKHEMLLSDIECLQKREIQLEDENICLRTKIAEIERLQQTNLNISGPELNAIHALSRNFFSPIMVDGDTPYSQPDQKILRLG

SEQ ID NO: 4717 - protein, 220 aa, Populus tomentosa
MVRGKTQMRRIENATSRQVTFSKRRNGLLKKAFELSVLCDAEVALIVFSPRGKLYEFASSSMQETIERYRRHVKENNTNKQPVEQNMLQLKEEAASMIKKIEHLEVSKRKLLGECLGSCTIEELQQIEHQLERSVSTIRARKNQVFKEQIELLKQKEKLLAAENTRLSDECGAQSWPVSWEQRDDLPREEQRESSSISDVETELFIGPPETRTKRIPPRN

SEQ ID NO: 4718 - protein, 435 aa, Vibrio harveyi
  misc_feature (279)..(279): Xaa can be any naturally occurring amino acid
  unsure (1)..(435): unsure at all Xaa locations
FLPGYVRLGGLARPDIDTFKWLSIVLCTLLAGGGVFWAAAEPIAHFVSAPPLYGEASPKASAINALSQSFMHWGFLAWAILGCLSSVVLMHLHYDKGLPLKPRTLLYPVFGDKAIHGRIGDVADACSIIAVAAGTIGPIGFLGLQISYALNSLFGLPDTFITQSLVIVAAILMYTLSALSGVSKGIQLVSRYNIVLSVALIGYILFFGPTSFIVDGYVQGIGRMVDNFFPMALYRGDTEWLSWWTVFFLGVGLLGYGPMMAIFIARISRGRTIRQLILXISIAAPLITCFWFSIVGGSGLAFELENPGLISSAFEGFNLPAVLLAITSELPFPMVISVLFLILTTTFIVTTGDSMTYTISVVMTGSTEPNAVIRSFWGLMMGVVAIALISMGSGGISALQSFIVITAVPVSFILLPSIWKAPSIANHMAKEQGLI

SEQ ID NO: 4719 - protein, 322 aa, Alkalimonas amylolytica
MTIDFTQQALQVLQIEATAISQLARFVNDDFNKACQLIMDSPGRVIVSGMGKSGHIANKIAATFASTGTPAFFVHPGEASHGDLGMITKDDVVIAISNSGETGEVLTIIPVLKRIGAHLIGMSGNPASTLARLSDVHVCVQVEQEACPLGLAPTASTTATLAMGDAMAVALLNARGFSADDFALSHPGGSLGRRLLLRLEDVMHTGNTIPMVPTTATIKTALLEMSAKGLGMTTVVDKHGVLQGIFTDGDLRRILDQRYDIHDTLITAVMVRNCITAQPQMLAAEALKLMEQRKINGLVIVDQHQHPVGAMNMHDLLKAGVL

SEQ ID NO: 4720 - protein, 393 aa, Picea abies
VICLAVGFSNRLTKEKSEDPQIDHIRWKSTSKAVHHACSSTLYPEFCVSSVSSFPGLSKRPGPMEILKVVVKLSIAAVEKANARARRLSRPGLDQRQRGALQDCFELFDETLDELYSTLSDLKNKTFISIPQSASDLETLLSAAITNQYTCIDSFTHCKGNLKQSLLGGLRNISHLVSNSLAMVKNISAEASNLARRTVSNQNRRLLSDQSDPNFMPMDSDGFPSWMSAGDRRLLQTSTGTVKPNAVVAKDGSGNYTNITEAVEAAPEKSKTRYVIHIKAGVYAENVELHKKKTNLMFIGDGMDVTVVTGNRNVKENFTTFRSATVAVLGKGFIARDMTFENTAGAAKHQAVALRVGSDLSAFYRCSFKGYQDTLYAHSLRQFYREWHIYGHR

SEQ ID NO: 4721 - protein, 841 aa, Lotus japonicus
MAMAFVQDRESSIDRHLDSSGKYVRYTAGQVEALERVYTECPKPSSLRRQQLIRECPVLANVEPKQIKVWFQNRRCREKQRKEASRLQAVNRKLNAMNKLLMEENDRLQKQVSQLVCENGFMRQQLQAPSAAGTTDGNGDSVATTSRNSMRDANSPAGFLSIAEETLAEFLSKATGTAVDWVQLPGMKPGPDSVGIFTISQSCSGVAARACGLVSLEPNKVAEILKDRLSWFRDCRSLEVFTMFPAGNGGTIELVYTQTYAPMTLSPARDFWTLRYTTTLENGSLVVCERSLSGSGAGPNAAAAHQFVRAEMLPSGYLIRPCEGGGSIIHIVDHLNLQAWSVPEVLRPLYESSKVVAQRMTIAALRYVRQIAQETSGEVVYGLGRQPAVLRTFSQRLSRGFNDAVNGFNDDGWSVLNCDGAEDVIISVNSTKNLSGTSNPASSLTFAGGVLCAKASMLLQNIPPAVLVRFLREHRSEWADFNVDAYSAASLKAGSYAYPGMRPMRFTGNQIIMPLGHTIEHEEMLEVIRLEGHSLAQEDAFASRDVHLLQLCSGIDEDAVGACCELIFAPIDEMFPDDAPLVPSGFRIIPLDSKPGDKKDTMTTNKTLNLTSGLEVGASTNHTAGDASSCHNNRSVLTIAFQFPFESSLQDNVAVMARQYVRSVISSVQTVSMAISPSGTNPAAGAKLSVGSPEALTLARWVCQSYSYYLGTGLLRSDSLVGDLVLKHLWHHQDAILCCSLKSVPMFIFANQAGLDMLETTLVALQDITLDKIFDESGRKALFADFAKLMQQGFAYLPAGICMSTMGRHVSYEQVIAWKVLAEEDNSVHCLAFSFINWSFV

SEQ ID NO: 4722 - protein, 525 aa, Pseudomonas putida
MKTVHGATYDILRQHGLTTIFGNPGSNELPFLKGFPEDFRYILGLHEGAVVGMADGYALASGQPTFVNLHAAAGTGNGMGALTNAWYSHSPLVITAGQQVRSMIGVEAMLANVDAAQLPKPLVKWSHEPATAQDVPRALSQAIHTANLPPRGPVYVSIPYDDWACEAPSGVEHLARRQVSSAGLPSPAQLQHLCERLAAARNPVLVLGPDVDGSAANGLAVQLAEKLRMPAWVAPSASRCPFPTRHACFRGVLPAAIAGISHNLAGHDLILVVGAPVFRYHQFAPGNYLPAGCELLHLTCDPGEAARAPMGDALVGDIALTLEAVLDGVPQSVRQMPTALPAAEPVADDGGLLRPETVFDLLNALAPKDAIYVKESTSTVGAFWRRVEMREPGSYFFPAAGGLGFGLPAAVGVQLASPGRQVIGVIGDGSANYGITALWTAAQYNIPVVFIILKNGTYGALRWFADVLDVNDAPGLDVPGLDFCAIARGYGVQAVHAATGSAFAQALREALESDRPVLICAASSR

SEQ ID NO: 4723 - protein, 528 aa, Pseudomonas putida
MKTVHGATYDILRQHGLTTIFGNPGSNELPFLKGFPEDFRYILGLHEGAVVGMADGYALASGQPTFVNLHAAAGTGNGMGALTNAWYSHSPLVITAGQQVRSMIGVEAMLANVDAAQLPKPLVKWSHEPATAQDVPRALSQAIHTANLPPRGPVYVSIPYDDWACEAPSGVEHLARRQVSSAGLPSPAQLQHLCERLAAARNPVLVLGPDVDGSAANGLAVQLAEKLRMPAWVAPSASRCPFPTRHACFRGVLPAAIAGISHNLAGHDLILVVGAPVFRYHQFAPGNYLPAGCELLHLTCDPGEAARAPMGDALVGDIALTLEAVLDGVPQSVRQMPTALPAAEPVADDGGLLRPETVFDLLNALAPKDAIYVKESTSTVGAFWRRVEMREPGSYFFPAAGGLGFGLPAAVGVQLASPGRQVIGVIGDGSANYGITALWTAAQYNIPVVFIILKNGTYGALRWFADVLDVNDAPGLDVPGLDFCAIARGYGVQAVHAATGSAFAQALREALESDRPVLIEVPTQTIEP

SEQ ID NO: 4724 - protein, 562 aa, Neisseria gonorrhoeae FA 1090
MLNKDQFADNHFIRTIIEDDLKSGKHEAVQTRFPPEPNGYLHIGHAKSICLNFGLAYIYDGLCNLRFDDTNPEKENDEYVNAIKEDVEWLGFHWAGEPRFASDYFDRLYDYAVGLIKDGKAYVDDLTPEEMREYRGTLTEAGKNSPYRDRSIEENLDLFTRMKNGEFPDGSKTLRLKIDMAAGNINMRDPVIYRIRRAHHHNTGDKWCIYPMYDYTHCISDAIEGITHSLCTLEFEAHRPLYDWVLDNIPALHATRPRQYEFSRLELLYTITSKRKLNQLVVEKHVSGWDDPRMPTISGMRRRGYTPEGVRLFAKRAGISKSENIVDMSVLEGAIREELENSAPRLMAVLNPLKVTLTNFQAGKTQSRRAAFHPNHEEMGDREVPVSQTIYIEADDFAENPPKGFKRLIPGGEVRLRHGYVIKCGEVVKDEAGNVVELKCSIDHDTLGKNPEGRKVKGVIHWVSAEHAAEIKVRLYDRLFTVERPGAVRGEDGEYLPFTDFLNPESVKEITAYAEPAAKDLPAESRWQFERIGYFVTDRQDHGKDTPVFNRTVTLKDSWQPK

SEQ ID NO: 4725 - protein, 334 aa, Spiroplasma citri
MEFGIEIGYTSILTLRETVEAISLIKRELVRRFIIQFNLLKVDAPLITTEEKGLNDDFQMTERPIDFDILPTNLTGEIFQSHNKWRRNAIKQYELLENEGILTTAMVLRRDIKQSNSQAVSFSEIGFDLLLEEKDITLLKIKETIDKATNIISDVEDILLLKFPQLNKKFKKKLNWTSQIELQKAMRLLSYQERLNRYTRENGATILYGLKNSITNNTIEISESQDVFNWELYAKIFVYDFVLEKAICIGYCAATVNRDVLKNQLAVTKETSKLRTEYDAKVATNDLPVTLSFGLFKSQLDLFLLEKQHIGEVIASVWSDDFLEYAKKNGIEIL

SEQ ID NO: 4726 - protein, 346 aa, Spiroplasma citri
MFKGGLMEEKSFSIYGLSAGIKLADEICKILGVTRQGMETVRFADGEILVRAMNSVRGKDVYIIQSTSWPVNENLMELLIAIDALKRGSAQSINVIIPYFGYARQDRKARGRQPITCKLVANMLTTAGTTRVMTVDLHSPQSMGFFDVPVDDLRSTQELVRTIVRKIEEDHLKEEVTIVSPDHGGLVRARDVANRLGNLAGNIAVIDKRRPKPNVSEVQFILGDVKDRICFIVDDMIDTAGTICNAAKALKQHGAKAVYLLACHGVFSPPAKERLTELINDGTVKKVIVTNTIDINQDRLFVGLEIISIADLISQMIKAMIEKRSLSDVYSKCNEQIKKIIEKIKK

SEQ ID NO: 4727 - protein, 97 aa, Spiroplasma citri
MKIGIPKEIKAQENRVGVTPSGVIELVKHKHEVYVEKNAGLGSGFTDDYKKAGAIILDNPAEIWTKEMIIKVKEPLESEYNFLWRTNYFYILSFGFR

SEQ ID NO: 4728 - protein, 294 aa, Spiroplasma citri
MAIKSGFVAIVGRPNVGKSTLLNTILNNKVAIVTAKAQTTRNRIQGIYNDQESQIVFMDTPGIHKAHNEMGKFMNKVALSATKAADVILFLAPANERIGDNDRYIIKALQERAIPIVLVVTKIDLVSKGDLMVKIAEWEKIHQFTAVIPVSAVKHKNLETLLILLKTHLEVGPQYYPDDMLTDQPEKFLICEIIREKILLLTEDEIPHSVAIQIDKIEDQPQLLKIMASICVERDSQKGIIIGKQGRLIKKIGTQARLELEQILGTKIFLELFVKVVDKWRDKPSMIARLGYNK

SEQ ID NO: 4729 - protein, 358 aa, Spiroplasma citri
MISYKKCSGCGVVLQDTTPNDLGYVETLTQDYCYRCFRLTHYNELVTYNVPAIDFLAKLRQDYHLSWHYFYVLDVYDLDGTRELALEQLLQNNKVTLIINKIDLVNKLINPHKIITYITELFRTSVLFSKLEDIILVSGLKNYGLDELWRYIKRQTNDIVFVGSSNTGKSTLLNSLIKLTNQQQKITVSNNLATTLGKIVVNLGTRHKVYDTPGIMNKHSLLSYLAENNKNMITKQLLKPMTFQLNLEQTIFYEGLASFSYLTGLKTSFHFYKNNNLKLHRTKLSNKDYYFTHHLSTAAVKLKNYQEWTERVIEINEPGNYSLFIAGLGWISFKGQSGQKIMVGTHQNIKITLRKQFI

SEQ ID NO: 4730 - protein, 286 aa, Spiroplasma citri
MTKLKKEEKVDNSDSYSNEDSFVNIYKYALKKGNSPFYKTFLMGLAAGLFIGFGYIAAITATKGNWDNIPIGLKCLVFGLVFTVAITMIVFLGGEMFTSNSLALIVVFKKQLNVGRFVSNLFIVLSGNFLGCLVMAGLTAWGGFLNHTSDSVTDFYNNVVIFIDGKLEHTWWENFGSGILCNFLVAGSIYAAHTTKSAIAKFFVVNLIIMAFAISGFSHVVANSYLWFLQPFLKIFGTSGDWADFGKFAYNVQLPTLFGNFLSGGIFLPFLYYFIYRKNVKEQLVL

SEQ ID NO: 4731 - protein, 396 aa, Spiroplasma citri
MILVINAGSSSIKFQLYKVNSAKNYEVICKGLAERINIDGIFTLKFNGQKFQTKEDFPDHKSAAKVLIAKLKEHHIIQDFADIQGIGHRIVHGGEKFTQSIFINDEVFAEIKRMVTLAPLHNPPSIAAIEAFRKIVDVPNVAVFDTSFHTTIPEENYLYSVPYEWYSNYQVRRYGFHGISYRYITKRLAEVLQKSATELNAIICHLGNGASICAVKNGKSFNTSMGLTPLEGLIMGTRSGDIDPSIHQFIANQIGTTLDEITNTLNKESGLLGISGVSSDLRDVFKSSKDNQRSKLALLMSAKRIAKYIVSYANDLKTKPDAIVFTAGIGENSDEMRQLVVNEVTLLNLELSPSANQSSYDTENLISTSKSDVLIYAMRTNEEVMICEDTYHLINS

SEQ ID NO: 4732 - protein, 325 aa, Spiroplasma citri
MNILENIIEKINTFSQKIKIIFPEGNYERIQTVAKQLIGTNITPILVFATRAEVPSTIDELQSEVLVAEEQNEIELAEYLVELRKGKVSLSEAKQLVRECNYLAILWVKKGLADGMVGGITYDTKDIIGPALRIIKTKPNVKLVSSFFLMVRNTERYIFTDCALNIDPTAEELADIAYLGYEASQVFAFQNPNMALLSFSTKGSGRGASVDKVRTAYDLVRAKNLKNCYVDGEFQFDAAWDDTIRNKKAPSSPLKAPVDIFVFPNLDAGNIGYKIAQRLGGFEAIGPILIGLDRPVNDLSRGATINDIYNTVLVTAYLCIHKSND

SEQ ID NO: 4733 - protein, 713 aa, Spiroplasma citri
MDLTQQYEPGKDPKVLEKFAKNLNKEALAGKLDPIIGREDEINRVIRILSRRTKNNPVLIGEPGVGKTAIVEGLAQRIVKGDIPSNLKNKTIYELDMGALIAGAKFQGEFEERLKAVLNKAKESNGDIILFIDELHLIVGAGKTQGSMDASNLLKPMLARGELHCIGATTLDEHRLYIEKDAALERRFQKVVVSESTIDESISILRGLKERFETFHGVKIHDNALVASVNLSSRYITDRFLPDKAIDLIDEASATIKTEIASVPTELDNLNRRIVQLEIEKAALQKETDKASNERLVDIENELKPLKTKQQKLDIQWNSEKESITKLKNLKSQVEQLKKELDQAQLSGDFNRAGEIQYALLPKLEKQLNEQEKQASGSHLLKEDVTEHEIAAIVGKWTGIPVERLVETEKAKLLNLSKILRRRVRGQNEAIQVVADAIIRSRSGIKDPNKPIGSFLFLGPTGVGKTEVARSLAYVLFNSEKQMVRLDMSEYMEKHSVSKLIGAPPGYVGHEQGGQLTEAVRRSPYSIVLFDEIEKAHPDILNILLQILEDGRLTDSLGKTVDFKNTIIIMTSNIGSEYLLNENNEGVGLLIQKELARKFKPEFLNRIDNVVTFNALSKDVIKEIIEKELSELTQRIENSKNIRISYSEKVLEKILNEGYDREFGARPIKRYIQQNLESLIAHAIISEEVQEGKSYTIDVVKNEMVIKNSTKLN

SEQ ID NO: 4734 - protein, 434 aa, Spiroplasma citri
MKFIDVATIKLFAGKGGDGAVAFHRELYVPKGGPSGGDGGNGGSIIFVGDEGMNTLLDLKYQREIKAVDGENGSIKNMHGKNAANKYIKVPLGTLIYNNKTNEIIGDITTHQQEIVLVKGGQGGRGNARFANSKNKAPTIFEAGDLGETLEIRCELKVLADVGLVGLPNAGKSTLLAKISKAKPQIADYPFTTLTPQLGVVQDQNHHSFVVADLPGLIAGAAAGKGLGHDFLRHIERCKLIVHVLDMSGNYGTEDVYQNYLNVKTELKKYNYKLELRPEIIVANKMDLDIAAKNLIKFKTQIPTAEIIEVSGLMNQNLSLLINHIGTVLTKIKDNKALWQLDEPVSTEEDYKVYKYTTPIEEEVEVVNLGNGVWKVSGAAIYQAYHKTPIKTYDNLLLFNKKLQDLKVFEKLRAKGAKAGDIVRIFDYELEWDG

SEQ ID NO: 4735 - protein, 271 aa, Spiroplasma citri
MKKIEIKDLFVSADNDIILNGLNLTVNINEIHALMGPNGNGKSTLLSTIMGHPSYTVESGDILIDGQSILDKTVDERSKMGIFFAMQSPVEISGVLNLDFLKAIINAHRDSPIKLPELYQDINRNIKNLKIDDSMIRRYLNTGFSGGEKKKNEILQLNLLKPSLALIDEIDSGLDVDALNVVSTELNKMRNKNFAAIIVSHYDRFFNLVQPTHAHVIVKGKIVKSGDYNLVKKINEEGYEWLLQELDLTVENKQSGIKPLAGIGCAAQKGK

SEQ ID NO: 4736 - protein, 198 aa, Solanum phureja
MEGCCNYNHYNFLTVFLILLAFTTAARPDSGETNREFIRTSCKSTTYPNLCFSSLSSRSSAIGVSPQLLAHESLSVSIETAQSTSTMMIKVAHSQGMTPREVGAMQDCVEELSDTVSELRKSLGEMKQLRGRDFDMKMSDIQTWVSAALTNEDTCTEGFAGKAMNGKVKTVVREKILEVAHMTSNALALINRLAALHG

SEQ ID NO: 4737 - protein, 488 aa, Artemisia annua
MALSLTTSIALATILLFVYKFATRSKSTKKSLPEPWRLPIIGHMHHLIGTTPHRGVRDLARKYGSLMHLQLGEVPTIVVSSPKWAKEILTTYDISFANRPETLTGEIVLYHNTDVVLAPYGEYWRQLRKICTLELLSVKKVKSFQSLREEECWNLVQEIKASGSGRPVNLSENVFKLIATILSRAAFGKGIKDQKELTEIVKEILRQTGGFDVADIFPSKKFLHHLSGKRARLTSLRKKIDNLIDNLVAEHTVNTSSKTNETLLDVLLRLKDSAEFPLTSDNIKAIILDMFGAGTDTSSSTIEWAISELIKCPKAMEKVQAELRKALNGKEKIHEEDIQELSYLNMVIKETLRLHPPLPLVLPRECRQPVNLAGYNIPNKTKLIVNVFAINRDPEYWKDAEAFIPERFENSSATVMGAEYEYLPFGAGRRMCPGAALGLANVQLPLANILYHFNWKLPNDVSYDQIDMTESSGATMQRKTELLLVPSF

SEQ ID NO: 4738 - protein, 488 aa, Artemisia annua
MALSLTTSIALATILFFVYKFATRSKSNKNSLPEPWRLPIIGHMHHLIGTIPHRGVMDLARKYGSLMHLQLGEVSTIVVSSPKWAKEILTTYDITFANRPETLTGEIVAYHNTDIVLAPYGEYWRQLRKLCTLELLSVKKVKSFQSLREEECWNLVQEIKAAGSGRPVNLSENIFKLIATILSRAAFGKGIKDQKEFTEIVKEILRQTGGFDVADIFPSKKFLHHLSGKRARLTSIHMKLDNLINNLVAEHTVNTSSKTNETLLDVLLRLKDSAEFPLTADNVKAIILDMFGAGTDTSSATIEWAISELIKCPRAMEKVQAELRKALKGKEKIHEEDIQELSYLNLVIKETLRLHPPLPLVMPRECRQPVNLAGYNIPNKTKLIVNVFAINRDPEYWKDAETFIPERFENSSTTVMGAEYEYLPFGAGRRMCPGSALGLANVQLPLANILYHFNWKLPNGASYDQIDMAESFGATVQRKTELLLVPSF

SEQ ID NO: 4739 - protein, 233 aa, Persea americana
KRIENKINRQVTFSKRRNGLLKKAYELSILCDAEVALIIFSSRGKLYEFGSVGTNKTLERYQRCCYNPQDANISDRETQGWYQEVSKLKAKYESLQRSQRHLLGEDLGPLSVKELQQLERELEVALSKARQRKTQIMMEQMEELRKKERQLGDINKQFKNKLEAEGAFRGLQGSWESGAVVGNNTFSLHPSQSGPMDCEPTLQIGYHPHFVPPEAAIPRTVAGEGNFIQGWAL

SEQ ID NO: 4740 - protein, 238 aa, Euptelea pleiosperma
MGRGRVQLKRIENKINRQVTFSKRRSGLLKKAHEISVLCDAEVALIVFSTKGKLFEYSTDSGMDMILDRYERYSSAERELVAHDPESQGSWSLEYAKLKAKLEVLQRNQRHFMGENVDSLSSKELQNLEQQLDSALKHIRTRKNHLMYESIAELQRKEKTLQEQNNQLEKKLKEKELTQQAHWEHQSSTSFLLSQTLPTLNIGGTYQVRGSGSEEEVAQPHARTNTLMPPWMLRHVNE

SEQ ID NO: 4741 - protein, 244 aa, Euptelea pleiosperma
MGRGRVQLKRIENKISRQVTFSKRRSGLLKKAHEISVLCEADVAVIVFSTKGKLFEYSTNSGMEGILERYERYYYAEQEVVATDPESLGNWSMEYAKLKAKVDVLQRTQRHFMGEDLDSLSLKELQHLEQQLDTAMKQIRSRKNQLMYESVVELQRKDKVLQEQNSMLEKKIKEMEKSIAQQRHWEQQNQGQNSPSFLLSQTLPSLTIGGTYQARCTGGEEEEARTQSRFNTHMPPWMLRHLNP

SEQ ID NO: 4742 - protein, 245 aa, Sinofranchetia chinensis
MGRGRVQLKRIENKINRQVTFSKRKTGLLKKAHEISVLCDADVALIVFSTKGKLYEYSTESGMDRILEKYERYSYAERELVATDSESQGNWPLEYTKLKAKIEVLQKNQRHFMGQELNSMSFKELQNLEQQLDTALKQIRSKRNQLMNESISELQKKEKALQEQNNQLGKKLKEKEKTLAQLAHWEHPNQGQNSPSFLLSQTLPSLNIGGPSQTRGSGCEEERTRRPETRPNTLLPPWMLRHINQ

SEQ ID NO: 4743 - protein, 388 aa, Picea mariana
MGRAPCCAKVGLNKGAWSAEEDSLLGKYIQTHGEGNWRSLPKKAGLRRCGKSCRLRWLNYLRPCIKRGNITADEEELIIRMHALLGNRWSIIAGRVPGRTDNEIKNYWNTNLSKKLAVRGIDPKTHKKVTTDSINRASDRFNQRKGGKLYDCSQRSQRLERNVARAGQSTGLVIPNVHNLKADLKGQYIAGPRAIQSSNSIRSSSPINTLIQPKSNELTDDPDFMQPQPVVSSEAGKQTDDSTVYCSSDSAASCALIDHLSSADDDQYLSLEGNSNECYSHTVAEESGTLKSSNPQTHSEAICDSRERDNGGPVQKHDQFPEYDVLSFFDVRNAENEICCNDDQWVHEQEMPQLHSWDNQIDDQGKEHFGSHVNNDVTAMSWEASFWF

SEQ ID NO: 4744 - protein, 524 aa, Klebsiella pneumoniae
MSVIAQAGAKGRQLHKFGGSSLADAKCYLRVAGIMKEYSQAGDMMVVSAAGSTTNQLISWLKLSQSDRLAAHQVQQSLRRYHTELIGGLLEPAAADTLIAAFIHDLERLAGLLDGGVSEAVYAEVVGHGEVWSARLMAAVLNQLGMEAAWLDARAFLRAERAAQPQVDEGLSYPLLQQLMAQHPNKRLVVTGFISRNQAGETVLLGRNGSDYSATQIGALAGASRVTIWSDVAGVYSADPRKVKDACLLPLLRLDEASELARLAAPVLHARTLQPVSASDIDLQLRCSYTPEQGSTRIERVLASGTGARIVTSHDDVCLVEFQVPAGHDFKLAHKELDALLKRAQLRPLAVGVHADRKLLQFCYTSEVADSALKLLDEAGLPGELRLRQKLALVAMVGAGVTRNPLHCHRFWQQLKGQPVEFTWQSEEGISLVAVLRAGPTESLIQGLHQSLFRAEKRIGLMLFGKGNIGSRWLELFAREQTTLSARTGFEFILAGVVDSKRSLLNYDGLDAIRALAFFNDEAV

SEQ ID NO: 4745 - protein, 253 aa, Platanus x acerifolia
MSLLSDLINLNLSETTEKIIAEYIWIGGSGMDLRSKARTLPKLVDDPKKLPKWNYDGSSTGQAPGTDSEVILYPQAIFKDPFRRGNNILVMCDTYTPAGEPIPTNKRCNAEKIFSHPDVAAEEPWYGIEQEYTLLQKDVKWPLGWPVGGYPGPQGPYYCGVGSDKAWGRDIVDSHYKACIYAGINISGINGEVMPGQWEFQVGPSVGISAGDEVWVARYILERITEIAGVVLSFDPKPIQGDWNGAGAHTKLQ

SEQ ID NO: 4746 - protein, 880 aa, Aeromonas hydrophila
MIRIELPVLVERLNPICRHMLEEAAALCVNHQGAEIRIEHLLLKMLETPLSDVRQILKVAEVDVEELKALLQPSPADNGYGQGYPSFSPMLVEWLQDSWLLASAELQHAQLRSGVMLLVLLMTPQRYLPGSVTRLLAKVNRELLRQQFDEWVKESAETQVTTTPGGKTAQAALPADASLLARFTVNVTEQARQGSLDPVLCRDHEIDLMIDILSRRRKNNPIVVGEAGVGKSALIEGLALRMVAGQVPEKLRGVELMTLDLGAMQAGASVKGEFEKRFKGVMQEVKDAVQPVILFIDEAHTLIGAGNQAGGLDVSNLIKPALARGELRTIAATTWGEYKKYVEKDAALSRRFQLVKVGEPDADEATVILRGLRSIYEKAHGVLIDEEALQASAQLSARYISGRQLPDKAIDVLDTACARVAINLTTPPRAVSHLQNALRQRELEIRQLERQSLIGLGDNAERLAELQTAQQACREELAEQEARWQQQQGLVHQIVELRAALLADQQDEMLAREALDLADAPLDPQAAAEQLATLERELAELQQGEVLVSAHVDKTQIAAVIAEWTGVPLNRISQGELDVVTRLPEYLGELIKGQDVAVAHLHKHLLTARADLRRPGRPLGAFLLVGPSGVGKTETVLQIAELMFGGRQYLTTINMSEYQEKHTVSRLIGSPPGYVGFGEGGVLTEAIRQKPYSVVLLDEVEKAHPDVLNLFYQAFDKGELADGEGRIIDCKNVVFFLTSNLGFQTIVDHAEQPDVLLDALYPELAAFFKPALLARMEVIPYLPLGHDTLVQIVGGKLNRLVKLLKERFGAEVVLDDEVAEEILLRANRSENGARMLESVIDGALLPPVSLQLLQRLSAGEPIKRVHFSVADHQFVAEVGA

SEQ ID NO: 4747 - protein, 215 aa, Oryza sativa Japonica Group
MGFLSFAGRVLFAAAFLLSAYQEYALLLPPLPLPSLKNSPLANPDLRAPRRGGGRLDLAARRAARLSGGGEGGLDVGSGGFSEFGVDGGPAAKALQPKFNTIVANISTRTGLVVPHIELKHIVAAMISLKGLGGLLFILSSSLGAYLLLFHLAFITPVVHDFYNYDIESAEFVQLFTKFAQNCALVGALLFFLAMKNSIPKRQPNRKKAPKPKST

SEQ ID NO: 4748 - protein, 151 aa, Oryza sativa Japonica Group
MVRGRTELKRIENPTSRQVTFSKRRNGLLKKAFELSVLCDAEVALIVFSPRGRLYEFASAPSLQKTIDRYKAYTKDHVNNKTIQQDIQQVKDDTLGLAKKLEALDESRRKILGENLEGFSIEELRGLEMKLEKSLHKIRLKKVYISYFQYS

SEQ ID NO: 4749 - protein, 234 aa, Mesorhizobium sp. BNC1
MSRLDRSLISGLAPFQGLSAVDLDRMVGQARSLRIAKGEAVFEQEGEAHSFFLLLDGHVRVVKTTPDGQQVIVRYISPGELMGIAHALGRTTYPASAIAAVDCVVLAWPGRLWPEFAAAFPDFGVNTYRTVGSRLQDAHTRVVEMSTEQVDRRVAHALLKLVSQTGRRTDEGVLIDFPISRQDIAEMTGTTLHTVSRLLTAWEEQGLVKSGRQKVTVTEPHQLLMLAEGRTSKT

SEQ ID NO: 4750 - protein, 294 aa, Mesorhizobium sp. BNC1
MNIGFIGLGIMGRPMAGHLIDAGYTVHLNRVKPVSQHLVDKGGRAVATAKAVSEAADVIILMVPDTDDVETVLFGADGVAEGLSPGKLIIDMSSISPVATKAFAERIEALGCDYLDAPVSGGEAGAINASLTIMVGGNPEVFEKTRPLFEVLGKSITFIGPAGSGQITKVANQIVVGLTIEAVAEALTFARVAGADPVKVREALSGGLAASKILEMHGERMIKRTFDPGFRIRLHRKDMSIAVDSARQLGLALPNVALVEQMMNSAIARGDGDKDHSGLVRTIEALAGASPDPE

SEQ ID NO: 4751 - protein, 320 aa, Mesorhizobium sp. BNC1
MSVNGNTQPGLLVLTAVDNGRLGSVEGDYRVVFATAGGSTAGGSLEPFDRTELEQIEAIITNGGRGLSGAEMQAMPRLRFIQVLGSGTDKLDIDAAAGRGIVVASGVGSNAPSVADHAIGMALAILRDIPRFHIEASEGTWTPSQRPTLSGKVCGILGLGAVGEAIARRLIGFDARIAYHNRRAAPGSPYAYCGSPAELAAEADVLFVCCPGGAATYHLVDTGVLNALGSAGFLVNVGRGTVVDSDALAAALMKGAIAGAAIDVFEGEPLLPDVLRTAPNLVVTPHVAGLTSDALDAAWARARANLRAFRDHGEIVGRLV

SEQ ID NO: 4752 - protein, 289 aa, Mesorhizobium sp. BNC1
MRLANTKGGVLMKGKSLYAALLVAATPGMWGLSAAEAGTLDDIKARGELICGVLGNSEPFGYEDPGNRQVVGYEIDLCKDLAGTMDVTPTIKVIAPQARIPELQQGRVDLLAALISYTNERAEQVDFSNTYLVDSFRCMVKKDSGITGLDGLADKRISVQKGGLIEAALRSQFPNATVLSYDDVSERFVAFQQGKAAATCDRATLLRALQIRAKNEATTTILPEALNMMQKAGFAVRKGDKDFVDYLNQFLATYESSGKGQALFDRWVGASSNYDLSRDFKMGDDIASQ

SEQ ID NO: 4753 - protein, 388 aa, Mesorhizobium sp. BNC1
MASPLYLDHNATTPIDPAVVAAMEPFLREIFGNPASVEHAHGHAAGLAVDRARAQVAEALGAQPKEIVFTGSCTEANNLAILGVARAHPNKKHIVTTAIEHPAILEPARALERDGWRVTYAPVDEAGRVSVDAIADAITDETTLVSVMAANNEVGTLQPIRAIGELCEARGVLFHSDLAQVVAYGTVDVERDHIHLASLSAHKAYGPKGIGALYIRSRKPKARVAPIFFGGGQERGLRPGTLNTAAIVGMGEALAIARRCAQADGVRLRAMCNLFRDRLQTSLPGVKLNGHPAERLANNLSFSIEGVEPLALIRNLRADLSFSAASACATDKIETSHVLKAMFGDTGRARTAFRIAPGRHTSQADMDCALDLILAEAGILSSFARPAA

SEQ ID NO: 4754 - protein, 205 aa, Eucalyptus globulus
MGRGRVQLKRIENKINRQVTFSKRRCGLLKKAHEISVLCDADVALIVFSTKGKLFEYATDCCMERILERYERYSYAESQVLTNNAETNGNWTLEHAKLKARMEILQKNQKNLMGEELDSLSLKELQNLEHQLDTALKNIRSRKIQLMCESISELQRKDKALQEQNNMLAKKVKEKEKALAQQTQWDNPQDDGLTSSSGSLPSEWN

SEQ ID NO: 4755 - protein, 380 aa, Brassica nigra
MLKQESNYNISNRENNRGARACDTCRSTICTVYCHADSAYLCNSCDAEVHSANRVASRHKRVPVCESCERAPAAFMCEADDVSLCTACDSEVHSANPLARRHQRVPVVPITGNSCSSLATTHHTAVTEPEKRAVLVQDDEEGKEDAKETASWMFPYSDKGSPNHNNNNNNNNQNNELLFSDDYLDLADYNSSMDYKFTGQYNQPQHKQDCTVPQTNYGGDRVVPLQLEETRGNVRHKKEKITYGSSGSQYNYNDSINHNAYNPSMETDFVPEPTARETTVSHQKTPKIHQLPEPLVQILSPMDREARVLRYREKKKRRKFEKTIRYASRKAYAERRPRINGRFAKMSETEVEDQEYNTMLMYYDTGYGIVPSFYGQNKEY

SEQ ID NO: 4756 - protein, 348 aa, Brassica nigra
MLKQESNWAQACDTCRSAACTVYCRADSAYLCTSCDAQIHAANRLASRHERVRVCESCERAPAAFFCKADAASLCTACDSQIHSANPLARRHQRVPILPISGCVATNHHSSETTEPENIVVVGQEEEDEAEAASWLLPSSVKNCGDNNNNNNNNNISENNRFSVGEEYLDLVDYSSSIDKRFTGQTNQYQQDYNVPQRSYVADGVVPLQVGVANGHMHHEKHNFQFGFTNVSSEASPIHMVSLVPESVTSDATVSHPRSPKAGTEELPEAPVQMLSPMERKARVLRYREKKKTRKFEKRIRYASRKEYAEKRPRIKGRFAKRNEVDADHALSTMVMFDTGYGIVPSFS

SEQ ID NO: 4757 - protein, 224 aa, Brassica nigra
MLKEESNESVFLVGKEEDDDGREVASWLMLNLGKDNDSHNNGFLFGVEYLDPVDYSSSIDNQFEDQYSQYQRSFGGEDGVVPLQVEEITSHLQQSHHNYGHYNYNGSLKDLNHTVSVSSMDISVVPESRAIDTSVQHPKETIDQQSGPPTQKLTPADREARVLRYREKKKRRKFEKTIRYASRKAYAEIRPRIKGRFAKTIETEADAQQLLSTALVSYGIVPSF

SEQ ID NO: 4758 - protein, 688 aa, Oryza brachyantha
MPSLPVVTVPEPMAVDESASKKSKRKLKAAEAEAGKKKEKKEKKRKAKEPASSDEERSSTSSEEPAPAAKKAKKEKKKGKEEVAAVGEDDDGELTASGDEDPADPNALANFRISEPLREKLKSKGIKALFPIQATTFDLVLDGHDLVGRARTGQGKTLAFVLPILESLVNGKHKASGADYGRPPSVLVLLPTRELAKQVHTDFEFYGATFGLSSCCVYGGSEYRPQEMKIRKGVDIVVGTPGRVKDFVQKGTLNFKSLKFRVLDEADEMLNMGFVDDVELILGKVEDVTKVQTLLFSATLPDWVGKLSLRFLKPGKKTVDLVGDEKLKASASVRHLALPCNRAARAQVIPDIIRCYSRGGRTIIFTETKESASELSGLIAGSRALHGDVAQAQREVILAGFRSGKFLVLVATNVAARGLDINDVQLIIQCEPPRDVEAYIHRSGRTGRAGNTGVAVMLFDPRHKFNVNRIERESGVKFEHISAPQPTDVAQSAGSEAAEAIASVSDSVIPVFREQAEQLLSSSGMSAADLLAKALAKAVGYTDIKKRSLLSSMENHTTLLLQTGRSVYAPGFVLSTLKRFMPEERLADVKGITLTADGTGAVFDVPSAEVEDYIQGSENAAMVTIEEVKQLPPLQERDQSRGSNGGGRFGNRRFSGGGGGGRGGGGNRFGGGNRFGGRGGGGNRFNKR

SEQ ID NO: 4759 - protein, 844 aa, Oryza brachyantha
MSFGGMFDGAGSGVFSYDAGGGGGGGGGGGVHNSRLLPAPPVPKPGGGYAAPGLSLGLQTNMDGGHLGDMNRSLAMMGNGGSGSGGDGDSLGRGREDENDSRSGSDNLDGASGDDLDPDNSNPRKKKKRYHRHTPQQIQELEAVFKECPHPDEKQRMELSRRLNLESRQVKFWFQNRRTQMKTQIERHENALLRQENDKLRAENMTIREAMRNPMCASCGGAAVLGEVSLEEQHLRIENARLKDELDRVCALAGKFLGRPISSISSPSPPSLQACSGLELGVGSNGFGLGALGASGLQSIPDLMGGSAGLPVGSAAMRLPAGIGGLDGAMHAAAADGGAIDRAVLLELALAAMDELVKVAQMDEPLWLPSLDGGFEALNYDEYHRAFARVLGQSPGSYVSEATRESGIAIISSVDLVDSLMDAPRWSEMFPCIVARASTTDIISSGMGGTRSGSIQLMHAELQVLSPLVPIREVVFLRFCKQHAEGLWAVVDVSVDAVLRPDQNGGGGGGVSSSSSYMGCRLLPTGCIVQDMNNGYSKVTWVVHAAYDETAVHQLYRPLLRSGQALGARRWLASLQRQCQYLAILCSNSLPARDHAAITPKWRRLDEWRGGEGGGGAGDGEDKVRMMARHSVGAPGEPPGVVLSATTSVRLPGTLPQRVFDYLRDEQRRGDWDILANGEAMQEMDHIAKGQHHGNAVSLLRPNATSGNQNNMLILQETCTDSSGSLVVYAPVDVQSMHVVMNGGDSAYVSLLPSGFAILPDGHNSASPSPVDVGSASPSSTAGAGATGGGSNNTGSLVTVAFQILVNNLPTAKLTVESVDTVSNLLSCTIQKIKSALQANIISP

SEQ ID NO: 4760 - protein, 509 aa, Capsicum chinense
MEGTTWTAYAAVFLGTLFLLLLSKFLRQKKLNLPPGPKPWPIIGNLHLMGNLPHRSIHELSVKYGPILQLQFGSFPVVVGSSVEMAKIFLKSMDINFVGRPKTAAGKHTTYNYSDITWSPYGSYWRQARRMCLTELFSAKRLDSYEYIRAEELHLILRNLNKLSGKPILLKDYLTTLSLNVISRMVLGKRYLDESKNSIVTPEEFKKMLDELFLLNGVLNIGDSIPWLGFMDLQGYVKRMKVLSKKFDKFLEHVLDEHNVRRKAVENYVAKDMVDVLLQLADDPSLEIKLERHGVKAFTQDLLAGGTESSAVTVEWAISELLKRPDIIKKATEELDRVIGQNRWVQEKDIPNLPYIEAVVKETMRLHPVAPMLVPRECREDCKVAGYDVQKGTRVLVSVWTIGRDPTLWDEPEAFEPERFLEKSIDVKGHDFELLPFGAGRRMCPGYSLGLKVIQASLANLLHGFKWSLPDNMTPEDLNMEEIFGLSTPKKFPLSAMIEPRLPPSLYSV

SEQ ID NO: 4761 - protein, 908 aa, Monostroma angicava
MTPGPITTDAAAGVGVDTTDGTMKWELFEENRTLTTRSGQMIVNDGEFGKWNDTDEGRVKCFLTPDEGFGDAIESLVIVLYRLPIIAKRDATTGAWSFKWDDDALYLTSTGLRKGLEQLKVAPLWVGILNSDDEVPRQEREGVADRLLEEFNCVPVFIPHDTLKQFYQGFCKGTLWPLFHMVSSATDHTEHTTRFDDRLWRVYMNVNRMFRDKVVEVYDGDRALIWVHDYHLMLLPQASRSRLSGVKIGFFLHIPWPSSEVYRVLPWRNELLKGMLSATLLGFHLFDYARHFLSACVRLLNLEHEANRGSLGLEYDGRHVMLRVSHIGVDPERFSEGLSAPSLTDRVAEFKERFADCTVLGAVDDLDLIKGIALKLMGFQRYLDSAPKMRGKVVLVQVAIPKAARVKESVRNEIRELVAAINNKHGDGSGRRPVWYLEESISFESRLALYSIMDALVVTPIRDGLNLIPYEYIVSTSEGKGQLILSEFTGCSRALSSAERVNPWDLEKLSNVLDMVVQKAIAAAPEVELKRRADKAYVSAHSSQQWAQSFLHDLKEASEPAQVVVKVGPLAGLPGVLAYDEFTLLNRSAVLRAYKAAKRRLFLFDYDGTLTSITDQSSQMAHAWARPSEAVAANLDTLSKDPLNDVYIMSGRKTEVLEAGLNNSPTIGIAAEHGFFYRKKNSKEWNRLLEDADLSWMELALRIMLMYTDRTDGSYVEQKKAGLVWHYLDADREFGSWQAKEMRDHLESLLSPFSVQVVTGYGWLQVRMAAMNKGVMVETILRDMPEPPDFVLCCGDDRTDEDMFAYLDTHLDPSVKQFTCTVGVKPSHARYYLHSSNEVGALLETLVTGSYPRGVRPRPRGGSVSLADLVPDDEGSSSTPAVPQRTNGPRTSASGQKRRGLASSLPSQ

SEQ ID NO: 4762 - protein, 908 aa, Porphyra haitanensis
MTPGPITTDAAAGVGVDTTDGTMKWELFEENRTLTTRSGQMIVNDGEFGKWNDTDEGRVKCFLTPDEGFGDAIESLVIVLYRLPIIAKRDATTGAWSFKWDDDALYLTSTGLRKGLEQLKVAPLWVGILNSDDEVPRQEREGVADRLLEEFNCVPVFIPHDTLKQFYQGFCKGTLWPLFHMVSSATDHTEHTTRFDDRLWRVYMNVNRMFRDKVVEVYDGDRALIWVHDYHLMLLPQASRSRLSGVKIGFFLHIPWPSSEVYRVLPWRNELLKGMLSATLLGFHLFDYARHFLSACVRLLNLEHEANRGSLGLEYDGRHVMLRVSHIGVDPERFSEGLSAPSLTDRVAEFKERFADCTVLGAVDDLDLIKGIALKLMGFQRYLDSAPKMRGKVVLVQVAIPKAARVKESVRNEIRELVAAINDKHGDGSGRRPVWYLEESISFESRLALYSIMDALVVTPIRDGLNLIPYEYIVSTSEGKGQLVLSEFTGCSRALSSAVRVNPWDLEKLCGVLDMVVQKAIAASPEVELKRRADKAYVSAHSSQQWAQSFLHDLKEASEPAQVVVKVGPLAGLPGVLTYDEFTLLNRSAVLRAYKAAKRRLFLFDYDGTLTSITEQSSQMAHAWARPSEAVAANLDTLSKDPINDVYIMSGRKTEVLEAGLNNSPTIGIAAEHGFFYRKKNSKEWQRLLEDADLSWMELTLRIMLMYTDRTDGSYVEQKTAGIVWHYLDADREFGSWQAKELRDHLESLLTPFSVQVVSGYGWLQVRMAAMNKGVMVETILQDMPEPPDFVLCCGDDRTDEDMFTYLDTHLDPSVKQFTCTVGVKPSNARYYLHSSNEVGALLETLVTGSYPRGVRPRGRGASISLADLVPDDEGSSSTPPMPQRTNGPRTSASGQKRRGLASSLPSQ

SEQ ID NO: 4763 - protein, 908 aa, Gracilaria lemaneiformis
MTPGPITTDAAAGVGVDTTDGTMKWELFEENRTLTTRSGQMIVNDGEFGKWNDTDEGRVKCFLTPDEGFGDAIESLVIVLYRLPIIAKRDATTGAWSFKWDDDALYLTSTGLRKGLEQLKVAPLWVGILNSDDEVPRQEREGVADRLLEEFNCVPVFIPHDTLKQFYQGFCKGTLWPLFHMVSSATDHTEHTTRFDDRLWRVYMNVNRMFRDKVVEVYDGDRALIWVHDYHLMLLPQASRSRLSGVKIGFFLHIPWPSSEVYRVLPWRNELLKGMLSATLLGFHLFDYARHFLSACVRLLNLEHEANRGSLGLEYDGRHVMLRVSHIGVDPERFSEGLSAPSLTDRVAEFKERFADCTVLGAVDDLDLIKGIALKLMGFQRYLDSAPKMRGKVVLVQVAIPKAARVKESVRNEIRELVAAINNKHGDGSGRRPVWYLEESISFESRLALYSIMDALVVTPIRDGLNLIPYEYIVSTSEGKGQLILSEFTGCSRALSSAERVNPWDLEKLSNVLDMVVQKAIAAAPEVELKRRADKAYVSAHSSQQWAQSFLHDLKEASEPAQVVVKVGPLAGLPGVLAYDEFTLLNRSAVLRAYKAAKRRLFLFDYDGTLTSITDQSSQMAHAWARPSEAVAANLDTLSKDPLNDVYIMSGRKTEVPEAGLNNSPTIGIAAEHGFFYRKKNSKEWNRLLEDADLSWMELALRIMLMYTDRTDGSYVEQKKAGLVWHYLDADREFGSWQAKEMRDHLESLLSPFSVQVVTGYGRLQVRMAAMNKGVMVETILRDMPEPPDFVLCCGDDRTDEDMFAYLDTHLDPSVKQFTCTVGVKPSHARYYLHSSNEVGALLETLVTGSYPRGVRPRPRGGSVSLADLVPDDEGSSSTPAVPQRTNGPRTSASGQKRRGLASSLPSQ

SEQ ID NO: 4764 - protein, 908 aa, Chondrus ocellatus
MTPGPITTDAAAGVGVDTTDGTMKWELFEENRTLTTRSGQMIVNDGEFGKWNDTDEGRVKCFLTPDEGFGDAIESLVIVLYRLPIIAKRDATTGAWSFKWDDDALYLTSTGLRKGLEQLKVAPLWVGILNSDDEVPRQEREGVADRLLEEFNCVPVFIPHDTLKQFYQGFCKGTLWPLFHMVSSATDHTEHTTRFDDRLWRVYMNVNRMFRDKVVEVYDGDRALIWVHDYHLMLLPQASRSRLSGVKIGFFLHIPWPSSEVYRVLPWRNELLKGMLSATLLGFHLFDYARHFLSACVRLLNLEHEANRGSLGLEYDGRHVMLRVSHIGVDPERFSEGLSAPSLTDRVAEFKERFADCTVLGAVDDLDLIKGIALKLMGFQRYLDSAPKMRGKVVLVQVAIPKAARVKESVRNEIRELVAAINNKHGDGSGRRPVWYLEESISFESRLALYSIMDALVVTPIRDGLNLIPYEYIVSTSEGKGQLILSEFTGCSRALSSAERVNPWDLEKLSNVLDMVVQKAIAAAPEVELKRRADKAYVSAHSSQQWAQSFLHDLKEASEPAQVVVKVGPLAGLPGVLAYDEFTLLNRSAVLRAYKAAKRRLFLFDYDGTLTSITDQSPQMAHAWARPSEAVAANLDTLSKDPLNDVYIMSGRKTEVLEAGLNNSPTIGIAAEHGFFYRKKNSKEWNRLLEDADLSWMELALRIMLMYTDRTDGSYVEQKKAGLVWHYLDADREFGSWQAKEMRDHLESLLSPFSVQVVTGYGWLQVRMAAMNKGVMVETILRDMPEPPDFVLCCGDDRTDEDMFAYLDTHLDPSVKQFTCTVGVKPSHARYYLHSSNEVGALLETLVTGSYPRGVRPRPRGGSVSLADLVPDDEGSSSTPAVPQRTNGPRTSASCQKRRGLASSLPSQ

SEQ ID NO: 4765 - protein, 908 aa, Ulva pertusa
MTPGPITTDAAAGVGVDTMDGTMKWELFEENRTLTTRSGQMIVNDGEFGKWNDTDEGRVKCFLTPDEGFGDAIESLVIVLYRLPIIAKRDATTGAWSFKWDDDALYLTSTGLRKGLEQLKVAPLWVGILNSDDEVPRQEREGVADRLLEEFNCVPVFIPHDTLKQFYQGFCKGTLWPLFHMVSSATDHTEHTTRFDDRLWRVYMNVNRMFRDKVVEVYDGDRALIWVHDYHLMLLPQASRSRLSGVKIGFFLHIPWPSSEVYRVLPWRNELLKGMLSATLLGFHLFDYARHFLSACVRLLNLEHEANRGSLGLEYDGRHVMLRVSHIGVDPERFSEGLSAPSLTDRVAEFKERFADCTVLGAVDDLDLIKGIALKLMGFQRYLDTAPKMRGKVVLVQVAIPKAARVKAAVRNEIRELVAAINDKHGDGSGRRPVWYLEESISFESRLALYSIMDALVVTPIRDGLNLIPYEYIVSTSEGKGQLVLSEFTGCSRALSSAVRVNPWDLEKLCGVLGMVVQKAIAASPEVELKRRADKAYVSARSSQQWAQSFLHDLKEASEPAQVVVKVGPLAGLPGVLTYDEFTLLNRSAVLRAYKAAKRRLFLFDYDGTLTSITEQSSQMAHAWARPSEAVAANLDTLSKDPINDVYIMSGRKTEVLEAGLNNSPTIGIAAEHGFFYRKKNSKEWNRLLEDADLSWMELALRIMLMYTDRTDGSYVEQKKAGLVWHYLDADREFGSWQAKEMRDHLESLLSPFSVQVVTGYGWLQVRMAAMNKGVMVETILRDMPEPPDFVLCCGDDRTDEDMFAYLDTHLDPSVKQFTCTVGVKPSHARYYLHSSNEVGALLETLVTGSYPRGVRPRPRGGSVSLADLVPDDEGSSSTPAVPQRTNGPRTSASGQKRRGLASSLPSQ

SEQ ID NO: 4766 - protein, 908 aa, Ulva prolifera
MTPGPITTDAAAGVGVDTTDGTMKWELFEENRTLTTRSGQMIVNDGEFGKWNDTDEGRVKCFLTPDEGFGDAIESLVIVLYRLPIIAKRDATTGAWSFKWDDDALYLTSTGLRKGLEQLKVAPLWVGILNSDDEVPRQEREGVADRLLEEFNCVPVFIPHDTLKQFYQGFCKGTLWPLFHMVSSATDHTEHTTRFDDRLWRVYMNVNRMFRDKVVEVYDGDRALIWVHDYHLMLLPQASRSRLSGVKIGFFLHIPWPSSEVYRVLPWRNELLKGMLSATLLGFHLFDYARHFLSACVRLLNLEHEANRGSLGLEYDGRHVMLRVSHIGVDPERFSEGLSAPSLTDRVAEFKERFADCTVLGAVDDLDLIKGIALKLMGFQRYLDSAPKMRGKVVLVQVAIPKAARVKESVRNEIRELVAAINNKHGDGSGRRPVWYLEESISFESRLALYSIMDALVVTPIRDGLNLIPYEYIVSTSEGKGQLILSEFTGCSRALSSAERVNPWDLEKLSNVLDMVVQKAIAAAPEVELKRRADKAYVSAHSSQQWAQSFLHDLKEASEPAQVVVKVGPLAGLPGVLAYDEFTLLNRSAVLRAYKAAKRRLFLFDYDGTLTSITDQSSQMAHAWARPSEAVAANLDTLSKDPLNDVYIMSGRKTEVLEAGLNNSPTIGIAAEHGFFYRKKNSKEWNRLLEDADLSWMELALRIMLMYTDRTDGPYVEQKKAGLVWHYLDADREFGSWQAKEMRDHLESLLSPFSVQVVTGYGWLQVRMAAMNKGVMVETILRDMPEPPDFVLCCGDDRTDEDMFAYLDTHLDPSVKQFTCTVGVKPSHARYYLHSSNEVGALLETLVTGSYPRGVRPRPRGGSVSLADLVPDDEGSSSTPAVPQRTNGPRTSASGQKRRGLASSLPSQ

SEQ ID NO: 4767 - protein, 105 aa, Arabidopsis thaliana
GSHMLEDPQRRIRRPFSVAEVEALVQAVEKLGTGRWRDVKLCAFEDADHRTYVDLKDKWKTLVHTAKISPQQRRGEPVPQELLNRVLNAHGYWTQQQMQQLQQNV

SEQ ID NO: 4768 - protein, 304 aa, Anabaena sp.
MTQAKAKHADVPVNLYRPNAPFIGKVISNEPLVKEGGIGIVQHIKFDLTGGNLKYIEGQSIGIIPPGVDKNGKPEKLRLYSIASTRHGDDVDDKTISLCVRQLEYKHPESGETVYGVCSTYLTHIEPGSEVKITGPVGKEMLLPDDPEANVIMLAGGTGITPMRTYLWRMFKDAERAANPEYQFKGFSWLVFGVPTTPNILYKEELEEIQQKYPDNFRLTYAISREQKNPQGGRMYIQDRVAEHADQLWQLIKNQKTHTYICGPPPMEEGIDAALSAAAAKEGVTWSDYQKDLKKAGRWHVETY

SEQ ID NO: 4769 - protein, 334 aa, Pyrococcus horikoshii
  misc_feature (1)..(1): Xaa can be any naturally occurring amino acid
  misc_feature (18)..(18): Xaa can be any naturally occurring amino acid
  misc_feature (52)..(52): Xaa can be any naturally occurring amino acid
  misc_feature (174)..(174): Xaa can be any naturally occurring amino acid
  misc_feature (230)..(230): Xaa can be any naturally occurring amino acid
  misc_feature (300)..(300): Xaa can be any naturally occurring amino acid
  unsure (1)..(334): unsure at all Xaa locations
XKPKVFITREIPEVGIKXLEDEFEVEVWGDEKEIPREILLKKVKEVDALVTXLSERIDKEVFENAPKLRIVANYAVGYDNIDIEEATKRGIYVTNTPDVLTDATADLAFALLLATARHVVKGDRFVRSGEWKKRGVAWHPKWFLGYDVYGKTIGIIGLGRIGQAIAKRAKGFNXRILYYSRTRKEEVERELNAEFKPLEDLLRESDFVVLAVPLTRETYHLINEERLKLXKKTAILINIARGKVVDTNALVKALKEGWIAGAGLDVFEEEPYYNEELFKLDNVVLTPHIGSASFGAREGXAELVAKNLIAFKRGEIPPTLVNREVIKIRKPGFE

SEQ ID NO: 4770 - protein, 570 aa, Fusarium oxysporum f. sp. lycopersici
MSNSNLQKPIDVAEYLFKRLYEVGVRSVHGVPGDYNLVALDYLPQCNLKWVGSVNELNAAYAADGYARVTKMAALITTFGVGELSAVNGVAGSYSEHIPVVHIVGCPSTISQRDQMLLHHTLGNGDFDVFANMSAQISCNVAKLNKPSEIAEQIDTALRTCWLRSRPVYIMVPTDMVQEKVEGARLDTSIDLSEPQNDPGNEDFVVDEILKAMYAAQRPVILVDSCAIRHRVVKEVHQLIDKLDLPVFVTPMGKGAVNEDHPNYGGVFAGDGSHPARAQSIVEGSDLLLTIGALKSDFNTTGFSYRTSQINSVDFHSTHCKVRYSTYPGVAMRGVLRKIIDRVDPKSMPAPSIPEVRNEVEKNTDDSEIITQAWLWPRVGEYLIPNDIVVTETGTANFGIWDTRFPRNVTALSQVLWGSIGWSVGACQGAALAAKDAGKEGRTILFVGDGSFQLTAQELSTMIRHHLKPTIFVICNDGFTIERFIHGMDAVYNDINNWKYKDLVSVFGGEKTCKTFQIKTKTELNELLTNKEFNAAECLQFVELYMPREDAPRALIMTAEASARNNAKKH

SEQ ID NO: 4771 - protein, 245 aa, Populus tomentosa
MGRGRVELKRIENKINRQVTFAKRRNGLLKKAYELSVLCDAEVALIIFSNRGKLYEFCSTSNMLKTLERYQKCSYGAEEVNKPAKELENSYREYLKVKARFEALQRTQRNLLGEDLGPLNTKDLEQLERQLESSLNQVRSTKTQYMLDQLADLQNKEHLLLEANRGLTMKLDEISARNSLRPSWEGDDQQNMSYGHQHAQSQGLFQALECNPTLQIGYNPVGSDQMSCTTHATQQVHGFIPGWML

SEQ ID NO: 4772 - protein, 913 aa, Triticum turgidum subsp. durum
MNPDNFTHKTNEALVAAHEAASEAGHAQITPLHLAAALAADKSGILRQAVAGASGGNASAGDSFERVLAGALKKLPSQSPPPDSVPASTALIKAIRRAQSAQKKRGDSHLAVDQLLMGLLEDAQIADCLKEAGVSASRVRAELDKLRGGDNSRKVESASGDTTFQALKTYGRDLVEVAGKLDPVIGRDEEIRRVVRILSRRTKNNPVLIGEPGVGKTAVVEGLAQRVVRGDVPSNLLDVRLVALDMGALVAGAKYRGEFEERLKAVLKEVEEADGKVILFIDEIHLVLGAGRTEGSMDAANLFKPMLARGQLRCIGATTLEEYRKYVEKDAAFERRFQQVYVAEPSVADTISILRGLKEKYEGHHGVRIQDRAIVVAAQLSARYIMGRHLPDKAIDLVDEACANVRVQLDSQPEEIDNLERKRIQLEVELHALEKEKDKASKARLVEVRKELDDLRDKLQPLTMKYRKEKERIDEIRKLKQRREELQFTLQEAERRMDLARVADLKYGALQEIDAAIAKLEGETGENLMLTETVGPEQIAEVVSRWTGIPVTRLGQNDKERLVGMADRLHTRVVGQTEAVNAVAEAVLRSRAGLGRPQQPTGSFLFLGPTGVGKTELAKALAEQLFDDENLLVRIDMSEYMEQHSVARLIGAPPGYVGHEEGGQLTEQVRRRPYSVILFDEVEKAHVAVFNTLLQVLDDGRLTDGQGRTVDFRNTVIIMTSNLGAEHLLAGMVGKNSMKVARDLVMQEVRRHFRPELLNRLDEMVIFDPLSHEQLRKVARLQMKDVAVRLAERGVALAVTDAALDVILSLAYDPVYGARPIRRWIEKRVVTQLSKMLIQEEINENCTVYIDAADKDELAYRVDRSGGLVNAETGQRSDILIQVPNGALGGGGGGEAAKAVKKMRVMEDGDEDA

SEQ ID NO: 4773 - protein, 917 aa, Triticum turgidum subsp. durum
MNPDNFTHKTNEALVAAHEAASEAGHAQITPLHLAAALAADRSGILRQAVAGASGGNASAGDSFERVLSAALKKLPSQSPPPDSVPASTALIKAIRRAQSAQKKRGDSHLAVDQLLMGLLEDAQIADCLKEAGVSASRVRAELEKLRGGDNARKVESASGDTNFQALKTYGRDLVEVAGKLDPVIGRDEEIRRVVRILSRRTKNNPVLIGEPGVGKTAVVEGLAQRVVRGDVPSNLLDVRLVALDMGALVAGAKYRGEFEERLKAVLKEVEEADGKVILFIDEIHLVLGAGRTEGSMDAANLFKPMLARGQLRCIGATTLEEYRKYVEKDAAFERRFQQVYVAEPSVADTISILRGLKEKYEGHHGVRIQDRAIVVAAQLSARYIMGRHLPDKAIDLVDEACANVRVQLDSQPEEIDNLERKRIQLEVELHALEKEKDKASKARLVEVRKELDDLRDKLQPLTMKYRKEKERIDEIRKLKQRREELQFTLQEAERRMDLARVADLKYGALQEIDAAIAKLEGETGENLMLTETVGPEQIAEVVSRWTGIPVTRLGQNDKERLVGMADRLHTRVVGQTEAVNAVAEAVLRSRAGLGRPQQPTGSFLFLGPTGVGKTELAKALAEQLFDDENLLVRIDMSEYMEQHSVARLIGAPPGYVGHEEGGQLTEQVRRRPYSVILFDEVEKAHVAVFNTLLQVLDDGRLTDGQGRTVDFRNTVIIMTSNLGAEHLLAGMVGKNSMKVARDLVMQEVRRHFRPELLNRLDEIVVFDPLSHEQLRKVARLQMRDVAVRLAERGVALAVTDAALDVILSLAYDPVYGARPIRRWIEKRVVTQLSKMLIQEEIDENCTVYIDAANKDELAYRVDRSGGLVNAETGQRSDILIQVPNGALGGGGGEAAKAVKKMRVMEDGDEDSMDEDV

SEQ ID NO: 4774 - protein, 913 aa, Triticum turgidum subsp. durum
MNPDKFTHKTNEALAAAHEMASEAGHPQLTPLHLAAALAADRSGILRQAIAHASGGNDAAADSFERVASAALKRLPSQSPPPDTVPASTSLVKAVRRAQSAQKSRGDSHLAVDQLLMGLLEDAQISDALKEAGISAARVKAEVEKLRGGDNRRVESASGDTNFQALKTYGRDLVEVAGKLDPVIGRDEEIRRVVRILSRRTKNNPVLIGEPGVGKTAVVEGLAQRVVRGDVPSNLLDVRLVALDMGALVAGAKYRGEFEERLKAVLKEVEEAEGKVILFIDEIHLVLGAGRTEGSMDAANLFKPMLARGQLRCIGATTLEEYRKYVEKDAAFERRFQQVFVAEPSVPDTVSILRGLKEKYEGHHGVRIQDRALVIAAQLSSRYITGRHLPDKAIDLVDEACANVRVQLDSQPEEIDNLERKRIQLEVELHALEKEKDKASKARLVDVRKELDDLRDKLQPLQMKYRKEKERIDEIRSLKQRREELQFTLQEAERRMDLARVADLRYGALQEVDAAIAKLEGETGENLMLTETVGPDQIAEVVSRWTGIPVTRLGQNEKARLIGLADRLHQRVVGQYEAVNAVGEAVLRSRAGLGRPQQPTGSFLFLGPTGVGKTELAKALAEQLFDDENLLVRIDMSEYMEQHSVARLIGAPPGYVGHEEGGQLTEQVRRRPYSVVLFDEVEKAHVAVFNTLLQVLDDGRLTDGQGRTVDFRNTVIIMTSNLGAEHLLAGMVGSSMKVARDLVMQEVRRHFRPELLNRLDEIVIFDPLSHEQLRKVARLQMKDVAVRLAERGVALAVTDAALDVILSLSYDPVYGARPIRRWIEKRIVTELSKMLIREEIDENSTVYIDAAPSKDELTYGVDKHGGLVNARTGHKSDILIQVPNGAVGGDAAHAVKKMKIMQDGGDVDDMEEE

SEQ ID NO: 4775 - protein, 913 aa, Triticum turgidum subsp. durum
MNPDKFTHKTNEALAAAHEMASEAGHAQLTPLHLAAALAADRSGILRQAIAHASGGNDAAAESFERVATAALKRLPSQSPPPDTVPASTSLVKAVRRAQSAQKSRGDSHLAVDQLLMGLLEDPQISDALKEAGISAARVKAEVEKLRGGDNRRVESASGDTNFQALKTYGRDLVEVAGKLDPVIGRDEEIRRVVRILSRRTKNNPVLIGEPGVGKTAVVEGLAQRVVRGDVPSNLLDVRLVALDMGALVAGAKYRGEFEERLKAVLKEVEEAEGKVILFIDEIHLVLGAGRTEGSMDAANLFKPMLARGQLRCIGATTLEEYRKYVEKDAAFERRFQQVFVAEPSVPDTVSILRGLKEKYEGHHGVRIQDRALVIAAQLSSRYIMGRHLPDKAIDLVDEACANVRVQLDSQPEEIDNLERKRIQLEVELHALEKEKDKASKARLVDVRKELDDLRDKLQPLQMKYRKEKERIDEIRRLKQRREELQFTLQEAERRMDLARVADLRYGALQEVDAAIAKLEGETGENLMLTETVGPDQIAEVVSRWTGIPVTRLGQNEKARLIGLADRLHQRVVGQYEAVNAVGEAVLRSRAGLGRPQQPTGSFLFLGPTGVGKTELAKALAEQLFDHENLLVRIDMSEYMEQHSVARLIGAPPGYVGHEEGGQLTEQVRRRPYSVILFDEVEKAHVAVFNTLLQVLDDGRLTDGQGRTVDFRNTVIIMTSNLGAEHLLAGMVGNSMKVARDLVMQEVRRHFRPELLNRLDEIVIFDPLSHEQLRKVARLQMKDVAVRLAERGVALAVTDAALDVILSLSYDPVYGARPIRRWIEKRIVAELSKMLIREEIDENSTVYIDAAPSKDELTYGVDKHGGLVNARTGHKSDILIQVPSGAVEGDAAHAVKKMKIMQDGGEVDDMEEE

SEQ ID NO: 4776 - protein, 609 aa, Mesorhizobium sp. BNC1
MENNRNLLITIALSVVILTLWQVFYVNPRVDAQREAAQIEAQRAQETEEKLGTQGADIPAPGATPGSTAVPGSAIPRTQVTRQEALAGAERVTIDTPRLAGTINLAGARLDDLLLKDYRVTVDKDSPNIDLLGPAGLPEGYFVEVGYTGNASTGAVPGPDTVWQLQEGSTLSPGSPVTLSFTNDRGLTFLRTFAVDENYLFTITDTIRNAAGEPVEIRNYGRTTRFGQPKTAGIYILHEGFIGVLGEEGLREVDYSTAQEDGQVLPGKSADGWLGITDKYWAVTMVPRAQKDFEPRFAYFSDGRERYQADYLTDPVTVAPGGEAKIETLVFAGAKEVHVVDAYETQHNIRQFELLIDWGWFYFITKPMFYLIDWLFRLLGNFGVAILATTVFVKLVFFPLANKSYKSMANMKKVQPALLEIREKYADDKMKQQQAMMELYKKEKINPLAGCWPILIQIPVFFALYKVLYVTIEMRHAPFFGWIQDLSAPDPTTIFNLFGLLPFDPSQVPVFGPFLMLGVWPIIMGITMFLQMRMNPTPPDPTQAMIFNWMPVIFTFMLATFPAGLVIYWAWNNLLSIIQQGVIMKRQGAKIELWDNMVNLFRRKPKPAE

SEQ ID NO: 4777 - protein, 636 aa, Mesorhizobium sp. BNC1
MAKVIGIDLGTTNSCVAVMDGKDAKVIENAEGARTTPSIVAFTDSDERLVGQPAKRQAVTNPENTFFAIKRLIGRRFEDPMVEKDKKLVPYKIVKADNGDAWVESHGTKYSPSQISAMILQKMKETAESYLGEKVEKAVITVPAYFNDAQRQATKDAGKIAGLEVLRIINEPTAAALAYGLDKKEGKTIAVYDLGGGTFDISILEIGDGVFEVKSTNGDTFLGGEDFDMRLVNYLADEFKKEQGIDLKNDKLALQRLKEAAEKAKIELSSSSQTEINLPFITADQTGPKHLAIKLTRAKFESLVEDLVTRTIEPCRAALKDAGLSAGEIDEVVLVGGMTRMPKVQETVKNFFGKEPHKGVNPDEVVAMGAAIQAGVLQGDVKDVLLLDVTPLSLGIETLGGVFTRLIDRNTTIPTKKSQVFSTAEDNQNAVTIRVFQGEREMAADNKLLGQFDLVGIPPAPRGMPQIEVTFDIDANGIVNVSAKDKGTGKEQQIRIQASGGLSDAEIEKMVKDAEANAEADKKRRETVEVKNQAEALIHSTEKSLKDYGDKVSEDDRKAIENAIAELKTATEGEDADAIRAKTTALAEASMKLGQAVYEASQAENAAGGTEETGGAKDDVVDADFEEIDEDDKKSA

SEQ ID NO: 4778 - protein, 476 aa, Mesorhizobium sp. BNC1
MNAETNTLDPALADRFAAIVGERHALRDEGDIEPHLVEPRGLWGGRSLLVLKPGSTEEVSRILKLATETGTPIVPQGGNTGLVGGQMPDATGREVILSTSRLNRIREVDLSSNTATVEAGVVLQVLQEEAAKNDRLFPLSLGAQGSCQIGGNLSSNAGGVGALAYGVARDLCLGLEVVLPTGEIFDDLRKLKKDNTGYDLKDLFIGAEGTLGVITAAVVKLYPMPKGRDLAWVGLGSPVDALRLFELANEKAGRALTMFELIEKTPLDFVLRHIPQARAPLAESHPWNALIEISSGRSAEDARFLMEEILAAGFEAGWATDAVIAQNETQQLQLRQLREDMSDAQRPEGGSIKHDISVPVAAIPEFIERAAKIVQEVVPGVRPVCFGHMGDGNLHYNISQPAGASKEEFLTHYRAMNDAVHALVRELGGSFSAEHGIGRMKRAELLATQPAVATDLMRRVKAAFDPQGIMNPGKVI

SEQ ID NO: 4779 - protein, 377 aa, Mesorhizobium sp. BNC1
MDRFEIAICGGGVGGLTAALALTKIGHRVTVFERAEKFLRIGADVNLTPNAVKALDGLGIGERLRKTAARPAYRISRTWDTGEETSRLPMSVAAEEKYGAPQLTIHRGDLLQAMEEAIDPACIRLGHQAESVNVDGARPVVTFADGKAESFDLVIGADGIHSAVRTSLFGADAPEFTGLVSYRSVIESKDVDVPNLDCFTKWWGPTPDMQIVTFPLLRGEELFVFATTSQPEWTAESWTMPGEVEELRAVYADFHPEVQKILAACTSVTKSALYVRKPFAQWSRGGATILGDAAHPMVPFMAQGACMAIEDAIVLARVLQGAALAEIPLRLKTYEELRKPRTSQVQEGSRANNWLKGQGNADWVYGYDAWRLAIPSS

SEQ ID NO: 4780 - protein, 305 aa, Mesorhizobium sp. BNC1
MTETGEPSPGTRSGFVALIGAPNAGKSTLLNQLVGAKVSIVTHKVQTTRALVRGIATRDRTQIVFVDTPGIFKPRRRLDRAMVTTAWGGAKDADIVAFLLDAERGIRGDAETILDNLSEVRQPKILILNKVDRIKRDKLLVLAAEANERVSFDRTFMISALTGDGCDDLLGYLAEALPEGPWYYPEDQISDLPMRQLAAEITREKIYMRLHQELPYSAHVETEKWEEKKDGSVRIEQVIYVERESQKKIVLGHKGSTIRDIGQAAREDIAQILEQKVHLFLFVKVRENWGDDPERYREMGLEFPG

SEQ ID NO: 4781 - protein, 342 aa, Mesorhizobium sp. BNC1
MPMSSSNKFKVAVVGRAFGPEAQAIIQEVAPPEFDLSFSVDTTEKAHPLIRESDFCLVTTAITEKLLQESPKLRLVHKWGIGIDKIDLEGAERQGVYVAITAGSNAGAVAEHTIMLILAALRRLALADQSMREGKWIYTELRPLCRKLSGKTVGILGFGNIGRNVAQRLQGFDVEIIYHDPFRAPPEVEDRLKATYVSFDELIKRSNILTLHCPGGAANHHIINASALAKMQRGSVLVNCARGDVVDEEAMVAALQSGQLLAAGLDAFEPEPLPASSKLTQLTSVVLTPHTAGSVLDNVAPVAQHAFGNMLRMIRGEALPKSDLVVVPDKPRQFAGAGPVAV

SEQ ID NO: 4782 - protein, 312 aa, Mesorhizobium sp. BNC1
MKPEVIVRVPFPPESIALLEEDFTVYYAPTLPELEKAIREHGATTRGVVTNGSIGLTGDQIRAIPHLEMIHTVGVGYEKIDMEAVREKKIIVANNAGTNAFSVAEQALGLLLAVLRDIPAAERAVRSGIWEEARYPRPLIFEKRVGIVGLGEVGLGVAKRVQAFEATVLYHNRRPREGAPYEYYSTTRELAAASDILIISCPGGEETRHLVNRDVLAALGPSGVLINVGRGSVVDTAALVEALHGKVIAAAGLDVWEGEPVISPELAGAPNVILSPHIGGRSPEAVVFARRQISKNLKAHFFGKGDIVHRIA

SEQ ID NO: 4783 - protein, 315 aa, Mesorhizobium sp. BNC1
MPSKTIDHAFTARQITGAAGDPTYAGALSFMRRKFTKDVKGADAVVWGIPFDAAVSNRPGARFGPQAIRRASVIFDNDPQYPFHLDLFDTLAVVDYGDCLLDYGRHDLTPAAIETEASKILESGAFLVTLGGDHFVTWPLLRAHAARHGPLALVQFDAHQDTWWDDGNRIDHGSFVGRAVRDGVIDPARSIQVGIRTHAPEDCGLKIVHGYDLEEIRAAEIARMIAERVGDAPAYITFDIDCLDPAFAPGTGTPVAGGPSTAKMLSILRQLGGLNIVGADVVEVSPPYDHADVTAIAGASIAMHYLGLLAEKRRP

SEQ ID NO: 4784 - protein, 111 aa, Mesorhizobium sp. BNC1
MSGINEFIDNEVKTNDVVLFMKGTPGFPQCGFSGQVVQILDYLGVDYKGINVLTSDELRQGIKEYSSWPTIPQLYVKGEFVGGCDIVREMFQAGEMQSFLEEKGVSVRGAA

SEQ ID NO: 4785 - protein, 460 aa, Mesorhizobium sp. BNC1
MQFAPTHGVERERENRLTKDNILPSGGFADLGISETLLKAAAAAGMTEPKPIQKEAIPPFLAGSDILGVAQTGSGKTAAFSLPILSKIIGLGTKRRPRTARALILVPTRELAVQIEKVVRELAKGAHVSTALVLGGVSRHSQIKRMAQGVDVLIATPGRLTDLVRDGAVVLSETTWLVLDEADRMLDMGFINDVRRIAKATHPARQTALFSATMPREIEALASSLLKEPVRIEVSPQGTTAAEIRQSVIMARTKQKRKLLSEMLADEKMAQVIIFSRTKHGADRVTKDLQHDGFQAAVIHGNKSQNARQRALNDFREGAVRILVATDIAARGIDVPGISHVVNFDLPDEAESYVHRIGRTGRNGAEGEAITLCDPGEVSKLRQVERVIRNRLPIARDITGQPDSAPKPRVPSAIQPLAEGVEGKPQRNAAPKRSGAKPPRHRRNRRGQKGGAQRPTSKAA

SEQ ID NO: 4786 - protein, 371 aa, Mesorhizobium sp. BNC1
MRIGCPKEIKNHEYRVGLTPGSVREYMAHGHDVLVETGAGAGIGADDNAYRAAGAEIAKSAEDVFARSDMIVKVKEPQPSEWVQLREGQILYTYLHLAPDPEQTKGLLESGVTAVAYETVTDAHGGLPLLAPMSEVAGRLAIQAGATALQKANGGRGVLLGGVPGVLPGKVAIIGGGVVGLNAAKMAVGLGADVTIIDRSIPRLRQLDDIFNGRIHTRYSTVEAIEEECFSADVVVGAVLIPGAAAPKLVTREMLSGMKKGAILVDVAIDQGGCFETSHATTHSDPTYEVDGIIHYCVANMPGAVPVTSAHALNNATLHYGLQLAGRGLRALADDQHLRNGLNVHKGRITNRAVADSLGYEMIEPKAALAA

SEQ ID NO: 4787 - protein, 403 aa, Mesorhizobium sp. BNC1
MADTHAITAGFLPLLDSAILVAAKEKGFAEREGIDLTLVRETSWASIRDRIAVGHFEAAHMLAPMPIAATLGLTPIRLDLVAPMALGLGGNAISVSRALWKEMESAGARGVGDPAAAGNALRQVIAGRRGTAEGRLRFAVVHPHSGHNLELRYWLAASGIDPERDLDVAVLPPPLMPDAIAAGSIDGFCVGEPWSSVAVARGHAHIAAVKAAIWKSSPEKVLGVRADWAAANGEELFRLLRALYRAAEWCGKADNCAELAEILAGERYLGQPVEIVLGALEGRLDTGHGLQNVPDFFLPAARAATFPWRSHALWLYSQMVRWGQVAHSAANAEKARNSFRPDLYRAALQPLGVPVPVEDMKPEGAALAPGAGGFFDGAVFDPDKLDAYIAGQRPAGKGSDPSI

SEQ ID NO: 4788 - protein, 397 aa, Mesorhizobium sp. BNC1
MPDISKRITGIMPSGKDGWEVHFAALTRKLAGENILMLSVGDHDFDTPAGTVEACVEAVQSGHHHYIQLPGLPKLRQALARLSTECTGVDTAPEEVIVTQGGQGALYASCQAVLDPGSHAVIVSPYYATYPGTVRAAGASFTEIETRSEDGFEPRVEAIAAAIRPETRMILINSPNNPTGAVYSRATLEAIAEICRRHDLWLLSDEVYWTLRGEREHVSPRSLPGMKERTLVVNSLSKSHGMTGWRVGWLTAPAEVVKLLISLNIVSSYGMVDFVSRAAVAAVENGHGVQEIAARYGSRRKAFLDEIRGANDIVVRGSEGGMYVMLDISHINPDAEAFAWGLLEAEKVAVMPGPSFGAAAQGHIRISMCQEEPVLREAAMRIRRYIASEITRRDAAE

SEQ ID NO: 4789 - protein, 600 aa, Mesorhizobium sp. BNC1
MEQRAPEPRAHETGRQEMTGAEMVVQALKDNGVEHIFGYPGGAVLPIYDELFQQDQIQHILVRHEQGAGHAAEGYARSTGKAGVMLVTSGPGATNAVTPLQDALMDSIPLVCITGQVPTPLIGSDAFQECDTVGITRPCTKHNWLVRDVSDLAAILHEAFHVATTGRPGPVVVDIPKDVQFARGIYTPPQTAPRTSYQPTLDGDQEKIRAAVALMASARRPIIYTGGGVINAGPEASHLLRELVGLTGFPITSTLMGLGAYPASGENWLGMLGMHGTYEANMAMHDCDVMLCIGARFDDRITGRLDAFSPNSRKIHVDVDPSSINKNVRVDIPIIGDAGRVLEDMVRLWRASANADKAALKPWWEQINRWRARQSLAYKTNSDVIMPQYAVERLYELTKGRDVYVTTEVGQHQMWAAQHFGFDQPNRWMTSGGLGTMGYGLPAALGVQIAHPDALVIDIAGDASVLMTMQEMSSAVQHDAPIKIFILNNQYMGMVRQWQQLLHGNRLSHSYTEALPDFVKLAEAYGCHGIRCEKPGELDDAIREMIDVKKPVIFDCRVANLANCFPMIPSGKAHNEMLLPDEATDEAVANAIDAEGRALV

SEQ ID NO: 4790 - protein, 463 aa, Mesorhizobium sp. BNC1
MKRLVVVSNRVADLTRTSQAGGLAVGLADSLRQRGGVWMGWDGQTLKYEEEPEPRIRKIGEVTQATIPLTEQDYAEYYLGFANSVLWPLFHYRLDLVEYKTAFLEGYRRVNAKFANALVSILRDDDLIWIHDYHLIPLAAELRERGCKQRIGFFLHIPFPPPEILAAVPRHRWLVECLLKHDVIGFQTHTDLNNLLRYVEDHLGCEILADGRIRTREREVIAGFYPIGIDVDAFVGMAEKPNDEVQIETKRREILGRRQIIGVDRLDYTKGLPDRLRAFARLLELYPEMRKSVALMQIATPTREEVEAYVDIRKELEALSGAINGRFADFNWTPVRYIHGTVPRDALAALYRASQVGFVTPLRDGMNLVAKEYVAAQSMDDPGVLVLSKFAGAAEDLHEALIVNPYDVDDMARNLCRALTMPLDERQERQRALMERIRKHDSAHWLNSFMDALEKGETKEDEE

SEQ ID NO: 4791 - protein, 770 aa, Mesorhizobium sp. BNC1
MVVKKTRSDLDEAALFFHRYPVPGKLEIQPTKPLGNQRDLALAYSPGVAAPCLAIHEDPATAADYTSRANLVGVVSNGTAVLGLGDIGPLASKPVMEGKAVLFKKFAGINVFDIEIDAPDVDRMVETISALEPTFGGINLEDIKAPECFEVEERLKERMKIPVFHDDQHGTAIIVAAAVLNGLELAGKDIASVKIVTSGAGAAALACLNLLVSLGVKTENIWITDRHGVAYRGRVEEMDRWKEPYLKDTEARELADVIDGADVFLGLSAGGVLKPEMLKGMAERPLILALANPNPEIMPDVARKARADAMICTGRSDFPNQVNNVLCFPYIFRGALDVGATAINEEMKLAAVRAIAALAREEPSDVAARAYSTETPVFGPDFLIPSPFDPRLILRIAPAVAKAAMESGVATRPIEEMDAYLDRLNRFVFRSGLVMKPVFSTAKQIGRKRVIYADGEDERVLRAAQVVLEEGLAQPILIGRPHVVEMRLKRYGLRIKPGVDFEIINPEDDPRYRDYVDLLIRIAGRRGVTTEVARTLVRTNATVIAALAIMRDEADAMICGLEGRFERHLRYVEAIIGRREGVQDLSALSMLITQQGVVFLTDTYVTLDPSAAEIAEMTVLAAEEIRRFGIDPKAALLSHSDFGSRDSASAMKMREAVGILHRIAPDLIADGEMHGDAALSEELRQRVYPHALLKGEANLLVFPNLDAANITLTTLKVMTDALHVGPILLGMARPAHILTPSVTSRGIVNMTALSAVEALQSQNRQLNLPG

SEQ ID NO: 4792 - protein, 289 aa, Mesorhizobium sp. BNC1
MAKIAFIGLGVMGYPMAAHLKNRGGHDVTVYNRTTAKAEKWVGEHGGALAETPAEAAKDKDFVFACVGNDEDLRGVTTGPEGAFRTMKQGSIFIDNTTASAEVARELAADAEKRGCSFIDAPVSGGQAGAENGALTVMCGGDKAAFEKAKPVIEAYARMVGLMGPSGAGQLTKMVNQICIAGLVQGLAEGIHFGKKAGLDIEQVVGVISKGAAGSWQMENRHKTMNEGRYDFGFAVDWMRKDLEICLAEADRNGAKLPITALIDQFYKEVQEMGGRRWDTSSLLARLER

SEQ ID NO: 4793 - protein, 477 aa, Mesorhizobium sp. BNC1
MTFSDLGLSPKVLAAVGDAGYTVPTPIQAGAIPHALQGKDVLGIAQTGTGKTASFVLPMLTRLERGRARARMPRTLILEPTRELAAQVEENFVKYGKNHRLNIALLIGGVSFDEQEKKLERGADVLIATPGRLLDHHERGKLLLTGVEILVIDEADRMLDMGFIPDIERICKLIPFTRQTLFFSATMPPEITKLTEQFLQGPVRVEVSKPASTAVNITQRLVKSGSKPWAKREKLRDLIRAEGDELKNAIIFCNRKTEVATLFRSLVRHEFDAGALHGDMDQRARMMMLENFRKGKLKLLVASDVAARGLDIPDVSHVFNFDVPTHSEDYVHRIGRTGRAGRSGKAFTIVTRADRKYVDGIEKLIGQDIEWLDGDLSTLTVEDEADEKPRRGGRAERGGKKRDQGKSRRAEEPVEEAVSPSEKPAPRREDRRRERKDMIRSTNEEQRGRRRERPERETETLGFGDDIPDFMKVPGKV

SEQ ID NO: 4794 - protein, 251 aa, Mesorhizobium sp. BNC1
MLEIKNLHARIAEDGTEILRGVNLAVKPGEVAAIMGPNGSGKSTLSYVLAGRDDYEVTEGDILFKGQSILEMDPAERAATGIFLAFQYPMEIPGVATMEFLKVAMNAQRRARGEEELKIPELLKRVRTAAQELDMDMNMLKRPLNVGFSGGEKKRAEILQMKLLEPSLCVLDETDSGLDIDALKIVAEGVNALRSPDRTIVVITHYQRLLDYIVPDSVHVLYKGQVVKSGEKELAQELEKNGYAGLIGEAA

SEQ ID NO: 4795 - protein, 388 aa, Mesorhizobium sp. BNC1
MSMAGQRIYLDYNATAPLSEAARRAVIDAFDAANPSSVHAEGRAARQMVEAARRDVAALVNGKAAHVVFTSGATEAAAMLLSPDWTMGRAPLTFSRLYVSATDHPCVLSGGRFAAETVEKIPVGSDGIIDLGALERALAAHNGTEGLPLVASHVANNETGVIQPIEEIGAVVKRAGGVPIFDAVQAAGRIPLDLSAGYADFFILSSHKIGGPKGVGAVVGASDLMMPRPLVTGGGQEKGHRAGTENVAAIAGFGAAAREAAAAVSAMDGVCAKRSRIEAILRSVLPDAVIYCEKVRRLPNTVFFSIPGMKAETAQIAFDLAGIAVSAGSACSSGKVGPSQVLQAMGFGDQAGALRVSIGVQTTDAEIEAFAEALEKIVAKRKMATAAA

SEQ ID NO: 4796 - protein, 69 aa, Mesorhizobium sp. BNC1
MTTGTVKWFNATKGFGFIQPDSGQPDVFVHISAVEQAGMRSLVEGQKIDFEVVRDPKSGKSAAANLQAV

SEQ ID NO: 4797 - protein, 400 aa, Mesorhizobium sp. BNC1
MAFLADALSRVKPSATIAVTQKARELKAQGRDVIGLGAGEPDFDTPDNIKQAAIEAIKRGETKYPPVSGIQPLREAIAAKFKRENNLDYDWKQTIVGTGGKQILFNAFMATLNPGDEVVIPTPYWVSYPEMVSICGGTSVFAETRLEDNFKLQPEVLERAITPRTKWLIMNSPSNPSGAAYTREELKAVADVLLKHPHVWVLTDDMYEHLTYGDFTYHTIAEVEPQLYGRTLTMNGVSKAYAMTGWRIGYAAGPIELIKAMDMIQGQQTSGAATVCQFAALEALTGPQDFIHQSKKVFQERRDLVVSMLNQAKGISCPVPEGAFYVYPSCAGTIGKKAPSGKLIESDTDFVSELLETEGVAVVQGSAFGLGPNFRISYATSDALLEEACSRIQRFTANLR

SEQ ID NO: 4798 - protein, 70 aa, Mesorhizobium sp. BNC1
MAQTGTVKFFNATKGFGFITPDNGQKDVFVHISAVEASGMRSLVDGQKVSFDVEPDRMGKGPKAVNLSAA

SEQ ID NO: 4799 - protein, 70 aa, Mesorhizobium sp. BNC1
MPQSGTVKFFNHAKGFGFITPDDGQKDVFVHISAVQASGLPGLEDGQKVTFDTEPDKRGKGPKAVNLTIG

SEQ ID NO: 4800 - protein, 310 aa, Mesorhizobium sp. BNC1
MKLFAGNSNRVLAEAIARYLNISLGKAMVRRFADQEIFVEIQENVRGEDVFVLQSTSYPANDHLMELLIMIDAFRRSSARRITAVLPYFGYARQDRRTSGRTPISAKLVANLITQAGADRVLTLDLHAGQIQGFFDIPTDNLYAVPVMARDVKAHYKLENVMVVSPDVGGVVRARALAKRIDAPLAIVDKRRDRPGESEVMNVIGDVHGRDCLLIDDIVDSGGTLCNAAEALIANGATSVTAYITHGVLSGGAVARITGSKLKELVITDSIQPTSSVEAAHNIRAITIADLIGEAISRTASEESVSSLFN

SEQ ID NO: 4801 - protein, 211 aa, Mesorhizobium sp. BNC1
MSTQDVSLFSAEDFRRRAAAQDPALAGEAYGDHRLNPDLKQFFLRDGLHDAAVLVPVVNHAGGATVILTERSSRLRQHSGQIAFPGGRIDPTDSSPEDAALREAEEEIGLDRALIQVVGRMPDYVTGSGYRIRPVLSVVQSDFALVLNTDEVEDAFEVPLSFLMDPANHRRESRIWQERERFFYTMPYGERFIWGITAGILHMLYERLYAR

SEQ ID NO: 4802 - protein, 390 aa, Mesorhizobium sp. BNC1
MPNTILALNAGSSSLKFGLYEAGSSGEPRSMARGAVGLRDVRSLTAKGPDGKTLLEKELPGRGLEDAIGELLRWADSWTGQGLVAAGHRIVHGGGRFSDPVLLTPPVIDAVEELTPLAPLHQPRSIAPIRALTALRPHLPQVGCFDTAFHGTIEATVRRYALPRHYEAMGIQRYGFHGLSYEHIASRLRQVSPELAAGRIVVAHLGNGASLCALHDGNSVDTTMGFSALDGLVMGTRCGAIDPGVLLYLLQEEGFSPAELQHVLYEGSGLLGVSGISSDVRELSASDDPRAREALELFAFRAARETAALASTMGGLDGLVFTAGIGEHSASIRSAICSRLTWLGARIDHDANDSHAERISAVDSPVDVYVIPTDEEVVIARHVLSAVGKV

SEQ ID NO: 4803 - protein, 233 aa, Mesorhizobium sp. BNC1
MPKLDASLIAGLPPFEGLEKDDLEQVLAPARSLRFAREKPIFEQEGEARFFFVLLDGHVRVVRTTPEGQQVIVRYISEGEVFGIAAALGRTTYPATAIAAADCLVLAWPSALWPELSTRYPTLGANTYRTVGSRLQEAHARVVEMSKEQVEQRVAHALLRLVRQTGRKTAEGIEIDFPITRQDIAEMTGATLHTVSRLMSAWEGEGIVKSGRKRVTVSDSHRLMLKAESREKR

SEQ ID NO: 4804 - protein, 591 aa, Mesorhizobium sp. BNC1
MCGICGEVRFDGRTPSVSAISGMMEALAPRGPDGAGIVSHGNAGFGHRRLRIIDLSEKAQQPMVDSALGLTIAFNGCIYNYPELREALEAKGYSFFSHGDTEVILKAWHAWGETCVERFHGMFAFVIQERDTGRIVMARDRFGIKPLYLAEKSGVLRFASSLPALVKAGDVDTSIDRVALHHYMTFHAVVPPPRTILNGVRKLPPATIRVIEADGRSTERRYWDPPYRRDPADAGVSAEEWRDRVHEALRLAVKRRMVADVPVGVLLSGGVDSSLIVGLLAEAGQTGLMSFSVGFEEANGEKGDEFVYSDLIAKEFGTDHHKIFVPSDRLMDALPGTFAAMSEPMVSYDNVGFYLLSQEVSKHIKVVQSGQGADEVFGGYHWYPPLARSNDVVADYAKVFFDRSHETLKRQLGANWINGEDYSRGLVAAELMRPGADSPVDRALRLDANVMLVDDPVKRVDNMTMAWGLEARVPFLDHELVELAARIPPEEKLKDGGKGVLKDVARLVVPHEVIDRPKGYFPVPQLKYVAGPYLEMVRDALGSQRARERGLFRQDYLDRLFAQPADHITPLRGSELWQAGLLELWLQTHGI

SEQ ID NO: 4805 - protein, 667 aa, Mesorhizobium sp. BNC1
MSKFVINPPVFFGSVAITAIFLGVGVLFPGQAEAIFTAVQTWILGSFGWLYLLAVGIFIGSVILFAASGFGHLKLGPDDSTPDFHYMSWVAMLFAAGMGIGLMYFAVGEPMTHFAAPPEAEPLTIAAQRQAMSVTFFHWGLHAWAIYAVVGLSLAYFGYRYNLPLTVRSGLYPLLKNRIDGPIGHAVDIFAICGTLFGIATSLGFGVLQINAGLSYLLGVPNSAAVQLVLIAVITTVATISVVTGVDKGIRRLSELNLILAVLLMLFVLAVGPTAQLLRDFVQNIGFYLDTIVLRTFNIYAYEPRPWIDAWTLFYWAWWISWSPFVGMFIARISRGRTVREFVIAVLFIPAGFTFFWMTVFGNTALFIDTTVANGALSTAVTDDLSVALFQFFQYLPLPAVTSSLAVLLVAVFFITSSDSGSLVVDTIAAGGETETSIAQRVFWCVLEGLIAAVLLVAGGLAALQSATIATALPFTLIMLVLIWALFKGMKSDLAQRQVGHMAVTPQAYPAAGLTWQRRLGLILNAPTEQEVADYIAKVVTPALENVAQEMEKRGSKATVSHENGEHSVSLTVPASGVRDFVYGVQPAAHRLPAFSALEAAQGDLRFEARTFFSDGSRGYDLMGMTQEQIIADVLAQFDRYLQLVQSPEASLVIGAPEHAPDMPVRH

SEQ ID NO: 4806 - protein, 392 aa, Mesorhizobium sp. BNC1
MLQTVAAFDRIGEENAFAVLARATELAHQGRDIINLGIGQPDFHTPEHIVEAAVKALRDGHHGYTPANGILAAREAVARRTLATTGVEVSPENIMILPGGKPTMFAAILMFGEPGAEILYPDPGFPIYRSMIEFTGAKPVPVPIREENGFAFSAEETLSLITPKTRLLILNSPANPTGGVAPREEIARLVKGLEAHPQVAILSDEIYDVMTYDGEKATSLLTFPEIRDRLIVLNGWSKTWAMTGWRLGWSIWPDRLYGLVRKLAVNCWSCVNAPAQYAGIAAIDGPQDDVEKMMRAFASRRKLVVEGLNGLPGVTCLTPKGAFYAFPNIRGTGWKAKKLAAALLDEAGVALVGGPDFGVLGEGYIRLSYANSEENILRAIGRMGDFLARTGQ

SEQ ID NO: 4807 - protein, 505 aa, Mesorhizobium sp. BNC1
MPDTVLIVDDDPVQLRLLDAAVRRLGYAPVLADGGEAALRILAEVRPEELRAVILDLMMPGMNGIEVMETMRKRGIDMPVIVQTATGGVETAVAAMRAGAFDFVVKPVSPERLAAALKNALKVEALEGQQRRKREKAPDKFSFRHIVTRSPAMEKVLRLAQRAAASDIPILIEGESGVGKELIARAVRNESARRGKPFVTVNCGAIPDNLVESILFGHEKGAFTGATEKHSGKFVEANGGTLFLDEIGELPLDVQVKLLRAVQEGEVDPVGRRGTVKVDIRLISATNRDLLQRVREGRFREDLYYRLGVFPITVPPLRERRDDIPLLVQYFIAQFGDATTGRNISGISSDAIKLLSAYDWPGNVRQLENAVFRAMVLCDGTVLTAAEFPQIRAQVEGIDEKLLADEIKPAHQESAPPPQPDKASQQEMQPLHPALLPVIGEDGNVRPLEEMEREMIQFAIEHYDGRMSEVARRLGIGRSTLYRKLKEMGIEPPEGGGKKTESPGG

SEQ ID NO: 4808 - protein, 331 aa, Mesorhizobium sp. BNC1
MLSRQIKRFDAASAIASAARTLSTEQAALAALAEALDNGLSESFAEAVEMIARISGRVIVTGVGKSGHIGTKIAATLASTGTPAFFVHPVEANHGDLGMIAPDDAIIALSWSGESAELKGIVAYARRFSIPLIAMTSGSRSALARESSVVLCLPKVQEACPHGLAPTSSTLVQLAAGDALAIALLEARGFTPDHFRTFHPGGQLGAKLTRIGDIMHTGERMPLVSSGTGMREAILEISRKGFGCVGITNGEGALIGIVTDGDLRRHMDSDLLAMSVDEVMTHAPKTIKPDTLAAAALQMINSSAITTLMVVENGRPVGIVHLHDLLRIGAA

SEQ ID NO: 4809 - protein, 438 aa, Mesorhizobium sp. BNC1
MGQTIFVPKEADTNEPRVAASPDTAKRLSGLGFTVIVERGAGLASRITDEEFEKAGATLGGAADAAKADVVLKVRRPTALELKSYKKGALVIATMDPYGHEADVAAMAKAGISAFAMEFMPRITRAQSMDVLSSQANLAGYRAVIDAAAEYDRALPMMMTAAGTVPAAKVFVMGAGVAGLQAIATARRLGAVVTATDVRAAAGEQVASLGAKFIMTDALKDASGQGGYARELTEDERRAQAELVAEHIAKQDIVITTALIPGRPAPRLVTAGMVASMRAGSVIVDLAVERGGNVEGAVPGEVITTANGVKIIGHLNVPGRVAASASLLYARNLYAFLETMIDKQTKAMSVNFDDELVKATLLVHDGAVVHPNFAGATPAATPKPSPSDPEVEKAAKGTEPGLEVAPKRAGSRRKATEKPAAERAKPKKPATPKTGGDA

SEQ ID NO: 4810 - protein, 322 aa, Mesorhizobium sp. BNC1
MPDETRDITILVAGKLHPHAVSRIGEHFRMLRVDRCDPALLTEAMKQNVLGIAATGGVSAAFMDALPHLQIIAIFGVGYDSVDAVHAAEKGVMVTNTPDVLTDEVADAAIGLLINTVRELPRAEKYLRDGRWHREGPYPLTRASLRGRSVGIFGMGRIGRAVARRIEAFGLPVSYHNRRKVEDVPYTYYPTLVGLAEAVDTLISIAPGGTGTDKAVDAQVLRALGPNGVFLNVGRGSTVDEEALVAALRDGTILAAGLDVFADEPNVPEALLGCENACLLPHVASASAHTRQAMADLVADNLLSWFTQGKPLTPVMETAQVK

SEQ ID NO: 4811 - protein, 401 aa, Mesorhizobium sp. BNC1
MAEAFICDYVRTPIGRFGGVLSSVRADDLAAIPLKALVERNKEVDWAAVDDVIYGCANQAGEDNRNVARMAVLLSGFPVEVPGSTINRLCGSGMDAVATAARAIKAGEAELMIAGGVESMSRAPFVLPKADTAFSRNAEIYDTTIGWRFVNPLMKKQYGVDSMPETGENVAADFKVSRADQDAFAVRSQDKAVAAQENGRLAKEIVPVTIPQRKADPIIVDKDEHPRPGTTVEKLGKLPTPFRENGSVTAGNASGVNDGAAALIIASEAAARKYGLTPIARVLGGATAGVPPRIMGIGPAPASKKLCARLGLKPSDFDVVELNEAFASQGIAVLRELGIPEDAAHVNPNGGAIALGHPLGMSGARISGTAALELRERGARLALATMCIGVGQGIALALERV

SEQ ID NO: 4812 - protein, 646 aa, Mesorhizobium sp. BNC1
MCGFGGYFGAGVSEAEPLLRRMASAIAHRGPDERGTAVLDGAGLCHTRLSIVGLADGQQPMSLDGGRLTIAFNGEIFNYVELREALIARGRTFRTASDTEVILHLYDEKGPDCLADLNGDFAFAIWDAPRRRMFLARDRMGVRPLFYTSVGDRLFFASEVKTLLQVPGVEAEMDPFALDQMFTLWAPIAPRTAFKNIHELEPGHMMLVEEGRQAIRPYWSLSFPEHGAPSRHTDERAVAEELRALLTDATRLRMRADVPVGSYLSGGLDSSVISALAAGMTPEILRTFSVAFESAEHDESAFQNEVAAALGTMHASVNCGDGDIAAVFPDVIRFTERPILRTAPAPLFKLSALVRERGLKVVLTGEGADEVFAGYDIFKEARVRRFCARQPGSRMRPHLFRKLYPYLPGLKQQSAEYLAAFFGAGADSLDDPLFSHKPRMRATGAAKLFFSAQLRETLAGYDAAEELASRLPQEFPRWHPLHQAQYLESRFLLPGYILSSQGDRMAMAHGIEGRFPFLDHRLVEFATTLPPEMKLKGLVEKHILREATKGLLPESILRRTKQPYRAPDSASFRGAGEKDYVREAMSAEKLADCGLFNPASVSKLFAKSRQQPLSGFRDNAAFVGILSSQLWLETFTGSRIRAVEAA

SEQ ID NO: 4813 - protein, 268 aa, Mesorhizobium sp. BNC1
MDTNDRGRSYRMSQSAVLDREFAHPGERALGKRLLIVDDDDDIRTLVAEQLAEAGFRVELAADGVEMFDHLSKKSIDLIILDVNLPGEDGLSLCRRHGQKSNIPVIMLTARGALIDRVIGLEVGADDYLAKPFEPRELLARIRCVLRRAGAAVEPVDARRAKRARFRGWTLDFENRCLVDRAGRVVVLSGNEFSLLKYFVENANEVLTREQLLTLSTPATANDYNAQRLADLQICRLRQKLHPDTDEAPLIATVRNRGYVLAAAVEFE

SEQ ID NO: 4814 - protein, 424 aa, Mesorhizobium sp. BNC1
MKVIIIGGGIGGITLACKLALKGVIAEIFDAAPRLDPIGLGVNLLPHAAEIMQEIGVLADIAARAVETYESTFFNRFGQHIFSEPAGLRAGYALPQYSVHRGDLHGAMLRRFIEVAGNEHIHTSHRCVGFDQGHNGVTAHFEDPQSGAVLPSVRGDVLIGADGIHSVIRKKLHPDEGGPVYSGVNMWRGSIVHKPFLNGANMVRIGWLSTGKLVVYPIRNNVDGFGNQLINWVVEIETPHHKDKRDWNKEGSIDDFIGAFEDMRFDWLDVPAMLRGTEKVLEYPMVDQDPLPFWTQGRVTLMGDAAHPMYPRGSNGACQAIIDGKALADALLSHEQPAAAFKSYEDERRPSTTKVVLTNRSMPPDIILKEVFERTGDKPFEDINDVISVEELVRLSNNYKKIAGYDREHLGARASGPQITGNTI

SEQ ID NO: 4815 - protein, 424 aa, Mesorhizobium sp. BNC1
MARIVMKFGGTSVADLDRIHNVARHVKREVEAGHQVAVVVSAMSGKTNELVGWVQGMPKAAGAKSPFYDAREYDTVVASGEQVTSGLLAIALQSIGIDARSWQGWQIPIRTDNAHGAARITDIDGSDIIERMERGQVAVVAGFQGLAPDNRVATLGRGGSDTSAVAVAAALRADRCDIYTDVDGVYTTDPRIEPRARRLAKISFEEMLEMASLGAKVLQVRSVELAMVHKVRTFVRSSFEDPDAPGMGDFDNPPGTLICDEEEIVEQQVVTGIAYAKDEAQISLRRVADRPGVSAGIFGPLAEANINVDMIVQNVSEDGSKTDITFTVPTGDVEKALSVLEKVRGTVGFDAIQSEAGLVKVSVIGIGMRSHAGVAATAFSALAEKGINIRAITTSEIKISILIDGPYAELAVRTLHSVYGLDKH

SEQ ID NO: 4816 - protein, 532 aa, Mesorhizobium sp. BNC1
MAPRVLVSDKLSPTAVDIFRQHGVEVDYQPDLGKDKDKLLSVIDQYDGLAIRSATKVTEKLIAAATNLKVIGRAGIGVDNVDIPAASRRGIIVMNTPFGNSITTAEHAVAMIFAVARQIPEANASTHAGKWEKNRFMGVEITGKTLGVIGCGNIGSVVAMRAIGLKMHVIAYDPFLSEDRAEELGVEKVELNELFARADFITLHTPLTEKTRGIINAAAIAKMKDGVRIVNCARGGLIVEADLVEGLKSGKVAGAGIDVFENEPATENPLFNLPNVVCTPHLGASTTEAQENVALQIAEQMSEYLIKGAVTNAINMPSITAEEAPRLKPFIKLAEVLGAFVGQVTDEPIAGVEILFDGSTAAMNTRALISAALAGLIRPQVNDVNMVSAPIMVKERGIIVSEVKRDKSGVFDGYIKLTVKTPERTRSIAGTVFSDGKPRFIQIKGINLDAEVGEHMLYTTNNDTPGIIGQLGTICGKHGVNIANFQLGRNRPGGDAIALLYLDAPFPQPVLEELKSTGSIISAKPLRFDVGN

SEQ ID NO: 4817 - protein, 645 aa, Mesorhizobium sp. BNC1
MNPNYRNFALWAIIAVLLIALFNLFQAPQQRGATRDIAYSQFLEEVSQGRVESVTITGSRISGTYTDNRTPFQTYSPGDPSLVQRLEEHNVTITARPESDGSNSILGYFISWLPMILILAVWIFFMRQMQSGSGRAMGFGKSKAKLLTEAHGRVTFQDVAGVDEAKQDLEEIVEFLRDPQKFQRLGGKIPRGVLLVGPPGTGKTLLARSVAGEANVPFFTISGSDFVEMFVGVGASRVRDMFDQAKKNAPCIIFIDEIDAVGRHRGAGLGGGNDEREQTLNQLLVEMDGFEANEGIILIAATNRPDVLDPALLRPGRFDRQVVVPNPDIVGREKILKVHVRNVPLAPNVDLKTIARGTPGFSGADLANLVNEAALMAARRNKRLVTMAEFEDAKDKVMMGAERRSHAMTQEEKELTAFHEAGHAVVALNVPASDPVHKATIIPRGRALGMVMQLPEGDRYSMSYKYMISRLAIMMGGRVAEELKFGKENITSGAASDIEQATKLARAMVTRWGFSDKLGQVAYGENQEEVFLGHSVTRQQNMSEETQQKIDDEVRRLIDEAHEKAREILTTKRDAWIAVAEGLLEYETLSGEEIQAIIRGEKPARDLGDDTPPSRGSTVPKAGVRKEGKKGGEEPDAGLEPQPQG

SEQ ID NO: 4818 - protein, 601 aa, Mesorhizobium sp. BNC1
MALTSGTEERKSRRSLRPLRNLLPYVRRYRGLALGAGFFLVLAALATLLLPQAVRRVIDHGFSDADAAFITIYFSGLLLVAAILAVASACRYYFVVALGERVVADLRRDVFAHVTRLSPAFFDRAQSGEIISRLTADATQIKSGVGASASQAARNTLMGLGAVAMMVVTSPRLSAFAVGAIPIIVLPLVAFGRSVRRRSRSAQDTLAEATAFASERIGAVRVLQAFNNEEGAARRFGGAVDAAFEAARSSIFARAVLTFFVILGASTSVVAVLWVGSRDVLAGTMTAGTLVQFVLYAVLAAGALSALSEVGGELAQAAGAAERMSELLAEEPAIAAPADPIALPVPARGAVSFRDISFAYPARPGRSALHELSFDVAPGETVAIVGPSGAGKSTIFSLLLRYYDPDRGAVLVDGVDIRKADPQAVRERIAIVPQDVTVFAATAEENIAFGRPGATREQVEAAARAALAHDFIMALEKGYDTQVGERGVMLSGGQRQRLAIARAILRDAPILLLDEATSALDAESETLVQEALEHLMRGRTTIVIAHRLATILKADRILVLDDGRIVEEGCHAELVSRGGIYARLASLQFEAGADVFKGAAE

SEQ ID NO: 4819 - protein, 217 aa, Mesorhizobium sp. BNC1
MKFFVDTADVNEIRELSETGLLDGVTTNPSLIMKSGRPILEVTREICEIVDGPVSAEVTAVDFKEMMREADILSKIADNIAIKVPLTMDGLKACKALTSSGRMVNVTLCFSANQALLAAKAGATFISPFIGRIDDMGIDGMELIAEIRTIYDNYDFDTEILAASIRSVNHVKQAAIIGADVATVPPAVLKSLVKHPLTDKGLEAFLADWAKTGQKIG

SEQ ID NO: 4820 - protein, 454 aa, Mesorhizobium sp. BNC1
MRLSSIEIAKRMAGAGALALAAFAAVPAFAQEAAETAAEAAAPVMDKGDVAWMMTSTLLVLFMTLPGLALFYGGLVRAKNALSVLMQCTMIAAVVMVVWVLWGYSFAFGGGTSPFWGGFGKLFLSGVTMDSTAATFTDGVVIPEYVFICFQMTFAVITPALIVGAFAERIKFSAVVLFTVLWVTFVYFPVAHMVWDGSGYLFNLGALDFAGGTVVHINAGIAALVGCMIVGKRSGYGKDILAPHSMTLTMVGGSILWVGWFGFNAGSNLEATGGAALAMINTFTATAGAIIGWSVIEALHRGKASMLGAVSGLVAGLVAVTPACGSVGPVGAIVLGAIASAVCYFFVAVVKNKFGYDDTLDVFGIHGVGGIVGALGTGIFTAPWLGGTGADDFSIASQLWVQFVAVLVTVAWCGVVSAILYKLVDAIVGLRPEKEAETQGLDLTSHGEAAYHYS

SEQ ID NO: 4821 - protein, 69 aa, Mesorhizobium sp. BNC1
MTIGTVKFFNATKGFGFIQPDDGAADVFVHISAVERAGMRTIVEGQKLSFDVVRDNRSGKSAAENLQAA

SEQ ID NO: 4822 - protein, 484 aa, Mesorhizobium sp. BNC1
MAASETQVPTSTQKPVGAQAQSEARRAAPHTTEAASKNRLAASLRDAALAAFLAGVLGFFFIGLRTDLAPGGLDIRARWGAWLTSIAIVFIGRLALNVFVFKAAHPVGEGVGAKIAGVGKAAPKLGKWLTRALFIFALALPFFFTTFFPGRDRQFIDLAILIMTYIMLGWGLNIVVGLAGLLDLGYVAFYAVGAYSFALLAQHFEIGFWAALPLAGLLAAFWGIILGFPVLRLRGDYLAIVTLAFGEIIRIVLLNWYSFTGGPNGISGIPKPTFFGLELGRGDDGFAAFFGIEYDPIQRFIYLYYIIFALALLTNLVTLRLRKLPIGRAWEALREDEIACRSLGINTRNTKLTAFAIGAMFGGFAGSFFATRQGFISPESFTFIESAMILAIVVLGGLGSQLGIVIASIVMIGGIEMLRNLGFLTQIFGPGFDPVQYRMLIFGLAMVLIMVWKPRGLVTTREPTAALREKKRIGADMVAQGEGH

SEQ ID NO: 4823 - protein, 419 aa, Mesorhizobium sp. BNC1
MPATRTHSEKTMATHKDVKKVVLAYSGGLDTSIILKWLQTELGAEVVTFTADLGQGEELEPARRKAEMLGIKEIHIEDLREEFVRDFVFPMFRANALYEGTYLLGTSIARPLIAKRLVEIAAETGADAIAHGATGKGNDQVRFELTAYALNPDIKVIAPWRDWTFKSRTDLLNFARDHQIPVPSDKQGEAPFSVDANLLHSSSEGKVLEDPWSEPPEYVHQRTVSPFDAPDRATEITIGFKRGDAVSLNGEAVSPATLLAKLNDLGRDNGIGRIDLVENRFVGMKSRGVYETPGGTILLAAHRAIESITLDRGAAHLKDELMPRYAELIYNGFWYSPEREMLQALIDKSQEDVEGEVRLKLYKGNVIVTGRRSDKSLYSDALVTFEDDRGAYDQKDAAGFIRLNALRLRTLAARKRLQG

SEQ ID NO: 4824 - protein, 393 aa, Mesorhizobium sp. BNC1
MASSNSVVIASAARTPVGSFNGSFAQIPAHQLGASVIRAVLERAKVAADEVNEVILGQVLTAGQGQNPARQAAVAAGLLAETTAWGVNQVCGSGLRAAALGMQQIACGDAKIVIAGGQESMSLSPHCAHLRSGVKMGDYAMIDTMIRDGLWDAFNGYHMGITAENVARAFQITRDEQDRFALASQNKAEAAQKAGRFRDEIAAVTVKTRKGDEVVENDEYIRIGATLEAMQKLRPAFDREGTVTAGNASGINDGAAALLLISEEEASRRGIEPMARIASWATAGVDPAVMGTGPIPASRKALEKAGWRAADLDLVEANEAFAAQACAVNKEMGWNPDIVNVNGGAIAIGHPIGASGARILNTLLYEMRRRNAKRGLATLCIGGGMGVAMCVER

SEQ ID NO: 4825 - protein, 349 aa, Mesorhizobium sp. BNC1
MKFLDQAKVYIRAGDGGAGAVSFRREKFIEFGGPDGGDGGRGGDVWIEAVEGLNTLIDYRYQQHFKAKPGIHGMGRNRTGAKGDDVVLKVPVGTQVYEEDNETLICDLTEVGQRFLLLKGGNGGFGNQHFKSSTNQAPRRANPGLPGEELWIWLRLKLIADAGLIGLPNAGKSTFLATVTAAKPKIADYPFTTLHPNLGVVRIDAREFVLADIPGLIEGAHMGVGIGDRFLGHVERTGVLLHLISAREEDVAATYKTVRRELKAYGHGLSEKPEVVALSQIDLLDEEERREKLAALKKAARRAALPLSSATGEGVQDVLRALMRVVQAAREEERAAETANERWQKQADS

SEQ ID NO: 4826 - protein, 230 aa, Mesorhizobium sp. BNC1
MPDRALKGRKMFAVIKTGGKQYRVAANDTLLIERIAGEVGEIVQIGNVLAVGEGENVTIGAPFVEGASVAAEVVEQGRGPKVIAFKKRRRQNSRRKRGHRQLLTTVRIAEILLDGAKPSKKVAAKPATSEEKAAEEKPAKAKKEAAEKGASPRETKAAPLFSAPEGEPDNLTVIKGIGPVAAGQLKEQGLTTFAQLAALSDEDIARIDEAMPFSTDQIKDWREQAKEVAK

SEQ ID NO: 4827 - protein, 411 aa, Mesorhizobium sp. BNC1
MDTQTAISDASFRPATRVASLGVSEILQIGARAAQMKRAGEDVIVLGAGEPDFDTPENVKDAATRAMARGETKYTHLDGSPAMKEAVRHKFLSENRLDFTTDEITVSAGAKQIIYNAFMATLDPGDEVILPAPYWTSYMDVVRICGATPVVVACDAENGFRATAEQIERAITPRTRWLLLNSPSNPSGAAYGAEDYRPILDMLMRNPHVWLMADDIYEHIVYDGFEFVTPLALEPRLRGRTLTINGVSKAYAMTGWRIGYGAGPQPLVKAMSVIQSQSTSNPCSISQAAAIEALTGPQEFLAERRESFRERRDLVVTGLNTIEGIECRVPEGAFYAFAGCGGLLGRRTSDGSEIVSDRDLANYLLKDAKVAVVPGSAFGLSPFFRISYATSKSELTEALRRIGEACRRLVS

SEQ ID NO: 4828 - protein, 307 aa, Mesorhizobium sp. BNC1
MDDEIVILQATSLPAPTVNTLREHFSVLELPSQGAERDRLIEANRDRIRGIATLGAGPVDAALIGRLPALEIIACFSAGMDGIDLEAAKARNIAVTNTSPVLADDVADLAVVMLFSLLRGISRAERYARAGLWPDGNLPLARTVRGCRVGIIGLGHIGKAVARRLECSGAEIAYNGPRRKPDSAYTYFPSLIELANWSDALIVCCPGGEETRNLVGSAILEALGPEGWLVNVARGSVVDEAALVKAVVSGRIAGAALDVFAKEPHVPAELRDKENVIVLPHIGSATRETRDAMGLSMIASLRSHFRH

SEQ ID NO: 4829 - protein, 336 aa, Mesorhizobium sp. BNC1
MRVVLFEAEDWEKKACAPLMRRHDVRCTTAPLNFTTVDDFKDAEVISPFVASRLDAGIIGRLPDLKLIATRSAGYDHIDLSACRDRGIAIVNVPDYGDATVAEHAFALLLALARNIVESVALTRRGGFSMAGIRGLELRDKVIAVVGTGRIGRRAIEIARGFGMKVLAFDQVEDDAAATRSGFTYGGLDEILAQADVVTLHVPSSPTTVGLIGERQFAAMKDGAILINTARGNVVDTEALVRALASGKLRSAGLDVLPQEPLIREEAEIFRQDRAVDESDLKALVANHVLLRFPNVLITPHNAYNTDAALRRIIDTTIANIEGFAAGQLVNLVQAG

SEQ ID NO: 4830 - protein, 333 aa, Mesorhizobium sp. BNC1
MTGRKKPLVVITRKLPDQVETRMRELFDARLNIDDGPMTQPELVAAVKEADVLVPTITDRIDAALLAQAGERLKLIANYGNGVEHIDVTAAAERGITVTNTPNVLNEDTADMTMALMLAVPRRLVEGAEMLKQGGKWAGWSPTWMLGRRIWGKRLGIVGMGRIGTAVARRAKAFGLSIHYHNRRRVAPMIEDELEATYWDSLDQMLARMDIISVNCPSTPATYHLLSARRLALMQPSSYLVNTARGEIVDEEALIRMIEEGKLAGAGLDVFAHEPAVSRRLLKLSEIGKVVILPHMGSATIEGRIDMGEKVIINIRAFFDGHRPPDRVLPRKL

SEQ ID NO: 4831 - protein, 309 aa, Mesorhizobium sp. BNC1
MRCKILGAPVQDGAGCRGCDMGPSALRVAGLVEALSELGHTVEDLGNVSPKLQSPLAHPNSVLRSLSEIAGWTAALAEAAYRASADALPIFLGGDHSISAGTVSGIAQRAAELRRPLFVLWLDAHTDFHTLDSTVSGNLHGVPLAYATGQPGFDGYFPPLMAAVDPFRTCVMGIRSIDPAERIAINEAGVTMYDMRAIDEHGVAPLLRAFLERVASQDGLLHVSLDVDFLDPSIAPAVGTTVPGGATFREAHLVMEMLHDSGLVSSLDLVELNPFLDERGRTATLMVDLASSLMGRRIMDRPTRSYSHG

SEQ ID NO: 4832 - protein, 260 aa, Mesorhizobium sp. BNC1
MKQLLCTFMLAVAALVGSAPLAAAQTLEAIESRGKVLIAIDTAVPPYGMLDENMQPVGYDVDMAKMIAQDLGVELEIVPVTGPNRIAYLESNRADMVISTFGVTPERAKTVNFTIPYGANQIWIFGQKGEAASSIADLSGKPVAVVRGSIQDNVVTRMLPDAVIRRYEDDATAATAFLSGQVPFIATGTLIGDKLVARDTENYERKLLLGLNPYSIGLRKGDLEFLHLINTFIYSYRLGGQLNELSKKWIGAELGNLQSF

SEQ ID NO: 4833 - protein, 556 aa, Mesorhizobium sp. BNC1
MYRYDEFDHAFVKARVAEFRDQVERRLAGELTEEQFKPLRLMNGVYLQLHAYMLRIAIPYGTLAPRQMRMLAHIARHYDKGYGHFTTRQNLQFHWPALKDIPDILEKLASVEMHAIQTSGNCIRNVTADHFAGAAADEVTDPRPYAEILRQWSSLHPEFSYLPRKFKIAVTGAQRDRAAVQVHDIGLHLKKNAEGKRGFTVYVGGGLGRTPMVAKKIRDFLPEEDLLSYTTAILRVYNLNGRRDNKFKARIKILVHETGTEELRAQVEREYEALKDSELKLPESDIRAIQAYFAPPSLPARPEGDAVIAAASAADAGFATWLARNLHTHKNPDYASVTVSLKGIGEVPGDMSADQMDAVADLAEHYAMSEIRVSHEQNLVLPHVARADLKAVYDRLVEIGLATANVGLVTDIIACPGLDYCALANARSIPVAQQISTRFADQARQEAIGDLKIKISGCINACGHHHVGHIGILGVEKKGAELYQITLGGSGDENTAVGEIIGRGFGPDEIVDAVETIVETYVGLRQDKSETFLAAYGRLGPAPFKEALYGSEAKAA

SEQ ID NO: 4834 - protein, 761 aa, Mesorhizobium sp. BNC1
MAEAEKNDRVGPSVSAQEALEFHAMGRPGKLEITPTKPMATQRDLSLAYSPGVAVPVKAIAEDPARAFDYTTRGNLVAVISNGTAILGLGNLGALASKPVMEGKAVLFKRFADVDSIDLEVETEDADEFVNCVKLLGPSFGGINLEDIKAPECFIIETRLRELMDIPVFHDDQHGTAIIAVAGLINALDLTGRDMKTTKLVCNGAGAAGIACIELAKAIGFAPGNILLCDTKGVVYKGRTEGMNQWKSAHAVETDKRTLAEALDGADVFFGLSAKGALTPAMVQSLAKNPIIFAMANPDPEITPEEVAEIRTDAIMATGRSDYPNQVNNVLGFPYIFRGALDVRATTINDAMKVAAAEALAALARQDVPDDVAAAYQGNRPKYGPNYIIPVPFDPRLITAVPVAVAKAAMDSGVARRPILNLERYEQELSARRDPIASTLQRIYDRVRRQPKRIVFAEGEEEQVMRAAVSYVNQRLGTAILLGREERIRETAVNAGVDLARSGIEIINARLSRRNGIYADYLYERLQRKGYLFRDCQRLINNDRNHFAACMVALGDADGMVTGVTRNYSTALDDVRRVIDAKPGHRVIGASIVLARGRTVIVADTAVHDMPDAQQIADIAEESANFARRMGYEPRVAMLAYSTFGHPAGERSERIQETVKILDKRRVDFEYDGEMAADVALNPQIMQQYPFCRLSGPANVLVMPAFHSASISTKMLQELGGSTVIGPLLVGLNKPVQIVSLNAKDSDIVNMAAVAAYTAGG

SEQ ID NO: 4835 - protein, 757 aa, Cytophaga hutchinsonii ATCC 33406
MSISKEDALNYHTQGKPGKIEVVPTKALSTQLDLALAYSPGVAEPCKEIAANKEDAYKYTAKGNLVAVISNGTAVLGLGNIGPDASKPVMEGKGVLFKKFAGIDVFDLEVNCEDPEQFIKIVESLEPTFGGVNLEDIKAPECFIIEQELRKRMNIPVMHDDQHGTAIISSAALLNALEVVGKKAEDVNVVVSGAGAAAISCTRLYKHLGVRSENIVMCDINGVLRKDRTDLDVSQLEFATGRDLYTLADAMPGADVFIGLSAGNILKPEVLATMAKDPIVFALANPTPEIDYHLALNTRPDVIMATGRSDYPNQVNNVLGFPYIFRGALDVRATEINEAMKLAAVYAIAKLAKEVVPDTVNKSYGDNKITFGKNYLIPKPLDPRLITTISPAVARAAMESGVAKKDIEDWGAYEVELLQRIGIDQRLMSRIITQAKQEPKRVVFAEADNLKILKAAQIISDEGIAFPILLGNAEKIKELLIENALVIKDFLIVDPFEEKEKRSLYGNLLHNKRKRKGITAEIGRKLMRNRNYYGAMMVETGEADAFISGLTQEYGETIKPALQVIGVEEGIKRVAGMYILSNRKGVYFFSDTTVNMDPTAEELVDIIGVTARGVKFFNFEPRIAMLSYSNFGSNEGAVPTKVALATRLAKEKYPDLIIDGDIQANVAVDTALQEEMYPFSALAKDGANTFIFPALTSGNIAYKLLQEIGGMEAIGPLLMGMAKPVHILQLGSSVREIVNMVAIAVVDAQSQNSKINL

SEQ ID NO: 4836 - protein, 629 aa, Cytophaga hutchinsonii ATCC 33406
MCGITGIFAFNQIGAFYMINLGKSIELLAHRGPDGRGTFVEELIALGHRRLSVIDTINGRQPMHDSTDRYVLTFNGEIFNYKILREQLIQEAGYTFTTDSDTEVLLNAYIHWGEACLLKLNGFFAFAIYDKQKHEIFVARDRMGVKPLLYYKDEDKFIFASEMKAVLAYNVPKEIDWVSVQQYFTLGYIPEPDSIFKDVKKLEAGSYLLINKAGVISKKYYEIPSSTQTKHQHSFEQAAAHVKELVDASVKDRLVADVPVGAFLSGGLDSSIVVASASKHVENLHTFSVGFKGADFYDETKSAELVAKTFNTSHTTFSLSQTELADNILPCLESMSEPFGDTSSLPLFVLSKKVAPSMKVILSGDGADELFGGYNKHRAEWLIKNPNWQIRFAQLIQPVVKILPGNRNTPMGDKIRQAQKLIEGLTLTDAERYYRWCSVFSEEAHKEMFQENIADNEEYKIRKGGILHAFKKNPYDLNRILYTDLNLVLGSDMLHKVDSMSMANGLEVREPMIDYRLVEYVSTLPSSYKINKNGGKQVLKHAYKDELPAEILSKAKHGFDVPLTKIFSKELKAWILDELLSQKFIEQQHVFKWSYIKNIRNAIDKNSNLDESKIWPLITFQFWWKKFMN

SEQ ID NO: 4837 - protein, 337 aa, Cytophaga hutchinsonii ATCC 33406
MASSNFIDYVKVCCRSGKGGAGAVHFRKEKHTPLGGPDGGNGGRGGHIILRGNVQLWTLLHLKYTKHIMAEDGERGGTNRASGAQGKDQIVEVPLGTIARDPETGEKIAEITEDGQEIILIPAGRGGLGNEQFKTSTNQAPHYAQPGEPGIEAWVILELKVLADVGLVGFPNAGKSTLLSKVSAAKPEIADYAFTTLAPNLGVVKYRDYRSFIMADIPGIIEGAAEGKGLGIRFLRHIERNSILLFLIAADSKDIRAEYEILLNELQKYNPELLHKDRILAISKSDMLDDELKAELKKELPKGVETVFFSSYLNQGLTELKDLLWTTMNKPKSDFME

SEQ ID NO: 4838 - protein, 817 aa, Cytophaga hutchinsonii ATCC 33406
MKVLKFGGTSVGSVESIRKVAEILSSYKKKEKFVVVFSAMSGITNLLVEVGQKASTTDISYQQVLKTIEQKHVSTAKTLIDVKNQGKVIAQLKLILNELQDLLHGVYLLKELSPRSNDLVLSFGERLSSYLVSEFLKQEGVDVTFLDARKVIITDSSFGSAKVDFKKTDKAIKDYFKDIKSSVVTTGFIGSTDKGETTTLGRGGSDYTASVFGAALDSEGIEIWTDVDGIMTADPRKVKRAFTLPQVSYIEAMEMSHFGAKVIYPPTLQPAFKKRIPIWIKNTFNTAFEGTLINEKTSATDHSVKGISSIENISMLNLTGSGMVGVPGVSGRLFGALARNFINVILITQASSEHSICFVIDSKESAKAKDAVEEEFEHEIKAGKIDKLHEKDNLAIVAVVGDNMRHTPGIAGKLFSSLGKNGINVVAIAQGSSEINLSVVIGKEDLTKALNVIHESFFLSDVKTINVFVVGVGLIGSALLKQLQKQSTYLQKEKGFKINVVGLANSKKMLINENGVALTSWKEKLDEGEKANLKEFVKRMIDLNLRNSIFVDNTSNKDVVSFYHNILDESISIVTPNKLANSGLYKDYQKLQETAFKRGVKLMYETNVGAGLPVINTLNDLKDSGDKIIRIEGVLSGTLSYIFNNFKGDKKFSDIVKEAKEKGFTEPDPRDDLNGKDVARKILILSREAGFNLEFDDVVVENILPAPCLKAKTVEEFFVELEKNNNVFSKKRDEADKANKVLRFIAKLENGKAEVSLQSVDSTHPFFSLSGSDNMIAYTTERYKERPLVIKGPGAGAEVTAAGVFGDIIRISNYLKG

SEQ ID NO: 4839 - protein, 322 aa, Cytophaga hutchinsonii ATCC 33406
MKLTKNIVSIVTDVILNESEAIKNLVNHINDDFQHIIDAILSCKGRVVITGIGKSAIIGNKIVATLNSTGTPALFMHAADAIHGDLGMIQGGDVVICISKSGNTPEIKVLVPLIKNRGTILIGMVGNVDSYLAVQSDYVLNVTVEREACPNNLAPTTSTTATLVMGDALAVALLECRNFSSEDFAQLHPGGALGKQLYLRVNDVYTANEKPMVAPDATVKDVILEISSKRLGAAAVVDSAGILQGIITDGDLRRMLNAHDSFKQLCAADIMTKAPKTIDADEFAASAMLLMQSKNITQLIVMKNENFAGFIHIHDLLKEGIV

SEQ ID NO: 4840 - protein, 436 aa, Cytophaga hutchinsonii ATCC 33406
MEKVLIIEDDISLRTILEKFLQKNGFEVISTDRGKAGLEIITSQHIDFVLLDLRLPDSNGIEILQSIKKLHSHVSVIMMTFYDDVRSAVTAIKSGARDYLTKPINPEELLSLLKPIQAVKKAVEINKSEFVQGKNEKFAGVLEHARLVAPTMLSVLITGESGTGKEELAKYIHTNSQRKQKDFITVDCGSISEELFGSEFFGHMKGSFTGAVYDKPGLLESANGGTLFLDELGNLTYENQIKLLRVLQEKKVKRIGSNKEIDLDIRLIAATNEEIVLSVQKEKFREDLYHRLNEFKIHVPALRERPEDLNELINHFIAKSNSEFGKHVKQLSESGLAVLAQYAFPGNIRELKNIVRRAVLLATSETIEKDQLPQEIFNTRTLAVDTVDLKSLQEQQERDAIIKALKKTGNNKSEAARILNIDRKTLYNKLKLYQLE

SEQ ID NO: 4841 - protein, 733 aa, Cytophaga hutchinsonii ATCC 33406
MNDEKRLIIVAYRIPFKVTFKESGERVLQQNSGGLVSAILSLAEKGDVFGKNQKIHWFGYSTPDILQEGETQVENENFIVHPVLIEDALNDAYYEGFCNSTIWPISHYYPYLTSFNEEDYEAYVKANKIFADQINAFIRPGDMVWIQDYQLMLLPGMLRSENPDASIGYFHHIPFATFEIFRLLPKQWQTELLKGMIGADLVGFHTNDYSQYFLRSVQRVLGYDTTARDISIPNRIVRVDTFPISIDYNKFQELYNDPGVIEKRKEFLKDLSAEKNIFSVDRLDYSKGLIHRLNGFEYFLDQYPQWHTRVVLTMIVVPSRETILKYAEMKHELEEAVGRINGKYGTLGWRPVIYLYRSLSFEELGALYTLADVALITPIRDGMNLVAKEFVATRTDKKGVLILSEMAGASLELNGAILINPTDKRTLAAAIIQALTMDEQEQTQRMQMMQDRIRVYDIFKWTEDYMDQLDIIKLKQMEFEEKIINQDVLKSFKQIFDESSRRLFLLDYDGTLSPIVPDPSSSKPSVGIVDVLKKLSSDFNVNVAIISGRDKEFLNYIFDPNTILSAEHGAFLRIPGQDWELQYDYNDQWKRSVLPVFQKYTDRCAGSFIENKSTSLAWHYRNTEKEYAHIRSREFIEELENKVGIKSNLAIIDGDKVIEMKPSDVDKGIAARKICDLYQPDFILSIGDDRTDEDMFKALPDNALTIKVGVKNSSAKFTIKTQEEVMTILNTFL

SEQ ID NO: 4842 - protein, 807 aa, Cytophaga hutchinsonii ATCC 33406
MHIIQPLYMKIILSVSIFLISVFSAFSQDCWKMVAKGSDHTIAVRQDGTLWSWGQNMYGQLGDGSGYSSIIPVQVGTLTTWDKVFAKYDNSFAIMKDGTLWAWGMNSLGTLGDGTEQVRKTPVKVGTATDWQSVETNFNFTAAIKKDGSLWIWGDNYNGQLGNGTKVKNIIPSKVGSGKNWKSVSIGSSNILAIKTDGTLWGWGNNYYNQIGYTPTVDVLSPTQIGSETDWKSVSCGDDHVMAIRTNGSLWIWGSNKEGQIGNGEINSYQTEPVQVGSDTDWGTCHAIQDWSIAIKTNGSLWTWGSGYGYYNSSYIRKNIPTQFGRDTDWSMIYPSEQQSVAFKTDGSLWTWGSNARGQLGLGLYGNTNIPYMVSCPEVLTSSCWQAASIVQSTSFGLRTDSTLWKWGWGNENSLDIYARNDPGFARIGTYKWRAYASGGALLAIKDDGTLWQSGGRNVPVLLSSSKDWKAVAASSSRGYAIKTDGSLWGWDIDNYTNNTEPSGGVIPLLKEINPGTQWQSISASTTTAAAIRDDGSLWIWGSALYGAMGTGIAVAGSPTLIQMGNDTGWQFVSVGESTTMAIKTDGTLWACGQNNYGQLGNGNTTDIYTLTQIGTATDWKTVVAGPYHTLAIKTDGSINGWGSYTYNKLGLGYDLYGNLLEQNWKHIATGPYNSFAIHGDGTLYTVGDNEYTQLGSQNYRSNGPVKIECIIAEDTDPVITSTNDKTTQATEQKYMVYPNPNNGSFTISGSKNSDVYIYNIEGHLEKFTTMSDLKEQIQIDLIQGIYYIIVVDEAGNSSRQTFIVHQ

SEQ ID NO: 4843 - protein, 102 aa, Cytophaga hutchinsonii ATCC 33406
MYAIVEIGGKQYKVEKDHFIYVYRLEGAEGSAVTFDNVLLLADNNQYQVGAPSVAGASVSGKILEHLKDDKVTAFKKKRRKGFRKTVGFRQSLTKVLITSLN

SEQ ID NO: 4844 - protein, 612 aa, Cytophaga hutchinsonii ATCC 33406
MKTFNRILAFAKPYPRFAVPYFIFAMASTLFGLVNFAFLMPILDLLFNATKSLENLTKPVPGFNIDYFKGILDYYTASLIQEYGKSTTLIFIALFLISTNFLTNIFKYFSQLINTRLRATVIYNMRERMFDKVVKLDVGYFTNQRKGDLMSRMTNDLGEIENSVIGALQVFFRDPFNLVIYFITLLMIQWELMLFTLLILPIAGLGVSIIGKKLKKESEESQRSVGHILSLIDESISGIRIIKGFIAEKFVINRFNDQGKKYADLTNSMGNKRELASPLTEFMGVTIVAIILYIGGNLVFSGKMEASTFFLFIICFYKILEPVKSLASSITSIQRGIAAGDRIFDILDHPVSIEDTPSAKTLSAFTTGVSLKNIGFKYEEHEVLKHISIDIPKGKLIALVGPSGGGKSTLVDLIPRFYDPATGSVEIDGVNIKDYTLNSLRSYIGIVTQESILFNDTIFNNIAFGLPNITQEDVERAARIANAHEFIIRTEKGYQTSIGERGSKLSGGQRQRLSIARAVLKNPDILILDEATSALDNESEKLVQEALNYLMKDRTSIVIAHRLSTIRHADMILVLDKGQIKEQGTHEQLLAQEGIYYKLHQHASETGGMIIE

SEQ ID NO: 4845 - protein, 692 aa, Cytophaga hutchinsonii ATCC 33406
MSIPEDKKKKKSPIPNPSQKTNYQIFLISALLLVVVGIAYFSGSGGIQKTTKQRFFDMVLQHDVKKIVLVNDRNVEVTITDEALKSGRYDELLKRTNSPFSGTATGPQFQFEITPSYDFEAKYEEFLNKEKVPKEYQVPIEVDSNRAEVTSQLVTLGFWVLLFVGTWFLFRRVSGGGAGGQIFNIGKSKAALFDQDNKVKITFADVAGLDEAKEEVKEIVDFLRFPTKFTKLGGKIPKGALLVGPPGTGKTLLAKAVAGEAGVPFFSLSGSDFVEMFVGVGAARVRDLFKQAKEKAPCIIFIDEIDAIGRMRGKGGNMPGSNDERENTLNSLLVEMDGFGTDSGVIILAATNRPDVLDSALLRPGRFDRMISIDKPDIVGREQIFKVHLKPLKLGPDVDPKKIAAQTPGFAGAEIMNVCNEAALIAARRDKSEIDMQDFQDAIDRVIGGLEKKTKIISPEEKKIVAYHEAGHAVAGWFLEHADPLVKVSIVPRGVAALGYAQYLPKEQFLYTVEQLTDEMCMALGGRAAEDIIFGKISTGALSDLERITKMAYGMVSIYGMNDKIGNISFYDSKAGDYSFNKPYSESTAQTIDEEARNIVHEAYNRTKKLLLEKQPELEIVAKQLLEKEILFQSDLEKLIGKRPFEAETTYQAFTNKVDAPETLPDIIPNPAQQEGNSGSSTYSTNEGTYNK

SEQ ID NO: 4846 - protein, 396 aa, Cytophaga hutchinsonii ATCC 33406
MTEQLLCSFLKKSMQQSYTSKLPDIGVNIFSTMSALAQQYKAVNLAQGFPDFAPSEELIRLVHDYMLKGFNQYAPLAGVRPLVVNLAEKTEKLYGLSYDPDTEITITCGATEACYTALTSILHEDDEVIIPEPCFDVYLPAIQLSKAKAVFVPLTLPDFSYDWELIRSKVTPRTKLIIINSPHNPTGSILTAKDVEQLQLLVEAYPGLYVLSDEVYEHIVFDGNKHISISGNPVLKERAFIIGSFGKTYHVTGWRLGFCLAPAYMMKEFKKVHQYNTFSPVAPMQFAVADFMKKTDEYESLPAFFQNKRDLFLRHIKESKFDVIPASGTYFQMLSYKNISDENDLDFAARLTREFGLASIPVSVFYNDKTDHKLLRFCIAKKEETLLKAAHILCKI

SEQ ID NO: 4847 - protein, 403 aa, Cytophaga hutchinsonii ATCC 33406
MTTITNPQTLSTVVNSLSESETLAMTKKARELASQGNKVISLSVGEPDFKTPQHVMDAAKKAIDEGYHSYSPVAGFADLRAAIAEKLVKENNINVTAENIVVSTGAKQSLANVIQAIVDKGQEVIILAPYWVSYSEMVKLAEGKSVILTGTIENDFKVTAAEIAKAITPKTRAIMYSSPCNPSGSVYSEKELREIGELLKQNPQIVAIADEIYEYINFEGKNFSLGSIDEIKDQVVTVNGFSKGFAMTGWRLGYIAAPKYIAAATEKLQGQVTSGTCSITQRAGLAALQGDLSAPLKMKEAYLRRRDLIIDLLKEIPGLKINKPAGAFYIFPDVSAYLGKSVNGQVIKTSSDLSMFILNDAFVSTVGGDSFGSPNNIRISFAASDENIIEAIKRIKECLAKLK

SEQ ID NO: 4848 - protein, 461 aa, Cytophaga hutchinsonii ATCC 33406
MRNYFILLCVIFSNLTLYAQPCWLQIEAGSSFVIAMKADSTLWSWGSNSSGQLGDNTTDNKSIPSQFNTAKGWLKISSGNSHCIGLKKDGSIWTWGWNSEGQLGNGSLTKMLVPTQIGVDNDWMAVSAGQYNTFAIKNNGTLWGCGRNFEGQLGKGTTGSNVKTFIQIGTATDWAYVSVGAFHTMAIKTDGSLWAWGSNNNGRLGIGTTTTKNAPTKVGTATNWKSVYAAGSNTFAIKTDGSLWAWGYNYAGVLGDGTTTDRLSPVQIGTDNNWKTISSDGNTSFALKSDGTLWVWGDNNSGQFGNGTTTNSTLPIQIGTDNQWQHISINYSFLLAIKTDGSLWTWGYNYSGQLGNGTTTNTNLPVLVDCNLSLKVHEAISSENIVVYPNPTAGELTIKIKNQAAQNIHITIMNSVGQILQQKYITDESQLLDLSSQPNGMYLLKIQTTDNQVSLQKIQKF

SEQ ID NO: 4849 - protein, 462 aa, Cytophaga hutchinsonii ATCC 33406
METAVLDTIEAAVPAIDSIKAVAAITVDTLASKSSLAATDAAVSQLGLTANNIWMMLCTALVFIMNLGFATVESGLARSKNTTNILFKNTITPAIGIIIFCLWGFNLMYPGGAYEGGFFGFGGFGLTAPAAESGGLDLTYAGGYTYWTDFLFQAMFAATAATIVSGAVAERIKLTSYIIFTCIIIGVIYPVVGMWNWGGGWLKSLGFYDFAGSTMVHSLGGWAALAGVIVLGPRIGKYVDGKINPIPGHSLPLATIGVFLLWLGWFGFNGGSVLSADPALTSLVLVTTSLAAAAGAIGALLASVIYLKTLDLSMVLNGILGGLVGITAGADLMSPNDAILIGLISGAAVVFAVIFFDKIKVDDPVGATSVHLVCGILGTLFVGIFGDKGFGGSAEGAGMSQLIKQLIGVGAAASLVFPASYVIFTIISKTVGLRVAAKEEIEGLDIAEHGMKAYNIDVDKEY

SEQ ID NO: 4850 - protein, 253 aa, Cytophaga hutchinsonii ATCC 33406
MLSIKNLHARIEEKEILRGINLEVKAGEVHAIMGPNGSGKSTLASVLAGRSDYEVTSGSVTLNGKDLLDLSPEDRAREGVFLAFQYPIEIPGVSTINFMKTAVNEIREYRGQETMDAVSFLKLMKEKMKLVEIDESLLKRALNEGFSGGEKKRNEIFQMAMLEPSLAILDETDSGLDIDALRIVANGVNKLKTPNNATIVVTHYQRLLDYIVPDFVHVLYKGRIVKSGTKELALELEEKGYDWIKAEADAQTV

SEQ ID NO: 4851 - protein, 434 aa, Cytophaga hutchinsonii ATCC 33406
MRNKILSDGAKELSYEIREIVKKADLINKNGQSIVFENIGDPIQKNNVVPQWIRETISNLTLDNKSYSYSPSKGILKTRQFLAELNNKKAGAQITADDILFFNGLGDAIAKVYQFISRSSRVIGPSPAYSTHSSAEAAHASQDPITYKLDPNNHWYPDLDDLYNKVKYNPNIIGILIINPDNPTGMVYPLETLKRIVEIAREFNLFLLSDEIYLNITYNGARAYSLAEVIEDVPGIAMKGISKEFPWPGSRCGWMEYYNRGKDQDFDKFCSALDNAKMIEVCSTTLPQLAIPVIMSDPRYLPYREELNSKIGKRSKIIAGILGQIPELMFNETYGAFYNTIVFKDGVLNDKQTLPIENAANKALVEKWISEPNVDLDKRFVYYLLAAKGICVVPISSFCSDLKGFRVTLLEENEELLEQTFTSIRDAIRLYLKS

SEQ ID NO: 4852 - protein, 911 aa, Cytophaga hutchinsonii ATCC 33406
MCLSRFIINPAGKKYGIVMPKTHYNIYHPPGLYSQAPDFNPGIPGLTNLLCFQQCGKNGIIIQRNQYLEAYFPIHQFYSSMTKVFSIILLCSAFISSSVSVYAQFNRSDTRRSVPYTANYQRMATGNNSDHSFEIRSGELWGWGYNSNGQLGDGTTMDRRTPVKIGIDINWVAVATGSSYTLALKADGTLWSWGKNQRGQLGDGTTIDRHSPVQIGTEQTWTGIAACFSSGIGIKANGTLWTWGFNNGGELGIGNNDEKHTPVQVGADQNWLYAVAGSNHIVALKVDGSLWGWGLNEAGEIGNGNTVQQDSPVRVGTDNDWTTLAAGSNHTLAIKSNGTLWAWGHNVRGNLGNGTATLDPATLPVQVGTDADWIRVSAGLDHSVALKANGTLWAWGYNVRGQLGYGSGTDKHLPVQIGTAHTWVAINAGTYHTIGVKADGSLWTWGDNTNAQLGDGGTADQPVPHSIRTAPDDWISIAASNAFSMGLKANGTIWTWGLNPFETDGQYKNSSPVQTGSDQNWKSIATGSNYILALKADGTLWAWGDNFSGQLGDGTEQPRMLPKQIGTATTWVSIAAASGVQSFGIQADGSLWSWGHNYDGELGLGTNLKTLVPTRVGTGTDWISIKTGVGHTLGIKSDGTLWGWGTNRQGQLGDGTLVNKYVPVQLGTDRDWINIAGGTIHNICLKSNGTLWAWGRNNYGQVGTGNLITQDRMVQISAEQNWIDVYASLDQSFAIRADGSLWACGLNSSGQLGDGTSVDRAAMVAVGTNQKWISLAAGNYHTLALPVNRIQYCGTGTAYYGELGDHVFDNPNKTAFDCLDNNITTPINIQDNNHAPVLLVYPNPSAGSCTIIGNRDAMYIITNELGQMIRSVSLTENNQYAVTIEGLNTGMYFVTGINNPHAGNLKFIVLQ

SEQ ID NO: 4853 - protein, 355 aa, Cytophaga hutchinsonii ATCC 33406
MKSILVIEDNLEVRENIAEILELADYKVLTAMNGKVGVGLAKQSIPDLIICDVMMPELDGYGVLHLLSKSQETAVIPFIFLTAKTEKSDVRKGMNLGADDYLTKPFDDVELLDAVEIRLRKKELIRSAAVGGDLDSIHKIVSEARGNQELEKLISDQRKISRFKKKQILYSEGNKANSLYFIVSGKLKTYKTNDDGRELITGLYKEGDFLGYMNLLEGSDHTESAMMLDDSEIHIIPKDEFFAVLFSSKDVSEKFIKMLSDNLIEKEERLLKLAYNSVRKRVAESLFMIYSNFHKDEDPSDFTMAIYRDDLAAIAGASKETVIRTLSDFKDEGLISIQGSKISIINLDKLQKMKN

SEQ ID NO: 4854 - protein, 348 aa, Cytophaga hutchinsonii ATCC 33406
MSSNNQVLIEEKINETADAVTLVLKQHDSIKNYKSGQFITLLLNIGGEKVRRSYSFSSSPETDSKPSITIKKIQDGKASTYLFNTIKAGDSLEFQQPAGIFTLDKASSESLVFIGAGSGITPLISMIKTALANKKFKKICLIYSNRNEDSVIFKKKLEELKAAYSNFEVIYTYSQPHDTSLPKGRLNQSQFIKIIEHIKDLAVAKTDYFLCGPDGMLEEVKHGLEILQVASSKIHKESFVTTNENDSVFVSVPEHAGDANEVTIMYQGSEYKFTVKPGKTILQSALDEDIDLPYSCMSGLCTACMGKCLSGKVEMGDQDGLSEKEVKNGYVLTCVGRPAVAGTVIEID

SEQ ID NO: 4855 - protein, 172 aa, Cytophaga hutchinsonii ATCC 33406
MKNKCVFLDRDGVINVDNVNYTYKVEEFKIIDGVIPALKMLKEAGYLLIIITNQSGIAKGIYQHEDVYKCHDYFDRESGNLIDEYFYSPYHQSTSESLSRKPGSLMFEKAIAKYDIDIAQSWMVGDRERDILPANKLNIPTILIEEFPNTETSAKYKVDSLYEAAELILKKV

SEQ ID NO: 4856 - protein, 339 aa, Cytophaga hutchinsonii ATCC 33406
MAKVKSKLEYIWLDGYKPTQSLRSKTKIEENFSGKLEDLSNWSFDGSSTEQAKGGSSDCLLKPVFVCPDPQRKNGYLVMCEVLNADGTPHPTNGRAQIEDDDNDFWFGFEQEYFLYDLSTNMPLGFPAGGYPKPQGPYYCSVGAQNAYGREIIEEHLDVCLDAGLNVEGINAEVAAGQWEFQIFAKGAKRAGDEIWVARYLLERIGEKYGVYVNYHCKPLGDLDWNGSGMHANFSNTLLRTAGSKEVFDKVCEAFRPVVKEHIEVYGAHNELRLTGKHETASIHDFSYGVSDRGASIRIPVLVPAKGWSGYLEDRRPNSAADPYKVAARIIKTVKPVQR

SEQ ID NO: 4857 - protein, 542 aa, Cytophaga hutchinsonii ATCC 33406
MLVSFHSMQSSLFRTKNPNELHTEVSALKRTLTFKDLTALGIAAVIGAGIFGTIGQAAYDGGPGIIFLFIITSLGCLFSAFCYAEFAASTPISGSAYTYAYISFGELIAWIIGWDLFMEYAVGNMAVAISWSDYFTAFLKGVNIEFPLWLSMDYFTAVHQKSAAAQQAYVHAPRIFDFPVIVDLPAILITVLITILVYIGIQESKRTNNVLVVFKIIVLLLFIIVGFTTVNTANWSPFIPNGWSGIFKGTAAVFFAYIGFDALSTTTEECVNPKRDLPRAIFSSLLISTLIYIAIALVITGMVSYHDLNVGDPLAYALEKTGLHKFAGLLSFSAIVSMTGVLLVFQIGQPRIWMNMSRDGLLPKALSRIHPRYQTPSVATVLTGGSIILPLLFLDLKEVVDLTSIGTLFAFLIVCAGIWLKKEKIKTESFTVPFIGGRYLLPVTMLPVLYLYLHTVSTENVFSFTQIPLYSCILAMIATIFYGSVRNLSLLPGIGVCLNLLLLSTMHHQNWIRFVAWLAIGLIVYMTYGRKHSVLAGPSTKG

SEQ ID NO: 4858 - protein, 393 aa, Cytophaga hutchinsonii ATCC 33406
MKPVYIVAASRTPIGSLAGSLSSLNASQLGAAAIKGCLNNLELPLDAIQNAYMGNVLSAGLGQSPARQASKFAGLPDSTEATTINKVCASGMKAIQLGTQQILCGDAEIVVAGGMESMSNVPYYLDKARQGYKLGNAQVIDGIIKDGLWDVYYNCHMGNAAENTAKELHITREMQDAYAIESYKRSASAWQNGSFKNEIVPVNISGKPGQETVVDTDEEFSKVNFDKIPQLKPVFDKEGTVTAANASSINDGAAALILVSEDALKKYNLTPIARILSYADAAQDPLWFTTAPVLSVNKALEKAGLNIQDIDYFELNEAFAVVCLAINNKLGIDSRKANVWGGAVSLGHPIGASGARIVVTLVNILKTNNARLGVAGICNGGGGSSALVIENLA

SEQ ID NO: 4859 - protein, 387 aa, Cytophaga hutchinsonii ATCC 33406
MEQSAINTKKIAIVGGGPGGLTLARLLQKKGADVHVYERDLNKDARVQGATLDLHEESGLAALEEAGLMDAFRANYRPGADALRIVDKHATIFFDEAFAGDADTLQRPEIDRGPLRKILLESLLPNTVVWDSHLRSIEKAGEGWRLNFYSGMSAAADIVIAADGANSKIRAHITPLKPFYSGITIVEGFVYDSAQQVPAIHELVNGGKVFAMADSKTLIVSSKGDGSLVFYAGVHAPENWVANSGIDFKNAEEVRTWFKETFADWNPLWFDLFDKAEPDFVVRPQYCMLLDQSWEALPDLTMLGDAAHVMPPYAGEGVNMAMLDALELSRCLYDPSLPTAQLSIAAYERQMNARFAEIGTLTMEQTASLHSETALQNLLAMFERGID

SEQ ID NO: 4860 - protein, 457 aa, Cytophaga hutchinsonii ATCC 33406
MKKINYVIKAAAFGLLVAALNSCGGSETADQTTGDTSAATALAIEKPQLKIGFIKLTDMAPLAIAKEMGFFEEEGLFVTLEAQSNWKNVLDRVIDGELDGSHMLAGQPIAASSGFGRQAELVTPFSMDLNGNAITVSNDVWAMMKPNIPKDAHGKPVHPIKADALKPVVDSYKKQNKPFKMAITFPVSTHNYEIRYWLAAGGLNPGMYTAENVEGQVGAEVMLSVTPPPQMTATMEAGTIFGYCVGEPWNQQAVFKQVGVPVITDIEIWKNNPEKVFGMTKKFVEENPNTAIAITKALIKAGKWLDDPANRAKAVGILSKPAYVGADSIVIANSMTGTFEFEKGDKREAADFNVFFKYNATYPFYSDAVWYLTQMRRWGQITESKPDAWYDATARKVYRPDVWMSAAKLLVQEGVLKESDLPSNTGYKPATADFIDGTEYDGTKPNEYLKKFKIGNK

SEQ ID NO: 4861 - protein, 237 aa, Cytophaga hutchinsonii ATCC 33406
MAKTIPTCSNCSNDLCLIKKIVSMPAAQAYLNQKITFMCKKGQQFIIEGAPVQGLFFIYKGKSKVMQTGINGREQIVRLCKEGEIIGHRGFAVGDQYHISAEALEDTVVCNFSNRTMLELLQELPSLTYEMMLFYAKELNVSETKVRKIAQMTVRERVVDTLLYIHRKFGQSDQLLDLQLTRKEIADFSGTTEEQIIRILSMLKKEGVIRSSGKKIGIAEIVKLKKEISEHNYFIAS

SEQ ID NO: 4862 - protein, 371 aa, Cytophaga hutchinsonii ATCC 33406
MIIGVPKEIKNREFRVSLTPSGVAELVSRKHQVLVQKDAGLGSGFSNEQYTHAGATVFEHAADVYAKADLIIKVKEPLASEYALIKEGQIVFTYFHFASSEELTHAMIERKAICIAYETIQKADQSLPILTPMSEVAGRMSIQIAAHYLEKGNGGSGKLMGGVPGVKPARVLILGGGVVGTQAAKMAAGLGAEVILMDINLTRLRYLTDVLPANVTCLYPTKTLIEEYLPHTDVLVGAVLIPGGKAPVLASREMVETMPGGSVVIDVAVDQGGCIETCKPTSHEHPIFLVNDIIHYCVPNIPGAVPVTSTNALTNASLPYLLQLADKGWKDACRQSAEIEKGLSIAAGKVTDAMLAKTFQLSLHNIKDLLN

SEQ ID NO: 4863 - protein, 461 aa, Cytophaga hutchinsonii ATCC 33406
MKKFVTLFLALFFYVTCLHAQNCWKSVSVGDGYTLALKEDGTLWGWGLNNQGQLGNGTLVNKTVPTQIGTATNWSQISAAHNFSTALKNDGTIWAWGDNTFGQLADGTTTNKTAPIQIGTATNWQSVSAGYNHIAALASDATIWLWGNNYSGQLGDGTNTDKKSPLQIGTNEWKAIHAGSGYTIALKTDGTLWTWGNNTSGNLGNGTLADRNTPGKIGTAADWQKIYSAPMAMKADSLLWGWGYNGYGQLGNGLNGSLNNLKNPAQIGASHWKEVSPSGTHTLGIKGNGTLWAWGYNENGKLGDGTQTDRSLPTQIGTDSDWKMVNANYYHTMAIKTDGSLWAWGTNSNGQLGDGTKISKSSPTPVACSGIALSINTSLNETAIEVYPNPSQGFFLITVDPAATEHGVVRVLNMTGNIVLEKQFSEKQFEVDLTNQPEGIYYIQVQTDNTLLHTGKIIKRH

SEQ ID NO: 4864 - protein, 382 aa, Cytophaga hutchinsonii ATCC 33406
MKVRKQHPQLCIGIPKELEGIENRVCLTPEAVALIVNNGHIVQVETGAGLNAKFSDREYSEAGAKIVYSKKEVFDSEIVLKVDPPTTEEIGYMKPGKTLISALQMSTLDPGYITEINKKRITGLAYEFIEDKAGGKPVVKSMSEIAGSAVMQIAAEYLISKNGMGVILGGVTGVPSTKVLILGAGTVAEYAARTAIGLGAEVKVFDSHLYRLRRIKLNLGMQLYTSVIDTVNLRKELREADVVIGSLRAEEGTSCLVTDEMVTEMKPNSIVVDVSIDQGGCFETSQITNHISPIYRKYDVIHYCVPNIPSRVARTATISLSNIFAPILLQIAEAGGVEEMIHHKEWFMNGIYSYKGYLTNSIMAKKYNESYKDIKLLTASMF

SEQ ID NO: 4865 - protein, 218 aa, Cytophaga hutchinsonii ATCC 33406
MKFFIDTANLNEIREAQELGILDGVTTNPSLMAKEGISGKDNVFKHYKAICDIVDGDVSAEVIATDYKGIIEEGEELITIDPKIVVKVPMIKDGIKAIKYFSQKGIRTNCTLVFSAGQALLAAKAGATYVSPFIGRLDDISQDGMELIAQIVGIYRNYDYQTEVLAASVRHTMHLINCAEVGADVVTCPLNVITGLLNHPLTDSGLAKFLADHKKVNG

SEQ ID NO: 4866 - protein, 620 aa, Cytophaga hutchinsonii ATCC 33406
MDKNQIIGISLISVLMLGYFGFMSTQTPETPVTTPPAITQPVQSDTVLLKSAATDTALKAQNQREYGDFAAAMVGEAKEYKLENKDVVVTLSTKGGTIKSVLLKNYFTWDKKQLFLFKQENNQLSLILNTNKKPVDLYSLYYAGVESKAGDKQVVTFKTDAGNGKTIEHTYTLGAAGFTVDYNLKAAGFGGELPNLPLTLDWREQVERIEYDSEQARVKSTVNYMAAEDGFDYLSEASKDRETETLSNVYWVSLKQKFFNSGFYIREGGTIPSATVTAYPMYSTLPNAPVNSEKFIKALEAQVQLPLEAVISGKAAYAFYFGPNDFKICKAVPAENYQKNVNLGWPLVSWINRFVVIPVFDGLKGVFSSFGLIIVILVLLIKLVLLPLSYKSFVSMAKMKALKPELDELKAKHGDDQQAIQMEQMQVYKQFGINPLSGCIPVLLQMPILLAMFNFFPNAIDLRGESLWWATDLSSYDEFAKLPFTIPFYGSHVSMFTLLMTISTLAYTWVNNQVSTVTGPMKYMSYAMPVVFLFVLNSFPAGLSFYYFVSNLVTIAQQLIIRRFVDEGQLRLQLEAKRDKNLSGDTTGGAPKKNRFMARMEEAMKQREQEQQFKKNIKKK

SEQ ID NO: 4867 - protein, 446 aa, Cytophaga hutchinsonii ATCC 33406
MLFQDLKLIDPILKALSEEGYTTPTPIQSQAIPYVLQGKDLLGCAQTGTGKTAAFSIPILQLLSVKKSTDRKRPIRSLIVTPTRELAIQIGESLQAYGKYTGLTSTVIFGGVNQSRQVTALQNGIDVLVATPGRLLDLMNQGFISLRHIEIFVLDEADRMLDMGFVHDVRRLLLALPAKRQSLFFSATMPPEIVKLADNILVNPSKVEVTPVSSTADTIKQFMYFVDRGNKNNLLVEVLQDPKIKTCLVFTRTKHVADKVVKMLAEHKIKAEAIHGNKSQNARQNALTNFKAQTTRILVATDIAARGIDVDNLEFVINYEIPNIPETYVHRIGRTGRAGAKGTAFSFCDAEEKAYLKDIEKLISKKIPVIDEHPYPLMDHNPPKTPQGRQQRPASSSRPKAASGANSGSSRAGNAGGSQRSSGSSSRSGSSTGKKKWYGKSGSNTK

SEQ ID NO: 4868 - protein, 308 aa, Cytophaga hutchinsonii ATCC 33406
MSSLKLFSGTNSHYLAEKIAAAYGEPLGHRTIKRFSDGEIYVSFDESVRGKDVYIIQSTFPNADNLMELMLMVDAARRASAAEVAAIIPYFGYARQDRKDKPRVPIAAKLVANLLSAAGVDRLMTCDLHAGQIQGFFDFPVDHLDGAAIFIPYLRSIQSDKLIIASPDVGGVKRAREFAKHLKAEFVVCDKHRERANEIASMQLIGNVEGADVILVDDLIDTGGTITRAAEVIMNKGAKSVRAICTHPILSGSAYENIENSVLTEMLVTDTIPLRKETSKIKVLTVADLFAKAIYQIQQNESVSSLFL

SEQ ID NO: 4869 - protein, 713 aa, Cytophaga hutchinsonii ATCC 33406
MSNNTQETAGFNFAPQVSAAAQADIVELSTKIKGFRDNTIDSEKFRSFRLTRGVYGQRQEGVQMIRIKLPYGKVTTDQIIRIADISDKYGSSNLHLTTRQDIQLHYVKLENAPLVWNELEEVGVTLREACGNAVRNITASYTAGVDPNEPFDVSPYAHSMFEYFLRNPICQDMGRKFKISFSTSEADTAFGFIHDLGFIPRVKTVNGKEVRGFKVLLAGGLGAQPFVAHNVHEFLEEDQLIPFSTAVIRVFDRFGERSKRHKARLKYLVNGIGVEAFMEHVAKERIAIKDKSVVIDRNRVDEIILPAVTSFTEATPVDAVKFERFVKANVFEQKQKGYFGVQLKQHLGDLKSDKARVFAAIVKKYASDDVRITVNQGWLLKFVKKEALPALFNELNEIGLAEPGFDSMADITACPGTDTCNLGISSSTGLSVEIEKMLLEEFPDTVFNKNIKIKISGCMNACGQHTIGNIGFHGMSIKNGTNVLPAMQVMLGGGLEPDGTGTIADKILKLPTRRCVEAVREILTDYDTNATEGEYFNDYYRRQVAAEKMYFYKLLKPLSDLETLTELDYIDLGHDEKYVTEVGVGECAGVMIDLVGTLILDTEEKLKWSKRLQQNATPADAIYAAYATYVCGAKAILTGEGVACNTQIAMINDFDKHLVSTNKFSIAGGSFASQVLCMSEHEPTKEFADKYIADTEQFVQQIKTYRAAALVTV

SEQ ID NO: 4870 - protein, 298 aa, Cytophaga hutchinsonii ATCC 33406
MNHSETHKAGFVSIIGRPNAGKSTLMNCLVGERLSIITPKAQTTRHRVMGIINDPEFQIVYSDTPGVIEPKYELQKSMMRFVDFSLEDADMILWVLDVKDPEDHALVLQRLNNVEVPVLLVLNKIDLSTQEEIDALVEKWKAEFPKADSILAVSALKNFNSDMVLKWVLSHLPQHPPFYDKDELTDKPERFFASEIFREKIFKNYSKEIPYSSEVLIESFKDQKDLLRIQAVIIVERDSQKGIVIGQGGEALKRTATQARKSMEEFFGKKVFLETFVKVEPDWRSKEFYLRQFGYKLD

SEQ ID NO: 4871 - protein, 398 aa, Cytophaga hutchinsonii ATCC 33406
MKKKVVLAFSGGLDTTYCAKYLSEDLGYELHTAIVNTGGFSKEELADIEKKAYELGVTSHTTLDIIEKYYAECVKYMVYGNILRNNTYPLSVSAERVFQAMAIAEHAKKVGATAVAHGSTGAGNDQVRFDVVFMIMNPGIEIITPIRDMKLSREAEIEYLKKKGVVRDWSKAAYSINVGIWGTSVGGKETLTSDKTLPESAFPTQVTKTGEEEVELEFEKGQLVGLNGKRMKSTDAIVELNKIVAPYGIGRDIHVGDTIIGIKGRVGFEAAAPMVIIKAHHTLEKHTLTKWQMYWKEQLANWYGNFVHEGQFLEPVMRNIETFLEDTQVHVTGKVKVFAAPYRFHVVGIESAHDLMSAKFGKYGEENNAWSGDDVKGFSKIFGNQTMIYHRVNEDVKG

SEQ ID NO: 4872 - protein, 632 aa, Cytophaga hutchinsonii ATCC 33406
MGKIIGIDLGTTNSCVAVMEGSEAVVIPNSEGKRTTPSIVAFLENGERKVGDPAKRQAITNPTNTISSIKRFMGKKFSESKSEADRATYKLEAGSNDTPRVRIADRQYTPQELSAMILQKMKTTAEEYLGHEVKEAVITVPAYFNDAERQATKEAGQIAGLEVKRIINEPTAAALAYGMDKKGKDMTVAVFDLGGGTFDVSVLELGDGVFEVKSTNGDVHLGGDNFDEVIIDWLAGEFKSEEGLDLRQDPMALQRLKEAAEKAKIELSSSASTEINLPYIMPVNGMPKHLVKTLTRAKFEQLADSLIKRTLDPCKQALKDAGLSIGQIDEVILVGGSTRIPRIQEEVEKFFGKKPSKGVNPDEVVALGAAIQGGVLTGEVTDVLLLDVIPLSLGIETMGGVFTKLIEANTTIPSKKSEVFSTASDNQPSVEIHVLQGERAFAKDNRSIGRFHLGDIPPAPRNVPQIEVTFDIDANGILNVSAKDKGTGKEQKIRIEASSGLSADEIERMRNEAKANEGKDREEKEKIEKINQADSMIFQTEKQLKEFGDKLSAGNKSAIEASLEDLKKAFEAKDISAIDTAMAAINTAWQAASQEMYSAEQGAGQPGADAGQSGPSDSVTDVEFEEVDGDKK

SEQ ID NO: 4873 - protein, 871 aa, Cytophaga hutchinsonii ATCC 33406
MNINNYTIKGQEAFQKAMEIVAANEQQSIESVHLLKGIIVADENVVPFLFKKNNINPVTFNQTLDAVIKTYGKVSGGSPYLSNDATQVLNKATALSKEFGDEYISIEHMLLALVSGKDKAATLLKDAGLSEKGLRAAIQELRGTSKVTDQHAEGKYRSLEKYSKNLNDLARSGKIDPVIGRDEEIRRVLQILSRRTKNNPILLGEPGVGKTAIAEGLAQRIVSGDVPENLKSKQLISLDMGLLVAGAKYKGEFEERLKSVIKEVIDSDGEIVLFIDEIHTLIGAGGGEGAMDAANLLKPALARGELHAIGATTLKEYQKYIEKDKALERRFQAVIVDEPNTQDAISILRGIKEKYEVHHGIRIQDDAIIAAVELSQRYISDRYLPDKAIDLMDEASAKLRIELDSMPQELDEILRRIMQLEIEREAIRRENNKEKETILSRELAELNEQKSQIMAKWQEEKRVIDGLKQAKEDIDRYKMEAEQAERNGDYGKVAEIRYGKIQESEKQLVEFNKQLQELKQTLGSSMLKEEVTPEDIAEVVAKWTGIPVSKMLQSEREKLLHLEEELGKRVAGQAEAIEAISDAVRRSRAGLQDPKRPIGSFIFLGTTGVGKTELAKALADYLFNDDNAMVRIDMSEYQESHAVSRLVGAPPGYIGYEEGGQLTEAVRRKPYSVILLDEIEKAHPDVFNILLQVLDEGRLTDNKGRVANFKNAIIIMTSNMGAHVIQENFDKLTAANEDQVVEETKNEVIDLLRKTIRPEFLNRVDEIIMFRPLTRKEIRKIVGIQFSLIQKRLEENGIKVEASTEVLDKLGELGFDPQFGARPLKRVMQRLILNELSKEILSGNIQKESVVGITLGEDGNLQFLNLDSVPL

SEQ ID NO: 4874 - protein, 375 aa, Cytophaga hutchinsonii ATCC 33406
MRVYLDNAATTALDPLVLEAMMPYLTDHFGNASSIHGHGRETRSAIEIARKKIADLLNTTAAEIFFTSGGTEADNTAIIGAVEKHNIKHIITSRLEHHAVLHTAQYLEKLHRVSVYYVDVNEKGVIDLAHLESLLQQYPNALVSLMHGNNEIGNILDLKKAGDLCHQYKALFHSDTVQTIGHYPLHLYSLPVDFIAGSAHKFHGPKGIGLLYLKSGSAIYPYMHGGAQERNMRGGTENTPAIVGMAKALELAYQRMEADRNHITGLKKHMIEELNKIPGLLFNGESADIDKSLMHVLNVSLPPSENNEMLVMNLDIAKISASAGSACTSGTNIGSHVLEAIGAKDDWGYVRFSFGRNNTKEEIDYCIKTLVKSIK

SEQ ID NO: 4875 - protein, 446 aa, Cytophaga hutchinsonii ATCC 33406
MLVDSLNHAQAALNDSLHATNDLMFKTRTELQLTQNSLANSSFKANNIWMMVATAFVFIMHLGFATLESGLTQAKNTTNVLFKNSIVPAIGIMTHALCGFNLMYPGFEFGVSMDFIGFKGWGVELPEGGETFVYNPGMTYWTDFLFQAMFAATAATIVSGAVAERIKLFSFMVFSFFFTAFIYPIIGSWKWGGGWLNTIGFSDFAGSTLVHSVGGWAALAGVILLGPRLGKFNKGVINPIQGHSMTSAVIGTFLLWLGWFGFNGGSVLSAEPGMVSRVLVMTCISGSSGAIAAAFSIFAINKHFDLSMVLNGILAGLVGITAGADQMGIIDATLIGLISGCLVVFAIITFEKIRLDDPVGALSVHLVCGIWGTLAVALFGAKAGAAQFVTQLIGIGSVAVAAFGSSFLILLAIKYTIGLRVGKEEEIYGLDASEHYMEAYPNFMSK

SEQ ID NO: 4876 - protein, 480 aa, Cytophaga hutchinsonii ATCC 33406
MFSSLFKTKSIQSILKEEKGELKKTLTATSLVLLGIGAIIGAGIFSLTGIAAAENAGPAVTISFVVAGLGCAFAGLCYAEFASMLPIAGSAYTYSYATLGEFIAWIIGWDLVLEYAVGAATVAISWSRYLIKLLEKLGVDHIPYQWMMSPFETHRVNGTELHGIVNIPAIFITCLMSLVLIRGMKESAKLNNVIVALKITVVIAFIILGWSYMDPINHADYVPDNTGVFEHFGWTGVMTGAAVVFFSFIGFDAVSTAAQEAKNPQRDMPIGILGSLVICTILYVLFSYVMTGLENYQNFKGEAAPVALAIAATPYAFFQELIIIAILAGYTSVIMVLLMGQSRVFFSMSKDGLVPAIFSEVHPKYQTPWKSNILFAILVSLFAGLVPVSVVGEMTSIGTLFAFVLVCIGVLVLRKKQPDAPRAFRTPWVPFVPIMGIVVCLYLMYALPIDTWIRLIVWMAIGIAIYFLYSRHHSKIRNSN

SEQ ID NO: 4877 - protein, 417 aa, Cytophaga hutchinsonii ATCC 33406
MNEITELAAQQAELTHAVDTVWVAICAALIFQMEGGFALLESGFVRSKNAISIIAKVMIDIMFGGIAFYAVGFGIAYGASNGWWAFGFGIPEGDMGLGLTVSNKLFWFIQMGFAIAAISIVSGAVAERIKIWAYAFFVLFFCACMYPLAANWVWNPNGWLAQLGFNDFAGSAAVHAMGGFAGLAAAIVLGPRIGKYNADGSINPIPGHNLTLSAVGAFILWFGWFGFNPGSTLGAVGKWELIGSVATNTFLSSAMGGISTMVYTFLRYKRIDITMVINGVLAGLVAITAGCNVVSANSAIIIGLIAGILIDVAVVAIDKMKVDDPVGAVAVHGVNGFFGTVAVGLFATKGGLFTTGDAHLLGVQTLGVTVIAVCSFAVTYLVFIVLKKTTGIRLGEREELAGTDAVEFGIEAYTTIE

SEQ ID NO: 4878 - protein, 615 aa, Cytophaga hutchinsonii ATCC 33406
MCGITGFISIKWGSDELHSMTRRLQHRGPDAEGFYINESVHLGHRRLSILDLSVAANQPFFSKDKRYVMVFNGEVFNYKELAVKYAIPTDTTSDTEVILELFALQGPAAFQEFNGMFAIAIWDTYEKKLTLLRDRFGIKPVCYYDGPDGFGFASEIKSLLELPIPRLINSEALADYLFLEYIPKPNTIFQNIKKLTNGCYLEVTDGVRVAVKAFYDIREKYDPKPLKEKEGLEEFHHLLSDAVKSRMISDVPIGAFLSGGVDSSLVVSKFQENSTLPVETFTIGFDEKQYDESAYAKKVSELLKTNHHEYRLPAEDVFSVLKDAIEFYDEPFAVSSVLPSLLISKVSRQHTTVALTGDGADELFMGYNTYYWYNRIETLKRIGGKASLKLAGNIFKMFGGKPAIKSRLFEGWADKHPYINLWSQEQQMFTQQEIGKLLNYRYTHETTIPYWESLEKISLNNEQAVSFFDIQHYLADDLMYKMDIASMRHGLEVRCPFLDYNLVEFAVNLPLELKINNGTQKYILKKALEKYIPQSLIYRTKWGFSAPSEEWLKRSHTYLIDHYLDPARISAQGIFNAQEIQKLIASFRSGHYYHGKRLWSLVIFQLWYEQYMVAK

SEQ ID NO: 4879 - protein, 1097 aa, Cytophaga hutchinsonii ATCC 33406
MQVYIPDKPYEIFSLTYCFETIYNMKQRTFVLLFFILTLSSYAQTLKLETVIQKGHSASVKAVAVSPDGKILATGSRDKSVKLWDQQSGMEIRSLIGHDHTVNGLAFSPDGKLLATSSADGTARVWDILTGKEIFTSPKNSKYITDVAFNPDGKSFAYAGYPDSASIYAIPSGKLIKRLEVNADQGSGYGISLKYSNDGKWLAIGEDNKTANVYRTSDWHLAYTFKPAEGWCGGCGTYVEFSRDNKSLFKIAHNDKLSQYDLQTGSLIKTFGEPVDYLRGITLTKDGQHVIAASDSMLYNYTITSKTVVAYKLYLSETVNDIALSLDEKEILVASDNMTAWALEAASGKVIRTYQGALQEQDKGGLNYNADNYWEYNIARYLRLKNELLLTKDDNNFITGKTGVNAIQWNISTGAPNKLYEGHTKAVISMDQSADGSILATADGAGEVFLWNTKTGALINRIKPHTEPIFDVSLSRDGKYVATGSWDASIEVYDVQTGEVSSDMYLKENSCYSISFTPNGLYLLCGRLDKSLELREPDSKKVVLSFIGHTDVVSSIAFGADPNKALTASWDGTARIWDVTTGMMLQKFKGARGMLHSAIYSTDSKKIITGGDDRIIRIWDIQSGQVLKTLNGHQSEITSLSLSKDGKMLVSYSTDGVVKFWNLESGLEFYEHVHISSREWMARTPQGYFSATEQARADIHFVKGMDVYAPDQFFEYYRPDLIQQIFLNRGSSPTGMQNVENSLQLSPPPLIKLACIPNADGLQATLNIKVMDEGGGLSEIRLAHNGKNMAVALDPKKVVEGKGNSYIYSVPVSLVRGTNQFSGIAVSKGKIESAASLVSVVSDKAPSAAVCHVFAIGIDTYKNPAYTLNYAREDAEAFAESVKRNGANLYQKVIVHGLYDAAATRQNVLDTLKSLEAHIALNDVFIFYYAGHGSMVDQNFYFIPTECTSMYQATANNALSAETIQAGFKNIKALKQIIIMDACQSGGSVEVLAMRGANEEKAFAQLSRGAGIHVMASAGSEQNAKEILELKHGLFTYVLLEALNGKADGAPKDGKITIYELKSYLDDQVPELNSKYSGKIQFPYTFSRGSDFPIVLE

SEQ ID NO: 4880 - protein, 615 aa, Cytophaga hutchinsonii ATCC 33406
MCGINIIIDKKGVLTSREIQSMNQAILYRGPDHSDFVSFQFKQQQIFIGNNRLKIIDRNTLSNQPYNSIDKRYSLTFNGAIYNYKELKQQLPAMEWQTESDTEVLLNWMIVHGLSGLPELNGMFAFAFYDRQQHALIIARDPSGIKPLYYYNDDDYFIASSEIKGILASGLVKKEFNSNQVSHYLQFKYVPKPFTFYKNIFELNEATFIKIDEYDFKIKRFESPSVIKPNTLTNQQLIETCDQLIENAVKHHLVADVPVGLYLSGGIDSTLLLSKIRKLGHLNFPTFTIANSSREQAFGTRDFEFARLASKLYNSDHHEVSVHAEMLQDLPAFVSMIDQPIGDSALFLTHILSKEAGQHVRVALNGAGADELFAGYNRHSAYKSYLNNLLHKNLAITLIKSTYNILPDGGNHSLKKVFRLWNKFTGMMDVDPIKTCHNFSSSEYFIEKNTSIEVDDKSYEDLSYYLYYCLRNDRTKYLISDILALTDKMTMRSSIEARVPYLDQELRRFVESLDPSVLLKNGRKWILKEVLLRNGGETFLNRPKEGFGMPFGYWLKLPVNKNFVEKLTNKNHPIYEWVPYQTIKNLVDWHLGSKRDCSSELWSVLLLMHWYEKEF

SEQ ID NO: 4881 - protein, 444 aa, Cytophaga hutchinsonii ATCC 33406
MRVLKFGGTSVGKPERMHSVAKLISSPDPKVVVLSAVSGTTNALVDISTKLCKKDIKAAEDAIEKLFTPYHAFVEELYTTEAGKYKGHAIMRTYYELIKSYVTAPSFGDKETRFFLAQGELISTNLFQEYLAEQGYSSALLPALEFMKTDADSEPMLEYIEEKLNEQLAKHPNKQLYITQGYVCLNSDGEVDNLKRGGSDYTATLIGAALRMEEIQIWTDIDGMHNNDPRIVKRTFPIPEISFDEAAELAYFGAKILHPTCIRPAQVRKVPVRLLNTMQPEQKGTVINSKPSDRDITAIAAKDDITAIKIKSSRMLQAHGFLRKVFEIFENYKTSVDMITTSEVAVSLTIDDAKNLEQIVKELKEFSIVEVDTDQTIICIVGNFGKEKTGISKRLFDAMETIPVRMISYGGSASNISILINSTLKNETLNALNERLFFQAETVK

SEQ ID NO: 4882 - protein, 115 aa, Cytophaga hutchinsonii ATCC 33406
MNIEVLKSKIHRVKVTQAELHYVGSITIDEALMEASNIIENEKVQIVNINNGERFETYVIKGEKNTGVICLNGPAARKVAVGDIVIVIAYASMDFEEAKKWKPTLIFPDANNRLI

SEQ ID NO: 4883 - protein, 619 aa, Emericella nidulans
MRSIDQPLLTRLPSSGRAQTSQLPLTMYNAHRGMVPAPNSRLNELLDQLRQEFENQSRSTGEFEHQLTGQLQEMEMIRQKVYQLEQAQLKMKQDYEAEIRMLRHELESRGVQPVASHVAVPAQHGGPSQAPPPALGHGPSNLFGGIMANQGGSGPGLAPPPPQDQQPSQHTLQQPAAAAQPGAPQPPQSSFGGYQPWRCCYGPPPPPTASPGPGKRPRAPPGPATPQQAHQLAYPESRVSPQLARPTPPNQPVVRDRPGNMLANWNPEDLPPSQKKEGVDWYAVFNPEVQRVLDVELVHHLVHDSVVCCVRFSRDGKYLATGCNRSAQIFDVTLGQNVAVLQDESVDKSGDLYIRSVCFSPDGKYLATGAEDKQIRVWDIATRTIKHIFSGHEQDIYSLDFAGNGRYIASGSGDKTVRLWDIAEGKLVYTLSIEDGVTTVAMSPDGLYVAAGSLDKTVRVWDTTTGYLVERLENPDGHKDSVYSVAFAPNGKELVSGSLDKTIKLWELNLPRQQYNSAGKGGKCHRTFEGHKDFVLSVCLTPDGHWVMSGSKDRGVQFWDPITGNAQMMLQGHKNSVISVAPSPTGNLFATGSGDMRARIWRYASFPNPISLPKIWMLG

SEQ ID NO: 4884 - protein, 358 aa, Camellia sinensis
MERYELVKDIGSGNFGVARLMRNKETKELVAMKYIERGQKIDENVAREIINHRSLRHPNIIRFKEVVLTPTHLAIVMEYAAGGELFERICNAGRFSEDEARYFFQQLISGVSYCHSMQICHRDLKLENTLLDGSPAPRLKICDFGYSKSSLLHSRPKSTVGTPAYIAPEVLSRREYDGKLADVWSCGVTLYVMLVGAYPFEDQEDPKNFRKTIHRIMAVNYKIPDYVHISQDCRHLLSRIFVANSARRITIKEIKNHPWFLKNLPRELTEAAQAMYYRRENPSFSPQTVEEIMKIVEEARTPPPVSRSIGGFGWGGEEDEGKEEEEDEEAEEEEDEEDEYDKTVKEAHASGVHLPRDD

SEQ ID NO: 4885 - protein, 108 aa, Coccidioides posadasii
MAPKTHISNAENLKKYMELDQRGKIMAEYIWIDAYGGVRSKTKTVNKVVKSADELPEWNFDGSSTGQAPGDNSDVYLRPVAIFPDPFRRGENILVLCETWDSDGSPNK

SEQ ID NO: 4886 - protein, 120 aa, Platanus x acerifolia
LLQTNVKWPLGWPVGGYPGPQGPYYCGAGADKSFGRDISDAHYKACLYAGINISGTNGEVMPGQWEYQVGPSVGIEAGDHIWCSRYILERITEQAGVVLTLDPKPIEGDWNGAGCHTNYS

SEQ ID NO: 4887 - protein, 1184 aa, Arabidopsis thaliana
MLSSIGCNMFVPSTFCSVSKFVSIDCGCSSNYTDPRTGLGWVSDSEIIKQGKPVTLANTNWNSMQYRRRRDFPTDNKKYCYRLSTKERRRYIVRTTFLYGGLGSEEAYPKFQLYLDATKWATVTIQEVSRVYVEELIVRATSSYVDVCVCCAITGSPFMSTLELRPLNLSMYATDYEDNFFLKVAARVNFGAPNMDALRYPDDPYDRIWESDINKRPNYLVGVAPGTTRINTSKTINTLTREYPPMKVMQTAVVGTQGLISYRLNLEDFPANARAYAYFAEIEELGANETRKFKLVQPYFPDYSNAVVNIAENANGSYTLYEPSYMNVTLDFVLTFSFGKTKDSTQGPLLNAIEISKYLPISVKTDRSDVSVLDAIRSMSPDSDWASEGGDPCIPVLWSWVNCSSTSPPRVTKMWLDDNELTGTLPDMSKLVNLKIMHLENNQLSGSLPPYLAHLPNLQELSIENNSFKGKIPSALLKGKVLFKYNNNPELQNEAQRKHFWQILGISIAAVAILLLLVGGSLVLLCALRKTKRADKGDSTETKKKGLVAYSAVRGGHLLDEGVAYFISLPVLEEATDNFSKKVGRGSFGSVYYGRMKDGKEVAVKITADPSSHLNRQFVTEVALLSRIHHRNLVPLIGYCEEADRRILVYEYMHNGSLGDHLHGSSDYKPLDWLTRLQIAQDAAKGLEYLHTGCNPSIIHRDVKSSNILLDINMRAKVSDFGLSRQTEEDLTHVSSVAKGTVGYLDPEYYASQQLTEKSDVYSFGVVLFELLSGKKPVSAEDFGPELNIVHWARSLIRKGDVCGIIDPCIASNVKIESVWRVAEVANQCVEQRGHNRPRMQEVIVAIQDAIRIERGNENGLKSSSSSSSKAQSSRKTLLTSFLELESPDISRNSLAPAARSFYIYFLRPSKNLRRYGSWAIITGPTDGIGKAFAFQLAQKGLNLILVARNPDKLKDVSDSIRSKYSQTQILTVVMDFSGDIDEGVKRIKESIEGLDVGILINNAGMSYPYAKYFHEVDEELINNLIKINVEGTTKVTQAVLPNMLKRKKGAIINMGSGAAALIPSYPFYSVYAGAKTYVDQFTKCLHVEYKKSGIDVQCQVPLYVATKMTKIRRASFLVASPEGYAKAALRFVGYEAQCTPYWPHALMGAVVSALPESVFESFNIKRCLQIRKKGLQKDSMKKE

SEQ ID NO: 4888 - protein, 360 aa, Azoarcus evansii
MTTHRTPKFHPLKVAEVRRETPEAVSLRFEIPAELAEDYRFEQGQHLNLKVMVNGEELRRSYSICSGVDDNELRVAIKKIGGGVFSTWANDGGIRVGDVLEVMTPEGRFHTPLDPAHAKHYVAFAAGSGITPILSLVKTTLAAEPHSRFTLVYSNRRQASVMFAETLEDLKNRHMARFTLYNLFSREEQEVPLFNGRLDGERVRQFLDTLIPVDTIDEAFICGPGAMIDEVEAALQAAGLAHEHIHLERFGVPASAPEHHVEPGDATQAKVTVIADGLTREMEFRAEDPSILDVALRAGMDLPYSCKVGVCCTCRAKLLEGKVRMDKNFTLEQPDVDAGYILTCQAHPLIDRVVISFDER

SEQ ID NO: 4889 - protein, 153 aa, Arabidopsis thaliana
MVRGKIEMKKIENATSRQVTFSKRRNGLLKKAYELSVLCDAQLSLIIFSQRGRLYEFSSSDMQKTIERYRKYTKDHETSNHDSQIHLQQLKQEASHMITKIELLEFHKRKLLGQGIASCSLEELQEIDSQLQRSLGKVRERKVHILHHYLIGI

SEQ ID NO: 4890 - protein, 511 aa, Arabidopsis thaliana
QMNMENVSASKSVSNWSGTCYATPLIGAFIADAYLGRYWTIASFVVIYIAGMTLLTISASVPGLTPTCSGETCHATAGQTAITFIALYLIALGTGGIKPCVSSFGADQFDDTDEKEKESKSSFFNWFYFVINVGAMIASSVLVWIQMNVGWGWGLGVPTVAMAIAVVFFFAGSNFYRLQKPGGSPLTRMLQVIVASCRKSKVKIPEDESLLYENQDAESSIIGSRKLEHTKILTFFDKAAVEAESDNKGAAKSSSWKLCTVTQVEELKALIRLLPIWATGIVFASVYSQMGTVFVLQGNTLDQHMGPNFKIPSASLSLFDTLSVLFWAPVYDKLIVPFARKYTGHERGFTQLQRIGIGLVISIFSMVSAGILEVARLNYVQTHNLYNEETIPMTIFWQVPQYFLVGCAEVFTFIGQLEFFYDQAPDAMRSLCSALSLTAIAFGNYLSTFLVTLVTKVTRSGGRPGWIAKNLNNGHLDYFFWLLAGLSFLNFLVYLWIAKWYTYKKTTGHAL

SEQ ID NO: 4891 - protein, 331 aa, Arabidopsis thaliana
MGYERLGPSGATGSVTTSTTTAPILNQVSTSEQPENNNRRSKKKLVVSSIVLAISLILAAAIFAGVRSRLKLNQSVPGLARKPSQAISKACELTRFPELCVDSLMDFPGSLAASSSKDLIHVTVNMTLHHFSHALYSSASLSFVDMPPRARSAYDSCVELLDDSVDALSRALSSVVSSSAKPQDVTTWLSAALTNHDTCTEGFDGVDDGGVKDHMTAALQNLSELVSNCLAIFSASHDGDDFAGVPIQNRRLLGVEEREEKFPRWMRPKEREILEMPVSQIQADIIVSKDGNGTCKTISEAIKKAPQNSTRRIIIYVKAGRYEENNLKVGR

SEQ ID NO: 4892 - protein, 861 aa, Arabidopsis thaliana
MGSKSFGNLLDLASGDLLDIPQTPRYLPRVMTVPGIISDVDGYGISDGDSDVISLPCRERKIIVANFLPLNGKKDSETGKWKFSLDNDSPLLHLKDGFSPETEVIYVGSLKTHVDVSEQDEVSHNLFEEFNCVATFLPQDVHKKFYLGFCKQQLWPLFHYMLPMCPDHGERFDRGLWQAYVSANKIFADKVMGVINLEEDYIWIHDYHLMVLPTFLRRRFHRVKLGFFLHSPFPSSEIYRTLPVREELLRGLLNCDLIGFHTFDYARHFLSCCCRMLGLEYESKRGHIALDYLGRTVFLKILPIGIHMGRLESVLNLPATAEKLKEIQEKYRGKKIILGVDDMDIFKGLSLKILAFEHLLQQYPSMLGKIVLIQIVNPARGSGKDVQEARKETYDTVKRINERYGSHDYEPEVLIDRPVPRFEKSAYYALAECCIVNAVRDGMNLVPYKYTVCRQGTPSMNKSLGVSDDLPRTSTLVLSEFIGCSPSLSGAIRVNPWDVDAVADSLYSAITMSDFEKQLRHKKHFHYISTHDVGYWARSFSQDLERASRDHYSKRCWGVGWGLGFRLVALSPNFRRLSIEQTVSAYRRSSKRAIFLDYDGTLVPETSIVKDPSAEVISALKALCSDPNNTIFIVSGRGKVSLSEWLAPCENLGIAAEHGYFTRWNKSSDWETSGLSDDLEWKKVVEPIMRLYTETTDGSNIEAKESALVWHHQDADPDFGSCQAKELLDHLETVLVNEPVIVNRGHQIVEVKPQGVSKGLVTGKILSRMLEDGIAPDFVVCIGDDRSDEEMFENISTTLSAQSSSMSTEIFACTVGRKPSKAKYFLDEVSDVVKLLQGLANTSSPKPRYPSHLRVSFESVV

SEQ ID NO: 4893 - protein, 169 aa, Arabidopsis thaliana
YLFFTTRNPRFAIKCQNSQIESDTTEDPSRSKNSSSSGVGFGSPASSSSPAKKLSAATSGNKKGKGKREVNRRAPVEKPVFMSEEGAAKAEEQRQNENAFLLTWLGLGIVILIEGIILAASGFLPEELDKLFVKYVYPVFTPSVVLFVAGTTAYGVLKYIQNEKMKGQE

SEQ ID NO: 4894 - protein, 196 aa, Arabidopsis thaliana
MFICKHLCQETGGLYSVAVDEVHLKDLLLEHAPPPPAIAEFAIANLIKMGFPQRAAEGSMAICSCHKEVKIGAGYMCPRCKARVCDLPTECTICGLTLVSSPHLARSYHHLFPIAPFDEVPALSSLNDNRRKLGKSCFGCQQSLIGAGNKPVPCVTCRKCKHYFCLDCDIYIHESLHNCPGCESIHRPKSVSLMEE

SEQ ID NO: 4895 - protein, 356 aa, Arabidopsis thaliana
MSLLADLVNLDISDNSEKIIAEYIWVGGSGMDMRSKARTLPGPVTDPSKLPKWNYDGSSTGQAPGQDSEVILYPQAIFKDPFRRGNNILVMCDAYTPAGEPIPTNKRHAAAEIFANPDVIAEVPWYGIEQEYTLLQKDVNWPLGWPIGGFPGPQGPYYCSIGADKSFGRDIVDAHYKASLYAGINISGINGEVMPGQWEFQVGPSVGISAADEIWIPRYILERITEIAGVVVSFDPKPIPGDWNGAGAHTNYSTKSMREEGGYEIIKKAIEKLGLRHKEHISAYGEGNERRLTGHHETADINTFLWGVANRGASIRVGRDTEKEGKGYFEDRRPASNMDPYVVTSMIAETTLLWNP

SEQ ID NO: 4896 - protein, 360 aa, Arabidopsis thaliana
MSAAISAAVSLPSSKSSSLLTKISSVSPQRIFLKKSTVCYRRVVSVKAQVTTDTTEAPPVKVVKESKKQEEGIVVNKFKPKNPYTGRCLLNTKITGDDAPGETWHIVFTTEGEVPYREGQSIGVIPEGIDKNGKPHKLRLYSIASSAIGDFGDSKTVSLCVKRLVYTNDGGEIVKGVCSNFLCDLKPGDEAKITGPVGKEMLMPKDPNATIIMLGTGTGIAPFRSFLWKMFFEEHEDYKFNGLAWLFLGVPTSSSLLYKEEFEKMKEKNPDNFRLDFAVSREQTNEKGEKMYIQTRMAEYAEELWELLKKDNTFVYMCGLKGMEKGIDDIMVSLAAKDGIDWLEYKKQLKRSEQWNVEVY

SEQ ID NO: 4897 - protein, 640 aa, Arabidopsis thaliana
MVVKRKLNCGGSNGFDFPNIPKAPRSSRRKVSGKRSDDESEICAIDLLASLAGKLLEESESSSTSTYASEADNLDHLGGLIKQELEDGYTTKPCKSEFFDPGNPASKSTSENTSVTCLPFSSFENDCILEQTPVSDCKRASGLKSLVGSITEETCVVNEDAGSEQGANTFSLKDPSQLHSQSPESVLLDGDVKLAPCTDQVPNDSFKGYRNHSKLVCRDDDENYCKYYKFSDKCKSYRPLSRVGNRRIMQSVRAISKLKCFEDTRTDGRLKALYRKRKLCYGYNPWKRETIHRKRRLSDKGLVVNYDGGLSSESVSNSPEKGESENGDFSAAKIGLLSKDSRVKFSIKSLRIPELVIEVPETATVGLLKRTLKEAVTALLGGGIRIGVLVQGKKVRDDNNTLSQTGLSCRENLGNLGFTLEPGLETLPVPLCSETPVLSLPTDSTKLSERSAASPALETGIPLPPQDEDYLINLGNSVENNDELVPHLSDIPADEQPSSDSRALVPVLALESDALALVPVNEKPKRTELSQRRTRRPFSVTEVEALVSAVEEVGTGRWRDVKLRSFENASHRTYVDLKDKWKTLVHTASISPQQRRGEPVPQELLDRVLGAHRYWTQHQMKQNGKHQVATTMVVEAGSSM

SEQ ID NO: 4898 - protein, 307 aa, Arabidopsis thaliana
MQDIHDFSMNGVGGGGGGGGRFFGGGIGGGGGGDRRMRAHQNNILNHHQSLKCPRCNSLNTKFCYYNNYNLSQPRHFCKNCRRYWTKGGVLRNVPVGGGCRKAKRSKTKQVPSSSSADKPTTTQDDHHVEEKSSTGSHSSSESSSLTASNSTTVAAVSVTAAAEVASSVIPGFDMPNMKIYGNGIEWSTLLGQGSSAGGVYSEIGGFPAVSAIETTPFGFGGKFVNQDDHLKLEGETVQQQQFGDRTAQVEFQGRSSDPNMGFEPLDWGSGGGDQTLFDLTSTVDHAYWSQSQWTSSDQDQSGLYLP

SEQ ID NO: 4899 - protein, 180 aa, Sinorhizobium meliloti
EFDAFPTLEQLPLWGFDGSSTQQAEGRSSDCVLKPVAVYPDPVRTNGALVMCEVMMPDGKTPHPSNTRATVLDDESAWFGFEQEYFFYKNGRPLGFPEQGYPAPQGPYYTGVGYKNVGDIARQIVEEHLDICLAAGINHEGINAEVAKGQWEFQVFGKGSKKAADEVWLARYLLLRLTEK

SEQ ID NO: 4900 - protein, 180 aa, Sinorhizobium medicae
EFDAFPTLEQLPLWGFDGSSTLQAEGRSSDCVLKPVAVYPDPVRTNGALVMCEVMMPDGKTPHASNTRATVLDDEGAWFGFEQEYFFYKNGRPLGFPEQGYPAPQGPYYTGVGYKNVGDVARQIVEEHLDICLAAGINHEGINAEVAKGQWEFQIFGKGSKKAADEVWLARYLLLRLTEK

SEQ ID NO: 4901 - protein, 215 aa, Clostridium perfringens ATCC 13124
MKIFIDTANVEEIRKASKLGVLAGVTTNPSLIAKEGRDIKEVIEEICSIVDGSISAEVMALECDEMVREGRELAKIHKNIVIKIPMCEEGLKAVKVLASEGIRTNVTLIFSPLQALLAARAGASFVSPFLGRLDDIGNPGIEIVTQIAEMFALHGIDTEIISASVRNPMHVLDSAMAGSHIATIPYNVILQMVKHPLTDAGMKKFIEDYNKAFNK

SEQ ID NO: 4902 - protein, 397 aa, Clostridium perfringens ATCC 13124
MILSRKAQNIGASLTLALTAKAGELKKEGIDVVSFGVGEPDFNTPKNIIEAATRAMEEGNTKYTATSGIVELKEVIAKKLHDDNGLNYGTKNIIISTGAKQSLANVFMAILNPGDEVIIPVPYWVSYPELVKLSDGVPVFIETKKENDFKVTYDELKSVLSKNTKAIVINSPNNPTGTVYSKKDLEVIAKFAEENDLIIISDEIYEKLIYGKEEHISIASLSEDAFKRTVVINGFSKAYAMTGWRIGYAACYNEELIKVMNNVQSHMTSNTNSIAQFAALEALNGDQETIKNMVKEFSLRRELMIELISEIEDLTFIEPKGAFYVMIDVSKVLKKANIKGSMEFANLLLKEENVVVIPGIAFGEDNFIRLSYATSKEEIIKGLKRIKEFVNKLMNRD

SEQ ID NO: 4903 - protein, 398 aa, Clostridium perfringens ATCC 13124
MKIVVQKFGGTSVSTKERRTMVVEKVKGAINKGYLPVVVVSAMGRKGEPYATDTLLGLVSEEFKKENKLATDLLMGCGEIISTVVMSDELREAEIEAVPLTGGNAGILTDDNYSSADFIDINPKLILEVLKEGKVPVVAGFQGVDRNGFLTTLGRGGSDTTAAVLGVALKAEEIEIYTDVDGIMTADPRIVGDAELINKISYNEVFQLADQGAKVIHPRAVEIAMKGNVTLVIKNTMSTCIGTMIDSLGDVDNNKFITGITHQGNRIQVSIKSDDNKDNINYKTILESLANNKISLDLINIFPKEKVFTIDASVKELFEDIMRKNNLKYSLVEDLSTIAIVGSRMRGIPGVMAKIVGALDNENIEVLQTADSHMTIWCLVESKNVREAIKALHRVFMK

SEQ ID NO: 4904 - protein, 398 aa, Clostridium perfringens ATCC 13124
MNVLVINCGSSSLKYQLIDMDTENALATGLVERIGLEGANLTQKSEGKDKYEIVEPMKDHQDAIRLVLGALIDEKHGVIKSLDEINAIGHRVVHGGEKYAESALVTEEVMKDLEECAKLAPLHNPANIIGINACKALMPNVPMVVVFDTAFHQTMPEKAFVYALPYELYEKEHIRKYGFHGTSHKYVSAKIAEAMGKNIEDLKIITCHLGNGASIAAIKNGKCVDTTMGFTPLEGLVMGTRCGNIDPAVVTYLIDELGYTSQEVNTLMNKKSGIFGVSGVSSDFRDVEAAADKGSKEAQIALDLFRNSVKKYIGAYIAEMNGCDVIVFTAGVGENSIIERGAICRDLEFLGIELDEERNNIRAKVAEISKEGSRIKLFVVPTNEELMIAQDTVSIISK

SEQ ID NO: 4905 - protein, 246 aa, Clostridium perfringens ATCC 13124
MGKAYEKVYEVTYGETDGRKDCRITSMMNFFSDCCLSQEEKNSMNYADNSSETTWVFFDYEIIVNRYPRYREKIKVKTYVESIRKFYSNRVFEAYDMDGALVARADVLAFLINKKTRRPARISDEEYEIHGLSKESSKLLRKKLNFEKFDKEDLEMNFHIRYLDIDLNMHVSNIKYVEWILETVPVDIVLNYKMKKIKIKFEKEITYGHNVIIKSKIIKGEDEVKVLHKVENEEGESITLAETYWY

SEQ ID NO: 4906 - protein, 296 aa, Clostridium perfringens ATCC 13124
MFKSGFITIVGRPNVGKSTLTNLLMGEKLSIVSNKPQTTRNNIQTILTGEDYQMIFVDTPGIHKPKHKLGEYMVNSATDSIKDVDLVLFLSNPCEEVGRGDKFIIEQLKNQKAPVIFVLNKVDESSPEKVAKTLELFSKEYDFAEMIPISAMKAKNTDKLLELMVKYLPEGPKYYPDDMITDVQERFVVAEIVREKALKNLSQEVPHGIAVDVIQMKQDDNGKYNIEVDLICEKASHKGIIIGKNGQTLKKIGSTARYELERFLRAKVNIKIWVKVRKEWRDNTSLLKELGYKKLK

SEQ ID NO: 4907 - protein, 398 aa, Clostridium perfringens ATCC 13124
MKILIINCGSSSLKYKLIDMANEKDIIEGIVERIGLDQSRLVQKNELREKYILEKEIKDHKEAIDIVLNTLVDSKVGVIESIDEITAVGHRVVHGGERYSSSIIINEEVIKYLEECSKLAPLHNPANIIGIRACQSLMPNKEMVAVFDTAFHGTLPEKAYIYAIDYALYKDHKIRKYGFHGTSHKYVSHKVAETMGKDIKDLKIITCHLGNGASISAIKGGECIDTTMGFTPLAGIPMGTRSGNIDPSIIPFLVEECGYTIEEVSESLNKKSGVLGISGVSSDFRDIEDAASTGDKRAQLALDIFHYRIRAEIGSFIVNMGGVDVIVFTAGVGENSPETREECLKDLEFLGLTLDKEKNKVRGKLAEISQADSKIKAYVVPTNEELMIAKETVELIGK

SEQ ID NO: 4908 - protein, 381 aa, Clostridium perfringens ATCC 13124
MEVYFDNSATTKPLKEVRDEVYYAMDEFWGNPSSLHKLGVKMQRKIEELQESIAKKINASKEEIIFTSGGSESNNMIIKGVVGENNHIITTTFEHSSVLNTYRELEKQGVSVTYLKVNNKGFIDLKELEEAINKNTVLVSIMQVNNEVGSVQKIKEIGRLIKEKSKRAKFHVDGVQGFGKFEIDVKACNIDFYSVSAHKFHGPKGVGFMYMRKGLNLKSLITGGEQQRGLRAGTENTPSYMGMVKAMDIAYDSLEDSYNHVKNLKEYFIEKLSKIENVVINSPSSEEYSPYILNVSFLGIRSEVLLHILEEDNIFVSTGSACSSKASISKGSYVLNAMGLEPKCIQGAIRFSFSRYNNLEEVDYTIASLEKALKFLRRIKI

SEQ ID NO: 4909 - protein, 285 aa, Clostridium perfringens ATCC 13124
MLMNRNVSTFIGCEAEYDESSIVVFGAPFDSTTSFRPGTRFASQVMRGESWGLESYSPYQDLDLYDFNIFDGGEIELPFGNSEGALALIEDFSTKVVEDGKIPAMIGGEHLVTLGAFKGVFKKYPDVHVIHFDAHADLREDYLGQKLSHATVIHRVWDLVGDNKIFQFGIRSGEKEEFLWAKDHVYTNKFNCDTLDYALEMVKDKPVYVTIDLDVLDPSVFPGTGTPEPGGIQFNELLNSILKLRGLNIVGFDINELSPQYDQTGASTAVACKVLREMLLVANNK

SEQ ID NO: 4910 - protein, 380 aa, Clostridium perfringens ATCC 13124
MNKNVIGVEISGIRKFYNEVVKFPEAISLTLGQPDFPVPEKVKEAMIRAIEEGKTTYTANAGIVELREEISSLLKNNFDIDFSKDEIIITVGGSEGLYAAMTALLNSGEKVLVPSIAYPAYESISKIIGCEVINYDLNEDFSVNIESLKEGIKQGGKLLVLSYPCNPTGALLSKKSRDELIEIIKENDILVLTDEIYSSLCFEEEYYSVAQCKDIKEKIIYVSGFSKMFSMTGLRIGYVACSKEIYDQIIKVHQYNSSCATSISQWGALEGLKSCMNDVENMKESFKERMNFTYKRLKSMGLEVEKPKGAFYIYPNISKFGLTSEEFCHRLLEEGKVACVPGDAFGKGGEGYIRISYCYSKDELERALDKLEAFVKTLKK

SEQ ID NO: 4911 - protein, 236 aa, Clostridium perfringens ATCC 13124
MIRLCNCASDKGPCARNIAIFSSLSDEELFKIVHMTEHKEFDENDTLCREGEISDKLFLIREGEVKICKITKEGKEQIVYILSKGDFFGENNLFVNSNISNFSAYAITSGKMCVLNKKSLDKILLENPEISIKIIEEMANRINLAENLAQNLATKDVEVRIASVLVEFMNRYGIEKEEGIYVKLPLNREQMANYCGVTRETVSRKLSKFDKTGIINLHGNKAIIIKDIEALLDLAE

SEQ ID NO: 4912 - protein, 376 aa, Clostridium perfringens ATCC 13124
MRKAFICPTKYVQGENELLNLGYFVETYGKSALLIAHPEDIKRVKDKLDATAKKFNIEFVEGGFKGECSRQEVKRLQDLAKEMKCDCTVGLGGGKALDTAKCVAEGEKLIVVPTIAATDAPTSHSAVLYTEDGSFDDYAYFKASPSVVLVDTEVIAKAPTRFLVAGMGDALSTYFEARATSSSFTKVNAGLPCGVREEKCRPAIGTNASLALAKLCYETLLEDGKKAKDACDCNCVTKSLENIVETNILLSGLGFESGGLAAAHAIHDGLTILEGTHGYFHGEKVAFGTIAQLVLENAPKEELYEVLDFCLEIGLPVCLEDIGVTEVSDEELFEVAEKACIPEESIYSMPFGIEVSEVVSAIKLADKIGKDYKNRK

SEQ ID NO: 4913 - protein, 403 aa, Clostridium perfringens ATCC 13124
MKKFNKVILAYSGGLDTSIIIPWLKENYGCEVIAVVGNVGQSDELVGLKEKAIKTGASKIYIEDLTKEFVEDYIFPTIQAGAKYEGKYLLGTSFARPIIAKRLVEIAKLEGADAICHGCTGKGNDQVRFELAIKTFNPEMQIIAPWRTWEIKSREEEIQYAIDNEVPINITYETNYSKDKNLWHLSHEGLDLEFPENEPKYDKILELCNTLEKAPNEAEYITLGFEKGIATSLNGEKLDGVTLLQELNKIGGKHGIGVIDMVENRLVGMKSRGVYETPGGSILYKAHKDLEELCLDKETSHYKEIVSLKFADLVYNGQWFTPLREALSAFISKTQETVTGEIKLKLYKGNIINAGMTSPYSLYSEEYATFGEDGIYDQKDAEGFINLFSLPSIVQAKMAQKLN

SEQ ID NO: 4914 - protein, 333 aa, Clostridium perfringens ATCC 13124
MELMKQIWESAKNNRKKIVLPEGDEERTLVASQRIKEEGLADVYLVGSEQVIREKAEALGVNLEGVNIVDPETSDKLDTYINEFYELRKAKGMTVEKAGKIVRDPLYFGTMMVKMGDADGMVSGAVHTTGDLLRPGLQIIKTAPGVSVVSSFFIMMVPGSQYGEGGMLLFSDCAVNPNPNADQLAAIAIATADTAKNLCKMDPKVAMLSFSTMGSADHDLVTKVRVATEKAKELRPDLDIDGELQLDAAIVGKVASQKAPNSKVAGNANVLVFPDLQAGNIGYKLVQRFANAEAIGPVCQGFAKPINDLSRGCSSEDIVNVVAITAVQAQATK

SEQ ID NO: 4915 - protein, 336 aa, Clostridium perfringens ATCC 13124
MEKLFIPKGYKPLLSLRETEVAIKELKDFFEDSLAKNLNLTRVSAPLFVNKGSGLNDDLNGIERPVSFDMKAMPEFNIQIVHSLAKWKRLALHRYEFEHGEGLYTDMNAIRRDEDLDNIHSIYVDQWDWEKIIDKEERNLETLKETVRSIYGTFKATEDFIVAKYPHIEKILPEDITFITSQELEDRYPDLTSKERETAICKEFGAVFIIGIGGKLASGEKHDDRSPDYDDWTLNGDLLFYYPLFDEAVELSSMGIRVDEESLLKQLKIAECEERKELPFHQMLLEGKLPYTIGGGIGQSRICMFFLRKAHIGEVQASMWDEDMIRTCEENNIHLL

SEQ ID NO: 4916 - protein, 392 aa, Clostridium perfringens ATCC 13124
MILENMILDNVKNMPPSGIRKYFDLINEMEDVISLGVGEPDFVTPWNVREAGIYSLEQGHTHYSSNAGFIELREEISKYLNRRFSLRYNPKDEILVTVGGSEGIDLALRALVGPGDEVIIPEPSFVAYKGCTAFTGATAKTIDLRACDDFKLTPELLEEAITEKTKVVIIPFPNNPTGAIMNREELQKIVDVLKDRDVIIISDEIYAELSYDEDHVSIASFPEVKEKTIVINGFSKAYAMTGWRLGYVCAHKVLIDAMKKIHQYAIMCSPTTAQYAAIEALKNGDESVFEMAREYNRRRRVLVDGFRSMGLDCFEPLGALYVFPCIKSTGMSSDEFCEKLLLEEKVLAVPGNAFGECGEGFIRACYAASMEDIMEAIKRIRRFVERNNMQGK

SEQ ID NO: 4917 - protein, 236 aa, Clostridium perfringens ATCC 13124
MEKTCTCGSCKEPCAKNISIFSTLSTEELLKIVNMTEHKSFEENDVLCREGEKSDKLFLIREGRVKICKITKEGKEQIVYVLSKGDFFGENNLFTSNNISNFSAYAITDAKLCILKKENLEKILIKNPEISLKIIQEMADRINSAENLAQTLATRDVEARLATVLIEFMDKYGEKNKEGIYISLPLNREQIANYCGITRETVSRRLSKFDKLGIIKLQGNKGLIVKDKEALFSLAE

SEQ ID NO: 4918 - protein, 144 aa, Clostridium perfringens ATCC 13124
MLDQKTIDIIKSTVPVLKSNGLEITKTFYKNMFEQNPEVKPLFNMNKQESEEQPKALSMAILAVAQNIDNLEAIKPVVNRIGVIHCNAKVQPEHYPIVGKHLLGAIKEVLGDGATEDIINAWAKTYGVIAEVFINNEKEMYASR

SEQ ID NO: 4919 - protein, 252 aa, Clostridium perfringens ATCC 13124
MSENKFMKKYDVLYYDSDVNKNIRMVPLMKIFGDVSAIHEEELAYEGIKYLKDHELSWIIYSYSIDIKKPIPYKSSINVETYLEGIKKFYACRVYKVYNEKNELVAEGKIIFLLIDLEKRRAVRIPKEYCELINMSDTGEVELKSTKVEKLIREDLESNISVRRSDIDFNKHVNNTKYLEWTMEATPECILDEYSLISAKIKYEKEVRLGDDVNIVCQWDEIEEGYKCLYKIVNNRLGEVSASIETIWKKEF

SEQ ID NO: 4920 - protein, 301 aa, Clostridium perfringens ATCC 13124
MLRILLNDGLDKKAISNLELLGFDVDTNHYDIEDLKEKIKEVDCIVIRSATKITRELIDEAIKGGKLKLIIRGGVGLDNIDVQYAEQNGIKVRNTPNASSSSVAEIILAHMFSLARFLNQSNITMKDGLWKKKDYVGVELEGKTLGIIGMGRIGSELAKKCTALGMKIIYFDLIDIKNIDNNYRKVEFDELLRKSDFISINISGTKSIIGSEELKKVKKGVFIINTSRGKALDEDAIITSLNDGTLGGVGLDVFLEEPSKNLELINHPKVSLTPHIGASTKEAQMKIGEEVINIIKEEIYK

SEQ ID NO: 4921 - protein, 465 aa, Clostridium perfringens ATCC 13124
MYLREEIVPFSMPGHKNGRGFKGFEEILLQGDLTEVEGLDNLQHPEGIIKEAEDKLSKLYKSKKSYFLVNGSTCGNLIMIFSLFKEGDKVLVERNCHKSIMNGIIMRKLKPVFINNIFHSKLKAPVGIDLNHLKEQISLNKDLKGIILTYPNYYGVGVNIDETIKIAREANLKVGIDSAHGAHFGFNNLLPESVQELKADIVVMSAHKTLPSLTQTAWMHVNNEDFIEEIEFYKNIFMSTSPSYMFMMSLDYSRNFLEEHGEEAYNNLFKIIEDFKNDIKDLSYFKILDKEFLINELEKNIKINDIKIDNSRIVLNLRENLNGNKLLDYLRSKNIQCEMSDNKNVVLIPSPFNTEEDFKILKYALKSCDINCLKDEEIDFYLTDLPEKKLEPFEVLDLEYERININDAVGKIVAESIVPYPPGVPMIIMGEVIEERHIKLLNEYMKSKVDLIGIKDKKVKVIKNK

SEQ ID NO: 4922 - protein, 516 aa, Clostridium perfringens ATCC 13124
MNTLNDILSKEIEEFREKGHKFLNKEMTVGEFKKASGGMGVYAHRGGKEFMVRLRVPSGVAGLSLLEEAYNWAKKYNLEKIHLTTREAIQLHGISIDAVCDIMQEGLTKGIYTRGGGGNFPRNVALNPLSGVQIGETFDVTPYALASNAHYMSKIYTYNLPRKIKTAFSNTEEDSAHCTVTDLGFLAVDNNGKRAFKLYIGGGLGRNPRTSVEFDELIDEKDVLYCLEAMTNLFVAEGDYKNHGKARIRYIVERMGEEEFKNCFRKHLEEVKAKGGLDLKVEDIKYSKKGEKTNIKHERLIPQKQEGLYTVLFHPVGGQLSLDVLKELIEKIEKIEEVEVRLGMDENLYVRNLNGKEAEAILDFTQGKGGETLAERSVSCIGTPICQMGVLESQKTLREFVELLKENSIKEGTLPRVRFSGCPNSCGMHEIGDIGFAGKKKKVCDALSNVFELHFGGKLGIGETRLGDYYGDILQDKVPEFLIKVAKAVEAKNSTFEEWIKDNSEEFKAIVEEYNV

SEQ ID NO: 4923 - protein, 529 aa, Clostridium perfringens ATCC 13124
MFIFLSFAIFLVAVFAIAWYKAKGTDNTETATGYFLAGRGLSGPVIAATMILTNLSTEQIIGLNGQSYATNMGPMAWEVTSCVALITLALIFLPRYLKGGITTIPDYLEERFDSTTKRIVSILFLVSYVVTYIPTVLYSGGLVLNQIFGISDLLGISTFQAVALTGFLLGVVGAIYTVLGGMKLAAFSDTVNGIGLLIGGLLVPILGILLLGNGDFVGGFEIIIATPEKLNAINPANAQSPLIPWPVLFTGLLFNNLFYWCTNQSIVQKALGASSLKEAQKGAILAGLIKVLTPAILVFPGIIAFAKYGDALPNADMAYPTLLLDVLPKPLLGIFAAILFGAAMSSLNGAMNSSSTLFTLDLYKPIINPEASDKQLVKVGQKFIIVVSVISVIVAPFILYAPSGLYNFLQECNGYFNVPILACVIVGFFTKRVPSLAAKAVFVVHIVLYTLSKFFLSDIHFLYVLGVLLPIGVIVMLIIGKIKPRETDFVQADKALIDMTPWKYAKPASLAVVLVMAFIYLLFSPIGLA

SEQ ID NO: 4924 - protein, 589 aa, Clostridium perfringens ATCC 13124
MEEINEKKTHKWKTIKRLLKYVAPYKWKTIGIILMLLLIMSCNTLNPYLMKVSIDKFVSAKDVNGLLGIGAVLLLLNIIAMILSKIRMLSMSKITNQILVNIRHELYTHIQTLSFSFFDSRPVGKILSRVVGDVNALNNLLNHSIVNLIPNLFTILLVIFMMFLMDPSLTLVCLTVLPFLFAGMFFIEIKSNKRWRVFRENRSALLGYTHEAFSGMKVVQGFNREEYSREKFENHLEGHAGGFLHAVRLQDYFWPTVDICRGFGIAIVLFAGYKLTRGGNLSLGTLMAFIMYIEMLWRPIMNLSAFYNAFVTNLSAAERIFDIMDTKNHMVNNKAEEKLPKIKGEIHFEDVTFSYDNDGNHALKDVTFTLNPGEKIALVGETGAGKTTITNLISRFYEPTKGKIFIDGIDISTVDVESLRSQMGIMLQDSFLFASSIKENIRYGKLDATDEEIIQAAKAVNAHNFIEKLEEGYNTNVNERGSRLSLGQRQLIAFARALISDPRILILDEATANIDTETERLVQEGIKKLMEGRTSIVIAHRLSTIRDCDKIFVLSHGKIVEDGTHEELLNRKGYYYNLYCAQYSFLKEE

SEQ ID NO: 4925 - protein, 593 aa, Clostridium perfringens ATCC 13124
MNKFKSVVKKISPFVGKYKWAFLGAILFIISAAVFTAIAPRTEGLIITQLTKDFEGIIRGVSGASVNFNYIFKVLILLFLVYAGGTGSTLIASFLLTNAIQNTMKNIRNEVEKKINRLPIRYFDGNSYGDVLSRITNDVDTISNALQQSFVQVINAFLSVGLALIMMYSINIKLALIATLIIPLSILITKIIVSKSQKLFNSQQKALGNLNGKVQEMYTGFNELKLYGKEDDALNEFVKVNEELRETGFKAQFISGIMSPLISLVTYLGIAVVGVVGSIIAIGGGITVGNLQAFIRYIWQINQPLSQVTQLSSAIQSAVAAANRVFEFLEEEEEVKDPNNAIKIEKPKGDVTFDHVKFGYKEDKPLIKDLSVDVKSGHMVAIVGKTGAGKTTLINLLMRFYDVQGGSIKIDGVDIRDMKREDLRSMFGMVLQDTWLFNGTIYDNIRYGRFDATKEEIIEAAKVANVHHFIKTLPGGYNMLLNEEASNVSQGEKQLLTIARAILKDPAILILDEATSSVDTRLELLLQKAMRNIMKDRTSFVIAHRLSTIRSADLILVMNDGNIIEQGTHEELMKQGGYYESLYNSQFASKEVN

SEQ ID NO: 4926 - protein, 356 aa, Clostridium perfringens ATCC 13124
MAYKLLIINPGSTSTKIGVYEGEKEILEETLRHSAEEILKYDTIFDQLDFRKEVILKVLKEKGIDINELDAVVGRGGMLKPIEGGTYEVNEAMVEDLKIGVQGPHASNLGGILSNEIAKEIGKRAFIVDPVVVDEMEDVARLSGVPELPRKSKFHALNQKAVAKRYAKEHNTSYEDVNLIVVHMGGGVSVGAHRKGRVIDVNNALDGDGPFSPERAGGVPSGELLEMCFSGKYSKEEVYKKLVGKGGFVAYANTNDARDLIKLSQEGDEKGSLIFNAFIYQIAKEIGSMAVVLDGEVDAIVLTGGIAYSDYVTNAINKKVKWIAPMVVYGGEDELLALAQGAIRVLDGVEEAKIYK

SEQ ID NO: 4927 - protein, 618 aa, Clostridium perfringens ATCC 13124
MSKERKGGMGGQMGRMGGGPRAVEKAKDFKGTMKKLGVYLKPYSLSIAIVILFAIGSAAFSIVGPKILGKATTKIFEGLVQKITGVPNASIDFGYIGNIAMILVALYLVSSLFGIIQSFIMSGVAQKVSYNLRKQISEKMDTLPLNYFDTRTNGEVLSRITNDVDTVNQTLNQSLSQIITSVVTLIGVLIMMFSISWIMTLATFIILPVSMVLISLVVKKSQKYFKSQQEYLGHLNGQVEEVYGGHNIMKAFNREEASTKDFDELNNTLYKSAWKSQFLSGMMMPIMSFVGNLGYVLVSILGGWLTIKSVITVGDIQAFIQYVRSFNQPISQMAQVANIMQSTAAAAERVFEFLDEEDEVKDPVNSVDPSEIRGEVEFEDVHFGYNEDKIIINDFSVDVKPGQKVAIVGPTGAGKTTIVKLLMRFYDINSGSIKIDGHDIRDFKRADLRNLFGMVLQDTWLFNGTIMENLRYGRLDATDAEVKEAAKAAHVDHFVKTLPDGYNMVLNEEASNISQGQKQLLTIARAFLKDPKLLILDEATSSVDTRTELLIQKAMEKLMEGRTSFIIAHRLSTIRDADLILVMKDGDIVEQGNHEELLEKGGFYSSLYNSQFEQSSAS

SEQ ID NO: 4928 - protein, 386 aa, Clostridium perfringens ATCC 13124
MNKIYFDNAATTFPKPDSVIKAMFDYMSFEGGSANRGSSSTALQSSRAVYECRYEIAKFFNFPKSENVIFTNNITTSLNMLLLGIIKSDWHIITTSMEHNSVLRPLVKISEELPNVELDIVQCNNEGLVSVEKIKEKIKNNTKLIILSHASNLVGTIQPIKEIGKLCKENDIFFILDSAQTAGVIPIDMTELNLNALAFTGHKSLLGPQGIGGFIIDDKLNSICKNIFSGGTGSNSSLIEHPQELPDKFEYGTLNTPGIIGLLEGIKFIEKEGIENIKAKEEVLCQKAMDLLCEIPEVKIYGSMDAKKKTSTISFNIEGIDPEFAGFLLDSEFNITCRTGIHCTPLAHKTVGSYPAGSIRISLGYFNTIEEVYRFVEVIKELISRR

SEQ ID NO: 4929 - protein, 265 aa, Clostridium perfringens ATCC 13124
MFREEFSNVISAGRGKIDLLNNSKGRYLVYAMLAGLYVSFGIMLAFTIGGILDSANSPSTKIIMGASFGVALSLVVFAGSELFTGNNFVMTIGMLNKEVTFKECGKVWGLAYAGNFLGSIIAALGFIGAGLTTGSVSDFMIKTAEIKISLPPEQLFIRGIFCNILVCLAVWCTFRLKTETSKLIMIFWCLFAFVTSGFEHSIANMSLLVIGVILTKGATITVAGSLYNLFFVTLGNILGGVLLGVTYHYIANKKVENKKLVHIQK

SEQ ID NO: 4930 - protein, 398 aa, Clostridium perfringens ATCC 13124
MNNRVVYMDYSATTYVKPEVLEEMLPYFTNKFGNPSAFYGVSRESRMAVDTARERVAKVLNADTNEIYFTGGGSEADNWAIKGIAFAHKNKGNHIITTKIEHHAVLHTCQWLEKQGFEVTYLDVNEEGFVDLEELKNAITDKTILVSVMFANNEIGTIEPVKEIGKICRERKVIFHTDAVQAVGNVKIDVKDMNIDLLSLAGHKVYGPKGIGALYIRKGIRIDNLIHGGGQERARRAGTENIPAIVGLGKAMEIAGENLDEHIAKISKLRDKLIKGLLEVPFTRLNGPKDGSKRLPGNVNVCFEFIEGEGILLSLDFEGICGSSGSACTSGSLDPSHVLLAIGLPHEIAHGSLRLSLGEGTTEEDVDYVLEKVPPIIARLRSMSPLWKNHLREVEGEN

SEQ ID NO: 4931 - protein, 287 aa, Clostridium perfringens ATCC 13124
MKKIGFIGVGIMGKSMVRNLMKNYFEVSIFARNKEKVLDVISEGANFYPTIKECVSGCDAVITIVGFPKDVEEVYFEENGILENVKEGTYVIDMTTSSPKLAVEIFEKAKEKGLKALDAPVTGGDIGAKNGTLTILVGGEEEDYKACLPIFQAMGTNIHYEGKAGFGQHTKLANQIMIAGAISGVCEAMAYAKDKGLDVKKMLDSVSTGAAGSKQLELVSPKILEEDFAPGFFIKHFIKDMKLAKEEALADNVNLDILSKVLENYEDLEREGFGDLGTQALIKHYNK

SEQ ID NO: 4932 - protein, 573 aa, Clostridium perfringens ATCC 13124
MGIFKDYISKRMVFLIVPIVAMIIVLGIDSFFPYLQKIFVDDILLGSDKSKLGLFFGVFLGLSLLRGILGYIKEFLFDKFSLNVSKEIRMDLFKKIQSFEFSFFDSTNTGELMSRIGEDVDIVWETISYGLRLLIEGIILFIISVTIMMSMSPSLTIICLVILLPVGVLAILVNKKFHRNYSKISDKVADINLMAQQDIAGIRLVKAFAREKYETEKFLKVNKDYYDLNITQAKILSNFLPVIDLLTNLTPVAMIIYGGYLVIKGNITMGTLLAFSSYILNLSFCVKNIGGLVNMMSQNRASMDKIFNILKRKPQITSMENSYNPDKVKGEIEFKNVSFRYNEEEVLKKINLKIPAGSTVAIMGETGCGKSSILSLIGRHYDVSSGELLIDGVNVKKWNLDSLRENMAVVFQDTFLFSDSIKDNIDFGGNKSEDEIIEAAKDSCAYDFIKEMPEGFETEVGERGLGLSGGQKQRLAIARALVRKTPILILDDATSALDMETEFNVLKNLSKKQDKATTFIIAHRISGVKDADIILFMKDGEIVEMGDHESLLKKKGYYYSVYCHQFQDLEFIQ

SEQ ID NO: 4933 - protein, 601 aa, Clostridium perfringens ATCC 13124
MKKLQSMITYIAIFAVVLMFAFAFYRNGTQGKVISYTEFKEAYVENKIETMTIKEDKMSVDGVFKDGKRFTSYVSNKMLDNLLQETQGVETVIKYTPPNNVGIWISFLPTILIIGVIFFGLFMFTQQAQNSGGNRGVMNFGKSKAKMANLDGKKVTFKDVAGADEEKGELEEIVDFLKQPKRYIEMGARIPKGVLLVGPPGTGKTLLAKAIAGEAGVPFFSISGSDFVEMFVGVGASRVRDLFEQAKKNAPCIIFIDEIDAVGRQRGAGLGGGHDEREQTLNQLLVEMDGFGVNEGIIMIAATNRPDILDPALLRPGRFDRRILVGAPDVKGREEVLKVHTRNKHLSEDVDLKVLAKMTPGFSGADLENLTNEAALLAVRGGKSSIDMADIEEAITRVIAGPEKKSRVVSEYDRRITAVHESGHAVVSNVLEYADPVHEISIIQRGMAAGYTMNLPEEDRTHTSKKQLKDKMVELLGGRVAEKLVIGDISAGAKNDIDRASHIARSMVMEYGMSDVIGPISFGNSDGGEVFLGRDIGKSSNISEETSAKIDEEIKKLIDEAYNRAESILRENISKLNAVTDVLLQKEKIDGDEFREIFKNS

SEQ ID NO: 4934 - protein, 238 aa, Clostridium perfringens ATCC 13124
MQSILKPITNLFTMIFQAIHGFVASLDIFGVGAGYVITIFLLTLLVRLILLPLNIKQTRSQQKMQEIQPEIAKLQKKYKNNPEKAQQEMMKLYKENNVNPMSGCLPLLIQMPILFALYYVFTGLTELQGVSFLWLGDLWAPDRTFILPILSAATTYLSSLLMTKFTQSQAGGAPGGMNMNTMNIVMAGMMGVMSIQFPSMLVLYWVIGNLIQMVQTYFIVVLPSRKRAKEKEQYKDIK

SEQ ID NO: 4935 - protein, 552 aa, Clostridium perfringens ATCC 13124
MSNAEHSSNFIRNIIIDDLDSKKHDTIITRFPPEPNGYLHIGHAKSIVLNFELGKEFNGRTNLRFDDTNPTKEDTEYVESIKEDVHWLGYNWSELHFASNYFDEMYKRALLLIKKGKAYVCDLTPEEIKEYRGTLTEPGKESPYRNRSVEENLDLFERMRKGEFEDGSKVLRAKIDMSSPNINFRDPIIYRIAHASHHNTGDKWCIYPMYDFAHPLEDAIEGITHSICTLEFADHRPLYDWFVKECEMESVPRQIEFARLNITNTVMSKRKLKQLVDEGIVDGWDDPRMPTVAGLRRRGYTPKSIRNFCKAIGVAKADSTVDSQMLEHFIREDLQETAPRAMAVINPLKLVITNYPEGESEILEIENNPKDESAGKRAVTFSREVYIEREDFMENPPKKYFRLFPGNEVRLKGAYFVKCNEVIKDENGEVTEIHCTYDPETKSGTGFTGRKVKGTIHWVDANNCIPAEFRLYEPLILDDCEENEGKHFLEQINPNSLTICKGFIEPSAKDAKPQDKYQLFRHGYFNVDPNFTSDDNLVFNRIVSLKSSFKLK

SEQ ID NO: 4936 - protein, 252 aa, Clostridium perfringens ATCC 13124
MQKKDINLISDMAVNKFKFADRAPIKYFFRAIVAGFFLVVAIILSYTTGAVLNNSYPEIARIMVAATFSLALGLIAFIGGELFTGNNLVMSIGIYNNECTLTMALKVWFMSYLGNFIGSILLGFLFVKSGASMDLIKDYAKGIVDIKLNLPALELFLRGMLCNFMVCIAFLSTIKMKSETGKLIIMFWCIFAFVIAGFEHSIANMGIFSITYFASGDVSLPLVFRNLFWVTLGNMVGGGVLLALPLKFMSME

SEQ ID NO: 4937 - protein, 460 aa, Clostridium perfringens ATCC 13124
MEIFKKQSLKRILSEANENKERTLSALDLTLMSVGSVIGTGVMVLTGIVAAKQSGPATSIAFIGGGIAAAIIVLCYAEFSSSIPSAGGSYSFTYVSLGEIIAYISGLCIVIGYTLSTATVASGWGSYLLSLLDILGIKLPKTFTAIPSEGGIVNLPAMISILFIVFVISLGTKESKKVNDIMVFIKIAVIALFIGVGVFHVNTSNWHPFAPFGVKGIVTGTASLFFAYCGFDATASAAEEVKNPQKSLPLGLISSLVICTIIYIAVSLVLTGVTSYTNLNVGDALSYALKLVGQRGVAFVVSLGTVIGILAVIFAGNFTTSHILLAMSRDGLLPKFFSKVDKKDVPYTALWTVGIIGALLAGFFNLGQLANFANIAFLLTYTLVCISLIAFRKKYPHVKRGFKTPLVPFIPLLGAFSCLFLMSNLSEEIWKIFIVVLVLLIISYLVYGRKHSLINKNNDN

SEQ ID NO: 4938 - protein, 238 aa, Clostridium perfringens ATCC 13124
MEKLTVEEKQILKAKGILNQKQEEFYAIRFLSKVGYFKAEEMIALSEIAKEYGNGELSLTSRLTVEIPYIKEENIDKVVEISRKKGLRIGGAGKTVRAIVTCKGTVCKHGLIDTRKIGELFEEKFLGRKVPSKFKIGVFGCINSYGKAQSNDFGIVPIVNSESKEVEFLVFIGGRAGRKARKAEPMKRRFKEEELLKLLECTIDYYNELADEKERLAEIIEKIGEEEFEKNIIKRFNA

SEQ ID NO: 4939 - protein, 236 aa, Clostridium perfringens ATCC 13124
MKKCDCKGYKSCLCNKELTIFKDLTEEEFNKLATGMTCFHFNKGEYICYEGEKLSKLFIISKGSVKTSKLTKGGKEQIMHIFSIGDYFGETSLFNNEGGILFNAIALNDVIVCAVDKDKVDSVLEENPRIAIVVLKSLTNRLKDTEEFAHKLVTNDVRVRIAYMLKEFKRKYGKIENGEIFIDLPINREDMANYCGITRETMSRKLSIFEHEGLIEIRGNKSLIIKDIERLNKIIS

SEQ ID NO: 4940 - protein, 248 aa, Clostridium perfringens ATCC 13124
MENVWNGFRQLEIFKIEEEAKDIKSFYLRATDGKPLKEYKCGQFLPLKIETDDEVIKKEMRRYSLSGDPKKDYYRLTIKRVPNGKVSGYFHESINVGDTILAMPPFGKFTLTEDSNKPLVLLSGGIGITPILSMLYGAKEQSRDVYFVEAVLNSDNLALNSDVQGIKKVKNFKEIKIFSEPLESDIKGKDFDEEGFITKEWIKNNLPLNGEFFFCGPTLFMKSIRNSLKDLGVKEDNINFEFFGKEEF

SEQ ID NO: 4941 - protein, 246 aa, Clostridium perfringens SM101
MGKAYEKVYEVTYGETDGRKDCRITSMMNFFSDCCLSQEEKNSMNYADNSSETTWVFFDYEIIVNRYPRYREKVKVKTYVESIRKFYSNRVFEAYDMDGALVARADVLAFLINKKTRRPARISDEEYEIHGLSKESSKLLRKKLKFEKFDKEDLEMKFHIRYLDIDLNMHVSNIKYVEWILETVPVDIVLNYKMKKIKIKFEKEITYGHNVIIKSKIIKGEDEVKVLHKVENEEGESITLAETYWY

SEQ ID NO: 4942 - protein, 397 aa, Clostridium perfringens SM101
MILSRKAQNIGASLTLALTAKAGELKKEGIDVVSFGVGEPDFNTPKNIIEAATRAMEEGKTKYTATSGIVELKEAIARKLHDDNGLNYGTKNIIISTGAKQSLANVFMAILNPGDEVIIPVPYWVSYPELVKLSDGVPVFIETKKENDFKVTYDELKSVLSENTKAIVINSPNNPTGTVYSKKDLEVIAKFAKENDLIIISDEIYEKLIYGKEEHISIASSSEDAFKRTVVINGFSKAYTMTGWRIGYAACYNEELIKVMNNVQSHMTSNTNSIAQFAALEALNGDQETIKNMVKEFSLRRELMIELISEIEDLTFIEPKGAFYVMIDVSKVLKKANIKGSMEFANLLLKEENVVVIPGIAFGEDNFIRLSYATSKEEIIKGLKRIKEFVNKLMNRD

SEQ ID NO: 4943 - protein, 265 aa, Clostridium perfringens SM101
MFKEEFNNVIGAGRRKIDLLNNSKGRYLVYAMLAGLYVSFGIMLAFTIGGILDSANSPNTKIMMGASFGVALSLVVFAGSELFTGNNFVMTIGMLNKKITFKECWKIWGLAYIGNFLGSIIAALGFIVAGLTKGSVSDFMIKTAEIKISLPPEQLFIRGIFCNILVCLAVWCTFRLKTETSKLIMIFWCLFAFVTSGFEHSIANMSLLVIGSILTKGATITVAGSLYNLFFVTLGNILGGVILGLAYYYVSNKKVENKKIVYIEK

SEQ ID NO: 4944 - protein, 478 aa, Clostridium perfringens SM101
MAEQHNESKKLGFAQLAALIVGSMIGGGAFNLPSDMARGAGTGAVIIGWIITGIGMIALAFVYQSLANRKPELTGGVYSYAKAGFGEYIGFNSAWGYWLSAWIGNVSYSVLLFGAVGYFLPMFGAGNNVASIIGASVLLWAFTLLILNGVSGAALINLITTIAKLVPIFLFIVISLFMFNFDKFTFQFWGTSDLGGIVTQVKSTMLVTLWCFIGIEGAVVVSGRAKKQSDVGKATVLGLIGTLIIYMLITLMALGVMDRVKLSGLENPSMAYVLEFAVGKWGAVLINLGLIISLFGSLLGWALLAAEIPYVAAKDGVLPKVFAKLNKKGTPSGSLIITNLLVQAFLILTLVASSTYQALYSVASTAILVPYLLSAMYGFKLALTGETYDKDPTGRTRDKIFGGIATVYAIWLCYAAGLKYLLLCFILYAVGIIFFYIGKKQNNKDSVVFVGKEKILAIIVLVIAIIAIVMLFNGAITI

SEQ ID NO: 4945 - protein, 238 aa, Clostridium perfringens SM101
MQSILKPITNLFTMIFQAIHGFVASLDIFGVGAGYVITIFLLTLLVRLILLPLNIKQTRSQQKMQEIQPEIAKLQKKYKNNPEKAQQEMMKLYKENNVNPMSGCLPLLIQMPILFALYYVFYGLGELKGVSFLWLGDLWAPDRTFILPILSAATTYLSSLLMTKFTQSQTGGAPGGMNMNTMNIVMAGMMGVMSIQFPSMLVLYWVIGNLIQMVQTYFIVVLPSKKRAKEREQYKDIK

SEQ ID NO: 4946 - protein, 465 aa, Clostridium perfringens SM101
MYLREEIVPFSMPGHKNGRGFKGFEEILLQGDLTEVEGLDNLQHPEGIIKEAEDKLSKLYKSKKSYFLVNGSTCGNLIMIFSLFKEGDKVLVERNFHKSIMNGIIMRKLKPVFINNIFHSKLKAPVGIDLNHLKEQISLNKDLKGIILTYPNYYGVGVNIDETIKIAREANLKVGIDSAHGAHFGFNKLLPESVQELKTDIVVMSAHKTLPSLTQTAWMHVNNEDFIEEIEFYKNIFMSTSPSYMFMMSLDYSRNFLEEHGEEAYNNLFKIIEDFKNHIKDLSYFKILDKEFLINGLEKNIKINDIKIDNSRIVLNLRENLNGNKLLDYLRSKNIQCEMSDNKNIVLIPSPFNTEEDFKILKDALKYCDINCLKDEEIDFYLTDLPEKKLEPFEVLELEYERININDAVGKIVAESIVPYPPGVPMLIMGEIIEERHIKLLNEYMKSKVDLIGIKDKKVKVIKNK

SEQ ID NO: 4947 - protein, 296 aa, Clostridium perfringens SM101
MFKSGFITIVGRPNVGKSTLTNLLMGEKLSIVSNKPQTTRNNIQTILTGDDYQMIFVDTPGIHKPKHKLGEYMVNSATDSIKDVDLVLFLSNPCEEVGRGDKFIIEQLKNQKAPVIFVLNKVDESSPEKVAKTLELFSKEYDFAEMIPISAMKAKNTDKLLELMVKYLPEGPKYYPDDMITDVQERFVVAEIVREKALKNLSQEVPHGIAVDVIQMKQDDNGKYNIEVDLICEKASHKGIIIGKNGQTLKKIGSTARYELERFLRAKVNIKIWVKVRKEWRDNTSLLKELGYKKLK

SEQ ID NO: 4948 - protein, 248 aa, Clostridium perfringens SM101
MENVWNGFRQLEIFKIEEEAKDIKSFYLRATDGKPLKEYKCGQFLPLKIETDDEVIKKEMRRYSLSGDPKKNYYRLTIKRVPNGKVSGYFHESINVGDTILAMPPFGNFTLTEDSNKPLVLLSGGIGITPILSMLYGAKEQSRDVYFVEAVLNSDNLALNSDVQGIKKVKNFKEIKIFSEPLESDIKGKDFDEEGFITKEWIKNNLPLNGEFFFCGPTLFMKSIRNSLKDLGVKEDNINFEFFGKEEF

SEQ ID NO: 4949 - protein, 398 aa, Clostridium perfringens SM101
MKILIINCGSSSLKYKLIDMANEKDIIEGIIERIGLDQSRLVQKNELREKYILEKEIKDHKEAIDIVLNTLVDSKVGVIESIDEITAVGHRVVHGGERYSSSIIINEEVIKYLEECSKLAPLHNPANIIGIRACQSLMPNKEMVAVFDTAFHGTLPEKAYIYAIDYALYKDHKIRKYGFHGTSHKYVSHKVAETMGKDIKDLKIITCHLGNGASISAIKGGECIDTTMGFTPLAGIPMGTRSGNIDPSIIPFLVQECGYTIEEVSESLNKKSGVLGISGVSSDFRDIEDAASNGDKRAQLALDIFHYRIRAEIGSFIVNMGGVDVIVFTAGVGENSPETREECLKDLEFLGLTLDKEKNKVRGKLAEISQADSKIKAYVVPTNEELMIAKETVELIGK

SEQ ID NO: 4950 - protein, 618 aa, Clostridium perfringens SM101
MSKERKGGMGGPMGRMGGGPRAVEKAKDFKGTMKKLGVYLKPYSLSIAIVILFAIGSAAFSIVGPKILGKATTKIFEGLVQKITGVPDASIDFGYIGNIAMILVALYLVSSLFGIIQSFIMSGVAQKVSYNLRKQISEKMDTLPLNYFDTRTNGEVLSRITNDVDTVNQTLNQSLSQIITSVVTLIGVLIMMFSISWIMTLATFIILPVSMVLISLVVKKSQKYFKSQQEYLGHLNGQIEEVYGGHNIMKAFNREEASTKDFDELNNTLYKSAWKSQFLSGMMMPIMSFVGNLGYVLVSILGGWLTIKSVITVGDIQAFIQYVRSFNQPISQMAQVANIMQSTAAAAERVFEFLDEEDEVKDPVNSVDPSEIRGEVEFEDVHFGYNEDKIIINDFSVDVKPGQKVAIVGPTGAGKTTIVKLLMRFYDINSGSIKIDGHDIRDFKRADLRNLFGMVLQDTWLFNGTIMENLRYGRLDATDAEVKEAAKAAHVDHFVKTLPDGYNMVLNEDASNISQGQKQLLTIARAFLKDPKLLILDEATSSVDTRTELLIQKAMEKLMEGRTSFIIAHRLSTIRDADLILVMKDGDIVEQGNHEELLEKGGFYSSLYNSQFEQNSAS

SEQ ID NO: 4951 - protein, 516 aa, Clostridium perfringens SM101
MNTLNDILSKEIEEFREKGHKFLNKEMTVGEFRKVSGGMGVYAHRGGKEFVVRLRIPSGVARLSSLEQVYNWAKKYNLEKIHLTTRESIQLHGISIDAVCDIMQDGLTKGIYTRGAGGNFPRNVALNPLSGVQIGETFDVTPYALAANAHYMSKIYTYNLPRKIKTAFSNTEEDSAHCTVTDLGFLAVENNGKRAFKLYIGGGLGRNPRKSVEFDELIDEKDVLYCLEAITNLFIAEGDYKNNSKARIRYIVERMGEEEFKNCFRKHLEEVKVKGGLDLKVEDIKYSKKGEKTNIKHERLIPQKQEGLYTVLFHPVGGQLSLDVLKELIEKIENIEDVEVRLGMDENLYIRNLNGKEAEAILDFTQGKGGDTLAERSVSCIGTPICQMGVLESQKTLREFVKLLKENSIEEGVLPRVRFSGCPNSCGIHEVGNIGFAGKKKKVGDVLSNVFELHFGGKLGIGETRLGDYYGDILQDKVPEFLIKVAKAVEAKNSTFEEWIKDNSEEFKAIVEEYNV

SEQ ID NO: 4952 - protein, 236 aa, Clostridium perfringens SM101
MKKCDCKGYKSCLCNKELTIFKDLTEEEFNKLATGMTCFHFNKGEYICYEGEKLSKLFLISKGSVKTSKLTKGGKEQIMHIFSVGDYFGETSLFNNEGGILFNAIALNDVIVCAVDKDKVDSVLEENPRIAIVVLKSLTNRLKDTEEFAHKLVTNDVRVRIAYMLKEFKRKYGKIENGEIFIDLPINREDMANYCGITRETMSRKLSIFEHEGLIEIRGNKSLIIKDIERLNKIIS

SEQ ID NO: 4953 - protein, 356 aa, Clostridium perfringens SM101
MAYKLLIINPGSTSTKIGVYEGEKEILEETLRHSAEEILKYDTIFDQLDFRKEVILKVLKEKGIDINELDAVVGRGGMLKPIEGGTYEVNEAMVEDLKIGVQGPHASNLGGILSNEIAKEIGKRAFIVDPVVVDEMEDVARLSGVPELPRKSKFHALNQKAVAKRYAKEHNTSYEDVNLIVVHMGGGVSVGAHRKGRVIDVNNALDGDGPFSPERAGGVPSGELLEMCFSGKYSKEEVYKKLVGKGGFVAYANTNDARDLIKLSQEGDEKGSLIFNAFIYQIAKEIGSMAVVLDGEVNAIVLTGGIAYSDYVTNAINKKVKWIAPMVVYGGEDELLALAQGAIRVLDGVEEAKIYK

SEQ ID NO: 4954 - protein, 619 aa, Clostridium perfringens SM101
MSKIIGIDLGTTNSCVAVMEGGEPVVITNSEGARTTPSVVSFQANGERLVGQVAKRQAITNPEKTIMSIKRHMGTDYKVNIDGKDYTPQEISAMILQKLKADAEAYLGEKVTEAVITVPAYFNDAERQATKDAGRIAGLDVKRIINEPTAASLAYGLDKMDSAHKILVYDLGGGTFDVSILDLGDGVFEVVSTNGDARLGGDDFDQRIIDYIAEDFKAQNGIDLRQDKMALQRLKEAAEKAKIELSSSTQTLINLPFITADATGPKHIDMTLTRAKFNELTHDLVERTIDIMKEALKSGNVSLNDIDKVILVGGSTRIPAVQEAVKNFTGKEPSKGVNPDECVAMGAAIQAGVLTGDVKDVLLLDVTPLTLGIETLGGVATPLIERNTTIPARKSQIFSTAADNQTSVEIHVVQGERQMAADNKTLGRFTLSGIAPAPRGIPQIEVAFDIDANGIVKVSATDKATGKEANITITASTNLSDAEIDKAVKEAEQFAEEDKKRKEAIEVKNNAEQIVYQTEKTLNELGDKVSAEEKSEIEAKIEEVKKVKDGDDIEAIKKAMEDLTQAFYKISEKLYQQNGGAQGEGFDPNNMGGANAGTGAANSNDDNVVDADFEVQDDK

SEQ ID NO: 4955 - protein, 392 aa, Clostridium perfringens SM101
MREVVIASAVRTALGSFGGSLKDVPAVDLGALVIKEALNKAGVKPECVDEVLMGNVIQAGLGQNPARQAAVKAGLPVEIPSMTINKVCGSGLRCVALAAQMIKAGDADVIVAGGMENMSQGPYVLKTARFGQRMGDGKMVDAMVNDALTDAFNGYHMGITAENIAEQWGLTREMQDEFAANSQIKAEAAIKNGKFKDEIVPVVIPKRKGDPIVFDTDEFPRFGTTAEKLAKLRPAFKKDGTVTAGNASGINDGAAALVVMSAEKAKELGVTPICKIVSYGSKGLDPSIMGYGPFYATKKALEGTGLTVADLDLIEANEAFAAQSLAVAKDLEFDMSKVNVNGGAIALGHPVGASGARILVTLIHEMMKRDAKRGLATLCIGGGMGTALIVER

SEQ ID NO: 4956 - protein, 333 aa, Clostridium perfringens SM101
MELMKQIWESAKNNRKKIVLPEGDEERTLVASQRIKEEGLADVYLVGSEQVIREKAEALGVNLEGVNIVDPETSDKLDTYINEFYELRKAKGMTVEKAGKIVRDPLYFGTMMVKMGDADGMVSGAVHTTGDLLRPGLQIIKTAPGVSVVSSFFIMMVPGSQYGEGGMLLFSDCAVNPNPNADQLAAIAIATADTAKNLCKMDPKVAMLSFSTMGSADHDLVTKVRVATEKAKELRPDLDIDGELQLDAAIVEKVASQKAPNSKVAGNANVLVFPDLQAGNIGYKLVQRFANAEAIGPVCQGFAKPINDLSRGCSSEDIVNVVAITAVQAQATK

SEQ ID NO: 4957 - protein, 551 aa, Clostridium perfringens SM101
MYKPKLISLLDDKESGFSKEQFLKDLIAGIIVAIIALPLSIALGISSGVSPEKGLITAIIAGFIISLLGGSRVQIGGPTGAFVVIVFGIIQNHGVDGLIIATFMAGIILVLFGLLRFGSLIKYIPYPITVGFTSGIAITLLSTQVKDFLGLSITKTPSEFIPKWEAYISHMNTTNLYTLAIGLLALIILIFWPKINKKIPGSLIALIVTTLVVFIFNLPVATIGSQFGKISSNIPIPHIPNLNLNTLKALIGPAFTIALLGGIESLLSAVVSDGMIGDKHNSNAELIAQGLANMGSSLFGGIPATGAIARTAANVKNGGRTPISGMVHSITLLLIMLVFMPLAKFIPLTTLSAILIIVSYNMSEWRTFKAILKAPKSDIAILLITFFLTVLFDLVIAIGIGMIVSMCLFIRRVATSIEVNELNESDCSYKSNIDTDMENLKVGENVLVYDIRGHLFFGAVDTFMNTMKEINDDAKVLVLRMRHTKTLDVTGYKQIKNIALSCKSRNMTLIISELQEQPKKVMRLMGFIDTLGEDHFATNFDEALEKANSLI

SEQ ID NO: 4958 - protein, 215 aa, Clostridium perfringens SM101
MKIFIDTANVEEIRKASKLGVLAGVTTNPSLIAKEGRDIKEVIEEICSIVDGPISAEVMALECDEMVREGIELAKIHKNIVIKIPMCEEGLKAVKVLASEGIRTNVTLIFSPLQALLAARAGASFVSPFLGRLDDIGNPGIEIVTQIAEMFALHGIDTEIISASVRNPMHVLDSAMAGSHIATIPYNVILQMVKHPLTDAGMKKFIEDYNKAFNK

SEQ ID NO: 4959 - protein, 236 aa, Clostridium perfringens SM101
MEKTCTCGSCKELCAKNISIFSTLSNEELLKIVNMTEHKSFKENDVLCREGEKSDKLFLIREGRVKICKITKEGKEQIVYVLSKGDFFGENNLFTSNNISNFSAYAITDAKLCILKKENLEKILIKNPEISLKIIQEMADRINSAENLAQTLATRDVEARLATVLIEFMNKYGEKNKEGIYISLPLNREQIANYCGITRETVSRRLSKFDKLGIIKLQGNKGLIVKDKEALFSLAE

SEQ ID NO: 4960 - protein, 381 aa, Clostridium perfringens SM101
MEVYFDNSSTTKSLKEVRDEVYYAMDEFWGNPSSLHKLGVKMQRKIEELQERIAKKINASKEEIIFTSGGSESNNMIIKGLARENNHIITTTFEHSSVLNTYRELEKQGVSVTYLKVNNKGFIDLKELEEAINKNTILVSIMQINNEVGSIQKIKEIGRLIKEKSKRAKFHVDGVQGFGKFEIDVKACNIDFYSVSAHKFHGPKGVGFMYMRKGLNLKSLITGGEQQRGLRAGTENTPSYMGMVKAMDIAYDALEDSYNHVKNLKEYFIEKLSKIENVVINSPSSEEYSPYILNVSFLGTRSEVLLHILEEDNIFVSTGSACSSKASVAKGSYVLNAMGLEPKCIQGAIRFSFSRYNTLEEVDYTIASLEKALKFLRRIKI

SEQ ID NO: 4961 - protein, 144 aa, Clostridium perfringens SM101
MLDQKTIDIIKSTVPVLKSNGLKITKTFYKNMFEQNPEVKPLFNMNKQESEEQPKALAMAILAVAQNIDNLEAIKPVVNRIGVIHCNTQVQPEHYPIVGKHLLGAIKEVLGDDATEDIINAWAKTYEVIAEVFINNEKEMYASR

SEQ ID NO: 4962 - protein, 398 aa, Clostridium perfringens SM101
MNVLVINCGSSSLKYQLIDMDTENALATGLVERIGLEGANLTQKSEGKDKYEIIEPMKDHQDAIRLVLGALIDEKHGVIKSLDEINAIGHRVVHGGEKYAESALVTEEVMKDLEECAKLAPLHNPANIIGINACKALMPNVPMVVVFDTAFHQTMPEKAFVYALPYELYEKEHIRKYGFHGTSHKYVSAKIAEAMGKNIEDLKIITCHLGNGASIAAIKNGKCVDTTMGFTPLEGLVMGTRCGNIDPAVVTYLIDELGYTSQEVNTLMNKKSGIFGVSGVSSDFRDVEAAADKGSKEAQIALDLFRNSVKKYIGAYIAEMNGCDVIVFTAGVGENSIIERGAICRDLEFLGIELDEERNNIRAKVAEISKEGSKIKLFVVPTNEELMIAQDTLSIVSK

SEQ ID NO: 4963 - protein, 392 aa, Clostridium perfringens SM101
MILENMILDNVKNMPPSGIRKYFDLINEMEDVISLGVGEPDFVTPWNVREAGIYSLEQGHTHYSSNAGFIELREEISKYLNRRFSLRYNPKDEILVTVGGSEGIDLALRALVGPGDEVIIPEPSFVAYKGCTAFTGATAKTIDLRACDDFKLTPELLEEAITEKTKVVIIPFPNNPTGAIMNKEELQKIVDVLKDKDVIIISDEIYAELSYDEDHVSIASFPEVKEKTIVINGFSKAYAMTGWRLGYVCAHKVLIDAMKKIHQYAIMCSPTTAQYAAIEALKNGDESVFEMAREYNRRRRVLVDGFRSMGLDCFEPLGALYVFPCIKSTGMSSDEFCEKLLLEEKVLAVPGNAFGECGEGFIRACYAASMEDIMEAIKRIRRFVERNNMQGK

SEQ ID NO: 4964 - protein, 336 aa, Clostridium perfringens SM101
MEKLFIPKDYKPLLSLRETEVAIKELKDFFEDSLAKNLNLTRVSAPLFVNKGSGLNDDLNGIERPVSFDMKAIPEFNIQIVHSLAKWKRLALHRYEFKHGEGLYTDMNAIRRDEDLDNIHSIYVDQWDWEKIIDKEERNLETLKETVRSIYSTFKATEDFIVSKYPHIEKILPEDITFITSQELEDRYPDLTSKERETAICKEFGAVFIIGIGGKLASGEKHDDRSPDYDDWTLNGDLLFYYPLFDEAVELSSMGIRVDEESLLKQLKIAECEERKELPFHQMLLEGKLPYTIGGGIGQSRICMFFLRKAHIGEVQASMWDEDMIRTCEENNIHLL

SEQ ID NO: 4965 - protein, 552 aa, Clostridium perfringens SM101
MSNAEHSSNFIRNIIIDDLDSKKHDTIITRFPPEPNGYLHIGHAKSIVLNFELGKEFNGRTNLRFDDTNPIKEDTEYVESIKEDVHWLGYNWSELHFASNYFDEMYKRALLLIKKGKAYVCDLTPEEIKEYRGTLTEPGKESPYRNRSVEENLDLFERMRKGEFEDGSKVLRAKIDMSSPNINFRDPIIYRIAHASHHNTGDKWCIYPMYDFAHPLEDAIEGITHSICTLEFADHRPLYDWFVKECEMENIPRQIEFARLNITNTVMSKRKLKQLVDEGIVDGWDDPRMPTVAGLRRRGYTPKSIRNFCKAIGVAKADSTVDYQMLEHFIREDLQETAPRAMAVINPLKLVITNYPEGKSEILEIENNPKDESAGKRAVTFSREIYIEREDFMENPPKKYFRLFPGNEVRLKGAYFVKCNEVIKDENGEVTEIHCTYDPETKSGTGFTGRKVKGTIHWVDANNCIPAEFRLYEPLILDDCEENEGKHFLEQINPNSLTICKGFIEPSAKDAKPQDKYQLFRHGYFNVDPNFTSDDNLVFNRIVSLKSSFKLK

SEQ ID NO: 4966 - protein, 601 aa, Clostridium perfringens SM101
MKKLQSMITYIAIFAVVLMFAFAFYRNGTQGKVISYTEFKEAYVGNKIETMTIKEDKMSVDGVFKDGKRFTSYVSNNMLDNLLQETKGVETVIKYTPPNNMGIWISFLPTILIIGVIFFGLFMFTQQAQNSGGNRGVMNFGKSKAKMANLDGKKVTFKDVAGADEEKGELEEIVDFLKQPKRYIEMGARIPKGVLLVGPPGTGKTLLAKAIAGEAGVPFFSISGSDFVEMFVGVGASRVRDLFEQAKKNAPCIIFIDEIDAVGRQRGAGLGGGHDEREQTLNQLLVEMDGFGVNEGIIMIAATNRPDILDPALLRPGRFDRRILVGAPDVKGREEVLKVHTRNKHLSEDVDLKVLAKMTPGFSGADLENLTNEAALLAVRGGKSSIDMSDIEEAITRVIAGPEKKSRVVSEYDRRITAVHESGHAVVSNVLEYADPVHEISIIQRGMAAGYTMNLPEEDRTHTSKKQLKDKMVELLGGRVAEKLVIGDISAGAKNDIDRASHIARSMVMEYGMSDVIGPISFGNSDGGEVFLGRDIGKSSNISEETSAKIDEEIKKLIDEAYNRAESILRENISKLNAVTDVLLQKEKIDGDEFREIFKNS

SEQ ID NO: 4967 - protein, 440 aa, Clostridium perfringens SM101
MGKPKLKKEIGLFTATALVVGNMMGSGIFMLPSSLAGVSGPGSTIMAWLLTGLGSLILALTFANLGSKIPKTGGTYEYSRLAYGNFMGFMTAWLYWNGSWIGNATIFIVITTYLGEVITSLTNSSIIGFLFCSSILWICTYINIRGTKLAGRVASVITVFKVLLFIFFIVVGLIYFDPSNLTPMFPEGKGVSTIPVAASLTLWAFMGLETASVAGGEIKDPEKNVKRSTILGMLISTVLYILISVVAMGVMSQSELASSTAPISDIIVKVLNLKSLNFLNIAIAISILGTAMGWLLSTARVGYAAGEDGIFPSVFAKVHPKYNTPYVALIIGSIFINIIFLMNFTKGLAGAYSFIVVLATLSYLPIYAISTIAEIILMVKEDKKPSFKKHLGLITRCLIGFAFAIWAIYASGAEIVMYGFILILLGVPIYGYMSIKKHFR

SEQ ID NO: 4968 - protein, 386 aa, Clostridium perfringens SM101
MNKIYFDNAATTFPKPDSVIKAMFDYMSFEGGSANRGSSSTALQSSRAVYECRYEIAKFFNFPKSENVIFTNNITTSLNMLLLGIIKSDWHIITTSMEHNSVLRPLVKISEELPNVELDIVQCNNEGLVSVEKIKEKIKNNTKLIILSHASNLVGTIQPIKEIGKLCKENDIFFILDSAQTAGVIPIDMTELNLNALAFTGHKSLLGPQGIGGFIIDDKLNSICKNIFSGGTGSNSSLIEHPQELPDKFEYGTLNTPGIIGLLEGIKFIEKEGIENIKAKEEVLCQKAMDLLCEIPEVKIYGPMDAKKKTSTISFNIEGMDPEFTGFLLDSEFNITCRTGIHCTPLAHKTVGSYPAGSIRISLGYFNTIEEVYRFVEVIKELISRR

SEQ ID NO: 4969 - protein, 593 aa, Clostridium perfringens SM101
MNKFKSVVKKISPFVGKYKWAFLGAILFIISAAVFTAIAPRTEGLIITQLTKDFEGIIRGVSGASVNFNYIFKVLILLFLVYAGGTGSTLIASFLLTNAIQNTMKNIRNEVEKKINRLPIRYFDGNSYGDVLSRITNDVDTISNALQQSFVQVINAFLSVGLALIMMYSINIKLALIATLIIPLSILITKIIVSKSQKLFNSQQKALGNLNGKVQEMYTGFNELKLYGKEDDALNEFVKVNEELRETGFKAQFISGIMSPLISLVTYLGIAVVGVVGSIIAIGGGITVGNLQAFIRYIWQINQPLSQVTQLSSAIQSAVAAANRVFEFLEEEEEVKDLNNAIKIENPKGDVTFEHVKFGYKEDKPLIKDLSVDVKSGQMVAIVGKTGAGKTTLINLLMRFYDVQGGSIKIDGVDIRDMKREDLRAMFGMVLQDTWLFNGTIYDNIRYGRFDATKEEIIEAAKVANVHHFIKTLPGGYNMLLNEEASNVSQGEKQLLTIARAILKDPAILILDEATSSVDTRLELLLQKAMRNIMKDRTSFVIAHRLSTIRSADLILVMNDGNIIEQGTHEELMKQGGYYESLYNSQFASKEVN

SEQ ID NO: 4970 - protein, 319 aa, Clostridium perfringens SM101
MENHSKNIKIFTGNSHPELAREIAKALNIPLGKAEVSTFSDGEISVNIKETVRGCDVFIVQSTCSPVNNNLMELLIMIDAFKRASAGRINAVIPYYGYARQDRKAKSRDPITAKLVADLLTAAGADRVLTMDLHAAQIQGYFNIPVDHLLGSPILAKYFVEKGLADRDDVVVVSPDLGSVTRARKFADKLNAPIAIIDKRRPKANVSEIMNIIGDVKDKVCILIDDMIDTAGTITNAANALKDLGAKNVYACCTHGVLSGPAFERINNSAIEELVMLNTIALPEGDGLNKFKSLSVAPIMADAINRIYDDEPLIGLFQD

SEQ ID NO: 4971 - protein, 380 aa, Clostridium perfringens SM101
MNKNVIGVEISGIRKFYNEVVKFPEAISLTLGQPDFPVPEKVKEAMIRAIEEGKTTYTANAGIVELREEISGLLKNTFDIDFSKDEIIITVGGSEGLYAAMTAILNPGEKVLVPSIAYPAYESISKIIGCEVINYDLNEDFSVNIESLKEGIKQGGKLLVLSYPCNPTGALLSKKSRDELVEIIKENDILVLTDEIYSSLCFEEEYYSVAQCKDIKEKIIYVSGFSKMFSMTGLRIGYVACSKEIYDQIIKVHQYNSSCATSISQWGALEGLKSCMNDVENMKESFKERMNFTYKRLKSMGLEVEKPKGAFYIYPNISKFGLTSEEFCHRLLKEGKVACVPGDAFGKGGEGYIRISYCYSKDELERALDKLEDFIKFLKK

SEQ ID NO: 4972 - protein, 484 aa, Clostridium perfringens SM101
MKRLSQENAPIYEALKWYKNQRIVPFDVPGHKQGRGNTELREFLGEDCVSVDVNSMKPLDNLCHPTSVIKDAEELAAEAFSADKAFFMVNGTTSAVQAMIMSVCKDGDKIIMPRNVHRSAINSLIITGVTPVYINPGIHGRLGISLGMAMEDIKKAIKENPDAKAIFVNNPTYYGICSNLREIVKLAHENNMYVLVDEAHGTHFYFDKRLPVSAMEAGADMAAVSIHKTGGSLTQSSMLLMKCNRIKPDYVRTIINLTQTTSGSYLLLSSLDIARRNLALNGEKIFEEVVGIAEYAREEINKIGGYYAFSKEINNGDDIYDFDVTKLTINTLETGLAGIEVYDILRDDYGIQIELGDVANILAIISVGDTRYNIERLVSALSEIKRIHEKDKKDIFDHEYIDPIVKVKPKEAFYAKKKKVLLRESEGLISGEFVMCYPPGIPILAPGELVTKETIDYIEYSKKKGSLVTGPEDMEIEYINVLDF

SEQ ID NO: 4973 - protein, 301 aa, Clostridium perfringens SM101
MLRILLNDGLDKKAISNLEMLGCDVDTNHYDIEDLKEKIKEVDCIVIRSATKIRRELIDEAIKGGKLKLIIRGGVGLDNIDVKYAEQNGIKVRNTPNASSSSVAEIILAHMFSLARFLNQSNITMKAGLWKKKEYVGVELEGKTLGIIGMGRIGSELAKKCTALGMKIIYFDLMDIKNIDNNYRKVEFDELLRESDFISINISGTKSIIGSEELKKVKKGAFIINTSRGKALDEDAIITSLNDGTLGGIGLDVFLEEPSKNLELIKHPKVSLTPHIGASTKEAQMKIGEEVINIIKEEMYK

SEQ ID NO: 4974 - protein, 495 aa, Artemisia annua
MKSILKAMALSLTTSIALATILLFVYKFATRSKSTKKSLPEPWRLPIIGHMHHLIGTTPHRGVRDLARKYGSLMHLQLGEVPTIVVSSPKWAKEILTTYDITFANRPETLTGEIVLYHNTDVVLAPYGEYWRQLRKICTLELLSVKKVKSFQSLREEECWNLVQEIKASGSGRPVNLSENIFKLIATILSRAAFGKGIKDQKELTEIVKEILRQTGGFDVADIFPSKKFLHHLSGKRARLTSLRKKIDNLIDNLVAEHTVNTSSKTNETLLDVLLRLKDSAEFPLTSDNIKAIILDMFGAGTDTSSSTIEWAISELIKCPKALEKVQAELRKALNGKEKIHEEDIQELSYLNMVIKETLRLHPPLPLVLPRECRQPVNLAGYNIPNKTKLIVNVFAINRDPEYWKDAEAFIPERFENSSATVMGAEYEYLPFGAGRRMCPGAALGLANVQLPLANILYHFNWKLPNGVSYDQIDMTESSGATMQRKTELLLVPSF

SEQ ID NO: 4975 - protein, 636 aa, Mannheimia succiniciproducens MBEL55E
MGKIIGIDLGTTNSCVAVMDGDKPRVIENAEGERTTPSIIAYTQDNEVLVGQPAKRQAVTNPKNTLFAIKRLIGRRFEDQEVQRDVNIMPFQIIKADNGDAWVDVKGDKLAPPQISAEVLKKMKKTAEDFLGETVTEAVITVPAYFNDAQRQATKDAGRIAGLEVKRIINEPTAAALAYGLDKGKGNQTIAVYDLGGGTFDLSIIEIDEVGGEKTFEVLATNGDTHLGGEDFDNRVINYLVDEFKKEQGVDLRNDPLAMQRLKEAGEKAKIELSSAQQTDVNLPYITADATGPKHLNIKLTRAKLEALVEDLVARSMEPVKVALSDAGLSVSQIDDVILVGGQTRMPLVQQKVAEFFGKEPRKDVNPDEAVAVGAAVQGGVLAGNVTDVLLLDVTPLSLGIETMGGVMTTLIEKNTTIPTKKSQVFSTAEDNQSAVTIHVLQGERKQASANKSLGQFNLEGINPAPRGMPQIEVTFDIDADGIIHVSAKDKGTGKEQQITIKASSGLSDEEIQQMVRDAEANAEADRKFEELVQARNQADALVHSTRKQLTEAGDKLSADDKAPIEKAVNELEAAAKGEDKAEIEAKIQALIQVSEKLMQAAQQQAQADAGAQQAQGNNGGDDVVDAEFEEVKDNK

SEQ ID NO: 4976 - protein, 264 aa, Glycine max
MSTSKSVSSSSEDDNELRRGPWTLEEDNLLSQYIFNHGEGRWNLLAKRSGLKRTGKSCRLRWLNYLKPDVKRGNLTPQEQLIILELHSKWGNRWSKIAQHLPGRTDNEIKNYWRTRIQKQARHLKIYTDSREFQELVRRFWMPRLLQKAKESSSSNMSIQNQAIPMPFDYVSQHLTVGTIPPWQGPCMNEAGPTYMDQHEQNSDSEHNNGSCISLSESANIPKVPQHFGHTTITQFHALNTNDFGTFTYEGYNVNNNVYEMDNF

SEQ ID NO: 4977 - protein, 198 aa, Glycine max
SSHDPEVRKGPWTMEEDLILINYIANHGEGVWNSLAKASGLKRTGKSCRLRWLNYLRPDVRRGIFTPEEQLLIIELHAKWGNRWSKIAKHLPGRTDNEIKNFWRTRIQKHIKQAETSQQHGNSENNDHQASTSTSKVSTMAHPNETFSPPSYQGTFEPFQPQFPTITDQSSCCTTTNDNNNYWSIEDIWSSMQLLNGD

SEQ ID NO: 4978 - protein, 170 aa, Glycine max
CRLRWLNYLRPDVRRGNITLQEQILILDLHSRWGNRWSKIAQQLPGRTDNEIKNYWRTRVIKQAKQLKCDVNSKQFRDTLRYVWMPRLLERLQPTSQALEPNQSGLVLHASSSLLPSNSDHSIERGSDLWPGFNNQMLLEQGSGGDLLESLWDDDNMCFLQQLSYDLQMK

SEQ ID NO: 4979 - protein, 196 aa, Glycine max
DKNGLKKGPWTTEEDQKLIDYIQKHGYGNWRTLPKNAGLQRCGKSCRLRWTNYLRPDIKRGRFSFEEEETIIQLHSILGNKWSAIASRLPGRTDNEIKNYWNTHIRKRLLRMGIDPVTHSPRLDLLDINSILNASFYGSSQINIQRLLGMHQYMVNPELLKLASSLFSTSQQQHNDPDDMPAQKGQLQNQLCDPQI

SEQ ID NO: 4980 - protein, 153 aa, Glycine max
MDEKGARSSNTLLSCEDEMDLRRGPWTVDEDLTLINYIATHGEGRWNTLALSAGLKRTGKSCRLRWLNYLRPDVRRGNITLEEQLLILELHSRWGNRWSKIAQYLPGRTDNEIKNYWRTRVQKHAKQLKCDVNSKQCKEAMQLSWMPTLVERI

SEQ ID NO: 4981 - protein, 515 aa, Cryptococcus neoformans var. grubii
MFQKVSDKFHRKQQSSTSPGKTQQVPNSPSSVLAKANSQAQQAYSSQDHSPMEGIQSDSTHIQQPMATQKAPIVGPSTSTSLSTVPVQDGTLPLTPGAQGMLAGTTDGHRQVQSPVSRSSSAGEDKMREKARDAQEQAAQAQANLHRVTQQARVAAINAAATQAALETATQLPATARVPTSGTGAEPGQARRKTAGRYALSDFLIERTLGTGSFGRVHLVRSRHNGRFYAVKVLNKEKVIKMKQVEHTNSEREMLVRVRHPFLVNLWGTFQDVNNLYMVMDFVAGGELFSLLRKSQRFPNSVAKFYAAEVALALDYLHSLDIIYRDLKPENLLLGADGHVKVTDFGFAKYVPDITWTLCGTPDYLAPEVVQSKGYNKSVDWYALGVLIFEMLAGYPPFFTEDGNPMKLYEKIIAGKVRYPTYFDVLAKELLKNLLIGDLTKRYGNLRAGSSDIFAHGWFAEVDWDKLYRREIPAPYVPKIDGEGDASQFDRYQEADVSAYGKVGNGPYDHFFVEF

SEQ ID NO: 4982 - protein, 1230 aa, Cryptococcus neoformans var. neoformans
MSSFTPAFRLHHTHSSSVSPTASNDVAPSSPTPNQPHQLAARSPLYANSPNCASKITKGSSLSSSTAHHGLKYVRPSTSPLLRSPKGESFSAYLGNWGSQELITFLNIHKCGQYLAIFQKNDINGKILLDLDMTALKSMGIGKISERVRLIGGIKDLRRCVADESIRAPFTQRSYPSERTLLPSLPSHSNVLLDKWDCSSSASRLGKRQITLRPPPLDLQGHMPPRLLSHASLGIATIDTHDIHTTNSKIEVYIQQNPPGQPQSMPTKRSDSLTLCAAPSRNVGRRSPSSRHFEGCKSQTDGLTTLNLTLDRQVPSSTMNNVTLREDCHLQREERLPLSHQVPHSRNAFASPHKTSLSGRCPLARGDTTSHQPSGPAIAEQDSPVNYRISNTVTNTKEISQGDLKQPFVMKSLESQSHLLAGVSDMSHDPVTDGFKPKGKASVPLTVMSSSDISAVNANPAALSLADLRRQLVKFINTEDDTIRTVNVMHVTSGVEILERALKKFGKFGTGIHGSPDVYGDEDGDGTLEIGGWEVYTESTPDESSKPLSEFNLLKTCTFHREGTAIQDKGLFLRKKQRMQKRKNIQDFFGETPPPSMSPTSPTLITGPHLSLVQGKSQPTSGSAFSSSSRLSTLTHKGRNRASMISVMSGLGVPIINTLPSPQGNGLRLTGSVHSHEKKSMYNFFGHRPPSELISNHLTDYFPSAKKSDVEKARHSLLRLSGGTVAYKKSGIYEGDSTPDHWSKPGDNQPPSLPPFEPSQDTLSDSLQAFASSTPVHLSRPKHTVALRRRRDSDSSSRSHTSMLMQTRRNRDHSDTTSLLTVDEITAEVENRRVSTIQRGDYIEETEDSSSIEGDTLPQDDESKGVLRAICSDSNKLVDSGKSYQGDSDIDQQHELEDEEEDKLDDDEEEEEEEEEEDNEQGKAFTSTGSKRIIKWIKGALIGAGSFGSVYLGMDAQSGLLMAVKQVELSAGSAKNEDRKRSMLSALEREIELLKELQHENIVQYLDSSVDANHLNIFLEYVPGGSVAALLNNYGAFEEALVRNFVRQILTGLNYLHMRGIVHRDIKGANILVDNKGGIKISDFGISKKVENSLITGLRTNRPSLQGSVFWMAPEVVKQTSYSPKADIWSVGCLVVEMLTGTHPWADLTQMQAIFRIGSLARPAPPSDISVQADEFLRKTFEIEHAKRPTAAQLLKHPFIGSPRVRTAASNFINGAIASETMEVQVVEES

SEQ ID NO: 4983 - protein, 394 aa, Ectothiorhodospira shaposhnikovii
MAESIVIVDAARTPVGTFNGSLSQIPASTLGAMVMKALLARTGLSPEQVDEVILGQVLQAGVGQNAARQAAVKAGIPYSSPAMTINKVCGSGLKAVHLAWQSVLCGDSNVVIAGGQENMSASPHVLPGSRQGTKMGDWKMVDTMIKDGLWCAFNDYHMGTTAENIAGEFRISRDEQDAFAAQSQQRAEAAQKAGYFKDEIVPVEIPQKKGEVKVFDMDEFPRHGTTAEGLGKLRPAFSRDGTVTAGNASGINDGAAAVVVMRESMASELGLNPLARIVSFAAAGVDPAIMGTGPIPATIKCLEKAGWRPADLDMVEANEAFAAQAIAVNKQLGWDLSKVNVSGGAIAIGHPIGASGARVLVTLLHGMKRTGARRGLATLCIGGGQGVALAVEAV

SEQ ID NO: 4984 - protein, 474 aa, Rhodococcus sp. RHA1
MKDSVPHGTSDFVVVANRLPVDMETLDDGTTRWKRSPGGLVTALEPILHDRERGSWVGWPGVPDTKVEPIVSGGVDLYPVELSSDEVKLYYEGFSNATLWPLYHDVLVAPVFDRDWWHSYLDVNRHFAEETARTAAEGATVWVQDYQLQLVPRLLREMRPDLTIGFFLHIPFPPVELFMQLPWRKEIVEGLLGADLIGFHLPGGANNFLFLARRLLGLDTTTAGVGVRSALGKVTLDGRVVQVGAFPISVDSRQLVEQATDPAIVERAAEIRRELGNPRKILLGVDRLDYTKGIDLRLSALGELLDEGRLDPSDTAMVQLATPSRERVEHYMKMRSSIEEQVSHINGDHGQIGRPFVHYLYQPVDRSELIALFLAADVMLVTPMRDGMNLVAKEYVACRADLGGALVLSEFAGAAAELRGAYLVNPHDLDGVKNTIMAALDPEREQGRRRMSRLHRQVLDHDVHRWAQSFLGAL

SEQ ID NO: 4985 - protein, 119 aa, Rhodococcus sp. RHA1
MRTPRRSNAQRGSACGSARCESGGRRCAPRPGRSKGGTMSAGHTLPARQSTALRTGTVRWFNAEQGFGFLAPADGSDDIFVHVSEIAGDGHRILEEGQRVSFAVCRTETGDQARDVRIA

SEQ ID NO: 4986 - protein, 329 aa, Rhodococcus sp. RHA1
MVRTHPERRPRSTRLLGCLAFGAVLIAGCGAPDAPAPRFSGDFTEFPLSAGAQLIAPSDTPPPDTETPACAAPASLRPGTPSFGGTLGDIRARGTVVVAVDQNTNLFSFRDPTTGTLTGFGVDLAREVARDLLGDPTKVEFRPLGTDDGAEMLADRDADMVVRPVALPCQGLQDLTFSTVYLEASRRLVVRDGSGISGPADLARRRVCTHHDPASMSALSRIAPKATILAVPDWDDCLMAIQQRQADAVAGAAFLAGLVAQDPNLEIVGPETDSAQYAIGLAPGNDDLVRFVNGTLERLRTDGTWAALYERWLSSLGPAPGPPAPEYRD

SEQ ID NO: 4987 - protein, 560 aa, Rhodococcus sp. RHA1
MTTPKTRSVQAKAPRTEGQWAQGDREPLNVNEQVKQDDDGLNVRKRIEEVYCRTGVAGIDPTDRRSRFRWWGLYTQRAPGIEGGRTATLPPEELEDEHFMLRIRIDGGALTTEQLRVVGEVSRLFARDTADLTDRQNIQLHWIRVEDLPEIWRRLEGVGLTTAESAGDTPRVVLGSPMAGIAVDEVLDATPALHEITRRLIANPDYSNLPRKFKTAISGLQDVVHEINDVAFIGVDHPDHGPGLDVWVGGGLSTNPRIGERLGAWVPLEDVPDVWIGIVSLFRDYGYRRLRAKARLKFLVSDWGVEKFRDVLEKEYLGRAMLDGPAPEPLDEPRDHVGIQRQKNGLNAVGIAPVVGRVGGTVLTDLARAAEASGSRRVRITPMQKLVILDVEDDSIDSLQADLEKLGFPARPSPWRRSTMACTGIEFCKFGIVETKARAATLIADVEKRLADVQDQLEHPITVHLNGCPNSCARIQVADIGLKGMIVTDVDSNQVEGFQVHLGGGLGLDTSFGRKLRGHKLPATEVPDYVERIVRRYVAGREGSEKFATWVQRATEADLA

SEQ ID NO: 4988 - protein, 320 aa, Rhodococcus sp. RHA1
MNGSTNTDQRKMRVIGKDVLAHGVMAVRLADPDGGAVPAWEPGAHIDVIIDRSTVRQYSLCGDASDTTSLAIAVLREEDGRGGSRWVHDSLQVGDLIAIAGPRNNFTLEPAQSYLFVAGGIGITPLLPMLRSAEAASADWRLLYGGRIRTSMAFAEELVARYPGRIELRPQDEYGILDLSAALDAVPDGTAVYCCGPEPLLQAIENECLAHPNLSLYVERFAAKERPANAVDRSFAVELRRAGRTITVDANESLLDAVLRSDVDAPFSCREGTCGTCETRVLEGVPEHRDSILTEDEQAENDCMMICVSRSCTAKLVLDL

SEQ ID NO: 4989 - protein, 370 aa, Rhodococcus sp. RHA1
MAPRPLRRHPPLHHSFHESRRDPVADKHRINFEPVDIEMEVGEDEYILDAAFRQGIHLMHGCREGRCSACKSFVLEGDIQMEDYSTFACNDAEVDEGHVLLCRSTAYSDCTIELLNFDEDELLGGVPIQDVRTRVTRIEPMTKDIVSLRLAPVEPAGYEFKPGQYSDLHIPGTEEHRSFSMATTRSTPGHVEFLIKKYPGGKFAGLLEDGISVGDEIALTGPYGSFTIKEGHVLPMVFIGGGAGMAPLLSLLRHMSETGNTRQVHFYYGARTPQDLFYVDEILELGRGLTDFTFVACLSESMDPPPVGAIAVEDGNVTDVVGRREPDIGRAEVYLCGPPPMVDAALELLEANGTPKDQIFYDKFTSPAFE

SEQ ID NO: 4990 - protein, 584 aa, Rhodococcus sp. RHA1
MARLQSLNVGMPKDVPWQGRTVHTGIFKYPVDGPRMVRTLDIDGDGQGDLDGHGGEIRAVLVYQCQSYDFWRRHLGRDDLEYGQFGENFTVDGLPDDEVHIGDRYRIGDAEFEVTQPRVTCYRVGMRLGEPEMPALLVAHHRPGFYFRVIAEGHVQAGDEIIRTRIGRHRMSVAAIDALLYLPDRDIGQLRNAVDIPALSPGWQRSFRDLLDAAERPTRAGEPPAGAQPDGWAGFRPLRVARIVSESTTVASIHLAPQDDAPLTRPKPGQYLTLRVAGAGEPPPVRNYSLSAAPSDNEYRISVKRETHGLVSTYLHTQLRVGDTLDVASPRGDFVLPEDHDGTTPVLLLSAGVGVTPVLAMLHALAAAHSKRDIWWLHTAHSAAEHAFAAEAHRLLTGVDRGHEHVYYTAQSSTANLDPPALPGRINREALVALGLPTNVTTYLCGPTAFMAVLREALMHLGVESDRIHTELFGALPAINPGLTDATHTPPHLPPGPVGSGPRITFTRSGLTVPWSDEYSTVLDLAEACDVPTRWSCRTGVCHTCQTPILSGTVRYRPDPLEPPMPGTTLLCCSQPETDLVLDL

SEQ ID NO: 4991 - protein, 203 aa, Rhodococcus sp. RHA1
MVGSNSTIERLDDAARDLLFAEARTVNNFAPTPVSDAELAQIWEMARWAPTAANSQPLRVQYVRTDDARRRLIEHLDEGNREKTTSAPVTVILAVDSGFHEHLPHLLPIRPQIREVFAANDALRERTGNFNAALQAGYFILAIRAAGLAAGPMTGFDPKGMDTEFFSGTTWRSILVVNIGHPGENPWFERLPRLDPAETVHWA

SEQ ID NO: 4992 - protein, 67 aa, Rhodococcus sp. RHA1
MAQGIVKWFNGEKGFGFIAPDDGTPDVFVHYSEISGSGFKSLDENQRVEFEVGQGQKGPQATNVRSV

SEQ ID NO: 4993 - protein, 399 aa, Rhodococcus sp. RHA1
MADRVVLAYSGGLDTSVAISWIGKETGKEVVAVAIDLGQGGEDMEVVRQRALDCGAVESVVVDARDEFADEYCLPTIQANALYMDRYPLVSAISRPLIVKHLVEAARAHGGTTVAHGCTGKGNDQVRFEVGFGSLAPDLDVIAPVRDYAWTREKAIAFAEENEIPINVSKKSPFSIDQNVWGRAVETGFLEDLWNAPTKDVYDYTQDPTVNWQAPDELIISFEAGRPVAIDGKPVSVLEAIQELNRRAGAQGVGRLDVVEDRLVGIKSREIYEAPGAMVLINAHQELEHVTQERELGRYKRQTEQRWSELVYDGLWFSPLKVALDTFIEKTQERVSGDIRLVLHGGAIIVNGRRSNESLYDFNLATYDEGDTFDQSYAKGFVQIHGLSSKVAAKRDLGL

SEQ ID NO: 4994 - protein, 329 aa, Rhodococcus sp. RHA1
MDIAGALQVSLAQLIGPSAIFYALLAIGLNLHFGYAGLLNFGQIGFALLGGYGVGIMTVTYQQPLWVGILVGLAAAGLLAVVLGIPTLRLRADYLAIVTIAASEILRLIFRSTASDSITGSTNGLFGFADPFTTLSPFDSGKQYNFLGVKFYGDDLWSMVVGWTLVLVLCGFVFLLTHSPWGRVLKAVREDEDAARALGKNVFVYKMQALVLGGMIGGLGGVFNALQTKSINPDFYSTAQTFFAFGALILGGAATVFGPVVGAMLFWFLLAIPDALLRQAISGPEPLLPLTEQQVGAMRFVLLGIMIAVLMVFRPQGILGNKREVQLNA

SEQ ID NO: 4995 - protein, 1527 aa, Rhodococcus sp. RHA1
MLFSQLPGPQGLYDPDQEVDSCGVAMVADVHGRRSHSIVSDGLLALENLEHRGAAGSEPNSGDGAGILLQLPTEFFADVVDFDLPAPLDDGSSTYAAGTCFLPHDPQARAAAQRRVSDLAAEEGLDILGWRRVPVDPDGADVGSSARACEPHMSQLFVTAPAVGGIRPGGLALDRLVYALRKRAEQVTPEVESEGSGVYFPSLSSRTVVYKGMLTTSQLSRYFPDLRDPRIASAIAIVHSRFSTNTFPSWPLAHPFRFVAHNGEINTVRGNRNRMRAREALLSSSVIPGDLRRLYPICTPDASDSASFDEVLELLHLAGRSVAHAVMMMVPEAWENDTSMCPDRRAFYQFHASLMEAWDGPACVTFTDGTVVGAVLDRNGLRPGRWWQTVDGRVVLASESGVLDVPQAEVVAKGRLEPGQMFLVDTSEGRIVPDEKIKMRLAAEQPYAEWLYAGLLELKTLPDRPHVQHNHESVVRRQVAFGYTEEDLRILLAPMAASGGEPLGSMGTDTPIAVMSQRSRLLYDYFVELFAQVTNPPLDAIREEIVTSLSRVMGPEQNLLEPTAASCRQIVLPWPVLDNEELNKIINVNADGNHPGLAATVLRALYDVERGGAGMAEAIEELRAQASAAIADGYRTLVISDRDSDHTRAPIPSLLAVAAVHHHLVRTKERTKVALVVESGDAREVHHLALLIGYGAAAVNPYLAMESIEDLVSEGELTGVEHTIAVRNYLTALGKGVLKVMSKMGISTVGSYTAAQVFEAIGLDRDLVHEYFTGTVSKLGGAGLDEIAREVTVRHRQAYPDNPAEFAHRRLEDGGEYQFRRDGELHLFTPETVFLLQHATRTGQHEVFAKYSEEVNRLAEAGGALRGLFTFREGVRPPVPLDEVEPVERIVTRFNTGAMSYGSISAEAHETMAVAMNNLGGRSNTGEGGENVDRLYDPSRRSAVKQVASGRFGVTSDYLINASDIQIKMAQGAKPGEGGQLPAYKVYPWVAETRHSTPGVGLISPPPHHDIYSIEDLAQLIHDLKNANDRARVHVKLVSSVGVGTVAAGVSKAHADVVLISGNDGGTGATPLTSMKHAGAPWEIGLADAQQTLVLNGLRDRITVQCDGGMRTARDVVVAALLGAEEFGFSTAPLIVAGCIMMRVCHLDTCPVGVATQNPELRKRYTGKPEFVEEFFRFVAEDVRQYLADLGFRSIDEAVGHADVLETAQGIAHWKNRGLDLTPIFAVATGPDGVPLPQRRRDRDQDHGLDRALDRTLIQLAEGALEDAHAVEIEMPVRNVNRTVGTLLGAEVTRRYGAAGLPDDTIRLTFTGSAGQSLGAFLPPGITIDLTGDANDYVGKGLSGGRIVVRPADDVLFVPETQVIAGNTLLYGATSGELYLRGRVGERFSVRNSGASAVVEGVGDHACEYMTGGRVVILGPTGRNMAAGMSGGIAYVLDLDPEDVNRAMVKLLQPDPDDLDWLCGAVTRHHRWTGSAVAASVLADWPRRSALFTKVMPVDYQRVLDATRMAKAEGLDVDTAIMEAARG

SEQ ID NO: 4996 - protein, 641 aa, Rhodococcus sp. RHA1
MCGLLGLLTSGETSDNAVSQVDQAMHCLRHRGPDEHGTWHDDHLVFGFNRLSIIDIEHSHQPLRWGPAENPERYALTFNGEIYNYLEVRAELAEQFGAQFVTEGDSESIVAAFHYWGEDAVRRLRGMFAFAIWDTETRELFIARDPFGIKPLFLATGTGGTAFGSEKKSLLELASLIGIGTELDPRAVEHYTVLQYVPEPETLHKQIRRLESGCFARVRPGEEPVITRYFAPTFPVRPFAAGTDQARYREIAEALEDSVAKHMRADVTVGSFLSGGIDSTAIAALAMRHNPNLITFTTGFEREGYSEVDVAAESAEAIGARHVVKVVSPSEFAAAIPEIVWYLDDPVADPALVPLWFVAKEARKHVKVVLSGEGADELFGGYTIYREPISLKPFEYLPKGLRRAAGKLSERIPEGTRGKSLLNRGSLTLEERYYGNARSFNDAQLRAVLRDFRPEWTHRDVTDPIYAQSQGWDPVARMQHLDLFTWLRGDILVKADKMTMANSLELRVPFLDPEVFKVASQVPLDQKITKSTTKYALRQALEGIVPGHVLHRAKLGFPVPLRHWLRGTELFDWAHEQIAASGTDHLLDKAAITKMLNDHRDGVSDHSRRLWTVLIFMVWHGIFVENRIVPEIAEPAYPVSL

SEQ ID NO: 4997 - protein, 305 aa, Rhodococcus sp. RHA1
MSKTEFRSGFVCFVGRPNTGKSTLTNALVGSKIAITSSRPQTTRHTIRGIVHRDHAQLILVDTPGLHRPRTLLGQRLNDLVRDTYSEVDVICLCIPADEKIGPGDRWIVQQVRQIAPKTTLIGIVTKIDKVSKDMVGQQLLAVSKLLGPEADVVPVSAASGEQVEVLVDVLASKMEEGPAFYPDGELTDEPEETLMAELIREAALEGLGDELPHSLAVVIEEIIPREGRTEKQGELLDVHALLYVERPSQKGIVIGKGGARLREVGTKARLQIEKLLGTKIFLELHVKVAKDWQRDPKQLGRLGF

SEQ ID NO: 4998 - protein, 573 aa, Rhodococcus sp. RHA1
MTSTTDASPAAVDAAPARTRTAKPARRRAEGQWALGYREPLNANEQAKKDDNPLNVRARIENIYSKQGFDSIDKGDLRGRMRWWGLYTQREQGYDGTFTGDENIDLLEAKYFMMRVRCDAGALNVEQLRTIAGISTEFARDTADLSDRENVQYHWVEVENVPEIWKRLEGVGLKTTEACGDCPRVVLGSPLAGESLTEVLDPTPAIDEIVRRYIGKPEYSNLPRKFKTAISGQQDVVHEINDVAFVGVNHPEHGPGLDLWVGGGLSTNPMLAQRVGVWVPLDEVPDVWEAVVSIFRDYGYRRLRNKARLKFLVKDWGIERFREVLETEYLKRKLIDGPAPEKPTRPIDHVGVQKTRNGLNAVGVAPIAGRVSGTILAKVADAAERAGSDKIRFTPYQKLIILDVADDKLEQLIADLDEVGLPARPSHWRKNLMACSGIEFCKLSFAETRKRSQVLVPELEQRLADINAQLDVPITININGCPNSCARSQVADIGFKGMLVDDGEGNQVEGFQVHLGGSLGFDSAFGRKLRQHKVTSTELGDYIDRVVRHFVKHRNEGERFAEWVVRADEGDLR

SEQ ID NO: 4999 - protein, 570 aa, Rhodococcus sp. RHA1
MNLTDHEPRKTGRNMRVVDYIVAALAAEGVEHVFGVGGANIEDLYDALHRSLDVEGVVAKHEFAATTMADGYARTSNRIGVVAATSGGGALNVIAGLGEAFASRVPLLALVGQPPTTLEGMGAFQDTSGLAGSIDATRLFGEVSVYCARVESPLDLERQLAEALAAARRGGPAVLLLPKDIQRSRGEFPEPRRAVPTAPRTTPTDITRLAEALRDDYGRVTVIAGDEVARAGARGELAELAHVLGARVAVTPDARDVLDPAAPGRLGVTGAMGNPDVVDALQDSDVCLLVGTRLPVMARGGLDGVLEKTLVYSVGSAKPFLQAHHLPTRDLRATLRGLVTEIGPAASRAAVAQSEPTPIDVPSSGTSGLRYTDAVKALAAMMPVGADVFADAGNTGAAVVHHLPVPTGGRFVVALGMGGMGYTFGAAIGSAFSRGRRTFVIAGDGAFYAHGLEIHTAVEYDVPVTFVVFNNNAHAMCLTREQVYFEGAYTYSRFRPAHIAAGVGALFPGLPSRAVDTHAGLADSLRATADSAGPAVIEVACDADELPPFLPFLPVRRPTERSESREGARR

SEQ ID NO: 5000 - protein, 486 aa, Rhodococcus sp. RHA1
MSRFIDRVVLHVSAGKGGNGCASVHREKFKPLGGPDGGNGGRGGDVVLEVDGNVHTLLDFHFHPHAKATNGKQGMGSNRDGAQGDDLILRVPDGTVVLDEDGRILADLIGVGTRFEAAQGGRGGLGNAALSSKARKAPGFALLGEDGVERELVLELKSVADVGLVGFPSAGKSSLVSVLSAAKPKIADYPFTTLVPNLGVVSSGDTTFTVADVPGLIPGASDGRGLGLDFLRHLERCAVLAHVVDCATLDPGRDPISDIDALEAELAAYKGALSGDAGLGDLADRPRIVILNKADVPEAAELAEMVTPDLEARGWPVFTISAVSREGLRPLTFALAKLVADYREAHPKAEPKRQVIRPVISNENSFSVVADPEIPGGFIVRGTRPERWVRQTQFDNDEAVGYLADRLARLGVETELVKQGAEPGASVTIGNVSFDWEPQTPAGVDLTRTGRGTDPRLDQVERIGATERKHASRIRRGLEGLDPEDQ

SEQ ID NO: 5001 - protein, 408 aa, Rhodococcus sp. RHA1
MKGLSMRDVVICEPLRTPVGRFGGVFKDINPQSLAATVITALVERTGIEGSQIDDVILGQASPGGEAPAIGRIAALDAGLGIDVPGMQVDRRCGSGLQAVITAVLQVASGGNDLVLAGGAESMSQAEFYTNPNIRWGVKGEGVQLADRLARARVTAGGANFPVPGGMIETAENLRAEFDISREDQDALAVQSHQRAVAAQDSGRFAEEIVGVTVPQRKSDPLVVDKDEHPRADTTVESLSKLRAIRSKIDSASTVTAGNASGQNDGAAVCIVTTAEKAKELGLKPLARMASWAVAGVPPRTMGIGPVPATEKALGQLGLSLSDMGVIELNEAFAAQTLAVLRSWDLDPTDERLNPNGSGISLGHPVGATGGRILATLLREMDRRESRYGLETMCIGGGQGLAAVFERV

SEQ ID NO: 5002 - protein, 369 aa, Rhodococcus sp. RHA1
MSVAHTSRPAEGRRFSLLSLFEAMATPHQLDRYLELVTPMVTVRDLRAEVIEVRRSTADTVTLTLRPTRQWRGFRAGQFVQVGVVIDGVRHTRCYSPANAQASTDGLVELTIKAHPDGLVSQYLHAHARPGLVLDLSQAAGEFTLPSPRPCRLLLVSGGSGITPVLSMLRTLVDEQHVGSITFLHYAYTENDVAYLDELRALADANANVSLVLAYTDQETGGHLHGFFGQEHLDAVAPWYADAETFLCGPPGLMRGVREVYRELGIEDRLHTEEFAPAAAPAEGAAGGEVSFTASGVTADNSGATLLEQAEAAGLHPEYGCRMGICFSCTTVKKSGCTKNVRTGDTDTDPDKAIQLCVSVPVGDVALDI

SEQ ID NO: 5003 - protein, 397 aa, Rhodococcus sp. RHA1
MTSSVIVAGARTPMGRLLGSLKDVSGSDLGGVAIRGALEKAGVAPEQVEYVIMGQVLTAGAGQIPARQAAVAAGIGMDVPALTINKVCLSGIDAIALADQLIRAGEFDVVVAGGQESMSRAPHLLEKSREGFKYGDVTMRDHMAFDGLYDIFTDQAMGSLTEAKNAEDGQRISREEQDAFAAASHQKAARAWKDGVFDDEVVPVPVPQRKGDPVLVSSDEGVRGDTTVESLARLRPAFSKDGTVTAGSASQISDGAAAVVVMSKAKAQELGVSWIAEIGAHGVVAGPDSTLQSQPARAIAKACAKEGIDPKDLDLVEINEAFAAVGIASTRELGLDPEIVNVNGGAIAMGHPLGMSGARIALHLALELRRRGGGVGAAALCGGGGQGDALIVRVPKA

SEQ ID NO: 5004 - protein, 299 aa, Rhodococcus sp. RHA1
MSTTVGFLGLGHMGGPMAANLVKAGHTVVGFDLAPAALEQAVKDGVTVADSAVEAVREVDVVITMLPSGKHVLGLYAEILPAAKPGTLFIDSSTIDVADARAAHDEAVEAGHRSVDAPVSGGVVGATAGTLAFMVGGTADDFESAKPLLDVMGKKVVHCGDPGNGQAAKICNNMILGVSMIAVSEAFVLGEKLGLSNQALFDVASNASGQCWALTTNCPVPGPVPTSPANNDYQPGFAAALMDKDLGLAANALKTNGVEADLGLRAAELYSRFHAAGGGGQDFSAIINDIRDRSTKGDQ

SEQ ID NO: 5005 - protein, 370 aa, Rhodococcus sp. RHA1
MDTSQSASTARPTVGVVRESNDGERRVALVPKVVASLIAKGVDVVVESGAGLGALIPDESYKLAGAAIADPWAADVIVKVAPPSDEEVGRLHAGQTLIGFLAPRNQDNQVAALKAAGVQAFAVEAIPRISRAQVMDALSSQANVSGYKSVLLAASESTRFFPMLTTAAGTVKPATVLVLGVGVAGLQALATAKRLGGRATGYDVRPEVADQVRSVGAQWLDLGIDAAGEGGYARELTEAERAQQQQALEDAIKGFDVVITTALVPGRPAPRLVTAAAVEGMKPGSVVVDLAGETGGNCELTEPGQTVVKHGVTICSPLNLPASMPEHASELYSKNISALLELMLVDGALAPDFSDEVLAASCVTREEGVS

SEQ ID NO: 5006 - protein, 397 aa, Rhodococcus sp. RHA1
MTDHDPTVLVAGARTPFGRFMGSLSSLSAQELGGHAISGALQSAGVDASAVDHVVMGQVLTAGSGQLPARVAAAAAGIPMTTPALNINRMCLSGIDAITLAHQMIVAGDADVVVAGGQESMSTAPHLLANSRRGHKYGDTVLIDHLAFDGLQDAFTGSSMGALTESRNPEYGITREAQDDWAARSHRAAARARKDGVFAAEIVPVPITSGRGETTDVSHDEGIRADTSAADLAGLRPAFAAGGSLTPGNSSPISDGACAVVVTRKSTAVRLGLSWLAEIGSRAVVAGPDSGLHEQPSNAIQAACRREGIAPRELDLVEINEAFAAVTLVSSEHLGLDADRVNVNGGAIALGHPIGVSGARIVLHLALELRRRGGGVGAAALCGGGGQGQALIVHVER

SEQ ID NO: 5007 - protein, 1830 aa, Rhodococcus sp. RHA1
MNTSATESGLYDRTLDKSSCGVGFITRKDGIQTHDVLIRGHEALCAVPHRGGMSAEGVGDGAGVCVDLSVPFFRTLTGQDDLEAGRFGVGNFFLPTDVAFHGDAEAVIERALADQGFHVLLERDVPVDATVLRPAAIRHQLPIRQWVFTAPDACADETEFDRRIHDALLAIEAVAYTQPDLAGLYPLSLSARTQVLKGRLNSNEVMPYFQDLVDPAHAIHTLYFHTRFSTNTDPHPTMAQPFRLMAHNGELNTDKKNRLSETALARARNREIVRPHGQSDSCRLDQTLQSRVVEDGLDLVTAVVSMMPPAWENDSTLSPEVRAMLEYFSLYEEKNDGPAALIFGDGTVVGARLDRLGLRPLRSVETDEYLCVTSEAGQIDFDPETVVHRGRIEAGGMLYFDHREGRSYSTDEALELLASRNDYPTLVAEARRTIEALPEVEAEPGPLRYNGDLERTQRYVAYSHNQESFKFMMDPMLASGQEKISAMGYGNAINALSDQEGGVAKYFSQRFAQVTNPSLDSIREADGMTLRVALGAKPNSGAQSAPQIVVPSPILTHMDMLRIRKQSETPVQRFPMLYTPVHGDSAANAAALEAAVDGLCDEVEAFAREQGGIAIVTDRHVATDRAALPMIVAISAVNQRLIEEGLRLRVSVVAESGQISSSHHVAAALGFGAAAIYPLAVRLRAEEKFADEADVAFKRFAKAAEKSLMKTMGRVGLCTAESYIGGEFFEPNYLDTDDRVLRRYFANVKTPVGGVGFAVIAQAVADWHQRALTVTGEKDVPLLGLFKERAEGAGHSYGTAAVRGFVDLTEEPISFDTAGTQDHTESLRLLPLNRLEDAFGLDDDAYRNAGFQKLTPEAIDCFEITPGYRAFARTMAEERTRRPAALRDVLDLPADVTFLTTAAEFRKQMGRFSRKGNNSFAVRGLESEAIGEDRFRLRLTGPHAGESRVLAALGESLVMRFGDDLLDHSVDGDALVVSTSGEALRCLSLLRTAPASVPIGQVQKASEITPFLTSGAMSHGALNSNAHEAVAHGTNMVGGMSNSGEGGEHISRYGTIRGSRIKQFASGRFGVWAGYLADPMLEELEIKIAQGAKPGEGGQLPAPKVTVEIAAARGGTPGVELVSPPPHHDTYSIEDLAQLIHDCKAARVRVIVKLVSSEGIGTIAVGVAKAGADVINVAGNTGGTGAAAVTSLKYAGRSAEIGVAEVHQALCANGLRQKVLLRCSGAHQTASDVVKSALLGADSFEFGTTALMMLKCVMAKNCNIKCPAGLTTNPELFDGDPRAMAQYLLNIAHETREVLAELGMSSLREARGRSDLLQLLDHPSSVGQLDLRAMLAVVEEVTIGDPVYLEKDYTLDDGWLVQLRAALVEQGEATVELGDGVHLSNRNKSVGAQLAVDIERMLNHELTDVELPAVLRDERGRGYLRDGSVRIATSGSAGLSYGAFCNDGMTLVHTGTANDGVGKGANGGSIVVRSPGGGSDRHGGNVLIGNFALFGATGGRTFVEGQAGDRFAVRNSGATAVVEGVGDFACEYMTNGAVLNLGSFGKGVGNGMSGGFVYQYDPEGKLPGKASADSILLGSITGDDEHAALHRQAVHVLLGWHLEATGSAKAAWLLENWETEQHHFVYGMPRALLQYQDSDEILKAKPRKELADELAAALVAHQVRKFKLDYRDGHAVLDGAVPGYGEADTEAMFALLNNYTVLNAAQEMALSKLPGVADPSDPAVDKAVRNLLLTEDFFLMQRLQRYAREALKDYSDEDLAVMVAAKRLADYKDALRRRNVRSIDAPGTYGWILHQDAKNVDKIGRLPGFEELFAQHALPDLIPTRDVVPS

SEQ ID NO: 5008 - protein, 534 aa, Rhodococcus sp. RHA1
MAARAYGEFMKRWNALAIPAAAAAAIASYDLVQRRHALLRNFPVVGHGRYLLESLGPELRQYITTGNDEERPFTRDQRRWVYASSKRVTDTFGFGTDNDIEFTDGYTIIKHRTFSEIPPSAMPHADEHLAIPSAKVLGAARGRAHAFRPRSIVNISGMSFGALSSAAVVALNRGAAATDCLHNTGEGGISRYHRNGADLIFQIGTAYFGCRDEDGRFDLARLRALVESAPVRAIEIKLSQGAKPGLGGLLPGAKVTPEIAEIRGVPEGRDCISPSRHTAFRDVDSMLDWVELLAAETGLPVGIKSAVGDPTFWDLLVEAMSNSGRGVDFVTIDGGEGGTGAAPLVFTDAVSLPFRSGFARVYAKFAEAGLTDGITFIGSGKLGLPDNAVAAMSLGCDLINVAREPMLAVGCIQAQKCHTDRCPTGVATQNPWLAHGLDAGIKSVRAANYLRALRRDVFKVAEACGVAHPGLITASDVEVADGNRHSITLADLYGYRLGWGLPGDADRAEITRLMTEAAAVPAGETGSPGAKTAP

SEQ ID NO: 5009 - protein, 393 aa, Rhodococcus sp. RHA1
MNSPEPIVVVDGARTPIGSFGGAFKDVPAHELGATAVKAALERAGVPGEDIDEVVMGCIGQVGPDAYNARRVALAAGLPERTPAYTVNRLCGSGLQAVWSAAQQMRWGGVNFALAGGDESMSRMPFYDFSARSGYKLGDRTLVDGTVAILTDPFGGVHMGRTAEAVARKYDVSRQQQDEFAVESQRRAASEAAKAAFAEEITPVEIGGRRPKTIDVDEHPKPDTTLETLAKLRPAFEEGGSVTAGNASGINDGAAALVLATQSAAQEKGLTGLVTLEAVATAAMDPALMGYAPVLALANLFEQTGTTPGDIDVIELNEAFASQAVAVIRDAKLNPEKTNPYGGAIALGHPVGATGAILSLRLAKDLVRRDLELGIVTMCIGGGQALAALFRRI

SEQ ID NO: 5010 - protein, 727 aa, Rhodococcus sp. RHA1
MTSPELALTVRLNTSAADTRRGVVRLHPEALAALGLREWDAIALVGARRTAAVAGRAPAGTPTGTALLDDVTLSNAGLTENSTVVVTPVTVYGGKTVTVSGSNLAVNSVSDVTLRHALLGKVLTVGDTVSLLPRDLGPGTSTAPATQALSRTFGVAWTSELLTVTGVDPAGGPVSVQPNTAVGWGEGVRATVSAAPTRLPAPPVRPAEEVPPVPVEDLVGAHTQAAKLTEWLGLALDEPELLRKLGASPHLGVLVTGPAGVGKATLARAVLASRRLVELDGPSAGALEADSRLQRVTAAVDAIRSGGVLLITDIDALLPATPEPVSALIVEQLRRAVDTVGVAFVATSAHPESVDARLRGQDLCDRELTLTLPDGSTRRALLELLLRKVPTDGIALEAIAARTPGFVVADLAALCREAALRAASRAARKPVDPALTQDDLLGALDVIRPLSRSGSEELAIGTLTLDDVGDMVETKQALTEAVLWPLQHPDSFARLGVDPPRGVLLYGPPGCGKTYLVRALASSGHLSVHAVKGAELMDKWVGASEKAVRELFQRARDSAPSLIFLDEVDALAPRRGQSSDSGVSDRVVAALLTELDGVEPLRDVVVVGATNRPDLIDPALLRPGRLERLVFVPPPDGEARRAILRTSGKSVPLADDVDLDALADDLDGYSAADCSALLREAALAAMRRNIDAADVTAADVAEAREKVRPSLDPEQVAHLESYALSRP

SEQ ID NO: 5011 - protein, 326 aa, Rhodococcus sp. RHA1
MRGRRIALVLVAATLLIGGCAESSPAHVGSPSVSYTEPPLPAAATPAPETSAAPPTPEKDCGDPTASLRPFPDTDAAPPMPTVDAIRARGRLVVGLDTGSNLMSFRDPATGAVQGFDVDIAREIARDLFGDPDRLEYRILTSANREKALQESMVDIVAKTMTITCDRKERVAFSSEYFEAQQRVLVVKGSPIRSAADLDGKRVCVVRGTTSLTRLQQVAPTADILTVPMWSDCLVVLQQRQVDAVSTDDTILAGLASQDPYLEIVGDSMGAEPYGVGITKANEDLVRFVNGTLERIRRDGTWTRMYDHWLSMLGPSPAPPSAVYQD

SEQ ID NO: 5012 - protein, 397 aa, Rhodococcus sp. RHA1
MTEGSVLVVNSGSSSIKFQLIHPDTGKASASGLVERIGEPEGRIVYHHRTGLAERHVHIADHRAGLKMVSDIVAEVGRPLREAGIVAVGHRIVHGGDVFFEPTIIDDAVVQSISELSNLAPLHNPANVIGIEVAREELPDIPHVAVFDTAFFHTLPAEASTYAIDRQVAKEHSIRRYGFHGTSHQYVSAQAAELLGRDLSELNQIVLHLGNGASASAIRGGRAVDTSMGLTPLEGLVMGTRSGDVDPGVILHLHRSGMGVDQIDDLLNRHSGLKGLSGVNDFRALLTLVGEGDEAAALAYDVYVHRLRKYIGAYLVELGGVDVITFTGGVGENNVDVRRDSLAGLGRLGIVVDDDRNRADSRDARRISADESDVEVLVVPTNEEFAIARAAADLIGA

SEQ ID NO: 5013 - protein, 706 aa, Rhodococcus sp. RHA1
MAMAAPATPSPVNPPARSQPSSVYIASPEGDTGKSTIALGVLQMLCASAARVGVFRPIARSTQETDYILELLLEHTTADVGYEEALGVTYEHVHADPDGALSEIVSRYHQVAAQCDAVVVIGSDYTDVASPSELGYNARIAANLGAPVLLAVKGARRTPEEVAQLAHLAIGELTSHHAHPLAVVANRCDPDELDAVTAALASTGVPAWSLPEIPLLVAPTMAELLESIDGSLFSGDPELLHREALRVMVGGMTAEHILERLTEGTVVIAPADRSDVLLAMVNAHEAEGFPSLAGIIMNGGLMPHPAIAKLMAGLKPRLPILTTGLGTFDTASAAAQTRGRVAVGSQRKIDTALSVMELRVDAPTLLERLKLPIPSVVTPQMFEYQLIDRARRDRKHIVLPEGDDDRILRAAGRLLQRQVAALTILGDEVQVRRRAAELGVDLGDAQVLDPRTSDHAGPFAEEYARLRAHKGMTVERAREVMADISYFGTMMVHLGIADGMVSGAAHTTAHTIRPSFEIIKTQPGVSTVSSVFLMCLSDRVLAYGDCAVVPDPTAEQLADIAISSAQTAAQFGIDPRIAMLSYSTGDSGSGADVDKVRSATKLVRERRPDLLVEGPIQYDAAIEQSVADKKMPDSAVAGKATVFIFPDLNTGNNTYKAVQRSAGAIAVGPVLQGLNKPVNDLSRGALVEDIVNTVAITAIQAQGAEK

SEQ ID NO: 5014 - protein, 393 aa, Rhodococcus sp. RHA1
MLSPTSTDVIRATLPVVGAAISDITTLFYRKMFDAHPELERDLFNRGNQKQGEQQKALAGAIAAFAALQLEPDQARVDLILSRIANKHASLGIEPTQYAIVHTHLFAAIVEVLGDAVTPEVAAAWDEVYWLMAETLIAMEAGLYASAGVAVGDVWRDVRVRERRHESADTVSFVLTSLDGSPLPSFAPGQYLSVAVHLPDGARQIRQYSLSSAPSRGDWRISVKRAGEVSNFLYQNVFEDDIVTVSTPFGDLVLQDDDAPLLLVSAGIGCTPMIGMLSHLADTEDSRPISVLHADRSASSHAHRAELTELVERLPFAVMHRWYEDLGARRPEGSLREGRADLGEVAIAPGTRAYLCGPLPFMLGMREELLAKDVPAENIHYEVFGPDSWSATV

SEQ ID NO: 5015 - protein, 377 aa, Rhodococcus sp. RHA1
MRDAVIVDAVRTPIGRRGGSLSGIHPANLSAHVLEALAARTSLSPEEIGDVVWGCVSQVGEQAGNVARTAVLAAGWPETVPGTTLTRACGSSQQAVSFAAAAVIAGHEDVVVAGGVESMSRVPMGSASKNGEHFPAAVLDRYGVDGFSQGTGAEMMAAKWGLSRQVLDEYALRSHELAAHAADRGAFDGQLAPLSDVLAGDEGIRRGGTLDSLGRLKTVFKEDGVIHAGNSSQISDGAGALLVTTSEKAAQLGLTPMARIHTCAVAGDDPVIMLTGPIAATEKALTRSGLKIDDIGAFEVNEAFAPVPLAWQAETGAATDRLNPLGGAIAVGHPLGGSGAILMTRLVHHMRDNGIRYGLQTMCEAGGLANATILELL

SEQ ID NO: 5016 - protein, 331 aa, Rhodococcus sp. RHA1
MTFTVSVAADRVECRPDQPILDAFLRGSVWMPNSCNQGTCGTCKLRVVSGSVDHGRSPEDTLTQADREQGFALACQATPCSDTVVERLDTAPAGTVHALRDLIGTVSAIEDVARDTRRVLVTLDSPLEFSAGQYVELRVPGTDHCRQYSMANTPGESKQLEFHIRRQPGGVATDGWVFGTLSVGERVEMTGPLGDFRLDPEDEGPMILLGGGTGLAPLKSMVRQALTVTPERAIHLYHGVREAADLYDVDLFREWERAHPGFRYVPCLSDSTWSGRTGFVTDAFVEDFDTCRGYSGYLCGPPAMVDAGVKAFKRRRMAPRRIFREKFTPAA

SEQ ID NO: 5017 - protein, 512 aa, Rhodococcus sp. RHA1
MTFQVALSFEDGITRFIKCDGDETVADASYRARINIPLDCRDGACGTCKSLCESGTYDGGDYIEEALTDEEAEHGYCLPCQMMPESDLVLQIPTTSDVAKTAAGTFTSTVTEIRKFSDTTIGFTIEIANRDDLVFLPGQYVNITVPGTEATRSYSFSTGPTSKELSFLVKITDGGLMSEYLRSRAQVGDTLEFTGPMGSFFLREQKRRALLLAGGTGLAPLLSILDKMRTDAADHPVHLVYGVSSDADLVELDKLEEYTKSLPQFTFDYCVSDPASSAPNKGYVTGLFEPAHLNDGDVDVYLCGPPPMVEAVRDHLKSEGVTPANFYFEKFNNAATPSGSEASAPPAAETVEAAPEYEIGEEHQPLSESDAQFDARMALELGAMELTIGRMTQEQLSEYRILAETSCESIENDHFTDAGAFTDTNAAFHEFLFRCTANDVLLEAYNRLEVTQLMTKVLRTADWVDEHIQHDHLDIVTAFEKGDRAAAHDLIVSHSAHAKATMCRAIERSAVA

SEQ ID NO: 5018 - protein, 411 aa, Rhodococcus sp. RHA1
MPENTNAQADDVVVCEPLRTPVGRYGGQFKDVPAADLGARVVSELLARTKVDPGRVDDVIFGQCYPNGEAPAIGRVVALDAGMPVTVPGQQLDRRCGSGLQAVLDAAMRVQTGIAELVIAGGVESMSRAEYYTESMRWGAKGAPAVLHDRLARGRVTAGGRNYPVPGGMLETAENLRRKYDISRLEQDELAVSSHQRAVAAIDSGKFAEEIVPVEVPVRKGDPQVVDRDEHPRAGTTIESLARLRPIMGGTDPDATVTAGNASGQNDGAAACLVTTRAQAERLGLRPLARLVTWAVAGVEPSEMGIGPVPSTERALKRAGLTLADIDLIELNEAFAAQALAVTREWNFGAQDFDRTNVNGSGISLGHPVGATGVRILTTLLREMDRRGARYGLETMCIGGGQGLTAIFERV

SEQ ID NO: 5019 - protein, 506 aa, Rhodococcus sp. RHA1
MIVGVLKEARAGETRVAATPTTVAALQKLGYQVVVEPGAGEPAGFTDGAYAGAGAELRDPLAADVVIGVNPPTLPQRDRLQPGATLIAMLNPRLDDGIVADLAQRPITALSMDAVPRISRAQSMDVLSSMANVAGYRAVVEAAHEFGRMFTGQVTAAGKIPPARVFVVGAGVAGLAAIGAASAMGAIVRAFDVRPEVAEQVASMGAEFVEIDFEAEVSADGYAKEMTAEQEIATAAMYDEEARAADIVITTALIPGRPAPKLITEETIAAMRNGSVIVDMAAANGGNAALTKTDERIVTDNGVRILGYTDLAGRLAAQASQLYGTNIVNLLKLLTPDKDGELVLDFDDVVQRGITVVRDGKSTWPPPPVQVSAAPRTPAAATVPAAEPKEPMSPGKRLGVVAAAATVLFLLIGVAPAQLQLNLTVFALAIVIGYYVIGHVHHALHTPLMSVTNAISGIIVVGALLQIGKGDTAITVISFVAVLLACINIFGGFAVTRRMLAMFSRS

SEQ ID NO: 5020 - protein, 405 aa, Rhodococcus sp. RHA1
MPEAVIVSIARSPIGRAMKGSLKGMRPDDLAAQMVQAALDKVPALDPTDVNDLLLGCGLPGGEQGFNMGRNVAVQLGYDFIPGTTITRYCSSSLQTTRMALHAIKAGEGDVFISAGVETVSRFIAGSSDSLPDTQNPLYADAQTRTEKLAQGGQTWVDPREEGLVPDTYIAMGQTAENVAQITGITREEQDRWAVRSQNRAEEAIKNGFFAREITPVTLPDGTVVTKDDGPRAGTTYEAVSQLKPVFRPDGTVTAGNACPLNDGAAALVIMSDIKAKELGLTPLARIVSTGVSGLSPEIMGLGPIEATKRALAIAGMGISDIDLFEINEAFAVQVIGSARELNIDEDKLNVSGGAIALGHPFGMTGARITATLLNNLTTHDKQFGIETMCVGGGQGMAMVLERLS

SEQ ID NO: 5021 - protein, 438 aa, Rhodococcus sp. RHA1
MTTPNPALRESATFDRGVISEIQRAAETGIYDIRGWGAKRKLPHFDDLLFLGASMSRYPLEGYREKCDTDVVLGDRNAKFPLHLDIPITIAGMSFGALSGQAKEALGRGASEVGTSTTTGDGGMTPEERGQSKNLVYQYLPSRYGMNPDDLRKADAIEIVLGQGAKPGGGGMLLGQKITERVAGMRTLPMGVDQRSACRHPDWTGPDDLAIKIIELREITNWEKPIYIKVGATRTYYDVKLAVKAGADVVVVDGMQGGTAATQDVFIEHVGIPTLAAIPQAVQALQELGVHRKVQLIVSGGIRSGADVAKAMALGADAVAIGTAALIALGDNSPRYAKQYEELGSAAGFYDDFQAGKDPAGITTQDPELSKNLDPVEGGRRLANYLRVLTMEAQTLARACGKSHLRNLEPEDLVALTVEASAMARVPLAGTTWIPGTL

SEQ ID NO: 5022 - protein, 450 aa, Rhodococcus sp. RHA1
MNEAVAAADTAWILAAFTAVSLMVPGLAMFYGGMVSVRNTLNMAMMTFGAFAVVGVLWIVFGYSAVLGNSLGGLGVLGDPLEYFGSSSLLEAPAEPGLPPALVSGFQLLFAGITVALISGALADRMKFGAWMVFAGLWATFVYFPVAHWVFAFDSEDGSVIGGWIANTLGAVDFAGGTAVHINAGVAALAVVLVLGARKTFPVSPRPHSLPLTMLGAGILFFGWFGFNGGSALSAGNSASVVILNTVAASCAGICAWLVVEKLREGHATSLGAASGLIAALVAITPACGAVSPLGALVVGGAAGAVCCFAVSWKYRLGYDDALDVVGVHLVGGILGTVLIGFLADPAAPSGAAGLFYGGGVDVLWRQCVAVAAVLAYSFVVTLVIVLALKKFMGIRADQDSEYDGLDVSVHGETAYVLDAVGLTGASKHGADAVLGAEAITTRAADPAKA

SEQ ID NO: 5023 - protein, 516 aa, Rhodococcus sp. RHA1
MNLVSASLFAALVAVTLMITAWASKRNKSAADHYVAGGSLTGRQNGVAIAGDFISAASFLGVTGAIALTGFNGFYLAVFVPVAFVLAMLLIAEPLRNLGRFTLADVLATRFPGKDVRSMMAISTVVISVVYLVSQLVGAALLVSLLFDLDYAVAVLIIGTLTTAYTLVGGMLATSWIQIIKTGLLMVCAVVLFVLVLVRFDFNPFGPFSTALAEFGQSFVAPQRTSGAASFDQLSQTVGLVLGVLGLPHVMIRFLTVPDAKQARTSAYTAIWIFFAFYLLVPVLGYGAAKLVGVEVIKSENRGGNLAVAQLAETVGGGVLLAFVAAVAFVTILAALSGLVIATSGAIAHDLYGQVIRNGSVSAKAQHRAARVATVATCVIGVAIAFAAQKQNVAFLASLGMSIAACANLPALLLTMYWKRMTARAVISGIVVGLVLSVTVILLSPVVQGPDSILGFSNPALAVAPLSLAVSIIVALVSAPSGETKARADRLFSVMRTRALTGQTETTDDDTMVAMQ

SEQ ID NO: 5024 - protein, 365 aa, Rhodococcus sp. RHA1
MTTAVSPKPGAALRNRAFHTLTVADVESLCDDAVAVTFDVPAELADEFAFGPGQSLTLRRTIDGVEHRRSYSICAPSGSAPRVGVREVSDGLFSTWLVRDVRPGDRIEVQGPSGTFVADPAAGGRHVLIAAGSGITPMLSIAASMLANPEAEVVLLYGNRRTRSVMFAEEIADLKDTYGSRFDIIHVLSREPREVELFTGRLDADRLRAIFDAVVPVADIDHFWLCGPYGMVTDAETVLGDLQIDKSRVHHELFFVDDVPPPMETHREPGVTGPSSEVTLVLDGRSTTATLPRDESILDAAEKYRSDLPFACKGGVCGTCRAKITCGDVDMRRNYALEDYEVDSGFVLTCQTFPVSDNVTVDFDA

SEQ ID NO: 5025 - protein, 406 aa, Rhodococcus sp. RHA1
MAEVFLVDGARTPQGRYGGALAGVRPDDLAGLVVAEAARRAGIPGDAVDEVILGAANQAGEDNRDVARMAVLLAGLPDSVPGYTVNRLCASGLTAVASAAHTIRSGEADIVIAGGVESMTRAPWVMAKPGTPWARPGEVADTSLGWRFTNPRFTAADRDVPAGAGPDVRKVTLSMGETAEEVAALEGVTRAESDAFALRSQERAIAAVDAGRFEREIVPVPVRDGELAADETPRRGTTLEKLGSLKPVFRTGGIVTAGSSSSLSDGAAALVVASEAAVEKYGLTVRGRIVTSASAGIAPNVMGLGPVPATRKALARANWSISDLGAAELNEAFAAQSLGVIRQLKLDESIVNADGGAIALGHPLGCSGARILLTLLGRMEREGARRGLATLCVGVGQGVAMLIEAP

SEQ ID NO: 5026 - protein, 203 aa, Rhodococcus sp. RHA1
MSHAISTGRGLDEAARALLYTEARTANSFAPTPVSDEELAQIWELARWAPTAANTQPLRVLFVRTDEGRARLVEHMNEGNRAKTASAPAVAVLAVDPRFHDHIPALLPFRPELRDVFEANEPMRKQTGDFNAALQAGYFILAVRSLGLAAGPMAGFDADGIDKEFFPDGQWHSTLVVNIGHPGENPWFDRLPRLDPEESVSWA

SEQ ID NO: 5027 - protein, 316 aa, Rhodococcus sp. RHA1
MRMVITDHNFAGEDFERAAAKELDADFATFAATTETEAIEAVRGADVALVNFAPMTAAALAAMNPNGVVVRYGIGFDNVDLDAATRLGVRVCNVPDYGADTVADHAVTLTLMLLRKVAQFDRALAAGGWPSATELAPIRSTSETTVGLLGTGRIALAVAKRLQPFGFDLIAHDPYANPDVAADHGITLVDLDELFRRSHALSLHAPATADTRGIVNADNLAKMPFGSFLVNTSRGALVEQDAVLDALDSGALAGVGLDVFHPEPLAPDHRLRAHPNAVLTPHAAFYSEQSLRDLQRLAAEEASRAIRGEPLRCPLN

SEQ ID NO: 5028 - protein, 398 aa, Rhodococcus sp. RHA1
MRRAALVAPVRTAVGRFGGALRDVPAETLAATVIKETVARSGIDPILIEDVVMGQSYANSEAPCIGRWAALEAGLPIRVAGLQTDRRCGTGLQALVTASMMVQTGAADVVLAGGVESMSNIEHYTTGARWGTRAGSLNLYDRLDRGRERSQPEWRFGKISGMIETAENVATRCGIGREESDAFAAESHAKAHAAWEAGKFDDEVIEVKITDRKGNVTVVARDEGIRPETTPETLARLRSALKDGVVTAGNASQQNDAASSMLVVAEDQLDELGLEPMGFLTGWSAAGCEPALMGLGPVAATSKLFSRTGASFDDFTLIELNEAFACQVLGVLKEWGFEDRDRLNVNGSGISLGHPIGATGARMTTTALHELRRRGGGKALLTMCIGGGQGMAAIVEGA

SEQ ID NO: 5029 - protein, 407 aa, Rhodococcus sp. RHA1
MHDAVICEPVRTPVGGFGGMYRDIPVTTLASTVLKGLIERTSLTSDDIDDVIFGQGYANGEAAAIGRIAALDAGLDVTVPGIQLDRRCGSGLQAVIYAAMQVQTGMSDLVIAGGAESMSQTEFYSTGMRWGVKGASVEFHDRLAKPRTNSGGVNFPVEGGMIETAENLRREYSISREEQDAYAAESHARAIRAKDGGLFDAETIPVTVPGKRGKSDVVVTTDEHPRRDVTAESLSALRPIRSRVDPEATVTAGNACGQNDAAAAAIVTTPENAERLGLRPFARLVSWGVAGVEPNRMGIGPVPAVDKALTRAKLTLNDIDLLEINEAFAAQVLACAREWKFDESDMRDRFNVNGSGISLGHPVGATGGRILANLLRELDRRQARYGIETMCIGGGQGIAAVFENVNI

SEQ ID NO: 5030 - protein, 402 aa, Rhodococcus sp. RHA1
MSTFVPAARVDQMRESPSVAAAQRVRELRASGREILDLTVGEPDFDTPDHIKAAAVAAMESGLTKYTPVNGIPALRDAISKRMLDRTGVEFTDNEITVGGGAKQVIFLALMATVEEGTEVIVPAPYWVSYPDMVTVHGGTPVVVDCQESDRFLLTADTLAAAITPSTKWVILNAPSNPTGAVYSERELAELAAVLDRNPHVNVLCDEIYDEIVFTDSPVPNLLSAAPHLRDRILVTNGVSKAYAMTGWRLGYGVGNKGLIAAINKLQSQSSSCPSSISQAAAAEALTGDQSFVATSVASYRARRDLIFELSSRIEGLEPVLPQGAFYLFVGCAGLVGKRTPDGTLLENDQDVVLFLLDHASVATIQGSAYGAESYFRVSFATSEDVLRNAAAAVEKAVASLS

SEQ ID NO: 5031 - protein, 393 aa, Rhodococcus sp. RHA1
MPTSVIVAGARTPIGRLQGSLAGFSGADLGGIAIEAALGKAGVAPDRVQYAIMGQVLTAGAGQMPARQAAAKAGIPMSTPSLNINKVCLSGVESIILADQFIRSGAFDVIVAGGMESMSQAPHLLPGSRGGFKYGDVTLVDHMALDGLHDAFTDQPMGLLTEAGNDRDVIAREDQDAFAARSHQLAAKAWDNGIFDDEVVPVEIPARRGESTWLRRDEGIRPDTTAETLARLRGAFRDGGTVTAGNASTINDGACAVVVMSKERAEAEGLTWLAEIGEHGMVAGPDSGLQFQPSGAIAKACDAAGIAPAELDLIEINEAFAAVGIASTRELGVDPDRVNVNGGAIALGHPIGMSGARITLHLALELQRRGGGIGAVALCGGGGQGDALILRVP

SEQ ID NO: 5032 - protein, 404 aa, Rhodococcus sp. RHA1
MPEAVIVSIARSPIGRAMKGSLKGMRPDDLAAQMVQAALDKVPALDPTDINDLILGCGLPGGEQGFNMGRNVAVQLGYDFIPGTTITRYCSSSLQTTRMALHAIKAGEGDVFISAGVETVSRFTAGNSDSLPDTQNPLYADAQTRTEKLAQGGQTWVDPRQEGLVPDTYIAMGQTAENVAQITGITREEQDRWAVRSQNRAEEAIGAGFFEREITPVTLPDGTVVTKDDGPRAGTTYEAVSQLKPVFRPDGTVTAGNACPLNDGAAALVIMSDTKAKELGLTPLARIVSTGVSGLSPEIMGLGPIEASKRALAIAGLGISDIDLVEINEAFAVQVIGSARELGIDEDKLNVSGGAIALGHPFGMTGARITATLLNNLTTHDKQFGLETMCVGGGQGMAMVLERL

SEQ ID NO: 5033 - protein, 345 aa, Rhodococcus sp. RHA1
MSTDDIQGPIDATRIQGPVDATRTPRYAEPSTFARLPRLDEVSRADVTVMGVPFDSGVSYRPGARFGPGHIRAASKLLRPYNPALDVHPFAAQQVADFGDIGVNPFDIQEALATVDGAVTDLRKDGSTVLTLGGDHTIALPILRSLARDHGPIAVLHFDAHLDTWDTYFGAPYTHGTPFRRASEEGLIDLERSQHIGIRGPLYSKKDLEDDAVLGFQVIRSDDYEVDGVASIVERMRRRLDGGPVYVSVDIDVLDPAHAPGTGTPEAGGMTSRELLNTLRGLVGLNVVGADIVEVAPAYDHAEITGIAAAHVAYELLSVLAINASSAPGRAARGETLRQAAYVTK

SEQ ID NO: 5034 - protein, 562 aa, Rhodococcus sp. RHA1
MTIPVTPDSTAADTDPRPLTMFGPDFPFAYDDYVTHRSGLGAVPTDRHGTEVAVIGGGLSGMVTAYELMKLGLKPIVYEADQIGGRMRSHPFDGHPDVVAEMGAMRFPPSSTTLFHYLDAMGLRTEAFPNPLADSTPSTVIDLKGESYYAQHLDDLPPVFREVSDAWQRTLEDHAELIPLQQAIRDRDTAELKRIWNDLVVRLDDQTFYGFLASSKHFASFRHREVFGQVGFGTGGWDTDFPNSILEILRVVITAADDHHRGIVGGSQQLPLRLWTDTPTGMAHWPDGTSVRALNGGATRPRVTEVRRTAPHQVTVTDSSGEIRTYPAAVFTAQSWMLLNNIHCDDDLFPIDHWTAIERTHYMGSTKVFALVDRPFWKDKDPVTGRDLVSMTLTDRMSRGTYLLDHGDDKPGLICLSYTWSDDSLKLLPLDATERMNLMIKSLEEIYPGVDFRSHIISTPVTLSWETERDFMGAFKANLPGHYRYQERLFSHFVQDELHPRHRGIFLAGDDISWTAGWAEGAVQTALNAVWGVMHHLGGAAPADNPGPGDRYAELGPIRLCD

SEQ ID NO: 5035 - protein, 342 aa, Rhodococcus sp. RHA1
MAPGVTAVPPTDAARLNDSSLIDHWIATLRGENRIVGLADGEDERAIRAAHHLHHKCVVSPRLFGRRDVIRRIAEAAGIPLAEELVVDLAEAAADPAIRDAVESGFARYPDRIESALSDPVCLAAAALRAGVVDACVAGASRPTSDVLRAGLRIVGLAPGSSILSSSFLMLLSDGRQLTFSDCAVVPDPTVEELVDIALAASATHFQLTEQTPIAAMLSFSTQGSASHPRVEKVREAAELVRVRDPQLHVDGDLQFDAALVAEIGASKAPGSRVAGRANVLVFPNLDAGNIGYKIAQRLGGAIALGPILQGLAAPWNDLSRGCTGSDIELMALVSAVQSLAT

SEQ ID NO: 5036 - protein, 373 aa, Rhodococcus sp. RHA1
MRIGIPKEVKNHEYRVAATPAGVHEMVAHGHDVFVERGAGEGSSIGDDAYGAAGAKILDSADAVWQSAELLLKVKEPIAEEYHRMRSDLTLFTYLHLAAGEECTRALLAAGTNSVAYETVQLPDGSLPLLFPMSEVAGRLAPLVGAQALMRPEGGRGVLIGGVSGVSPARVVVIGAGVSGMNAVAVAAGTWADVVLFDKNVDKLRAADRMYQGRIRTLAANAYSIEQEVMQADLVIGAVLVPGAKAPKIISNSLVSRMKPGSVLVDIAIDQGGCFEDSRPTTHAEPTFKVHDSVFYCVANMPGAVPHTSTYALTNVTLPYTLQIAEKGLARAARENAALRAGVSTVAGRLTNDAVGAALGIESVSVDDALNLV

SEQ ID NO: 5037 - protein, 602 aa, Rhodococcus sp. RHA1
MSKKKNGADRTAVSGVQKMTPSEAFVETMVANGVTDMFGIMGSAFMDAMDIFAPAGIRLVPVVHEQGAGHMADGYARVSGRHGMVIGQNGPGISNCVTAIAAAFWAHSPVVIVTPEAGTMGTGLGGFQEANQLPMFQEFTKYQGHVNNPKRMAEFTGRCFDRAMSEMGPTQLNIPRDYFYGEIETEIPQPTRLDRGPGGETSLNEAAELLAQAEFPVIVSGGGVVMADGVEECKALAERLGAPVVNSYLHNDSFPASHPLWTGPLGYQGSKAAMKLISQADVVLALGTRLGPFGTLPQHGMDYWPKNAKIIQIDADHKMLGLVKKISVGICGDAKAAAVALTERLEGKSLVCDANRAARGEKIDAEKAAWEKELDEWTHERDAFSLDMIAEQEGEDGNWLHPRQVLRELENAMPDDVMVSTDIGNINSVANSYLRFEKPRSFLAPMSFGNCGYALPTIIGAKAAAPERPAIAYAGDGAWGMSLGEIMTAVRHDIPVTAVVFHNRQWGAEKKNQVDFYNRRFVAGELESESFAGIAQAMGAEGIVVDKLEEVGPALQRAVAAQMNEGKTTVIEIMCTRELGDPFRRDALSKPVRLLDKYKDYV

SEQ ID NO: 5038 - protein, 336 aa, Rhodococcus sp. RHA1
MTRVIRPRRRTRPRALLLSAAVVAVLAAGCATPQPLTPTVSGDYSEVPLTSGAEILLPTGDVPEEPPAPDSCGALASLRPAATPDVRAPGSSLAEITARGRLIVGIDQNTNLFSFRDPTTGMLMGFDVDVAGEMARDLFGDPSRVEFRLLTSGDRFDALQNEDVDLVVKSTSITCERSERVAFSTVYFQAYQRLLVPKGSGISGPADLAGKRVCTAGDTTSLDTVRRVQPEATIVAVPDWDDCLVVLQQRQADAASTDDSILAGLAAQDPNLEIVGPPLESEPYGIGVNKNHDDLVRFVNGTLDRMRADGTWTRLYDNWLTVLGPSAGPPAPTYRD

SEQ ID NO: 5039 - protein, 370 aa, Rhodococcus sp. RHA1
MLDFIYYPVSGILWVWHKVFGAIPFLGPDSGITWALSVVFLVFTLRAVLYKPFVKQVRTTRQMQELQPQIKALQKKYSGDRQRQAVEMQKLQKEHGFNPIMGCLPVLAQAPVFIGLFHVLRSFNRTGTGIGQLGMSVEANANTPNYFFSVEDVQSFLSARLFGAPISAWITMPKAQLDAFAAYGPIPTVLNIAVVAVPLMIIASIATHFNSRASVARQSPEAAANPQSAIMNKLALWIFPLGVLVGGPFLPIAILLYWVSNNIWTYGQQHIVFRRIDQEEEEKKQAAIARRADNAPKPGARPDLTKKKKKSATATDGSSSADEPEIVEGIVEDSASDQVSGDGSAAGTSKPKPGARPQSNRGKSPKRKRR

SEQ ID NO: 5040 - protein, 342 aa, Rhodococcus sp. RHA1
MVVTHSAAVLGGGIGGLAVARYLSRAGWHVDVYERADTLPTSGTALGMWPQALDALDAIGAGDRVRTLGSPQHRGSLLRPDGSVIGTIDNRNRTAYLLSRPALLATLAEALPDGMISFGTPAPALDALTDHDVVIGADGLRSPTRRQLFGEKFEPRYVGATAWRGWVPGHRDTVSETWDTDALFGITPRDGDLVNWFACVRTDAGHPGGLDYLRSRFGNWHADVRAVLDAATPDAMLHHDLYESPALPSYVAGNAALLGDAAHAMAPNLGRGACEALVDAVALGRFLTADTDIHTALRRYDRTRRPATRRLVRGSRAMSSVAMTGRLRPLRDLSVKLAAGLA

SEQ ID NO: 5041 - protein, 1542 aa, Rhodococcus sp. RHA1
MKQLPGPQGLYHPSNEHDSCGVAFVVDMKGRRSRDIVEKAITALVNLEHRGAAGSEPNTGDGAGILLQVPDKFFRAVVDFPLPAEGTYATGIAFLPQSKADAQRAADAVEKIVESEGLKVLGWREVATDDSSLGALARDAMPTFRQIFIGSENDALTGLDLERRAYVVRKRTEHELGSEGAGKDGPGRETVYFPSLSSQTFVYKGMLTTPQLKGFYLDLQDERLESALGLVHSRFSTNTFPSWPLAHPFRRVAHNGEINTVTGNENWMRAREALIDSDIFGGSGEVGPGKDRRSQLEKIFPVCTNGASDTARFDEVLEMLHLGGRSLPHAVLMMIPEAWERHESMDPARRAFYQYHSSLMEPWDGPASVCFTDGTVIGAVLDRNGLRPSRLWVTDDGLVVMASEVGVLPIDPATVVKKIRLQPGRMFLVDTAEGRIISDDEIKSELAAEHPYQEWLDQGLTHMDDLPDRPYTYMSHERVVLRQLMFGYTNEEVNLLVKPMALSGAEALGSMGTDTPIAVLSSRSRMLFDYFSQLFAQVTNPPLDAIREEVVTSLGGTIGPEHDLLHPTAESCRQIFLPQPILHNDDLSKLIHVNDDGEFPNFRSVIVRGLYPVAEGGAGLRKALDDVRYQVSEAIAGGARLVVLSDRESNETYAPIPSLLLTSAVHHHLVREKTRTKVGLIVEAGDAREVHHMALLIGFGAAAVNPYMAFETVDEAVQNNELQGVSLDKAIQNYIKAAGKGVLKVMSKMGISTLASYTGAQLFQVIGLSQELVDEYFTGLQSSLGGIGLDQIAADVAVRHSNAYLDRPEERAHRELEVGGEYQWRREGEYHLFNPDTVFKLQHSTRTGQYEVFKEYTKLVDDQSERLAALRGLFEFKKGVREPVPLDEVEPATEIVKRFSTGAMSYGSISAEAHETLAIAMNRLGGRSNSGEGGESPARFTPDENGDWRRSAIKQVASGRFGVTSHYLTNCTDIQIKMAQGAKPGEGGQLPAHKVYPWVAEVRHSTPGVGLISPPPHHDIYSIEDLAQLIHDLKNANPQARIHVKLVSEVGVGTVAAGVSKAHADVVLISGHDGGTGATPLTSMKHAGAPWELGLAETQQTLLLNGLRDRIVVQVDGQLKTGRDVMVAALLGGEEFGFATAPLVVSGCIMMRVCHLDTCPVGVATQNPVLRKRFSGKPEFVENFFLFIAEEVRELLAELGFRTLDEAVGQVDVLDTTKALEHWKGSKAGNLDLSPILHETESAFMDQDLYCTGTQDHGLDKALDQQLIVQSRNALDKGQKVTFESPITNVNRTVGTMLGHEVTKAYGGEGLPDNTIDITFTGSAGNSFGAFVPKGMTLRLHGDANDFVGKGLSGGRLVVRPPLETAPGFIAEDNIIGGNVILFGATSGEALLRGVVGERFAVRNSGATAVVEGVGDHGCEYMTGGKVVILGATGRNFGAGMSGGVAYVYNPDKVFEDNLNTELVDLEDLTGDDFTWLKSAIERHRDETGSEVAARILSDWSQQVNHFAKVMPRDYKKVLLAIEAAKKDGKNVDEAVMEAARG

SEQ ID NO: 5042 - protein, 571 aa, Rhodococcus sp. RHA1
MSWTGSLAQLPGIATARAYRREWLRPDITAGLVLTALLIPAGMGYAEAAGLPAYAGLYATIIPLLAYALVGPSKILVLGPDSSLAPLIAAAVLPLAVAGDPESALALAGVLGVLVGLILLVGGFLHLGFVTELLSKPIRLGYLNAIALIVVVGQLPKLLGFSVDASGLIGEIGEIGQSVIQGNIDPVAAAMGIGSLAVIVGFRIWLPRIPGVLVAVVGAIILSAALGLTDDIGMVGALPAGLPLPSFGGVDWGDVGNLVGPAAGIALIAFADTGVLSRTFAARHGEDVNGSTEMKAVGVANIAGGLFGGFPVSASGSRTPVAEQSGARTQLACVVGALAVLVFVLVAPGVTTYLPDATLGAVVIVAATALVDVGGMVRMWRMSTVEFGLAVAAFLGVALVGVLQGILVAIGLSFVAVVAQAWQPYRTELVRTPDRPGFHDVQRHPGGLRIPGLVLVRFDAPLFFANGEIFDEYVRSVVAAAPTPVEWVVVASEPITGLDTTAVDELVDLDTYLEGKEIRLVFAEMKGPIKDRLIRFGVGDRFDSSHFYPTIESAVTAFHSRADHTGDPSGG

SEQ ID NO: 5043 - protein, 341 aa, Rhodococcus sp. RHA1
MTQVRLSRPAARPCARRLAGLLAVAVAVLAGCAAPDPLTPTVAATYTARPMTDGAQIIPPTNSPPPEPPLPESCGALASLRPGPQPPPGQMPPGGSLAAIAARGRLIVGVDQNTNLFSFRDPTTGTLQGFDVDLAKEVARDIFGDPTRVEFRLLTSAGRFSALENNEVDVVVHATSITCERARRVGFSTEYFRAFQRILVPQGSDITGPADLAGKRVCTFVDTTSLATVQRVAPDATILAVPDWDDCLVTMQKKQADAVSTSDSLLAGLASQDRNFRIVGPQLEAEHWGIGVNKGRDDLVRFVNGTLERIRADGTWMRLYDRWLAAPLGPIAGPPPATYRD

SEQ ID NO: 5044 - protein, 399 aa, Rhodococcus sp. RHA1
MTSPARSVIVAGARTPVGRLTGSLASLSGSDLGGIAIKGALDKAGVAPELVEYVIMGQVLTAGAGQIPARQAAVNAGIPMSVPALTVNKVCLSGLDAIALADQLIRAGEFDVVVAGGQESMSQAPHLLPNSRSGFKYGDTTLVDHLAYDGLYDIFTEQAMGALTEDRNANTDKIGREEQDAFAAASHQRAAAAWKNGLFDDEVVPVTIPQRRGEPLVVTEDEGVRADTTAASLSKLRPAFSKNGTVTAGSASQISDGAAAVVVMSKAKAEELGLEWLAEIGAHGVVAGPDSTLQQQPANAIDKACTREGLDPSALDLVEINEAFAAVGIESTRQLGVDPSKVNVNGGAIAIGHPLGMSGARVVLHLALELKRRGGGTGAAALCGGGGQGDALILHVPGE

SEQ ID NO: 5045 - protein, 334 aa, Rhodococcus sp. RHA1
MVTTESSVKEAAVQTVSGGRVLKVGPLKPSLTATLSEKYDALDLPLGEDRTGFLAEHGESVTAVVTSGRTGVDAALMTDLPNLGAIVHFGVGYDTTDVVLAEELGIGVSNTPDVLTDCVADTAVGLLIDTLRGFSAADRFVRDGRWPAEGNFPLTRKVSGTRVGIVGLGRIGSAIATRLTGFGCTISYHNRREVPGSPFSYVGSAAALAAGVDVLIVAAAGGKGTEKLVDRTVLEALGPDGYLINVARGSVVDEDALVELLTGRKLAGAGLDVFAREPHVPEALLALDTVVLLPHVASGTTETRAAMEALTLQNLDEYLAQGTLTTPVLEPRSR

SEQ ID NO: 5046 - protein, 397 aa, Rhodococcus sp. RHA1
MTNAVIVDVVRLASGKGKPGGALSGTHPVELLAHVLRTIVERNGIDPAQVDDVIGGCVGQAGEQALNISRTAVLSAGFPDSVPATTVDRQCGSSQQAAHFAAQGVIAGAYDIVIACGVESMSRVPMGTTTIGQDASGPGIAARYPEGLVNQGISAELIAAKWKFDRDTLDAFSAQSHQRAADALSKGLFDKEIVPISVTDAAGETVTHTTDETVRASTTAEGLSGLKSSFYSEKYAARFPEAQWHITPGNSSPLTDGASAALIMSEEMASKLGLTPRARFHSFAVAGDDPVFMLTAPIPATKKILAKSGLSIGDIDAYEVNEAFAPVPLAWAHEFGADPAKLNPWGGAIALGHALGSSGTRLLSTLVNNLEATGGRYGLQTMCEGAGMANATIIERI

SEQ ID NO: 5047 - protein, 319 aa, Rhodococcus sp. RHA1
MTTDADTVSMMVRQMRVESSGVVSLRLERQDGGAVDRWTPGAHLDLHLNRGTIRQYSLCGDPDDKTGYRVAILHEVTGRGGSRHVHETLRPGDSLSVSAPRNNFELLPSPRYVFVAGGIGITPILAMIGEAERMGAEWELHYGGRARASMAFLDELSAYGDRVHVVTEETDGVLDLAGILGTARVETLVYACGPEGLLGAVEGYTDSWPDGAIRLERFKAKEIPADTLAGDRPVRVICERSGISATVAPDRTILDTLEESGVDVPNSCREGICGTCETRVLAGTPDHRDSLLSSSEQESGTTIMICVSRARSDELVLDL

SEQ ID NO: 5048 - protein, 656 aa, Rhodococcus sp. RHA1
MALRNGKKVDAIDVDPGDVTLQARNVKFDWSRTPLHWIPGEPIASHTLSAINLILPEGERWFCATFTEALPLINDDRLRADVRGFIGQEAMHAETHNVVLYEFLDAHDVDPRPFVLQSEFLMRKVLGRREMGSARAQRQQLVERLAFIGAIEHMTAFLGDWILNARLEDFDADPSMTDLYRWHGAEEVEHRSRSRRRHALRGGVLPPQPRDAGVVSRVSRGDDARAEVHRARRPDHARPRLLLAVDRAVRGDAPGFPARAVEPVPGCAPIPEPPVLAAGRGRHGAGDRLPGQVACREGGGVVTPTYPAPTSVPGDLWGKRQRDPLLRAVAGVTTAYMRSLRFLYRTDLTPPVSDGSRRMLVCERRVVAHDENVVSLTLAAPNGGELDRWRPGAHLDLELPSGRRRQYSLCGDPADSRAYTIAVRRLPDGGGGSLEVHDTLHPGASVKVRGPYNAFPLALPGHGSTADGLHFVAGGIGITPILPMVRLAHRLDLDWSMAYTGRNRESLPFLDQLAEFGDRVSVRTDDDGGIPTAAELLGAVTDTSAVYCCGPIPMIEAIDDALPPGAEFHYERFSPPPIVDGRPFEAELARTGEVVVVPADRTALDAISDVRPGLAFSCRQGFCGTCAVRVEHEGRTSGQMLLCVERTQGERVVLDI

SEQ ID NO: 5049 - protein, 564 aa, Rhodococcus sp. RHA1
MVSSATGTWPVFGSLQEYRKGWVRPDVIAGLTVWAVLVPEALAYATIAGVPPVVGLYAAIPALVLYAAAGSSRHLVVGPMSATAALSAAIVAPLAGADGGKYAALTAVLAIATGIAGLLAGLLRMGFIAAFISEPVLKGFIVGLALTIIAGQVPALLGVEKEHGNFFEQAWGVITQLGDVDWGTFVVGVLSLVVVLGFTRWLPLVPGSLLAVLLGIAAVAVFGLDGRGVDIVGHIDSGLPSVGLPGGVGFDDYVDLLGPAVGVLLIGFAEGLGAAKTYAAKEGYEVDPNRELLGLGVANLGSGLCSGMVVNGSLSKTAVNGGAGAKSQVSGLLVAVLTVVTLLFLTGLFEKLPEATLAAVVIAAVIELVDISALRRLYGVWTERLGSIYGYAARADFAAALAAMVGVLVFDTLPGLVIGIGVSMLLLLYRSSRPHVAALAKEGSLWVDAERHPDLPTTPHVVVVRVEAGLFFANADHVKDRIEDLCTDDTRVVVIDAETSPFVDVSAAQMLVQLRDVLARSGIELRVARDIGQFRDTIRTSGSDATPVGLYPTVREALAEPDPQ

SEQ ID NO: 5050 - protein, 421 aa, Rhodococcus sp. RHA1
MALVVQKYGGSSVATAERIRRVAERIVETKKAGNDVVVVVSAMGDTTDELLDLAQQVCPAPPAREMDMLLTSGERISNSLVAMAIHSLGAEARSFTGSQAGVITTGAHGNAKIIDVTPGRVRDALDEGSIVLVAGFQGVSQDSKDVTTLGRGGSDTTAVALAAALEADVCEIYTDVDGIFTADPRIVPDAQRLETVSFEEMLELAACGAKVLMLRCVEYARRYNVPVHVRSSYTTKPGTIVSGSMEDIPVEEAIITGVAHDRGESKITVVGLPDTPGYAAQVFRAVAEAEINIDMVLQNISKVETGKTDITFTLPTADGPRAVEKLTKLQGDIGFTQVLFDDHIGKVSLVGAGMKSHPGVTATFCEALAKAGVNIDLISTSEIRISVLVKDVELDKAVKAIHDAFGLGGDEEAVVHAGTGR

SEQ ID NO: 5051 - protein, 243 aa, Rhodococcus sp. RHA1
MQQIAHNMHTDEQYSQGAHVDDVLARAGIFQGVEPSAVAALTKQLQPVDFPRGHVIFNEGEPGDRLYIIVSGKVKIGRRSPDGRENLLTIMGPSDMFGELSIFDPGPRTSTATTVTEVRAVSMDREALKAWIDHRPEIAEQLLRVLARRLRRTNNNLADLIFTDVPGRVAKALLQLAQRFGTQEAGSLRVTHDLTQEEIAQLVGASRETVNKALADFAHRGWLRLEGKSVLISDSERLARRAR

SEQ ID NO: 5052 - protein, 253 aa, Rhodococcus sp. RHA1
MTNSVDGVAVPPWLRRVVHRTPADPHKINPVLDRRAPRGATTREAAVLVLFGGPVEADPLMSGGLPADADILLTQRASTMRQHSGQVAFPGGASDPGDEGPIATALREAQEETGLDPSGVRPLAVLEEIFIPPSGFDVTPVLAYWEKPSEVGVVDPAEAERVARVPVHTLIDPRNRFQVRHPAGYQGPAFAVDGMLVWGFTAGILAALFAVSGWEQEWDRHDIRDLDTVLAELDNDLDDDHLTHGHGRPAAER

SEQ ID NO: 5053 - protein, 67 aa, Rhodococcus sp. RHA1
MAQGTVKWFNAEKGFGFIAPEDGSADVFVHYSEIQGSGFRTLEENQRVEFEVGQGTKGPQATGVRAV

SEQ ID NO: 5054 - protein, 148 aa, Rhodococcus sp. RHA1
MFRTMMKSKIHRATVTHADLHYVGSVTVDQDLMDAADLLEGEQVCIVDIDNGARLETYVIAGERGSGVIGINGAAAHLVKPGDLVILIAYGVMNEQEVRDYEPRVVFVDAANSPIELGADPAHAPEGSGLITPRMLSTLDAERESSLV

SEQ ID NO: 5055 - protein, 365 aa, Rhodococcus sp. RHA1
MKIGIPREIKNHEYRVAISPAGVHELNERGHEVVIESGAGIGSSFADEDFKAAGAQILQAADQVWDTADLLLKVKEPIAEEYARLRQDQVLFTYLHLAASKECTDALLASKTTSIAYETVVGADGSLPLLAPMSEVAGRLAPQAGAYHLMRHGGGRGVLMGGVPGVRPAKVVVIGAGVSGKNAIAIAYGMQADVTVLDLSIARLREIDALYHGQVKTIASNSLELEQAVQGADLVIGAVLVPGAKAPTLVSNNLVSRMKPGSVLVDIAIDQGGCFEDSRPTTHAEPTYQVHDSVFYCVANMPGAVPRTSTYALTNATLPYVVALADKGWKEATATVPGLAAGLSTHDGQLLSAEVAAAHGYTAVS

SEQ ID NO: 5056 - protein, 595 aa, Rhodococcus sp. RHA1
MAKLTGGQVVAQVLKQYGVEYVTGIPGHGIWSLTDAFLEKGSEIPFIQVYHEQSATHLADGYYRVSGKPMAAVASIGAGAANTVLGLATAYSDSTSLLCITGGPPTHMRGRGLLQELERHTDNGFPQVTDAVSKRSWVATRVEELPFIMHRAFSTMLTGRPGPAHIEVPMDVQAEAADVSLHDLARRLPVGLQQPDPLAIDKAVDVLRDSRRPVIVVGGGAITSDSADEVLALAETWQIPVVTTWNGKGAFPEDHALFAGSVGQTGTIVGNAVASRADVVISIGCRFTDWSSSSYAQGVTFSIPPAKLIHIDIDPHEIGKNYPAEVGIVADAKPTVAAIVASLPRSSADRSVYLAELEQLKTEWETKLAGRRDSDRFPFTSQRPLGGLRSVMERDGIIVAGSGNTQGAVKQTFPVYHPRTHLTSGGFSSMGWAVPAAIGAKLAAPDRQVACVLGDGDFLMTSQEIGVCVQHDIPVVFVVQDNAGFMSIRGGQRKQTSRHIGTEFNRPDGTPYSPDFKALGQSFGLESFRVDDPADLESTYRKAFDSKAPALIEIPTDRDAAGPWVPGWWDFPVPAYIEDERQDEYWATRAKEQHL

SEQ ID NO: 5057 - protein, 382 aa, Rhodococcus sp. RHA1
MTEAYIVDAVRTPIGKKNGGLSGVHPADLGAHVIKALVERTGFDPAGVDDVVFGCVDAIGGQAGNIARTAWLAAGYPEEVPGVTVDRQCGSSQQAVHFGAQAILSGTADLIVAGGVQNMSQIPIASAMVVGQQYGFDTPFGGSTGWTERYGDQEVSQFNGAELIADKWDISREELERWALQSHERARTAIAEGRFDREIVPFGDVTTDEGPRETSLEKMAALKTLTEGGRLTAAVASQISDGASAVLLASPEAVERYGLTPRARIHHLSARGADPIFMLSAPIPATRYALEKTGLSIDDIDLIEINEAFAPVVLAWIKEIGADPAKVNVNGGAIALGHPLGATGTKLMATLLNELERTGGRYGLQTICEGGGTANATIIERL

SEQ ID NO: 5058 - protein, 491 aa, Rhodococcus sp. RHA1
MDITIILIYLGAMLAFGWWGKRRASNSSEYLVAGRRLGGFLYTSTMAAVVIGGASTVGGVGLGYTYGISGMWLVVSIAAGVLLLSLLFAARIQRLKVYTVSGMLKLRYGIDATGASGLVMMAYTLMLTVTSTIAYATIFNVLFGFDRTLSVVLGGLIVVAYSAMGGMWSITLTDVVQFVIKTIGVFVLLLPFTWSKAGGYAGIKERVGEQALGLGTIGTGTIITFFVVYTLGILIGQDIWQRVFTAKSPEVARWGGVTAGIYCLLYGVAGALIGLAASALMPDIGSSDDVYADVAVHVLPVGLSGIVLAAAVAAMMSTASGALIATATVARQDVLPLVAQIFGRTRPELDTSDPEADVRGNRLYVIVIGLVSIVIAALINDIVSALTIAYDILVGGLLVPILGGLVWKRATGTAAMAAMAVGTVATIATMFVVGDVMANEPVYVGLVSALVVFVATSLITEPTPANVMSVWNARVSGKDEEDPVPVPAPIA

SEQ ID NO: 5059 - protein, 67 aa, Rhodococcus sp. RHA1
MAQGVVKWFNSEKGFGFIAPDDGSADVFVHYSEISGSGYKSLEENQRVEFEVGQGQKGPQAQNVRAV

SEQ ID NO: 5060 - protein, 515 aa, Rhodococcus sp. RHA1
MAASSESSASSSRSTSDPVSGQADFVVVANRLPVDLERLPDGTTRWKRSPGGLVTALEPILRRNKGAWVGWAGVADAELDPVVEDDLELYPVPLSAAEIADYYEGFSNATLWPLYHDVIVKPEYNRDWWNAYVEVNRRFAEATSKAAAHGATVWIQDYQLQLVPKMLRMLRPDLTIGFFLHIPFPPVELFMQMPWRTEIIEGLLGADLIGFHLPGGAQNFLYLARKLAGQQTSRGNVGVRSKLGVVQVGFRTVRVGAFPISIDSGQLDEQSRSKSIRDRAKKIRNELGNPKHIMLGVDRLDYTKGIDVRLAALHELLDEQRIDPADTVMVQLATPSRERVDSYVQMRDDIERKVSRINGEYSEVGRPVVHYLHRPIPREELIAFFVAADVMLVTPLRDGMNLVAKEYVACRSDLGGALLLSEFTGAAAELRQAFLCNPHDLDSVKDAMEQALGQPKEDGRRHMRALRRQVLAHDVDRWARSFLDALAHGGAAGPALIAPAEASEADYNEDATGEN

SEQ ID NO: 5061 - protein, 489 aa, Rhodococcus sp. RHA1
MTNSALWITLAGMIGLAVIAVGGRRKRAQNLSEWTVGTRNFGVVTSFFLQAGESFTTFTFLGVAGIAFTAGIGATYAIPYIPLGYVALYFIGPRIWKLSKDRGYITQADFFADRYRSPLLGRLVALCGIIFLLPYLQLQITGLGLIVRLVTGSASSGTLSMIVATVLVVGFVLWAGIHGLARTAYVKDVLILLAVVVLSIVIPLHFAGGIGDVFGQIAQTHSEMLTVNPGDYDKVWWTTSLLISAIGCGFLTTPHLWPPLLAAKNGRVIRSNNTFLPMYQVVMILPIMLGFVGILALNPNTSSNAVLLTLAGGALPNWALGLIAIAAASAAMLPAGAICIGISTLASHNLVKIRSERTKLRFNHLVVIAAATMALVLGLTRPDLLANLLLLTFGGLSQLAPGLALALPEKPLLAKQSVFAGLVVGMLTVIVMTVFELNLANIDAGICGLVLNLAVIAVVEAVVRASRPRTPAPASSEDLPAAAPILETT

SEQ ID NO: 5062 - protein, 331 aa, Rhodococcus sp. RHA1
MSGGRFYVTTPIPEPALTLLRAAGSVDVPDELPDAARLREVCVSGDYDVVVSQLRDTFDADLLAAAKIRGISNYAVGFNNVDIGAATANSILVGNTPGVLTDATADVAMLLIMATARRAVEADTFVRAGRFTGWEPNLLLGQDVSGRTLGLAGFGRIARATAKRALAFGMQVLFCPRPPGDRPVSDEELGEFAGLVTHTDWDTLVTTSDFLSLHVPLNAQTRHLVDAGVLAAMKPSAILINTARGPVVDEAALVAALKSGEIAGAGLDVYEDEPALAPGLAELSNTVLLPHLGSATVSVRAEMARLCAENAVALAQHRIPPHPVNPEAWNS

SEQ ID NO: 5063 - protein, 408 aa, Rhodococcus sp. RHA1
MCNPRRHTDYAAVMPATPRNRTVQRLQPFASTIFAEMTALAVRHHAINLGQGFPDTDGPASMLDTARRAIADGLNQYPPGPGMPVLRQAVAADRLARYGLDHDPDSEVLVTVGATEAISAAILGLVEPGEEVVLIEPYYDSYAASVALAGAVRRSVPLARSGTKFVVDLDALRAAITPKTRMLVINTPHNPTGTVFTPEEIAAVAEVACEHDLLVLSDEVYEHLVFDGRTHTALATLPGMYERTVSVSSAAKTFNVTGWKIGWACGPAELIDAVRTAKQYMSFVGGGPFQPAVAHALSHEQQWVKELRDSLQAKRDVLYDALVASGLEVHSGGGTYYLCADITAIGERDGIDFCRRLPERIGVAAVPVSVFTDHPVPWNPLVRFAFCKQDHVLEEAARRLRTLGEPGS

SEQ ID NO: 5064 - protein, 613 aa, Rhodococcus sp. RHA1
MCGIAGWISFERDLRVEQSTVDAMAETMNCRGPDDRGTWVVERAALGHRRLAIIDLPGGHQPMSVDTPGGTVAMVYSGEVYNFGELHEELYRRGHRFATDSDTEVVLHGYLEWGEAVAERLNGMYAFAIWDSRTDTLVMIRDRMGIKPFYYYETRDGVLFGSEPKAILANPIAESTVTMDGIRELFAFVKTPGHAVWDGMREVEPGTVVTVSRTGLRTHRYWTLQTRPHTDDRDTSVAHVRELLDDIVRRQLVADVPRCTLLSGGLDSSAMTGIAAEQLAEVGETVRTFAVDFVGQTEHFVADELRGTPDTPYVHDVARRSRTAHQDIVLDSDALADPAVRAKVIRARDIPMGLGDMDASLYLLFKAIRQHSTVALSGESADEVFGGYKQFFDPKAQQANTFPWLVQFAEHFGDESNIFTPEVTAGLNMDDYVQDSYDAAVSGIDRLDGESDFEWRMRKICYLHLTRFVRVLLDRKDRASMAVGLEVRVPFCDHRLVEYVYNTPWSLKTFDGKEKSLLRAATRDVLPQSVIDRVKSPYPSTQDPKYAVALQQHGKDLLSDPSHPVFGLVSADWLSRAVSVDTPQISQVSRRGLERTLDLALWMDMYNPTIKLS

SEQ ID NO: 5065 - protein, 299 aa, Rhodococcus sp. RHA1
MTSTVGFVGLGNIGGRVVAHLVKAGHDVAVYDLNTAAVDAAVALGARSVASPGEAARKAEALFLSLPTPAIVEGVVADVLQQGNQGLVIVDHSTIDPDTTRRLAQDAQVAGACFLDAPVSGGVQGAEAGTLAVMLGGDEASVKKVIPLIETYAGNIFHVGPSGSGQAIKLANNQITAANIVALGEGLSSAVAAGVDLDTAVAVLTKSSANSNVLSNYFPKTLFTEERPTGFALDFMHKDLGLFLNAAGKAKLPTPVTSLVRDLFSIGQRDGRGGKDFTSVVEFYEDFTGIRLQTKGNNQ

SEQ ID NO: 5066 - protein, 420 aa, Rhodococcus sp. RHA1
MTLVSNPDHGHHRKPHRKLEQSTKLQNVLYEIRGPVHAHAARLEAEGHRILKLNIGNPAPFGFDAPDVIMRDMIAALPYAQGYSESKGILSARRAIVTRYELVAGFPELDVDDIYLGNGVSELITMTMQALLDNGDEVLIPAPDYPLWTAMTSLAGGTPVHYLCDEGNDWNPDIADIESKITDKTKALLVINPNNPTGAVYSMEVLQQLVDLARKHQLLLLADEIYDKILYDDAKHISLATLAPDLLCLTFNGLSKAYRVAGYRSGWVAITGPKEHAAGFLEGLDLLASTRLCPNVPGQHAIQVALGGHQSIEDLILPGGRLLEQRDVAWERLNMIPGVSCVKPKGALYAFPRLDPNVYEIYDDEKLVQDLLLQEKILMVQGTGFNWPDHDHLRIVTLPWARDLAVAIERFGNFLTSYKQ

SEQ ID NO: 5067 - protein, 614 aa, Rhodococcus sp. RHA1
MARAVGIDLGTTNSVVSVLEGGEPVVVANAEGSRTTPSIVAFAKNGEVLVGQPAKNQAVTNVDRTIRSVKRHIGTDWNVEIDGKKYTPQEISARTLMKLKRDAEAYLGEDITDAVITVPAYFEDAQRQATKEAGQIAGLNVLRIVNEPTAAALAYGLDKGDKEQTILVFDLGGGTFDVSLLEIGDGVVEVRATSGDNHLGGDDWDERIVTWLVDKFKAQNGIDLTKDKMALQRLREAAEKAKIELSSSQSTSINLPYITVDADKNPLFLDEQLSRSEFQKITSDLLDRTRAPFQAVIKDSGIAVKDIDHVVLVGGSTRMPAVSDLVRELTGGREPNKGVNPDEVVAVGAALQAGVLKGEVKDVLLLDVTPLSLGIETKGGVMTKLIERNTTIPTKRSETFTTADDNQPSVQIQVFQGEREIASHNKLLGSFELADLPPAPRGVPQIEVTFDIDANGIVHVTAKDKGTGKENTIKIQDGSGLSKEEIERMVKDAEAHAEEDKARREEAEVRNQAESLVHQTEKFIKDNEDKVPADVKEKVEAAIKEANDALAGTDIAAVKTAVEKLATESQALGQAIYEASAAEEAANTDGSGANGADDVVDAEVVDEPSDSEKK

SEQ ID NO: 5068 - protein, 388 aa, Rhodococcus sp. RHA1
MDSQAISLVRSSFKAIAAVPDGPQTLSRSFYALLFARYPDARDFFPAAMDAQRDRLISAVQYVIERLEEESGQILAYLAQLGRDHRKYGIEDAHYVAVGNSLIAAVEQFPSTEPWTDELEQAWRDVLAVVAATMMDAANAESGPPAWGATVIEHLQVRKDVSIVRLQLDEPMTYTAGQYVSVQVPSRPRMWRYLSPANPANDQGIIEFHVRRVSGGWVSPAIVSQTLVGERWAIGSPLGDLGVRYGNSRDILMIGSGTGIAPLRAQILQMSQRGQDRRVHLFFAGRYPCDLYDLGTLWALAEQNPWLTVVPVTEEDEDPWWYTGPSSAALPGMHRRLTGKVGQVVADFGTWAERDIQLVGSDAMINTTKFRLHAAGTPPENIRHDPSY

SEQ ID NO: 5069 - protein, 406 aa, Rhodococcus sp. RHA1
MRVFESAGTEAGDGLTRDCLDPLVISRLRASFSSIVSTEHGRYRLTTTFYATLFAEHPEFRALFPAALDQQGHRLFQALQFVIDNLDDEGRVLGFLSQLGRDHRKYGVEGRHYFASGNALLVSVQSSFTQAIWTPSLTAAWTELLDLLLHTMADAADNDDLPAAWGATVVDHERRLDDLAIVRLETDSPIPYGAGQYLSVQIPQRPRMWRYLSAAIPANPYGQLEFHVRRVSGGWVSPAIVNETQVGDRWLLSSPLGGLEVDRDSGQDVLMIGSGTGIAPLRAQVMEMAMRSNNPRVHMFVGGKYPCDLYDIETLWHLSLSNPWLTVVPVSEEDEDPWWHTIPAPEAPPGLHQRLQGQLGRVVARFGSWADRQIQISGSPAMIKTTVYALQGGGTPPELIRHDPLI

SEQ ID NO: 5070 - protein, 850 aa, Rhodococcus sp. RHA1
MDSFNPTTKTQAAMTAALQSASSAGNPDIRPAHLLVALLDQTDGIAAPLLKAVGVDPTVVHREGQDLVDRLPKTTGATTTPQLGREALAALTAAQHLATELDDEYVSTEHLMVGLASGESDVAGLLKRHGATPEALRDAFTTVRGSARVTSPDPEGTYQALEKYSTDLTALARNGKLDPVIGRDNEIRRVVQVLSRRTKNNPVLIGEPGVGKTAIVEGLAQRIVAGDVPESLRGKSVISLDLGSMVAGAKYRGEFEERLKAVLDDIKNSAGQVITFIDELHTIVGAGATGESAMDAGNMIKPMLARGELRLVGATTLEEYRKYIEKDAALERRFQQVLVGEPSVEDTVGILRGLKERYEVHHGVRITDSALVAAATLSDRYITSRFLPDKAIDLVDEAASRLRMEIDSRPEEIDTVERIVRRLEIEEMALQKESDAASKDRLEKLRQELADEREKLNQLTTRWQNEKQAIDSVRGVKEQLETLRGEEERAERDGDLGRAAELRYGRIPQLEKELEQAARESGAAADGDVMLKEEVGPDDVADVVAAWTGIPAGRMMEGETAKLLRMESELGKRVVGQEEAVVAVSDAVRRARAGVADPNRPTGSFLFLGPTGVGKTELAKSLADFLFDDERAMVRIDMSEYSEKHSVARLVGAPPGYVGYEAGGQLTEAVRRRPYTVVLFDEVEKAHPDVFDILLAVLDEGRLTDGQGRTVDFRNTILILTSNLGAGGSREQVMDAVRHAFKPEFINRLDDVVIFESLTEEQLESIVDIQLDQLSRRLAARRLTLDVSDSARFWLAVRGYDPMYGARPLRRLIQQAIGDQLAKLLLAGDVKDGDTVPVKVSETGDALVLG

SEQ ID NO: 5071 - protein, 389 aa, Rhodococcus sp. RHA1
MRDAVIVEAVRTPIGKGKPSGALHGVHPVDLLAHSLSTLVERTGIDPALIDDVIGGTVTQVGDQSQNITRSALLAAGFPESVPGTTVDRQCGSSQQAVHFAAQGVMSGAYDIVVAAGVESMGRVPMGSSSIGRETMGVGFERRYPDGLVPQGISAELIAARWGLSRTQLDEFALRSHQKAAAATSAGNFAKELAVLPELSVDEALRPDTTLDALAGLRPAFRSDFYEERFPQIDWSITAGNSSPLSDGSAALMITTSEIAGRLGLRPLARLHSFAVAGDDPLMMLTAVIPATRKVLQRSGLDISDIDLFEVNEAFASVVLAWAADTGADLDRVNVHGGAIALGHPLGASGARIMTTLVNAMEQRGARFGLQTMCEAGGLANATVLERLV

SEQ ID NO: 5072 - protein, 255 aa, Rhodococcus sp. RHA1
MTSELLGRAVLSWRVAELVESWPETASARALVLEVPDWPGHRAGQHVDLRLTGPDGYTTERSYSLASPAERSPDGWRLQLVVQRVADGEVSPYLTDVFAPGSLIEVRGPIGGWFVWSPREGGGAPVLLVAGGSGIVPLMSMIRERRFRHDRTPFRLVYSLRTRADELFADELNRPGSGDGGVETFVLHTREDSPRRPAGRITAADLAAWGWPADFAPRCFVCGPTGFVEEAARLLLSLGHSPDDIKTERFGPSGP

SEQ ID NO: 5073 - protein, 545 aa, Rhodococcus sp. RHA1
MAMNTDLPDQGSETADASVGGGLKRVGVRTDQVVFSAAAAAVSAIVVWGLVAPDNLDSTTGKALDWLVTDMGWLFVLSASGFVLFSLWLAFSKFGHIPLGKDGEKPEFRTVSWIAMMFSAGMGIGLMFFGVAEPLAHYVTPPPGSNGGIGTAMATTMFHWSLHPWAMYAVVGLSIAYGSYRKGRKQLFSSAFIPLLGRRAEGPIGKFIDVLAIFATLFGTAASLGLGALQIGSGFQVVGWMSEVSTFLLVAIVALLTLAFVASAVSGVAKGIQWLSNTNMVLAVILALFVFVVGPTVLILNLLPTTIGAYAAQLAQMSARTGASSDPATGEWLSSWTIFYWAWWISWTPFVGMFLARISRGRTIRQFVVGVIVVPSAVSLVWFAIFGGAGISEQRDGIDLAGQDTQEGQLFGMLNHLPLTGITTVLVMILVGIFFVSGADAASMVMGTLSQRGSLEPQRWVVVFWGVLTGGVAALILWTGGDTALDGLQTMTIIAAAPFVLVMIGLCFSLYKDLSRDQMIVDGREMRREMRRVAAKRRRDRISSR

SEQ ID NO: 5074 - protein, 67 aa, Rhodococcus sp. RHA1
MAEGIVKWFNSEKGFGFIAPEDGSADVFVHYSEIQSGGFRTLEENQRVSFEIGQGNKGPQATGVTLI

SEQ ID NO: 5075 - protein, 533 aa, Rhodococcus sp. RHA1
MTSQNGGQALVAALAAHGVDTVFGIPGTHNLAVYAALADSPIRSVLTRHEQGAGYAADGYARVTGKPGVCLTTTGPAILNAAAAAAQAWSDSVPVLFISPALPLTHPGRGNGYLHEVKNQQAALEAIVSYSHRVTSVAEIPRAITYAFAAMSSGRPRPVHIEIPVDILDAEADVRIVAPVRSAPLAAPLHAVTDAAQRLAAAQSPVLIVGGGARSAAPQVRALAERLSAPVVTTTNGKGVLDEDHPLSVGAGVHHPSVRAVLEAADCVLAIGTEFAPSDFWYGPVELDHKLIRIDVDPTSMTTNADPAIRLLGDAGTTVSQLLDVTKMREDPGACERAASLRRGLRADAAAEGAPWLDMMAAIAPVVDESTVIAGDSTMACYYGALSNLTVHRPGGFLYPTGQGTLGYGLPAAIGASVADPDARILAILGDGGVMFTLPELATAAQLRLPLPIVVVDNGGYGEIRNEMADRGDTVHSVALGGIDFPAVARAMGCHGRAVESPAALTDAITAAFDADRPTLLHIRENSRATQQG

SEQ ID NO: 5076 - protein, 326 aa, Rhodococcus sp. RHA1
MTANWIDNQKNLMLFSGRAHPELAEQVAKELDVRVTPQTARDFANGEIFVRFEESVRGSDAFVLQSHPAPLNTWVMEQLIMIDALKRGSAKRITAILPFYPYARQDKKHRGREPISARLIADLLKTAGADRIITVDLHTDQIQGFFDGPVDHMHAQGQLAEYIRGNYGTDNIAVVSPDSGRVRVAEKWADTLGGAPLAFIHKTRDPLVPNQVKSNRVVGDVEGHTCILIDDMIDTGGTIAGAVKILKEAGAGDVIIAATHGVLSDPAAERLAACGAKEVIVTNTLPIDESKKFPTLTVLSIAPLLARTIKEVFENGSVTSLFNGNA

SEQ ID NO: 5077 - protein, 350 aa, Rhodococcus sp. RHA1
MTTVETPRSSRSVVVTVAAVVEETSDARSLVFDVPDERRHEFAYKPGQFLTLRIPSDRTGSVARCYSLASSPFTDDLPKVTIKRVAGGYGSHWLCDNVGVGDRIEVLPPAGVFTPASLDEDLILFAAGSGITPVMSILKSALSVGNGKVVLVYANRDEKSVIFADELRELAARHEHRLTVVHWLESVQGLPTPRQLANLSDRFRDHRAYLCGPRPFMDAIHESLALAGVPRDRVHAEVFTSLSGDPFADVVVEELPDTEAGTSTVEVQLDGEAHNLSWPRRATLVDVMLSKGLDVPYSCREGECGSCACTVVQGEVDMDNASILDPEDIASGYILACQARPVSEHVRIEF

SEQ ID NO: 5078 - protein, 405 aa, Rhodococcus sp. RHA1
MPEAVIVSAVRSPIGRAMKGSLKTIRPDDLTTQMVAAALAKIPELDPTEIDDLLLGCGQPAGQSGFNIARVVAVELGYDFLPGVTVNRYCSSSLQTTRMALHAIKAGEGDVFISAGVESVSSFVTGNADGLPNTKNPRFADAEARTAKLAEGGVAWTDPREDEQIPDVYIAMGQTAENVASATGITREEQDRWGVRSQNRAEEAIKNGFFEREITPVTLPDGTVVAADDGPRAGTTYEGISGLKPVFRPDGTVTAGNACPLNDGAAALVIMSDTKAKALGLTPLARIVSTGVSGLSPEIMGLGPIEAVKKALAIAGKSISDIDLFEINEAFAVQVLGSARELKIDEDKLNISGGAIALGHPFGMTGARITNTLLNNLREQDKTFGVETMCVGGGQGMAMVLERLS

SEQ ID NO: 5079 - protein, 521 aa, Rhodococcus sp. RHA1
MIVLALWILGLGALALTLGVATGWWFAAVVLLALAALGTWDLLQRRHSILRNYPVLGHARFLLEKIRPEIQQYFVESSTDGTPFDRDTRDLVYERAKGTLAEEPFGTERDVHAVGYEFMAHSLRARMAPPEPPTVRIGGPDCERPYDIALLNVSAMSFGSLSANAIEALNAGAARGGFAHDTGEGAISPYHRKHGGDLIWEIASGYFGCRTDDGHFDPGKFAEHAASDQVKAISIKLSQGAKPGLGGVLPGAKVSREIAETRGVPVGKTVISPPSHTAFSTPNELIDFIVTLRTLSGGKPVGFKLCVGSRTEFLGICKAMLERDVTPDFVIVDGSEGGTGAGPVEFEDNMGMPLTEGLMLVHNALTGAGLRNRIKIGASGKVASASDIVKRIIQGADFTLAARAMMFAVGCIQAQMCHTNRCPVGVTTQDPARTRALDVPDKAARVFRFQKSTVAGAQQMVASMGLDSFDQLTPSMLNRRIDGVTTRTYAELYEWLMPGELLEDPPSDWLTDWIDADSSRF

SEQ ID NO: 5080 - protein, 438 aa, Rhodococcus sp. RHA1
MAQDTWRNWAGTETANPLRFATPRSVEELSALVSGAAEHGQRVKAVGSGHSFTGVAVTDGILVSLDALTGIESVTLDEPAGALVTVLAGTRLHDLSEQLWHRGLAMINLGDIDVQSIAGALSTGTHGTGARFGGLATQVRALQVVLADGSVADCSPTENPELFEAARLGLGAVGIISKVTIQCVPNYVMHAVEKPESLDAILDRLDHDRTTIDHFEFYWFPHTRRVLTKRNTRLPGDTPVSPLHPVRAYVEDELLANVLFEGINRVAGLAPTTIPKINRLSSRMLSAREFTDRSYRVFASERRVKFREMEYAVPTEALPDTLAAIDAWVEESGFTVAFPVEVRFAAGDDVWLSTANGRDTAYIAVHQYHRRDHEPYFAAVEAIAREVDGRPHWGKMHGRTADDLRPAYPNFDEFLAVRDKYDPGRMFGNAYLQQVLGR

SEQ ID NO: 5081 - protein, 586 aa, Rhodococcus sp. RHA1
MSDIERDPEPPTFADLDIDDRVLKALSDVGYESPSPIQAATIPPLLAGNDVVGLAQTGTGKTAAFAVPILSKIDLTQKSPQALVLAPTRELALQVAEAFGKYSAHIPGLHVLPIYGGQSYGVQLSGLRRGAHVVVGTPGRVIDHLEKGTLDLSKLSYLVLDEADEMLKMGFQEDVERILADTPEYKQVALFSATMPGAIRKISKQYMHDPVEITMKSKTSTASNISQRYVQVAHQRKLDALTRVLEVEDFEAMIIFVRTKQATEDLAEKLRSRGFSASAINGDIVQAQRERTIGQLKSGALDILVATDVAARGLDVDRISHVVNYDIPHDTESYVHRIGRTGRAGRAGEALLFVAPRERHLLKAIEKATRQPLAEMQLPSVDDVNAQRVSKFGDSITESLTSDNLALFRKMIEDYEQEHDVPLADIAAALAVQSRDGEAFLMAPEPPPAPRREREPRERPARRFDEGPPTRSRGPEGQELATYRIAVGKRHRVVPGAIVGAIANEGGLRRSDFGHISIRPDHSLVELPADLSSETLEALRRTRISGVLIQLQPDSGPPSGRPRGGRDDRAGGKFQRDRDSRKKPRE

SEQ ID NO: 5082 - protein, 632 aa, Rhodococcus sp. RHA1
MSMEVTAWNAMYNAMHAQEDRRPFSRTTLRRIARFALPHRRSLGWYLLLSVVTAALAVATPVLAGRVVNAIVGGDAVSVVVRLAALIAVIAVLESALALWTRWLSASIGENLILDLRTAVFDHVQRMPIAFFTRTRTGALVSRLNNDVIGAQRAFSDTLSGVVSNLVTLGITLIVMIGISWQITLCALLLLPIFVLPARRMGARLAQLNREAANHNSVMSTQMTERFSAPGATLVKLFGRPSEESAEFAVRARRVRNIGVRTAMLQSVFVTALTLVSALALALVYGLGGFYALRGQLDAGAVVAMAMLLTRLYSPLTALASARMDVMSALVSFERVFEVLDLKPLIAEKPDAVAVPDGPVSVEFDSVEFAYPSADKVSLASLEEVATLDTRGGVDVLHRLSFRAEPGQMVALVGSSGAGKSTIAQLVPRLYDADAGSVKLGGVDVRDLTADSVRATVGMVTQDGHLFHDTVRANLLLARPCATPAELAEVLERARLTDLVAALPDGLDTVVGERGYRLSGGERQRLTIARLLLAHPRVVILDEATAHLDSTSEAAVQEALGEALAGRTAVVIAHRLSTVRAADLILVVEAGRIVERGTHSELLAAGGRYEELYRTQFDTGTVSSPTLTEVLR

SEQ ID NO: 5083 - protein, 351 aa, Rhodococcus sp. RHA1
MTTVEVPHSSRSVVLTVSGVVEETPDSLSLVFDVPADLADKFAYKPGQFLTLRIPSDRTGSVARCYSLASSPFTDDAPKVTVKRTAEGYGSNWLCDNVAVGDTIEVLPPSGVFTPKSLDHDFLLFAAGSGITPVISILKSALTEGSGKVVLFYANRDEKSVIFAEELRTLASRYPSRLVSIHWLETVQGLPGVDQLASAVAPYLGHEAFMCGPAPFMDTIHKALADAGMPRSQVHAEVFNSLAGDPFRDADVVEVTEDEAADAATVEVELDGAIHNLSWPRKQTLVDIMLAKGIDVPYSCQEGECGSCACTVLEGKVEMENSEILDPEDIESGYILGCQARPVTDYLKIEF

SEQ ID NO: 5084 - protein, 502 aa, Rhodococcus sp. RHA1
MAIQDKGSGEPHLGGRPTGLFRTKSIEQSIRDTDEPETKLRKDLTAWDLTVFGVAVVIGAGIFTLTARTAGNVAGPSVSAAFVIAAIACGLAALCYAEFASTVPVAGSAYTFSYATFGELIAWIIGWDLILEFALAASVVAKGWSLYLGEVIGNHTPVAQIGSVTFDWGAVLIVAIITVVLATGTKLSSRVSLVITSIKVAVVLVVVVVGAFYIDTDNYSPYIPPSEAGSTGEGIHQSLFSYVTGAGGSTFGWYGLLAAASLVFFAFIGFDIVATTAEETKDPQKALPRGILGSLLIVTILYVAVTLVLTGMVDYHELAGDSSNLATAFGIHGITWAKNLISFGALAGLTTVVMVLMLGQTRVLFAMSRDGLMPRRLAPTGKHGTPVRITVLVGVVVAVLAGIFPIGTLEEMVNIGTLFAFVLVSVGVIVLRRTRPDLPRGFRVPLVPWVPVLAVLACLWLMVNLSVETWIRFIVWMALGVIIYFAYSRRHSMMERRSRGEV

SEQ ID NO: 5085 - protein, 225 aa, Rhodococcus sp. RHA1
MKPRILVVDDDTALAEMLTIVLRGEGFDPYVVGDGTQALTAVRETRPDLVLLDLMLPGMNGIDVCRVLRADSGVPIVMLTAKTDTVDVVLGLESGADDYIMKPFKPKELVARVRARLRRTEDEPAELLSIADIVIDVPAHKVSRGEELISLTPLEFDLLVALARKPRQVFTREVLLEQVWGYRHAADTRLVNVHVQRLRAKVETDPENPEVVLTVRGVGYKAGPP

SEQ ID NO: 5086 - protein, 371 aa, Rhodococcus sp. RHA1
MGLKDWIEAPAAAVVPAKRSKLNWLRGAAARLTTPLLPDDYLHLANPLWSARELRGQIVEVRAETADSATIVIKPGWGFDFDYEPGQYIGIGLHIDGRWHWRSYSLTSPPNWDDKLISIAVKAMPEGFLSSHLVNGVPSGTIVRLATPTGNFALPDPPPERILFLTAGSGITPVMAMLRTMNRRGQLPDVFHVHSAPTDADVMFADELTQLHEEHDDFRCKIQLTRSQGKFALSSLDEVCPDWRERQTWACGPLPMLDEIETLWRDEGIENKLHLERFAVSRADTSGEGGTVTFAKADKTVSVDGATTLLEAGEQVGALMPFGCRMGICQTCVVPILAGHAIDLRSGKQHAEGDRVQTCISAAAGDCTLDA

SEQ ID NO: 5087 - protein, 555 aa, Rhodococcus sp. RHA1
MRAATRKASPLSKITVDHEDDATETTLSAQLDSTHVAPTFAELGVRDEIVRALDEIGIERTFAIQELTLPLALAGDDLIGQARTGMGKTFGFGVPLLHRISSGTTGTAALDGTPRALVIVPTRELCIQVTKDLEGAAKYLKGEKNKLEVLAIYGGRPYETQIATLQKGADVVVGTPGRLLDLANQGHLILGKVEVLVLDEADEMLDLGFLPDIERILGMVPDKRQTMLFSATMPGPIITLARTFLTQPTHIRAEQADDSAVHDRTSQHIYRAHALDKAEMVARVLQAEGRGATMIFTRTKRTAQKVADDLAERGFSVGSVHGDLNQVAREKALKAFRTGKIDVLVATDVAARGIDIDDVTHVINYQCPEDEKTYVHRIGRTGRAGRTGIAVTLVDWDDIPRWQLIDKALGLGIPDPAETYSSSPHLFEELSIPAGTTGTIKRPRVEKAEKVAPERSENTGAERSENTGAERSENTDTGQGEKAERTERPARTRTRRRTRGGRPADSVGPKSVSPEPTAPESAAPSGDTDGEGASKPRRRRRRRTTKVGAAATNAE

SEQ ID NO: 5088 - protein, 481 aa, Rhodococcus sp. RHA1
MPERPDHLSDTHTPDTTFAALGVREPLVKALADKGITSPFPIQVDTLPDTLSGRDVLGRGKTGSGKTLAFSIPMVSRLAGELSGGKRRPGRPVGLILAPTRELATQITAALEPLAAAYDLRVTTIFGGVSQNRQVSALKAGVDIVVACPGRLEDLMKQKFVSLDAVEITVLDEADHMADLGFLPVVTRILTATPQHGQRLLFSATLDNGVDKLVKRFLKNEVLHSVDEANSPVAAMTHHVFDVDGVEAKRKLVERLASGTGRRILFMRTKHQARKLARQLTEAGIPSVDLHGNLSQAARDRNLASFSAGEARVLVATDVAARGVHVDDVQLVVHVDPPAEHKAYLHRSGRTARAGSAGDVVTVVLPEQRKDLAVLMRKAAIKVTPLRSTADSAHVLDLVGAIAPHVTPAPKAAAPASNGGGRNQRPGGAQGGRGGQDGRAHGQGGGARRSRSGGAGRPRAASSTGGGTRTASAAGSRRRQG

SEQ ID NO: 5089 - protein, 406 aa, Rhodococcus sp. RHA1
MTSARSADHPVYLDHAATTPMVPAAVRAMTDIFRTVGNASSLHGSGRAARRRIEEARESIAADLGARPSEVIFTSGGTESDNLAVKGIFWARRDADPGRVRILASSVEHHAVLDAVEWLEKHEGARVTWLPVDELGRVSPQTLRDELAVHADETALVTIMWANNEVGTIMPITELAAVAAEFGVPMHSDAVQAVTHIPVDFAASGLSALSIAAHKVGGPQGVGALLLGRQVPCVPLLHGGGHERDLRSGTPDTAGVVGMAAALRDTTADLDARATELAVLRDRLIERVGEIVPDAVLNGPVGSARLPGNAHFTFPGCEGDSLLMLLDAAGIECSTGSACTAGVARPSHVLTAMGVDSATARGSLRFSFGHTSAIADVDAVIAALPQVVERARAAGLAGVGARGGDR

SEQ ID NO: 5090 - protein, 647 aa, Rhodococcus sp. RHA1
MSAPTARPQPTPRKSGAASPTTAAAATQTGSRRQLAPERVSGAQSVVRALEELEVDTVFGIPGGAVLPVYDPLFDSKKVRHVLVRHEQGAGHAATGYAQATGKVGVCMATSGPGATNLVTPLADAQMDSVPVVAITGQVGRSLIGTDAFQEADISGITMPITKHNFLITDGVDIPRIIAEAFYLASSGRPGAVLVDIPKDVLQAQTTFSWPPEMRLPGYRPVTKPHGKQVREAARLIADAKHPVLYVGGGVIKSESSPELLELAELTGIPVVTTLMARGAFPDSHTLNCGMPGMHGTVAAVAALQRSDLLITLGARFDDRVTGQLDSFAPDAKVIHADIDPAEIGKNRYADVPIVGDCKEVIVELIEAIKADLATGTTLDLTEWWAYLDGIRRTYPLSYDRPSDGALSPEYVIQAVGKLAGPDAIYCAGVGQHQMWAAQFVNYEKPRTWLNSGGLGTMGYAVPAAMGAKMGMPDTEVWAIDGDGCFQMTNQELATCALEGIPIKVALINNGNLGMVRQWQTLFYDERYSNTNLGTHGAIRIPDFVKLAEALGCHGIRVEREEDVEAAIREAQAINDKPVVIDFIVGADAQVWPMVAAGTSNDEIMAARGIRPLFDDDEAAAEPAVIHEAMEREQRSGTAAAAGEEDQ

SEQ ID NO: 5091 - protein, 531 aa, Rhodococcus sp. RHA1
MSQPGRPVVLIADKLAPSTVEALGDGVEVRWVDGPDRPALLAAVPEADAILVRSATTVDAEVLAAGTKLKIVARAGVGLDNVDVAAATERGVMVVNAPTSNIHTAAEHAVALMLATARQIPAADATLRDREWKRSKFNGVEIFGKTVGVVGLGRIGQLFAQRLAAFETHVIAYDPYVSAARAAQLGIELVTLDELLERADLISVHLPKTPETKGLLGTENLAKTKKGVVIVNAARGGLIDEAALAEAIKSGHVRAAGLDVFETEPCTDSPLFDLPEVVVTPHLGASTTEAQDRAGTDVAKSVLLALAGDFVPDAVNVSGGAVGEEVAPWLEIVRKQGVLIGALSGELPVNLSVDVRGELASEDVEVLALSALRGVFSAVIEDAVTFVNAPALAEERGVTAEVTKAAESPNHRSVVDLRAVFGDGSVINVSGTLTGPQQVEKIVNINGRNFELRAEGLNLVVNYTDQPGALGKIGTQLGNAGIDIQAAQLSQDAEGEGATILLRVDREVPSEVRDAISTAVGATKIELVNLA

SEQ ID NO: 5092 - protein, 325 aa, Rhodococcus sp. RHA1
MTQQTNHLLVRQQRLESDGVLSLTLERPDGAALGEWEPGAHIDIVLPSGTVRQYSLCGDPTDKTAYRIAVLREDEGRGGSKEIHDSVRVGDLLAVRGPRNHLALEPAPHYLLIAGGIGVTPILSMARQLSRENASWSALYGGRSRATMAFVEEFCGLGEVNVTPSDESGNLDLAAALANVPSGTAVYCCGPEGPLQEVKSVCGPVLGDEVIHFERFGAPVVGADPAAAAGVSDRQSPNEFDVELRRTGCTLKVPADRTLLEVVLEANPDILYSCEDGFCGSCETRVLDGIPEHHDSILSQADREKGETMMICVGRSRTPTLVLDA

SEQ ID NO: 5093 - protein, 789 aa, Rhodococcus sp. RHA1
MDTGSLTEKSREALQEAQNVATRMGHTEVDGEHLLLALVDQQEGLVPRLLEQAGANVDALRSDLERELSRRPKVSGPGATPGQVTITQRLAKLLDAAEREAKRLKDSYVSVEHLVMALSEEGSASAAGRVLASHGVTRDAFLTALTKVRGNQRVTSATPEGAYEALEKYGRDLVSEGRAGKLDPVIGRDTEIRRVTQILSRKTKNNPVLIGDPGVGKTAIVEGLAQRIVRGDVPEGLRDKTIFSLDMGSLVAGAKYRGEFEERLQAVLSEVKAAEGRILLFVDELHTVVGAGSVGGEGSLDAGNMLKPMLARGELHMIGATTLDEYRKHIESDAALERRFQTVLVDEPSAEDAISILRGLRERLEVFHGVKIQDGALVAAVTLSHRYITDRFLPDKAIDLVDEACARLRTEIDSMPAELDELTRKVTRLEIEEAALSKETDAASKARLEELRKELADLRAEADARHAQWEAERQAIRRVQELRGELERLRHEAEEAERNYDLNRAAELRYGEITALERRLEAAEEQLATRQGRNPLLREVVTEDEIAEIVAAWTGIPVARLQEGEREKLLKLDEILHERVVGQDEAVQLVADAVIRARSGIRDPRRPIGSFIFLGPTGVGKTELAKTLASALFDSEDNMVRLDMSEYQERHTVSRLIGAPPGYVGYDEGGQLTEAVRRKPYSVVLFDEIEKAHADVFNTLLQVLDDGRITDSQGRQVDFRNTVIIMTSNIGSQHLLEGVTADGEIKPDARDWVLAELRGHFRPEFLNRVDDIVLFTPLTLPQIEHIVEL

SEQ ID NO: 5094 - protein, 626 aa, Rhodococcus sp. RHA1
MATAVGIDLGTTNSVIASWQGGEPVVISNVEGARTTPSVVAFTESGERLVGQLARRQAILNPKGTIYSAKRFIGRHYDEISEEAKAVSFDVVPGDNGEARFDVRGKKYAPEEISALVLRKLVDDASKFLGEKVKEAVITVPAYFNDAQRNATKDAGRIAGLEVLRIINEPTAAALAYGMDKQTHETVLVFDLGGGTFDVSLLDVGEGVVEVRSTAGDSHLGGDDFDRRLVDYLADEFQRAENIDLRKDAQALQRLFEAAEKAKVELSSVTQAQVNLPFVTADANGPKHLTTTIMRSKFEDLTADLVERCLDPVKQAMSDAKVTANDIDEVILVGGSTRIPAVQALVRRLTGGKDPHMGVNPDEVVALGAAVQAGVLKGEVSDVLLLDVTPLSLGVETQGGVMTKIIERNTTIPARRSEVFSTAEDNQSAVDVVVLQGERERAADNRVLGRFRLEDIRPAPRGEAQVEVTFDIDANGILNVTARDKDTGKEQSITISEQGNLDTSEVERMLAEAERNRGEDEELRKAVDARNALDSVAYQVERRLAELGDSAPPHDKARAEMLIADARKAVKDGASPAEVEPLTSELQQLLYGLTPVQDGGDGHQAGGAEAASSDDDDVIDAEFDRS

SEQ ID NO: 5095 - protein, 277 aa, Rhodococcus sp. RHA1
MRINRSIRVGIGVMALAVVASACGGGEEKSASQSASEGKLTVGIKYDQPGLGLRNPDGSFSGFDVEVAEYVAGKLGVAPENVEFKESPSAQRETLIENGEVDYIVATYSITDARKEKVDFAGPYFIAGQSLLVKSDNTDITGPDSLNGGKKLCSVTGSTPAQKVKDTYAQDVQLQEFDTYSACVEALRNGAVDAVTTDDIILAGYAAQYPGELKVVGEPFTEERYGIGLAKGDDETRAKINDAIDAMIADGSWARAFNETVGASGYPIPAPPTVDRY

SEQ ID NO: 5096 - protein, 615 aa, Rhodococcus sp. RHA1
MARAVGIDLGTTNSVVCVLEGGDPVVVANSEGSRTTPSVVAFAKNGEVLVGQPAKNQAVTNVDRTVRSVKREIGTDWHVAIDDKKYSAQEISARTLMKLKRDAEAYLGEDITDAVITVPAYFEDAQRQATKEAGQIAGLNVLRIVNEPTAAALAYGLDKGDKEQTILVFDLGGGTFDVSLLEIGEGVVEVRATSGDNHLGGDDWDDRIVKWLADKFKAQNGIDLTKDKMALQRLREAAEKAKIELSSSQSTSINLPYITVDADKNPLFLDEQLSRSEFEKITSDLLDRTRAPFQSVIKDAKISVKDIDQVVLVGGSTRMPAVTNLVRELTGGKEPNKGVNPDEVVAVGAALQAGVLKGEVKDVLLLDVTPLSLGIETKGGVMTKLIERNTTIPTKRSETFTTADDNQPSVQIQVFQGEREIASHNKLLGSFELAGIPPAPRGVPQIEVTFDIDANGIVHVTAKDKGTGKENTIKIQEGSGLSKEEIDRMIKDAEAHAAEDAQRREEAEVRNQAESLVYQTEKFIKDNEDKVPADVKEKVESSITNAQEKLKGSDVTAIKEAIEKLTTDSQALGQAIYDAQAKDSAATGGGNGSSGGAEEVFDAEVVDEPGREDNR

SEQ ID NO: 5097 - protein, 295 aa, Rhodococcus sp. RHA1
MRFSRKAIVPLVAVVAIAGIALFGTRSTVTTGITPAVAQAPQFAPGTTMEKIAREGVLRVGTRFDHPGLSARNLRGEQEGYEIDLVRYIAGKLGVPADRIEWTEANSASREQLLQQDKVDVVVATLSINDKRRQVISFGGPYLDINNDLVTVKGNPKNITDPQTPNGVTVCSTLGGAVSASLRKNFPQTNLIEFDVSSKCIDALKNGSVDALATQGPIGAGYVSKDQKDIELINKPFAVESWGVGIAKGDVAFCEFLNSAITDYYSDGSAEEAWADSLGRYTKQQPVMPELQPCT

SEQ ID NO: 5098 - protein, 367 aa, Rhodococcus sp. RHA1
MTMTRSDRSAGSDSDTPDFEPSRVLRLAARATVAYRHVFAASRAAPWLSRPKPVRNWGFDRELIVAEVRTEAADVVSLKVVSPDGRDLPSWIPGAHLDLILPSGKQRQYSLCGDPDDLSSYRIAVRRIDTGLGGSIEVHDSLRAGTPITVRGPRNAFPLVAADSYLFVAGGIGITPILPMLKRCHDRELPWRLVYLGRSRATMPFLDELARYSRGQVEIRPDDELGAPDVAGVVATASPGAAVYMCGPTPLMTTARRVMREIDPTGSLHTERFSPLPVVDGREFEIHLARRGTTVSVGPDETALAAIRREVPGVAYSCQQGFCGTCRVRVLAGEVDHRDRILTHDEKEDSMLICLSRSAGGSLVVDL

SEQ ID NO: 5099 - protein, 269 aa, Rhodococcus sp. RHA1
MSTPDASTPEISVLEIKDLHVDVANTDENADPINILKGVNLTVRSGETHAIMGPNGSGKSTLSYAIAGHPKYQITSGTITLNGENVLEMSVDERARAGLFLAMQYPVEVPGVSMSNFLRTAATAVRGEAPKLRHWVKEVKEALTELDIDPSFGERSVNEGFSGGEKKRHEILQLGLLKPKIAILDETDSGLDVDALRVVSEGVNRYKERQHGGILLITHYTRILRYIKPEYVHVFVGGRVVESGGPELADELEAKGYERFTQAAATQGA

SEQ ID NO: 5100 - protein, 632 aa, Rhodococcus sp. RHA1
MTNAVQTTSAPLEQTETETPDQNATVTFAEIGLPAPLVQALARNSITVPSPIQALAVPDALAGTNVLGRAQTGSGKTLAFGLPMLTRLSRHEDRPAPKRPRALVLVPTRELAFQVVDSLNSYAGAMGLTVRPAVGGTPFSKQVDQLRRGVDILVATPGRLNDHLRQGTCILDSIEITALDEADQMADMGFLPEVRAILGETRADGQRLLFSATLDREVQSLVRQFLPDHVQHSTEDGRASVDTMEHYVLLVDRGQKDNVLAEIGARDGRTIMFARTKLGCEGITDRLRAVGIAAEALHGGKAQNQRTRVLERFKNGRTPVLVATDVAARGIHVDGIDLVVHVDPPADHKDYLHRAGRTARAGEKGTVVAIVLPNQKRTFRRLTGMAGVDATAVPVTPGSEKLASITGAKAPSGEPVRDTYSRGERGGDRKFGDRGPRREGGYAGRDGGGYRGNRNDRGDRGERSFGDRPSGGRSFEGRGPRRDQTDNRSGGYRGDRPQRDGDNRGGGYRGDRDNRTFTDRAPRRDFGDSAPRREYGGGTTAPRRDFGDRGDSHRGTGERSFDRSAPRRDFGDNRGAAGGFRRDDRRDDRRDDRRPAATPERRPAATTGGGFRSRTERRSYDGFDGPRRERRS

SEQ ID NO: 5101 - protein, 324 aa, Rhodococcus sp. RHA1
MNGDNVICPLRVDRVVPESDGVVSLRLVHPDGQRLPDWTPGAHLDVLLPSGLLRQYSLCGDPQDDTGYRIAVLREARGRGGSREIHDSALLGCTLGIRGPRNHFALSTAPRYLFLAGGIGITPILAMAREVSRRGVPWRLVYGGRTRSTMAFVDELQNLPSGQVELVPQDERGHIPLDDILAATPPDTHIYCCGPEPMIRAVEAACARCSALDRLHVERFTAPSLAEQPPVEPVGDGTFEVELHRSGVVLRVPANRTLLEVVRDVVPGVMSSCEEGFCGACETKVLEGVPEHHDSILSDAERASCNTMMICVGRARSGLLVLDL

SEQ ID NO: 5102 - protein, 323 aa, Rhodococcus sp. RHA1
MSPENPDPNTTLTLVVDEVRKECDDVLTLSLIDGTGSTLPTWEAGAHIDLHLANGLVRQYSLHNTPGDSSRYEVAVLRDPNSRGGSQHIHDEVKKGGTLTASLPRNNFPLEPAEEYLFVAGGIGITPLLPMMQAAADNDIAYRMVYAGRSRPKMAFFEQLSDDSRVQMCVSDEGTRLDLDALIGDDLGPNVHIYSCGPERLLDALAARCADVGVSARLHVEHFSGTVVELDPNVETAFEVELSRSGKTLTVGPDQTILDALLECGIKAANSCGEGVCGSCETTVLEGEVDHRDAVLDDDEKAENEVMMICCSRARSPRIVLDM

SEQ ID NO: 5103 - protein, 526 aa, Rhodococcus sp. RHA1
MIRWLVIAGAWVLGSASLLLVFFVSAWWLLGTVIVAAIAMVGAWDLLQRRHSVLRNYPVIGHARFMLERIRPEIQQYFIERSTDGTPFDRDTRTTVYERAKGTKDVEPFGTERDVTATGYEFVTHSLRAHPASDDTPHVRIGGPQCTMGYDIALYNVSAMSFGALSGNAIEALNGGAARGGFAHDTGEGGISPYHLAQVGDLIWEIGSGYFGCRDADGHFDPGEFAAKAALPQVKCISIKLSQGAKPGLGGVLPAAKVSPEIARTRGVPVGQSVISPPSHSAFCTPLELIDFITTLRALSGGKPIGFKLCVGSRTEFLAICKAMIETGITPDFIIVDGSEGGTGAAPLEFEDHVGMPLTEGLMLVHNALVGTGLRDRIKIGASGKVANGIDIIKRLIQGADFTLAARAMMFAVGCIQAQRCHTNRCPVGVTTQDARRARALNVPDKTTRVYNLQRSTVASAQQILASMGLDDFCDLDPSMLHRRIQGHRTMTYADLHEWLQPGDLLTEDPPTSWLRDWTNADSSRF

SEQ ID NO: 5104 - protein, 535 aa, Rhodococcus sp. RHA1
MFRFLIVGFTVLGLGVVTAAAALGSWAWWAVASLLAVLLIVGLYDLLQRRHSVLRNYPILGHLRYLLESLRPELQQYFIERNFDGRPFDRDVRTVIYERAKGIHGELSFGTERDIEEVGYEYLVHSVMPAAEPEHPPRVLVGGADCSRPYSMSLLNISSMSFGALSANALRALNSAAARGGFAHDTGEGGLTPYHLSGGGDIIWEIGSGYFGTRTPGGQFDPHRFADKAAHEQVKAISLKLSQGAKPGVGGVLPAAKVSAEIAEYRGVPVGEKCVSPAAHSAFHTPREMIEFVARMRDISGGKPVGLKLCVGSRVELLAICKAILEMGTGPDFIVVDGAEGGSAAAPLEYEDHVGLPLTDGLMTVHNALVGTGLREQIRLGASGKVAVGNDIVKRLIQGADYTNAARAMMMAIGCIQAQRCHTNTCPVGVATQDPKRTRALDVADKSLRAYRYHEATVRQAVQIMASMGVTDPSGLGPHLLRKKITPTRVSSYAEIYEWLTPGELLHHTPRAWAADWAEASADTFHPGAEPGHRP

SEQ ID NO: 5105 - protein, 489 aa, Rhodococcus sp. RHA1
MDQSQAPLLDALEQYHRLDRYGFSPPGHRQGRGADERVKKVLGADPFRADVLASGGLDDRRSSNGYLSRAEQLMADAVRAERAFFSTCGSSLSVKAAMLAVAGNDPGGLLVSRDSHKSIVAGLIFSGVTPRWITPRWDEDMHFSHPPSPDQVRAVWEKYPDAAGALIVSPSPYGTCADLAAIARVCHERGKPLIVDEAWGAHLPFHDDLPTWAMDACADVCVVSVHKMGAGFEQGSVYHLQGELVDGTHLSQCADLLTTTSPNVMLYAAIDGWRRQMAEHGTDLLGRALALAASTRERIAGIDGLTVLEDRLLGEQASHDLDRLQVLIDVSELGVSGFQCTDWLREHCHLDVGMHDHRRIAATLSMADDDTTSGRLVTALDELAQAAASFDPPPPVSLPSPEQLQLESVMSPRDAFFGAAEMVDADRAAGRIAAEPLTPYPPGIPAVVPGERLDRPVIDYLRSGVDAGMGIPDAADGTLRRIRVVTGSR

SEQ ID NO: 5106 - protein, 627 aa, Rhodococcus sp. RHA1
MARAVGIDLGTTNSVVCVLEGGDPVVVANSEGSRTTPSVVAFAKNGEVLVGQPAKNQAVTNVDRTVRSVKREIGTDWHVKIDDKNYTAQEISARVLMKLKRDAESYLGEDITDAVITVPAYFNDAQRQATKEAGQIAGLNVLRIINEPTAAALAYGLDKGEKEQTILVFDLGGGTFDVSLLEIGEGVVEVRATSGDNHLGGDDWDDRIVKWLADKFKASSGFDLTKDKMAMQRLREAAEKAKIELSSSQSTSINLPYITVDADKNPLFLDEQLSRSEFEKITSDLLDRTRAPFQSVITDAKISVGDIDHVVLVGGSTRMPAVTNLVRELTGGKEPNKGVNPDEVVAVGAALQAGVLGGEVKDVLLLDVTPLSLGIETKGGVMTKLIERNTTIPTKRSETFTTADDNQPSVQIQVYQGEREIASHNKLLGSFELTGIPPAPRGVPQIEVTFDIDANGIVHVTAKDKGTGKENTIRIQEGSALSKEDIDRMIRDAEAHAAEDSRRREEAETRNQAESLVYQTEKFIKDNEDKVPADVKDKVQSAIKNVQDALAGTDIGAVKTAVEKLGTESQALGQAIYAAQAASEGGTGGGDGGAGAAAGAGASGNGQGADDEVVDAEVVDEPREGHR

SEQ ID NO: 5107 - protein, 325 aa, Rhodococcus sp. RHA1
MSDIDGMIDAVITEDVWGRAFNDLGTSRSILRAPHAWQDREKLLELGSRSRALVVRNRTQVDRQLIEACPSLRVIARAGVGLDNIDVKCANEAGVVVVAPLGANAISVAEHTIGMALAAVRRTVELDADCRRGGWERTPGRELHGGVWGLLGAGATGRACARLARSLGMSIVAYDPFADAEKLAQEGIELVEHPALVAARADVMSCHLPATRGTAHLINGELLTVMKPTAVLVNVGRGEVVDENALADALETGRLAAAALDVREVEPPLPGRLEKLGNVILTPHIAGITTHSQDRIIEVLADNIAAVLDNRSATAAVGTLREARS

SEQ ID NO: 5108 - protein, 388 aa, Rhodococcus sp. RHA1
MTPDRSPVLVSLARTPVGKFGGALAHLSALDLGAAAVHAALEPLDRQISIDHTFLGNVVQAGNGQNPARVAAIHGGVPTTVPGTTINDVCLASVTATGMAASMIRGGEIDTALVGGFESMSRALHGVQVRAAAKVGHGGLVDLLVNDGLWCAVSDSGMGEISDQANREHGITRADQDEFACASHRRATAATESGRFKQEIRALTDILDADEGIRPGSTVTKLATLRPAFTEGGTITAGNASQMSDAAAAGVLMSLGVADSLGLDPLVEVVDRVVVAGPDPSLHLKPAVAARVLLDRNGLSIGDIGLWEINEAFAGVVLASARDLGIDLDRVNVNGGAIALGHPLAASGFRILMTLATEMRLRQREFGVATICGGGGQGQALLLRLPQH

SEQ ID NO: 5109 - protein, 361 aa, Rhodococcus sp. RHA1
MYPQQTSAAVGARKMRVVGVVEETHDARSILVEPHPEHIDAFDYRPGQFLTVRVPDVGSGTARCYSLSSSPHVDSTMKFTVKRVAGGHGSNWLCDEIALGDELEVLPPAGTFTVRSLDQSVVLVAGGSGITPVIAIAKSILHAGTGTVLLVYANRDERSVIFGEQLRELGERFGSRFTVIHVLESVQGYLTAPAMSNLIRPFTDRAVYICGPEPLMKLVKAVCSAEGIAPSQVMTERFVSLSTDPFRNPVEDKPSTSDTGVEVSAQDEAAAGDCTVHVSLDGTERTVAWPRSKRLLDALLDAGVEAPFSCREGACSACVCSLTEGEVRLVRNEVLEADDLADGYILACQAEVVTDQISIKY

SEQ ID NO: 5110 - protein, 420 aa, Rhodococcus sp. RHA1
MTLTGTKQSTEHYRPWSNWAGNITSTPAITVTPCTDDDAVAAVRDARSRGIGVRVCGSSLSFSPLVATGGMLLDLRHLTGITGVDRDRQRVRVRAGTVIRDFAAELWTHGFSLANQGMIWNQTVGGAVGTSTHGTGRTLCGMSSMVTWVRLIDGRGEIVEIGEDEPDRLHAVQTALGVMGIFLEVEMAVVPAFYAEEKFRFEAWESAERNWLTNIDAHRNLSVMWLQSNAAAEAYSVPVPPGMSLANQVLHFAIDAIDPLPESEWCQDIGARRGPAYGVLSGENIVDTFCELEYMVPFDDGLEAVQRVQELLLGKHADQLHPMFIRFIKADEAWMSPFYQRDTVTVSVAGHPGADYWPFFTDVDQILREYDARAHWGKLHLFDRDYLARVYPRHGDFVRLRKEMDPDGMFLNDHTRRLFG

SEQ ID NO: 5111 - protein, 323 aa, Rhodococcus sp. RHA1
MSTDVSDSATVLNLIVDEVRRECDDVLTLSLIDSAGQDLPTWEAGAHIDLHLPGNLARQYSLHSDPGDRARYEVAILRDPNSRGGSQYIHEEVRKGAMLPTSTPRNNFPLQPADEYLFVAGGIGITPMLPMMQAAAEMNRPARLIYAGRSRTTMAFVEQLAEQENVQLCVSDEGTRAHVADLLGPHLGPDVHIYSCGPERLLEAVTARAAEVGLSKQLHVERFSGTAVDLDPDVEKSFDVELSRSGRILTVAPDQTILDAVLACGIKVANSCAEGVCGSCETTVLEGEVDHRDQILDEDEQAENDVMMICCSRSRTPRLILDL

SEQ ID NO: 5112 - protein, 425 aa, Nicotiana benthamiana
  misc_feature (193)..(193): Xaa can be any naturally occurring amino acid
  misc_feature (229)..(229): Xaa can be any naturally occurring amino acid
  unsure (1)..(425): unsure at all Xaa locations
MEEVEIPQYFLCPISLQIMKDPVTTVTGITYDRESIEMWLLTAEEETETAACPVTKQPLPKDTELLTPNHMLRRLIQAWCIVNAEKGVDRIPTPKYPMNKSNILRLLRQVNNNDHQLCAEALRKMADLVSENEKNRKCMEQAGAIKAMVCFIVKSFKYEKLFPGIEEALRIFHLIWNPKSENKQYVKDNPDLXQAILWILKSNLNTSHVLVKTHAMMVLKNVTEVSSSXLLTGLDPEFFQQMANTLRKNGKYYISQQATKAALQVLIDACLWGRNRLKIVESGAIFELIELELSNPEKRVSELVFCLLANLCVLADGRAELLKHAAGIAVVTKRTLRISSATDDSALQILGLISKFSATNEVLLEMLRVGGVSKLCMAIQADCEPHLKKKAREILRAHSHVWSNSPCISLYTVYLLTDFLDNSKI

SEQ ID NO: 5113 - protein, 394 aa, Hordeum vulgare subsp. vulgare
MSKDVKFSDEEVTSHPRVGEGEEQTVGPARQSSIFALTLDELQNSVCNPGRNFGSMNMDEFMSNIWNAEEFLAATGGCLVGMEEVPVVGGGGSGGDGGDAGGSTLCRQGSFSLPPPLCRKTVEEVWAEINREPRPGHAQAQAARPSPQPPVQPPAGNGGGAVAANGRQGTLGEMTLEQFLVKAGVVRGSVAGGQAPMPGSMVHGQMNPMQQGQQPGPMMYQMAPANGMFPVMGDGMGFVPNGYAGMVVVPPPPPSQGGVGIVSPGSSDGRSAMTQADMVNCMADGAMMENGGARKRGAPGDQSCERSIERRHRRMIKNRESAARSRARKQAYTVELEAELNHLKEENARLKAEEKTILLTKKQMLVEKMMEQSKENVNAKKGGALSRRCGSCSW

SEQ ID NO: 5114 - protein, 302 aa, Hordeum vulgare subsp. vulgare
GGAGKDFGSMNMDELLRNIWTAEESNAIAATLTTATTAVPTSNVDAQPQPPPPQQQQQAILRQGSITLPRTLSQMTVDEVWRDIMGFCDEEPPPPPAPAPAQAERQQTLGRMTLEEFLVRAGVVREDMGGQTVVVPARAQALFPQGNVVAPTMQVGNGVVHGVVGQGAGVPMTVAAPTTPGVLNGFGKMEGGDLSSLSPVPYPFDTVTRARKGPTVEKVVERRQRRMIKNRESAARSRQSKQAYIMELEAEVAKLKENNEALQKKQVEMLQKQKDEVIERIEKQLGPKAKRFCLRRTLTGPW

SEQ ID NO: 5115 - protein, 336 aa, Pseudomonas putida
MTHKVALNFEDGVTRFIDANTGETVADAAYRQGINLPLDCRDGACGACKCFAESGRYGLGEEYIEDALSEAEAEQGYVLTCQMRAESDCVIRVPAASDVCKTLQASYQAAISNVRQLSESTISLSIKSASLNQLAFLPGQYVNLQVPGSDQTRAYSFSSLQKDGEVSFLIRNVPGGLMSSFLTSLAKVGDSVSLAGPLGAFYLREIKRPLLLLAGGTGLAPFTAMLEKIAEQGSEHPLHLIYGVTHDYDLVEMDKLEAFAARIPNFSYTACVASPDSAYPQKGYVTQYIEPKHLNGGEVDVYLCGPPPMVEAVSQYIRAQGIQPANFYYEKFAASA

SEQ ID NO: 5116 - protein, 350 aa, Pseudomonas putida
MNEFFKKISGLFVPPRESTVSVRGQGFQFKVPRGQTILESALHQGIAFPHDCKVGSCGTCKYKLISGRVNELTSSAMGLSGDLYQSGYRLGCQCIPKEDLEIELDTVLGQALVPIETSALIRKQKRLAHDIVELELVSDKQIAFYPGQYADVECAECSAVRSYSFATPPQPDGSLSFHVRLVPGGIFSGWLFGGDRTGATLTLRAPYGQFGLHESNATMVCVAGGTGLAPIKCVLQSMTQAQRKRDVLLFFGARQQRDLYCLDEIEALQFDWGGRFELIPVLSEESSTSSWKGKRGMVTEYFKEYLTGQAYEGYLCGPPPMVDAAETELVRLGVARELVFADRFYNRPPC

SEQ ID NO: 5117 - protein, 336 aa, Pseudomonas putida
MTHKVALNFEDGVTRFIDANAGETIADAAYRQGINLPMDCRDGACGACKCFAESGRYDLGEEYIEDALSEAEAEQGYVLTCQMRAESDCVIRVPAASDVCKTQQASYQAAISNVRQLSESTIALSIKSASLNQLAFLPGQYVNLQVPGSDQTRAYSFSSLQKDGEVGFLIRNVPGGLMSSFLTSLAKVGDSVSLAGPLGAFYLREIKRPLLLLAGGTGLAPFTAMLEKIAEQGSEHPLHLIYGVTHDHDLVEMDKLEAFAARIPNFSYSACVASPDSAYPQKGYVTQYIEPKHLNGGEVDVYLCGPPPMVEAVSQYIRAQGIQPANFYYEKFAASA

SEQ ID NO: 5118 - protein, 165 aa, Nicotiana attenuata
AQIFSDSKVVSEVPWFGIEQEYTLLQQNVKWPLGWPVGGYPVPQGPYYCGAGADKSFGRDISDAHYKACLYAGINISGTNGEVMPGQWEFQVGPSVGIEAGDHIWCARYILERITEQAGVVLSLDPKPIEGDWNGAGCHTNYSTLSMREEGGFEVIKKAILNLSL

SEQ ID NO: 5119 - protein, 213 aa, Pseudomonas fluorescens
MRTTRTFARIVMHCWHACAACSSILPIFPCWVEELLLKLLILDRDGVINHDSDAYIKSVEEWLPLPGSIEAIAQLSKAGWTVAVATNQSGIARGYYDLAVLEAMHEHLRALVAEQGGEVGLIVYCPHGPDEGCDCRKPKPGMLKTIAAHYGVALAGVWFVGDSLGDLEAAKAVDCQPVLVKTGKGEKTLGKTLPVGTLIFDDLAAIAAELIHN

SEQ ID NO: 5120 - protein, 245 aa, Eucalyptus globulus
MGRGRVQLKRIENKINRQVTFSKRRCGLLKKAHEISVLCDADVALIVFSTKGKLFEYATDCCMERILERYERYSYAESQVLTNNAETNGNWTLEHAKLKARMEILQKNQKNLMGEELDSLSLKELQNLEHQLDTALKNIRSRKIQLMCESISELQRKDKALQEQNNMLAKKVKEKEKALAQQTQWDNPQDDGLTSSSVILSQSLQPLNIGGPYHPSGIEEGAALGPPQHRNATLFPSWMLSHLQE

SEQ ID NO: 5121 - protein, 640 aa, Lolium multiflorum
MATATSTAVAFSGATATLPKPRTLPRHLLPSSRRALAAPIRCSAVSPSPSPAPPATALRPWGPSEPRKGADILVEALERCGISDVFAYPGGASMEIHQALTSSPLITNHLFRHEQGEAFAASGYARASGRVGVCVATSGPGATNLVSALADALLDSIPMVAITGQVQRRMIGTDAFQETPIVEVTRSITKHNYLVLDVEDIPRVIQEAFFLASSGRPGPVLVDIPKDIQQQMAVPVWDAPMSLPGYIARLPKPPATELLEQVLRLVGEERRPILYVGGGCSASGEDVRRFVELTGIPVTTTLMGLGNFPSDDPLSLRMLGMHGTVYANYAVDKADLLLAFGVRFDDRVTGKIEAFASRSKIVHIDIDPAEIGKNKQPHVSICADVKLALQGLNAVLTGSKCDKSFDFASWHDELEQQKREFPLGYKTFGEAIPPQYAIQVLDELTKGEAIIATGVGQHQMWAAQYYTYKRPRQVLSSAGLGAMGFGLPAAAGTAVANPGVTVVDIDGDGSFLMNIQELALIRIENLPVKVMILNNQHLGMVVQWEDRFYKANRAHTYLGNPENESEIYPDFVTIAKGFNVPAVRVTKRSEVRAAIKKMLETPGPYLLDIIVPHQEHVLPMIPSGGAFKDIIMEGDGRISY

SEQ ID NO: 5122 - protein, 153 aa, Arabidopsis thaliana
ALCVHSLSVYANDIQTSPKRLAETAIAVTLSRAQSTKLFVSRLTRMKGLKKREVEAIKDCVEEMNDTVDRLTKSVQELKLCGSAKDQDQFAYHMSNAQTWTSAALTDENTCSDGFSGRVMDGRIKNSVRARIMNVGHETSNALSLINAFAKTY

SEQ ID NO: 5123 - protein, 903 aa, Oryza sativa Indica Group
QIRKAKLISLGRGNRFAAVRDDEQTADALSRRYRDYNFLDYHEKVIDGFYDIFGPSMESSKQGKMPSLADLQTGIGDLGFEVIVINRAIDTTLQEMEQVAQCILLDFPVANIAALVQRIAELVTDHMGGPVKDANDMLTRWLEKSTELRTSLHTSLLPIGCIKIGLSRHRALLFKILADSVGIPCKLVKGSNYTGDDDDAINIIKMNEREFLVDLMAAPGTLIPSDVLSWKGNSLNSNARLTQNPLAGSSSTTDSNLSANALPPGHKGGQLPLFSSGDWILASQSGYEKDGATTSSQASSSGTTSVAAGSAFDSSWTLVSHGQSDDPSTSAGMSAQQKVILPGGEHPWNENINARNENIKLVSDLQGNSESINLFADLNPFGGREPKRTSVPLNGPDNRNNELQRRRENVVPSTRRPQQRLVMKNWSPYNDVSNNKQYNYVEDSFARRNIGDNAASSSQVARPSAKNTNLNVGVRTDTPYMAAHNYDNSMAGSSAMKMTSTAGIGKVPDKVLYGDLDKGLTNSRLGDQPPIERHKWGNSVEGRIPTGTVHNQAKEHKENFDGKQDNKKLHPDPKKSPLDRFMDTSMPSRNPESVSPSFARSHKLDTMFDDVSECEIHWEDLVIGERIGLGSYGEVYRADWNGTEVAVKKFLDQDFYGDALDEFRSEVRIMRRLRHPNIVLFMGAVTRPPNLSIVSEYLPRGSLYKILHRPNCQIDEKRRIKMALDVAKGMNCLHISVPTIVHRDLKSPNLLVDNNWNVKVCDFGLSRLKHSTFLSSKSTAGTPEWMAPEVLRNEQSNEKCDVYSFGVILWELATLRMPWSGMNPMQVVGAVGFQDKRLDIPKEIDPLVARIIWECWQKDPNLRPSFAQLTSALKTVQRLVTPSHQESQSPPVPQEIWVNSSTP

SEQ ID NO: 5124 - protein, 957 aa, Hordeum vulgare subsp. vulgare
  misc_feature (467)..(467): Xaa can be any naturally occurring amino acid
  unsure (1)..(957): unsure at all Xaa locations
MKIPFVTKWSHRSSEPAGPSNSAAAQQQQPPPLSPSAPSRSPPVASTEAAGDEFILQEEEYQMQLALALSASASGAEGAGDPDGEQIRKAKLMSLGKGDPVTNSDLGGGYTAESLSRRYRDYNFLDYNEKVIDGFYDIFGPSAESSGHGKIPSLAELHMSIGDLGYEVIVVDYKFDNALQEMKEVAECCLLGCPDITVLVRRIAEVVADHMGGPVIDANEMITRWLSKSIEQRTSHQTSLLHIGSIEIGLSRHRALLFKILADMVGIPCKLVKGSHYTGVVDDAINIIKMDNKREFLVDVMAAPGTLIPADVFNSKGTPFNFSQTLGQNQVVESASNIEDDPVALQSEHEHYQGHMFANNDRVSDNLSSYENTMTAGSSASEPGTLGKASTLAGAPSKQKKNLQLIPDSHEIDESRNLFAEFDPFNATESGKSSLAFKGLNNRNSDFRRRRENVVPPSARSQQPLVXKNWSACNDISNNKQYNVADGSVPRRNATDNASSSQLALSTAKHYNPNVRELNDRMYAAPARNYDNRIIGTSAMAKASTGDCLDRSQVPPGLYYDKMLGTSSMNTASSSGIGKVAEKDLQNDLEKGPIYSRFDGELSKNAQGFTPERDEHKENCGSYDHRMLHPDPRKSPLDRFMDRPRQNIECVSPSQVGSSKVDLVLDEVSECEILWEDLVIDERIGIGSYGEVYHADWNGTEVAVKKFLDQEFYGDALEEFRCEVRIMRRLRHPNIVLFMGAVTRPPHLSIVSEYLPRGSLYKIIHRPNCQIDEKRRIKMALDVARGMNCLHTSVPTIVHRDLKSPNLLVDDNWTVKVCDFGLSRLKHSTFLSSKSTAGTPEWMAPEVLRNEQSNEKCDIYSFGVILWELATLRKPWHGMNQMQVVGAVGFQDRRLDIPKEVDPIVASIIRDCWQKDPNLRPSFIQLTSYLKTLQRLVIPSHQETASNHVPYEISLYR

SEQ ID NO: 5125 - protein, 654 aa, Leptolyngbya boryana
MTDTLAAPTLNKFEKLKAEKDGLAVKAELEHFARLGWEAMDETDRDHRLKWLGVFFRPVTPGKFMLRMRVPNGIITSGQTRVLGEILQRYGDDGNADITTRQNFQLRGIRIEDLPEIFRKFDQAGLTSIQSGMDNVRNITGSPVAGIDADELIDTRGLVRKVQDMITNNGRGNSSFSNLPRKFNIAIAGCRDNSVHAEINDIAFVPAFKDGTLGFNILVGGFFSGKRCEAAIPLNAWVDPRDVVAVCEAILTVYRNLGLRANRQKARLMWLIDEMGLEPFREAVEKQLGYAFTPAAAKDEILWDKRDHIGIHAQKQPGLNYVGLHVPVGRLYAQDLFDLARIAEVYGSGEIRLTVEQNVIIPNVPDSRVSALLREPIVKRFSIEPQNLSRALVSCTGAQFCNFALIETKNRAVALMQELEQDLYCPRPVRIHWTGCPNSCGQPQVADIGLMGTKVRKDGKTVEGVDLYMGGKVGKHAELGTCVRKSIPCEDLKPILQEILIEQFGARLWSDLPESARPNPTALITLDRPTVETPNGKSTTVQELNAQEFDYVLSAPPVVKAPTEIAAPATIRFAQSGKEITCTQDDLILDIADQAEVAIESSCRSGTCGSCKCTLLEGEVSYDSEPDVLDEHDRASGQILTCIARPVGRILLDA

SEQ ID NO: 5126 - protein, 1131 aa, Sorghum bicolor
MSSSRPAHSSSSSSRTRQSSQARILAQTTLDAELNAEYEESGDSFDYSKLVEAQRSTPSEQQGRSGKVIAYLQHIQRGKLIQPFGCLLALDEKSFRVIAFSENAPEMLTTVSHAVPNVDDPPKLGIGTNVRSLFTDPGATALQKALGFADVSLLNPILVQCKTSGKPFYAIVHRATGCLVVDFEPVKPTEFPATAAGALQSYKLAAKAISKIQSLPGGSMEALCNTVVKEVFELTGYDRVMAYKFHEDEHGEVFAEITKPGIEPYLGLHYPATDIPQAARFLFMKNKVRMICDCRAKSVKIIEDEALSIDISLCGSTLRAPHSCHLQYMENMNSIASLVMAVVVNENEEDDEPGPEQPPQQQKKKRLWGLIVCHHESPRYVPFPLRYACEFLAQVFAVHVNKEFELEKQIREKSILRMQTMLSDMLFKEASPLSIVSGSPNIMDLVKCDGAALLYGDKVWRLQTAPTESQIRDIAFWLSEVHGDSTGLSTDSLQDAGYPGAASLGDMICGMAVAKITSKDILFWFRSHTAAEIKWGGAKHDPSDKDDNRRMHPRLSFKAFLEVVKMKSLPWSDYEMDAIHSLQLILRGTLNDALKPVQASGLDNQIGDLKLDGLAELQAVTSEMVRLMETATVPILAVDGNGLVNGWNQKVAELSGLRVDEAIGRHILTLVEDSSVSIVQRMLYLALQGKEEKEVRFELKTHGSKRDDGPVILVVNACASRDLHDHVVGVCFVAQDMTVHKLVMDKFTRVEGDYKAIIHNPNPLIPPIFGADQFGWCSEWNVAMTKLTGWHRDEVIDKMLLGEVFDSSNASCLLKSKDDFVRLCIIINSALAGEEAENAPFGLFDRNGKYIECLLSVNRKVNADGVVTGVFCFIHVPSDDLQHALHVQQASEQTAQRRLKAFSYMRHAINKPLSGMLYSRETLKSTGLNEEQMRQVHVADSCHRQLNKILADLDQDNITDKSSCLDLDMAEFVLEDVVVSAVSQVLIGCQGKGIRVACNLPERFMKQKVYGDGIRLQQILSDFLFVSVKFSPVGGSVDISSKLTKNSIGENLHLIDFELRIKHQGAGVPAEILSQMYEEDNKEPSEEGLSLLVSRNLLRLMNGNIRHIREAGMSTFILTAELAAAPSAVGQ

SEQ ID NO: 5127 - protein, 1178 aa, Sorghum bicolor
MASGSRATPTRSPSSARPEAPRHAHHHHHHHSQSSGGSTSRAGGGGGGGGGGGGTAATATATATESVSKAVAQYTLDARLHAVFEQSGASGRSFDYSQSLRAPPTPSSEQQIAAYLSRIQRGGHIQPFGCTLAVADDSSFRLLAFSENAADLLDLSPHHSVPSLDSAAPPPVSLGADARLLFSPSSAVLLERAFAAREISLLNPLWIHSRVSSKPFYAILHRIDVGVVIDLEPARTEDPALSIAGAVQSQKLAVRAISRLQALPGGDIKLLCDTVVEHVRELTGYDRVMVYRFHEDEHGEVVAESRRDNLEPYLGLHYPATDIPQASRFLFRQNRVRMIADCHATPVRVIQDPGMSQPLCLVGSTLRAPHGCHAQYMANMGSIASLVMAVIISSGGDDEQTGRGGISSAMKLWGLVVCHHTSPRCIPFPLRYACEFLMQAFGLQLNMELQLAHQLSEKHILRTQTLLCDMLLRDSPTGIVTQSPSIMDLVKCDGAALYYHGKYYPLGVTPTESQIKDIIEWLTVCHGDSTGLSTDSLADAGYLGAAALGDAVCGMAVAYITPSDYLFWFRSHTAKEIKWGGAKHHPEDKDDGQRMHPRSSFKAFLEVVKSRSLPWENAEMDAIHSLQLILRDSFRDAAEGTSNSKAIVNGQVQLGELELRGINELSSVAREMVRLIETATVPIFAVDTDGCINGWNAKIAELTGLSVEEAMGKSLVNDLIFKESEEIVEKLLSRALRGEEDKNVEIKLKTFGSEQSNGAIFVIVNACSSRDYTQNIVGVCFVGQDVTGQKVVMDKFINIQGDYKAIVHNPNPLIPPIFASDENTSCSEWNTAMEKLTGWSRGEVVGKFLIGEVFGSFCRLKGPDALTKFMVVIHNAIGGQDYEKFPFSFFDKNGKYVQALLTANTRSKMDGKSIGAFCFLQIASAEIQQAFEIQRQQEKKCYARMKELAYICQEIKNPLSGIRFTNSLLQMTDLNDDQRQFLETCSACEEQMSKIVKDATLQSIEDGSLVLEKSEFSFGDVMNAVVSQAMLLLRERDLQLIRDIPDEIKDASAYGDQFRIQQVLADFLLSMVRSAPSENGWVEIQVRPNVKQNSDGTDTELFIFRFTYPGEGLPADIVQDMFSNSQWSTQEGVGLSTCRKILKLMGGEVQYIRESERSFFLIVLELPQPRPAADREIS

SEQ ID NO: 5128 - protein, 1135 aa, Sorghum bicolor
MSSPLNNRGTCSRSSSARSRHSARVVAQTPVDAQLHAEFESSQRNFDYSSSVSAAIRPSVSTSTVSTYHQTMQRGLYIQPFGCLLAVHPDTFTLLAYSENAPEMLDLTPHAVPTIDQRDALAVGADVRTLFRSQSSVALHKAATFGEVNLLNPILVHARTSGKPFYAILHRIDVGLVIDLEPVNPVDVPVTAAGALKSYKLAAKAISRLQSLPSGNLSLLCDVLVREVSELTGYDRVMAYKFHEDEHGEVISECRRSDLEPYLGLHYPATDIPQASRFLFMKNKVRMICDCSATLVKIIQDDSLAQPLSLCGSTLRASHGCHAQYMANMGSVASLVMSVTISNDEEEDVDTGSDQQPKGRKLWGLVVCHHTSPRFVPFPLRYACEFLLQVFGIQLNKEVELAAQAKERHILRTQTLLWDMLLRDAPVGIFTQSPNVMDLVKCDGVALYYQNQLLLLGSTPSESEIKSIATWLQENHDGSTGLSTDSLVEAGYPGAAALREVVCGMAAIKISSKDFIFWFRSHTTKEIKWGGAKHEPVDADDNGRKMHPRSSFKAFLEVVKWRSVPWEDVEMDAIHSLQLILRGSLQDEDANRNNVRSIVKAPPDDTKKIQGLLELRTVTNEMVRLIETATAPVLAVDIAGNINGWNNKAAELTGLPVMEAIGRPLIDLVVVDSIEVVKRILDSALQGIEEQNLEIKLKAFHEQECNGPIILMVNSCCSRDLSEKVIGVCFVGQDLTTQKMIMDKYTRIQGDYVAIVKNPSELIPPIFMINDLGSCLEWNKAMQKITGIQREDVIDKLLIGEVFTLHDYGCRVKDHATLTKLSILMNAVISGQDPEKLLFGFFDTDGKYIESLLTVNKRINAEGKITGAICFLHVASPELQHALQVQKMSEQAATNSFKELTYIHQELRNPLNGMQFTCNLLEPSELTEEQRKLLSSNILCQDQLKKILHDTDLESIEQCYMEMNTVEFNLEEALNTVLMQGIPLGKEKRISIERDWPVEISRMYLYGDNLRLQQVLADYLACALQFTQPAEGPIVLQVIPKKENIGSGMQIAHLEFRIVHPAPGVPEALIQEMFRHNPEVSREGLGLYICQKLVKTMSGTVQYLREADTSSFIILIEFPVAQLSSKRSKPSTSKF

SEQ ID NO: 5129 - protein, 585 aa, Raphanus sativus
MCGILAVLGCSDDSQAKRVRVLELSRRLRHRGPDWSGIYQNGGNYLAHQRLAIIDPASGDQPLFNEDKSIVVTVNGEIYNHEELRKGLKNHKFHTGSDCDVIAHLYEEHGENFVDMLDGIFSFVLLDTRDNSFMVARDAVGVTSLYIGWGLDGSLWVSSEMKGLHEDCEHFEAFPPGHLYSSKSGGGFKQWYNPPWFNESVPSTPYEPLAIRRAFEDAVIKRLMTDVPFGVLLSGGLDSSLVASITARHLAGTKAAKRWGPQLHSFCVGLEGSPDLKAGKEVAEYLGTVHHEFHFTVQDGIDAIEDVIYHVETYDVTTIRASTPMFLMSRKIKSLGVKMVLSGEGSDEIFGGYLYFHKAPNKQEFHQETCRKIKALHKYDCLRANKATSAFGLEARVPFLDKEFINTAMSLDPESKMIKPEEGRIEKWVLRRAFDDEERPYLPKHILYRQKEQFSDGVGYSWIDGLKAHAAENVNDKMMSNAAYIFPHNTPLTKEAYYYRMIFERFFPQNSARLTVPGGATVACSTAKAVEWDASWSNNMDPSGRAAIGVHLSAYDGSKVALPLPPHKAIDDMPMMMGQEVVIQT

SEQ ID NO: 5130 - protein, 399 aa, Paulinella chromatophora
MFIFYSMNQAIATNLHSQENDGLIEPHGGQLIDLMITENQKSILKIGVDHVIECSHRNACDLELLIVGGFSPLNGFMNENDYNSVVESHRTSLGLLFGLPIVMDTDRKDVEVDNRILLTYQGRDLAIMDVETKWEPDKAKEALNCYGTSSIEHPAVRMITSERGRFYLGGKIIGIELPSRVFPCKTPFQVRATLPPNEDVVAFQCRNPIHRAHYELFTRALHANNVSDQAVVLVHPTCGPTQGDDITGEVRFQTYERLAAEVDNPRIHWAYLPYSMHMAGPREALQHMIIRKNYGCTHFIIGRDMAGCKSSVTSKDFYGPYDAQNFATTVAPELGMQTVPSLNLVYTKEKGYVVADEAEKEGLHIQKLSGTEFRKMLRNGEEIPEWFAFRSVVEVLRAS

SEQ ID NO: 5131 - protein, 194 aa, Rhizobium leguminosarum
DVFPTLEQLPLWGFDGSSTQQAEGRSSDCVLKPVAIYPDPARTNGALVMCEVMMPDGVTPHASNARATILDDEDAWFGFEQEYFFYQNGRPLGFPEQGYPAPQGPYYTGVGYSNVGDVAREIVEEHLDLCLAAGINHEGINAEVAKGQWEFQIFGKGSKKAADQIWMARYLLQRLTEKYGIDIEYHCKPLGDTD

SEQ ID NO: 5132 - protein, 194 aa, Rhizobium leguminosarum
DVFPTLEQLPLWGFDGSSTMQAEGRSSDCVLKPVAIYPDPARTNGALVMCEVMMPDGVTPHPSNARATILDDEDAWFGFEQEYFFYQNGRPLGFPEQGYPAPQGPYYTGVGYSNVGDVAREIVEEHLDLCLAAGINHEGINAEVAKGQWEFQIFGKGSKKAADQIWMARYLLQRLTEKYGIDIEYHCKPLGDTD

SEQ ID NO: 5133 - protein, 1032 aa, Penicillium marneffei
MRQNMGYFDNIGAGEVTTRITADTNLIQDGISEKVALVIAALATFVTAFVIAYIKYWKLALICSSSIIALTLMMGGGSRFIIKYSKLSLESYAQGGNLAEEVISSIRTAIAFGTQERLAQQYDKHLDKAEKWGIRLQMIFAVVLGGMFSIMYLNTGLGFWMGSRFIVDGEIGVGQVLTVLMATIMSSFSLGNVAPNAQAFTSAVAAAAKIYSTIDRISPLDPMSEEGRKLDQVEGSIELCNVSQRYPSRPDVAVMKDVSLFIPAGKTTALVGPSGSGKSTIIGLVERFYNPVRGQVLLDGQDIQSLNLRWLRQQISLVSQEPILFATTIFENVRYGLLGTEFINESDEKLQQRIEQALEMANALDFVNALPEGIHTHVGERGFLLSGGQKQRIAIARAVVGDPKILLLDEATSALDTKSEGVVQAALDKAAEGRTTIVIAHRLSTIKTAHNIVVLVDGSIQEQGTHDQLLDSQGAYYRLVEAQRINEAKESGALSSEDTEEEAAAEEEKEIERTTSRIRMSRTLSSTASGFKPGLEREATLRSISSVVQSKKEQTKESHYSLWTLIKFIYSFNKKETPYMVVGLFFACLAGGAQPTQSVLYSNSIITISQPPSNYGQLKRDASFWSLMFLMLGLVQLIVYTTQGIMFAYSSEKLIRRARSQAFRTMLRQDITFFDSDENSTGALTSFLSTEAKHLSGISGATLGTLVNVTTTLAACCVIALAVGWKLALVCISTIPALLACGYWRFSVLAQFQARSKKAYEISASYACEATSAIRTVASLTREEDVLNTYRKQLEAQTRRSLFSVARSSVLYAASQALSFFCMALGFWYGGELFGKHQYTMFQFFLCFTQIIFGAQSAGSIFAFAPDMGNSKNAAADFKKLFDRRPAIDVWSEDGHKLDSAEGTVEFRNVHFRYPTRPEQPVLRGLNLTVNPGQYVALVGASGCGKSTTIALLERFYDPISGGVYIDGQNIANLNVNSYRQHLALVSQEPTLYQGTVRENILLGSNATDISEETIINACKNANIYDFILSLP

SEQ ID NO: 5134 - protein, 325 aa, Vitis vinifera
GGGNFGVARLVSDKRTRELFAVKFIERGQKIDEHVQREIMNHRSLMHPNIVRFKEVLLTPTHLAIVMEYAAGGELFGRICNAGRFSEDEARFFFQQLISGVSYCHSMRICHRDLKLENTLLDGSTAPRVKICDFGYSKSSVLHSQPKSTVGTPAYIAPEVLSRKEYDGKLSDVWSCGVTLYVMLVGAYPFEDPDDPRNFRKTIGRILSVHYSIPDYVRVSIECRHLLSRVFVANPDKRITIPEIKTHPWFLKNLPIEMMDGGSWQKNDVNNPSQSVEEILSIIQEARKTTGVRKAGGPFMEGSMDLDDIDADEDIETSGDFVCPL

SEQ ID NO: 5135 - protein, 487 aa, Pichia anomala
MSDITLGRYLFERLNQVKVQTIFGLPGDFNLSLLDKIYEVEGLRWAGNANELNAAYAADGYSRVKGLSAIITTFGVGELSALNGIAGSYAEHVGVLHIVGVPSISSQAKQLLLHHTLGNGDFTVFHRMSSNISQTTAFIKDINSAPAEIDRCIREAYVFQRPVYLALPANLVDDLVSSDLLSTPIDLSLKPNDPESENEVVSTVLELIKKADNPVILVDACASRHSALAETKDLMDLTQFPTFVTPMGKGAVDEQHPRFGGVYVGTLSKPDVKAQVENADLILSVGALLSDFNTGSFSYSYKTKNIVEFHSDHIKIRNATFPGVQFQSVLQNLNSKIAPVVKGYKPYPVPSLKLTTSPASPETPLTQEWLWTKLSSWLREGDVVITETGTSAFGIVQTRFPSNTTGISQVLWGSIGYSVGAALGAVAGAEEVDKEKRVILFVGDGSLQLTVQEISTMIRWGLTPYIFVLNNAGYTIERLIHGEKSFL

SEQ ID NO: 5136 - protein, 237 aa, Polytomella parva
FIYFKMQTSIRVSNRPVLHATKRIVTINGSNRAKCAVKASKAVLLKVENLEAKIASTGQPVLNGVNLIVHEGETHAIMGKNGSGKSTFSKVLVGHPDYIITNGSVEFRGKDLLVLEPEERSHLGLFLSFQSPVEIPGVSNIDFLRMAYNAKSKASGGKELDPLEFYAYIMPKLELLKMDSTFLNRNVNEGFSGGEKKRNEILQLAALESQMAILDEIDSGLDIDALRDVSAAVNTLR

SEQ ID NO: 5137 - protein, 139 aa, Streptococcus pneumoniae TIGR4
MSKEKVILAYSGGLDTSVAITWLKKDYDVVSVCMDVGEGKDLDFIHDKALKVWAVESYVIDVKDEFATDYVLVAHQSHAYYEQKYLLVSALSRPLISKKLVEIAHQIGATTIAHGCTGKGNDQVEYQIAVAKKANEAKK

SEQ ID NO: 5138 - protein, 448 aa, Streptococcus pneumoniae TIGR4
MHRHLKLWDLILLGIGAMVGTGVFTITGTAAATLAGPALVISIVISALCVGLSALFFAEFASRVPATGGAYSYLYAILGEFPAWLAGWLTMMEFMTAISGVASGWAAYFKGLLSQYGIAFPQALNGTFNPQAGTFVDLLPILVLVLVTSLVLLNAKAALRFNSILVILKFSALALFVLVGIWNIKFDNWSNFAPYGFGQIYGASTGIMAGASLMFFGFLGFESISMAVDEVKTPQKNIPRGIVLSLSIVTILYALVTLVLTGVVHYSHLNVDDAVAFALRSVGISWAANYVSLVAILTLITVCISMTYALSRMIYSLARDGLVPAAFKELTKTSKIPKNATILTGLASAVAAGMFPLASIAAFLNICTLAYLIMLAYGLIRLRKEKGMPKAGEFKTPLVPLLPILSIIICLSFMLQYNMNTWIAFLVALLVGSIIYFTYGYKHSTIEE

SEQ ID NO: 5139 - protein, 313 aa, Streptococcus pneumoniae TIGR4
MKLFALNSNQEIAQKIAQAVGVPLGKLSSRQFSDGEIQVNIEESVRGYDVYIIQSTSFPVNNHLMELLIMVDACVRASAHSINVVLPYFGYARQDRIACPREPLTAKLVANMLVKAGVDRILTLDLHAVQVQGFFDIPVDNLFTVPLFAKHYCDKGLLGSDVVVVSPKNSGVKRARSLAEYLDAPIAIIDYPQDDATRNEGYIIGDVEGKKAILIDDILNTGRTFSEASKIVEREGATEIYAVSSHGLFVEGAAELLDNTNIKEILVTDSVATKEKTPKNVCYITASELIGDAIVRIHERKPVSPLFAYNKKK

SEQ ID NO: 5140 - protein, 371 aa, Streptococcus pneumoniae TIGR4
MIYLDNAATTPMSAVAISAMTKVMQETHGNPSSIHGHGRQAGKLLREARQELAQLLRTKPQHIFFTSGGTEGNNTTIIGYCLRHQEQGKHIITTAIEHHAVLETIDYLVQHFGFEATIIQPENQEITAQQIQKALRDDTILVSTMFVNNETGNLLPIAEIGQILKQHPAAYHVDAVQAIGKIPIHSEELGIDFLTASAHKFHGPKGIGFLYASSMDFDSYLHGGDQEQKKRAGTENLPAIVGMVAALKEDLEKQEEHFQHVQNLETAFLAELEGIQYYLNRGKHHLPYVLNIGFPGQKNDLLLLRLDLAGISISTGSACTAGVVQSSHVLEAMYGANSERLKESLRISLSPQNTVEDLQTLAKTLKEIIGG

SEQ ID NO: 5141 - protein, 275 aa, Streptococcus pneumoniae TIGR4
MLIGIPKEIKNNENRVALTPAGVHSLVSRGHRVLIETNAGLGSGFTDADYQKQGAEIVATAGEAWAAELVVKVKESLSSEYGYLRDDLLLFTYLHMAAAPELADAMLTAKTTETVRDNQGQLPLLVPMSEVAGRMAVQIGAHFLTKQAGGSGVLLGGVPGVPKGKVTIIGGGVVGTHAARIALGLGAQVTILDISSKRLSVLEEVFGSQIQTLMSNSFNIEASVRDADVVIGAILIPGAKAPELVTDEMVKQMRPGSVSLTLLLTKVALSKQLTV

SEQ ID NO: 5142 - protein, 155 aa, Streptococcus pneumoniae TIGR4
MEFMLDTLNLDEIKKWSEILPLAGVTSNPTIAKREGSINFFERIKDVRELIGSTPSIHVQVISQDFEGILKDAHKIRRQAGDDIFIKVPVTPAGLRAIKALKKEGYHITATAIYTVIQGLLAIEAGADYLAPYYNRMENLNIDSNSVIRQLALAI

SEQ ID NO: 5143 - protein, 315 aa, Hordeum vulgare subsp. vulgare
DDKLEATKAEMGEVREENERLMTLLSHIVRDYQSLQTHFHDAVKVKQQAPAADKLPAASAPAPTADDLVSLSLGSGGYSRPKGAHQRSLSSSSSGTETDPDDQLSLGLSSRRSTDGDDRQAARPSATPLMNLSSDSSADDTAAPGHDLPAAACPTATKARKSPGAGVDGADDEVLQQQAKKARVSVRVKCDTPTMNDGCQWRKYGQKISKGNPCPRAYYRCTVAPSCPVRKQVQRCADDMSILITTYEGTHSHPLPPPAAAAMASTTSAAASMLLAGSFSSSSHGHHLPFASAGLLGPTTISTIASCPIVTLDLT

SEQ ID NO: 5144 - protein, 407 aa, Hordeum vulgare subsp. vulgare
HEAPTTGKLFVASAANSTMPPDSTFSNDVFSFQPHSGPTSYSNVEKGYNVCHQNQSMSNMHQQGSSLQSSFTAVKDSADEAIVKPKTSDSMFSDNHTSEEQEENEEDQNEEYSSATNSNPGEDGYNWRKYGQKQVKSSEHPRSYYKCTHPDCPVKKKVERSQDGQITEIVYKSSHNHPLPPPNRRSGIPSSQINDPQVHVLERPGLHAGLNTASLWENGKSECIQDAQGVEGRSAACPPVSAYGDTSIMESQDAADVSSTLSNEIDRATQGTISLDCDGGEDETESKRRKLDALAAVTLPTATTTSSIDMVAAASRAVREPRVVVQTTSEVDILDDGYRWRKYGQKVVKGNPNPRSYYKCTHQGCSVRKHVERASHDLKSVITTYEGKHNHEVPAARNSGNGGSGSG

SEQ ID NO: 5145 - protein, 183 aa, Hordeum vulgare subsp. vulgare
GTRQGSNDVSSDALSGTPENSSASYGEDETNGVSSRLAGAVSGGEDQFDSEEPDSKRWRNDGDGEGTIMAVGNRTVREPRVVVQTMSDIDILDDGYRWRKYGQKVVKGNPNPRSYYKCTTPNCPVRKHVERASQDLRAVVTTYEGKHNHDVPAARGSGAAAARYRAATLQPAASYLQGAGGYS

SEQ ID NO: 5146 - protein, 1557 aa, Synechocystis sp. PCC 6803
MSFQYPLLAPMTNSSVATNSNQPFLGQPWLVEERDACGVGFIANLRGKPDHTLVEQALKALGCMEHRGGCSADNDSGDGAGVMTAIPRELLAQWFNTRNLPMPDGDRLGVGMVFLPQEPSAREVARAYVEEVVRLEKLTVLGWREVPVNSDVLGIQAKNNQPHIEQILVTCPEGCAGDELDRRLYIARSIIGKKLAEDFYVCSFSCRTIVYKGMVRSIILGEFYLDLKNPGYTSNFAVYHRRFSTNTMPKWPLAQPMRLLGHNGEINTLLGNINWMAAREKELEVSGWTKAELEALTPIVNQANSDSYNLDSALELLVRTGRSPLEAAMILVPEAYKNQPALKDYPEISDFHDYYSGLQEPWDGPALLVFSDGKIVGAGLDRNGLRPARYCITKDDYIVLGSEAGVVDLPEVDIVEKGRLAPGQMIAVDLAEQKILKNYQIKQQAAQKYPYGEWIKIQRQTVASDSFAEKTLFNDAQTVLQQQAAFGYTAQDVEMVVVPMASQGKEPTFCMGDDTPLAVLSHKPRLLYDYFKQRFAQVTNPPIDPLRENLVMSLAMFLGKRGNLLEPKANPRRTIKLRSPLVNEVELQAIKTGQLQVAEVSTLYDLDGVNSLETALDNLVKTAIATVQAGAEILVLTDRPNRRNIGLRIKVFIPPLLAVEAVHHHLIRAGLRLKASLIVDTAQCWSTHHFACLVGYGASAICPYLALESVRQWWLDEKTQKLMENGRLDRIDLPTALKNYRQSVEAGLFKILSKMGISLLASYHGAQIFEAIGLGAELVEYAFAGTTSRVGGLTIADVAGEVMVFHGMAFPEMAKKLENFGFVNYRPGGEYHMNSPEMSKSLHKAVAAYKVGGNGNNGEAYDHYELYRQYLKDRPVTALRDLLDFNADQPAISLEEVESVESIVKRFCTGGMSLGALSREAHETLAIAMNRLGAKSNSGEPPEDVVRYLTLDDVDSEGNSPTLPHLHGLQNGDTANSAIKQIASGRFGVTPEYLMSGKQLEIKMAQGAKPGEGGQLPGKKVSEYIAMLRRSKPGVTLISPPPHHDIYSIEDLAQLIYDLLQINPEAQVSVKLVAEIGIGTIAAGVAKANADIIQISGHDGGTGASPLSSIKHAGSPWELGVTEVHRVLMENQLRDRVLLRADGGLKTGWDVVMAALMGAEEYGFGSIAMIAEGCIMARVCHTNNCPVGVATQQERLRQRFKGVPGQVVNFFYFIAEEVRSLLAHLGYRSLDDIIGRTDLLKVRSDVQLSKTQNLTLDCLLNLPDTKQNRQWLNHEPVHSNGPVLDDDILADPDIQRKAINHQTTATKTYRLDNTDRTVGTRLSGSIAKKYGNNGFEGNITLNFQGAAGQSFGAFNLDGMTLHLQGEANDYVGKGMNGGEIVIVPHPQASFAPEDNVIIGNTCLYGATGGNLYANGRAGERFAVRNSVGKAVIEGAGDHCCEYMTGGVIVVLGPVGRNVGAGMTGGLAYFLDEVGDLPEKINPEIITLQRITASKGEEQLKSLITAHVEHTGSPKGKAILANWSDYLGKFWQAPPSEKDSPEANGDVSLTGEKTLTSV

SEQ ID NO: 5147 - protein, 167 aa, Pfiesteria piscicida
MADDEHTFESTDAGASATFPMQAGEIRKGSHLMIKGRPCKCVEVSTSKTGKHGHAKAHIVALDIFTGKKYEDLCPTSHNLDVPFVKRTEYQVLSADADSGEVSLLMEDGSTKDDLNLPTFVKVGEPTDEDKKCTSELLEGMEAGKNVVVIVQAACGEEKIVTVKVTD

SEQ ID NO: 5148 - protein, 86 aa, Pfiesteria piscicida
MAEGEAAAHIQLKVKDQQGSEVQFKIKKSTPLRKLMDAYCSRLGLQASQVRFMVDGERIAPDDTAEKLGLEDEDLIDVAMEQTGGR

SEQ ID NO: 5149 - protein, 298 aa, Prorocentrum minimum
MPEVMSIVKTPKEAFQGMVDKGVGMGGDSSIKIFHQSFYAGCYIGFGGMLSMVVAGGLKSAAEDNPTIQTFVFAALFPVNLLLILLTGGVLITGTAATVPAAVFEGKLPPVQIARTFALAWLGNLLGALLFAGFVTACNLNVGLTSELAIKVAEKKIKENFGVTFLKGIGCNWLVCMAVFLQGQAQDMVGKMVGIWFPISCFVAIGFEHIPANMFMIPMGMMAGADVSVLDCLWRNFIPVTLGNIFAGSIFVGGGYSFAFGRLGSSPMFNMPTKEQGPSKEQQATGNAVEVPPEAQGL

SEQ ID NO: 5150 - protein, 637 aa, Prorocentrum minimum
MSKKTAVGIDLGTTYSCVGVWKNDGVEIIANDQGNRTTPSYVAFTDTERLIGDAAKNQVARNPENTVFDAKRLIGRKFADPIVQADIKLWPFKVEAGTGDKPMIVVTSQGEEKKFHPEEISSMILLKMKETAEAYLGAKCNDAVVTVPAYFNDSQRQATKDAGTISGMNVLRIINEPTAAAIAYGLDKKGSGEKNILIYDMGGGTFDVSLLTIEDGIFEVKATAGDTRLGGEDFDNRIVDFCMQDFKRKNRGKDLAGNQRAIRRLRTQCERAKRTLSSSTQATIEIDSLMDGIDFSCSLSRARFEELNMDYFRNSMGPVEKCLRDSGIDKRNVHEVVLVGGSTRIPKVQAMIQEFFNGKEPNKSINPDEAVAFGAAVQAAILTGEGSSQVQDLLLLDVTPLSMGLETAGGVMTKLIERNTTIPTKKGQTFTTYADNQPGVLIQVFEGERAMTKDNNLLGKFHLDGIPPAPRGVPQIEVTFDIDANGILNVSAQDKSTGKSNQITITNEKGRLSQAEIDRMVQEAEKYRAEDESNKAKIEAKNGLENYCFTMRNTLQEEKLKDKFEGGDKEKIEKAVQDALDWLDKNQLAEKDEFEAKQKELEGIVNPIMMKVYQAAGGGGMPEGGMPGAGPTVEEVD

SEQ ID NO: 5151 - protein, 210 aa, Aegiceras corniculatum
NGKYELGCILGHGTFAKVYLARNVPSGKNVAMKVVGKEKVIKVGMMEQVKREIAVMKRVKHPNIVELHEVMASKTKIYFAMELVRGGELFAKVAKGRLKEDVARHYFQQLISAVDFCHSRGVYHRDLKPENLMLDDDGNLKVADFGLSAFADHLRQDGLLHTTCGTPAYVAPEVLGKKGYDGAKADIWSCGVILYVLLAGFLPFQDENLV

SEQ ID NO: 5152 - protein, 151 aa, Zinnia violacea
WFQNRRTRWKTKQLERDYGVLKSNFDSLKHKYESLKQDNESMVKQIKELKSKLYEEDEPDNIPMPEQSDDKPKSPENMVETAYFPDFKDGSSDSDSSAIMGDAQKAYQPQFVKLEEHNFFGGDESCNFFSDDQAPTLQWYCQDQWNLSEEN

SEQ ID NO: 5153 - protein, 110 aa, Zinnia violacea
KIWFQNRRARTKLKQTEVDCEFLKRCCENLTEENRRLQKELQELKALKLSPQFYMQMAPPTTLTMCPSCERVGAPPSQKSIDHQHRKLPFYPWPTSASQVVQRQMGALHH

SEQ ID NO: 5154 - protein, 142 aa, Zinnia violacea
KIWFQNRRARWKTKQLERDYNLLKDNYDVLKRNYHKLQQEKESITKELVELKAKVYKDTKEDNNAMFLGSDPTNTTLNNDKTHKLLDGLSDSDSSGVLNDENMNISDHNISWSLNMTTFGVSSICSSSSKELIIDQGAYQQL

SEQ ID NO: 5155 - protein, 247 aa, Zinnia violacea
MKRHGSSDSVGLMPMCHTLDETREFHSMLMEGLDDDCGGVDGGECDRGLISEKKRRLTAVQVKALEKNFEMENKLEPERKVKLAKELALQPRQVAIWFQNRRARWKTKQLERDYGVLKSNFDSLKHKYESLKQDNESMVKQIKELKSKLYEEDEPDNIPMPEQSDDKPKSPENMVETAYFPDFKDGSSDSDSSAIMGDAQKAYQPQFVKLEEHNFFGGDESCNFFSDDQAPTLQWYCQDQWNLSEEN

SEQ ID NO: 5156 - protein, 741 aa, Agrobacterium rhizogenes
MAGSSFTLPSTGSAPLDMMLIDDSDLLQLGLQQVFSKRYTETPQSRYKLTRRASPDVSSGEGNVHALAFIYVNAETLQMIKNARSLTEANGVKDLVAIDVPPFRNDFSRALLLQVINLLGNNRNADDDLSHFIAVALPNSARSKILTTAPFEGSLSENFRGFPITREGNVACEVLAYGNNLMPKACSDSFPTVDLLYDYGKFFESCAADGRIGYFPEGVSKPKVAIIGAGISGLVAASELLHAGVDDVTVYEASDRLGGKLWSHGFKSAPNVIAEMGAMRFPRSESCLFFYLKKHGLDSVGLFPNPGSVDTALFYRGRQYIWKAGEEPPELFRRVHHGWRAFLQDGYLHDGVMLASPLAIVDALKLGHLQQAHGFWQSWLTYFERESFSSGIEKMFLGNHPPGGEQWNSLDDLDLFKALGIGSGGFGPVFESGFIEILRLVVNGYEDNVRLSYEGISELPHRIASQVINGRSIRERTIHVQVEQIDREEDKINIKIKGGKVEVYDRVLVTSGFANIEMRHLLTSSNAFFHADVSHAIGNSHMTGASKLFLLTNEKFWLQHHLPSCILTTGVAKAVYCLDYDPRDPSGKGLVLISYTWEDDSHKLLAVPDKRERFASLQRDIGRAFPDFAKHLTPADGNYDDNIVQHDWLTDPHAGGAFKLNRRGNDVYSERLFFQPFDVMHPADDKGLYLAGCSCSFTGGWVDGAIQTACNATCAIIYGSGGTLKEGNPLAHAWKRYRYQA

SEQ ID NO: 5157 - protein, 405 aa, Triticum turgidum subsp. dicoccoides
MGSSDSSSGSAQKATRYHHQHQPPPPQRGSAPELPPGFRFHPTDEELVVHYLKKKADKAPLPVNIIAEVDLYKFDPWELPEKATIGEQEWYFFSPRDRKYPNGARPNRAATSGYWKATGTDKPILASGTGCGLVREKLGVKKALVFYRGKPPKGLKTNWIMHEYRLTDASGSTTATNRPPPVTGGSRAAASLRLDDWVLCRIYKKINKAAAGDQQRNTECEDSVEDAVTAYPLYATAGMTGAGAHGSNYASPSLLHHQDSHFLDGLFTADDAGLSAGATSLSHLAAAARASPAPTKQFLAPSSSTPFNWLDASPVGILPQARNFPGFNRSRNVGNMSLSSTADMAGAVDNGGGNAVNAMSTYLPVQDGTYHQQHVILGAPLVPEAAAATSGFQHPVQISGVNWNP

SEQ ID NO: 5158 - protein, 645 aa, Lotus japonicus
MGTIGNNSHEGDHHGVNFTAQRGFYTKLKSGLKETFFPDDPFRQIKEEENRSRRIIKGVQYYVPIFEWLPNYTLRLFISDFISGLTITSLAIPQGISYAKLANLPPIVGLYSSFVPPLVYAIFGSSRHMAVGTLAAASLLIGQTISTVASPETDPTLYLHLIFTTTFVTGVFQACLGIFRLGILVDFFSHSTITGFMGGTAFILIAQQLKGFFGMKHFSTKTNLVEVAKSIITNRHEIRWETTVLGLVFLAFLQFTRHVRNKRPKLFWVSAIAPMTVVIVGSIFVYLVHGQKHGIPIVGHLDRGLNPWSIQYFNFDSKYLPAVMQAALITGVLSLAEGIAIGRSFSVTDNTPHDGNKEMVAFGLMNLFGSFTSCYLTSGPFSKTAVNYNAGGKTAMTNVVQAVLMALTLQFLAPLFGFTPLVALSAIITSAMLGLVNYTEVIYLYKVDKFDFVICMAAFLGVAFLGMDYGLMISVGLGVIRALLYVARPATCKLGKLNEFGIYRDVEQYPASTFPGLIIVQLGSPVYFSNSVYVKERVMRYIKSQQRSNEDVVEQVILDMSGVTSIDTTAIEGLLELNKMLEKNGIEMFLVNPRLEVMEKLIISKFVDKLGKESFYLTLDDAVKASQYSLKKNDNGDIVHETSHA

SEQ ID NO: 5159 - protein, 300 aa, Glycine max
MQQIHSMPGGRFFSGSGSADRRLRPHHQNQQALKCPRCDSLNTKFCYYNNYNLSQPRHFCKNCRRYWTKGGVLRNVPVGGGCRKSKRSSKPNKITPSETASPPPPPHPDHNNNSNSHSSSESSSLTAAVATTTEAVSAPETLNSDSNNNNNMQESKLLIPALETNNPLEQGTGDCGGIFSEIGPFTSLITTTTSTNEPLGSGFGFGNSTLPDASSFQWHYQKVSSNNEELKLPENSFLDHTVDLSGMHSKTSHGGGFGSLDWQGGADQGLFDLPNTVDHAYWSHTHWSDHDNSSSLFHLP

SEQ ID NO: 5160 - protein, 341 aa, Glycine max
MQEIHSIGGGRFFGGGGDRRLRPHHQNHHQQPPIKCPRCDSLNTKFCYYNNYNLSQPRHFCKNCRRYWTKGGVLRNVPVGGGCRKSKRSNKPKTTTSAAATTSSNNNNNNPSSSSETAAATAPTPPQQPPPPLELEHNSHSHSSSESSTYTVAATEAMSAPTTNAVSNNNLLLDNNRESKVFANPNPYLEQSRSGGLFSDIESFSSLVNLNNQALGFGFGNNNSNISILDATSFRFGVSVTNPHGNDQVLAAPGGGHGQWQQQQQNHHEFGTASFLDHTVPLEFSSLQHKAGHQGGFGPLDWQPGGDQGLFDLPNTVDQPYWTHHTHWSDQDNPSSLFHLP

SEQ ID NO: 5161 - protein, 358 aa, Medicago truncatula
GSEESELYHAQIHLYKHVYNFVSSMALKSAMELGIADAIHNHGKPMTLSELASSLKLHPSKVNILHRFLRLLTHNGFFAKTIVKGKEGDEEEEIAYSLTPPSKLLISGKPTCLSSIVKGALHPSSLDMWSSSKKWFNEDKEQTLFECATGESFWDFLNKDSESSTLSMFQDAMASDSRMFKLVLQENKRVFEGLESLVDVGGGTGGVTKLIHEIFPHLKCTVFDQPQVVGNLTGNENLNFVGGDMFKSIPSADAVLLKWVLHDWNDEQSLKILKNSKEAISHKGKDGKVIIIDISIDETSDDRGLTELQLDYDLVMLTMFLGKERTKQEWEKLIYDAGFSSYKITPISGFKSLIEVYP

SEQ ID NO: 5162 - protein, 357 aa, Medicago truncatula
SEESELYHAQIHLYKHVYNFVSSMALKSAMELGIADAIHNHGKPMTLSELASSLKLHPSKVNILHRFLRLLTHNGFFAKTIVKGKEGDEEEEIAYSLTPPSKLLISGKPTCLSSIVKGALHPSSLDMWSSSKKWFNEDKEQTLFECATGESFWDFLNKDSESSTLSMFQDAMASDSRMFKLVLQENKRVFEGLESLVDVGGGTGGVTKLIHEIFPHLKCTVFDQPQVVGNLTGNENLNFVGGDMFKSIPSADAVLLKWVLHDWNDEQSLKILKNSKEAISHKGKDGKVIIIDISIDETSDDRGLTELQLDYDLVMLTMFLGKERTKQEWEKLIYDAGFSSYKITPISGFKSLIEVYP

SEQ ID NO: 5163 - protein, 354 aa, Medicago truncatula
SELYHAQIHLYKHVYNFVSSMALKSAMELGIADAIHNHGKPMTLSELASSLKLHPSKVNILHRFLRLLTHNGFFAKTIVKGKEGDEEEEIAYSLTPPSKLLISGKPTCLSSIVKGALHPSSLDMWSSSKKWFNEDKEQTLFECATGESFWDFLNKDSESSTLSMFQDAMASDSRMFKLVLQENKRVFEGLESLVDVGGGTGGVTKLIHEIFPHLKCTVFDQPQVVGNLTGNENLNFVGGDMFKSIPSADAVLLKWVLHDWNDEQSLKILKNSKEAISHKGKDGKVIIIDISIDETSDDRGLTELQLDYDLVMLTMFLGKERTKQEWEKLIYDAGFSSYKITPISGFKSLIEVYP

SEQ ID NO: 5164 - protein, 417 aa, Synechocystis sp.
TSPTTTSTGTGTGSSTDQAISPLVEGENAPEVTTAKLGFIALTDAAPLIIAKEKGFYAKYGMPDVEVLKQASWGTTRDNLVLGSASGGIDGAHILTPMPYLITMGTVTDGKPTPMYILARLNVNGQGIQLGNNYKDLKVGTDAAPLKEAFAKVTDPKVAMTFPGGTHDMWIRYWLAAGGMEPGKDFSTIVVPPAQMVANVKVNAMESFCVGEPWPLQTVNQGVGYQALTTGQLWKDHPEKAFGMRADWVDQNPKAAKALLMAVMEAQQWCDQAENKEEMCQILSKREWFKVPFEDIIDRSKGIYNFGNGQETFEDQEIMQKYWVDNASYPYKSHDQWFLTENIRWGYLPASTDTKAIVDKVNREDLWREAAQALEVPADQIPSSPSRGIETFFDGITFDPENPQAYLDSLKIKSIKA

SEQ ID NO: 5165 - protein, 93 aa, Saccharomyces cerevisiae
ARMDWKETPEAHVFKADLPGVKKEEVKVEVEDGNVLVVSGERTKEKEDKNDKWHRVERSSGKFVRRFRLLEDAKVEEVKAGLENGVLTVTVPK

SEQ ID NO: 5166 - protein, 413 aa, Synechocystis sp. PCC 6803
MYSPGYVATSSRQSDAGNRLFVYEVIGLSQSTMTDGLDYPIRRSGSTFITVPLKRMNQEMRRITRMGGKIVSIKPLEGDSPLPHTEGIAKPSQSEGSGSEAVANPAPESNKTMTTTPKEKKADDIPVNIYRPKTPYIGKVLENYPLVREGAIGTVQHLTFDLSAGDLRYLEGQSIGIIPPGKDDKGKPHKLRLYSIASTRHGDFGDDKTVSLCVRQLEYQNEAGETVQGVCSTYLCNIKEGDSIAITGPVGKEMLLPPDEDANIVMLATGTGIAPFRAFLWRMFKEQHEDYKFKGLAWLIFGIPKSENILYKDDLEKMAAEFPDNFRLTYAISREQQNAEGGRMYISTGLAENAEELWNLMQNPKTHTYMCGLKGMEPGIDEAFTALAEQNGKEWTTFQREMKKEHRWHVETY

SEQ ID NO: 5167 - protein, 577 aa, Mesotaenium caldariorum
VFGLQLNMEVELSSQLREKHILRTQTLLCDMLLRDAPMGIVSQSPNITDLVKCDGAALFYHGRAWLLGVTPSEAQVRDIAAWLLDSHKDSTGLSTDSLADAGYPNADSLGVSVCGMAAARITSKDFLFWFRSHAQKEVKWAGAKQEPGDRDREEGEEGGRMHPRSSFQAFLEVVKQRSLPWEDVEMDAIHSLQLILRGSFQDMEGEGGGSQQGNKRMINARLNDLKLQGMDELSTVANEMVRLIETATAPILAVDSLGCVNGWNAKVSELTGLPVSEAMGKSLVKDLVQRESREAVERVLYMALNGEEEQNVEIQLKTWGPQLHSHGGTVILVVNACASRDVSESVVGVCFVGQDVTGEKEVLDKFIRIQGDYTTIVRSRNSLIPPIFGSDEYGCCTEWNPAMEKLTGVRREDVIGRMLTGDVFGSALRLRGSDGLTQFMIVLNRAMDGADTDKFPFTFYDREGKCVDSLLTANKRTDADGAITGVFCFLHTVSLELQQALSVQKAAERVAEAKAKELAYIRQEIQNPLDGIHFARSFIEHTELSEDQKQLMETSATCEKQLRRILDDMDLESIEEG

SEQ ID NO: 5168 - protein, 1142 aa, Mesotaenium caldariorum
MSTSRMSQSSGESTAKTKREVRVAQATADAKLNTAFEASAAVGGSFDYTKSVGASLNAGSEAIPSSAVTAYLQRMQRGGITQTFGCMLMVEEGSFRVRAFSENAGEMLDLVPQAVPSMGQQSLIAVGTDIRTLFTSASVSLLEKAAMATDVSVMNPVSLQSRAAKKPFFAVLHRIDVGLVVDLEPVRPSDPNVSAAGAMQSHKLAAKAISRLQSLPGGDIGLLCDAVVEEVRELTGYDRVMAYKFHEDEHGEVIAEIRRSDLEPYLGLHYPATDIPQAARFLFMKNRVRIICDCSAPPVKVIQDPTMKHPISLAGSTLRGVHGCHAQYMANMGSVASLVMAVIINDNSSEEGATAAGGILHKGRKLWGLVVCHHSSPRYVPFPLRSACEFLMQVFGLQLNMEVELSSQLREKHILRTQTLLCDMLLRDAPMGIVSQSPNITDLVKCDGAALFYHGRAWLLGVTPSEAQVRDIAAWLLDSHKDSTGLSTDSLADAGYPNADSLGVSVCGMAAARITSKDFLFWFRSHAQKEVKWAGAKQEPGDRDREEGEEGGRMHPRSSFQAFLEVVKQRSLPWEDVEMDAIHSLQLILRGSFQDMEGEGGGSQQGNKRMINARLNDLKLQGMDELSTVANEMVRLIETATAPILAVDSLGCVNGWNAKVSELTGLPVSEAMGKSLVKDLVQRESREAVERVLYMALNGEEEQNVEIQLKTWGPQLHSHGGTVILVVNACASRDVSESVVGVCFVGQDVTGEKEVLDKFIRIQGDYTTIVRSRNSLIPPIFGSDEYGCCTEWNPAMEKLTGVRREDVIGRMLMGDVFGSALRLRGSDGLTQFMIVLNRAMDGADTDKFPFTFYDREGKCVDSLLTANKRTDADGAITGVFCFLHTVSLELQQALSVQKAAERVAEAKAKELAYIRQEIQNPLDGIHFARSFIEHTELSEDQKQLMETSATCEKQLRRILDDMDLESIEEGYLELETGEFMMATVMNSVVSQGMVQSSKKGLQLFCDTPPEFKSMCVFGDQVRLQQVLADFLMNAVQFTPASGWVEIKVVPNVRSLPGGITMAHMEFRVTHSGEGLPEDLVHQMFDRADAHSKSQEGLGLSMCRKIVRLMSGEVRYVREPGKSYFLVLLDLPLAQREDAGSAM

SEQ ID NO: 5169 - protein, 564 aa, Aphanothece halophytica
MVKQSKRPDFEEELLEEQPERYPGDTNFQKWGFDLHPQVAPISGGLVLLFIILTLTFKEQASSVFNATLNSIATYGGWFYILAANIFLGVVLIFAFSKFGRIRLGGQDAKPEFSTFAWFAMLLSAGMGIGLMFWSVGEPMFHFIGPPPIFGSEAGTPDAAETAMTITFYHWGLHPWGLYALVGLGLAFFAFNRGLPLTMRSVFYPLLGERIYEWPGHVIDILAVVADLFGLATSLGLGVQQVAAGLSFLIPAINEGVITQVTLIAIITGFATLSVVAGLDGGVRRLSEWNLYLAATFMVFVLVLGPTLFIFDTFVQNIGNYVARFPMLSFWTESFGSGEESTWQNSWTVFYWGWWISWSPFVGMFIARVSRGRTIREFVMGVLIAPTLLSFLWLSTMGGAALNLQLTNAGDIAAAVQENVATAMFVMLDNFPLTALSSIVGILLVTIFFVTSSDSGSLVVDNLTSGGKLDSPVPQRVFWAVMEGVVAAVLLLGGGLTALQTAAITTGLPFAIVLLIMCYSLNQGLSQELQELEMAELRDAEAKREEKIAAIMASRQEARFAQDE

SEQ ID NO: 5170 - protein, 193 aa, Daucus carota
MKLSKSTLVFSALLVILAAASAAPANQFIKTSCTLTTYPAVCEQSLSAYAKTIQNNPQELASTALQVSLTRTQQAQTFMKRLNKFKGLKARQYAAIHDCLEEVEDSLDRVSRSCDEMKNLSHAKGNDFTFRMSNVETWVSAALTDETTCMDGFAGKGMDGKIKESVRAQVVAVARVTSNALALVNNFAAKHKH

SEQ ID NO: 5171 - protein, 341 aa, Oryza sativa Japonica Group
MGVMSKQQQEAMAEEMMELRRGPWTLEEDNLLMNYIACHGEGRWNLLARCSGLKRTGKSCRLRWLNYLKPDIKRGNLTPEEQLLILELHSRWGNRWSRIAQHLPGRTDNEIKNYWRTRVQKQARQLKVDANSTVFRDAVRCYWMPRLLEKMAGAATDPTPPPPPPLHHHAAMATASSSPFDFDTHLQQAEAATACVVPNNVYHHHIDPSPSTSTSAGSTAAAAAFQPLPCFSELRWDQQMQSSGELDDGAAGVFVDSASALGSLSLDGLDLGPAEYYSDSTLLDYLNSSCTGSAMMTMMTASGNAGSYNYCGGAMDGGDTWRSDEVCQAAARKLGEWGGGI

SEQ ID NO: 5172 - protein, 672 aa, Aspergillus awamori
MARISHQGAAKPFTAWTTIFYLLLVFIAPLAFFGTAHAQDETSPQESYGTVIGIDLGTTYSCVGVMQNGKVEILVNDQGNRITPSYVAFTDEERLVGDAAKNQYAANPRRTIFDIKRLIGRKFDDKDVQKDAKHFPYKVVNKDGKPHVKVDVNQTPKTLTPEEVSAMVLGKMKEIAEGYLGKKVTHAVVTVPAYFNDAQRQATKDAGTIAGLNVLRVVNEPTAAAIAYGLDKTGDERQVIVYDLGGGTFDVSLLSIDNGVFEVLATAGDTHLGGEDFDQRVMDHFVKLYNKKNNVDVTKDLKAMGKLKREVEKAKGTLSSQMSTRIEIEAFHNGEDFSETLTRAKFEELNMDLFKKTLKPVEQVLKDAKVKKSEVDDIVLVGGSTRIPKVQALLEEFFGGKKASKGINPDEAVAFGAAVQGGVLSGEEGTGDVVLMDVNPLTLGIETTGGVMTKLIPRNTVIPTRKSQIFSTAADNQPTVLIQVYEGERSLTKDNNLLGKFELTGIPPAPRGVPQIEVSFDLDANGILKVHASDKGTGKAESITITNDKGRLSQEEIDRMVAEAEEFAEEDKAIKAKIEARNTLENYAFSLKNQVNDENGLGGQIDEDDKQTILDAVKEVTEWLEDNAATATTEDFEEQKEQLSNVAYPITSKLYGSAPADEDDEPSGHDEL

SEQ ID NO: 5173 - protein, 313 aa, Gossypium hirsutum
MESTWVDTTLDLNINSSHNTIQVLKRESSGKLADSDVKVPVKQETGALVEELNRIIAENKKLTEMLTVLCERYSSLQNQYMELVSRNSGSDATAATSKKRKAECEDYVPMIGFSGKAESSFSDEDSCKKPKDCIKAKISRAYVRPNPSDNSLIVRDGYQWRKYGQKVTRDNPSPRAYFKCSFAPSCPVKKKVQRSAEDPSILVATYEGEHNHEQHSPPALSSLSPNGGTSNPRSAPVSSSSSAPAKSSPPTVTLELMKPTGLGNDTQNPTQQVDEPAIQQILVQQMAASLTRDPNFTAALASAISGKVLDHKW

SEQ ID NO: 5174 - protein, 307 aa, Lactobacillus reuteri
VANQYGATAIAHGCTGKGNDQVRFEAGIHALAPDMKIEDPIRDWHWSREEEIQYAKDNGIPVPITKASPYSIDENLWGRANECGILEDPWAAAPADAYDRTVSIEEAPDTPTTIEITFSEGVPTAIDGEEMPLDQLIMKLDKLAGSHGIGRIDHVENRLVGIKSREIYECPAATVLLAAHKDLEDLTQEREVAHFKPLIEQKMSEIIYNGLWYSPLMKSLVAFIDESQAVVNGVVRVKLFKGNVICEGRKSPNSLYDKNLATYTSADEFDQEAATGFIKLWELPDKVYAQVQNKNKKKVKENTSDAY

SEQ ID NO: 5175 - protein, 392 aa, Bacillus sp. YM-2
MKELLANRVKTLTPSTTLAITAKAKEMKAQGIDVIGLGAGEPDFNTPQNIMDAAIDSMQQGYTKYTPSGGLPALKQAIIEKFKRDNQLEYKPNEIIVGVGAKHVLYTLFQVILNEGDEVIIPIPYWVSYPEQVKLAGGVPVYIEATSEQNYKITAEQLKNAITDKTKAVIINSPSNPTGMVYTREELEDIAKIALENNILIVSDEIYEKLLYNGAEHFSIAQISEEVKAQTIVINGVSKSHSMTGWRIGYAAGNADIINAMTDLASHSTSNPTTASQYAAIEAYNGPQDSVEEMRKAFESRLETIYPKLSAIPGFKVVKPQGAFYLLPDVSEAAQKTGFASVDEFASALLTEANVAVIPGSGFGAPSTIRISYATSLNLIEEAIERIDRFVK

SEQ ID NO: 5176 - protein, 659 aa, Gossypium hirsutum
MAAATSNSALPKLSTLTSSFKSSIPISKSSLPFSTTPQKPTPYRSFDVSCSLSHASSNPRSAAASVTQKTAPPHYFISRYADDEPRKGADILVEALEREGVKDVFAYPGGASMEIHQALTRSKIIRNVLPRHEQGGVFAAEGYARSSGISGVCIATSGPGATNLVSGLADAMLDSIPLVAITGQVPRRMIGTDAFQETPIVEVTRSITKHNYLVLDVDDIPRIVSEAFFLASSGRPGPVLIDVPKDIQQQLAVPKWNHSLRLPGYLSRLPKAPAEAHLEQIVRLVSESKKPVLYVGGGCLNSSEELKRFVELTGIPVASTLMGLGAFPISDELSLQMLGMHGTVYANYAVDKSDLLLAFGVRFDDRVTGKLEAFASRAKIVHIDIDSAEIGKNKQPHMSVCSDVKLALQGINKILETTGAKLNLDYSEWRQELNEQKLKFPLSYKTFGEAIPPQYAIQVLDELTGGNAIISTGVGQHQMWAAQFYKYKKPRQWLTSGGLGAMGFGLPAAIGAAVANPEAVVVDIDGDGSFIMNVQELATMRVENLPVKILLLNNQHLGMVVQWEDRFYKANRAHTYLGDPSNESEIFPNMLKFAEACGIPAARVTKKEDLKAAIQKMLDTPGPYLLDVIVPHQEHVLPMIPSGGAFKDVITEGDGRTQY

SEQ ID NO: 5177 - protein, 356 aa, Cucumis melo
MSLLSDLINLNLSDSTEKIIAEYIWIGGSGMDLRSKARTLSGPVSDPPKLPKWNYDGSSTGQAPGEDSEVILYPQAIFRDPFRRGNNTLVICDAYTPAGEPIPTNKRHAAAKIFSHPDVVAEVPWYGIEQEYTLLQKDVKWPIGWPIGGFPGPQGPYYCGVGVDKAFGRDIVDAHYKACLYAGVNISGINGEVMPGQWEFQVGPSVGISAGDELWVARYILERITEIAGVVLSFDPKPIQGDWNGAGAHTNYSTKSMREEGGYEVIKKAIEKLKLRHKEHIAAYGEGNERRLTGRHETADINTFSWGVANRGASVRVGRDTEKEGKGYFEDRRPASNMGPYVVTSMVAETTILWKP

SEQ ID NO: 5178 - protein, 495 aa, Artemisia annua
MKSILKAMALSLTTSIALATILLFVYKFATRSKSTKKSLPEPWRLPIIGHMHHLIGTTPHRGVRDLARKYGSLMHLQLGEVPTIVVSSPKWAKEVLTTYDITFANRPETLTGEIVLYHNTDVVLAPYGEYWRQLRKICTLELLSVKKVKSFQSLREEECWNLVQEIKASGSGRPVNLSENVFKLIATILSRAAFGKGIKDQKELTEIVKEILRQTGGFDVADIFPSKKFLHHLSGKRARLTSLRKKIDNLIDNLVAEHTVNTSSKTNETLLDVLLRLKDSAEFPLTSDNIKAIILDMFGAGTDTSSSTIEWAIPELIKCPKAMEKVQAELRKALNGKEKIHEEDIQELSYLNMVIKETLRLHPPLPLVLPRECRQPVNLAGYNIPNKTKLIVNVFAINRDPEYWKDAEAFIPERFENSSATVMGAEYEYLPFGAGRRMCPGAALGLANVQLPLANILYHFNWKLPNGVSYDQIDMTESSGATMQRKAELLLVPSF

SEQ ID NO: 5179 - protein, 307 aa, Solanum demissum
MAFFPTNFMLQTPHHEDEHQPSTSLNPILPSCSPQDFHGIASFLGKRSMSFSGMDGNNACEENHGEDDLSDDGSQAGEKKRRLNMEQVKTLEKNFELGNKLEPERKMQLARALGLQPRQIAIWFQNRRARWKTKQLEKDYEVLKRQFDAIKAENDALQTQNQKLHAEIMSLKNREQPTESINLNKETEGSCSNRSENSSEIKLDISRTPAIDSPLSNHHPNISSRPFFPPSMIRSNNNNNSNNGVVVPHQLFHINSSSPRQDLKLMDQNTTTTNNNSSVKEESLSNMFCGIDDQTSFWPWLEQQHFN

SEQ ID NO: 5180 - protein, 173 aa, Solanum demissum
MAFFPTNFMLQTPHHEDEHQPSTSLNPILPSCSPQDFHGIASFLGKRSMSFSGMDGNNACEENHGEDDLSDDGSQAGEKKRRLNMEQVKTLEKNFELGNKLEPERKMQLARALGLQPRQIAIWFQNRRARWKTKQLEKDYEVLKRQFDAIKAENDALQTQNQKLHAELVFLEV

SEQ ID NO: 5181 - protein, 513 aa, Solanum demissum
MAGLSLAAGGWTSNLIVFLINEFNMKSIAAAKVFNVVNGLTTIFPIVGGIIADSYLGCFSVIWISSLISALGILLLLLTVVIDALRPLACGDGSSLCTSPSTNQYVFLYVSLALASIGVGGTRFTVAPMGAYQFDKPKHQTMFFDWYIFIFYLCWALSTAFIVYVEDNISWAWGFGISMACNILGLAIFLAGKRFYRHVKEQGGSPFVNLARVVVAATQKWRAPLSDQTQHYYHDPSDKTTLVPTKFFKFLNCAAIITEGDTKPDGSICNPWRLCTVQQVEDLKSLIKLFPLWASGLLISTQLVMQLSLLTLQALKMDRHMGPHFEIPAAISIIDRILNPFLAKYTTFSLTPLQRVGIGHALTISCMAVSALVESRRLRVARSHHLQGQKDAIVPMSVFWLLPQLALNGIGEGFHFPGHIAFYYQEFPTSLKNTSTAMVSLFIGIAFYLGNVLIDVVQRETGWLPDNINDGRMDNVFWLCCTLGSVNFIYFLLVASFYKYKNMESKPNNVPSK

SEQ ID NO: 5182 - protein, 531 aa, Solanum demissum
MAGLSLASGGWTSNLIVYLIDEFNMKSIKTAKVYNVINGCTTLFPIVGGILADSYLGSFSVIWFSSLISALGILLLLFTSAIDVLRPPPCDDGSSLCTSPSTHQYAVLYVALALASLGVAGTRFIIAPMGANQFDKPKHQAIFFNWYIFAFYMSFAISTTVIVYVEDNVSWSWGYGISMAFNILGLAMFLIGKRFYCDVKEQGGSPFVNLARVIVVAIQKWRVPLSEQTQHYYHDPSDTTTTLTITQIPTKSFKFLNCAAFITEGDTKPDGSISNPWRLCTVQQVEDLKSLIKLFPLWASGFLISTQLVIQASLLILQALKMDRHMGPHFEIPAGSMLVFILLFTCIAIFIIDRFLYPFLAKYTTFSLTPLQRIGIGHVITIISMAVSALVESRRLRIVRTHKLQGQNNDIVPMSVFWLVPQLALNGIGEGFHFPGHIAFYYQEFPTSLKSTSTAMVALFIGIAHYLGNTLIDLVQRLSGWLPDNINKGRTDNVFWLCCILGSANFMYYVVCASLYKYKNVDNKSNIAPSK

SEQ ID NO: 5183 - protein, 531 aa, Solanum demissum
MAGLSLASGGWTSNLIVYLIDEFNMKSIKAAKVYNVINGCTTLFPIVGGILADSYLGSFSVIWFSSLISALGILLLLLTSAIDVLRPPPCDDGSSLCTSPSTHQYAVLYVALALASLGVAGTRFTIAPMGANQFDKPKHQAIFFDWYIFAFYTSFAISTTAIVYVEDNVSWSWGYGISMAFNILGLAMFLIGKRFYRDVKEQGGSPFVNLARVIVIAIQKWRVPLSEQTQHYYHDPSDTTTTLTKTQIPTKSFKFLNCAAFITEGDTKPDGSISNPWRLCTVQQVEDLKSLIKLFPLWASGFLISTQLVIQTSLLILQALKMDRHMGPHFEIPAGSMSVFILLFTCIAIFIIDRFLYPFLAKHTTFSLTPLQRIGIGHVITIISMAVSALVESRRLRIVRTHKLQGQNNDIVPMSVFWLVPQLALNGIGEGFHFPGHIAFYYQEFPTSLKSTSTAMVALFIGIAYYLGNTLIDLVQRLSGWLPDNINKGRTDNVFWLCCILGSANFMYYVVCASLYKYKNVDNKSNIAPSK

SEQ ID NO: 5184 - protein, 373 aa, Solanum demissum
MSNFLVWSQGGKSLEIFYSGGMRPIFCGNVEYNARQSELERLFRRYGKVDRVDMKSGFAFVYMDDERDAEDAIRGLDRIEFGRKGRRLRIEWSKEERNGRRPETSRKSSSSVKPSKTLFVINFDPYSTRSRNIERHFDPYGKILNIRIRRNFAFVQYETQEDATRALDATNMSKLMDQVITVEYANKDDDDRRNGFSPDRNHDRGLKRGYDRGRSRSPYGRERGSPDYGRGRARSPSPIRQGRSSPDYGRRPSSNPNHRERDSEYGSGRSPNIRKERNPDHGNGHSPNPRRLRAGSENGEVHSPPEEGLLESGPSPPRVGRRGKYSPDDYRGRSRSPRSKPEEIGSPRYAAAESPLPERHRSLSPPTRERSRS

SEQ ID NO: 5185 - protein, 259 aa, Solanum demissum
MGRFDKEGLKKGPWTPEEDQKLLSFIDKHGCGSWRALPAKAGLQRCGKSCRLRWINYLRPDIKRGKFSLQEERTIIQLHALLGNRWSAIAAYLPSRTDNEIKNYWNSCLKKSHMAEWESARLEAEARLVQKSKILFHNNNSHNYNINPSTVSQQLPYYQQLPCLDILKAWQMTSTKLPTINDISHAILRNNSKNKKLDSSIPSSTLNSSENIFANNAPTTKVGDDHQNLHNLSTINSCFEDDHLQTELPSFMQEFSGFY

SEQ ID NO: 5186 - protein, 170 aa, Solanum demissum
MSSMHCQEAVYFLAAINTNHPRDDLGGMDVARKALILARLLGRRLNLDNMKIESLYPEEMGPDVMPLEDFLVNGLPLLDQKIEDRIKQASANGNVLRYVCLIDDARCEVGIQQVPNDSALGRLRGSDNVVEIYSRCYEKQPLVIQGAGAGNDTTAAGVLADILDIQDLFP

SEQ ID NO: 5187 - protein, 228 aa, Misopates orontium
MVRGKTQMRRIENATSRQVTFSKRRNGLLKKAFELSVLCDAEVALVIFSPRGKLYEFASSSMQETIERYQKHAKEVQANNPPTEHNFQHLKHETVSMMKKIEQLETSKRKLLGEGLGTCNMEELQQLEQQLERSVTSIRARKMQVYMQQIEQLKEKGKALAAENAMLSQKVGLQPQGQTSNSDKATCSFEKTEKATLGTSTEISEVSDVETELFIGLPETRAKRPPQK

SEQ ID NO: 5188 - protein, 247 aa, Misopates orontium
MGRGRVELKRIENKINRQVTFAKRRNGLLKKAYELSVLCDAEVALIIFSNRGKLYEFCSSSNMLKTIERYQKSSYGSLEVNHQAKDIEASSYKEYLKLKSKYESLQGYQRHLLGDDLGPLNMNDLEHLEHQLETSLKHIRSTRTQVMLDQLSDLQTKEKMMVDANKALERKLEEIYAANHIQQSWGGGGDHSNAYNDHQHAQSQGFFQPLECNSTLQIGFNDPVASSQMTAPTDAQNMHGLVPGWML

SEQ ID NO: 5189 - protein, 217 aa, Misopates orontium
MVRGKTQMRRIENATSRQVTFSKRRNGLLKKAFELSVLCDAEVSLIIFSPRGKLYEFASSSMQDTIERYQGHTKELQANNPPAEHNIQHVRHEAASLMKKIEQLETSKRKLLGEGLGTCTFEELQQLEQQLERSVATIRARKTQMFKQQIEQLKEKGKSLAAENAMLHQKIGVEQQVPALNLQKPVMGSSEISEVSDVETELFIGLPETRAKRPPQQ

SEQ ID NO: 5190 - protein, 438 aa, Porphyra yezoensis
MSKGKVVLAYSGGLDTSVILKWLQDQGYEVICFIADVGQTDDFEAARVKALSLGATKVYVENLRKEFVTDFIFPAVKVNAIYESRYLLGTSLARPCIARRQIQIAIAEKAQFVSHGATGKGNDQVRFELTFYALAPHIQVIAPWRDDTFIESFKGRSDLLAYARSKGIAMPSGDKPPYSMDDNLMHISYESGDLEDPACAPRDAIYTKTDPRESWPDTPETVRIEFRDGTPVKASSEASGESYTDPLELYLFLNQVAKRHGIGRIDIVENRFVGIKSRGVYETPGATILRCAHIDIEGVAMDREVMRLRDMLSPKFSELVYNGFWFAPEMDFLLAAVDKSQELIDGWVDVVCFKSNCMAVARSSPTSLYSADLSSMENVDGYQPSDAGGFIRINAVRLKAHRKILLATDRERLANAGPIGTTYAAVLDSDKTDAGAKK

SEQ ID NO: 5191 - protein, 423 aa, Streptomyces albulus
MGLVVQKYGGSSVADAEGIKRVAKRIVEAKKNGNQVVVVVSAMGDTTDELIDLAQEVSPIPSGREFDMLLTAGERISMALLAMAIKNLGHEAQSFTGSQAGVITDSVHNKARIIDVTPGRIKASLDEGNIAIVAGFQGVSQDKKDITTLGRGGSDTTAVALAAALNADVCEIYTDVDGVFTADPRVVKKARKIEWISFEDMLELASSGSKVLLHRCVEYARRYNIPIHVRSSFSGLQGTWVSNEPQGDRPMEQAIISGVAHDTSEAKVTVVGVPDKPGEAARIFRAIADSEVNIDMVVQNVSAASTGLTDISFTLPKAEGRKAVAALEKTRAAVGFDSLRYDDQIAKISLVGAGMKTNPGVTATFFEALSNAGVNIELISTSEIRISVVTRADDVNEAVQAVHSAFGLDSETDEAVVYGGTGR

SEQ ID NO: 5192 - protein, 191 aa, Glycine max
MSLPRPSEGKAPSQLKEGVAPAAAAASSSSSWNNRLHTFPPLSLHNKSSKIEDSDEDMFTVPDVETTPVSVHSAATLQNSNLTQRNVTDPQFQTGFPGKRRRGRNPADKEHRRLKRLLRNRVSAQQAREREKVYVNDLESRAKELQDKNAILEERISTLINENTMLRKVLMNARPKTDDSIEQKQDQLSKS

SEQ ID NO: 5193 - protein, 525 aa, Glycine max
MEDTEAASSFKMNNHMEQLTIPQFNASSQSQMRTVTRNHHHNQRGGGIPPSHPHQIPPISPYSHMNNQIPVSRPQMPSHSTSPTPSHTRSLSQPSFFSLDSLPPLSPCTFRESSSTSDHADVSMEDRDVTSHSPLPPFAARNPSLPPRKSHRRSNSDIPFGFSTVLQSSPPLIPLRGREGVKPNSSVVKRETNWEHGNVEGSGEKKSPEGEVVDDLFSAYMNLDSFDTLNSSGTDDKNGGENRDDLDSRACGTKTNGGDSSDNEAESSVNESGHGGSEKREGMKRSAGGEIAPTTRHYRSVSMDSFIGKLNFGDESPKLPPSPGQRGRLMSPAGGIDGNSAAFSLEFGSGEFSGPELKKIMANEKLAEIALTDPKRAKRILANRQSAARSKERKMRYISELEHKVQTLQTEATTLSAQLTLLQRDSAGLTNQNSELKFRLQSMEQQAKLRDALNEALTAEVQRLKIATAELSSDSHGSSCLIPQHSVNPLMFQQQPPSASQQNIHLQQQQHRQNGNANSNSDLKQ

SEQ ID NO: 5194 - protein, 177 aa, Aegilops tauschii
MAGRDRDPLVVGRVVGDVLDPFIRTTNLRVTFGNRTVSNGCELKPSMVAQQPRVEVGGNEMRTFYTLVMVDPDAPSPSDPNLREYLHWLVTDIPGTTGASFGQEVMCYESPRPTMGIHRFVLVLFQQLGRQTVYAPGWRQNFNTRDFAELYNLGPPVAAVYFNCQREAGSGGRRMYN

SEQ ID NO: 5195 - protein, 248 aa, Erwinia chrysanthemi
MLTIENLNVSVEDKPIINGLNLQVNPGEVHAIMGPNGSGKSTLSATLAGREDYEVIGGSLRFKGKDLLELSPEERAGEGIFMAFQYPVEIPGVSNRFFLQTALNAVRAYRQQPTLDRFDFEDFIDDKIRLLNMPDDLLTRSVNVGFSGGEKKRNDILQMAVLEPELCILDETDSGLDIDALKIVSGGVNALRDGKRAFIIVTHYQRILDYIRPDYVHVLYQGRIVKSGDFSLVKQLEEQGYGWLTDQQ

SEQ ID NO: 5196 - protein, 386 aa, Solanum tuberosum
MADMNQHPTVFQKAANQLDLRSSLSQDVHARYGGVQPAIYQRHFAYGNYSNAGLQRGQATQDLSLITSNASPVFVQAPQEKGFAAFATDFLMGGVSAAVSKTAAAPIERVKLLIQNQDEMLKAGRLSEPYKGIGECFGRTIKEEGFGSLWRGNTANVIRYFPTQALNFAFKDYFKRLFNFKKDRDGYWKWFAGNLASGGAAGASSLFFVYSLDYARTRLANDRKASKKGGERQFNGLVDVYKKTLKSDGIAGLYRGFNISCVGIIVYRGLYFGMYDSLKPVLLTGNLQDSFFASFGLGWLITNGAGLASYPIDTVRRRMMMTSGEAVKYKSSLDAFSQIVKNEGPKSLFKGAGANILRAVAGAGVLAGYDKLQVLVLGKKFGSGGA

SEQ ID NO: 5197 - protein, 302 aa, Haemophilus somnus 129PT
MNQKLFSVAVIGLGAMGMGAAKSCIQAGLDTYGVDLNLQALEILKTAGAKQVSTSAIGFAKDLDAVLLLVVNANQVNNILFGEQGLAQHLKPKTAVMISSTISAQDAKEISQKLTKLNLIMLDAPVSGGAAKAAQGEMTVMASGSSEAFEKLKPVLDAVSGKVYNIGEEIGLGATVKIIHQLLAGVHIAAGAEAMALAAKAGIPLDLMYDVVTNAAGNSWMFENRMKHVVDGDYTPLSMVDIFVKDLGLVNDTAKSLHFPLHLASTAYSMFTEASNAGYGKEDDSAVIKIFSGLDLPKKGGH

SEQ ID NO: 5198 - protein, 410 aa, Haemophilus somnus 129PT
MTTKVSLDKSKIKFLLLEGIHQNALEVLKAAGYTNIEYHRKALEPDELKIAIKDAHFIGIRSRTSLTEDILAEATKLIAIGCFCIGTNQVDLEAAKARGIPVFNAPFANTRSVAELVLGEILLLMRNIPQANADVHRGLWNKSMVGSYEVRGKRLGIIGYGHIGSQLSIIAEALGMNVYFYDIETKLPLGNAQQMNSLEELLSTCDVVSLHLPENSSTKNLMNAERIAQLKANCIFINAARGTVVDIDALAQALESKKIRGAAIDVFPKEPASIEEEFISPLRAFDNVILTPHIGGSTVEAQENIGVEVANKFVKYSDNGSTLSAVNFPEVSLPEHSNAKRLLHIHHNRPGILNKINQIFVEQNINIAAEYLQTEAKIGYVVIDVETEDTAQLLAKLKQIEGTIRARVLF

SEQ ID NO: 5199 - protein, 541 aa, Haemophilus somnus 129PT
MDSKRSLLFMALLFISFLIYQQWQVDYNTPKPEMTEQAQVSEVNSTALTATSDIANDTQAKGRVITLENDVFRLKVNTLGGDVIGSELLNYDAELHSSAPFVLLQNNADKVYIAQSGLVGKNGIDSRAGRANYQVEGDVFKLAEGQQELKVPLVFEKDGVIYRKVFVLKPGSYALEVNFEITNQSPKPIEVVPYAQLTHTLVESSGSMAMPTYTGGAYSSSETNYKKYSFEDMEKADLDIHTKAGWVALLQHYFVSAWIPNQDANNTLYTLTNTKKHLGSIGYRSAPIVIENGATETIHTQLWTGPKLQDQMADVANHLDLTVDYGWAWFIAKPLFKLLTLIQSLVQNWGLAIIGVTLVVKAILYPLTKAQYTSMAKMRMLQPKLQEMRERFGEDRQRMSQEMMKLYKEEKVNPLGGCLPILLQMPIFIALYWTFMEAVELRHAPFFGWVQDLSAQDPYFILPILMGASMFLLQKMSPTPVADPMQQKVMTFMPLIFMVFFLFFPAGLVLYWLASNLITIAQQWLIYRGLEKKGLHTRVKK

SEQ ID NO: 5200 - protein, 402 aa, Haemophilus somnus 129PT
MTFGTYETVALACLVLLLGYFLVKRVHFLSEYNIPEPVVGGFIVAIILSIVHHFWDMSFSFDTKLQTTMMLVFFSSIGLSANFARLAKGGKPLVIFLFAALGLIILQNTVGIGTSMLVGLDPAYGLIAGSVTLTGGHGTGAAWAETLSNRFGIQGALELAMACATFGLVFGGIIGGPVARFLLKRLHKAEVPEDENVDDIEEVFEKPVYRRKINTRSIIETITMMSVCLIVGQYLDVLTKGTALQLPTFVWCLFTGTVIRNALAHVVKFKVADEAIDVLGTVGLSLFLAIALMSLKLWELAGLALPILVVLLAQVVVMATYSIFVTYRMMGRDYDAVVLSAGHCGFGLGATPTAVANMQAVTSHFGPSHKAFLIVPMVGAFFIDLLNSVALNIFLNIVDVLH

SEQ ID NO: 5201 - protein, 510 aa, Haemophilus somnus 129PT
MLIGVPRELLDNESRVAATPKTVQQILKLGFEVIVENNAGFNASFEDQAFVNAGAKIGSAQDIWNADIIFKVNAPTDAEIAQIKEGATLISFIWPAQNSELMAKLSAKKINVLAMDAVPRISRAQALDALSSMANISGYRAVIEAAHEFGSFFTGQITAAGKVPPAKVLVIGAGVAGLAAIGAANSLGAIVRAFDSRPEVKEQVKSMGADFLEIDFQEEGGSGDGYAKVMSEEFNRRAMALYAEQAKEVDIIITTAAIPGKPAPRLITKEMVDSMKPGSVIVDLAALTGGNCDYTQAGEIVVTENQVKVIGYTDFPSRLPTQSSQLYGTNLVNLLKLLCKEKDGNIHIDFEDVVLRGVTVIRDGEVTWPAPPIQVSAQTQQKTTAPVVDKKEKTPINPKVKYGVMALAGAAFLWLGSVMPAAFLSHFTVFVLACVVGYYVVWNVSHALHTPLMAVTNAISGIIIVGALLQIAQGNFFISLLAFIAILVAAINIFGGFKVTQRMLAMFRKG

SEQ ID NO: 5202 - protein, 392 aa, Haemophilus somnus 129PT
MKFIDEALIRIEAGDGGNGCVSFRREKFIPKGGPDGGDGGDGGDVYLIADENLNTLIDYRFEKRFAAERGENGRSSDCTGRRGKDITLRVPVGTRAIDNDTKEVLGDLTKHGTKMLVAKGGYHGLGNARFKSSVNRAPRQKTNGTPGEKRDLQLELMLLADVGMLGLPNAGKSTFIRAVSAAKPKVADYPFTTLVPSLGVTRVDTSRSFVIADIPGLIEGASEGAGLGVRFLKHLERCHVLIHLVDIAPIDESDPADNIAIIEGELFQYSEKLANKPRWLVFNKIDTLSDEEATARAKNIMQRLGGEDDYYLISAATGKNVDVLCRDIMDFIEENPRQEQEKIDAQEVKFKWDDYHQEQLSEQVFTEDDQEGDDWDDWSEDDEEGVEIIYKP

SEQ ID NO: 5203 - protein, 404 aa, Haemophilus somnus 129PT
MKLPIYLDYAATCPVDERVVKKMMEFLSIDGNFGNPASRSHKFGWQAEEAVDVARNHIADLIGADSREIVFTSGATEADNLALKGVMRFYQTKGKHLITCKTEHKAILDTCRQLEREGFEVTYLDPKSDGLIDLEELKSVIRDDTVLVSIMHANNEIGVVQDIAKIGEICRERKVLFHTDATQSVGKLPINLSELKVDLLSMSSHKLYGPKGIGALYVCRKPRVRLEAIIHGGGHERGMRSGTLPVHQIVGMGEAYRIAKEEMATEMPRLTALRDRLYNGLKDIEETYVNGSMEQRLGNNLNISFNYVEGESLMMALRDIAVSSGSACTSASLEPSYVLRALGLNDELAHSSIRFTVGRYTTAEEIDYAIGLVKSAVEKLRDLSPLWDMFKEGIDLNSIEWTHH

SEQ ID NO: 5204 - protein, 562 aa, Haemophilus somnus 129PT
MLSLISFIGFTALVAVLAWWYTRKDDLSNSEGYYLAGRSLTATFIAGSMLLTNLSTEHLVGLNGLAYREGFIVMAWEVLAAITIAMFALYFLPKYLKLGIATIPEFLEKRFDKGTLLITSLLFLGCYVISLLPIVLYTGALALESLFDVSTVFNIDKTTAIWIMVWGIGILGSVYAIFGGLKAVAVSDTINGIGLLVGGILVAVLGLAYVGDGNAWHGLKTIYETNPDKFNSIGDDNSVVPFSTLFTGMIISNLFFWCTNQSIIQRALGAKSLKEGQKGVLLCAFLKLLGPLLIILPGIIAYHIYQGKLDIPDQAYPNLVHLVLPDALVGFFAAVVVGAVLSTFNSALNSSVTLFSRNVYKTQINPHASDMKLVSVGKWVGTGLAIMAMIVAPLVANAPDGLFFLIQELQGIFNAPILSVVVVGLLTKRVPAIAAKFGLVFGMVAYILCKFVIKVEIHFFHLIAILFVVNVVVMLIIGRIMPMETPYNEEYTKQVDIQPWAYAKAVSLVITFISISLYIFMAKDVLPAVWIGYYCFGAATVLYFIYSFVQHRNQQFRLKENN

SEQ ID NO: 5205 - protein, 755 aa, Haemophilus somnus 129PT
MDAQLRQAALDFHEFPKPGKIEVTPTKSLGTQRDLALAYSPGVAVPCLEIQADPASAYRYTSRGNLVAVISNGTAVLGLGNIGALAGKPVMEGKGVLFKKFAGVDVFDIEIDEQNPDKLVEVIAALEPTFGGINLEDIKAPECFYIEQKLRERLKIPVFHDDQHGTAIISAAAIINGLRIVNKKIEDVRLVASGAGAASIACLNLLVSLGMKRENITVCDSKGVIYKGRDEKMDDTKKLYAIDDNGQRSLADAIPDSDIFLGCSAAGALTQEMVKTMGPNPLILALANPEPEILPPLAKAVRPDAIVCTGRSDYPNQVNNVLCFPFIFRGALDVSATTINEEMKLAAVYAIADLALAEQSEVVSSAYGESGVSFGPDYIIPKPFDPRLIVKIAPAVAKAAMDSGVATRPIEDFEAYIEKLTQFVYKTNLFMKPVFAQAKEDKKRVILTDGEEKRVLHAIQEIATLGIAYPVLLGRTHIIEESIKKLGLQLQLGRDFEIIDIENNPYYEECCDTYYNKLKRQGMTPTGAKRKMLHNPTALGAVLLELGKVDAMICGLVGPFAAHLATVKEVVGEKEHEIPATVNGLVLPTGNLFIADTFVNSSPTAEELAEITIMSAKEVRRFGIEPQVALVSHSNYGSINDPSAVKMRQVLELVREKAPDLIIDGEMHCDIALSENLRKEVMPDSPIKGAANLLIMPNMETARISLNLLQGTATPITIGPILMGVEKPAHILTSASSVRRIINMVAVAAVKAQNR

SEQ ID NO: 5206 - protein, 480 aa, Haemophilus somnus 129PT
MNINIILPLVLYLLFVFGIAYYSYRQRSQGNFLSEYYIGNRSMSGFVLAMTTAATYVGAGSFIGGPGAAYKFGLGWVLLAMIQVPVVLFTLGVLGKKLAMLARKNQSLTVNDILFSRYKNPYIILLASLSLLFSFFIMMSVQFIGIGRLLETTLHIDYHISVLIFATTVGIYTFIGGFRAVVLTDTIQGLIMVLGTFLLLGGVIYAGGGISQLIDHLAKIDPHLITPYGTDDRPLDFTFMASFWVLVCFGLLGLPHTVVRAIAYKNSKALHSGIIIGTIVIAVLMLGIHLAGALGRAVIPTLDVSDKIIPTLMIQVLPPVVAGIFLAAPMAAIMSSVDSTLIQMSSTLIKDLYLRFYPAQIHNETGIKRLSILTTLFLTLLVTIATLNPPDMLIWLNLFALGGLETTFLWVMLFGLYWKKANAYGAISSMLVGLISYILLTALDIKLFNFHAIIPALLFGLIAFLLGNQVGNKLIKNEEK

SEQ ID NO: 5207 - protein, 404 aa, Haemophilus somnus 129PT
MRVFPKSDKLEHVCYDIRGPVHQEALRLEEEGKKILKLNIGNPAPFGFEAPDEILVDILRNLPAAQGYCDSKGLYSARKAIVQYYQSKNILSATVNDVYIGNGVSELITMSLQALLNDGDEVLIPMPDYPLWTAAATLAGGKAVHYLCDEQADWFPDVADIKSKVTSRTKAIVIINPNNPTGAVYSKELLLDIVEVARQNGLMIFADEIYDKILYDNAVHHHIAALAPDLLTVTFNGLSKSYRVAGFRQGWMILNGPKHQAKGYIEGLDMLASMRLCANHPMQHAIQTALGGYQSINEFILPGGRLLEQRNKAYELINQIPGLSCTKPMGALYMFPKIDTKKFNIYDDEKMVLDLLRQEKVLLVHGRGFNWQQPDHFRIVTLPYVNQIEDALGRLARFLEYYRQ

SEQ ID NO: 5208 - protein, 601 aa, Haemophilus somnus 129PT
MTETTITFNDLGLPEFILNAVSEMGFSTPSPIQQACIPHLLNGHDVLGMAQTGSGKTAAFSLPLLAKIDTNEKYPQMLVMAPTRELAIQVADACEQFVKFSKGVRIVTLYGGQRYDIQLRALKQGAQVVVGTPGRILDHIRRGTLDLSNLQSIVLDEADEMLRMGFIDDVETVMAELPEQHQTALFSATMPAPIKRITKRFMHNPQEVKIQSTQRTAPDITQSCWYVRGFRKNEALLRFLEVEDFDAAIIFTRTKTATLDVTELLEKHGFRAAALNGDMTQQLREQTLDRLRNGSLDILVATDVAARGLDVERISLVVNYDIPLDAESYVHRIGRTGRAGRAGRAILFVEPKERRLLGNIERLMKKAIEEVEMPNHLALQECRRKNFVAKITKQLEHHDLEQYRSLLEDLFTADQDQEDIAAAMLMLLQGKQKLILPEDPVFEKHSRRNDRRERGERRGKENPRSERHGYGTPQPMDLYRIEVGRCDGVEVRHVVGAIANEGDIQSRYIGHIKLYDTYSTIELPQGMPKELLQVFAKTRVLNKQMRMSFVSAVNSEEEFEAGSGGKRKGRYEREFRGGRKFNEKSNRSFSEQRKERRERKR

SEQ ID NO: 5209 - protein, 612 aa, Haemophilus somnus 129PT
MNDMVKNIVLWIVVAVVMMTAYQSFSGNSSNNAIDYTTFISDVENNQVSATKFNEVGEIFVTKKDGSKYTTVLPTPLEDRKLLDDLIKSKVKIDGALPEQRGFLSQILISWFPMILLIGVWFFFMRQMQGGGGKAMSFGKSRAKMLTKEQIKTTFADVAGCDEAKEEVGEIVDFLRDPSKFQKLGGKIPKGILMVGPPGTGKTLLAKAIAGEAQVPFFTISGSDFVEMFVGVGASRVRDMFEQAKKNAPCLIFIDEIDAVGRQRGAGLGGGHDEREQTLNQMLVEMDGFEGNEGVIVIAATNRPDVLDPALTRPGRFDRQVVVGLPDVRGREHILKVHMRKVPVADDVDAMTLARGTPGYSGADLANLVNEAALFAARTNKKLVTMLEFEKAKDKINMGPERRSMIMTDKVKESTAYHEAGHAIVGYLVPEHDPVHKVTIIPRGRALGVTFFLPEGDQVSISQKQLESKLSTLYAGRLAEELIYGEENISTGASNDIKVATNIARNMVTQWGFSDKLGPILYSEDEGEVFLGRSMAKAKHMSDETAHTIDEEVRSIVNRNYQRARQILTDNMDILHAMKDALVKYETIEEEQIKQLMNREPVVAPPGWTNNE

SEQ ID NO: 5210 - protein, 563 aa, Haemophilus somnus 129PT
MTTQQLISKLTDIVGNKFIITDPSKTESYRSGYRFGNGNAIAVVRPTNLVEYWNVLKACVEADVIIINQAANTGLTGGSTPSGNDYDRDIVIINTMYMNGIQLINNAEQAVCLPGSTLNELEILLKTHGREPHSVIGSSCIGASVIGGICNNSGGALVQRGPAYTEMALYAQLNEQGELELKNHLGIDLGNDPEEILENLQNQRYQRKDIQQHCGRGHDHSYCEHVRQIDENSPARFNADPSRHYETSGSAGKLAVFAVRLDTFPMEKHTAVFYIGTNQTDVLNDIRRHMLANFQQLPISGEYIHRDAFDIAAKYGKDTFWIIKKFGTHRLPKLFALKAKVDRIAKKVSFLPNDFSDKFMQILSKAMPEHLPKSLWQYRDQYEHHLIVKIGGTGVQEAQEYLKEYFSDNSKGNYFQCNAEETQAAMLHRFAVASAAIRYRAIHDKDVEDIVALDVALRRNDKEWFEKLPAEIENKIIHKLYYGHFMCHVFHQDYIIKKGHNCTELEHQMLDLLDQRGAEYPAEHNVGHLYQAKPELRKFYKALDPTNSFNPGIGQTSKKKYWQ

SEQ ID NO: 5211 - protein, 712 aa, Haemophilus somnus 129PT
MSRTIILIPISTGVGLTSVSLGLIHALEQKGAKIGFMKPISQPSTDEDKLDRTTSIVRTSTTLETAEPFMLSVAENLIGQNQSDVLLEKIVENHQQLAKNNELIIVEGLVPTRKHGYANSINYEIAKALDAEIVLVAAPATETPAELKERIEAAASQFGGKNNPNLLGVIINKFNAPIDESGRTRPDLSEIFDAYQHKQNNLNEVYKLFEKSPIKVLACVPWNAELIATRAIDLVNHLGASILHEGDIKTRRIRSITFCARSLQNMVEHFKTGSLLVTSADRPDVLTASALAATNGIELGGILLTGGYKIDNQIKKLCQPVFENTGLPIFRIEGNTWQSALALQSFNLEVPVDDKERIENIKQYTSQQFKSSFIENLVAASTRPRRLSPPAFRFQLTELARAAKKRIVLPEGDEPRTVKAASLCAERGIAECILLANPDDVKRVADAQGVVLGKGITIIDPVSVRENYVDRLVELRKAKGMTETSAREQLEDTVVLGTMMLEANEVDGLVSGAIHTTANTIRPPMQIIKTAPGNSIVSSIFFMLLPDQVLVYGDCAVNPDPTAEQLAEIAIQSADSAKAFGIDPKVAMISYSTGTSGSGADVEKVKEATRIAQEKRPDLLIDGPLQYDAAVMEDVAKSKAPNSPVAGKATVFVFPDLNTGNTTYKAVQRSADLVSIGPMLQGMRKPVNDLSRGALVDDIVYTIALTAIQATQ

SEQ ID NO: 5212 - protein, 398 aa, Haemophilus somnus 129PT
MSQKLVLILNCGSSSLKFAILDPVSGAEKLSGLAEAFYLPDARIKWKLNGEKGNADLGAGAAHSEALNFIVSTILTEDLKNSIAAIGHRVVHGGEKYTKSVVITDEVIQGIKDAAEFAPLHNPAHLIGIEEAFKAFPHLKDNNVAIFDTAFHQTMPEEAFLYALPYSLYKEHGVRRYGMHGTSHYFVSREAAKRLNIAEDKINVITCHLGNGASVAAIRQGKCIDTSMGFTPLEGLVMGTRSGDLDPAIIFYMHNTLGMSVAQIEETLVKKSGLLGLTEVTSDCRYSEDNYEKESAAKRALDVFCYRLAKYIGSYMAIIGENLDAIVFTGGIGENAALVRQITLNHLKLFGYKIDDEKNSAARFGNEGVITADNTPIAIVIPTNEELVIAQDTARLSF

SEQ ID NO: 5213 - protein, 386 aa, Solanum tuberosum
ADNQHPTVYQKVASQMHLSSSLSQDVHARYGGIQRPALSQRRFPYGNYSNAGLQTCQATQDLSLIAANASPVFVQAPQEKGLAAFATDFLMGGVSAAVSKTAAAPIERVKLLIQNQDEMIKAGRLSEPYKGIGDCFSRTIKDEGFAALWRGNTANVIRYFPTQALNFAFKDYFKRLFNFKKDRDGYWKWFAGNLASGGGAGASSLLFVYSLDYARTRLANDAKAAKKGGGGRQFDGLVDVYRKTLKSDGVAGLYRGFNISCVGIIVYRGLYFGMYDSLKPVLLTGKMEDSFFASFALGWLITNGAGLASYPIDTVRRRMMMTSGEAVKYKSSFDAFNQILKNEGPKSLFKGAGANVLRAVAGAGVLAGYDKLQVIVFGKKYGSGGG

SEQ ID NO: 5214 - protein, 548 aa, Haemophilus somnus 129PT
MENTEHKPTNFIRQIIDEDLASGKHHNVYTRFPPEPNGYLHIGHAKSICLNFGIAQDYQGKCNLRFDDTNPVKEDVEYVDSIKQDVKWLGFEWEGEPRYASDYFDQLYSYAIELIQKGLAYVDELSPEQIREYRGTLTSAGKNSPYRDRSVEENLALFEKMKKGEFAEGAASLRAKIDMASPFMVMRDPVLYRIKFASHHQTGDKWCIYPMYDFTHCISDAIERITHSLCTLEFQDNRRLYDWVLDNISIERPLPHQYEFSRLNLEYTLTSKRKLLKLVNDGIVDGWNDPRMPTISGLRRRGYTPASLREFCRRIGVTKQDNVVEYSALESCIRDDLNTNAPRAMAVLNPLKIVIENFDGKEILTAPNHPNREELGTRELPFTKEIYIDQADFREEANKQYKRLVLGKEVRLRNAYVIKAERVEKDAEGCVTTVYCTYDPETLGKNPEGRKVKGVIQWVSATDNLSAEFRLYDKLFTVANPGAVEDINEVLNPNSLIIKRGVVEQSLANAKAEQAYQFEREGYYCADSKDSNADNLVFNLTVSLKEGF

SEQ ID NO: 5215 - protein, 321 aa, Haemophilus somnus 129PT
MTALFNEEMTMNYLQIARNSLAAEQNALAKLSQNLNQQFNQVVELILNCEGRLVVGGIGKSGLIGKKMVATFASTGTPSFFLHPTEAFHGDLGMLKPIDIVMLISYSGESDDVNKLIPSLKNFGNKIIALTGNLNSTLAKHADYILDISVEREACPNNLAPTTSALVTLALGDALAVSLITARNFQPADFAKFHPGGSLGRRLLCRVKDQMQVRLPKVTENTNFTDCLTVMNEGRMGVALVMENENLKGIITDGDIRRALSANGTNTLNKTAKDLMTSNPKTINYNTYLSEAENFMKEKKIHSLVVVDDQNKVIGLVEFSS

SEQ ID NO: 5216 - protein, 315 aa, Haemophilus somnus 129PT
MPDIKLFAGNATPELAKQISERLYISLGDATVGRFSDGEIQVQINENVRGCDVFIIQSTCAPTNDNLMELVVMVDALRRASAGRITAVIPYFGYARQDRRVRSARVPITAKVVADFLSSVGVDRVLTCDLHAEQIQGFFDVPVDNVFGSPVLIHDMLKKTDLENPIVVSPDIGGVVRARAIAKLLNDTDMAIIDKRRPKANVAQVMHIIGDVAGRDCILVDDMIDTGGTLCKAAEALKERGAKRVFAYATHAVFSGAAAKNLANEALDEIVVTDTIPFTPEIKALGKVRVLTLSGMLAESIRRISNEESISAMFN

SEQ ID NO: 5217 - protein, 438 aa, Haemophilus somnus 129PT
MNTKKIGLVACIAVVAGNMMGSGIALLPSSLAKIGSIAIFGWIIAIIGALALAYVFARLSTKNPQAGGPVAYAGEVSPIFGYQTSILYYHANWIGNLAIAITAIAYLSTFFPILNEPIPAAIAAICAVWFFTFINLLGGTWVSRFTSIGLILVLIPVVGTALLGWTHFNVEIYKANWLANPDVHSMKAVINSVLLCLWAFVGVESAAVSSDLVENPNKTVPLATLLGTGLAGIIYVMASQVISGMFPNEITATSGAPFALSVSAIVGDWASPIVSAFTAIACLTSLGSWMMLVGQAGRRAADDGNFPKMFGEVDKNGTPKKGLFAASIMMTILMILLTIVTTSGSSASDLFTQLTSVAVLLTMFPYFYSIIDLIRLEGLTSKSTFSLIASSLAILFCFAALAGAEHYQITATILIALCIFAFYAKKLGTKQLHQINNH

SEQ ID NO: 5218 - protein, 708 aa, Haemophilus somnus 129PT
MKQILIGYSMYNDHLQNLISALEEKGYKTTAVDGHQEILHAVKNNASIISVILSNDIIDKDLTDKILLLNEDLPIFSLKDTDDLNENLDFATIGHHVQFVDCNLYTLDEIIHKIERAVEKYFDSITPPLTKALFKYVNEDKYTFCTPGHMGGTAFLRSPIGSVFYDFFGKNTFKSDISVSVGELGSLLDHSGPHKEAEKYIANVFNADRSYIVTNGTSTANKIVGMYSAPSGSTVLIDRNCHKSLTHLLMMSDVTPIYLKPTRNAYGLLGGIPEQEFSKSAIEKKLADIDNPNWPVHAVITNSTYDGLFYNTDKIKETLDVKSIHFDSAWVPYTNFNPIYEGKTGMGGKRVEDKIIYETQSTHKLLAAFSQASMIHIKGQINEETFNEAYMMHTSTSPHYGIVSSTEVAAAMMKNNTGKQLLQDAITRAVRFRKEIKQRMRESQSWYFDVWQPENISSTECWELKPGESWHGFTNIDKHHMYLDPIKVTLLMPGLNKDNTLDPNGIPATLVSNYLDSKGIIVEKTGPYNILVLFSIGIDDTKAMSLIQALDDFKSLYDANVLVKDILPNIYAHAPKFYETMRIQELAGGIHRLICKHNLPDLMFKAFDILPKMIMTPNKAFNLELKGNIDECYVEDMVGKINANMILPYPPGVPLIMPGEMITEESRAILEFLVMLCEIGTHYPGFETDIHGAYRQDDGRYKVKIINI

SEQ ID NO: 5219 - protein, 582 aa, Haemophilus somnus 129PT
MQDKDLSTLQTFKRLWPTIAPFKLGLIASAVALVFNALADAALIQMLKPVLDEGFGKVDNSLLRIMAIVVVLLIFVRGVTNFISTYCLAWVSGKVVMVMRRRLFRHLMYMPVTFFDQNSVGRLLSRIVYDSEQVANSSSGSLVTIVREGAYIIALLTVMFYTSWQLALVLFIIGPIIAVIIRIVSKKFRELGKNLQNSMGDLTSSVEQMLKGHKVVLAFGGQKIEEERFDQVSNNMRRRGMKVMAASAISDPVVQIIASFALAAVLFLATLPEIMTQNLSAGSFTVVFSSMLAMMRPLKSLTNVNAQFQRGMAACQTLFALLDLETEKDTGKHVVDTVKGEVRFENVTFSYSGKEHPALNNISFTIPQGKTVALVGRSGSGKSTIANLVTRFYDVEQGKITLDGVNIQDYTLANLREHCAVVSQQVHLFNDTIANNIAYAVTEKCTREQIIEAAEAAYAMEFIEKLENGLDTVIGENGASLSGGQRQRLAIARALLRDSPVLILDEATSALDTESERAIQAALETLQKDRTVLVIAHRLSTIEKADEILVIEQGEIKERGSHQELLALNGAYKQLHSTQFNH

SEQ ID NO: 5220 - protein, 108 aa, Haemophilus somnus 129PT
METLDKIKKQISENPILIYMKGSPKFPSCGFSARAVEVLINCNVPFGYVDILQHPDIRAALPNYANWPTFPQLWVEGELIGGCDIMLEMFQQGELQSLLSEVAARYPQ

SEQ ID NO: 5221 - protein, 277 aa, Haemophilus somnus 129PT
MKYRPFLKWAGGKFRLTEEINKLLPKNKTCLIEPFVGAGSVFLNTHFEHYILVDINPDLIHLFNIVKQDVEHYIAACKPIFFHDQANTANYYYHRRAEFNLSQNIFERAVLFLYLNRYGFNGLCRYNAKNEFNVPFGSYKTHYFPESELRYFAQKAQRAVFICADFQQAFSMINNDSVIYCDPPYAPLKQNSNFTSYSGNEFSLSHQQNLAQLAKDTALNHGVPVLISNHDTKFTREIYKDAKIKRLKVQRSISKSSHKRIKVNELIAVFNHKKSVP

SEQ ID NO: 5222 - protein, 275 aa, Haemophilus somnus 129PT
MASPQEMAQIGENVGVYKATKNQCYSFLSAISAGAFIALAFVFYTTTQTDLGNAPWGLTKLVGGLVFSLGIIMAVVCGSELFTSSTMTLIARVNKRISTTQMLKNWLVVYLGNFIGSLIIVLLIWFAGQTMAANGQWGLTILKTAQHKIHHTWLEAFCLGILCNIMVCIAVWMSYAGKTLTDKAFIMILPIALFVASGFEHSVANMFMIPMGLITSHASSADFWQAINMNPLQFADLDIYHFIFKNLIPVTLGNIIGGGVCIALMQWFTNKPHRH

SEQ ID NO: 5223 - protein, 635 aa, Haemophilus somnus 129PT
MGKIIGIDLGTTNSCVAVMDGDKPRVIENAEGERTTPSIIAYTNDNETLVGQPAKRQAVTNPKNTLFAIKRLIGRRFEDQEVQRDVAIMPFEITKADNGDAWVSVKGEKMAPPQISAEVLKKMKKTAEDFLGETVTEAVITVPAYFNDAQRQATKDAGRIAGLEVKRIINEPTAAALAYGLDKGKGNQTIAVYDLGGGTFDLSIIEIDEVGGEKTFEVLATNGDTHLGGEDFDNRVINYLVDEFKKEQGVDLRNDPLAMQRLKEAGEKAKIELSSAQQTDVNLPYITADATGPKHLNIKLTRAKLEALVEDLVARSMEPVKVALSDAGLSVSEINDVILVGGQTRMPLVQQKVAEFFGKEPRRDVNPDEAVAIGAAVQGGVLAGDVKDVLLLDVTPLSLGIETMGGVMTTLIEKNTTIPTKKSQVFSTAEDNQSAVTIHVLQGERKQASANKSLGQFNLEGINPAPRGMPQIEVTFDIDADGIIHVSAKDKGTGKEQKITIKASSGLSDEEIQQMVRDAEANAEADRKFEELVQARNQADHLVHSTRKQLAEVGEKLSAEDKAPIESAVNELETAAKGEDKTEIDAKVQALIQVSEKLLQASQQQAQADAGAQQSQSTKGGDDVVDAEFEEVKDK

SEQ ID NO: 5224 - protein, 816 aa, Haemophilus somnus 129PT
MRVLKFGGTSLANPQRFLQAAALIEKAHLEEQAAGVLSAPAKITNHLVALSEKAALNQPTDGHFDEALEIFYNIINGLYAENTHFDLVGTKALIESEFAQIKGLLENIRQAGKVDDAVKATIDCRGEKLSIAMMNAWFEAKGYTVTVINPVEKLLAYGSYLESSVDIAESTKRVDAKSIPAKNIVLMAGFTAGNDKGELVLLGRNGSDYSAACLAACLGASVCEIWTDVDGVYTCDPRLVPDARLLSSLSYREAMELSYFGAKVIHPRTIGPLVEPQIPCLIKNTGNPEGAGSIIDNRENISEGLQVKGITNLDNVAMFNVSGPGMQGMVGMAARVFSAMSKASVSVILITQSSSEYSISFCVPTKAIEKAKAALNAEFEQELVAKDLDPVEVIHDLSIISVVGDGMAQSKGIAASFFSALASANISIVAIAQGSSERSISAVVPLNKAIEAVKATHQALFNNRKVVDMFLVGVGGVGGELIEQIKRQSEYLAKKDIEIRVCALANSNKMLLNENGLNLDNWREDLANATQPSDFDVLLSFIKLHHVVNPVFVDCTTAESVAGLYERALKEGFHVITPNKKANTRELDYYNQVRENARKNHRKFLYDTNVGAGLPVIDNLQNLLAAGDDVVSFNGILSGSLSFIFGKLEEGLSLSEATALAREKGFTEPDPRDDLSGQDVARKLLILAREIGLELELSDIEVEGVLPQGFSEGKSADEFMAMLPSLDEEFAERVAKAKSEGKVLRYVGQIEEGKCKVSIVAVDGDAPLYKVKNGENALAFYTRYYQPIPLLLRGYGAGNAVTAAGIFADILRTLKH

SEQ ID NO: 5225 - protein, 300 aa, Haemophilus somnus 129PT
MTEQETYCGFIAIVGRPNVGKSTLLNKILGQKISITSRKAQTTRHRIVGIHTEGVYQAVYVDTPGLHIEEKRAINRLMNRAASSAIGDVDLIIFVVDGTHWNDDDEMVLNKLRRAKAPVVLAINKVDNIKNKDELLPFITDVSQKLEFKEIIPISAQRGNNIHNLEKIVRTSLRKGVHHFPEDYVTDRSQRFMASEIIREKLMRFTGEELPYSVTVEIEQFKLNDRGIYEINGLILVEREGQKKMVIGAKGQKLKTIGTEARQDMERLFDNKVHLELWVKVKSGWADDERALRSLGYIDE

SEQ ID NO: 5226 - protein, 444 aa, Haemophilus somnus 129PT
MSNTILQHLPIGQKVGIAFSGGLDTSAALLWMRQKGAVPYAYTANLGQPDEEDYNAIPRKAMEYGAEKARLIDCRNQLAHEGIAAIQCGAFHISTGGVTYFNTTPLGRAVTGTMLVSAMKEDDVNIWGDGSTFKGNDIERFYRYGLLTNPSLRIYKPWLDNQFIDELGGRQEMSEFLIANGFDYKMSVEKAYSTDSNMLGATHEAKDLEYLNSGIRIVKPIMGVAFWRDDVTVKAEEVTVGFEDGVPVTLNGQSFSSAVELFLEANRIGGRHGLGMSDQIENRIIEAKSRGIYEAPGMALLHIAYERLVTAIHNEDTIEQYRINGLRLGRLLYQGRWFDPQALMLRETAQRWVARAVTGEVTLELRRGNDYSILNTVSPNMTYHPERLSMEKVENAPFDPSDRIGQLTMRNLDITDTRDKLGIYTHTGLLTVGKDSMLPQLDKK

SEQ ID NO: 5227 - protein, 333 aa, Haemophilus somnus 129PT
MYVMKKSFILQQQEISFAKNTFTEKLIEHLGIIEVQGPILSQVGNGIQDNLSGTEKAVQVNVKQITDAKFEVVHSLAKWKRHTLARFNFAENEGLFVHMKALRPDEDSLDQTHSVYVDQWDWEKVIPTGRRNLAYLKETVRSIYQAILETEDAVHQKFGLSKFLPREITFIHSEELVQRYPELNDKQRENAICKEYGAVFLIGIGGVLSDGKPHDKRAPDYDDWTTPSEGEYLGLNGDILVWNPVLERAFEVSSMGIRVDETALRKQLALTGDEDRLQFDWHQDLVNGRLPLSIGGGIGQSRLAMLLLQKKHIGEVQSSVWPKVVTEQFENIL

SEQ ID NO: 5228 - protein, 184 aa, Haemophilus somnus 129PT
MNKAIFLDRDGTLNIDHGYVHEIDKFQFIVGSIEALKQLKSMGFLLVLVTNQSGIARGYFSEEQFLQLTEWMDWSLADRGVDLDGIYYCPHHLEGIGEYKQDCDCRKPKNGMLLQAIKELNIDPARSFMVGDKKEDLLAGKSAGIKKNILVRSGKEITDDGLSLADYVLDTIADLPELIKKLKF

SEQ ID NO: 5229 - protein, 436 aa, Haemophilus somnus 129PT
MSTQKSNKIGVVQLTILTMVNMMGSGIIMLPTKLAEIGTISIVSWLVTAVGSTALAYAFAQCGMFSKKSGGMGGYAEYSFGKAGNFMANYTYGVSLVIANTAIAISAVGYGSELLNVTLSPISIALCTIFTLWLATVLNFGGARITGNISSFTIWGVIIPVVGICLIGWFWFSGEMYVSAWNPHNVPTFEAIGVSISMTLWAFLGLESACANTDVVENPERNVPIAVLGGTLGAAVIYIVSTNVIAGIVPNLELANSTAPFGLAFAHMFEETTGKVVMGLMVMSCFGSLLGWQFTIAQVFKSSAEEGYFPAFFKKVTSKNAPIIGMVTITAIQSLLALMTISPSLNKQFNILVDLAVVTNVIPYLLSMAALMVLLKVEKVALNKAKITTFVAFIGSLYSLYALYAAGEQAMLYGSIVTFIGWTLYGFISYKFDIKK

SEQ ID NO: 5230 - protein, 407 aa, Haemophilus somnus 129PT
MEITLGIAMFTVIVLALAVLILFAKSKLVNSGDITIEINDDPGKAINLPAGGKLLGALANKGIFVSSACGGGGSCGQCIVKVTEGGGDILPTELSHISKREAKEGYRLSCQVNVKNSMKIELPEEVFGVKKWECTVISNDNKATFIKELKLQIPEGEEVPFRAGGYIQIEAEPHTVHYKDFDIPKEYHEDWDKFDLWRYTSKVDEHIIRAYSMASYPEEKGIIMLNVRIATPPPRNPDVPPGQMSSYIWSLKEGDKVTISGPFGEFFAKETDNEMVFIGGGAGMAPMRSHIFDQLKRLKSKRKMSFWYGARSKREMFYVEDFDMLQAENDNFVWHVALSDPLPEDDWDGYTGFIHNVLYENYLKNHEAPEDCEYYMCGPPVMNAAVIKMLKDLGVEDENILLDDFGG

SEQ ID NO: 5231 - protein, 784 aa, Arabidopsis thaliana
MESSHRFLLVALTVASSIIHLVQAQAGFISLDCGLSPNEQSPYVELETGLQFLSDSSFIQSGKIGRIDASLESKYPRSQTTLRYFPDGIRNCYNVNVYKGTNYLIRATINYGNYDGLNISPRFDLYIGPNFWVTIDLEKHVGGDTWEEIIHIPKSNSLDVCLIKTGTSTPIISVLELRSLPNNTYITESGYPDDFYDRKWVPYFESEWRQISTILKVNNTINGFLAPQEVLMTAAVPSNASVPLSFTKDLEFPKDKLYFYFHFSEIQPLQANQSREFSILWNGEIIIPTLSPKYLKASTLYSVSPFVCEVGKCLLELKRTQNSTLPPLLTAIEVFTVIDFPQSKTNEDDGLVPEFLAKMETLLFIDLRKNKLNGSIPNTLRDREKKGLQIFVDGDNTCLSCVPKNKFPMMIAALAASAIVVAILVLILIFVFTKKKWSTHMEVILPTMDIMSKTISEQLIKTKRRRFAYSEVVEMTKKFEKALGEGGFGIVYHGYLKNVEQVAVKVLSQSSSQGYKHFKAEVELLLRVHHINLVSLVGYCDEKDHLALIYEYMPNGDLKDHLSGKQGDSVLEWTTRLQIAVDVALGLEYLHYGCRPSMVHRDVKSTNILLDDQFMAKIADFGLSRSFKVGDESEISTVVAGTPGYLDPEYYRTSRLAEMSDVYSFGIVLLEIITNQRVFDQARGKIHITEWVAFMLNRGDITRIVDPNLHGEYNSRSVWRAVELAMSCANPSSEYRPNMSQVVIELKECLTTENSMKVKKNDTDAGSSLELSLSFDTEVVPTAR

SEQ ID NO: 5232 - protein, 402 aa, Sphingomonas sp. KA1
MAEAFICDAVRTPIGRYGGILAGIRADDLGALPMKALIERNPGLDPAVIDEVFYGCANQSGEDNRNVARMSLLLAGLPHGVAGVTLNRLCASGLESVGAAARAIRTGEMGVAIAGGVENMTRAPFVVGKAGSAYGRAQQMEDTTMGWRFVNPALDALYGTETMPRTAENVAHDHGISRKDQDAFALRSQQRAVAAQQNGFFDEEIITVVTPGRKRGETVEVRTDEHPRADTTIEGLGKLKPLFGPEGTVTAGNASGINDGAAAMIIASEAAAKAHGLTPRARILGMASAGVEPRVMGIGPIPATQKLMAHLGLTIGDFDAVELNEAFASQSLAVVRQLGLADDADHVNPNGGAIALGHPLGMSGARLAMTLVHQLEKSGGRRGLATLCIGVGMGLALAVERV

SEQ ID NO: 5233 - protein, 604 aa, Trichodesmium erythraeum IMS101
MLIVQKYGGTSVGSVERIKAVAQRIAKTASDRSVVVVVSAMGKTTDTLVKLANDISPNPCRREMDMLLSTGEQVTIALVSMALQELGVPAISLTGAQVGIVTEAQHSRARILHIQTERIEEHLQLGEVVVVAGFQGISQTRHQEITTLGRGGSDTSAVALAAALQAQRCEIYTDVPGILTTDPRIVPEAQLMSEITCDEMLELASLGAKVLHPRAVEIARNYGMPLVVLSSWSDAPGTRVVSAIPKRPALQDLELTKPVDAVEYDTNQAGISMLRLPDRPGVAAQLFSGIALQNIDVDLIIQSIHESNTNDIAFTVSKDVLKQAAAVADAMLPALGKNAHPSLGEPEVKTEERPIAKVSLVGAGMIGRPEVAAKMFEALAAAGVNIIMISTSEVKVSCVVDAEDCKKTVNSLCQAFDVDVADISSSSTAGESEEVPPPVRGVALDIKQARLAVRQVPDHPGMAAKIFGLLAQQNISVDMIIQSQRCHSVDGVLTRDIAFTVSQPEGETAYQILANTAADFGWGEVVLESSIAKVSVVGSGMISHPGVAAQMFEALAASQINILMITTSEIKISCVVEEEDGVKALQAIHKAFCLSANEVVKVPA

SEQ ID NO: 5234 - protein, 433 aa, Trichodesmium erythraeum IMS101
MASTPQLRREIGVFGATLMGNGSILGTGVFVSIGIAASIAGPSVIIAVAVAGVVATCNAFNSAQLAANHPVSGGTYEYGYKYLNNWLGFIAGWMFLFAKSASAATAALGFAGYFLNAFGVNNNTWLVLTALTAVVVLTIVVLSGIRRSNVTNIIIVSITLFSLVLFILAGVPQVVFSEGKNLMPFFPGDKPIASLLQATALMFVAYTGYGRIATLGEEVKEPRRTIPRAIALTMIFTCVLYISTAIVSVFAGQEVIQKLSQADVSLVAPLEVIAKVGGLGIPVIPKLIAIGAITAMLGVLLNLILGLSRVLLAMGRRRDVPKVVARLDSGQTTPYIAVVIVGVAIACLVLIGDVKTTWSFSAFNVLIYYAITNFAALHLSPEERLYPKWLGWLGLASCLFLAFWVEKQIWLVGLGLILIGLIWHSLIHRFITD

SEQ ID NO: 5235 - protein, 390 aa, Trichodesmium erythraeum IMS101
MKLAARVGKVPLSLTLAISAKARAMKADGKDVCSFSAGEPDFDTPEHIKVAAQKALDSGYTKYGPAAGEPKLREAIAHKLSQENGLNYKAENIIVTNGGKHSLFNLMLALIEPGDEVIIPAPYWLSYPEMVKLAGGEPIILTTDPETGYKVTPEQLRQSITDKTKLFVLNSPSNPTGMVYQPAEIKALAEVLVEKDILVVSDEIYEKIIYDDAEHLSIGAVNSEIFKNTIISNGFAKAYSMTGWRIGYLAAPVELINATVKIQGHSTSNVCTFAQYGAIAALESSQDCVEQMRQAFAKRRKIIYDLLKTLPGISCNQPEGAFYMFVNISKISSSSLEFCNALLEDQNVAVIPGIAFGADDHIRISYATDLETIEKGMDRLERFIRSQSSG

SEQ ID NO: 5236 - protein, 331 aa, Trichodesmium erythraeum IMS101
MDKKPLVVITHWIHSQVIDYLSKTCEVILNQTQYTLSREEIINRTKEAEGLMVFMPDFIESSFLDACPQLKVIAGALRGYDNFDIDACTKRGIWFTIVPDLLAAPTAELTVGLLLGLARRMLEGDRLIRDGQFQGWKPKLYSRGLLHQNLGIVGMGKLGKALAQRLVGFNMNLFYSDSIPLSVEQETAWKISRVSLEELLKISDYVVLMVPLIPDTYHLINQDTLAKMKPKSFLINACRGSVVDEKAIGSAIQSGHLAGYAADVFEMEDRAIPHRPQGIYNTLITEKNKTFLTPHLGSAVDEIRHDISFEAAKNIVQVLSGEIPQGAVNKL

SEQ ID NO: 5237 - protein, 1546 aa, Trichodesmium erythraeum IMS101
MNQSHTNLKADQGTYQGQRWLVEERDACGVGFIAHPSGKKSHEIILKALPALTCLEHRGGCSADKDSGDGAGLMTQIPWELLSENLELNPDNCGVGMIFLPQTEKKAAIVRQIIEKKIRNEGLEVVGWRVVPVVPERLGVQAKINQPQIEQIVVSSDKLQGDELERSLYLIRRNIGRVIEEEGLSWGIDTYICSFSCRTIVYKGMVRSAVLGEFYTDLKNPAYKSSFAVYHRRFSTNTMPRWPLAQPMRLLGHNGEINTLLGNINWMRAREASLSSSLWESRLDELKPFVDNQNSDSANLDNVMELMVRSGGSPLEALMIMVPEAYKNQPDLIDYPEITDFYEYYSGLQEGWDGPALLAFSDGKQVGAALDRNGLRPARYCITNNDLVIVASEAGVVEIPEKEILEKGRLGPGQMIAVDLRTNEILKNWEIKKRISGQQPYREWLKNRKQIIKQPFIANSQLESQSLLQLQTAFGYSLEDLDLIITDMANLGKEPTFCMGDDIPLAVLSGRPHLLYDYFKQRFAQVTNPPIDPLREGMVMSLNMLLGKRGNLLEVSGENARLLKVESPVLNESELKAIRDSEFATETISTIFAVADGPEGLNRAVKSLCDRAVKAVENGKEILILSDKCDGGINADFTYIPPLLAVGAVHHHLIQERLRMKASLVVETGQCWSTHHFACLIGYGASAVYPYLALESVRAWWSSSKVQNQMERGKITKITIEEAQKNYRQAVEAGLLKILSKMGISLLSSYQGAQIFEAIGIGGDLLELAFRGTTSRISGLTVPELAQEVISFHGRGFLELNIKKLENYGFVQYRPTGEYHMNSPAMAKELHKAVTAINGSNGNGKNIDLTEYDHYEVYRKYLQERPITALRDLLDFHSSSPSIPLEEVEPAAEIMKRFCTGGMSLGSLSREAHETLAIAMNRIGGKSNSGEGGEDPTRFKILNDVDNQGLSQLFPHLKGLRNDDTASSAIKQVASGRFGVTPEYLMSAKQIEIKIAQGAKPGEGGHLPGKKVSAYIAKLRGSKPGVSLISPPPHHDIYSIEDLAQLIFDLHQINPNAGVSVKLVAEIGIGTIAAGVAKANADIIQISGHDGGTGASPLSSIKHAGGPWELGLTEVHRVLMENQLRDRVLLRVDGGLKTGWDIVMAALMGAEEFGFGSIAMIAEGCIMARICHLNTCPVGVATQQEKLRNKFTGVPENVVNFFWFIAEEVRTILARLGYRSLNEILGRADLLKARENVKLVKTESLNLSCLLKLPDTRNNRGWLNHDTVHSNGPVLDDVLLDDEKIQGAICNQGIVYKTGIKVVNTDRTVGARLAGAIASRYGNTGFEGLINLTFNGSAGQSFGAFNLPGMTLVLEGEANDYVGKGMHGGEIIIKPPAEGRYNSEENVIVGNTCLYGATGGILLANGQAGERFAVRNSMAKAVIEGVGDHACEYMTGGVIVCLGKAGRNVGAGMTGGIAYFFDEDGDFPARVNNEIVSIQRVSTSAGEAQLKELISLHFGKTGSPKAKMIWANWSECLPKFYQVVPPSEADTAVAKVETGSQAVVKV

SEQ ID NO: 5238 - protein, 212 aa, Trichodesmium erythraeum IMS101
MVLYLDSAIVTEARVASKFGWISGVTTNPTLLAKSDLSPEATLKELSEIISGELYYQLTATSFDEMIAEGKAASKLIGHKIVLKIPATATGFQATSHLSKNIDCSVTGIYHPAQALVAAETGAKYAIAYVNRATRLLGDGLKLVREMAKVLEGSSTEILAASVKSPDEATETLLAGAHHLTLPFSVLQTITTHELSEQTFKEFNEKGRGIMY

SEQ ID NO: 5239 - protein, 330 aa, Trichodesmium erythraeum IMS101
MIHATLPIQAPIPAIVNDHNRLRLFSGSANVPLSTEVARYLGLDLGPMVRKHFADGELYIQIQESIRGCDVYLIQPSCHPVNDNLMELLIMIDACHRASARQITAVIPYYGYARADRKTAGRESITAKLVANLITEAGASRILAMDLHSAQIQGYFDIPFDHVYGLPVILDYLLSKNLSDIVVVSPDVGGVARARAFAKKLNDAPLAIIDKRRQAHNVAEVFNVIGDVKDKTAVLVDDMIDTAGTICEGGRLLREKGARQVYACATHAVFSGTAIERLSNGIFEEVIVTNTIPFNQENSFPQLIVLSAANLLGETIWRIHEDTSVSSMFR

SEQ ID NO: 5240 - protein, 1133 aa, Trichodesmium erythraeum IMS101
MAFKSLSLNLGRIFSKLSLKTILIVPYVIQILGAFGALGYIAFLNGQQTVDDLGKKLTNKISDRIQQHVLGYLNQSHQVLRITNDAIESANLDIYNFVALRRYFWEVVKEKDLQDYLFFGNEEGEFIGVEHFAEGEIYLKSCKIPTQSLCETYLLNNQGNISQYLNSKEYDPRDTPWYLVAKKLGEPTWSPILSSFSGQNSSLDIFAVQPIFDSTENLLGVLSNKTTLVKLTNFLKNLYISPNGQSFIIERSGNLIASSEVMEPFVIKGTQENRKIERLPATASENKIVSMTTKHLQQKFSSFAEITHTHEMNFPIEEEWYYASVIPVIDGRGINWLAVVVIPEDDFMEKVNMNIRTTILLSFAALTITVLLGIVTTNWITKPILQLNSAAKEISQGKWETQLKIYREDELGELANSFDQMASQLKKSFETLEAQNKQLTELDRLKDEFLANTSHELRTPLNGIIGIGEFLLEENTKNLNSITTSNLAIIVSSARRLSNLVNDILDFSKIRYHKLELQVRAIDVRIVVESVITLNRVLVGKNKNLQLTNAIPTDLPPVLADENRLQQILYNLIANAIKFTESGKVEISASLYSPKEDQDEATEIIIMVSDTGIGIPPDQLDRIFESFEQGEGSIIRKYGGTGLGLAVTKELVELQGGRIWVESEVGVGSRFNVTLPISNQLVPNSSLNFPSPTVNNIHYLIKNIETTIRSKPLGSKIPNGDFHVLVVDDEPINIQVLNNYLKANNYQVTQALSGKEALAALENNHNFDLILLDVMMPNMSGYEVCSQIREKYPAQSLPVLMLTAKNQIADLVMGFQFGANDYLTKPFAKDELLTRIQTHIKLSKITKAYERFVPHEYVELLSKESIINVKLGDRVSTKMAIFFSDIRSFTTISEQMTSQETFAFVNGYLKEVCPEIRDRNGLIIKFLGDGIMAVFPDGADDALEAAIAQLKRLQEYNQVLLSTGWMPIKIGIGIHWGHIMVGIVGEKGRMSGDAFSNNVNLTSRLEGLTKFYGVSLLISESAFNYLKNPQKYQIRFLDRASVKGIDEPINVYEVLDGEVDEIRELKLQTQVDFALGLESYRVGELVDAKDYFEKVLAVNYSDKTAQLYLERIDDLMVTGVPKNWNGVWAFTQK

SEQ ID NO: 5241 - protein, 111 aa, Trichodesmium erythraeum IMS101
MTLTPELKAKIDDLVTKNKIMVFMKGNKLMPQCGFSNNVVQILNILGVTYETCDVLENQDIRTGIKEYSNWPTIPQVYVDGEFLGGSDVMIEMYNNKKEELEQKLAVASAS

SEQ ID NO: 5242 - protein, 158 aa, Trichodesmium erythraeum IMS101
MTTIKLMHAKLHRVRVTDAKPDYVGSVTIDSDLLEKVGILPLEEVQIVNLNNGQRWLTYVLPGQAGSGMVCPNGGAALLCKKDDILIIWANEQCDRAEVLENGHKAKIFVADENNHCREFLYQILNPNQGSVEFHSLPVIPEGKTSEYLQQMIETNKI

SEQ ID NO: 5243 - protein, 400 aa, Trichodesmium erythraeum IMS101
MSRATKVVLAYSGGVDTSVCIPYLKNEWGVKEVITLAADLGQGDELEGVRKKALDSGAVESLVIDVIEPLIKEYAFPAIQANALYENRYPLATALARPLIAKILVEAAEKYGADAIAHGCTGKGNDQVRFDVAIAALNPQIKILAPAREWGMSREETIAYGEEYGIPAPVKKSSPYSIDKNLLGMAIEAGELEDPWVEPPEEVYGMTKAIADTPNEPEYIEIGFERGIPVSLNGQEMGGIELITKLNQIAGNHGIGRIDMIENRLVGIKSREIYESPAMWVLIQGHRDLESLTLTADVTRYKRGIEETYSQLVYNGLWFSPLKGALDAFIQQTQERVTGVVRVKLFKGNAMVVGRKSDNSLYSFDLATYGAEDEFDHKAAEGFIYVWGLPTRVWSEKLRG

SEQ ID NO: 5244 - protein, 243 aa, Trichodesmium erythraeum IMS101
MEYNKEKILVVDDEASIRRILETRLSMIGYDVVTAADGEEALETFHNTTPDLVVLDVMMPKLDGYGVCQELRKESDIPIIMLTALGDVADRITGLELGADDYVVKPFSPKELEARIRSVLRRVDKNGGNGIPSSGVIQVSTIRIDTNKRQVYKGDERIRLTGMEFSLLELLVSRSGEPFSRSEILQEVWGYTPERHVDTRVVDVHISRLRAKLEEDPSNPELILTARGTGYLFQRIIERDEVG

SEQ ID NO: 5245 - protein, 377 aa, Trichodesmium erythraeum IMS101
MIKSTHISQTATTLLSLNIAPTQIIRGKNALAQSGEAIARIGHHPLIVGSPRSLNIILPHLQPLLQIHNLKFTQANYGSDCSETSLANLSQAVATQKPDLIIGIGGGKALDTAKLLAYKCHLPIITIPTSAATCAAWTALSNIYSDQGAFLYDISLAKCPELLILDYGIIKTGPSRTLVAGIGDAIAKWYEASVSSGHSESTMIISAVQQARVLRDILFQKSTFALEQPGGETWQEVVDATVLLAGLIGSIGGAQCRTVAAHAIHNGLTHLSASHEKLHGEKVAYGILVQLRLEEMLQSNQLAATARQQLLKFYNQIGLPKSLNDLGLKEITLSELRHVAEVACHPNSDIHRLPFRIIPEQLVAAMVSTTVPLELEK

SEQ ID NO: 5246 - protein, 510 aa, Trichodesmium erythraeum IMS101
MTETIQRKMKLNSFDKFKAEKDGLAVKTEIEHFAKIGWEAIDKTDRNHRLKWLGVFFRPVTPGKFMLRMRMPNGMLSSQQMRVLAGIVQRYGDDGNADITTRQNLQLRGIAIEDIPDIFNRLEKVGLTSVQSGMDNVRNITGSPVAGIDATELYDTRELIKQVQDMITDNNKGNFEFTNLPRKFNIAIAGCRDNSVHAEINDIAFIPAYKNDKFGFNVLVGGFFSAKRCEAAIPLNAWVEPNQVIALCRAILEVYRDYGLRENRQKSRLMWLIDEWGLTKFRSQVEKQIGLTLETEALKDEILWEKRDHIGIYKQKQPGLNYIGLNIPVGRLYAVDMFDLARLAEVYGNGEIRLTVEQNVIIPNVPDSRLETFRSEPLLKKFSFEPQPLTRAVVSCTGSQFCNFALIETKNRALAIAKELETELSIPKPVRIHWTGCPNSCGQPQVADIGLMGTKVRKNGKMVDGVNLYMGGKVGKDAQLGSCVQKSIPCEDLKPILRSLLIKNFAAQPK

SEQ ID NO: 5247 - protein, 542 aa, Trichodesmium erythraeum IMS101
MFDQTKTPIVETLQNLTQKFHAPFYAPGHKHGKSIPQSLSELLGKKVFPADLPELPELDNLFAPDGVIQEAQELAAETFGALHTRFIVNGSTSGIIAGILATCGNGDKIILPRNIHQSVISGLILSGAIPIFIDPEYDLNWDIPLSITPESITQTLAKHPDTKAVMIVYPTYHGVCGNIRAIAQQVHKYNIPLLVDEAHGAHFAFHSELPIPALLSGADLSVQSTHKTLGAMTQASMLHVGSNRIDLDRLEQALQILQSSSPSYLLLASLDAARQQMALFGEELMSQTLELAKNARNRISQLSNYSVFNLKRREKKTEERNFTCLSKDSDLLKNRVKEDIGDSGAIFSNPNTQLPTPNYPPNFLIKNYFNPGFIALDLTRLTIKVSQIGFSGYQADEILHQELGVTCELPSFLNLTFIISPGNTKADINQLVTGLISLRHRGRINLPTNDGTKFDLKVNDFSIPISPRDAFFAQKNCLPIKKSVGYISAELICPYPPGIPVLIPGEIITEKHIQILEQVQANGGIIVGCSDPILKTIKVSRF

SEQ ID NO: 5248 - protein, 638 aa, Trichodesmium erythraeum IMS101
MAKVVGIDLGTTNSCVAVMEGGKPTVIANAEGFRTTPSVVAYGKKEEQLVGQIAKRQAVMNTQNTFYSVKRFIGRKFDEVTHETTEVSYKVLNINGNVKLDCQALKKQFASEEISAQVLRKLIDDASKYLGEQVTQAVITVPAYFNDSQRQATKDAGKIAGVEVLRIINEPTAASLAYGLDKKSNETILVFDLGGGTFDVSILEVGDGVFEVLATSGDTHLGGDDFDKKIVDYLAAEFNKVEGIDLRKDKQALQRLTEAAEKAKIELSSVTQAEINLPFITATQDGPKHLDLTLTRAEFEGLCSDLIDRCRIPVENAIRDAKLDKKAIDEVVLVGGSTRIPAVQEIVKKVLGKEPNQSVNPDEVVAVGAAIQAGVLAGEVKDILLLDVTPLSLGVETLGGVMTKIIPRNTTIPTKKSEVFSTAVDGQTNVEIHVLQGEREMSSDNKSLGTFRLDGIPAAPRGVPQIEVTFDIDANGILNVTAKDKGTGKEQSISITGASTLPDTEVDRMVKEAEANATADKERRDKIDRKNQADSLAYQAEKQIQELGDKVPEADKTKIEGLIKDLRDAVAQEDDEKITSLTTELQQALYSVSSNMYQQSGGAPGEGSTPNSDAGSGASSSNATGGDDVIDADFTETK

SEQ ID NO: 5249 - protein, 523 aa, Trichodesmium erythraeum IMS101
MFFLAITLYSRYMYNHILELDSPFSFERLYSHPGSLIPYDQGGTRKQVAIIGGGIAGLVSAYELSQLNHKVTLLESDYRLGGRIKTHYFSDGTYGELGAMRIPTSHGCTLHYIDKFKLPKRPFINYNPATFYYLRGKKTRLDNYQELFSVYNLTSDEKEDPGVIYDQLLSELINSFSEQEKWELFAPTFTSDRVRKWDDLTVTDYFCSHLSPDAFQLLGHATGAIHYEKVSLLNGLIDFFAWHQVEQYELIGGMETLIKALVKRISGKIETEAKVTNIAMTDKGVQVDWNKLDKQQTAEFDYIICTVPTTALARINFDPILPSKQQEAINNLGYCSSSKSLLHCTARPWEFTENIYGGGSFTDLNIEKCRYPCDNAKLDGNNFSQPHFVVKNKDISYQASVLTAAYRWEDNSRKFVTLDESNKTDLTLEEISQLHPNIKQYTDDVVHSIWDEDNNPGSGSYAYFAPGDREKYQPFLGQPYPINNPRVFFAGEHLAINHASVQGSIQTAVSAVIELLETANLNL

SEQ ID NO: 5250 - protein, 440 aa, Trichodesmium erythraeum IMS101
MNQVSSTYKLIASHNQDIQISLYTPAHQGIKSNGHRLSAEIYQYDAPFLTRPRTENIEKHFSKLYGTKHTFWLTAGGSQGVLTTCALLGTQYKKVAIALNSHISTINGIILAGLEPYFIDSESLMPTTDEVITALETSGVSALLLTHPSYEGVTIELATIANYCQKHGIALAVDEAHGSHFPFLDEQWQSAISVGADIVSHSMHKYAGSLVQTGLLHLPKSSQFSTEQVMGVLPLFETTTRSNLLMLSLEDAIKRGYSESGKALFDKAIQECDLLRSQLDSYGQVLTYDPQVTDPLKIYLKSDRMTGEELAEFLYEYGIDGEFAGEEGLLLIFSFHHNPQDFQFMRETLAKVVAILREKPIKQIVPDSYFSRRPQINTLPKDAFFCRKEKLPIGEVLGKISSCWIKKVPPGSPILIPGEEVTNWHIERLSPDTVVEVVGA

SEQ ID NO: 5251 - protein, 234 aa, Trichodesmium erythraeum IMS101
MEDRYSHNPQSNIKQLILSTPFFESLPEKALKKAVIHLVSRQHPGNQVILLENDWGSSVYFILDGWVKIRTYNLDGKEVTLNILGKGELFGEMAALDEIPRSTDVITLAPTLIANMPAQDFAYLINTEPIAGIRLAQLMARRLRQVNRRLRLREADAQARVTDILLFLAEGQGTPSQQGIEIPNLPHRELSSLSGLARETVTRVLSKLEKKSLIKRERDILCIPDLHALERTLV

SEQ ID NO: 5252 - protein, 496 aa, Trichodesmium erythraeum IMS101
MLRKLMDKNWFSRFRYFCLFLGTIVVLIGCQVALANGGSDDFVKVDNIWLLLAGALVFFMNAGFALLEAGFCRSDNSVNVLAKNLIVFCVAAIAFWMFGFGLMFGDSSYHLPCRGNFEQKNEKVQSYHGHFSPTMEYNEFEQKSQFILPPKNDTPLGYPSKGFSCLQRQFPKRSIASIFFFQLAFAGTAATIVSRAVAEKMKLWVFFCFSFILVGFLYPIVGHWVWSEYGWLKQGLNFIDFAGSTVVHTVGGTAALAVAILLKPRWSWLGYDPWEDLETDEGSEALSPQGQKESYDQRNLTSATLGCLILWLGWLGFNGGSTTELKEVGHIIITTIMSAATGGIIAILLSPLFSQRSSNNSEIGKLDLSSLINGILGGLVGITASAAYVDIPIAIFIGAVSGVVVVLTRKLLKWIKLEDPLGAIPVHLFCGCWGTIAVSFSLRGTIVYEKTYNFLERLEWQFSGWGVVFITTFLVSCIIWIFIGLTLYLFEKILRK

SEQ ID NO: 5253 - protein, 400 aa, Trichodesmium erythraeum IMS101
MMQIYLDYSATTPTRPEAITTMQQVLTQQWGNPSSLHMWGQRSATLVEKARIQVADLINTVPESIIFTSGGTEADNMAIMGVALCYGKPQHIIISSVEHFAISEPARVLENWGWQVTRLPVDRQGRLDPQELQAALQPNTVLVSIIYGQSEVGTLQPIAELGNICRDRGVLFHTDAVQVVGRLPIDLQKLPVDLLSLSSHKIYGPQGVGALYVRQGVKLVPLLSGGGQEMKLRSGTQAVAAIAGFGVAAELANEEIATETSRLSRLRDRFFAHMVDNPYVIFTGDRLYRLPHHVSFCIVPPEVEMPKGNNQVTGKTLVRQLNLAGIGISTGSACHSGKIAPSPILLAMGYTKEHAIRGVRFTLGRETTEADIDWTAIVLKQILTRLMPNVNSQKFYCISL

SEQ ID NO: 5254 - protein, 545 aa, Trichodesmium erythraeum IMS101
MNTAELLIKCLENEGVKYIFGLPGEENLNILEALKNSSIQFITTRHEQGAAFMADVYGRLTGKAGVCLSTLGPGATNLMTGVADANLDGAPLVAITGQVGTDRMHIESHQYLDLVAMFSPVTKWNAQILRPSNTPEIVRKAFKVAQQEKPGAIHIDLPENIAAMSVEGKPLKQDKREKSYSAYQSMTEAAVAISKAKNPMILVGNGALRGNASEIVTEFATRLNIPVANTFMGKGVIPYTHPLSLWTTGLQQRDFITCAFEQTDLVIAVGYDLIEYSPKKWNPQGKIPVIHVGAKYAEIDSSYIPIAEIVGDISDSLNEILRRSERINQLSPTVSEIRKSMRYEYEGHGKDDGFPIKPQKLIYDLRQVMGPEDIVISDVGAHKMWIARHYHCERPNTCLISNGFAAMGIAIPGAIAAKLVYPERKVVAATGDGGFMMNCQELETALRVGTNFVTLIFNDGGYGLIEWKQENHFGESSFIKFGNPDFVKFAESFGLKGYRVESAADLIPTLKEALAQDVPAVIDCPIDYRENSRFSQKSGGLNCSV

SEQ ID NO: 5255 - protein, 343 aa, Trichodesmium erythraeum IMS101
MIIPITACEVEGTSDQKEVTQENKQVTSRLDIVKNRGKLICGVEGGIPGFSFVDKNGNYSGIDVDICKAVAAALFNDPNLVEYRNLDSTERFTALNGGEVDMLSRNTTWTVSRDTTVGLEFAPTTFYDGQGMMVRANSGVESLEDLQGKSICVEAGTTTELNLTDNLRQRNVTAETLTFQQADPAYAAYAEGRCDGMTSDKSQLLSRRSTLPSPNDHVILQVTMSKEPLGPVTKNNDSAWFDVVKWVTYALIEAEELGITQENVDDLKQNSDNPTIRRFLGVDGDLGEGLGLSNDFAYRVIKNVGNYAEVYDRNLGEESQFKLPRGMNNLWTKGGLLYSPPFR

SEQ ID NO: 5256 - protein, 221 aa, Trichodesmium erythraeum IMS101
MTHDRPLASVFRNISGGSYPPVIETFERSKTIFFPGDPAERVYVLIKGAVKLSRVYEAGDEITVALLRENSVFGVLSLITGHKSDRFYHAVAFTPVELISVPIDQVEKALREDPELSVILLRGLSSRILQTEMMIETLAHRDMGSRLVSFLLILCRDFGVPRDDGIMIDLKLSHQAIAEAIGSTRVTVTRLLGDLRQDEMISIHKKKITVHNPVALSQQFT

SEQ ID NO: 5257 - protein, 413 aa, Trichodesmium erythraeum IMS101
MEEEIIIVGAGIGGLTLACALEQKGIDFQLYEQADSFEALGYGIQVSPNVVRVLRELGLEQQLEEVSHLCLGFELRSFNSNRVLATWQLDNDTPYYQCRRADLHSLVFNSIQDKSRIHFSRCLESYEEKDDQLLLSWHNLPSTTAKALVAADGVRSLVRRSLFNAVAHGENPQDSATSVFSQNQAQYAGYAAYRAILPFQDKYLPLWGKATVWMGKNHHVVVYPNGNEQNSTSWLNLVLVVKDKNWNPQGWTIPADKKAVARDFANQSEELNEILEDMAASPEPCFKWGLFIHKPLPYWSRGKVTLLGDAAHPMLPFQAQGAAMAIEDAYVLAKYLASERDIEKAFIKYQQARIKRTTKVQQVSINNANIFHASGVKAAIRNFALGVVSTTVPSLLNKKTAWIYDFDVKTAVS

SEQ ID NO: 5258 - protein, 639 aa, Trichodesmium erythraeum IMS101
MNNFFGLDVKDLVELAKTLEEKAKSGEIKTSFEVQSGPMRNIPRHGNIPRGMGRSNYQAQTGQSSQDTNFTVQSPNKDSVTQNRAQEKTNSTTSSPETKLRPTLRDIGGMSEVIQELREVIELPLKRPDLLTKLGLEPSRGVLLVGPPGTGKTLTAKAIAEELGLNYIAINGPEVMSKYYGEAEGKLRDIFAKAKKSAPCLIFIDEIDSIAPDRSKVEGEVEKRLVAQLLGLMDGFEVLEGVLLLAATNRPDHIDPALRRPGRFDQEVYFHVPDRDGRSEILQILTKAMPLDNSVDLEEIADLAVGLVGADLKAVCQKAAYFALRREVPSLENLNIQTPEDMSLLQSDLLRAIKEIKPSILRSVAVEVPNVSWQHIGGLDVVKQKLQESVEGALLYPELYEKTKAKAPKGILLWGEPGTGKTLLAKAVASQAQANFIAVNGPELLSKWVGAAEEAVRELFSKARQVSPCVIFIDEIDTLAPARGKTMGDSGVSDRLVGQLLTELDGLRDCTQLLLVGATNRPDALDPALLRAGRLDLQIKVDLPDQASRLEILKVHNQDRPLEEVNLEDWASRTEGWNGADLALLTNQAALAAIRSYSAQGIKSSKENDIKITSADFENAYNALKSQKQSNNFDSDICV

SEQ ID NO: 5259 - protein, 387 aa, Trichodesmium erythraeum IMS101
MNFATRMNSLGGDAAIEVFTKAKQLESQGRNIIHLEIGQPDFKTPKNIREAAFQAMNDGYTTYTPAAGLLKLREVIAEHISQTRNISVNSDEVVVMPGAKPVIFFTLLALINSGDEVIYPNPGFPVYESVINLVGGKPIPLPLLEELDFQFSIDNLVNSISEKTKLLIINSPHNPTGSVLTPEYLEAIAKLAVKHNFYVLSDEIYSHLNYDSKFTSIISFPSMKERTILLDGHSKTYAMTGWRLGYSISPKAIAEKLDKLMLNSNSCACSFTQIAGIEAIKNSQEFVKKIFAEFKQRRDVIVDGLNSISGINCRKPAGAFYAFPNVKQLPISSNKLADYLLAEAGVALLPGTAYGKFGDGYLRLSYANSIENIREGISRIETAIAKL

SEQ ID NO: 5260 - protein, 587 aa, Trichodesmium erythraeum IMS101
MQLQTKVSIKQATGAFALIDSLKRHGVKHIFGYPGGAILPIYDELYRAEAAGDLQHILVRHEQGASHAADGYARATGEVGVCFATSGPGATNLVTGIATAHMDSIPMVIITGQVGRPMIGTDAFQETDIYGITLPIVKHSYVVRDPRDMARIVAEAFHIASTGRPGPVLIDIPKDVGLEEFEYEPVEPDSITLPGYRPTIKGNPRQINQAINLIQEARRPLLYIGGGAISASAHGEIQELAERFNIPVTTTLMGKGAFNEHHPLSVGMLGMHGTAYANYAVSECDLLIAVGARFDDRVTGKLDQFASYAKVIHIDIDPAEVGKNRSPEVPIVGDVRQVLIDMLERCQKIDTNVSSNQTQTWLERIKRWKQDYPLVVPHYSDSMSPQEVIDQIGKMAPDAYYTTDIGQHQMWAAQFLKNGPRQWVSSGGLGTMGYGMPAAIGVKVALPNREVICISGDSSIQMNIQELGTLAHYGINVKTVIINNGWQGMVRQWQQAFFGERYSSSNMEVGMPDFVKLAEAYGVKGMMISHRDQLKEAIEEMLAYDQPVLMDAHVTRDENCYPMVAPGKSNAQMIGLPIRKQLEQAVE

SEQ ID NO: 5261 - protein, 474 aa, Trichodesmium erythraeum IMS101
MIKNLIPYLFISAYLLLTLVIGIIGYRSQKNTPEDYFLAERKIGSIVLFFTLIATNFSAFAFLGLSGAGYRIGISYYPMIGFGTALVGITFYFIGYKVWLLGKEKGLITPSELIANCLPSQPLKLIFLAVMVIFTIPYLTLQPIGGGYMIENLTNGQIPYFWGAAFLTFIIVLYVFIGGMKSVALTDVLQGVLMLILMIVAVVTISQSLGGLTEANQTVHKLKPELFSRSGTNDFFTPHKWFSYMLLWGLSVPMFPQMFMRFYTPKNPNSLKLSASLYPLITCIMFICPVLIGMWGHINFPDLVGKEADKIFPMMLAEYTSTTMASLVMVGALAAFMSTLDSQLLALSSMITRDIYIVYIRPQATLTEQTFVGKILIVILAIIGLILAANPPATIAAIATQAFTGLAVLFPTVIAALYGKNISPLSCIISIIFGEIAVIGFQVNIIPKSWALGFLPVVPIVLICSLIIVVFLRK

SEQ ID NO: 5262 - protein, 310 aa, Trichodesmium erythraeum IMS101
MELSTNITIPVAPAGYKSGFVGIIGRPNVGKSTLMNQLVGQKVAITSPVAQTTRNRLRGILTTQAAQIIFVDTPGIHKPQHQLGKVLVQNAKVAIQSVDLVLLIVDGSVIAGGGDRYIINLLDKIQTPVILGMNKLDLQPQDAWKIEASYYQLIHPHPWQIIKFSAVTGEGVEILQDLLIEQMETGPYYYPPDLVTDQAERFIMGELIREQILLLTREEVPHSVAIAIDRVDEEPTITRILATINVERSSQKGILIGKGGNMLKAIGSAARQQIQKLIAGKVYLELFVRVQSKWRQSRIQLAELGYQVEE

SEQ ID NO: 5263 - protein, 330 aa, Trichodesmium erythraeum IMS101
MYTGLNINMSPSKNTSETNPPLNYPTLGIIGCGNIGGRQAANFIAQGYPVYVYDINLDRMTELESLGAHITHSCAELATYSDVIFTSLPTPADVVRAVLEGDGNLSQGLRSRSIYIDITTNSPETIFKLSKAMEELGVEMLDAPFNDCPEGAKSDGGMGLAVMASGSRKTFERVEPILQLMADRVIYCGTLGNGTRCKLIHNAVNAVAVQAVTEGITLGLAQGIPLETIWDALRFGAFGQNAGDIHGLPHYWFSRRCDDLSQHPDFTVKLLHKDLQLALEMASQQNISVPQFSLTVKDYEEAVRRGFSDYSTTKVRCLQEEQARVMAKTT

SEQ ID NO: 5264 - protein, 478 aa, Trichodesmium erythraeum IMS101
MEKQIWIGITFIAFLLSFTVVGIYSATQKQNTTTDYLLASRNVNPWLTALSAMATGQSGFLFIGSIGFIYKVGFAAIWIPLAWTIGDYIAWLLIFKRLRLVSQETDSDTISSFLGQENLSPKNQGRSITIISALITIGILGTYAAAQLVAASKGLNAIFGWNYELGIIAGAVIVVVYCFSGGIRASIWTDSVQGILMILSLLILCIVSLLACGGLTELWVKLNAIDPTLTNWMPTNLPWGFFPYFLGWLVSGLGVVGQPHVLVRAMAIDSADNIALARNIKLVCGLMNSATAFGIGLTARVLLPELMTSGDPELALPNLSIELLPAVLVGLMLAGLFSAAISTADSQILSCSAALSQDLVPSGSNSYRKAKIATLAVTAFVLAIALITNNSVFALVIFSWSVLACALGPLLVLRVWQKPVRVPVAITMMITGIVVAIIWNKGFNLSSAIYEVLPGMAAGFIVYGIANLQIWPKDLSKQ

SEQ ID NO: 5265 - protein, 324 aa, Trichodesmium erythraeum IMS101
MLTHKSIKQQLKSVIEQEISAISKLCESIDDSWLKAVLRLRDCKGKLVVSGIGKSGSISQKIAASFTSTGIPAIFIHPTEASHGDLGLLDSSDILLVLSASGQTSELLDIMQYASRLKSSIILITKNPNSSLAHFADIILQIPDLPEACINGLAPTISTTCQLVLGDALVVTLMSLRGFTSEDFKQFHPGGNLGALLVPVKNLMYKEHQIPLIDLGASIKEAIIEMNFKSLGCVGVINHRNQYVGIFTDGDLRRSLEAKVSLEEPVSQHMTPSPLSIQSDLIISELIDFFQKNQIPNVFVVENNEPIGIVHVHQLTSILGRDVI

SEQ ID NO: 5266 - protein, 361 aa, Trichodesmium erythraeum IMS101
MKIGIPKEIKDQEFRVGLTPASVKVCTEAGNEVFIETEAGWGAGFSDSDYLNAGGHILSDTRDVWKCDMIVKVKEPLSSEYEFLKSEQLLFTYLHLAADRKLTKKLIESGVTAIAYETVELSDQRLPLLTPMSIIAGRLSVQFGARFLERQQGGRGVLLGGVPGVTPGKVVILGGGIVGTEAAKIAVGLGAKVKILDINLERLAYLETVFGSRLELLYSSSSAIEAAVADCDLLVGAVLVPGRRSPVLVPKSLVEQMHSGSVIIDVAVDQGGCVETLRPTSHTNPIYQELGVVHYGVPNMPGAVPWTATQALNNSTLPYVLQLANYGSKALDMNPGLAKGLNVKNHVLVHPALREVFPDLN

SEQ ID NO: 5267 - protein, 136 aa, Trichodesmium erythraeum IMS101
MTYAIIETGGKQLRVEAGRFYDIDLLSGSEGDRISINNVLLVQNDGDVHIGQPLVEGALIEGTIMKHLRGKKIIVYKMRPKKKTRKKRGHRQELTRLMIDSISLNGKVLASLEKSLVEKPESSVMEVTSETTETVT

SEQ ID NO: 5268 - protein, 667 aa, Trichodesmium erythraeum IMS101
MKNFGQQIKTDELKGINHHNWSLCQAQSNTQKAKILFGRIPGGKLTRKLGWKILATGIIAQAVLLVSPAFANSTQKNLSYSQLLDKIQAGEVTEIDYYPSRGIAKVSLKGQRSREGMYIVQMFEHVPELLDQVRAQKIDFELKRSPDNSVAMGIIFNILIVFVVIVVLLAILRRSSQSQGNALNFGKSRARFQMEAKTGVLFEDVAGIEEAKEELQEVVSFLKKPEKFTAIGAKIPKGVLLVGPPGTGKTLLAKAIAGEAGVPFFSISGSEFVEMFVGVGASRVRDLFKKAKENAPCIIFIDEIDAVGRQRGAGIGGGNDEREQTLNQLLTEMDGFEGNSGIIIIAATNRPDVLDVALLRPGRFDRQVTVDLPAYKGRLGILEVHARNKKLTPEISLEAIARKTPGFSGADLANMLNEAAILTARRRKEGITPNEIDDAIDRVTIGLSLTPLLDGKKKRLIAYHELGHALLMTLLKNSDLLNKVTIIPRSGGVGGFAQPIMDEGMIDSGMYTRGWLIDRITISLGGRAAEEEIFGLAEVTVGAANDIRSVASLAREMVTRYGMSDLGPLALENPNGEVFLGRGWQSQQPEYSEEVAIKIDHQIRTMVFHCYEKARKIIRENRVLMDRLVDLLIEKETIEGDEFRRIVSEYTELPKKQKSLINLEKKI

SEQ ID NO: 5269 - protein, 403 aa, Trichodesmium erythraeum IMS101
MNKQKQSKSHFIAPKLLKTIEHETPMSKFYRTATYMSRINEAGNINLILGDSHEMPLPGFVEALQKNAIASKIGYYGYKMNLPETRKIVSQALKKHRGISILPDDIFMTNGTVIGLAICLKLLVQEGDEVIINLPPWLGYRGMINAVGAKSVGIPVMAKTFDLDLEKIANSITERTRAILINSPHNPTGKILSEKTLENLGNLLTEASKNYGKPIYLISDETFSRVVFNHQNCPSPTQFYPLSFLVYSYSKTWIAPGQRIGYIALPETMPEREQIRNLIGRLQTLYFGWCFPSALMQYALEDLENLKLNIKHLQDKRDWIIQELQKIGYEVNVPQGTFFLLVKSPYKDDCAFAELLTNYGVFVLPGTPQEIPGYFRISLTANKDMLTQALPKFKLAREQAIMT

SEQ ID NO: 5270 - protein, 405 aa, Trichodesmium erythraeum IMS101
MMEKQIMKTDMRLGVKTNTEYSNRTFVYEVEGLRQSQTAGELNNPIRRSGTVYITVPYSRMNQEMRRITGMGGKILSIKTLNEHSEANSQKTKTKQKTKPMTEAKPRRSEKKSVPVNTYRPKNPFIGKCLSTAELVNEGGEGTVRHLVFDLSGSDLHYLEGQSIGIIPPGKDAKGKAHKLRLYSIASTRHGDHLNDQTVSLCVRRLEYNHPETGERIYGVCSSYLCGMEEGADVAITGPVGKEMLLPDDEDATIIMIATGTGIAPYRAFLWRMFKEREQNPDYQFKGLAWLFFGCPYTPNILYKEELEELQREFPDNFRLTYAISREQKNKDGGKMYIQHRIQENAEELWQLIQKPNAHTYICGLKGMEDGIDEGMSAVTGQFDIDWGDYQKKLKKEGRWHVETY

SEQ ID NO: 5271 - protein, 495 aa, Trichodesmium erythraeum IMS101
MDLSFASLGISEERANHLETIGFTEPTPIQAQAIPPLLEGKDIVGQAQTGTGKTAAFSLPILEQIDIDTNAVQALILTPTRELALQVTEAIRQFTGINSKGPTKRRLFVLTVYGGQSIERQSQRLQKGVHIVVGTPGRIIDMLNRNSLKLDHLKMMVLDEADEMLSMGFIQDVEKILEAAPAERQTAFFSATMDYSIRKLVNKYLQSPVTVKVAQQKTTPKRITQTVYILPRGWSKGKALQPILELEDPEAALIFVRTRQAAAELTNQLQSAGHSVDEYHGNLNQSQRERLLTRFRNQQVRWVVATDIAARGLDVDHLTHVINYDLPDSVDSYVHRIGRTGRAGREGTAISLIHPVDKRKLRLIERHLRQRLNTRSIPKRSQIEARQLQKLQDKVRSALSGERMASFLPLISQLGKEYDPHAIAAAALQIAYDETRPAWMGLDYSQEEDEPMYETPKPRLKKQLPKKSNNKSYSDKNKNLKDEIYVEEASLPQNN

SEQ ID NO: 5272 - protein, 303 aa, Trichodesmium erythraeum IMS101
MSTIYSTLLLPFIGSEIEPDYTTAKVVIVPIPYEATTTYRRGCVNGPAVLLNASQQLECYDEELDRETGLEVGIYTHEPIADTRNGKKITPLDMLKVTQETVEKLVSDGKFVIAIGGEHSITNGIVKAYKKLYFDEPFTVIQIDAHGDLRYEYEGSIYNHACVMRRIFEMGLPMVQIGIRAICKEEADLIKDKNLTVFKAREIAIQPDWMERVISSIQTKNVFLTIDLDGIDPTLIPGVGTPEPGGLNWYSLTTFLRRIFELYQVLGCDIMELAPITDSVVSEFTAAKLVYKLVGYQALAQDW

SEQ ID NO: 5273 - protein, 235 aa, Trichodesmium erythraeum IMS101
MQPTRAVINDQNKELINCYEVVRDSLDDLIEELREHEKHNNADYFYEIRDLDRSPENYKSLSAVKRAARIIYLNKTCYNGLFRVNSQGQFNVPFGRYKKPNILDEAVLKSVSLYLKKTKVKILDKDFAEAVKNAKKGDFIYLDPPYDPLSNTSSFTGYDINGFNRNEQKRLREVFDELNEKGCLVILSNSQTDFIMGLYQDYQDKIKVVRAARSINSKGLKRGRINEIIVLNFSA

SEQ ID NO: 5274 - protein, 1209 aa, Trichodesmium erythraeum IMS101
MGRKCILGFILFLLTLTLTILHGSVISKNTNDYQLSNQIKEVKTWQTSELEKEQYNFYQSSEEDFIKPQKFDHLQTVINKKDLPVYKNLSTSKPHSTYKVTDILWLLISSGLVFLMQPGFMCLESGLTRSKNNINVAFKNLTDFGISVFCFWSIGFAFMFGTSASGIIGHSNFFFATNVQPLDAAFFLFQVMFCGTATTIVSGAVAERMKFGTYLFVAFLVSGFIYPIFGHWAWNGIDTGVLRGWLGQRGFIDFAGSTVVHSIGGWVSLATLLVIGPRTGRFPRDRPPEKIHGSNLPLSILGVMLIWFGWFGFNGGSTLALNEQVPGIIVNTIFSSVAGMITGLSIGWSIRGIPGVDLIINGTLGGLVAITASCHAVTTLSAVIIGFIGGIVTILVEQILEKIRVDDAVGAIPVHLGAGIWGTLAVALFGKPEILGTGLSLSEQLTVQLLGVCTAFLLGFFVVYPILLITNKFFLLRVSTEDEHIGLNISEHHAKTEILDLFEIMSSQASTQDLTLRVPVEPFTLVGQIAERYNHVMDTLEEVTTRNDAIIKLATDAIITFNKSELEIISVNPSAEKIFSYKPQDLVGMPIYEILDFTINPLMREKIDSNDLITEGKKSTVEALKLWVNPSFISFPTREIINAYYTFNFQDIKPENLQSYFPNFIHLFDKNSADTQIELETEKKITQKKYYIERLISLIAETGNLYELVGIRKDGSLFPIEIAVREAKLNQKNFYTGTFRDISERKESEAKLKENEQRFRSLSTATFEGIIIYEQGKIVDANTAALQMFKYELSEIIGMNGLELIDSKYKNLVWKNMSSGYEKPYEVVGIRKDNSTFPIEIQAKTFFYCSYQHRVSAIRDITERKLAEKALRESEEKFRAVMEQAADAFIIHDLQGKIVDVNQSTCQTLGYTYEELLHLFIEDIEINFVLEYLYQKWQKLIPGIPITLQGTHKRKDGTTFPVEVRLGLLKAGNGNLVLALCRDITERKKVEQALLLEQGKSEKLLLNILPKPIADKLKENQDIIAEGFDEVTVLFADLVGFTQLASSVYPKRLVYWLNEIFSKFDLLAEKYGLEKIKTIGDAYMVVGGLPTPMENHAEAIALIAIDMREELAHFAHKSKQDFLIRIGINTGPVVAGVIGRKKFIYDLWGDTVNIASRMESQGIPGVIQVTEATYQILKHKFLFTERGLIHIKGKGYMKTYFLQGKKVIP

SEQ ID NO: 5275 - protein, 389 aa, Trichodesmium erythraeum IMS101
MFKRPIYLDCNATTPLDERVLKTMLPYFTEHFGNPASITHQYGWEAEAAVKKAREILATGINASPEEIIFTSGATESNNLAIKGIAEAYFNKGKHIITITTEHNAVLDPCAYLQNLGFEVTYLPVNRDGIIDITRLETALRDDTILVSIMAANNEIGVLQPLAKIGEICKENSIIFHTDAAQAIGKISLDVQAMNIDLMSLTAHKIYGPKGIGAIYVRRRHPRVKIAPQIHGGGHERGIRSGTLCTPQIVGFSKAVALALAEIKSEAKRLTSLRQQLWEKLQTLENIFLNGHPTQRLPGNLNISVEGVDGQALLLGLQSVMAVSSGSACTSAKISPSHVLQALGRSEKLAYASVRFGIGRFNTAEEIDLVAEQAIATIKSLRQATTSIK

SEQ ID NO: 5276 - protein, 792 aa, Trichodesmium erythraeum IMS101
MVKNILDGRYKIIKIIESEGLAHTYLAQDIRRPGAAECFIKHLQPSISDQKFLEIIRRRFQQEAQILEKLSQNNQIPKLLAYFEENQEFYLVQSFIPGKSLDNEILPGRALSEIQIIRILIEVLEILVFVHRNNVIHRDIKPANLIRRKLDNKLVLIDFGAIKEINIAQPSRTARIGTMEYMPIEQFEYNPQLNSDIYALGMMGIQGITGLPSSELSKLKYQENGNKKEIFWRNRINCSTALADVLDKMVRYNYRERYQSATEVIEDLKEIRYNLNKTSKIKAYQEEVIRRASYRGDISPAGRGILEALRENLELSQEETEIIEDDILNPYRKYQEKGKKYEQRLRETIQQEYPFTNETLEELKYLQQVLGLTQEDVKLIEDRVVPKSLFLKLKKTFINNYQRASISWLLIVRFVTITISVIFVIYIYIKLQNDYKIQQEKILRKEQQEVAQLNLLRNLYRERNYEDCISKNTIITENSSVFSEAQDILQKCKQGKNWENYQVEDFSQYLAAVSSVVFSPDGKMLATGSRETTVKILEIPTGKVINTFPADDSIIWSVAFNSDATQLVAGTYYWRVMIWNVPTVAEEPFQIFEHRAPIWSVVMSPDDEIVASSSGDKRVKVWNLKTGSLIFSFPDHSDTIYSIDISSDGKKLVSGSADQTIKIEDLDTGDLINTLNGHTGAIRSVKITPDGKKIVSGSYDTTVKIWDLKTGKLIKTLSGHTAEVISVDISRDGRYIASGGKDNNIKVWDLEKGELLNTLTGHTDEVYTVAFSPDGNSIASGGKDRTIKLWQR

SEQ ID NO: 5277 - protein, 352 aa, Trichodesmium erythraeum IMS101
MQFIDQAEIQVEAGKGGDGMVAFRREKFVPAGGPAGGNGGRGGSVVLVAVANLQTLLDFKFQRVFKAENGKRGGPKNMTGAGGSDRLIEVPPGTMIYDRETEELLGDLVKPGQTCCVAQGGKGGLGNKHFLSNSNRAPEYALPGLDGEVRMLRLELKLLAEVGIIGLPNAGKSTLIAALSAARPKIADYPFTTLVPNLGVVRKPTGDGTVFADIPGLIEGASAGLGLGHEFLRHIERTRLLLHLVDITDVDPVENFETIQNELEVYGRSLEDKRQVLALNKVDAVDVKGAEIQELVNRFREISGGKVFLISAVAGIGLEELMQEIWGLLEMEEEVKSSELTPTPPLVSREES

SEQ ID NO: 5278 - protein, 400 aa, Trichodesmium erythraeum IMS101
MQQTIYLDNNATTKVDEAVLEEMLPYLSQFYGNPSSMHTFGGKVGKATRKARSQVAALLNAEDTEIIFTSCGTEGDNAAIRAALTAQPNKRHIITTQVEHPAVLSLCKYLEKQGYTVTYLSVDSQGMIDLTELEAAITGNTALVSVMYANNETGVVFPIEKIGQIAKEYGALFHVDGVQAVGKVPLDMKNSTIDMLALSGHKLHAPKGIAALYVRRGTRFRPLLIGGHQERGRRAGTENVPGIIALGKACELAKEHLAHIDKERELRDLLENGILNTIPDCAVNGHLIQRLPNTTNIGFKYIEGEAILLHLSHYGICASSGSACTSGSLEPSHVLRAMGLPYTVLHGSIRFSLSRYTTRQEVEEVLAVMPSIAERLRALSPFKNDQADWLQERQQATVSS

SEQ ID NO: 5279 - protein, 527 aa, Trichodesmium erythraeum IMS101
MPKVLVSDSIDQNGINILSQVAQVDIKIGLPVEELVKIIPEYDGLMIRSGTKVTKEIIEAADKLKIIGRAGVGVDNVDVQAATRKGIVVVNSPEGNTIAAAEHALAMMLSMSRHVPEANQSIINAQWDRKKFVGVEVYKKTLGVVGLGKIGSHVAKVAKAMGMKILAYDPFISEERAEQLGCSLVDLDLLVQESDYITLHIPKTDETYHSINAETFAKMKPTARIINCSRGGIIDEVALSKALKEGKIAGAALDVYENEPLEVESPLRDLGQKIVMTPHLGASTAEAQVNVAIDVAEQIRDVLLGLPARSAVNIPGMYPDTLKKLKPYLRLAETLGNLVSQLAGGRIDFLNVRLEGDLAGGDSKPVVVGALKGLLSQALRERVNYVNAFIEAKERGIRVVETRDDSVRDYTGSLHLEAKGSLGEHNVRGSLLGKDEIRITNIDGFPINVPPSPYMLLTLHRDMPGIIGKIGSLLGSFNVNIASMQVGRKIVRGDAVMVLSVDDPLPEEILTEILKEPGIRNAYTVAL

SEQ ID NO: 5280 - protein, 215 aa, Trichodesmium erythraeum IMS101
MKETNAINTKHLMLVDDDPNLILLVKDYLEFRGYQVITAENGREALELLEEQIPDLIICDVMMPQMNGYNLVQHIRENLATEWVPVLFLSAKGQIQDRVKGLNTGADVYIVKPFEPEELVAQVESSLKQASRLIKHHNSSFSDRPTIKVRRNVELTPRELKVVKLVAQGMANRDIAEIMEVSQRTIESHVSNMLGKTGLHNRTELARWAIESKKA

SEQ ID NO: 5281 - protein, 271 aa, Trichodesmium erythraeum IMS101
MKIIHNSSYVNMIKENSEVILSVKNLTANVEGKEILKGFNLEIKAGEIHAIMGPNGSGKSTFSKVLAGHPAYEVTGGEVTFLGKNLFDMEPEERSLNGVFLAFQYPLEIPGVSNLDFLRVAYNTKQKYQGLEELDAFDFDDLVQDKLDVVKMKPEFLDRSVNEGFSGGEKKRNEILQMALLEPKLAILDETDSGLDIDALRIVANGVNKLANESNSLLIITHYQRLLNYIVPDFVHVTESGRIIKTGTKELALELEEKGYDDVTEVAKVGV

SEQ ID NO: 5282 - protein, 488 aa, Trichodesmium erythraeum IMS101
MTSKLKFRINKTKNRRLLSAKYSRFLEPTKLINYLSRTKWFSPTKLACIPLLCLIIALWAGAANAQDQELTPEYIKGVLDAIWILVASVFVIFMNAGFGMLESGFCRQKNTVNILAKNLIVFAIATLVYWSIGFSIMFAGDHPFIGAGGFFLTGESSTYGLNPFPAGLPVPVFFLFQAAFAATAATIVSGAVAERVEFLAFLLFSILITGISYPITGHWIWGSGGWLGAMGFKDFAGSTAVHSVGGWAALVGAYILRPRRGKYDEKNQPQAIPGHNMGFATLGCLILWIGWFGFNPGSQLAADENVVYIAVTTNLAAAAGGATAAITSWSKDKKPDLSMIINGVLAGLVGITAGCDGVSYLEAVIIGSIAGMIVVFSVSFFDKLTIDDPVGAISVHLICGIWGTLAVGIFVEDTSIITQFIGIISVGLFTVILSSIFWLALRATVGIRVHPEQEYKGLDISEHGMEAYHGFVKEPDSLATGVSHDHIQ

SEQ ID NO: 5283 - protein, 628 aa, Trichodesmium erythraeum IMS101
MKISWRTIVLWTIPALVIGFFLWQGTFGQTQVNMGSNTASTRMSYGRFLDYLQADRVTSVDLYDNGRTAIVEAVDPELDNRVQRLRVDLPVNSPSLISRLREANINFDSHPPRNEGAVWGLLGNLIFPILLIVGLFFLFRRSSNVPGGPGQAMNFGKSKARFSMEAKTGVLFDDVAGVDEAKEELQEVVTFLKKPERFTAVGARIPKGVLLVGPPGTGKTLLAKAIAGEAGVPFFSISGSEFVEMFVGVGASRVRDLFKKAKENAPCIIFIDEIDAVGRQRGAGIGGGNDEREQTLNQLLTEMDGFEGNSGIIIIAATNRPDVLDSALLRPGRFDRQVTVDAPDIKGRLSILDVHARDKKLSSEISLEAIARRTPGFTGADLANLLNEAAILTARRRKEAITMLEINDAVDRVVAGMEGTPLMDGKSKRLIAYHEVGHAIVGTLLKEHDPVQKVTLVPRGQARGLTWFMPNEDQGLISRSQILARITGALGGRAAEKVIFGDAEVTTGASNDLQQVTGMARQMVTRYGMSDLGLMSLETQQSEVFLGRDLMTRSEYSDEIASRIDSQVRTIVEHCYENACDMMQDNRIVIDRLVDLLIEKETIDGDEFRQIVAEYTNVPEKDRYVPVL

SEQ ID NO: 5284 - protein, 380 aa, Trichodesmium erythraeum IMS101
MKISVAKEILVNECRVALVPDVIAKLVKQGLEIQVEAGAGEKSFFFDRAYEQAGAKIISDSNALWGKTKVLLKIGVLEESEVDKLREGSIVISFLNPLGNPTIVKRLAERKVTAFSMELIPRTSRAQVMDALSSQANIGGYKAVLLASAALPKFFPMLTTAAGTIKPAKVLVMGAGVAGLQAIATARRLGAVVEAFDIRPEVKEQVQSLGAKFVDVSLKEDTVAEGGYAKELSEQAKQHTREVLTQHVAVSDIVITTAQVPGKKAPLLVTKEMVEQMKPGTVIVDMAAGQGGNCECTQPGKDVQWNGVTIIGPLNLPATMPVHASELYAKNISALLKLMIKDGELNLDFEDDIIAGACVTHGGEIRNQKVKDALRVTIGG

SEQ ID NO: 5285 - protein, 341 aa, Picea abies
MAQIKHSPGLTLQFLSVLITGLALMLWIQTVDAQSCNGLSHHFYYKSCPKAQAIIKSVVEDAVRKEAGMAASLLRLHFHDCFVKGCDGSILLDDTSSFTREKTANPNRNSVRGFGVVDQIKCELEKACPGVVSCADILAVAARDSVGFSGGPFWKVLLGRRDSRSASKSGANNDIPGPNSTHQTLETKFKRQGLNVVDLVALSGAHTIGLARCSSFKARLYNQTVNGKPDPTLDTTYLKHLRAVCPQTGTDDNQTTPLDPVTPIRFDINYYDNVVAGKGLLASDEILYSTKGSRTVGLVESYSTSTHAFFKQFAASMIKMGNINPLTGSHGEIRKNCRRMN

SEQ ID NO: 5286 - protein, 341 aa, Picea abies
MAQIKHSPGLTLQFLSVLITGLALMLWIQTVDAQSCNGLSHHFYYKSCPKAQAIIKSVVEDAVRKEARMAASLLRLHFHDCFVKGCDGSILLDDTSSFTGEKTANPNRNSVRGFGVVDQIKSELEKACPGVVSCADILAVAARDSVGFSGGPFWKVLLGRRDSRSASKSGANNDIPGPNSTHQTLETKFKRQGLNVVDLVALSGAHTIGLARCSSFKARLYNQTVNGKSDPTLDTTYLKHLRAVCPQTGTDDNQTTPLDPVTPIKFDIDYYDNVVAGKGLLASDQILYSTKGSRTVGLVESYSTSMHAFFKQFAASMIKMGNINPLTGSHGEIRKNCRRMN

SEQ ID NO: 5287 - protein, 310 aa, Picea abies
MVFIVCSITHTANGQLSSTFYAQSCPTALSVVKAAVRQAVANEKRMGASLLRLHFHDCFVNGCDGSVLLDDSSTITGEKTANPNANSARGFDVIDTIKSNVEKACSGVVSCADILAISARDSVVELGGPSWTVMLGRRDSTTASKNGANNNIPPPTSSLSNLISLFQAQGLSTKEMVALSGGHTIGQARCVNFRAHIYNETNIDSTYSTSLQSKCPSTAGSGDSNLSPLDYVTPTAFDKNYYSNLKSKKGLLHSDQELFNGGSTDSQVTTYASNQNSFFSDFAAAMVKMGNIKPLTGTSGQIRKNCRKPN

SEQ ID NO: 5288 - protein, 819 aa, Serratia marcescens
MRVLKFGGTSVANAERFLRVADIMESNARQGQVATVLSAPAKITNHLVAMIDKTVAGQDILPNMSDAERIFADLLSGLAQALPGFEYDRLKGVVDQEFAQLKQVLHGVSLLGQCPDSVNAAIICRGEKLSIAIMEGVFRAKGYPVTVINPVEKLLAQGHYLESTVDIAESTLRIAAAAIPADHIVLMAGFTAGNDKGELVVLGRNGSDYSAAVLAACLRADCCEIWTDVDGVYTCDPRTVPDARLLKSMSYQEAMELSYFGAKVLHPRTITPIAQFQIPCLIKNTSNPQAPGTLIGKDSTDADMPVKGITNLNNMAMINVSGPGMKGMVGMAARVFAVMSRAGISVVLITQSSSEYSISFCVPQGELQRARRALEEEFYLELKDGVLDPLDVMERLAIISVVGDGMRTLRGISARFFSALARANINIVAIAQGSSERSISVVVSNDSATTGVRVSHQMLFNTDQVIEVFVIGVGGVGGALIEQIYRQQPWLKQKHIDLRVCGIANSRVMLTNVHGIALDSWRDALAGAQEPFNLGRLIRLVKEYHLLNPVIVDCTSSQAVADQYVDFLADGFHVVTPNKKANTSSMNYYQQLRAAAAGSHRKFLYDTNVGAGLPVIENLQNLLNAGDELVRFSGILSGSLSFIFGKLDEGLSLSAATLQARANGYTEPDPRDDLSGMDVARKLLILAREAGYKLELSDIEVEPVLPPSFDASGDVDTFLARLPELDKEFARNVANAAEQGKVLRYVGLIDEGRCKVRIEAVDGNDPLYKVKNGENALAFYSRYYQPLPLVLRGYGAGNDVTAAGVFADLLRTLSWKLGV

SEQ ID NO: 5289 - protein, 356 aa, Medicago sativa
MSLLSDLINLNLSESSEKIIAEYIWVGGSGMDLRSKARTLPGPVSDPAKLPKWNYDGSSTNQAPGQDSEVILYPQAIFKDPFRQGNNILVICDVYTPAGEPLPTNKRHNAAKIFSHPDVAAEVPWYGIEQEYTLLQKDTNWPLGWPIGGFPGPQGPYYCGIGADKAYGRDIVDAHYKACLYAGINISGINGEVMPGQWEFQVGPSVGISAGDEIWAARYILERITEIAGVVVSFDPKPIPGDWNGAGAHTNYSTKSMREDGGYEIIKKAIEKLGLRHKEHIAAYGEGNERRLTGKHETTDINTFSWGVANRGASVRVGRDTEKDGKGYFEDRRPSSNMDPYVVTSMIAETTLLWKP

SEQ ID NO: 5290 - protein, 335 aa, Oryza sativa
MGCLLMLCLVSPLLLATSVHGNPWYGYGYGLFPQFYDHSCPKAKEIVQSIVAQAVARETRMAASLVRLHFHDCFVKGCDASVLLDNSTTIISEKGSNPNMNSLRGFEVVDEIKAALEAACPGTVSCADILALAARDSTVLVGGPYWDVPLGRRDSLGASIQGSNNDIPAPNNTLPTIITKFKRQGLNIADVVALSGGHTIGMSRCTSFRQRLYNQSGNGMADYTLDVSYAAQLRQGCPRSGGDNNLFPLDFVSPAKFDNFYFKNILSGKGLLSSDQVLLTKSAETAALVKAYADDVNLFFKHFAQSMVNMGNISPLTGSQGEIRKNCRRLNNYYH

SEQ ID NO: 5291 - protein, 581 aa, Synechococcus sp. CC9311
MDWNGQRRITGAHALMNALRLHGVDTIFGYPGGAILPIYDALHIAESEGWLKHILVRHEQGGTHAADAYARATGRVGVCFGTSGPGATNLVTGIATAQMDSVPMVVITGQVPRPAIGTDAFQETDIFGITLPIVKHSWVVRDPADLASVVAQAFLIASSGRPGPVLIDIPKDVGQEEFDYVPVQPGSIQPPGFRQPAKPAVQEVIDALALMRKSSRPLFYVGGGAVSAGAHDSLRILAERFQIPVTTTLMGKGAFDENHPLALGMLGMHGTAYANFAVTDCDLLIAVGARFDDRVTGKLDTFAPKAKVIHFEIDPAEVGKNRCPDVVVLGDVGLSLAQLVDQSRPHSAELTTSSWLEQINSWKELYPLTIPAKEGAIFPQEVLLAVRDLASDAIITTDVGQHQMWAAQYLRNRPRCWISSAGLGTMGFGMPAALGAQVAFPDQKVVCIAGDASILMNIQELGTLAQYSLPVKVVIVNNHWQGMVRQWQESFYDERYSASDMLNGMPDFSALARAFGVDGVKITERDDLHSKLSEAFASPRPTLIDVHVRRGENCYPMVPPGASNAQMVGLPSHPELAQDSR

SEQ ID NO: 5292 - protein, 1560 aa, Synechococcus sp. CC9311
MGESLGSEIAQPATECERRCCCTSRLQVMTQLTGSDWPYCDSSAPAAVAGEKDACGVGFLAQLQGERSYWVLQQALRGLGCMEHRGGCGGDGDSGDGAGVLCEIPWDYLRAIWPEAANGNGLGMMFLPKDPSLRAEVQRFCDQEAQSLGLMSIGWREVPIDSAVLGPLARETAPVIQQWLVQRDVDADALESLLLRLRRRVGARVRKEFGAEGAREFYVASLSGRTVVYKGMVRSEVLAQYYADLRDPRFAVSFAVYHRRFSTNTLPRWPLAQPMRLLGHNGEINTLLGNLNWAKASEAGLEDVWGDAAADLIPVVNPDFSDSANLDATLELMVRSGRSITDSLITLVPEAFRNQPDLESRPDVTAMYEFNAGIQEPWDGPALLVFADGKRVGATLDRNGLRPARWCTTADGFVIMGSETGVVDLSGKTVVEKGRLGPGQMVAVDLERGELLTNWAVKEDAAQRFPYGDWLKQHRRSVSAQPWTQDCQISELDLLRLQTAMGFTAEDLDLVIEDMAGLGKEPTYCMGDDIPLAVLSDKPHLLYDYFKQRFAQVTNPPIDPLREKLVMSLEMHLGQRRPAVKPQAAAAALIHLDTPVLNEAELSALSDQGLAVRSLSTQVAVEACAGGLQSAVDALCLKAEDAVRKGAQVLVLSDRVNAEEQPAELMATTVAMPALLAVGAVHHHLLRQKLRLHCSLVSETAQCWSTHHMACLIGYGASAVCPWLTWETTRHWLAHPKTQKRIEQGKLQPLDANKAQANVRLSLENGLRKILSKIGISLLASYHGAQIFEAIGLGADVIQKAFAGTTSRVAGMTLLELANETLSLHAKAFPELNRSKLEFMGFVQYRTGGEYHLNSPEMSKALHSAVKAGPGYDHFSTYKTLLENRPVTALRDLLEFKLAATPLPLDQVESAESLCTRFCTGGMSLGALSREAHEVLAVAMNRIGGKSNSGEGGEDPIRFQILKDVDGDGRSSSFPSIGGLRNGDTACSAIKQIASGRFGVTAEYLRSGKQLEIKVAQGAKPGEGGQLPGPKVDEYIAGLRNSKAGVALISPPPHHDIYSIEDLAQLIHDLHQVHPKAPVSVKLVAEIGIGTIAAGVAKANADVIQISGHDGGTGASPLSSIKHAGSPWELGLTEVHRSLLENGLRDRVLLRADGGLKTGWDVVVAALLGAEEYGFGSVAMIAEGCIMARVCHTNNCPVGVATQKAALRKRFTGVPEHVVNFFWYVAEEVRQLMSVLGVARLEDLIGRSDLLQPRSVELEKTKCVDLSSLLAPVGDANDRSWLKHSSEAHGNGPILEDHLLADADFMDAVENHGSLSRTIEIVNTDRSVGARFAGEIAQRHGNRGFKGQLNLNFRGAAGQSFAAFLVQGMTMRLEGEANDYVGKGMNSGRISLVPDDGVANPGDQVILGNTCLYGATGGELFANGRAGERFGVRNSGARAVVEGAGDHCCEYMTGGVIVVLGGTGRNVGAGMTGGVAFLLDEAGGVKARVNPEIVEVVGITTPQQESLLKSLLEAHVSTTSSEKAKALLADWTNAKSSFKLLVPPSERAAMGLEAREVVAA

SEQ ID NO: 5293 - protein, 411 aa, Synechococcus sp. CC9311
MLAIPSKSEPCPALSAMTGPEHPYFYLDGCATAPLRESVISCMIRAQQESWGNPSSLHRIGCDAAESLERARLSISNSLGADRSDILFCSGATESAHLALIGLAKTQSPGRLVISSVEHPAVAAAAQQLVACGWTIEEWPVDAFGKIQMEHLDRLLQAPTKIVSLIWGQSEVGTLQPIQVVGEACRSKRIPFHTDATQVLSQGCPNWNELPVDLLTASAHKCGGPRGIGLLLFRQEIAERIQPLFAGGEQENGLRAGTECPVLAQGMAAAFRDIASCQANQIELSGSGIASVRDALLALLCQNDAIRLNGHPTERLPHHLSMLVSDRHGQPMSGRALVRALDREGIAASSGSACSSGRDSDSPILKAMGVDPLWRRSGLRLSLGYWINPATLTEINDRIQNAIDRMNHNLA

SEQ ID NO: 5294 - protein, 385 aa, Synechococcus sp. CC9311
MTQSAPIALDHQATTPCHQDVVKAMEPWWTEQWGNPSSRQHRLGLTAAAAVQMAREQISDCLNCSAEQLIFTSGATEANNIALLGHARAIARERGKPGHLISMVSEHHAVLDPLRQLQREGFRITLLSPESDGLLELKKLEAAITEDTQLVSVMLANNEIGVIQPLPEVAAICRDQGVTLHSDVAQAFGHIPLDSKGLGADFLSLSAHKLNGPKGVGALISNPDLKVEPLQWGGGQERGLRPGTLPVPLIIGFAKAAELAQSDLASRSQRIERLRNRLWEGLKQRQPELMLNGHATARLPHNLNITIPGVSGNKLHRALRSRVACSSGSACSRGEPSHVLMALGRSRQEAEASLRLSLGRSTSDRDIDLAIQAINDVVHQLRHKA

SEQ ID NO: 5295 - protein, 637 aa, Synechococcus sp. CC9311
MGKVVGIDLGTTNSCVSVMEGGKPTVIANAEGFRTTPSVVAYTKNQDQLVGQIAKRQAVMNTDNTFYSVKRFIGRRVDEVNEESKEVSYGVEKAGSNVKVKCPVLDKQFAPEEVSAQVLRKLAEDAGKYLGETVTQAVITVPAYFNDSQRQATKDAGKIAGLEVLRIINEPTAAALAYGLDKKSNERILVFDLGGGTFDVSVLEVGDGVFEVLSTSGDTHLGGDDFDKVIVDHLAESFKSNEGIDLRQDKQALQRLTEAAEKAKIELSSATQSEINLPFITATPEGPKHLDLTLTRGKFEELASTLIDRCRIPVEQALKDAKLSSSELDEIVMVGGSTRIPAVLELVKRTTGKDPNQTVNPDEVVAIGAAIQGGVLAGEVKDILLLDVTPLSLGVETLGGVMTKMITRNTTVPTKKSETYSTAVDGQTNVEIHVLQGEREMASDNKSLGTFRLDGIPSAPRGVPQIEVTFDIDANGILSVTAKDKGSGKEQSISITGASTLSDNEVEKMVKDAESNASADKEKREKIDLKNQAETLVYQAEKQLAELGDKVDAEAKSKVEEKSTKLKEATEKEDFESMKSLLEELQQELYTVGASVYQQAGAEAAASGEEGAAAGNSGDGSSNAGDDVIDAEFTETK

SEQ ID NO: 5296 - protein, 568 aa, Synechococcus sp. CC9311
MIPLLRPHRRLLTIGTLCMLVFVGSQLVLMRLMGRLLPDVGSGDLKRILPVIGLVLLVFAIQKLAQFGQDSLLAGPALQVSQSLRRDLFQRLQKVQLGALEKMSSGDLTYRLTEDADRVSEVIYKTLHDSIPSALQLVAVLGYMLWLDWKLTLAILLLAPFVAWLISLFGARVMIATERSQKKVSELAGLLGEAIEGLPLVRAFAAEPWLERRFEEEIDQHRQARYNTYRLVALQHPVVGIIEVLGFATVLVLAAIRISSGDLAVPELISYLTGLVLLIDPIAHVTANYNEFQQGQSSLRRLREIEKEPSEPADPVPSIPLGRLRGDLNFDQVEFSYIPGQPVLQDFNLSIKAGQVVALVGPSGAGKTTLFSLLLRFNRVNHGQLLCDDKDLSQVSARDLRQQVALVPQRSSVFSGTIAEAIRFGRQATQEQLHQAAKLANAHDFIIRLPDGYNTRLQERGTNVSGGQLQRIAIARAVLGNPAVMLLDEATSALDAEAEAAVQLGLKQAMLGRTVIVIAHRLATVQEADLIVVLEHGRICQQGSHDDLMSQGGRYRELCERQFIRINE

SEQ ID NO: 5297 - protein, 331 aa, Synechococcus sp. CC9311
MTSFLTAARAEQEKLQHDTRRLRLFSGTSNPALAREIAAYLGVPDGPKVCKRFADGELYVQIQESIRGCDVFLIQPTCAPVNDNLMELLIMVDACRRASARQITAVVPYYGYARADRKTAGRESIAAKLTANLLVKSGVDRVLAMDLHSAQTQGYFDIPCDHIYGSPVLVDYLAAQDLGEVVVVSPDVGGVARARAFAKQMNGAPLAIIDKRRTGHNMAESLTVIGDVSGRTAILIDDMIDTGGTICSGAKLLREQGATGVIACATHPVFSPPAIERLSVEGLFEQVVVTNSIPIASNHAFPQLHVLSVANMLGEAIWRIHEESSVSSMFR

SEQ ID NO: 5298 - protein, 530 aa, Synechococcus sp. CC9311
MLEISLTDEFLYQGISTMSIQVPTRPFLENKKLNKIEQNKAAKDGLLVGNEIEEFARVGWEEVDETDLQLRLKWYGMFWRPKTPGKFMLRLRVPNGVINHQQLRVVASIVERYGENGSCDITTRQNLQLRGVLLNDLPDILKRLKDVGLSSIQSGFDNPRNVTGNPLAGIDPNEIIDTRPFTTELQDFLTNHCEGNPEFSNLPRKWNTAVAGAKDNFLLHNDIVFHPVERDGVLGFGVWIGGILSSQMNAYAIPLNAWVKQDEICRMTDCVIRLWRDNGERNKRPKGRFRMYLDQLGIDAFRSEVESLFGPLIEDPGSVFNSTPRSHYGIHPQKNADEFFAGLHVSVGRLTATDLHDLATASLDYGTGEIRLTEDQNVIIVGLSSANLDRFKADPLLQRFPLEPGAIAAGTVSCTGNTYCSFGLTNTKDQAIAAAKQLDAELELPEELKIHWTGCPNTCGQAFMGAIGLTGTKAKNSKGEMGEGYTLSIGGSQGENPQIGEVQQKAIPAEDIQNVLRQVLIEQFGAKPRA

SEQ ID NO: 5299 - protein, 262 aa, Synechococcus sp. CC9311
MIRPDAEPLLEITDLHASVEGKPILNGVNLQVKAGEIHAVMGRNGSGKSTLSKVLAGHPAYRVTSGSVRYLGRDLLDLEPEERSRLGVFLGFQYPIEIPGVSNLEFLRVSTNARREKQGKEEFDTFDFDDHVRDRLQVVQMDPAFLERSVNEGFSGGEKKRNEILQMALLDPVVAILDETDSGLDIDALRIVAGGVNQLASPDNCTLLITHYQRLLDEITPDYVHVMGAGRILKTGGRELALELEKIGYDWVDQLLAAEGVS

SEQ ID NO: 5300 - protein, 374 aa, Synechococcus sp. CC9311
MKKVLVIGGGIAGLTLALALKKVGIPVAVHEKYNHYQNQKTGFLIWSYAIKILQDLGVPVDEVGAPLEAFRIHGRKGRFVCKMPIGSVSRLHGANSYEVNRYRLSELLSRMVGDDLILGSECTSVSSVDGQAIATFADGGSDQGDILIACDGSNSVVRKFIHPGVHLRMLGAGGWISVINQRPPLLPLNTQMEFWQPGVKAGVADLGHGETRWYVAFKNYVPSAVESKKDQILNRMKPLPEIIKSCLECTDEDQMVPTQAGDLLALSPWYRDRVLMIGDAAHATSPYAGMGACSAIADASLLADLIASGRSVPAIFQDFQAVRKPAADSVIKDSRRGLDLSTCGDLKGWVRDWMFTNMPEKKLNQIVTDMVTGH

SEQ ID NO: 5301 - protein, 401 aa, Synechococcus sp. CC9311
MGRATKVVLAYSGGVDTSVCIPYLKQEWGVEEVITFAADLGQGDELEPIRLKALEAGATQSLVGDLIKPFIEEFAFPAIRANALYEGRYPLSTALARPLIARRLVEVAREVGADAVAHGCTGKGNDQVRFDVAIASLAPDLKVLTPAREWGMSREETIAYGERFGMPSPVSKKSPYSIDLNLLGRSIEAGPLEDPMVAPPEEVFAMTRSVDQTPNDAEEIEIQFEGGNPVAINGKRLEPVSLIREANLLAGTHGIGRLDMIENRVVGIKSREIYETPGLLLLIQAHQELESLTLAADVLRTKRQLEMQWADLVYQGLWFGPLKEALDGFMDRTQIHVNGVVRLKLHKGNATVTGRASTDNSLYIPEMASYGSEDKFDHRAAEGFIYVWGLPTRLWAAKHRR

SEQ ID NO: 5302 - protein, 292 aa, Synechococcus sp. CC9311
MAMVGLGALGLPIAVNLRRAGYSLNVHTRSRSAESAAELLDDQGPTVTSSSSPKEAVSGCAVLLICVSDDTAVQDVLWGDSGAGYSLRPGSLVIDCSTIAPATAAAMAKRLSERNVHYIDAPVTGGTEGAKAGTLTVLCGGNTMALEQAHPLLEVIGGSIHHFGPVGSGQQVKAVNQVLVAGSYAAVAEAIALGQHLRLPMEHVVAALLGGAAGSWALQHRSAAMLSDQYPLGFKLALHHKDLKIALAAAKEQQLELPLTQLVLEQESELMQQGLGNADVSALRRCYPAHPS

SEQ ID NO: 5303 - protein, 382 aa, Synechococcus sp. CC9311
MIGYISDNLLIPILDFFYGLVPSYGLAIVALTVVIRLALFPLSAGSIRSARRMRIAQPVMQKRQAEIKARYANDPQKQQAELGKLMKEFGSPLAGCLPLLVQMPILFALFATLRGSPFADVPYTLNLKVLPADQIAAVEPKPFTSASHSIFITETNHVPIVASLPGGTKLGTGDSVPIQLETRGGESFRNVISGVDNGQRFLPAWTVTKGEGVVSVSETGTITALTTGDATVEGKITGLAARSGFLFIKALGQVGFYTEGAINWDIAILIGAFGLSLFVSQLLSGMGMPANPQQSTANKITPVMITGMFLFFPLPAGVLLYMVIANIFQAFQTFLLTREALPDNLQSILDAQILQKSQPASASAGGGSSSGRMPFEPKGGNK

SEQ ID NO: 5304 - protein, 125 aa, Synechococcus sp. CC9311
MAETSSSSSQTTPETGTYAIVEASGQQFWVQPNRYYDLDRLHADVDAKITLDKVLLVKNGDAATIGKPYVQGASVELKVMAHRRGQKVIVYKMRPKKKTRRKNGHRQELTRVMVESISVGGKAIS

SEQ ID NO: 5305 - protein, 381 aa, Synechococcus sp. CC9311
MRKLNQFFELTRTISRDERGLTHLFLTRDKQMRVHLLALPLVSFLFILNGCATLGEGGASRLDLIKRRAELRCGVSGKIPGFSFLRRDGSFAGLDVDICRAFAAALTGSPDQVQYRSLTAPERFTALRTGEIDLLSRNTTFNLSRDAVGGNGVSFAPVVFHDGQGLLVKRQSGVSDLNDLQGKTICVGSGTTTEQNLNDAFQARGIDYKPIKYQDLNQVIAGYLQGRCSAMTSDRSQLAAARSGFNNPEQHVILPEVLSKEPLAPLAAGGDQRLADAMRWVIYALIAAEELGITQQNIGDKLEEAQRRPELTQLRRFLGVEGELGEKLGLNNDFIVKVIQAVGNYGEIYNRHLGPDSAVPIPRGLNNLYRNGGVLTSPPFQ

SEQ ID NO: 5306 - protein, 244 aa, Synechococcus sp. CC9311
MAEVSRGFSRYAPPTIRPAGSSFGTPAVPSSRTLQDVIRGLDGANSEMVERGKTIFFPGDPAEKVYLIRRGAVRLSRVYESGEEITVALLRENSLFGVLSLLTGHRSDRFYHSIAFTRVEMVTAPATSVRQAIEADTSVGLLLLQGLSSRILQTETMIETLTHRDMSSRLVSFLLVLCRDFGVPGQRGITIDLRLSHQAIAEAIGSTRVTITRLLGDLKSSSLVDIDRKKITVLDPIALAKRFS

SEQ ID NO: 5307 - protein, 392 aa, Synechococcus sp. CC9311
MPGPPSLSHRALALQPSLTLAISARAKALQQKGVDVCSLSAGEPDFGTPDFIVEASIQALRDGITRYGPAAGDPELRAAIAQKLSLENNIPTKTDQVLVTNGGKQAIYNLFQVLLNPGDEVIIPAPFWLSYPEIVRLAGGNPVTVPSSASDGFGLDLNKIEQSITPLTKVLVLNSPGNPTGRVLCLSELEALAELVRRHPHLMVMSDEIYEYLLEEGESHHSFAAVAPDLRERCFVVNGFAKGWAMTGWRLGYLSGDSTVIKAAAALQSQSTSNVCSFAQRGALAALQGSRDCIRAMAASYNTRRAELCNGLQQMKGITLVPPRGAFYAFPRLPDSITDSLAFCERALEEEGLAIVPGGAFGDDRCVRLSCAVSRETISDGLSRFQNLLTRR

SEQ ID NO: 5308 - protein, 605 aa, Synechococcus sp. CC9311
MALLVQKFGGTSVGSVERLQTVARRIADCKEDGNDLVIVVSAMGHTTDELTAKAKAISSDPPQREMDMLLSTGEQVSIALLSMALHELGVPAVSMTGAQVGIVTESAHGRARILDVRTDRLRARLAEGQVVVVAGFQGTSLSSGGTAEITTLGRGGSDTSAVALAAALGADACEIFTDVPGVLTTDPRKVANAQLMPQVSCDEMLELASLGAAVLHPRAVEIARNYGVKMVVRSSWSDAPGTTLTSRNAKPIGREGLELGRPVDGVELLEDQAVLALSHVPDQPGVAARLFESLSAGGVNVDLIIQATHEGSSNDITFTVAETDLEQARSICTTLVDSLGGILSSDGGMSKLSIRGAGIMGRPGIAAGLFDTLSREGINLRLIATSEVKVSCVVEASMGSKALQAAQQAFELSTQQQHINPPASGEGEPEVRGVALDRDQAQLSVRHVPDRPGMAGSLCSALADAGISLDAIVQSERQHGDGSRDISFIVKREDRAASDQALAPLLAQWPGAVLEDGPAIARVSAIGAGMPATAGTAGRMFRFLAEADVNIELIATSEIRTSCVVAESDGIKALEAVHAGFQLGGSESHQAQGTESPLELEAFKP

SEQ ID NO: 5309 - protein, 248 aa, Synechococcus sp. CC9311
MTATAASKETILVVDDEASIRRILETRLSMIGYNVVTACDGTEALESFEQCNPDLVVLDVMMPKLDGYGVCQELRKESDVPIVMLTALGDVADRITGLELGADDYVVKPFSPKELEARIRCVLRRVEKEQVAGIPNSGVIQVADLRIDTNKRQVFRADERIRLTGMEFSLLELLVGRSGEPFSRGEILKDVWGYTPERHVDTRVVDVHISRLRSKLEDDPANPELILTARGTGYLFQRIIDSVAPEGS

SEQ ID NO: 5310 - protein, 601 aa, Synechococcus sp. CC9311
MTNTPAQDSGSCSVDLSMSEISETTASETTDEMFTTVIETVEEPKVPSGFSEFGFSEALLKTLADKGYKEPSPIQKAAIPELMLGRDLVGQAQTGTGKTAAFALPLLERLQGDSPLPSVLVLAPTRELAMQVAEAFKAYSAGHPHLNVLAIYGGSDFRSQINALRRGVDVVVGTPGRVMDHMRQGTLNTSGLRSLVLDEADEMLRMGFIDDVEWILEQLPQERQVVLFSATMPNEIRRLSKRYLREPAEITIKTKDKEARRIRHRCITMQNSHKLEALNRVLEAVTGEGVIIFARTKAITLTVAESLEAAGHDVAVLNGDVPQNQRERTVERLRKGTVNILVATDVAARGLDVDRIGLVINYDMPFDSEAYVHRIGRTGRAGRSGDAILFITPRERRFVGNLERAVGQAIEPMDIPSNAEINQSRLDRLRTRLSTEATSEDKPEEETALLQELIQRVAQELEVEPGQLTLAAMRLAVGEGPLLVQGDESWLKAPLRNDRRDDRRGDRGNDRGRRPERASRPPEDDMERFRVEVGHRDRVKPGNLVGAIANESGLEGRMIGRIQIFETHSLVDLPKGMPENVFNSLRRLKVMNRELQIRQDS

SEQ ID NO: 5311 - protein, 604 aa, Synechococcus sp. CC9311
MCGIFGGFSFEASAFSGELPVMMAKSILHRGPDNTGYWSNEEALLGNCRLSIIDLSKNGNQPFYSKNKDIVVVQNGEIYNYIELRDLLIGEGACFQSDSDTEVVLHAYAIWGPDFVSRLNGMFSIAIYDSRVSTAVLRLYRDRLGVKPLYYCIDGGCLWFGSEIKAILAAGVKANPNYNALRSYFALNYIPPPQTAFANIYHLQPGHSAAITKSGVKLNRYWDCNDIGLNEDITTAEAKSGIITLLDDAVRIRLRSDAPFGAFLSGGLDSSSVVGLMSLYKESPTKTFSIGFEDARYDETSYAEMASKRFGTYHSTKIMSENALDIWSKFIWHCDQPHGDISFIPTYQVSENASQEVKMVLTGDGGDELFAGYDKYASFFSGECDRSHPRWFSDYAQFTGLIEADMAKRLFKGEIKASFEENDPYAPITESMLRFGQDDHINKVLYADTVNLLPGNNLVKPDRMAMAHSLEVRSPFLDYRLVEYAFSLPGKMKLKGTETKYIYKMAVEELLGETLTWRKKQMFTVPVGDWFRGHLADFCSRILLDNRSLSRGLYAESVLREVIEDHTSARKNYTRLLRALISLEIWFRLFIDQDMSNLELITSK

SEQ ID NO: 5312 - protein, 587 aa, Synechococcus sp. CC9311
MAPIDWFLLVFYLIGTLFLGLWLARRNQGEDDYFVAGRSLSGWLAGASMAATTFSIDTPLYVAGLVGTRGLAANWEWWGFGLAHVAMAVVFAPLWRRSGVMTDAAFTELRYGGATAAWLRGTKAFLLALPINCIGIGYAFLAMRKVVQALGIVSDQPVPALGGLPDTVLLLTIVAVLVLVYTVAGGLWAVVITDFVQLILAMVGALAVAWAAIHAAGGMDALLTSLNALGRPEVLSLVPWRWTDSGFDWIGGAGISASTFLAYLTVQWWSFRRSDGGGEFIQRMLATRDERQARLAGWVFLVVNYLLRSWLWVLVALAALVLLPDQADWELSYPALAVTYLPPVVLGLVVVSLVAAFMSTVSTSVNWGASYLTHDLYQRFVRPNASQKELLLVGQATSVLLLVLGVLTALISDSIGTVFRLVIAIGTGPGVVLVLRWFWWRINAAAELSSMVCGFFVGLATSVIPVLQISDYGHRLMVTTAITAVVWVGVMLMTPPESEEVLERFVQRVQPPGPGWSHWRRRFEVEASESLRDLLARFLLSSCVLFGALLGSGAFLLHQQMAGWSGLILTVVSLSLLLRGRHSRLAV

SEQ ID NO: 5313 - protein, 370 aa, Synechococcus sp. CC9311
MATIGVPTEIKVDEQRVALTPDAVKELVTHGLEVRIQSGAGSGAGIDDEAFAAAGAQIVDQEQAWGAHLVVKVKEPQPEEFRFLRNDMVLLTYLHLAAYPEVGEALLAAGTTGVAYETVQLENGTLPLLAPMSEIAGRLAAQVGARLLERPQGGRGVLIGGCTGVQPARVVVLGAGTVGWNAARLVAAMDAEVMLLDRSPERLRSLEAYRSGRLMSVVSSRGLLERLIPTADLLIGAVLTPGGRAPTLVDEAMVKGMKPGSAIVDVAIDQGGCIATSRETTHTNPTVTIHGVQHYAVGNMPGAVPFTSTEALVSVTLPYIVGIAGRGLEEAVTERPELLSGLNTVQGSVCHPGVAKALDVPPRHPMACLR

SEQ ID NO: 5314 - protein, 330 aa, Synechococcus sp. CC9311
MFRVNSLGALVCNGIDEYKKTLLSSRLRRFLIALLVVPALQLLSAALLPAYAGDTALLAADNTLILTSSALVLLMTAGLAFFYGGFVQSRNVLNTMAMSFVMMGLATLVWVTFGFSLAFSDGGALQAVVGNPFSFALLENVPPVWDGLAIPGLTFALFQGMFAIITPALISGALVERISFKFWCVFSPVWLLLVYAPLAHMVWGGGFLGKDLDFAGGTVVHISSGVSALVLAGLIGCRRQWPHSVRPPHDVSQILLGTGLLWFGWFGFNGGSQLAVAGAELPFTTTHISAAAGLVAWSLIETWRSGKPTVVGMATGAVAGLVGVTRLPGL

SEQ ID NO: 5315 - protein, 295 aa, Synechococcus sp. CC9311
MDYVLPNELVDGMILAGGKKATVSIKNLLIRGFYSGAILGLAVILALTVGILTKLPFVGSLLFPFGFASIVLFGMELVTGNFALLPMATWAGKCSWSATFRNWTWVWIGNFIGTLVVAIIMAISLTSGSMDAAAENVGPPIWDLVAQKIVALNQINVVKKYEALGSMGFFLAFLRGVVANWLVCLGVTMALVSKSVPGKLLACWLPITAFQTMGMEHIVVNQFLHTAGPILGSGVPFYKVIFWNFLPVTLGNIVGGMVFIGMLFYSTHRTKISDVLPTEHDEKLERELAAELGAR

SEQ ID NO: 5316 - protein, 373 aa, Synechococcus sp. CC9311
MVCHTHAIAPSRVIRGEQAWQRGLPAIADLCQRPALLGRSPATQAIRDGLKADLISNELTVEEVQLNFDCCEDDLIRLEASLKATACDSLIAAGGGKVLDAGKLLAYRLKVPCITVPLSAATCAGWTALANIYSPDGAFVADVALDACPDLLIFDHGLVRQAPNQTLSSGIADALAKWYEASVSSGSSTDGMIQQAVQMARVLRDQLLIDALDAIARPESEAWVRVAEACGLTAGVIGGLGGAQCRTVAAHAVHNGLTQLPSCHGKLHGEKVGFGILVQLRLEERLGGNQLAAQSRRQLLPLLKELGLPVSLQDLGLGETGLHDLRAICSFACRPGSDLHHLPFEVTETDLLEALVSTEADSRSINTSLETEA

SEQ ID NO: 5317 - protein, 242 aa, Synechococcus sp. CC9311
MVSGLKDEGQRSNLSVVATPSSMSLRLLLDSANPEDWQNWWQTGLFTGITTNPTLLRRAKRACNFQSLKELSATALELGVRELHLQAWGANSNALEACATELASIAPGVVIVKLPVTRAGLVAARPLISRGIQITFTACYDAAQVLLADALSANYIAPYLGRINDQGRDGHSELLTMQRALHALESNTRLLVASLRSPNDLVALAAGGCDTFTISPEIASALLQNPHTTAAAEQFEHDATNP

SEQ ID NO: 5318 - protein, 494 aa, Synechococcus sp. CC9311
MAVTKGQSPFILLYHRTPFDEGRDEKGNRIWCDQKSPNGIIPTLRNLFRTRENGTWIAWRKVDKVEDANDENIPMSNPKPFTLCRIPLEEDQISSFYHVTSKESFWPILHTFPTHFNVNNADWSIFEEVNYRFAKAACHQAAESATVWVHDYNLWLVPGYIRELRPDLKIAFFHHTPFPGNDVFAILPWREQILESLLCCDVVGFHIPRYTENFARAANCLLGAKKGSKQPVNSRFVSTGSALTEPSETPCLHYKGRKIQLLSSPVGTSPDVIQELAARADVQELADKIDDDTKKGRKLILSASRVDYTKGNEELLLAFERLLERRPDWHGKVVLMLACVAAASGMKIYEDTQRTIEETAGRINGRFSLIDWVPIRFSTRRIPYEEMVAWFTRSDICWITPLRDGLNLVAKEYAAARKDRGGALVLSEFTGASVVLDGAILTNPYSHRQMDEAIERALEMPKDEQIKRMSRMSSAVESFTVSDWVREQMDALEA

SEQ ID NO: 5319 - protein, 568 aa, Synechococcus sp. CC9311
MTPSVVTYALDRLADLGIGHVFGVPGDYSFPINDAVEVHPRLRWVPSANELNAAYAADGYARRRGAAIVCTTYGVGELSALNGLMGAMAERLPVFHLVGTPSLRIVRQGLICHHTLGDRNYDRFEAISASASCVSARLTPENAVIELERVIDKALEQSRPAYLTFPMDLALMPITGTPIQGSPLGVIDQHDSVSAELEAVLDLLESRIASASRPVVLPTITLKRFGLVNAFEEFLKASGLAYATTPMDKALLSEQHPAFLGMYNGGRSTPAALQSVVEEADLVVDIGGLVLEDLNTGLWSGSLDPNRIVALHADWVQAGHQVFTSVSISDVLAGLTRRFQTSSKRLSYWGEHRPVRPAPMLPLLGEPDQPTDSASFYPRLQQFLRPNDLLLSDTGTCLLKLNAIRLPDGVTMESQTLWGSIGWGTPAALGCALAEPERRVVLVTGDGAHQLTVQEIGVMGFTGVNPVVIVLNNGLHGIEALISETGHAYNDLPPWHYANIPAALGCKDWWSGRAATVAELEQALAAISAHQGAAYLEVVIPAEESQPLAEEVIEIFHQTTTPKSALTD

SEQ ID NO: 5320 - protein, 474 aa, Synechococcus sp. CC9311
MHSLIPLLWPDRRQSLHLPVHGRGRALPPALKRLLRKPPGSWDLPELPEIGGPLEKDGAVADAQARLASRLGVAGCWFGVNGSTGLLQAALSALAGPGQAVLLPRNAHRSLIAACVLGGIRPVFLPVPFLSDRGHPGAMSAQGLESALTALPSIPESIVGAVLVHPTYHGYASDPTPLIAALHRRGLPVLVDEAHGTHFAFAGGEALPRSSLHAGADLVVHSLHKSAPGLGQTAVLWLQGMRVSSAAVRASLLRFQTSSPSALLLASCEATLNWMLTPTWERLLQRRLKEARQLAIRLVAAGLPLRSSDDPLRLILLTAEKGISGLDADAWLMQRGLIAELPEPFCLTFCLGLASQHGLAQRMQRLWRRLQESHPSSGPLEPLLLPPLQTCSTPELLPALAVRAPACELSIHDSAGRIAAEMICPYPPGVPLLIPGERIGLDRLEWLLSQHRRWPELVPGMVKVLAEEPQVQLG

SEQ ID NO: 5321 - protein, 389 aa, Synechococcus sp. CC9311
MTASSSSSQRSGVIAPYGGTLVDLMASATEHAALKASATTSIECSDRNACDVELLVVGGFSPERGFMHQADYDSVVAGHRTTSGYLFGLPIVMDTDREDVAVGDKVLLTYKGQDLAVLTVGDKWEPDKVVEAKGCYGTTSLEHPAVRMIATERRRYYLGGLIQGLQLPERVFPCKTPAEVRAGLPDGEDVVAFQCRNPIHRAHYELFTRALHAQNVSENAVVLVHPTCGPTQQDDIPGAVRFQTYERLAAEVDNSRIRWAYLPYAMHMAGPREALQHMIIRRNYGCTHFIIGRDMAGCKSSLSGDDFYGPYDAQNFAKECAPELTMETVPSLNLVFTDEEGYVTAEHAEARGLHVKKLSGTQFRKMLRSGEEIPEWFAFRSVVEVLRAS

SEQ ID NO: 5322 - protein, 528 aa, Synechococcus sp. CC9311
MTKVLVSDPIDQAGLDILGQVAQVDERIGLSSEELKSIIGDYDALMIRSGTQVTADVIEAADRLRIIGRAGVGVDNVDVPAATQRGVLVVNSPEGNTIAAAEHALAMLLSVSRHVPQAHGSMRSGAWDRKKYVGNELYKKLLGVVGLGKIGSHVARVAKAMGMEVIAFDPFISAERAQQMQVRLTTLEALFQQADYITLHIPRTPDTENLVNAELLRTMKSTARIVNCARGGIVDEPAIAEAIESGVIAGAGLDVFASEPLAQDSPLRAVERGLVLTPHLGASTEEAQENVAVDVAEQIRDVLLGLPARSAVNIPGLSAEIMERLKPHLQLAETLGLLVSQLSGGQIQELEVRLQGEFASHPSQPLVVAALKGLLSTALGDRINYVNASLEAKGRGIHVLEIKDDASRDFAGGSLQLTTRGGQGGHSVTGAVFADGDLRVTSIDEFPVNVPPSRHMLFTRHRDMPGIIGHLGSLLGEHNVNIASMQVGRRIVRGDAVMVLSIDDPIPPALLTTIHGINGIQEAHPVTL

SEQ ID NO: 5323 - protein, 643 aa, Synechococcus sp. CC9311
MNQRWRQIALWILPIGVALLLIWQLVGSGALNNLRSSNAPPSAGTTVAPRNAAVARMSYGRFLDYVAAGRVTAVDIYDGGRNAVVEAVDPDLDNRVQRLRVDLPGLAPELINTLKDEGISFDIHPPKTAPPALGILGNLLFPLLLIGSLIFLARRSNSMPGGPGQAMQFGKTKARFAVEADTGVKFDDVAGVSEAKQDLEEVVTFLKQPERFTSVGAQIPKGVLLVGPPGTGKTLLAKAIAGEAGVPFFSLSGSEFVEMFVGVGASRVRDLFKRAKENSPCLIFIDEIDAVGRQRGAGIGGGNDEREQTLNQLLTEMDGFEGNSGIIILAATNRPDVLDSALMRPGRFDRQVTVDAPDIKGRLSILEVHSRNKKLDEQLTLDSIARRTPGFTGADLANLLNEAAILTARRRKESIGISEIDDAVDRIIAGMEGHPLTDGRSKRLIAYHEVGHALVGTLVKDHDPVQKVTLIPRGQAQGLTWFSPDEEQMLVSRAQLKARIMGALGGRAAEDVVFGHSEVTTGAGGDIQMVASMARQMVTQFGMSQLGPMALEGGSQEVFLGRDLMTRSDVSDAISKQIDEQVRLIVMKCYEETVALVGQHRQAMDKLVEQLIEQETMDGDEFRVVVAEFAEIPEKERFSPLLA

SEQ ID NO: 5324 - protein, 380 aa, Synechococcus sp. CC9311
MPRLLIPIESAAAETRVAASPETLKKFIALGCSVAVERGAGVSSGFLDETYASAGADLVAPGEAQAWGQADVLLCVQSPSPASLGRLRRGALVVGMLSPYGNQELAEALKGCGLSAMALELLPRISRAQSADVLSSQANIAGYKAVLLGAAALDRYFPMLMTAAGTVQPARVVVLGAGVAGLQAVATARRLGAVVYVSDIRPAVKEQVESLGARFIDPPEMEDKPAESGGYAKQASDAFLAAQRQQLSDQLAQADVAICTAQVPGRRAPRLISEDMLDRMRPGSVVVDLAVAQGGNCADTVPSQTVNRKGVKLIGANELPCSVPNHASSLYARNLLALLQPTLQDGKLTLDTEDELIAGCLIAHDGSIRRGDVLTPGDTN

SEQ ID NO: 5325 - protein, 384 aa, Synechococcus sp. CC9311
MRVSATPQTSDERAFTIVFTGLGGRRAELSRLNVSYGRLRDTICVLLSRGARIQSVSPAGSEPESAPVQSAPPVSAPVTTSKPKPKPAAKPVPVNLYKPKAPFLGTVTENYSLLKEGAIGRVQHITFDLSGGDPHLEYVEGQSIGIVPAGEDAKGKPHKLRLYSIASTRHGDNLEGNTVSLCVRQLQYEKDGETINGVCSTYLCDVEPGSKVKITGPVGKEMLLPEDEEANVIMLATGTGIAPMRTYLRRMFEPKEREENGWNFRGKAWLFMGAPKTANLLYDADFLHYEKEYPDNFRYTKAISREQQNPKGGRMYIQDRVSEHAEEIFAMIEDPKTHVYMCGLRGMEPGIDEAMSAAAEAKGLDWSELRPKLKKAHRWHVETY

SEQ ID NO: 5326 - protein, 317 aa, Synechococcus sp. CC9311
MVESLSGSFTSDKSKEFRSGFVALIGRPNVGKSTLVNQLIGDKIAITSPVAQTTRNRLRAILTTDEAQLILVDTPGIHKPHHLLGERLVRTARSAIGEVDQVLLLLEGCEAPGRGDAFIVQLLRQQSLPVQVLLNKWDLVPLEQKDAADAAYRELLSETDWPVHRCSALSGDGCPELVKAISSLMPEGPQLYPSDMVSDQPERLLMGELIREQVLLNTREEVPHSVAVSIDRIEEIPAKGKGNGRTAVLATVLVERKSQKGILIGKGGAMLKTIGQGARLQMQTLIDGPVYLELFVKVVPDWRSKPARLAELGYVGD

SEQ ID NO: 5327 - protein, 329 aa, Synechococcus sp. CC9311
MQFIDQARISVRGGRGGDGIVAFRREKYVPAGGPSGGDGGQGADVVLEADSNLQTLLDFKYKRLFAGIDGRRGGPNRCTGASGPPLVIKVPCGTEVRHLSTGIVLGDLTTHEERLTVAFGGRGGLGNAHYLSNRNRAPEKCTEGRDGEEWPLQLELKLLAEVGIIGLPNAGKSTLISVLSAARPKIADYPFTTLIPNLGVVRRPTGDGTVFADIPGLIAGAAQGAGLGHDFLRHIERTRLLIHLVDGGAEDPLLDLRVVEKELEAYGHGLVERPRILVINKQELIQEEDLDAIVSALTEASGRTPLLVSAAMNRGLDDMLDRVWSELGI

SEQ ID NO: 5328 - protein, 292 aa, Synechococcus sp. CC9311
MNNPKSQTIDQSLFDDEGAIFMGGQRDPEGCRIALFGVPYDGTTSFRPGTRFGPAAIREVSTGLETYCPQLDRDLEDIPYADIGAVEIPYGDPQPVVDAVRHATGTVLAAGMKPLMLGGEHSISSGAVAAVAEQHPDLVLVQLDAHADLRNEWLGSRHSHACAMRRCLEVLPSQQLLQIAIRSGTFEEFKELHRNERLISVQEIPERMTPLRGRPIYLTVDLDWFDPAVMPGTGTPEPGGFIWNDFAAVINELRHHRLMGADVVELAPQLDSSGISSVLAAKVTRSLLLLMA

SEQ ID NO: 5329 - protein, 378 aa, Synechococcus sp. CC9311
MAYPLEQGCIHQRPLAVLASPGRYVQGPGATHELGRELKRLGLADSVLFIAGGTAQRCLARIWQAELPPLGLTPVIETFGGESSEAEIDRLVELAKTHTFTAVVGAGGGKASDTARAVANELELPVVITPTLASTDSPCSALSVLYTEQGEMLSYRFYTRHPALVLVDTTVIAQAPKRQLVAGLGDALATWFEARTVRQSHVNNQLGGKPTTSGTALAKLCHEILLTDGPAACAAVDAGVATPALERIVEANNLLSGLGFENGGLAAAHAVANGFSMIAGSHRMLHGEKVAMGLHTQLVLEGQPQSEICEIFEYCRSVGLPTTLAQLGVNADSDKDIQTIAERAVMPGETIHNEPFEVSAAAVDCALKAADQQGRAYA

SEQ ID NO: 5330 - protein, 490 aa, Synechococcus sp. CC9311
MTTAYESPNTRRKSRLQEASLLEGPMLLLQSIRGFKTNRSLLWLGCVPLALFGLGLFNLSAHAAEMPELNAAFLANNLWLLVATILVIFMNAGFAMVEAGMCRQKNAVNILAKNLFVFALAVTAYWFVGYSLMYGNAIAAGWLYFNGLFFDPAVTPELISEAGLVPSVDFLFQAAFAGTAATIVSGLVAERVKFGEFVVFSLILTAFIYPIAGSWEWNGGWLNSVGDKEFIDFAGSSIVHSVGAWAGLIGAMLLGPRIGKFIDGKPQAIPGHNMAIATLGALILWIGWYGFNPGSQLAMDQWVPYVAVTTTLAAAGGAIGATVISTLTSGKPDLTMIINGILAGLVSITAGCGNLTFVGSWVAGLIGGIIVVFAVSALDASGIDDPVGAFSVHGVCGVWGTLVVGLWGFDIQGDGSPLGLLVGGGISQLGIQALGCAAYAIWTIVTCWIAWSVIGGLFGGIRVTEKEEVEGLDIGEHGMEAYPDFVSSGR

SEQ ID NO: 5331 - protein, 537 aa, Synechococcus sp. CC9311
MVGLARCCCFGISGAFSGCIGPAVLGWPACLGVDVHRPSGGTHPDRCLDRPPMTTTLISALISLVVYLLALLWLGAQSLGGQTNSADSYFLADRRLRAGVLFFTLIATNFSAFFFLGFAGAGYRIGIAYYPMMAFGTGLAALSFGSLGCRVRRLSAQHGLITPSELIGHLLPGEGVRLLVLAVMVLFTLPYLALQPLGAGYLLESLTGGVVPFEVGAVLLTVVIVLYVVGGGMRAVARTDVLQGVLMFLLMLMAFVAVAVGVGGVQTANRTLLQQLPDLFSGAGRNDFFTPRMMASYLLLWPLCLPMFPQMLMRFFAAGDDRSLKQSMVLYPVVAGVLFICPVMIGMWGHLAFPDLVGRASDQIMPLMLGRYSPEWLTGIVMVGALAAFMSTLDSQLLALSSMLTRDLYKRYWRPQASLPEQVRVGQLVVIALAVSGLVIALRPPEAILSLATHAFSGLALLFPMLVGAVYGLRWSVIGAILSVIGGEAVLLGFATGVIPEVFQGGCLPLIPALVVACSILVVDQVISRWSSSFLQA

SEQ ID NO: 5332 - protein, 626 aa, Synechococcus sp. CC9311
MTKVIGIDLGTTNSCASVMEGGTPTVIANAEGFRTTPSVVAYTKSKEQLVGQIAKRQAVMNPENTFGSVKRFIGRRSDEVATETKDVPYTVETVGTKVKIKSAWMEKSFSPEEISASVLRKLADDASKYLGQAVTQAVVTVPAYFNDSQRQATKDAGKIAGLEVLRIINEPTAAALAYGFDKKDAEKILVFDLGGGTFDVSILEVGDGVFEVISTCGDAHLGGDNFDKVLVDHMADTFQKAEGIDLRKDAQALQRLTEAAEKAKIELSSSTQSEVNLPFITATADGPKHLTMTVTRGKFEELSSNLIDRCKKPIQQAMQDANLSKSDLNEVVMVGGSSRIPAVLELVKVATGQDPNQTVNPDEVVAIGAAVQGGVLSGEVKDILLLDVTPLSLGVETMGSVVNVMVPRNTTIPTNKTEIYSTAMDGQTTVEIHIIQGERQMVSDNKSLGTFRLDGIPAAPRGVPQVEVAFDIDANGILSVTAKDKGSGKEQSITITGASTLSESEVNRMVKDAEANAESDQQKREAIDTKNQAESVIYQAEKQLLELENKVTPESRTKVELVLSELKETLQTDNTQHIQDRIEGVKTALMEMGATLHSQQDGAPQASEENNESDDVIDAEFVESPK

SEQ ID NO: 5333 - protein, 554 aa, Synechococcus sp. CC9311
MILWPVLPAAINPLQTSPAGAINATPCAPESLLIRPLSESPTPVRSSLSQPPLWVGAIPLLIFLLVSAIDLALAKHFTETGKTIVSHALGGLWQWMVMLLFLIALAIAISPVGKLRLGGATAKPSLKFFDWCAVLICTLLAGGGVFWSAAEPLYHFQTPSPVFEGVVGSTAAAVDPALAVSFLHWGFLAWALVATTTTITFSILEQRGEPLWPRTLLVNILPKGWVNGPIGDLADGLSVVAAIAGTVGPLGFLSLQLSNAAGQLPWLSDSAGLQSLVVVLLTAVFATSTVSGIQKGIKWLSELNVWLTLVLGAGLLILGPGIWLIQHFFSGFWTYLLHLPQMALMPRSDVTEPWLNSWTVFYWGWFLGYAPLMGLFTAGVSRGRSIRELVLAVAILCPIVTNLWFTLLGGTGMNLELAGSGISDALAQNGAAAALLAILSALPLSGLLIPIGLLLVVLFMCTSADSMSYAAAMVVSGRNEPSQRLRLFWALMIGSLTLVLLRIGTGLGDSTSIDALQAFIVITAVPVTPLVLFTLWSAPRLAFKEWQRSGQSAE

SEQ ID NO: 5334 - protein, 107 aa, Synechococcus sp. CC9311
MDSKTKERIQTLIQSSPIFVFMKGTKLMPQCGFSNNVVQILNALGMSFETFDVLSDMEIRQGIKDYSDWPTIPQVYVKGEFMGGSDILIEMYNNGELKEKLEIELAS

SEQ ID NO: 5335 - protein, 387 aa, Shewanella sp. MR-4
MKQAVIVDCIRTPMGRSKAGVFRNVRAETLSAELMKGLLLRNPQLDPNTIEDVIWGCVQQTLEQGFNIARNASLLAGIPKTAGAVTVNRLCGSSMEAIHQAARAIMTGMGDTFIIGGVEHMGHVPMNHGVDFHPGLANNVAKASGMMGLTAEMLGKLHGITREQQDAFAVRSHQRAHAATVEGRFAKEIYGIEGHDANGALIKVLHDEVIRPETSMESLAALRPVFDPANGTVTAGTSSALSDGASAMLVMEESKARALGLPIRARIRSMAVAGCDAAIMGYGPVPATQKALARAGITVNDLDVIELNEAFAAQSLPCVKDLGLLDVVDEKINLNGGAIALGHPLGCSGARISTTLINLMEHKDATLGLATMCIGLGQGIATVFERV

SEQ ID NO: 5336 - protein, 557 aa, Shewanella sp. MR-4
MEPGQMIRGADAVIKVLAAHGVTTVFGYPGGAIMPIYDALYGSPVEHLLSRHEQGAAFAAVGYARASGKTGVCFATSGPGATNLITSLADALLDSVPVVAITGQVSTAVIGTDAFQEIDVLGMSLSCTKHSFMVTDVNDLIPTLYQAFEIAASGRPGPVLVDIPKDIQIAQLEYRTPLLAVTNEPQASVSEIDAARALLAEAKQPMLYVGGGVGMAGAVDQLREFIKATGMPSVATLKGLGSIAHGTPGYLGMLGMHGGKAANLAVQDCDLLVVAGARFDDRVTGRLATFANKAKVIHLDIDAAELGKLRQPDVAIAGDLRQIFPALAMALNITPWQAEVEHLARKHQWDYQHPGSLIYAPAMLRRLANKLPEDSVVSCDVGQHQMWVAQHMWFRRPEDHLSSAGLGTMGFGLPAAIGAQVARPDATVVTVSGDGSFMMNVQELTTIKRRKLPVKILLIDNQKLGMVKQWQQLFFEERYSETDLSDNPDFVQLASAFDIPGRTIFSSDEVEEALTEMLAAKGPYLLHVAIDDAFNVWPLVPPGASNSDMMDEMEKQT

SEQ ID NO: 5337 - protein, 451 aa, Shewanella sp. MR-4
MSLVVAKFGGTSVADYGAMNRCADIVLGNPDCRLVVVSASSGVTNLLVELTQESMNDDGRLQRLKQIAQIQYAILDKLGRPNDVAAALDKLLSRMAVLSEALASQRSKATMDELLSLGEQCSSALFAAVLREKGANSSAFDVRRVLRTDSHFGRAEPQVEQIAILSREHLLPLLSEQVIVTQGFIGSDEAGQTTTLGRGGSDYSAALLAEALKASAVEIWTDVAGIYTTDPRLAPNAHPIAEISFNEAAEMATFGAKVLHPATILPAVRQQIQVFVGSSKEPEKGGTWIRHQVEDAPVFRAVALRRDQTLLNLHSLQMLHAQGFLAETFATLARHKISVDLITTSEVNVSLTLDKTGSDSSGQGLLSEALLQELSQHCRVRVEDGLALVAIIGNRIATTAGICRRVFEVLEPHNVRMICQGASPHNLCVLVAESEAAQVVKALHENLFEGA

SEQ ID NO: 5338 - protein, 325 aa, Shewanella sp. MR-4
MVDQSQLRQWGCKVIDIEKSALDNLYQYVDSVEFAQACELILNCTGKVIVMGMGKSGHIGNKISATLASTGTPAFFVHPGEASHGDLGVLSDNDVILAISNSGESSEILALMPVIQRKAIPVIAMTGKPESTMARLSKIHLCIEVPEEACPLGLAPTSSTTATLVMGDAIAIALLQAKGFTREDFAMSHPGGALGRKLLLKVSNVMHSGDDLPLVKHDICITDALYEISKKGLGMTAVIDEQNKLVGIFTDGDLRRVIDAQVNLRTTPIADVMTRNCVTITENVLAAQALQVMDSKNINGLIVIDKDNHPVGALNMLDMVKAGVI

SEQ ID NO: 5339 - protein, 405 aa, Shewanella sp. MR-4
MEMAIGIGMFTLVVCLLVIVILIAKKKLVTTGEITIGINDDAEKSIKVAAGDKLLGALASKNIFIPSACGGGGTCGQCRVKVKSGGGDILPTEQGHITKKEAKEGCRLACQVAVKTDMELELEEEIFGVKKWQCEVISNDNKATFIKELLLKLPEGEDVHFKAGGYIQIEAPAHVVKYADFDIPAKYRDDWEKYGLFDLVSTVNEDVLRAYSMANYPDEKGRIMLNVRIATPPSANVPPGKMSSYIFNLKAGDKVTISGPFGEFFVKETDAEMVFIGGGAGMAPMRSHIFDQLKSKKTKRKMSFWYGARSSREVFYQQDFDTLAAENDNFVWHVALSEPLPEDNWTGYTGFIHNVLYENYLKNHKAPEDCEFYMCGPPIMNSSVIRMLESLGVEPENILLDDFGD

SEQ ID NO: 5340 - protein, 613 aa, Shewanella sp. MR-4
MNSSNHKSSQTVLPHTPVESLASPPSKVQDRAVLPWIWQFLKPYRLRVVAAIVFLLIGSLAWLSLGQGVRLMVDEGFIKDNAQRLNEIILLVLLITAVSGTAVFCRFYLMTWLGERVSADIRLTVYNQLLKLSPAFYAKVRTGEVISRFTADSTLLQTVVGSSLSMALRSGVTVIGGLAMMGITSVKMTLLVLLAVPLVLGPVGFFGRKVRTLARESQDRVADLGAYVDETLHEIHTVQAYGHEDKDRSLFNSRVEDVMTAASGRIRYRAMLISSVMFLSIAAIASVTWVGAHDVMSGKMTGGELSAFMFYAVMVAGAVATISEVVGEIQRASGAAERLIELAETEVDIPAPLVPKTLPAKVRGELQLQQLSFHYPEQTQLVLSDLELMITAGERVALVGPSGAGKSTLFQLLQRFYVPSSGSIHLDGIDIAELSPKDLRAQFALVPQDSVIFATSVLENVRYGRVDASEQEVIDACIAARVHEFISEFSEGYQTYLGERGVRLSGGQKQRIAIARAILADRPILLLDEATSALDALSEQKVKQALDELMKGKTTLIIAHRLATVINADRIIVFDKGRIVASGKHQTLLQTNALYREFASLQLLTDDVSALSE

SEQ ID NO: 5341 - protein, 388 aa, Shewanella sp. MR-4
MKFVDEAVIRVEAGDGGSGCVSFRREKYIPDGGPDGGDGGDGGSVYLQADENHNTLIEYRFERFHMAERGENGRGRDCTGHSGKDLILKVPVGTRAIDDETEEVLGDLTTHGQKLLVAKGGFHGLGNTRFKSSTNRAPRQKTLGTPGEVRSLKLELLLLADVGLLGMPNAGKSTFIRAVSRATPKVADYPFTTLVPNLGVVNPRPGQSFVIADIPGLIEGAAEGAGLGIRFLKHLERCRILLHIIDIEPIDGTDPVDSARAIVGELEKYSPKLASKPRWLVFNKADLLLEDELKEKVARVVKELGWEGDVYTISAYSRDGTKELATKLLDFIQSLPPEDKDANPDAEVEFKWDNYHQANIDAINEDYDDEFDDDFDDDDYDVEVIYQR

SEQ ID NO: 5342 - protein, 317 aa, Shewanella sp. MR-4
MKIVVLDGETLNPGDLTWQAVSALGEFSCFARTPSAEIIPRAQDAEIVLTNKTPFDANTLAQLPKLKYIGVLATGTNVVDLAAAKELGIVVTNVPAYGPDAVAQMVFAHILHHTQAVAAHHQAVAAGQWSNCSDFCFTLMPLQSLKGKTLGLIGYGDIGQQVAKLALAFGMKVLVNTRTEPSDLPLGVSWTSRDTVFKESDILSLHCPLTLETTELINAQTLELMKPQALLINTARGGLIDEAALAAALTQGKVFAGVDVLSTEPPSADNPLLTAPNISISPHNAWATKEARQNLLNIATANLSAYLAGDRVNWVNP

SEQ ID NO: 5343 - protein, 639 aa, Shewanella sp. MR-4
MGKIIGIDLGTTNSCVAVLDGGKARVLENAEGDRTTPSIIAYTDDETIVGQPAKRQAVTNPNNTFFAIKRLIGRRFKDDEVQRDVNIMPFKIIQADNGDAWVESRGNKMAPPQVSAEILKKMKKTAEDFLGEEVTEAVITVPAYFNDSQRQATKDAGRIAGLEVKRIINEPTAAALAYGIDKKQGDNIVAVYDLGGGTFDISIIEIDSNDGDQTFEVLATNGDTHLGGEDFDNRLINYLADEFKKEQGLDLRKDPLAMQRLKEAAEKAKIELSSTNQTEVNLPYITADATGPKHLVVKITRAKLESLVEDLIIRTLEPLKVALADADLSVSDINEVILVGGQTRMPKVQEAVTNFFGKEPRKDVNPDEAVAVGAAIQAGVLSGDVKDVLLLDVTPLSLGIETMGSVMTKLIEKNTTIPTKAQQVFSTADDNQSAVTIHVLQGERKQASANKSLGQFNLDGIEPAPRGMPQIEVMFDIDADGILHVSATDKKTGKKQNITIKASSGLSEEEVAQMVRDAEAHAEEDKKFEELVQSRNQADGLVHATKKQVEEAGDALPADDKAKIEAAMSAVEVATKGNDKEAIEKATQELIEASAKLMEIAQAKAQTQGGAQEGAAKQSNATADDVVDAEFEEVKDDKK

SEQ ID NO: 5344 - protein, 657 aa, Shewanella sp. MR-4
MRSSNLSDMAKNLILWVVIAVVLMSVFQGYSPSSSSSQKMDYSTFLDNVRDGQVASVEVKSDQRTIEGAKRTGEKFTTIMPLYDQDLINDLDRKGITMKGQEAEESGFLTQIFISWFPMLLLIGVWIFFMRQMQGGGGKGAMSFGKSKAKLMSEDQIKTTFADVAGCDEAKEEVKELVDYLRDPTKFQKLGGRIPTGVLMVGPPGTGKTLLAKAIAGESKVPFFTISGSDFVEMFVGVGASRVRDMFEQAKKSAPCIIFIDEIDAVGRQRGAGLGGGHDEREQTLNQMLVEMDGFEGNEGIIVIAATNRPDVLDSALLRPGRFDRQVVVGLPDVRGREQILKVHMRKVPLSEDVKASVIARGTPGFSGADLANLVNEAALFAARGNRRVVGMEEFERAKDKIMMGAERRSMVMSEAEKEMTAYHEAGHAIVGCLVPEHDPVHKVTIIPRGRALGVTFFLPEADAISQSRRKLESQISVAYGGRLAEELIYGSEKVSTGASQDIKYATSIARNMVTQWGFSDKLGPLLYAEEEGEVFLGRSMGKAKAMSDETATLIDAEVKAFIDKNYGRAKQILLDNIDILHSMKDALMKYETIDSLQIDDLMNRREVRQPADWQADDNGSNDKGSDKGEPAVKVDEVVKTAPVEAELKDADESPVK

SEQ ID NO: 5345 - protein, 407 aa, Shewanella sp. MR-4
MHTTYTIGELESFLIAIFVLFIGHSINRHVRVFRQYNIPEPIVGGLVVAAVVAFLHFQDITLAFSLPMQNTLMLMFFSTIGLSANYKLLLSGGKKVFIFLGVASVYIVIQNAVGVSLASLLGLDPILGLIAGSITLSGGHGTGVAWSQTFAENYGINTLELAMAAATFGLVMGGIIGGPIAQRLIGKHNLVSSYGMGRKHHTTHPQLVTYDQLEEDQVTAKTIIETLFVLLICVAGAKWFTVFVSEYQLNWLKMPDFVYALFLGVIIANITEVTRGYKPHTESIDVIGTVALSLFLSMALMNLKLWEILDLAIPLLIILLVQTAVLAVFAYFVTFKIMGSNYDAAVITGGHCGFGMGATPTAVMNMGALVSRTGPSPQAFMVVPIVGAFFIDIVNLIVLQGYLSFLM

SEQ ID NO: 5346 - protein, 717 aa, Shewanella sp. MR-4
MSRNIMLIPIGTGVGLTSLSLGMVRALERHGVKVQFFKPISQLRPNDNGPERSTTILSKSPTVNPLEPFDMAHAEALIRADQTDVLMEQIIARAAECASNTETLIVEGLVPTRNHPFADDVNYAIAKAMDADVIFIATPGSDTPTGLMNRLEIAYNSWGGKNNKRLIGAVINKIGAPVDDEGRARPDLSEVFDHQGVQRSDSSIMFQLPGKSPLRILGSVPYNLDLVAPRASDLAKHLRARILNAGEMNTRRLRKVTFCARSLPNMVNHIKTDSLLVTSGDRSDVIVSACLAAMNGVKIGALLLTGSYEPEPEILKLCEQAFETGLPVFLIDTNTWQTSLNIQRFDHEVPVDDAVRIDLVQEYVAGHIDQTWVESVTKNSPREHRLSPPAFRYKLTELARAAHKTVVLPEGDEPRTIKAAAICAERGIARCVLLGKKDEILRIAAQQDVVLGDGVVIVDPDEVRDRYVEPMLDLRRNKGLTEVVAKEQLEDNMVLGTMMLAQNEVDGIVSGAVNTTANTIRPPLQLIKTAPGSSLVSSIFFMLMPDQVLVYGDCAINPDPNAEQLADIAIQSAESAKAFGIEPRVAMISYSTGNSGTGSDVDKVREATRIAKEKRPDLVIDGPLQYDAAVMPNVARSKAPNSPVAGQATVFVFPDLNTGNTTYKAVQRSADLISIGPMLQGMRKPVNDLSRGALVDDIVYTIALTAIQASQNDASKA

SEQ ID NO: 5347 - protein, 399 aa, Shewanella sp. MR-4
MSNKLVLVLNCGSSSLKFAVIDAQTGDDQISGLAECFGLEDSRIKWKINGEKHESSLGAFTAHREAVEFIVNKILAGQPELAAQIQAVGHRIVHGGEKFTRSVIIDEHVIKGIEECSSLAPLHNPAHLIGIRAAIASFPKLPQVAVFDTAFHQSMPERAFIYALPYKLYREHGIRRYGMHGTSHLFVSREAAKVLNKPLEETNVICAHLGNGASVTAVKGGKSVDTSMGLTPLEGLVMGTRCGDLDPSIIYHLVHQLGYTLEEVNNLMNKQSGLLGISELTNDCRGIEEGYADGHKGATLALEIFCYRLAKYIASYTVPLGRLDAVVFTGGIGENSDIIREKVLNMLQIFNFHVDSERNKAARFGKKGIITTDNSTVAMVIPTNEEWVIAEDSIKLITK

SEQ ID NO: 5348 - protein, 324 aa, Shewanella sp. MR-4
MKDSHANAPQTSSNSHEPLQVSSHFSCYHQAEIYGKSKVVKAPWQSFGLAVFAGAFIALAFVFYLTVTTGAGDSAWGLVRLVGGIAFSLGLILVVICGGELFTSSVLSSVAWAQKQVTTGELLKCWSRVYIGNFVGAILMVGLIMAAGLYELDGGNWGLNALKVSQHKLHHTWVQAFSLGILCNMLVCLGIWMTFASRESLTKAILLILPVAMFVSSGFEHSIANLFMVPLGITIQSVASPEFFASLGVTQEQFADLTVANFVFNNLIPVTLGNIVGGGVIVGLGYWWIEQGQIALPDPQKSHQAHFFASPLHTEKAKNSQESK

SEQ ID NO: 5349 - protein, 183 aa, Shewanella sp. MR-4
MGTVNRAVFLDRDGVINKDHGYVHQVDDFEYIEGVFEACLALKQMGYKLVVVTNQSGIARGMYTEDQFHSLTEWMDWNFADKGVDLDGIYYCPHHNEKGLGEYKVDCDCRKPKPGMLLDAAKFLKIDLSQSVMVGDKADDMLAAKEAGVPTRILVRTGKAIADDSEASVVLDSIADVPGFLKK

SEQ ID NO: 5350 - protein, 110 aa, Shewanella sp. MR-4
METVEKIKQQIAENPIIVYMKGSPKLPSCGFSSQVAQIMINCGEQFAFVDILQHPDIRAELPKYANWPTFPQLWIEGELIGGCDIVVDMYQKGELQPLIKATADKYKTAE

SEQ ID NO: 5351 - protein, 404 aa, Shewanella sp. MR-4
MKLPIYLDYAATTPVDPRVAEKMFQYMTMDGIFGNPASRSHRYGWQAEEAVDVARNQVAELINADHREIVFTSGATESNNLAIKGVAHFYNKKGKHIITSKTEHKAVLDTCRQLEREGFEVTYLEPEANGIIPMERLEAAMRDDTILVSIMHVNNEIGVIHDVDAIGELCRSKGIIFHMDAAQSAGKLPIDVQTTKVDLISISGHKMYGPKGIGALYVRRKPRIRLEAQMHGGGHERGMRSGTLATHQIVGLGEAAAIAKAEMATDNARIAKLRDKLWNGIKHIEETYVNGDMTHRVSGSLNVSFNYVEGESLMMALKDLAVSSGSACTSASLEPSYVLRALGLNDEMAHSSIRFSIGRFTTEEEIDHAIETITQSIDKLREMSPLWEMFKDGIDLNQVQWAHH

SEQ ID NO: 5352 - protein, 572 aa, Shewanella sp. MR-4
MEKLSGASMIVRSLIDEGVKHIFGYPGGSVLDIYDALHLIPGIEHILVRHEQAAVHMADGYARATGKVGVVLVTSGPGATNAITGIATAYMDSIPLVVLSGQVPSNLIGNDAFQECDMIGISRPVVKHSFLVQDPTQIPEIIKKAFYIASTGRPGPVVVDLPKDCLNPALLHDYIYPESIKMRSYNPTTSGHKGQIRRGLQALLAAKKPVLYVGGGAIISSSEKQILALAEKLNIPVVSTLMGLGAFPGTHKNSLGMLGMHGRYEANMTMHNCDLIFGIGVRFDDRTTNNIEKYCPNATILHIDIDPSSISKTVRVDIPIVGSADIVLDSMLALLEESKESNDSEAINQWWQEITVWRNRNCLAYDKESHRIKPQQVIETLYKLTNGEAYVASDVGQHQMFAALYYPFDKPRHWINSGGLGTMGFGLPAAMGVKMAMPDETVVCVTGDGSIQMNIQELSTALQYDTPVKIINLNNRFLGMVKQWQDMIYSGRHSHSYMDSVPNFAKIAEAYGHVGMTISDPAELESKMAEALAMKDRLVFIDIMVDETEHVYPMLIRGGAMNEMWLSKTEKC

SEQ ID NO: 5353 - protein, 585 aa, Shewanella sp. MR-4
MKFPSLVSLMPGLAQMLQYEKQWIRDDVRAGLSVAAVALPVAIAYAQLTGVNAAVGLYSCVLPMLVYALFGTSRQLIVGPDAATCAVIAAVVTPLAAGDSMKHWQLVMTMTAMTGFWCLIASRFRLGVLADFLSKPILMGLLNGVAITIIVGQFSKIFGFTFDERYLIERLTGAPSYLTKTHWPTLLMGVVTLATYALVKRYRPLWPASMCAMAMAAFLVWAFNLTSFDINVVGEVSAGLPSFQAPAFDLGIARELVVPALNLAMVSFVSMMLTARSFAAKNGYDIDADKEFRALGIANIASALSQGFAVSGADSRTAVNDANGGKSQLVSIIAAVLIALVALFFTAPLKYIPSSALGVVLVIASISLIDLKALWNLRVRDRSAFLLACTTLFSVLFIGVIPGITLAVLLGLFQFLATVMRPTDQVLGLDQKGVIRSVDDSGKAKSVPGVFIYRFNSPLTYFNATYFKRRLLEKFIREPEPVDCIIIDAVPCFTHLDLSVMAMLADLHQLLKKRGIRLVLAGRKRQMLGWFEQAGMQSGEGGILIRPDLYLALKMNQSYKQALAEGQAPVIKKAPEDDVLLHSHL

SEQ ID NO: 5354 - protein, 363 aa, Shewanella sp. MR-4
MNPVFTPNVAQKILFIDRDGTLIEEPITDKQVDSLAKLVFEPQVIPALLRLQKAGFRLVMVSNQDGLGTPSFPQEDFDAPHNMMMQILSSQGVKFEDVLICPHFNDENCSCRKPKLGLVKDFLTQGTIDFTQSAVIGDRHTDVELGNAMGIKSFQYQRGSLGWDAIADALLNKGRTATVVRTTKETDIRVTVDLDNASKGTINTGIGFFDHMLDQIATHGNFKMEVNVDGDLEIDDHHSVEDTALAIGDALRQALGDKRGIARFGFSLPMDEAKGECLLDLSGRPFIKFAAQFEREKVGEMATEMVPHFFRSFADGLRCTLHVAAEGDNDHHKVEALFKVLGRALRHAIKVEGDVLPSSKGVL

SEQ ID NO: 5355 - protein, 371 aa, Shewanella sp. MR-4
MIIGVPKEIKNHEYRVGMVPSSVRELTIKGHEVFVETNAGTGIGFSDQDYVDAGAKILATAAEVFAKAEMIVKVKEPQAVERAMLRHDQILFTYLHLAPDLPQTEDLIKSGAVCIAYETVTDDRGGLPLLAPMSEVAGRMSIQAGAMALEKSSGGRGMLLGGVPGVEPAKVVIIGGGMVGTNAAQMAVGMGADVVVLDRSIDALRRLNVQFGSAVKAVYSTADAIERHVLEADLVIGGVLIPGAAAPKLVTRSMIARMKPGSAIVDVAIDQGGCVETSHATTHQDPTYIVDDVVHYCVANMPGAVARTSTFALNNATLPYILKLANLGYKAALLQDKHLLNGLNVMHGKLVCKEVAQALNLEYTAPASLLA

SEQ ID NO: 5356 - protein, 500 aa, Shewanella sp. MR-4
MSLILELKQISKHYPGVKALEDVSLRLFAGEVHALLGENGAGKSTLVKVMTGAQSKDMGDILFLGEPQHFNTPMDAQKAGISTVYQEVNLVPNLTVAQNLFLGYEPRRLGLIHFKKMYADARAVLTQFKLDIDVSAPLSDYSIAVQQLIAIARGVAMSAKVLVLDEPTASLDAKEVQVLFGILNQLKAKGVAIVFITHFLDQVYQISDRITVLRNGQFIGEYLTAELPQPKLIEAMLGRSLQEQLVDKQEKERTVTRAEAVLLSLKDVSVKGSIQSMNLTVPKGQAVGLAGLLGSGRSEVCNAVFGLDLVDSGSIHLAGQKLNLSQPVDAISAGIALCPEDRKIDGIIGPLSIRENIILALQARIGWWRYLSKARQQEIAQFFIDKLQIATPDADKPIEQLSGGNQQKVILARWLAIEPILLVLDEPTRGIDIGAHAEIVKLIRTLCDEGMSLLVASSELDELVAFSNKVVVLRDRYAVRELSGAELTSQHVMQAIAEGK

SEQ ID NO: 5357 - protein, 404 aa, Shewanella sp. MR-4
MRPIIKSNKLDTVCYDIRGPVHKEARRLEDEGHRILKLNIGNPAPFGFEAPEEIVRDVILNLPSAQGYCESKGLFSARKAIVQHYQAQGIKGVDIEDVYIGNGVSELIMMAMQGLLNTDDEVLIPSPDYPLWTAAANLAGGKAVHYRCDEEADWFPDLDDIKSKISSRTRGIVLINPNNPTGAVYSKELLLQVIELCREHNLILFADEIYDKILYDEAKHIPAASLSDDILTVTFNGLSKAYRAAGFRVGWMMLSGNLKAAKSYIEGLEMLSSMRLCANVPNQHAIQTALGGYQSINELILPSGRLTVQRDTCYELLNQIPGVSVKKPKGALYAFPKLDMKKFNLRDDERLVLDLLRDKKILLVHGSAFNWPEPDHLRVVFLPYKEDLTKALTEFGNFLETYKQ

SEQ ID NO: 5358 - protein, 195 aa, Shewanella sp. MR-4
MDQAEFRLRFNLHPLATQDPAAIPHLGLRKAAVLIPLQEIQGELSLILTQRPMHLRAHPGQISFPGGKIEPSDSSAITAALREAEEEIGLCRENVEVIGTFPAHNTFTGFEITPVVGMIKQDFALRLDPGEVADCFTVPLSFFIEPQNRHRKQFLRQGRYYSVHFIPYQQRFIWGATAAIIDHLCRHLSLPEQML

SEQ ID NO: 5359 - protein, 554 aa, Shewanella sp. MR-4
MCSIFSILDIQSDAKELRQVALEMSKLMRHRGPDWSGIYASDKAILAHERLAIVDIEHGAQPLLTEDGSLILAVNGEIYNHKELKAQLGDKYSYQTNSDCEVILALYQEYGTEFLDKLNGIFAFVLYDKAKDAYLIGRDHMGIIPLYTGRDAAGNFYVASEMKALMPVCKTVAEFQPGQYLYSSIGEPVQYYTRDWQSFDAVKDNGASQEELRDALEAAVKRQLMSDVPYGVLLSGGLDSSVISAITQTFAKRRIEDDDQSGAWWPQLHSFAVGLKGAPDLAAAKKVADAIGTIHHEINFTFQEGLDAIKEVIYHLETYDVTTIRAATPMYLMARKIKAMGIKMVLSGEGADELFGGYLYFHKAPNAQAFHEELVRKLDKLHLFDCLRANKAMAAWGLEARVPFLDKEFMDVAMRINPEAKMSKDGRIEKHILRQAFEHKLPKEVAWRQKEQFSDGVGYSWIDGLKAHAAEQVDDLQLANAKFRFPYNTPETKEAYFYRCFFEEHYPLASAAETVPGGKSVACSTPEALAWDESLRGIIDPSGRAVRSVHAASY

SEQ ID NO: 5360 - protein, 291 aa, Shewanella sp. MR-4
MAKVAFIGLGVMGYPMARHLLNKGHEVTVYNRTFAKAQTWVENYGGRCCPTPKEAAIGQDIVFTCVGNDNDLREVVLGNDGVVHGMAPGTVLVDHTTASADVARELHKVLAEKGVDFLDAPVSGGQAGAENGVLTVMVGGDQAVFERVKPVIEAFARCAERLGEVGAGQLTKMVNQICIAGVVQGLAEALQFARKAGLDGEKVVEVISKGAAQSWQMENRYKTMWGQNYDFGFAVDWMRKDLGIALEEARRNGSHLPLTALVDQFYSEVQAMGGNRWDTSSLLARLEKSTK

SEQ ID NO: 5361 - protein, 601 aa, Shewanella sp. MR-4
MTASPKDEMWTVFKRLLGYLKPMKGMFLLSVCGLIVYGLVDAAFISFIGPFIDKGFSSSTPAISNGIALPTSQGFHADNQVLLMAPIVVILMFSLRGFANFVSTYGISYMSARLIMDMRQQVFEHYLSLPVSYMDKENTGNLISKVTFDTEQIARASGSALISIVRDGVTVIGMLGLMFYNSWKLSLCILVIGPIMGLVITIVSRRFRKVSKQIQTAMGDVSAATEQMIKGHKNVLAFGGQETETARFAKINDRNRHQNMKLAVAQAVSQPLIMVIGSFALAFVLYAASLDSMKADLTAGTFATILGAMMAMLQPIKNLTRVNAEFQRGIAACTTVFELLDTLPESDTGTYTVKRAKGNLRFDNVSFSYEGQERRALDKIDFEVTQGQTLALVGRSGSGKSTIASLVTRFYTGLESGDIKLDDVSIYDYSLKSLRSQVALVSQQVTLFNDTIANNIAYAYPGEATREQIIQAATLAHAMEFIEQLPEGLDTQVGENGVLLSGGQRQRIAIARAMLRDAPVLILDEATSALDTESEKAIQQGLDNLRQNRTSVVIAHRLSTIESADQILVVDQGRIVERGTHKSLLELGGMYAKLYQMQFGS

SEQ ID NO: 5362 - protein, 556 aa, Shewanella sp. MR-4
MSHVDTEVRPSNFIRNIIDEDLKSGKHTRVQTRFPPEPNGYLHIGHAKSICLNFGIARDYQGLCNLRFDDTNPEKEDIDYVNSIQADVRWLGFQWDGEVRYSSNYFDQLHQYAVELINKGLAYVCFLNADETREYRGTLKEPGKNSPYRDTPVEENLQLFEKMRKGEFKEGECALRAKIDMASPFMCMRDPVIYRIRFAHHHQTGDKWCIYPMYDFTHCISDALEHITHSLCTLEFQDNRRLYDWVLDNLDDFQAPNRTRQYEFSRLNLEYTLMSKRKLNDLVTRKLVSGWDDPRMPTIAGLRRRGYTPASIREFCQRIGITKQENMIEAAMLDACIREELNEHAPRAMAVLRPLKVVIENYPEGQIETIQAASHPSDESMGTRELAFGRELYIDVADFREEANKQYKRLVMGKEVRLRNAYVIKAERCDKDSDGNITTVYCSYDADTLGKNPADGRKVKGVIHWVEATTAKPAEFRLYQRLFTDPNPAAAETVDEVLNPNSLEVVNGLVEASLVNAPAEKAYQFEREGYFCADNKDSSAEHLVFNLTVALRDSFE

SEQ ID NO: 5363 - protein, 658 aa, Shewanella sp. MR-4
MSIKSSINPPVFYSSVFFITLMVMICAIWPTEANHFFKSMQSWLEAKAGWLYILGVAIFLIFIIFVMVSRFGDIKLGPDHAVPDYSYKSWISMLFSAGMGIGLMFFGVAEPVMHYLAPPDATPETLAAAKEAMKITFFHWGIHAWAIYGVVALSLAYFAYRHKLPLLPRSALYPLIGERIHGPIGHCVDTFAVLGTMFGVATSLGFGVLQVNSGLSYLFEQLPNNTTVQVSLIIGITLLATLSVFSGLDKGVKRLSELNLGLALILLLIVLILGPTVMLLQAFVQNTGSYLSDIVNKTFNLYAYQHKEDWLGGWTLLYWGWWISWSPFVGTFIARVSRGRTIREFLVGILFVPSALTFLWMTVFGNSAIDAIMNQGATYLSDAVNTNVPVALFVFFEHMPFPHLLSGIGICLVVTFFVTSSDSGSLVIDNLTSGGDNNAPVWQRVFWALLQGVVASVLLLAGGLQALQTAAIASAMPFLCVMLLMCLGLYKALKDDWLKINSVQMHTTSVQYAKTNISWEERIEVLVSHPTEDEARIFLNNVATPALSKVCQQFMTKGLTADLEYLDGKVRLVISNEAYQPFVYGVRMRCFEIVNPVGEELEQGNNWYYRAEVYLEQGGQHYDVMGYTEEQLLADVVTQYEKYLHYLHLSNADQGHVT

SEQ ID NO: 5364 - protein, 396 aa, Shewanella sp. MR-4
MSTEQFNQEIVIVAAKRTPMGGFQGSLSGVTSPSLAATAIKALLTDTQVAPDKVDEVLMGCVLPAGLGQAPARQATLGAGLPLSVGATTVNKVCGSGMKTVMLAHDLLKAGSAKLVVAGGMESMSQAPYLLDKARSGMRMGHGKVLDHMFLDGLEDAYTGGAMGTFAQKTADEYGLTREQMDAFALSSLEKANAAINSGAFKAEIVPVTVSDRRGDVTIDTDEQPGNARPEKIPTLRPAFAKDGTITAANSSSISDGAAALMLTTRANAEQLGLTVLATIKGHTTHAQEPSLFTTAPVGAMAKLLSNVGWSKDEVDLFEINEAFAMVTMLAVSELGLDMAKVNVNGGACALGHPIGCSGARLLVTLIHALKARGLKRGVASLCIGGGEATAMAIEV

SEQ ID NO: 5365 - protein, 69 aa, Shewanella sp. MR-4
MSKTTGIVKWFNEDKGFGFISPDNGGADAFVHFRAIVSEGFKTLAEGQKVSYEVEQGQKGPQAANVVVL

SEQ ID NO: 5366 - protein, 376 aa, Shewanella sp. MR-4
MDTKTMNISTMPNISLASAPAGLVGFSQLVCVERWNETTDVVSFRFQAGEPMKFDYKPGQFMTLVLEINGEQACRSYTLSSTPSRPYSLMLTIKRVDGGLVSNYLIDHLQPGQTVRVLPPTGQFNLFDIPAKKYLFLSAGCGITPMYSMSRYLTDSQMNADIAFVHSARTQADIIFKTSLETMATRHRDFKLRYLVEDVTADTAWHPEAVLHDIGRLSADNLRDLVPDFSERTVFLCGPEPYMQAVKTILAELNFDMTQLYHESFATAVKEAHSRVKQAEMQTEDPVSGSNSFMLSIGDKKRALTAEQTLLEGIEAEGLPIIAACRSGVCGACKCKVLEGETESTSSMTLTPAEIEAGYVLACSTKLKSDVTLSLT

SEQ ID NO: 5367 - protein, 339 aa, Shewanella sp. MR-4
MTKKTDLPAVDAANASNEPSLDELLARMNAASAAAPSVHYDVTYCGMVAIIGRPNVGKSTLLNRLLGQKISITSKKPQTTRHRIMGIHTDGPRQIVFIDTPGLHIEEQRAINRLMNRAAASSLADVSMVIFVVDGMTWTADDEMVLSKLRRGGEERKTVLAINKVDNIKDKEALFPYLEEVAKKYPFDEILPISASKGTNVKRILEMAAESLPENPFFFPEDYVTDRSQRFMASEIVREKLMRFLGDELPYDATVEIEQFKMMENGVYQINALILVEREGQKRMVIGSKGERIRTIATQARLDMETLFDNKVFLEVWVKVKSGWADDERALRSLGYGDD

SEQ ID NO: 5368 - protein, 1482 aa, Shewanella sp. MR-4
MSLYHPSFERDNCGFGLIAQMDGEASHRIVRTAIHGLDRMKHRGGIASDGRTGDGCGLLMQLPLQFFEAIAAENDWHLSRKFAVGMLFLSQDEELADQAKFILERELERETLSIAGWRKVPVNPEVLGEIGKSSLPQIYQVLINAPIGWREKDLERRLYMARRRLEQQITDDKDFYVASLSGQVIVYKGLMMPADLPAFYPDLADIRLKSSICLFHQRFSTNTSPKWPLAQPFRYLAHNGEINTITGNRQWARARAYKFNSPLLPDLQQAAPFVNETGSDSSSLDNMLEMLLSGGMDLYRAMRLLIPPAWQSNPEMDDELKAFYDFNSMHMEPWDGPAGIVMTNGRHAACAVDRNGLRPSRYVITKDRILTLASEVGIWDYAADEVIEKGRVGPGELLVLDTLNGRLYQSFEIDNDLKRRHPYKEWMAKNSRTLIPAEQLATEQHGASELSAEQLLQYQKQFGYTREELEQVIWVLAKQGEEATGSMGDDTPMAVLSKKSRSLYDYFRQKFAQVTNPPIDPLREKHVMSLATCIGREQNLFNETTGHAYRVMFNSPILLFSDFNQLLGLDSTYYRANIVDLNYDPKEGLEHAIRRITSEAERLARSGTTLLILSDRAIDKSAQVIPAAMAVGAVQQMLVSKSLRCDTNIIVETASARDPHHFAVLLGFGATAIYPYLVYESISDLAKRHQLTDTTALMLNFRYGIEKGLRKIMSKMGISTVGSYRCSQQFEAIGIASDVIELCFKGVVSRIEGASFEDIAQDQALLHKAAYRAHVPLPQGGLLKYVDGGEYHCFNPDVVNTLQASLIDKNFATYKKFAELVDNRPVATLRDLIGIKADQAAIELDKVEAASHLFPRFDSAAMSIGALSPEAHEALAIAMNRLGGRSNSGEGGEDARRFNTERNSAIKQIASARFGVTAHYLVNADVLQIKVAQGAKPGEGGQLPGHKVSVEIAGLRHARPGVTLISPPPHHDIYSIEDLAQLIFDLKQINTKALISVKLVSEPGVGTIATGVAKAYADMITISGYDGGTGASPITSVKYAGSPWELGLAEVHQSLVENGLRHKIRLQVDGGLKTGTDVIKAALLGAESFGFGTVPMIALGCKYLRICHLNNCATGVATQDKKLRDNHYHGLPERVMTYFEFVAEEVREWMATLGVSKFEDLVGRSEWLHTLEGQTDKQRGLDLAPILYQPKVRASTSRTWQETNPPADLGLLNQHLLNECQNAVDKGECFDAAYSINNTDRSVGARLSGYIASTLGVKGTKAPIKLSFNGSAGQSFGVWNSPGLELKLCGDANDYVGKGMSGGKIVIYPPLGSPFQSERSAIVGNTCLYGATGGRFFAAGQAGERFAVRNSGAIAVVEGLGDNGCEYMTSGIVVVLGKTGVNFGAGMTGGFAYVFDQFGRFNRRVNNELVDTQKLESPIHQQHLKGLIEEHVAETGSEHAKMILSDFANWLDCFVLVKPKNIAVADLLKLEQSSPELAVKAG

SEQ ID NO: 5369 - protein, 857 aa, Shewanella sp. MR-4
MRLDRMTNKFQLAISDAQSLALGRDHQFIEPLHLMMALLNQDSGSIHPLLTQAGIRVSALRSLLSQELERLPQVEGTGGDVQLSQGLIRLLNLCDKLAQKRKDKYISSELFVLAALEGSDALAQCLKKSGATKELLEQTIEQVRGGQNVDDPNAEDQRQALKKFTVDLTERAEQGKLDPVIGRDDEIRRTIQVLQRRSKNNPVLIGEPGVGKTAIVEGLAQRIVNGEVPEGIKNKRVLSLDMGALIAGAKYRGEFEERLKAVLNELAQEEGQVILFIDELHTMVGAGKGDGAMDAGNMLKPALARGDLHCVGATTLDEYRQYIEKDAALERRFQKVLVDEPSVEDTIAILRGLKERYELHHHVEITDPAIVAAATMSHRYVSDRKLPDKAIDLIDEAASSIRMQMDSKPESLDRLERRAIQLKLEEQALAKENDEASRRRLEHLRVELHEVEAKASELNEIWRTEKAALAGTQHIKADLEQARMDLEVARRAGDLTRMSELQYGRIPELEKQLDLASQAEMQDMTLLRNKVTDLEIAEVLSKATGIPVSKMLEGEREKLLQMEVALHERVIGQNEAVDAVANAIRRSRAGLADPNRPIGSFLFLGPTGVGKTELCKSLAKFLFDTESALVRIDMSEFMEKHAVSRLVGAPPGYVGYEEGGYLTEAVRRKPYSVILLDEVEKAHPDVFNILLQVLDDGRLTDGQGRTVDFRNTVIIMTSNLGSDIIQEGFGHLSYSEMKSAVMNVVTHSFRPEFLNRIDESVVFHPLDAENIKHIASIQIASLRKRLAEKDYTLEITDEALSLIAEIGFDPVYGARPLKRALQQEMENPLAQKLLRGDLLPGKPIKVSCAGGELVFEQ

SEQ ID NO: 5370 - protein, 397 aa, Shewanella sp. MR-4
MLDSRTIQIIKSTIPLLESAGPALTQHFYQRMFTHNPELKDVFNLAHQHSGGQPVALFNAVAAYAKNIDNLGALGTAVERIAQKHTGFLIQPEQYAIVGGHLLATLQELGGEAVTEEVLTAWGDAYQFLANIFIQREAQIYQESAQQDGGWSGVREFIISEKKAESAVITSFVLTPTDGQAVKDFTPGQYLSIKLQHPKLAFDEIRQYSLSDAPNGRTYRISVKREPNGQVSNLLHDMLQVGDTVSVMPPAGDFALTAQPKTPIVLISAGVGQTPMKSMLNQLLKLKHPSAVTWLHACEHGEVHGFKTAVKSKLGQHANLASHVWYREPKEADILGQDYDFEGTMNLTSVADKIATDAHYYFCGPIGFMASIKQQLLAFGVPSEQMHYEVFGPHAEL

SEQ ID NO: 5371 - protein, 508 aa, Shewanella sp. MR-4
MQIGIPRESLAGETRVAATPATVEQLKKLGFEVVVEANAGLLSSFDDAAFEAAGAKITAEVWQADLIFKVNAPTDAEIAQIKDGATLISFIWPAQNPELVEKLSKRNINVMAMDMVPRISRAQSLDALSSMANIGGYRAVVEAAHHFGRFFTGQITAAGKVPPAKVLVIGAGVAGLAAIGTAGSLGAIVRAFDTRLEVAEQIESMGGQFLKLDFTNEDGSSSDGYAKTMSDEFIAAEMALFAEQAKEVDIIITTALIPGRPAPKLITKAMVDSMKPGSVIVDMAAQAGGNCEYTQPSELFVTENGVKVIGFTDLPGRLPAQSSQLYGTNLVNLMKLMCKEKNGVASINFDDVVMRNMTVVKAGEVTFPPPAISVSAAPAKPAAKVEAKAAEAKKPSKLKYILAVLGVAGFAAVASVAPAEFLSHFTVFVLSCVVGYYVVWNVSHSLHTPLMSVTNAISGIIVVGALLQIGQGSTLVTVLAFIAVLIASINIFGGFTVTQRMLKMFRKD

SEQ ID NO: 5372 - protein, 315 aa, Shewanella sp. MR-4
MPDIKLFAGNATPSLAKKIADRLFCKLGDAVVGRFSDGEISVQINENVRGADVFIIQSTCAPTNDNLMELIVMVDALRRASAGRITAVIPYFGYARQDRRVRSARVPITAKVVADFLSSVGVDRVLTCDLHAEQIQGFFDVPVDNVFGSPVLLEDMLAKKLDNPVVVSPDIGGVVRARAVAKLLDDSDLAIIDKRRPQANVAQVMHIIGDVQGRDCIIVDDMIDTGGTLCKAAEALKEHGANRVFAYATHPVFSGKAAENIENSVIDEVIVTDTVPLSPEMLKVAKVTQLTMSAVLAEAIRRVSNEESISAMFSH

SEQ ID NO: 5373 - protein, 416 aa, Shewanella sp. MR-4
MEELTKLGVTVSELRFALDTFYFLISGALVMWMAAGFAMLEAGLVRSKNTTEILTKNVVLYAIACVMYLLVGYNIMYVDNAEGGWLPSLGTLIGSQAEDANHALESDFFFQVVFVATAMSIVSGAVAERMKLWAFLFFSVVMTGIIYPVEGYWTWGKGFISSLGFVDFAGSGIVHMTGAAAAIAGVLLLGARKGKYGPNGQVNPIPGSNLPMATLGMFILWMGWFGFNGGSQLMVSDAANASSVAKVFVNTNTAAAFGAISALVVCKMIWGKADLTMILNGILAGLVAITADPLSPSLLMAGVIGVVAGGLVVFSIVGLDRIKIDDPVGAISVHGVAGFLGLMCVPLSNADATITAQLTGAAIIFAWVFSASFAVWFVLKMTMGIRVSEEEEYNGMDASDCGIDAYPEFVTVKSAG

SEQ ID NO: 5374 - protein, 622 aa, Shewanella sp. MR-4
MSSSERTFRELGLSENLLRALDELGYEKPTPIQSASIDPLMAGKDILGQAQTGTGKTGAFALPLLNKVTSQAVPQILVLAPTRELAVQVAEAFSSYAKFMKGFHVLPIYGGQSMHQQLNALKRGPQVIVGTPGRVMDHMRRGTLKLETLQALVLDEADEMLKMGFIDDIEWILEHTPEQRQLALFSATMPEQIKRVANKHLKDATNISIAASHTTVDSIEQRFVQVSQHNKLEALVRVLEVENTEGIIIFVRTRNSCVELAEKLEARGYASSPLHGDMNQQARERAVEQLKSGKLDILIATDVAARGLDVERIGHVVNYDIPYDTEAYVHRIGRTGRAGRTGMAILFVTSREMRMLRTIERATNSRISPMKVPSPETVAERRLSRLGEQLAQTMTQDLDFMREAVAQLCQQLEVDTDLLAAALLHQVQQERPLQLPAIQERTRDERNERSERGAERGERGERRSRESRPLPASLGSAEALKDNPDLKMCRYVIDVGRDNGVGVGNIVGAIANEANIDSRYIGAIQLYDAVTTVDLPDGMPKEVLQHLKKVRVCGKPLNIREAGDQVFVDSGRGARSDRRPRGDRPMGERKPRSASGDKPFADRKPRSDKPAGERRPRKPREE

SEQ ID NO: 5375 - protein, 797 aa, Shewanella sp. MR-4
MARCHLHKFGGSSLADADCYRRVAHILLTHGHSDDLVVVSAAGKTTNFLYKLLSLRDSNQLWQEELQVLISYQQGLIEQLLSNEQARDLRERLTTDKAQLISLLSLDSRNDYQISHVVSFGERWSARLMAALLRESGVAASHVDACSILVADEAAVPQIRVQESRAKVQALLAAHPNERLVITGFICANERGDTLLLGRNGSDFSASLIASLADIERVTIWTDVEGVFNADPNKINDAKLLKSMSLAEADRLARLGSPVLHSRTLQPLFNTEVSLAVRSSYASHTDFTLIAPHSSSASAPVVTNLNAVVLFGFKIAGDVASLLEQLVEAGLTPLAHWVSAHQRLELAYTAENQKQVQKLLDAQAEALGIKDLQINTELGLVALVSADAEHYRRSFARLLSRDAKPLFSGDLSLVTLVPQSQVNLLTQKVHRRCAGPRKRIGVLLLGVGNIGEAWVKLFKSVSPSLNQELEARVELVGLVSSSKALIKSTAVDLENWQQEFDAEATPWQYEHLFEQLEQLNCDELIALDISASASLTLQYPEFFERGIHMVSANKLAGSGPLPFYRELKEQLGYRRLFWRYNASCGAGLPIQHALNDLRNSGDTVEAVGGIFSGTLCWLFEKYDTSKPFSELVVEARGLGITEPDPRDDLSGRDMQRKLLILAREIGLEIELEDIELRSLVPAHLADIPLEQFLARIAELDDELQQQYGAAAEQNKVLRYVASLDNSDAALKAEVGLQWIDANHPYANLTPGDNVFVIRSAFYQGNPLIIRGPGAGREVTAAAVQSDLTQICRDLLQE

SEQ ID NO: 5376 - protein, 443 aa, Shewanella sp. MR-4
MSQQNPGLKQSLSLWQVVVMGLAYLTPMAVFDTFGIVSEITSGHVATSYLLALAGILFTAFSYGHLVRKYPYAGSAYTYAQKTFSPNVGFMVGWSSLLDYMFMPMINMLLAKIYLTAMFPNVEPWIFIFGLVAVMTVLNLRGIDLVANFNGVIVFAQIAIILVFIGLMAHSLSLGEGEGVIASVRPFYSEEISLAPLFTGATILCFSFLGFDGLSSLSEETKDAKRVIPRAIVLTALIGGVIFVSVSYFLQLFFPDISRFQQLDAVLPEIALYVGGNLFQSVVLVATTIAVLASGMAAHAGVARILYVMGRDNMLPNKGFGYIHPKWRTPAFNVILVGLLALSAVSFDLEMALALVNFGALVAFTFVNLSVIVQFYIKEKRNQSLKDHFQYFVLPLCGAATIGVLWLNLEPQSLELGLIWAAVGVLYLALRSLRLRKTVELQN

SEQ ID NO: 5377 - protein, 279 aa, Shewanella sp. MR-4
MIKKHRAFLKWAGGKFKLVDELANYLPTGERLVEPFVGAGSVFLNTDYPSYLLCDINQDLINLYNIVKERPAEYIEAAKKLFVDEMNQKDAYYRVRTDFNKSRDPFLRSVYFLYLNRHGFNGLCRYNRKGGFNVPFGSYKKPYFPEKEILAFSKKAQRAEFKCIGYEKAFEQIRTGDVIYCDPPYAPLSTTASFTTYVGAGFSLDDQALLARYSRHMALEQRIPVVISNHDIPLTRELYRGAHLAKIQVQRNISQNGSGRNKVDELIALYDENYDPQDD

SEQ ID NO: 5378 - protein, 407 aa, Shewanella sp. MR-4
MSIENKNTGVKKVVLAYSGGLDTSAIIPWLKETYDNCEIIAFCADVGQGEEELVGLTEKALASGASECHIVDLKEEFVKDYIYPTMATGAIYEGTYLLGTSMARPIIAKAQVEVARKVGADALCHGCTGKGNDQVRFEGCFAALAPDLKVIAPWREWTMQSREDLLAYLAERNIKTSASATKIYSRDANAFHISHEGGELEDPWNEPSKGVWTLTADPEDAPNQAEYVSLEVEHGRVTKVNGEALTPYAALMKLNAIAAPHGVGRIDITENRLVGMKSRGCYETPGGTVMFAALRAIEELVLDKTSRTWREQVGAQMAHLVYDGRWFTPLCKSLLAASESLAESVNGEVVVKLYKGHAIAVKKRSPNSLYSEAFATFGEDQVYDQKHAEGFIRLYSLASRIRALNAK

SEQ ID NO: 5379 - protein, 241 aa, Shewanella sp. MR-4
MGQETSKILVVDDDMRLRALLERYLMEQGYQVRSAANAEQMDRLLERENFHLIVLDLMLPGEDGLSICRRLRQQGSTIPIVMLTAKGDEVDRIIGLELGADDYLPKPFNPRELLARIKAVMRRQVQDVPGAPAQQEAEITFGEFSLDLATREMYHGDEAITLTSGEFAVLKVLVTHPREPLSRDKLMNLARGRDYSALERSIDVQVSRLRRLIEKDPANPRYIQTVWGLGYVFVPDGAARR

SEQ ID NO: 5380 - protein, 498 aa, Shewanella sp. MR-4
MNSLSYISLAIYFIAMLAIGLFAYRKSTDDVSGYILGGRQVSPQVTALSAGASDMSGWMLMGLPGAMFLVGFETLYIALGLLIGALINYLVVAPKLRVYTEVADNALTIPEFFAKRFGQADNSIRIIAAVIIVIFFTLYTSAGLVAGGKLFESAFGLNYDIGLVVTLAVVVSYTLLGGFLAVSLTDFVQGCIMFVALVLVPFVAYQEFTSADRMMNFAYQSIPHFTDAMQNVTLLGLISSLSWGLGYFGQPHIIVRFMAIRSVADIKTARRIGISWMTVTIIGALATGLVGIAYANKFGMKLSDPETIFIVFSELLFHPLVSGFLLAAILAAIMSTISSQLLVSSSSLTEDIYRTLSKKDSSEKEMVKMGRYGVAGVAIAATLLALDRSNSILSLVSNAWAGFGAAFGPLVLFSLYKANLTHKAAIAGIISGALTVLFWIYAPVLADGKALSSLVYEMIPGFVVSSTVIYLVSKFDNDPCPKTTKQFHQAGRVLAEES

SEQ ID NO: 5381 - protein, 541 aa, Shewanella sp. MR-4
MESQRNILLIGLLFVSFLLWQQWQADKAPKPVATESSVVANATTNHSADVPEADTGVPAAMTATQNLITVKTDQLDVQINPVGGDIVFAALVSHKLEQGKDQPFVLLEQTKDFTYIAQSGLIGRDGIDSSAKGRAAFAASKTEFTLADGQDTLEVPLTYVADNGVTYTKVFVFHRGKFNVDIDYKINNTSAAPLQVQMYGQIKQTIKPSESSMMMPTYRGAAFSTQDVRYEKYKFEDMSKSNLNQPTLGGWAAMLQHYFVSAWIPPATDSNTIFSSVSAGGLANIGFRGAVYDIAPGATQEISSQFYVGPKDQKALSALSDTLNLVVDYGFLWWLAVPIHWLLMFYQSFVGNWGVAIILITLTVRGLLFPLTKAQYTSMAKMRNLQPKLQDLKERFGDDRQKMGQAMMELYKKEKVNPMGGCLPILLQMPIFIALYWVLLESFELRHAPFMLWIHDLSVQDPYYILPLLMGASMFVMQKMQPIAPTMDPMQVKMMQWMPVIFTVFFLWFPSGLVLYWLVGNIVAIIQQKIIYAGLEKKGLK

SEQ ID NO: 5382 - protein, 387 aa, Shewanella sp. MR-7
MKQAVIVDCIRTPMGRSKAGVFRNVRAETLSAELMKGLLLRNPQLDPNAIEDVIWGCVQQTLEQGFNIARNASLLAGIPKTAGAVTVNRLCGSSMEAIHQAARAIMTGMGDTFIIGGVEHMGHVPMNHGVDFHPGLANNVAKASGMMGLTAEMLGKLHGISREQQDAFAVRSHQRAHAATVEGRFAKEIYAIEGHDANGALIKVLHDEVIRPETSMESLAALRPVFDPANGTVTAGTSSALSDGASAMLVMEESKARALGLPIRARIRSMAVAGCDAAIMGYGPVPATQKALARAGITVNDLDVIELNEAFAAQSLPCVKDLGLLDVVDEKINLNGGAIALGHPLGCSGARISTTLINLMEHKDATLGLATMCIGLGQGIATVFERV

SEQ ID NO: 5383 - protein, 279 aa, Shewanella sp. MR-7
MIKKHRAFLKWAGGKFKLVDELSNYLPTGERLVEPFVGAGSVFLNTDYPSYLLCDINQDLINLYNIVKERPVEYITAAKKLFVDEMNQKDAYYRVRTDFNKSRDPFLRSVYFLYLNRHGFNGLCRYNRKGGFNVPFGSYKKPYFPEKEILAFSKKAQRAEFKCIGYEKAFEQIRTGDVIYCDPPYAPLSTTASFTTYVGAGFSLDDQALLARYSRHMALEQRIPVVISNHDIPLTRELYRGAHLAKIQVQRNISQNGSGRNKVDELIALYDENYDPQDD

SEQ ID NO: 5384 - protein, 443 aa, Shewanella sp. MR-7
MSQQNPGLKQSLSLWQVVVMGLAYLTPMAVFDTFGIVSEITSGHVATSYLLALAGILFTAFSYGHLVRKYPYAGSAYTYAQKTFSPNVGFMVGWSSLLDYMFMPMINMLLAKIYLTAMFPNVEPWIFIFGLVAVMTVLNLRGIDLVANFNGVIVFVQIAIILVFIGLMAHSLSLGEGEGVIASVRPFYSEEISLAPLFTGATILCFSFLGFDGLSSLSEETKDAKRVIPRAIVLTALIGGVIFVSVSYFLQLFFPDISRFQQLDAVLPEIALYVGGNLFQSVVLVATTIAVLASGMAAHAGVARILYVMGRDNMLPNKGFGYIHPKWRTPAFNVILVGLLALSAVSFDLEMALALVNFGALVAFTFVNLSVIVQFYIKEKRNQSLKDHFQYFALPLCGAATIGVLWLNLEPQSLELGLIWAAVGVLYLALRSLRLRKAVELQN

SEQ ID NO: 5385 - protein, 797 aa, Shewanella sp. MR-7
MARCHLHKFGGSSLADADCYRRVAHILLTHGHSDDLVVVSAAGKTTNFLYKLLSLRDSNQLWQEELQVLISYQQGLIEQLLSNEQARDLRERLTTDKAQLISLLSLDSRNDYQISHVVSFGERWSARLMAALLRESGVAASHVDACSILVADEAAVPQIRVQESRAKVQALLAAHPNERLVITGFICANERGDTLLLGRNGSDFSASLIASLADIERVTIWTDVEGVFNADPNKINDAKLLKSMSLAEADRLARLGSPVLHSRTLQPLFNTEVSLAVRSSYASHTDFTLIAPHSSSASAPVVTNLNAVVLFGFKIAGDVANLLEQLVEAGLTPLAHWVSAHQRLELAYTAENQKQVQKLLDAQAEALGIKDLQINTELGLVALVSADAEHYRRSFARLLSRDAKPLFSGDLSLVTLVPQSQVNLLTQKVHRRCAGPRKRIGVLLLGVGNIGEAWVKLFKSVSPSLNQELEARVELVGLVSSSKALIKSTAVDLENWQQEFDAEATPWQYEHLFEQLEQLNCDELIALDISASASLTLQYPEFFERGIHMVSANKLAGSGPLPFYRELKEQLGYRRLFWRYNASCGAGLPIQHALNDLRNSGDTVEAVGGIFSGTLCWLFEKYDTSKPFSELVVEARGLGITEPDPRDDLSGRDMQRKLLILAREIGLEIELEDIELRSLVPAHLADIPLEQFLARIAELDDELQQQYGAAAEQNKVLRYVASLDNSGAALKAEVGLQWIDANHPYANLTPGDNVFVIRSAFYQGNPLIIRGPGAGREVTAAAVQSDLTQICRDLLQE

SEQ ID NO: 5386 - protein, 622 aa, Shewanella sp. MR-7
MSSSERTFRELGLSENLLRALDELGYEKPTPIQSASIDPLMAGKDILGQAQTGTGKTGAFALPLLNKVTSQAVPQILVLAPTRELAVQVAEAFSSYAKFMKGFHVLPIYGGQSMHQQLNALKRGPQVIVGTPGRVMDHMRRGTLKLETLQALVLDEADEMLKMGFIDDIEWILEHTPEQRQLALFSATMPEQIKRVANKHLKDATNISIAASHTTVDSIEQRFVQVSQHNKLEALVRVLEVENTEGIIIFVRTRNSCVELAEKLEARGYASSPLHGDMNQQARERAVEQLKNGKLDILIATDVAARGLDVERIGHVVNYDIPYDTEAYVHRIGRTGRAGRTGMAILFVTSREMRMLRTIERATNSRISPMKVPSPETVAERRLSRLGEQLAQTMTQDLDFMREAVAQLCQQLEVDTDLLAAALLHQVQQERPLQLPAIQERTRDERNERSERGAERGERGERRSRESRPLPASLGSAEALKDNPDLKMCRYVIDVGRDNGVGVGNIVGAIANEANIDSRYIGAIQLYDAVTTVDLPDGMPKEVLQHLKKVRVCGKPLNIREAGDQVFVDSGRGARSDRRPRGDRPMGERKPRSASGDKPFADRKPRSDKPAGERRPRKPREE

SEQ ID NO: 5387 - protein, 508 aa, Shewanella sp. MR-7
MQIGIPRESLAGETRVAATPATVEQLKKLGFEVVVEANAGLLSSFDDAAFEAAGAKITAEVWQADLIFKVNAPTDAEIAQIKEGATLISFIWPAQNAELVEKLSKRNINVMAMDMVPRISRAQSLDALSSMANIGGYRAVVEAAHHFGRFFTGQITAAGKVPPAKVLVIGAGVAGLAAIGTAGSLGAIVRAFDTRLEVAEQIESMGGQFLKLDFTNEDGSSSDGYAKTMSDEFIAAEMALFAEQAKEVDIIITTALIPGRPAPKLITKAMVDSMKPGSVIVDMAAQAGGNCEYTQPSELFVTENGVKVIGFTDLPGRLPAQSSQLYGTNLVNLMKLMCKEKNGVASINFDDVVMRNMTVVKAGEVTFPPPAISVSAAPAKPAAKVEAKAAEAKKPSKLKYILAVLGVAGFAAVASVAPAEFLSHFTVFVLSCVVGYYVVWNVSHSLHTPLMSVTNAISGIIVVGALLQIGQGSTLVTVLAFIAVLIASINIFGGFTVTQRMLKMFRKD

SEQ ID NO: 5388 - protein, 639 aa, Shewanella sp. MR-7
MGKIIGIDLGTTNSCVAVLDGGKARVLENAEGDRTTPSIIAYTDDETIVGQPAKRQAVTNPNNTFFAIKRLIGRRFKDDEVQRDVNIMPFKIIQADNGDAWVESRGNKMAPPQVSAEILKKMKKTAEDFLGEEVTEAVITVPAYFNDSQRQATKDAGRIAGLEVKRIINEPTAAALAYGIDKKQGDNIVAVYDLGGGTFDISIIEIDSNDGDQTFEVLATNGDTHLGGEDFDNRLINYLADEFKKEQGLDLRKDPLAMQRLKEAAEKAKIELSSTNQTEVNLPYITADATGPKHLVVKITRAKLESLVEDLIIRTLEPLKVALADADLSVSDINEVILVGGQTRMPKVQEAVSNFFGKEPRKDVNPDEAVAVGAAIQAGVLSGDVKDVLLLDVTPLSLGIETMGSVMTKLIEKNTTIPTKAQQVFSTADDNQSAVTIHVLQGERKQASANKSLGQFNLDGIEPAPRGMPQIEVMFDIDADGILHVSATDKKTGKKQNITIKASSGLSEEEVAQMVRDAEAHAEEDKKFEELVQSRNQADGLVHATKKQVEEAGDALPADDKAKIEAAMSAVEVATKGNDKEAIEKATQELIEASAKLMEIAQAKAQTQGGAQEGAAKQSNATADDVVDAEFEEVKDDKK

SEQ ID NO: 5389 - protein, 657 aa, Shewanella sp. MR-7
MRSSNLSDMAKNLILWVVIAVVLMSVFQGYSPSSSSSQKMDYSTFLDNVRDGQVASVEVKSDQRTIEGSKRTGEKFTTIMPLYDQDLINDLDRKGITMKGQEAEESGFLTQIFISWFPMLLLIGVWIFFMRQMQGGGGKGAMSFGKSKAKLMSEDQIKTTFADVAGCDEAKEEVKELVDYLRDPTKFQKLGGRIPTGVLMVGPPGTGKTLLAKAIAGESKVPFFTISGSDFVEMFVGVGASRVRDMFEQAKKSAPCIIFIDEIDAVGRQRGAGLGGGHDEREQTLNQMLVEMDGFEGNEGIIVIAATNRPDVLDSALLRPGRFDRQVVVGLPDVRGREQILKVHMRKVPLSEDVKASVIARGTPGFSGADLANLVNEAALFAARGNRRVVGMEEFERAKDKIMMGAERRSMVMSEAEKEMTAYHEAGHAIVGCLVPEHDPVHKVTIIPRGRALGVTFFLPEADAISQSRRKLESQISVAYGGRLAEELIYGSEKVSTGASQDIKYATSIARNMVTQWGFSDKLGPLLYAEEEGEVFLGRSMGKAKAMSDETATLIDAEVKAFIDKNYGRAKQILLDNIDILHSMKDALMKYETIDSLQIDDLMNRREVRQPADWQADDNGSNDKGSDKGEPAVKVDEVVKTAPVETELKDADESPVK

SEQ ID NO: 5390 - protein, 488 aa, Shewanella sp. MR-7
MIPVVALVGRPNVGKSTLFNRLTRTRDALVADFPGLTRDRKYGRAFLSGYEFIVVDTGGIDGTEEGIETKMAEQSLAAIEEADVVLFMTDARAGLTAADLSIAQHLRSRQKTTFVVANKIDGIDADSACAEFWSLGLGEVYQMAAAQGRGVTNMIEYALTPYAEAMGIERQGEEEEVDERQYTEEEAEAEQKRLQDLPIKLAIIGKPNVGKSTLTNRILGEERVVVYDEPGTTRDSIYIPMERDGREYVIIDTAGVRRRSKVHEVIEKFSVIKTLKAVEDANVVLLIIDAREGVAEQDLGLLGFALNAGRALVIAVNKWDGIDQGIKDRVKSELDRRLGFIDFARIHFISALHGTGVGHLFESIEEAYDSATRRVSTSMLTRIMQMSQDDHQPPLVNGRRVKLKYAHAGGYNPPIVVIHGNQVSKLPDSYKRYMMNYFRRSLKVVGTPIQLRFQEGDNPFENKVEKLTMSQERRRKRALSHIKDRKTK

SEQ ID NO: 5391 - protein, 407 aa, Shewanella sp. MR-7
MHTTYTIGELESFLIAIFVLFIGHSINRHVRVFRQYNIPEPIVGGLVVAAVVAFLHFQDITLAFSLPMQNTLMLMFFSTIGLSANYKLLLSGGKKVFIFLGVASVYIVIQNAVGVSLASLLGLDPILGLIAGSITLSGGHGTGVAWSQTFAENYGINTLELAMAAATFGLVMGGIIGGPIAQRLIGKHNLVSSYGMGRKHHSTHPQLVTYDQLEEDQVTAKTIIETLFVLLICVAGAKWFTVFVSEYQLNWLKMPDFVYALFLGVIIANITEMTRGYKPHTESIDVIGTVALSLFLSMALMNLKLWEILDLAIPLLIILLVQTAVLAVFAYFVTFKIMGSNYDAAVITGGHCGFGMGATPTAVMNMGALVSRTGPSPQAFMVVPIVGAFFIDIVNLIVLQGYLSFLM

SEQ ID NO: 5392 - protein, 717 aa, Shewanella sp. MR-7
MSRNIMLIPIGTGVGLTSLSLGMVRALERHGVKVQFFKPISQLRPNDNGPERSTTILSKSPTVNPLEPFDMAHAEALIRADQTDVLMEQIIARAAECASNTETLIVEGLVPTRNHPFADDVNYAIAKAMDADVIFIATPGSDTPTGLMNRLEIAYNSWGGKNNKRLIGAVINKIGAPVDDEGRARPDLSEVFDHQGVQRSDSSIMFQLPGKSPLRILGSVPYNLDLVAPRASDLAKHLRARILNAGEMNTRRLRKVTFCARSLPNMVNHIKTDSLLVTSGDRSDVIVSACLAAMNGVKIGALLLTGSYEPEPEILKLCEQAFETGLPVFLIDTNTWQTSLNIQRFDHEVPVDDAVRIDLVQEYVAGHIDQTWIESVTKNSPREHRLSPPAFRYKLTELARAAHKTVVLPEGDEPRTIKAAAICAERGIARCVLLGKKDEILRIAAQQDVVLGDGVVIVDPDEVRDRYVEPMLDLRRNKGLTEVVAKEQLEDNMVLGTMMLAQDEVDGIVSGAVNTTANTIRPPLQLIKTAPGSSLVSSIFFMLMPDQVLVYGDCAINPDPNAEQLADIAIQSAESAKAFGIEPRVAMISYSTGNSGTGSDVDKVREATRIAKEKRPDLVIDGPLQYDAAVMPNVARSKAPNSPVAGQATVFVFPDLNTGNTTYKAVQRSADLISIGPMLQGMRKPVNDLSRGALVDDIVYTIALTAIQASQNDASKA

SEQ ID NO: 5393 - protein, 324 aa, Shewanella sp. MR-7
MKDSHANAPQTSSNSHEPLQVSSHFSCYHQAEIYGKSKVVKAPWQSFGLAVFAGAFIALAFVFYLTVTTGAGDSAWGLVRLVGGIAFSLGLILVVICGGELFTSSVLSSVAWAQKQVTTSELLKCWSRVYIGNFVGAILMVGLIMAAGLYELDGGNWGLNALKVSQHKLHHTWVQAFSLGILCNMLVCLGIWMTFASRESLTKAILLILPVAMFVSSGFEHSIANLFMVPLGITIQSVASPEFFASLGVTQEQFADLTVANFVFNNLIPVTLGNIVGGGVIVGLGYWWIEQGQIALPDPQKSHQPHFFASPLHTEKAKNSQESK

SEQ ID NO: 5394 - protein, 183 aa, Shewanella sp. MR-7
MGTVNRAVFLDRDGVINKDHGYVHQVDDFEYIEGVFEACLALKQMGYKLVVVTNQSGIARGMYTEDQFHSLTEWMDWNFADKGVDLDGIYYCPHHNEKGLGEYKVDCDCRKPKPGMLLDAAKFLKIDLSQSVMVGDKADDMLAAKAAGVPTRILVRTGKAIADDSEASVVLDSIADVPGFLKK

SEQ ID NO: 5395 - protein, 404 aa, Shewanella sp. MR-7
MKLPIYLDYAATTPVDPRVAEKMFQYMTMDGIFGNPASRSHRYGWQAEEAVDVARSQVADLINADHREIVFTSGATESNNLAIKGVAHFYNKKGKHIITSKTEHKAVLDTCRQLEREGFEVTYLEPEANGIIPMERLEAAMRDDTILVSIMHVNNEIGVIHDVDAIGELCRSKGIIFHMDAAQSAGKLPIDVQTTKVDLISISGHKMYGPKGIGALYVRRKPRIRLEAQMHGGGHERGMRSGTLATHQIVGLGEAAAIAKAEMATDNARIAKLRDKLWNGIKHIEETYVNGDMTHRVSGSLNVSFNYVEGESLMMALKDLAVSSGSACTSASLEPSYVLRALGLNDEMAHSSIRFSIGRFTTEEEIDHAIETITQSIDKLREMSPLWEMFKDGIDLNQVQWAHH

SEQ ID NO: 5396 - protein, 572 aa, Shewanella sp. MR-7
MEKLSGASMIVRSLIDEGVKHIFGYPGGSVLDIYDALHLIPGIEHILVRHEQAAVHMADGYARATGKVGVVLVTSGPGATNAITGIATAYMDSIPLVVLSGQVPSNLIGNDAFQECDMIGISRPVVKHSFLVQDPTQIPEIIKKAFYIASTGRPGPVVVDLPKDCLNPALLHDYIYPESIKMRSYNPTTSGHKGQIRRGLQALLAAKKPVLYVGGGAIISSSEKQILALAEKLNIPVVSTLMGLGAFPGTHKNSLGMLGMHGRYEANMTMHNCDLIFGIGVRFDDRTTNNIEKYCPNATILHIDIDPSSISKTVRVDIPIVGSADIVLDSMLALLEESKESNDSEAINQWWQEITVWRNRNCLAYDKESHRIKPQQVIETLYKLTKGEAYVASDVGQHQMFAALYYPFDKPRHWINSGGLGTMGFGLPAAMGVKMAMPDETVVCVTGDGSIQMNIQELSTALQYDTPVKIINLNNRFLGMVKQWQDMIYSGRHSHSYMDSVPNFAKIAEAYGHVGMTISDPAELESKMAEALAMKDRLVFIDIMVDETEHVYPMLIRGGAMNEMWLSKTEKC

SEQ ID NO: 5397 - protein, 585 aa, Shewanella sp. MR-7
MKFPSLVSLMPGLAQMLQYEKQWLRDDVRAGLSVAAVALPVAIAYAQLTGVNAAVGLYSCVLPMLVYALFGTSRQLIVGPDAATCAVIAAVVTPLAAGDSMKHWQLVMTMTAMTGFWCLIASRFRLGVLADFLSKPILMGLLNGVAITIIVGQFSKIFGFTFDERYLIERLTGAPSYLTKTHWPTLLMGGGTLATYALVKRYRPLWPASMCAMAMAAFLVWAFNLTSFDINVVGEVSAGLPSFQAPAFDLGIARELVVPALNLAMVSFVSMMLTARSFAAKNGYDIDADKEFRALGIANIASALSQGFAVSGADSRTAVNDANGGKSQLVSIIAAVLIALVALFFTAPLKYIPSSALGVVLVIASISLIDLKALWNLRVRDRSAFLLACTTLFSVLFIGVIPGITLAVLLGLFQFLATVMRPTDQVLGLDQKGVIRSVDDSGKAKSVPGVFIYRFNSPLTYFNATYFKRRLLEKFIRESEPVDCIIIDAVPCFTHLDLSVMAMLADLHQLLKKRGIRLVLAGRKRQMLGWFEQAGMQSGEGGILIRPDLYLALKMNQSYKQALAEGQAPVIKKAPEDDVLLHSHL

SEQ ID NO: 5398 - protein, 404 aa, Shewanella sp. MR-7
MRPIIKSNKLDTVCYDIRGPVHKEARRLEDEGHRILKLNIGNPAPFGFEAPEEIVRDVILNLPSAQGYCESKGLFSARKAIVQHYQAQGIFGVDIEDIYIGNGVSELIMMAMQGLLNTDDEILIPSPDYPLWTAAANLAGGKAVHYRCDEDADWFPDLDDIKSKISSRTRGIVLINPNNPTGAVYSKELLLQVVELCREHNLILFADEIYDKILYDEAKHIPAASLSDDILTVTFNGLSKAYRAAGFRVGWMMLSGNLKAAKSYIEGLEMLSSMRLCANVPNQHAIQTALGGYQSINELILPSGRLTVQRDTCYELLNQIPGVSVKKPKGALYAFPKLDMKKFNLRDDERLVLDLLREKKILLVHGSAFNWPEPDHLRVVFLPYKEDLTKALTEFGHFLETYKQ

SEQ ID NO: 5399 - protein, 499 aa, Shewanella sp. MR-7
MSLILELKQISKHYPGVKALEDVSLRLFAGEVHALLGENGAGKSTLVKVMTGAQSKDMGDILFLGEPQHFNTPMDAQKAGISTVYQEVNLVPNLTVAQNLFLGYEPRRLGLIHFKKMYADARAVLTQFKLDIDVSAPLSDYSIAVQQLIAIARGVAMSAKVLVLDEPTASLDAKEVQVLFGILNQLKAKGVAIVFITHFLDQVYQISDRITVLRNGQFIGEYLTAELPQPKLIEAMLGRSLQEQLVDKQEKERTVTRAEAVLLSLKDVSVKGSIQSMNLTVPKGQAVGLAGLLGSGRSEVCNAVFGLDLVDSGSIHLAGQKLNLSQPVDAISAGIALCPEDRKIDGIIGPLSIRENIILALQARIGWWRYLSKARQQEIAQFFIDKLQIATPDADKPIEQLSGGNQQKVILARWLAIEPILLVLDEPTRGIDIGAHAEIVKLIRTLCDEGMSLLVASSELDELVAFSNKVVVLRDRYAVRELSGAELTSQHVMQAIAEG

SEQ ID NO: 5400 - protein, 363 aa, Shewanella sp. MR-7
MNPVFTPNVAQKILFIDRDGTLIEEPITDKQVDSLAKLVFEPQVIPALLRLQKAGFRLVMVSNQDGLGTPSFPQEDFDAPHNMMMQILSSQGVRFEDVLICPHFNDENCSCRKPKLGLVKDFLTQGTIDFTQSAVIGDRHTDVELGNAMGIKSFQYQRGSLGWDAIADALLNKGRTATVVRTTKETDIRVTVDLDNASKGAINTGIGFFDHMLDQIATHGNFKMEVNVDGDLEIDDHHSVEDTALAIGDALRQALGDKRGIARFGFSLPMDEAKGECLLDLSGRPFIKFAAQFEREKVGEMATEMVPHFFRSFADGLRCTLHVAAEGDNDHHKVEALFKVLGRALRQAVKVEGDVLPSSKGVL

SEQ ID NO: 5401 - protein, 195 aa, Shewanella sp. MR-7
MDQAEFRLRFNLHPLATQDPAAIPHLGLRKAAVLIPLQEIQGELNLILTQRPMHLRAHPGQISFPGGKIEPSDTSAIMAALREAEEEIGLCRENVEVIGTFPAHNTFTGFEITPVVGMIKQDFALRLDPGEVADCFTVPLSFFIEPQNRHRKQFLRQGRYYSVHFIPYQQRFIWGATAAIIDHLCRHLSLPEEML

SEQ ID NO: 5402 - protein, 554 aa, Shewanella sp. MR-7
MCSIFSILDIQSDAKELRQVALEMSKLMRHRGPDWSGIYASDKAILAHERLAIVDIEHGAQPLLTEDGSLILAVNGEIYNHKELKAQLGDKYSYQTNSDCEVILALYQEYGTEFLDKLNGIFAFVLYDKAKDAYLIGRDHMGIIPLYTGRDAAGNFYVASEMKALMPVCKTVAEFQPGQYLYSTTGEPVQYYTRDWQSFDAVKDNAASQEELREALEAAVKRQLMSDVPYGVLLSGGLDSSVISAITQTFAKRRIEDDDQSGAWWPQLHSFAVGLKGAPDLAAAKKVADAIGTIHHEINFTFQEGLDAIKEVIYHLETYDVTTIRAATPMYLMARKIKAMGIKMVLSGEGADELFGGYLYFHKAPNAQAFHEELVRKLDKLHLFDCLRANKAMAAWGLEARVPFLDKEFMDVAMRINPEAKMSKDGRIEKHILRQAFEHKLPKEVAWRQKEQFSDGVGYSWIDGLKAHAAEQVDDLQLANAKFRFPYNTPETKEAYFYRCFFEEHYPLASAAETVPGGKSVACSTPEALAWDESLRGIIDPSGRAVRSVHAASY

SEQ ID NO: 5403 - protein, 291 aa, Shewanella sp. MR-7
MAKVAFIGLGVMGYPMARHLLNKGHEVTVYNRTFAKAQTWVENYGGRCCPTPKEAVIGQDIVFTCVGNDNDLREVVLGNDGVIHGMAPGTVLVDHTTASADVARELHKVLAEKGVDFLDAPVSGGQAGAENGVLTVMVGGDQAVFERVKPVIEAFARCAERLGEVGAGQLTKMVNQICIAGVVQGLAEALQFARKAGLDGEKVVEVISKGAAQSWQMENRYKTMWGQSYDFGFAVDWMRKDLGIALEEARRNGSHLPLTALVDQFYSEVQAMGGNRWDTSSLLARFEKNTK

SEQ ID NO: 5404 - protein, 556 aa, Shewanella sp. MR-7
MSHVDTEVRPSNFIRNIIDEDLKSGKHTRVQTRFPPEPNGYLHIGHAKSICLNFGIARDYQGLCNLRFDDTNPEKEDIDYVNSIQADVHWLGFQWDGEVRYSSNYFDQLHQYAVELINKGLAYVCFLNADETREYRGTLKEPGKNSPYRDTPVEENLQLFEKMRKGEFKEGECALRAKIDMASPFMCMRDPVIYRIRFAHHHQTGDKWCIYPMYDFTHCISDALEHITHSLCTLEFQDNRRLYDWVLDNLDDFQAPNRTRQYEFSRLNLEYTLMSKRKLNDLVTRKLVSGWDDPRMPTIAGLRRRGYTPASIREFCQRIGITKQENMIEAAMLDACIREELNEHAPRAMAVLRPLKVVIENYPEGQLETIQAASHPSDESMGTRELAFGRELYIDVADFREEANKQYKRLVMGKEVRLRNAYVIKAERCDKDSEGNITTVYCSYDADTLGKNPADGRKVKGVIHWVEATTAKPAEFRLYQRLFTDPNPAAAETVDEVLNPNSLEVVNGLVEASLVNAPAEKAYQFEREGYFCADNKDSSAEHLVFNLTVALRDSFE

SEQ ID NO: 5405 - protein, 658 aa, Shewanella sp. MR-7
MSIKSSINPPVFYSSVFFITLMVMICAIWPTEANHFFKSMQSWLEAKAGWLYILGVAIFLIFIIFVMVSRFGDIKLGPDHAVPDYSYKSWIAMLFSAGMGIGLMFFGVAEPVMHYLAPPDATPETLAAAKEAMKITFFHWGIHAWAIYGVVALSLAYFAYRHKLPLLPRSALYPLIGERIHGPIGHCVDTFAVLGTMFGVATSLGFGVLQVNSGLSYLFEQLPNNSTVQVSLIIGITLLATLSVFSGLDKGVKRLSELNLGLALILLLIVLLLGPTVMLLQAFVQNTGSYLSDIVNKTFNLYAYQHKEDWLGGWTLLYWGWWISWSPFVGTFIARVSRGRTIREFLVGILFVPSALTFLWMTVFGNSAIDAIMNQGATYLSDAVNTNVPVALFVFFEHMPFPHLLSGIGICLVVTFFVTSSDSGSLVIDNLTSGGDNNAPVWQRVFWALLQGVVASVLLLAGGLQALQTAAIASAMPFLCVMLLMCLGLYKALKDDWLKINSVQMHTTSVQYAKTNISWEERIEVLVSHPTEDEARIFLNNVATPALSKVCQQFMTKGLTADLEYLGGKVRLVISNEAYQPFVYGVRMRCFEIVNPVGEELEQGNNWYYRAEVYLEQGGQHYDVMGYTEEQLLADVVTQYEKYLHYLHLSNADQGHVT

SEQ ID NO: 5406 - protein, 396 aa, Shewanella sp. MR-7
MSTEQFNQEIVIVAAKRTPMGGFQGSLSGVTSPSLAATAIKALLADTQVAPDKVDEVLMGCVLPAGLGQAPARQATLGAGLPLSVGATTVNKVCGSGMKTMMLAHDLLKAGSAKLVVAGGMESMSQAPYLLDKARSGMRMGHGKVLDHMFLDGLEDAYTGGAMGTFAQKTADEYGLTREQMDAFALSSLEKANAAINSGAFKAEIVPVTVSDRRGDVTIDTDEQPGNARPEKIPTLRPAFAKDGTITAANSSSISDGAAALMLTTRANAEQLGLTVLATIKGHTTHAQEPSLFTTAPVGAMAKLLSNVGWSKDEVDLFEINEAFAMVTMLAVSELGLDMAKVNVNGGACALGHPIGCSGARLLVTLIHALKARGLKRGVASLCIGGGEATAMAIEV

SEQ ID NO: 5407 - protein, 380 aa, Shewanella sp. MR-7
MDTKTMNISTMQNIMPSPALSSAPASVVGFSQLVCVERWNETADVVSFRFQAGEPMKFDYKPGQFMTLVLEINGEQACRSYTLSSTPSRPYSLMLTIKRVDGGLVSNYLIDHLQPGQTVRVLPPTGQFNLFDIPAKKYLFLSAGCGITPMYSMSRYLTDSQMNADIAFVHSARTQADIIFKTSLETMATRHRDFKLRYIVEDVTADTAWHPEAVLHDIGRLSADNLRDLVPDFAERTVFLCGPEPYMQAVKTILAELNFDMTQLYHESFATAVKEAQSRVRQAEMQTEAPVSGGNSFMLSIGDKKRALTTDQTLLEGIEAEGLPIIAACRSGVCGACKCKVLEGETESTSSMTLTPAEIEAGYVLACSTKLKSDVTLSLT

SEQ ID NO: 5408 - protein, 1482 aa, Shewanella sp. MR-7
MSLYHPSFERDNCGFGLIAQMDGEASHRIVRTAIHGLDRMKHRGGIASDGRTGDGCGLLMQLPLQFFEAIAAENDWHLSRKFAVGMLFLSQDEELADQAKFILERELERETLSIAGWRKVPVNPEVLGEIGKSSLPQIYQVLINAPIGWREKDLERRLYMARRRLEQQITDDKDFYVASLSGQVIVYKGLMMPADLPAFYPDLADIRLKSSICLFHQRFSTNTSPKWPLAQPFRYLAHNGEINTITGNRQWARARAYKFNSPLLPDLQQAAPFVNETGSDSSSLDNMLEMLLSGGMDLYRAMRLLIPPAWQSNPEMDDELKAFYDFNSMHMEPWDGPAGIVMTNGRHAACAVDRNGLRPSRYVITKDRILTLASEVGIWDYAADEVIEKGRVGPGELLVLDTLNGRLYQSFEIDNDLKRRHPYKEWMAKNSRTLVPAEQLATEQHGASELSPEQLLQYQKQFGYTREELEQVIWVLAKQGEEATGSMGDDTPMAVLSKKSRSLYDYFRQKFAQVTNPPIDPLREKHVMSLATCIGREQNLFNETTGHAYRVMFNSPILLFSDFNQLLGLDSTYYRANIVDLNYDPKEGLEHAIRRITSEAERLARSGTTLLILSDRAIDKSAQVIPAAMAVGAVQQMLVSKSLRCDTNIIVETASARDPHHFAVLLGFGATAIYPYLVYESISDLAKRHQLTDTTALMLNFRYGIEKGLRKIMSKMGISTVGSYRCSQQFEAIGIASDVIELCFKGVVSRIEGASFEDIAQDQALLHKAAYRAHVPLPQGGLLKYVDGGEYHCFNPDVVNTLQASLIDKNFATYKKFAELVDNRPVATLRDLIGIKADQAAIELDKVEAASHLFPRFDSAAMSIGALSPEAHEALAIAMNRLGGRSNSGEGGEDARRFNTERNSAIKQIASARFGVTAHYLVNADVLQIKVAQGAKPGEGGQLPGHKVSVEIAGLRHARPGVTLISPPPHHDIYSIEDLAQLIFDLKQINTKALISVKLVSEPGVGTIATGVAKAYADMITISGYDGGTGASPITSVKYAGSPWELGLAEVHQSLVENGLRHKIRLQVDGGLKTGTDVIKAALLGAESFGFGTVPMIALGCKYLRICHLNNCATGVATQDKKLRDNHYHGLPERVMTYFEFVAEEVREWMATLGVSKFEDLVGRSEWLHTLEGQTDKQRGLDLAPILYQPKVRASTSRTWQETNPPADLGLLNQHLLNECQNAVDKGECFDAAYSINNTDRSVGARLSGYIASTLGVKGTKAPIKLSFNGSAGQSFGVWNSPGLELKLCGDANDYVGKGMSGGKIVIYPPLGSPFQSERSAIVGNTCLYGATGGRFFAAGQAGERFAVRNSGAIAVVEGLGDNGCEYMTSGIVVVLGKTGVNFGAGMTGGFAYVFDQFGRFNRRVNNELVDTQKLESPIHQQHLKGLIEEHVAETGSEHAKMILSDFANWLDCFVLVKPKNIAVADLLKLEQSSPELAVKAG

SEQ ID NO: 5409 - protein, 397 aa, Shewanella sp. MR-7
MLDSRTIQIIKSTIPLLESAGPALTQHFYQRMFTHNPELKDVFNLAHQHSGGQPVALFNAVAAYAKNIDNLGALGTAVERIAQKHTGFLIQPEQYAIVGGHLLATLQELGGEAVTEEVLTAWGDAYQFLANIFIQREAQIYQESAQQDGGWSGVREFIISEKKAESAVITSFVLTPTDGQAVKDFTPGQYLSIKLQHPKLAFDEIRQYSLSDAPNGRTYRISVKREPNGQVSNLLHDMLQVGDTVSVMPPAGDFALTAQPETPIVLISAGVGQTPMKSMLNQLLKLKHPSAVTWLHACEHGEVHGFKTAVKSKLGQHANLASHVWYREPKEADILGQDYDFEGTMNLTSVADKIATDAHYYFCGPIGFMASIKQQLLAFGVPSEQMHYEVFGPHAEL

SEQ ID NO: 5410 - protein, 317 aa, Shewanella sp. MR-7
MKIVVLDGETLNPGDLTWQAVSALGEFSCFARTPLAEIIPRAQDAEIVLTNKTPLDANTLAQLPKLKYIGVLATGTNVVDLAAAKELGIVVTNVPAYGPDAVAQMVFAHILHHTQAVAAHHQAVAAGQWSNCSDFCFTLMPLQSLKGKTLGLIGYGDIGQQVAKLALAFGMKVLVNTRTKPSDLPQGVSWTSRDTVFKESDILSLHCPFTPETTELINTQTLELMKPQALLINTARGGLIDEAALAAALTQGKVFAGVDVLSTEPPSADNPLLTAPNISISPHNAWATKEARQNLLNIATANLSAYLAGDRVNWVNP

SEQ ID NO: 5411 - protein, 613 aa, Shewanella sp. MR-7
MNSSNHKFSQTVLPHTPVESLASPPSKVQDRAVLPWIWQFLKPYRLRVVAAIVFLLIGSLAWLSLGQGVRLMVDEGFIKDNAQRLNEIILLVLLITAVSGTAVFCRFYLMTWLGERVSADIRLTVYNQLLKLSPAFYAKVRTGEVISRFTADSTLLQTVVGSSLSMALRSGVTVIGGLAMMGITSVKMTLLVLLAVPLVLGPVGFFGRKVRTLARESQDRVADLGAYVDETLHEIHTVQAYGHEDKDRSLFNGRVEDVMTAASGRIRYRAMLISSVMFLSIAAIVSVTWVGAHDVMSGKMTGGELSAFMFYAVMVAGAVATISEVVGEIQRASGAAERLIELAETEVDIPAPLVPKKLPAKVRGELQLQQLNFHYPEQTQLVLSDLELTITAGERVALVGPSGAGKSTLFQLLQRFYVPSSGSIHLDGIDIAELSPKDLRAQFALVPQDSVIFATSVLENVRYGRVDASEQEVIDACIAARAHEFICEFSEGYQTYLGERGVRLSGGQKQRIAIARAILADRPILLLDEATSALDALSEQKVKQALDELMTGKTTLIIAHRLATVINADRIIVFDKGRIVASGKHQTLLQTNALYREFASLQLLTDDVSALSE

SEQ ID NO: 5412 - protein, 405 aa, Shewanella sp. MR-7
MEMAIGIGMFTLVVCLLVIVILIAKKKLVTTGEITIGINDDAEKSIKVAAGDKLLGALASKNIFIPSACGGGGTCGQCRVKVKSGGGDILPTEQGHITKKEAKEGCRLACQVAVKTDMELELEEEIFGVKKWQCEVISNDNKATFIKELLLKLPEGEDVRFKAGGYIQIEAPAHVVKYADFDIPAKYRDDWEKYGLFDLVSTVNEDVLRAYSMANYPDEKGRIMLNVRIATPPSANVPPGKMSSYIFNLKAGDKVTISGPFGEFFVKETDAEMVFIGGGAGMAPMRSHIFDQLKSKKTKRKMSFWYGARSSREVFYQQDFDTLAAENDNFVWHVALSEPLPEDNWTGYTGFIHNVIYENYLKHHKAPEDCEYYMCGPPIMNSSVIRMLESLGVEPENILLDDFGD

SEQ ID NO: 5413 - protein, 325 aa, Shewanella sp. MR-7
MVDQSQLRQWGCKVIDIEKSALDNLYQYVDSVEFAQACELILNCTGKVIVMGMGKSGHIGNKISATLASTGTPAFFVHPGEASHGDLGVLSDNDVILAISNSGESSEILALMPVIQRKAIPVIAMTGKPESTMARLSKIHLCIEVPEEACPLGLAPTSSTTATLVMGDAIAIALLQAKGFTREDFAMSHPGGALGRKLLLKVSNVMHSGDDLPLVKHDICITEALYEISKKGLGMTAVIDEQNKLVGIFTDGDLRRVIDAQVNLRTTPIADVMTRNCVTITENVLAAQALQVMDSKNINGLIVIDKEHHPVGALNMLDMVKAGVI

SEQ ID NO: 5414 - protein, 451 aa, Shewanella sp. MR-7
MSLVVAKFGGTSVADYGAMNRCADIVLGNPDCRLVVVSASSGVTNLLVELTQESMNDDGRLQRLKQIAQIQYAILDKLGRPNDVAAALDKLLSRMAVLSEALASQRSKATMDELLSLGEQCSSALFAAVLREKGANSSAFDVRRVLRTDSHFGRAEPQVEQIALLSSEHLLPLLSEQVIVTQGFIGSDEAGQTTTLGRGGSDYSAALLAEALKASAVEIWTDVAGIYTTDPRLAPNAHPIAEISFNEAAEMATFGAKVLHPATILPAVRQQIQVFVGSSKEPEKGGTWIRHQVEDAPVFRAVALRRDQTLLNLHSLQMLHAQGFLAETFATLARHKISVDLITTSEVNVSLTLDKTGSDSSGQGLLSEALLQELSQHCRVRVEDSLALVAIIGNRIATTAGICRRVFEVLEPHNVRMICQGASPHNLCVLVAESEAAQVVKALHENLFEGA

SEQ ID NO: 5415 - protein, 551 aa, Shewanella sp. MR-7
MRGADAVIKVLAAHGVTTVFGYPGGAIMPIYDALYGSPVEHLLSRHEQGAAFAAVGYARASGKTGVCFATSGPGATNLITSLADALLDSVPVVAITGQVSTAVIGTDAFQEIDVLGMSLSCTKHSFMVTDVNDLIPTLYQAFEIAASGRPGPVLVDIPKDIQIAQLEYRTPLLAVTNEPQASASEIDAACALLAEAKQPMLYVGGGVGMAGAVDQLREFIKATGMPSVATLKGLGCIAHGTPGYLGMLGMHGGKAANLAVQDCDLLVVAGARFDDRVTGRLATFANKAKVIHLDIDAAELGKLRQPDVAIAGDLRQIFPALAMALNISPWQTEVEHLARKHQWDYQHPGSLIYAPAMLRRLANKLPEDSVVCCDVGQHQMWVAQHMWFRRPEDHLSSAGLGTMGFGLPAAIGAQVARPDATVVTVSGDGSFMMNVQELTTIKRRKLPVKILLIDNQKLGMVKQWQQLFFEERYSETDLSDNPDFVQLASAFDIPGRTIFSSDEVEEALTEMLAAKGPYLLHVAIDDAFNVWPLVPPGASNSDMMDEMEKQT

SEQ ID NO: 5416 - protein, 541 aa, Shewanella sp. MR-7
MESQRNILLIGLLFVSFLLWQQWQADKAPKPVATESSVVANATTNHSADVPEADTGVPAAMTATQNLITVKTDQLDVQINPVGGDIVFAALVSHKLEQGKDQPFVLLEQTKDFTYIAQSGLIGRDGIDSSAKGRAAFAASKTEFTLADGQDTLEVPLTYVADNGVTYTKVFVFHRGKFNVDIDYKINNTSAAPLQVQMYGQIKQTIKPSESSMMMPTYRGAAFSTQDVRYEKYKFEDMSKSNLNQPTLGGWAAMLQHYFVSAWIPPATDSNTIFSSVSAGGLANIGFRGAVYDIAPGATQEISSQFYVGPKDQKALSALSDTLNLVVDYGFLWWLAVPIHWLLMFYQSFVGNWGVAIILITLTVRGLLFPLTKAQYTSMAKMRNLQPKLQDLKERFGDDRQKMGQAMMELYKKEKVNPMGGCLPILLQMPIFIALYWVLLESFELRHAPFMLWIHDLSVQDPYYILPLLMGVSMFVMQKMQPIAPTMDPMQVKMMQWMPVIFTVFFLWFPSGLVLYWLVGNIVAIIQQKIIYAGLEKKGLK

SEQ ID NO: 5417 - protein, 67 aa, Streptomyces ambofaciens
MAAGTVKWFNAEKGFGFIEQDGGGADVFAHYSNIAAQGFRELLEGQKVTFDIAQGQKGPTAENIVPA

SEQ ID NO: 5418 - protein, 499 aa, Streptomyces ambofaciens
MNRTRTNDRFARTRNNGGDFARGNGRFGSPAPRRSGGPSRSAGHGRRPAAMQGEFALPETITPALPSAEAFADLDMPRELLAALGSQGVAVPFPIQSATLPNSLAGRDVLGRGRTGSGKTLAFGLALLARTAKRRAEARQPLGLVLVPTRELAQQVTDALTPYARSVKLRLATVVGGMPIGRQASALRGGAEIVVATPGRLKDLITRGDCRLDQVAVTVLDEADQMADMGFMPQVTALLDQVRPEGQRMLFSATLDRNVDLLVRRYLSDPVVHSVDPSAGAVTTMEHHVLHVHGADKHAATTEIAARDGRVLMFLDTKHAVDRLTEHLLNSGVRAAALHGGKSQPQRTRTLTQFKDGHVSVLVATNVAARGIHVDSLDLVVNVDPPTDHKDYLHRGGRTARAGESGSVVTLVTPNQRRGMTRLMATAGIVPQTTQVRAGTEDLHRITGAQTPSGIPVVITAPVAERPKKRGSTSRGRRRPASATRRAAVLPPGAAVAAA

SEQ ID NO: 5419 - protein, 761 aa, Catharanthus roseus
MDLPYQRPRFTPFAVTHPRSGVNLNRAISQAFVCYDQFCERLLRYQQSWTDWVFDHGFAEAIEDVALVFQVAPCLHGPRIGALEVLIPRRTQVFIYMSNNQLQRFVAHQCIAQLGDAVLACMIPPYASDLSLQEMARAHNRFCPGSYTRSADVQCFIAIQLSSRFVEEGTCNVHGRNGLKRTCRFFRRPAEFFSRYDIVAIGPVLFHDELDCPANCNEPLSCFDLRYDYQVFLQECDAHDGVGHYPEGAPLPSVAIVGGGLSGLVAATELLGAGVKEITLFDTVDEIRSFGASPMPNGDAHQALTSFDVMPFSANQLCLSYYLDKFRIPSSLRFPCAGNDHTALYFRQKRYAWHAGQAPPGIFQRVHVGWKTLLYQGCERNGRRLMAPMDISFMLKERRRDEASEARQLWLREFGKFTFHAVLVEIFSCGNSSPGGKAWQTPHDFEAFGILRLGYGRVSSYYNVLFSTILDWIINGYEEDQHLSIGGVQLLQALMRIEIFQKSHAKARLCFDPVRGIAKEGGRLKVCLKHGHSRVFDQVIIGGSAEAATVDNRLAGDETSFSYNIEPAVGNSSAAVNSALFMVTKQKFWVNSGIPAVIWTDGLVRELCCIDIESPAGEGLVVFHYALDDYLSRPIEHHDKKGRCLELVRELAAAFPELACHLVPVNEDYERYVFDDHLTDGFKGALWRENSLEKGQYIQDLPGNNFPIGDHGGAYLIDRDDCVTGASFEEQVKAGIKAACAVIRSTGGTLSSLQPVDWNKK

SEQ ID NO: 5420 - protein, 172 aa, Brassica rapa subsp. pekinensis
MAPTAKTTAFKTNGADGGNKENRYRGVRKRPWGRYAAEIRDPTEKTRVWLGTFDTPEAAARAYDKAAFQFRGAKAKTNFPLPFFVADNESPSQSSTVESPSSIPDLNLGSISSVDSRFPSPKIQAKSGMIVFDEESGRSESDSSSVVVDLSSEKRPRVFLDLDLNLPPKPEN

SEQ ID NO: 5421 - protein, 344 aa, Vitis vinifera
MESLGVRKGAWTQEEDVLLRKCIEKYGEGKWHLVPLRAGLNRCRKSCRLRWLNYLKPDIKRGEFALDEVDLMIRLHNLLGNRWSLIAGRLPGRTANDVKNYWHGHHLKKKVQFQEEGRKKPQTHSKTKAIKPHPHKFSKALPRFELKTTAVDTFDTQVSTSSKPSSTSPQPNDDIIWWESLLAEHAQMDQETEFSASGEMLIASLWTEETATQKKGTHSKTKAIKPHPHKFSKALPRFELKTTAVDTFDTQVSTSSKPSSTSPQPNDDIIWWESLLAEHAQMDQETDFSASGEMLIASLRTEETAAQKKGPMDGMIEQIQGGEGDFPFDVGFWDTPNTQVNHLI

SEQ ID NO: 5422 - protein, 849 aa, Persea americana
MGLILEITTSSSNSNRSLLSLITISLLLLTYLSPATCSVSYDHKAIIINGQRRILISGSIHYPRSTPEMWPDLIQKAKDGGLDVIQTYVFWNGHEPSPGEYYFEGRYDLVKFIKLVKEAGLYVHLRIGPYACAEWNFGGFPVWLKYIPGISFRTDNEPFKTAMAGFTKKIVDMMKEEELFETQGGPIILSQIENEYGPVEWEIGAPGQAYTKWAANMAVGLGTGVPWVMCKQDDAPDPIINTCNDHYCDWFSPNKNYKPTMWTEAWTSWFTAFGGPVPYRPAEDMAFAIAKFIQRGGSFINYYMYHGGTNFGRTAGGPFVATSYDYDAPIDEYGLIRQPKWGHLKDLHKAIKMCEAALVSGDPIVTSLGSSQESHVFKSESGDCAAFLANYDEKSFAKVAFQGMHYNLPPWSISILPDCVNTVFNTARVGAQTSSMTMTSVNPDGFSWETYNEETASYDDASITMEGLLEQINVTRDVTDYLWYTTDITIDPNEGFLKNGEYPVLTVMSAGHALHIFINGELSGTVYGSVDNPKLTYTGSVKLLAGNNKISVLSIAVGLPNIGAHFETWNTGVLGPVVLNGLNEGRRDLSWQNWSYKIGLKGEALQLHSLTGSSSVEWSSLIAQKQPLTWYKTTFNAPEGNGPFALDMSMMGKGQIWINGQSIGRYWPAYKAYGNCGECSYTGRYNEKKCLANCGEASQRWYHVPSSWLYPTANLLVVFEEWGGDPTGISLVRRTTGSACAFISEWHPTLRKWHIKDYGRAERPRRPKAHLSCADGQKISSIKFASFGTPQGVCGNFTEGSCHAHKSYDIFEKNCVGQQWCSVTISPDVFGGDPCPNVMKNLAVEAICQ

SEQ ID NO: 5423 - protein, 586 aa, Pisum sativum
MCGILAVLGCSDDSQAKRVRILELSRRLKHRGPDWSGLHQHGDNYLAHQRLAIVDPASGDQPLFNEDKSIIVTVNGEIYNHEELRKQLPNHKFFTQCDCDVIAHLYEEHGENFVDMLDGIFSFVLLDTRDNSFIVARDAIGVTSLYIGWGLDGSVWIASELKGLNDECEHFEVFPPGHLYSSKEREFRRWYNPPWFNEAIIPSTPYDPLVLRNAFEKAVIKRLMTDVPFGVLLSGGLDSSLVASVTARYLAGTKAAKQWGAKLPSFCVGLKGAPDLKAGKEVADFLGTVHHEFEFTIQDGIDAIEDVIYHTETYDVTTIRAATPMFLMSRKIKSSGVKWVISGEGSDEIFGGYLYFHKAPNREEFHQETCRKIKALHRYDCLRANKSTYAWGLEARVPFLDKDFIKVAMDIDPEFKMIKHDEGRIEKWILRKAFDDEENPYLPKHILYRQKEQFSDGVGYGWIDGIKDHAAKHVTDRMMFNASHIFPFNTPNTKEAYYYRMIFERFFPQNSARLTVPGGPSVACSTEKAIEWDASWSNNLDPSGRAALGVHVSAYEHQINPVTKGVEPEKIIPKIGVSPLGVAIQT

SEQ ID NO: 5424 - protein, 583 aa, Pisum sativum
MCGILAVLGCSDPSRAKRVRVLELSRRLKHRGPEWSGLHQHGDCYLAQQRLAIVDPASGDQPLFNEDNPSIVTVNGEIYNHEDLRKQLSNHTFRTGSDCDVIAHLYEEYGEDFVDMLDGIFSFVPLDTRDNSYIVARDAIGVTSLYIGWGLDGSVWISSEMKGLNDDCEHFECFPPGHLYSSKDSGFRRWYNPSWYSEAIPSAPYDPLALRHAFEKAVVKRLMTDVPFGVLLSGGLDSSLVASITSRYLATTKAAEQWGSKLHSFCVGLEGSPDLKAGKEVADYLGTVHHEFTFTVQDGIDAIEDVIYHVETYDVTSIRASTPMFLMSRKIKSLGVKWVISGEGSDEIFGGYLYFHKAPNKEEFHEETCRKIKALHQYDCQRANKSTYAWGLEARVPFLDKAFINVAMNIDPENKMIKRDEGRIEKYILRKAFDDEENPYLPKHILYRQKEQFSDGVGYSWIDGLKAHAAKHVTDKMMLNAGNIFPHNTPNTKEAYYYRMIFERFFPQNSARLTVPGGPTVACSTAKAVEWDAAWSNNLDPSGRAALGVHDSAYENHNKVNKTVEFEKIIPLEAAPVELAIQG

SEQ ID NO: 5425 - protein, 396 aa, Methanosarcina barkeri
MAKKVALAYSGGLDTSVCIPILKEKYGYDEVVTISVDVGQPEEEIKRADAKAEKISNKHYTIDAKEEFVKDYVFPLIKANGSYEGYVMGTSIARPLIAKKVVEAARKEGAVALAHGCTGKGNDQLRFEAVFRQTDMDVIAPMREMNLTREWEIDYAKEHGIPVEVTKSKPWSVDENIWSRSIEGGRLEDPSFVPPEEIFEWTTSPEKAPEQPRVVDIGFEAGVPVSLDGEKMSGYAFVKKMNEIAGENGVGRTDMIEDRVLGLKARENYEHPAATVLRQPNSRPLRNSSLTRSELKFKKIVDDQWSELAYYGLVDEPLYADLNAFIDKSQERVTGIVKVRLYKGALTILARSSPNALYSEDLVSFDSQTIDQKGSEGFAKYHGFQARMYRKVMDKQ

SEQ ID NO: 5426 - protein, 397 aa, Methanococcus vannielii
MQEKIAVLAYSGGLDTSCCLKLLEDKYNYKVVSVAVDVGQPEDDLKEPEEKAKKLGVLKHYTIDAKEEFAVDYIFRAIKANALYEGYPLSTALARPLIAIKIAELAKEIGADAISHGCTGKGNDQFRFESVIRTKAPEIEIIAPVRDLNLTRTEEIQYAKEKGIPIPVDLEKPFSIDENLWGRSIEGGILENPMIETPKECFAWTVDPKIAKDEEEYVEIEFKAGVPVAINGQKFDAINVIKEANKLAGRNGVGRVDIIEDRVLGLKSRENYECPGAILLITAHKALEQLVLSREELVFKEMVDSKYADLIYKGLWHEPLRHDLDAFVDKTQERMNGIVRAKLYKGSLRIVGRESECALYQENMVSFENKDMDQREIVGMVKFHGLQAAIFESLRNK

SEQ ID NO: 5427 - protein, 243 aa, Arachis hypogaea
MGRGRVELKRIENKINRQVTFAKRRNGLLKKAYELSVLCDAEVALIIFSNRGKLYEFCSSSSMLKTLERCQKCNYGAPETNVSTREALELSSQQEYLKPKARYEALQRSQRNLMGEDLGPLSSKELESLERQLDSSLKLIRSTRTQFMLDQLSELQRKEHLLSEANRALRQRQLEGYQINPMQLNPGGVDDMGYARHPPQPQPDPLFQQLDCEPTLQIGYQPDPVSVVTAGPSMGNYMGGWLP

SEQ ID NO: 5428 - protein, 462 aa, Alkalilimnicola ehrlichei MLHE-1
MSLITISNRVALPSQLQGAQGGLAVGLRSALEDGGGLWFGWDGRHEPRLPDPRPLAVQNANGVRYATLRLTRAEYERFYLGFSNQVLWPLFHYRLPYVHCQRADREGYWAVNRLFADRLPDLPDAESPIWIHDYHFIPLGQMLRERGITNPLGFFLHTPFPAWDVYRALPDHQALLEALCAHDLVGFQTDLDRDNFLDCLRHTDAIEVIDTARARYRGRVVHIGVFPIGIDVDSVAAHARHGFYSQQGRRLQASLGDRRLIIGVDRLDYSKGLDIRFEAYRRMLERRREHRARVVYLQIAPISRGEVPEYDEIRRELEYQAGHLNCQFAEYDWAPLRYLNRGFHRANVLGFLSRAHVGLVTPMRDGMNLVAKEFVAAQDPDDPGVLVLSHLAGAARELDAAVLVNPYDPDEVAERLHQALTMPLAERRERWTRMIRCLREQDITCWRDDYLQALQTAAGASG

SEQ ID NO: 5429 - protein, 192 aa, Alkalilimnicola ehrlichei MLHE-1
MSHDCPAANRPPLVILDRDGVINQDSDAYIKAPEEWRVIPGSAEAIARLNRAGVPVAVCTNQSGIGRGLFDDATYRAITAHMHAVLARAGARIDAVFHCPHRPEDRCECRKPRPGLLLQAAAHFDCPLDGVPVIGDSLRDLEAGRAVNARPMLVRTGKGARTLAQGLPWAVAVYDDLAEAVAALIGEWGIAS

SEQ ID NO: 5430 - protein, 468 aa, Alkalilimnicola ehrlichei MLHE-1
MKEQASVWVVDDDRSIRWVLQKALERAGFKVTCFDTAERVLRALERNQPDVLLTDIRMPGVSGLDLLAQVGDRWPDMPVIVMTAHSDLDAAVASYEGGAFEYLPKPFDVDEAVELVTRARESTRTAEATEAAEAPAQHPEILGEAPAMQEVFRAIGRLSRSSVTVLINGESGTGKELVARALHRHSPRSEGPFIALNMAAIPRDLMESELFGHEKGAFTGAQATRRGRFEQADGGTLFLDEIGDMPAELQTRLLRVLADGEFYRVGAHTSMRVDVRIIAATHQNLEARVADGYFREDLFHRLNVIRVHVPSLRERREDVPLLARHFLAAAGRELNVEPKTLRPEVERYFMGLDWPGNVRQLENTCRWLTVMASGQEVLLEDLPPELREEAEAGRPGGGNWETALSRWVDQALARGQEGLLDELQPRFEVIMIRAALQRTGGRRQDAARLLGWGRNTLTRKIKELGMEL

SEQ ID NO: 5431 - protein, 416 aa, Alkalilimnicola ehrlichei MLHE-1
MEEIREISYALDTFYFLVSGALVMWMAAGFTMLEAGLVRSKNTTEILTKNISLYAIACIMYMVVGYNIMYGDGLSSVIPSISFILGASDNSAAAVAAGEASYYSDVSDFFFQVVFVATAMSIISGAVAERMKLWSFLLFAVVLTGFVYPIQGYWSWGEGFLDQLGYADYAGSGIVHMFGASAALAAVLVLGPRKGKYGPNGEVRPIPGANMPLATLGVFILWLGWFGFNGGSELKVSDVDSANAVALVFANTNLAAAGGVVAALVTARLMFGKADLTMALNGAIAGLVSITAGPDAPSLLLATFIGAVGGVLVVLSIVGLDKLKIDDPVGAISAHGTAGIWGVMAVLLWMDDASFFAQIAGILTIFAWTFGVSLVLWLILKAVMGIRVTEEEEQQGLDITECGIEAYPDFVQQSKT

SEQ ID NO: 5432 - protein, 631 aa, Alkalilimnicola ehrlichei MLHE-1
MCGITGIFDLQAQRPIDVPLLEAMNQTQYHRGPDEGGLHHEPGVGLAHRRLSIIDLSSGQQPLFNEDGSVAVTYNGEIYNFPELTRTLQSAGHTFRTHCDTEVIVHAWEEWGEACVERFRGMFAFALWDRNRETLFLARDRLGIKPLYYAALPDGHLLFASELKALMAHPDLPRQLDPCAVEEYFGFGYVPEPRSIFAGVHKLPPGHTLTVRRGQGGVPASRAYWDVPFAPLPAMGEAEAAEELVRRLREAVEIRLVAEVPLGAFLSGGVDSSAVVAMMAGLSPDPVRTCSIGFDDPRYDESEYARMVAERYRTAHRLDQVNPDDFDLLGKLGALYDEPFADSSALPTYRVCEQARRQVVVALSGDGGDENLAGYRRYRHHLGEERLRGLLPLGLRRGLFGSLARVYPKADWAPRVFRAKATFQALARDAVEGYFQGVSILRDDLRRHLFSSGFRSELQGYSAVDVLRRHAAQAPTDHPLSLVQYLDMKTYLPGDILTKVDRASMAHALEVRVPILDHKLVEWMSGLPPEMKLNGSEGKHLLKKAMEPHLPHEVLYRKKRGFAVPVAEWFRGPLRQRVRDQVLGPRIGESGLFDMDFLNRLVDEHTRGARDHSPALWSLLMFDEFLAKARP

SEQ ID NO: 5433 - protein, 229 aa, Alkalilimnicola ehrlichei MLHE-1
MLEIKGLNQYYGGSHILKGVDLAVEQGTCACLMGRNGMGKTTLLKCLMGLVPIADGSITFQGREISRLRPQQRARMGIGYVPQGREIFPQLTVEENLRVPLAGKRSRGIPERIFELFPVLKEMARRRGGDLSGGQQQQLAIGRALVLQPEILLLDEPNEGIQPNIVRQIGEVIRMLNREEGLTILLVEQKLPFARATGDHFTLLNNGRAVASGAMSQLSDELIQEHMTV

SEQ ID NO: 5434 - protein, 776 aa, Alkalilimnicola ehrlichei MLHE-1
MSDNFRDNALEYHEFPRPGKLQVVPTKPLANQRDLALAYSPGVAAACEEIVNDPQAASKYTARGNMVAVITNGTAVLGLGNIGPLASKPVMEGKGVLFKKFAGIDVFDIEINEQDPDKLTEIIASLEPTFGGINLEDIKAPECFQVESALRKRMNIPVFHDDQHGTAIITAAAVLNGLRVVDKKIEDVKLCCSGAGAAAIACLDILVSMGMNKENIFVADSKGIVYKGRKEYMDERKEGYARETSARTMKEVIEGADIFLGLSAPGVLSQAMVKQMADSPIIMALANPVPEILPELAKEARPDAIIATGRSDYPNQVNNVLCFPFIFRGALDVGATTINEEMKLAAVYAIADLAMAESSDVVTAAYGGKSLRFGPEYLIPRPFDPRLILKIAPAVARAATESGVATRPIEDFDAYHMELSQFVFQSGLVMKPIFERARTNPKRVVYTDGEEERVLRAVQVVVDDGLAKPILVGRRKVVEMRIKRLGLRLEIGKNVDLADPEDDPRYREYWQLYHSIMERRGVTPARARTIVRTRTTVIGALMVRRGEADALVGGSVGRYHRQIGHIENVIGRRAGVRNMAAMNVLILPKGTFFIVDTYVNHDPNAHQIAEMTTLAADEVRRFGITPKVALLSHSSFGTSNAESARKMRDALQLIRDADPGLDVEGEMHGDAAVSEEIRKRIFPNNELKGQANLLVMPTLDAANIAFNLLKVTTDGVSVGPILLGSARPAHILTPSSTVRAIVNMSALAAVEATMAEPEATHDEERDYSGYEDEEDV

SEQ ID NO: 5435 - protein, 318 aa, Alkalilimnicola ehrlichei MLHE-1
MNDNGRMMVFAGNSNPQLAESIAEHLKTRLGHAVVGRFSDGEIMVEVNEHVRGKDVFVVQSTCAPSNDNLMELLVIIDALRRSSAARITAVIPYFGYARQDRRPRSQRVPISARLVANMLEAAGVNRVLTVDLHADQIQGFFNIPVDNVYASPMLLGDIWRQLYPRKIVVSPDVGGVVRARAIAKRLDDADLAIIDKRRPRANESKVMNIIGDVQDKTCIIVDDMVDTAGTLCEAAKVLKDKGAFKVVAYITHPVLSGNAINRISESHLDELVVSNTIPLSSEAQSCDKIRQLSIADILAETMRRVSQDESVSELFVE

SEQ ID NO: 5436 - protein, 552 aa, Alkalilimnicola ehrlichei MLHE-1
MAVQAKSGLLKGMNPTVTVVTVVVMLVSVILGAGWTEQSAAAISTARETLNPFLEWYYVVLVAVFFVFCLWLGVGRYKNVRLGGDTERPEFTTFSWVAMLFAAGTGVGIIFWSIAEPIMHFDSNPFAADGSPESAAVAMRLTFFHWGLPGWAIFGLVGLVLAYFSFRHSLPLTVRSALYPFLGHRIHGPIGDLVDSLAVFGTVFGIATTLGLGVQQMNTGLGQLFGLDTTLTLQLGVTAVIMFIATASVVSGVKRGVRLLSEANFWLSVVIVLFFLIFGPTHYLFALTIESTGEYLQNLLAMTFYTHANKDTGWQAEWTVFFWGWWIAWSPFVGMFIARISRGRTVREFMLGVLLMPTVITFVWIGLFGGTALHQELFGDGGVVAAVSQDVSVAIFHTIEGMQLGLLGQAAGVLVTVLIATYLITSANAGTLVINTLLANGDTDPPTGHRILWGVVLALLTAVLLVAGGLETLQAAVILAGLPFSLVMVAMLLGLVKALEQERYAPRPGARTLAPTEPWVGMDQAGDTLHEPRGTAGAAGEYQPSARTGAEG

SEQ ID NO: 5437 - protein, 126 aa, Alkalilimnicola ehrlichei MLHE-1
MQLNMLKCKLHQACVTDTELDYEGSCAIDANLMDAAGIREFEQIHVYNLANGARFTTYAIRGEAGSRMISMNGAAAHLCSEGDRIIICCYANVDESELDRHEPALVYCDGDNRITHQRNGIPLQVA

SEQ ID NO: 5438 - protein, 109 aa, Alkalilimnicola ehrlichei MLHE-1
MDQVQETIAKQVKENPILLYMKGSPQQPQCGFSMRAAQALAGCGKEFAYVDVLQDEAIRQGIKEFGNWPTIPQLYLNGELVGGCDIIMEMYESGDLQKMVDQAAESASN

SEQ ID NO: 5439 - protein, 402 aa, Alkalilimnicola ehrlichei MLHE-1
MSDVKKVVLAYSGGLDTSVILQWLRETYDCEVVTFTADLGQGEELEPARKKAEAFGIKEIYIDDLREEFVRDFVFPMFRANAIYEGEYLLGTSIARPLIAKRQVEIARETGADAVSHGATGKGNDQVRFELGYYGLEPNIKVIAPWREWDLNSREKLLAYAEKHGISIEGKQSGGSPYSMDANLLHISYEGGVLEDTWTECEEAMWRWTRSPEAAPDEAQYIDIEFQGGDPVSIDGEKLSPAALLSRLNDLGAMHGVGRIDIVENRYVGMKSRGCYETPGGTILLRAHRAIESITLDRESAHLKDEVMPKYAELIYNGYWWSPEREAMQALIDATQRRVNGVVRLKLYKGNVIVVGRDSANDSLFDQTIATFEDDRGAYDQKDAEGFIRLNALRLRIAQRRG

SEQ ID NO: 5440 - protein, 385 aa, Alkalilimnicola ehrlichei MLHE-1
MSAPTPIYLDYNASTPIAPEVAKAMAPYLQEAYGNPSAGHWAGGPAREAVEQARRQVARLIGAAPDEIVFTSGGSEANNHAIKGTWYATEGPFHIITTAVEHPATLVPCRFLESLGASLTVLPVDRYGQVNPDAVQAAITPETRLISVMHANNEVGTLQPVEAIGRIARDHGVRFHVDAAQSAGKVPINVQAMGVDLLSLAGHKFYGPKGIGALYVRRGIDLTPLIHGAGHEGGRRAGTESALLATGLGTAAEKARDLSPMARVQALRDRLWTGLKGHFGDTLCLNGHPQARLPNTLNVAFADCVGAAILDRLDGVAASTGSACHAGSVTLSPVLAAMGVPERVGMGALRFSLGRWTTEQEIDEVIARLARAVPQARAATTQEPS

SEQ ID NO: 5441 - protein, 395 aa, Alkalilimnicola ehrlichei MLHE-1
MSDREVVVLSAARSAIGTFGGTLAGFEPADLGGLIIKEAVARSGVDPNQINYTTVGNCIPTESRSPYVARVAAVQGGLPHNSTAVTVNRLCGSGMQAIVSTAQSILLGDADFGVGAGTEVMSKGGYLTPSARFGARMGDAKMVDMMVATLTDPFGVGHMGITAENLAEKWNISREEQDQFAAESQRRAQAAIEGGYFKDQIVPVTIKSRKGEKVFDTDEHPRFGVTVEDLAKMRPAFKKEGGTVTAGNASGINDAAAALVLADRAAAEKAGHKPVARMVAYGIAGVPNDIMGEGPIPSSKVALDKAGLSIEDMDVVESNEAFAAQALTVMKGLGLDPAKTNVNGGAIALGHPVGATGSILAVKAIHELHRIQGKYALVTMCIGGGQGITAIFERM

SEQ ID NO: 5442 - protein, 249 aa, Alkalilimnicola ehrlichei MLHE-1
MLKIRNLHARVEDTEILKGVNLEIGEGEVHAIMGPNGSGKSTLSKVLAGDENYEVTAGEVLFRGKDLLELEPEERAGEGVFLGFQYPVEVPGVSNVYFLKTAINSVRKYRGEPELSAIEVLRHIKDAAKMVKMGDELVNRPVNEGFSGGEKKRNEIFQMAALAPHMAILDETDSGLDIDALRIVSEGVNSMRHPHRSFLLITHYQRLLNYIKPDHVHVMLDGKIVKSGDYTLALELEESGYALFGENAA

SEQ ID NO: 5443 - protein, 574 aa, Alkalilimnicola ehrlichei MLHE-1
MAKDNEPQPSDNQQSITNSGEMASVGVPAPEGPANLIDTDYVIGQDNITGQIRLNLDIHGKVFAISALVTVFFVVLTLALQDEVAPLFEATRVWLTSNLAWFFLLAGNIFVLVCLALIFSPLGRVRIGGAEATPDFSYLGWFSMLFAAGMGIGLMFFAVSEPISHFGTAMGGIALEDGARTDWAPLGAAEGNTEAAIRLGMAATIFHWGLHPWAIYAVVALALAIFAYNKGLPLTVRSIFYPLLGERVWGWPGHLIDMLAVFATLFGLATSLGLGAQQASAGLSHLFGIPEGNLTMVLLILGITAVAIVSIVAGVDKGVKRLSEINMFVAGLLMFFVIFVGPTLLIFTGVFQNLMAYLVNLPALSMPFGREDSNFTEGWTAFYWAWWISWSPFVGMFIARVSRGRSVREFLIAVLLVPSMVSVLWMTAFGATAIDQVVNQGFEGVREAALELQLFVMLGELPLAQITSFVGILLVVVFFITSSDSGSLVIDTITSGGKVDAPKPQRVFWAIIEGLIAIALLIGGGLAALQAMAISTGLPFTLVLLVGCYAIFKGLMSEPRGLPEPEEGQKEPSR

SEQ ID NO: 5444 - protein, 104 aa, Alkalilimnicola ehrlichei MLHE-1
MYAVIKTGGKQYKVSEGDVLRVEKLAGEAGASVEFDQVLMVGEGDDVKVGAPTVEGGKVTAEVLGQGRARKIEIQKFKRRKQYRRFAGHRQQFTEVKITGISAG

SEQ ID NO: 5445 - protein, 358 aa, Alkalilimnicola ehrlichei MLHE-1
MKFVDEVTIRVEGGDGGDGCASFRREKYIPRGGPDGGDGGHGGSVWLRADEGLNTLADFRHERKFTAQRGENGMGKQRYGKSGQDREIAVPVGTLVSDADTGELIGELLEHGQRLLVARGGKGGLGNVHFKSSTNRAPRQYTPGTKADRRNLHLELRLLADVGLLGMPNAGKSTLVRAISSARPRVADYPFTTLYPNLGVVSVGAARSFVVADIPGLIEGAAEGAGLGIQFLKHLGRTRLVLHVIDAVPLDPAQDPVDDARKIVAELGRYSESLAARERWLVLNKLDLLPEEDRDAHVNDLLQRLQWGGPVYRISALSGDGTRQLAQDVMNRLEVMDEEAREAGERARREQRQEEGPE

SEQ ID NO: 5446 - protein, 417 aa, Alkalilimnicola ehrlichei MLHE-1
MGRRSPVIRSRCIGGSGMVADPVELEYSETPEPMWNPALRALPIPGIRRMVNMAAEMDDVIHLSIGQPDFPVPDHVIEAHIDALRHGQTGYTMDAGLPELLETIAEYYADRYQRPIAPENVLVTTGATEAIYLALAATAAPGRQFLVPDPSFPLYAPLIRMNGGEVKAIPTRAENGHQLDPQEVIDNIGMRTFGIILNSPSNPTGTVYPRETVEAIVQEAAYRGVYVYSDEVYDHLLLDDLQYASVLNCTSDLDHVMMMSSFSKTYSMSGLRIGWIISSQGAIKKLRRFHIFTTTVANTPAQWAGVAALRGEKTCLDSMVAEYRRRRDRVVQLVSDAPHLTGYWPQGAFYIFPSLPPNTDATTVAIRMLQETGVCVVPGDAFGDSCPNSLRISFSASMDDIEEAFERVIPWLAKQRF

SEQ ID NO: 5447 - protein, 235 aa, Alkalilimnicola ehrlichei MLHE-1
MVTTNVIRLHEDLETSPLFSGLAERQVSEVISRGHRRVVPGGGTLFNCGEPADQFFLVVEGAVKLFRAMSNGHVVVVRIIRPGEPFAACSVVGRPDATYPVTARAWMDVTVLAWSRGTMSSELRRLPTLQYNLLQLVSQYQDQTVDRLCESSTQPVAQRLAHCLLRLADQASIPTTDGLQLRDPLTRQELAEFCGTTLHTVSRLLAQWERDGLVRVGRCRVTLASTKRLQLLSMQ

SEQ ID NO: 5448 - protein, 392 aa, Alkalilimnicola ehrlichei MLHE-1
MDIKLANRVQRVKPSPTLAVTAKAAELRAAGKDIIGLGAGEPDFDTPEHIRDAAITAINEGETRYTPVDGTPALKKAVINKFKRENGLDYDGKQVLVSSGAKHSLYNLMCALLNEGDEVIIPAPYWVSYPDMAKLADAEPVIIEAGQEQGFKITPEQLEGAITDRTRLFVINSPSNPTGSAYSKAELAALGEVLKKHPQIVVVTDDIYEHILFEGEFVNIVNACPELKDRTVVVNGVSKAYAMTGWRVGYAAGPEALIGAMKKIQSQSTSNPASVSQAASVAALDGDQGCIPPMLEQFKKRHDFVVDALNKIDGVECRPCEGTFYCFPNMQGAIDKLDGVGNDVELAGFLLEQGVALVPGSAFGLEGYARISFATSMENLEKAMERIAKALG

SEQ ID NO: 5449 - protein, 551 aa, Alkalilimnicola ehrlichei MLHE-1
MYQYTDEDYALVRERVDEFRDQTRRHLAGELSEDDYRPLRLMNGLYIQRLGPMLRIAIPYGTLSVRQLRALAEVARRYDRGLGHFTTRQNLQLHHLKLEDVPEVLADLAGVEMHAIQTSGNCIRNVTSDQMAGVAPDEVDDPRPWCELIRQWANLHPEFSYLPRKFKIAVSGARHDRAAVQVHDIGLRLVSGTGHAARFEVWVGGGLGRTPVIAQRLRTDLPGEQLLPYLEAILRIYNRLGRRDNKYKARIKILVRELGLARFRDLVETEYATMEKAPLRISESRYRAVAGHFDRPPVSAPAADEQGLEAQAAEEPAFGHWLRWNTELQRQPGVRAVTVCLKGGERQPGDITSDEMDAVADLAERFGQGEIRSTHHQNLVLPDIPAGDLREVWRTLAARGLAHPVVGTVSDVICCPGWKYCNLANAESIPVALAVQAELDELDYLHDLGEVRLNISGCMNACGHHHVGHIGILGVEKRGKPWYQIQLGGSSAGEVSLGKVLGPAVPQEQVAPVVGSLMARYVALREGDERFLDTVRRVGLAPFKEVLHAAA

SEQ ID NO: 5450 - protein, 323 aa, Alkalilimnicola ehrlichei MLHE-1
MEDTQPAGRSLEHMPIPLFATVMGTAGLTLAWRAAEQAWGWSAAISTTLTAVVVLLFLFLSAAYSLKFIRYREAVKAEFHHPVKMNFFPAISISLVLVAMLLQPHVTWLAGLLWLGGAALHITFTLVVMGIWIGQRPFQIAHINPAWFIPVVGNVLMPLAGVPLGFVELSWFFFSVGVVFWLVLMTLMFYRFIFHDPLPERLLPTLAILLAPPAVGFLAWTHLNGGEINAMGRILYYTGAFIFLLLVLRARGFGRLPFFLSWWAYSFPVAAFAIATVTMAGMVPSTFLAIAGALLVLLTTVLVIALVVMTLKAARAGKICVPE

SEQ ID NO: 5451 - protein, 586 aa, Alkalilimnicola ehrlichei MLHE-1
MAVQAKHNGGAAHWLPLLGWLRAYRPEYLAGDLIAGAVVAVMLVPQAMAYAMLANLPPHVGLYASIIPPVAYALFASSRALAVGPVAIVSLMVASVAGAVAAPGSAEHLGAAVVLALLSGIVLLVMGMARLGFVTQFLSHPVLSGFITAAAVLIGFSQLRHVLGVEGGGDNLPAMVVALWQSLGQVNGVTLAIGLTSIGLLLWMQGPLKGLLVRSGLSAPVAGIAVKTAPLVVVVLGSLAVALPGLDEHFGVSVVGRVPEGLPDFALPAVDLPLWRELVWGAVLIALVGFLESASVAKSLAARDRERIDPDRELKGLGLANIGASLSGGYPVTGGISRSVVNYSAGARTPMAGVLSALLIVLVLLFLTPWLAWLPHASLAAIILVAVVGLVDLHTPRRIWQYSRSEAVTLLTTAAVVLVVGVEAGIVVGVLLSLGLYLWRTSRPHMAVVGRVPGTEHYRNVERHKVETDPRVLLVRVDESLYFPNTRYLEDRLQELVWGRDGVEHVVLICSAVNFIDASALESLEELAGQFADSGVTLHLAEVKGPVMDGLEQAGFTRHLRGGRVFLSTHEAMKALGPRRRWVVPT

SEQ ID NO: 5452 - protein, 315 aa, Alkalilimnicola ehrlichei MLHE-1
MSDEPRPAEGQPAGLSDELPLIRCGHVALVGRPNVGKSTLLNQLLGQKISIVTRKPQTTRQRILGVCHRDGAQIVYVDTPGLHQRRDKALNRYLNRTAANALADVDLVVFLVDRLHFKPEDEAVLERLKRRDVPVILAINKVDRLRDKAQLLPHIQWLSEQHPFVEVVPLSALKGENLAPLEEAILRQLPESPPLFPEDYITDRGPRFRIAELIREQLMRHLGEELPYATAVEVEAMDQEGQLTRISALIWVERPGQKAIVIGDGGQRLKVIGSRARQEIQQLLGGRVFLQLWVKVREGWSDDERALQSLGYEGD

SEQ ID NO: 5453 - protein, 598 aa, Alkalilimnicola ehrlichei MLHE-1
MTVAGPKRLEALRPLLAFLRRYRLRVTAAVAALLVAAGSVLTLGQALRLVVDRGFLGEDPAELNRLLLLAMTVILIMALASALRYYLVSWIGERVAADLRTAVFDHVTHLEPAFFELNGVGEIQSRLTTDTSVLQTILGSSFSIAVRNLLLLAGAVVMLFITSPRLTAFVLLSLPLVLIPILYFGRRVRRLSRASQDRVADVGSYAGETLHAIRTVQAFGHEAADRRRFRRHVDAAFATAVRRVRQRAWLVGMAMMLAFTAVGIILWQGGHDVLAGRMSAGELAAFVFYAVLAAGATGAVSEVVGELYRAAGATERLTELLRNQPRIRAPARPVPPPQPLRGAISLEGVAFAYPGRPQQRVLDRVDLRVAAGERVALVGPSGAGKSTVFALLLRFYDPIEGRVCLDGVDLKAMDPKAVRAAIGLVAQEPTLFTGTAWENIRYGREDADDADVRRAAEAAHCTEFLQQLPEGFDTPLGPGGVQLSGGQRQRIAIARAILRDPALLLLDEATSNLDADSEARIQSALEDLMRERTSLVIAHRLATVQSADRIVVMQSGRIQAEGSHRQLLRDSPLYAHLAALQFGSDPDGGSPGAAQPVG

SEQ ID NO: 5454 - protein, 689 aa, Alkalilimnicola ehrlichei MLHE-1
MLATPGAPVNPRVFLPAAAVVLALVMGGALWTEPLGRGFESLHQMLIQHFGWVYTTVVALLLGFVLAVLLHPRFRRLRLGPPDSRPEYTYLSWFAMLFSAGMGIGLLFYGVAEPLLHYLEPPHGEGGTAAAADEALRLTFFHWGLHPWAIYIIVALALAFFSYRHDLPLSMRAALYPLIGHRINGPAGDLMDSLAVVGTVLGVATSLGLGVMQVNAGLAHVGLMAVSVHNQILLIVFIMAIATLSVLSGLNNGIRIISRANLFLGSLLLLFVFAAGPTVMMLYGLLQAVGHYVQGLVALTLRTDVFHGQGWQASWTLFYWAWWISWCPFVGMFIARVSRGRTVGEFILGTLLVPTGFTFLWMTVFGVSALEQEMRAGELGSIVQADVAQALFAMLEAMPLATLTVPLATLVIIGYFVTSADSGALVMNILSSGGNPNPPLLLKLFWSLLTGAAAAVLLLAGGLQALQTATLTAALPLSLVLLLMAWGLWTAFRADAAQVEEIGTMPEPGLDRLSRYLRERRARALPPGEAAGLHAPGRWLQLWPRRVQHWLLRRERFKDRQRAAEVLDEAEEAVRRCLDETVYPALQAVAEELNREGHPIHAERTRDGAQLCVTGEHGMHPIYVAQGRVYQRPQFAFPALHGRPERPRLATVHVTSDGLSREWSVDHCERDTLYADALRECRKWLDWWR

SEQ ID NO: 5455 - protein, 319 aa, Alkalilimnicola ehrlichei MLHE-1
MRSAFLDRDSLDQGDLDLAPLEQALPDLRHYERTGAHEVADRIADLNAVVVNKVVLDEAALAAAPDLRLILVAATGTNNVDLAAARQRGITVCNCRGYGTDAVAQHTLGLMLALSTRLLDYHNAVQAGEWGRSEQFCLLDYPIQELSGRTLGLVGHGELGQRVAELARALGMTVKVAARPGGGPPALGRVPLEQLLPQVDVLTLHCPLTDATRNLIGAEALQRLPRHALLINCARGGIVDEQALADALRAGEIGGAGVDVLSEEPPVNGNPLLAGDIPNLIVTPHSAWGSREARQRIVMQLAEAARGYLDGHPVRVVSE

SEQ ID NO: 5456 - protein, 416 aa, Alkalilimnicola ehrlichei MLHE-1
MALIVQKYGGTSVGTTERIKNVARRVQASRERGDDVVVVVSAMSGETNRLLALAEEIGPNPPAREVDVLVSTGEQVTIALLTMALESIGTPARCYTGPQVRILTDSAHSRARILDIDAKQINDDLRLGRVVVVAGFQGVDESGAITTLGRGGSDTTAVAIAAALKADECQIYTDVDGVYTTDPRVVPKARRLERITVEEMLELASLGSKVLQIRSVEFAGKYKVPLRVLSSFKEGPGTLITYEENPMEEPLISGIAFNRDEAKLTVLGAPDVPGIAASILGPISDAGIEVDMIIQNVSTSGATDFTFTVHKRDYEQALKILQDNKDKLGAREIYGDPKIVKLSLVGVGMRSHAGVASTMFKALSAEGINIQMISTSEIKISVVVDEKYLELGVRTLHTAFGLDDENAQVEVEGDNA

SEQ ID NO: 5457 - protein, 199 aa, Alkalilimnicola ehrlichei MLHE-1
MCGAGVDLSECLARCLEQADLPESGFLEFKGRATPAAVLVPLLPGPGGYRVVFTRRSEQLREHAGQVSFPGGRKEPGETAERTALREAWEEIGLEPDRVTLLGRLGPYHTGTGFRVRPVVGRIEPPVVWRPDPQEVAEVFTVPLSFLTDPANHGLYETERQGRRLTYHALTWGEHFIWGATAGILMQFCRVLEGTRESA

SEQ ID NO: 5458 - protein, 427 aa, Alkalilimnicola ehrlichei MLHE-1
MSFDSLGLSAVLLRAVAEQGYSKPTPVQAQAIPAILQGGDVMAAAQTGTGKTAGFTLPMLERLSQNRPEGGRRRVRALILTPTRELAAQVRDSVKTYGGKLPLKTAVIFGGVGMNPQIQTLRRGVDIVVATPGRLLDHMGQGTVDLSGVEMLVLDEADRMLDMGFIRDIRRVIAAVPKQRQTLMFSATFSKEIRQLAEGMLRNPTQIEVAARNTAAENVNQRVHPVSRGEKRALLSNLIQDGDWRQVLVFTRTKHGADRLARQLDQDGLSSAAIHGNKSQSARTKALAQFKQGRVRVLVATDIAARGLDIDQLPHVVNYELPNVPEDYVHRIGRTGRAGRGGEALSLVCVDEHKLLDGIHKLLKRPIDQHIVPGFEPDPSERPQPLFKKPAGRGAGGGRRPNGAPAGNRPQGGRRRGGRPGQSARQG

SEQ ID NO: 5459 - protein, 584 aa, Alkalilimnicola ehrlichei MLHE-1
MLKRLLPFLAWPRPTADTLKADLLAGVTVALVLVPQSMAYATLAGMPPYYGLYAAFLPVIVAALWGSSPQLATGPVAVVALLTAAALAPLAEAGSGEFITLAIALAFMVGVIQLLLGAFRLGTLVNFISHPVIIGFTNAAAIVIVLSQLGSLLGLSMDRSGSFLLGVLDLLQRVPQAHGPTVLMGLAAIAMMVGCKRWLPRIPGVLLAVAVLTPVSLWLDFEGMGGAVVGGIPEGLPTLGIPELGVTTVTTLMTTALVIALVAFMEAISIAKAIATRTRDRIDPNQELIGQGLGNLVGSFSSAFPVSGSFSRSAVNYNAGARTGLSSVITGLLVALTLLFLTPLLYHLPLAVLAAIIMMAVLGLVNVKAVRHAWQAKRDDGIAAVVTFSATLIFAPHLDYGILLGAGLAIVLYLLRTMKPRVVLLARHPDGTLRDAEYFDLPRSPYIAAVRFDGDLYFANVGYFEDAILDARARHPEARFVLVVANGINQIDASGEETLHKLAENLHASGSTLVLAGLKLPLQELLERTGLKEVIGDENIYRNERHALAAIYQRMDVPGFDPARCPLNPEPAGEAGIADSAAER

SEQ ID NO: 5460 - protein, 467 aa, Alkalilimnicola ehrlichei MLHE-1
MDKDHEKRLNRRSFLKTGGLLSGAALMGMVAPGVRTGAWAGGSDGLEVTRVALGFIPLTDCAPLVIAREKGFFQAHGLDVQVSKEASWANIRDKVSVGALDGGHMLAGMPIASTLGVGATRTPMVTGFSMDLNGNAITVSNALYDRMMEADPEAMQERPITARALKKVIDQDKAAGRAPLTFAMVFPVSTHNYELRYWMAAAGINPDEDVRLVVIPPPQMVANLRARNMDGYCVGEPWNMRAVDMGIGKVLVTNYEIWNNNPEKVLGLTEEWVEKHPNTHRALLQALIQTNKWMDEPENREEVVDIISRRAYVNAPPHVVGMSMKGTLQFQRDEKPRPFPDFNVFHRYAATYPWRSHAVWFLTQMVRWGQLREPEDLLKVAERVYRPDLYREAARAVGEPYPTIDYKSEGTRDKPWTLQEASHPIEMGPDRFLDGRTFDPRDVMAYLEGFDVHSRALSLPQLAELNG

SEQ ID NO: 5461 - protein, 325 aa, Alkalilimnicola ehrlichei MLHE-1
MKLFALNASRDFGARVAEALGSPLAEHEEREFEDGEHKARPLTGVRGEDVYVLQSLHGDPAQGVNERLARLLFFLATVRQAGAARVTAVIPYLAYARKDRQTKPRDPVTTRYLAQLLEAMGIDAVITLEVHNRAAFQNAFRCQAHPLDTRRLFAAHIRGRCENDPVVVASPDPGGVKRAQGFQETLAALLDRPVGAAFVEKRRSEGVVSGEALVGDVAGASVWLMDDLISSGGTLARAAAACRRQGAARVVGLAAHGLFTGDAGRVLSDSALERILITDTVPPDRLDPAVAEQRLEIVSAAPLFAEAIRRTHKGGSLTELLEGPG

SEQ ID NO: 5462 - protein, 671 aa, Alkalilimnicola ehrlichei MLHE-1
MAARRRAGAGSTDNSIQEHFMSKIIGIDLGTTNSCVAVMDGGSTRVIENSEGDRTTPSVVAFAEDGEVLTGAPAKRQAVTNPENTVFAVKRLIGRRFEEDVVQRDVREMPYKIVKADNGDAWVEVRGKKMAPPEISARTLQKMKKTAEDYLGETVTEAVITVPAYFNDSQRQATKDAGKIAGLEVKRIINEPTAAALAYGLDKKGGDRKVAVYDLGGGTFDISIIEIAEVDGEHQFEVLATNGDTFLGGEDFDRAVIDYLIAEFKKDQGIDLGGDRLAMQRLKEAAEKAKIELSSAQQTEVNLPYITADQAGPKHLAIKLTRAKLESLVEGLIKRTIEPCKVALKDAGLSASDVDEVILVGGQTRMPKVQEAVTQFFGKEPRKDVNPDEAVAVGAAIQGGVLGGDVKDVLLLDVTPLSLGIETLGGVMTKLIEKNTTIPTKASQTFSTAEDNQGAVTVHVLQGEREMAKDNKSLGRFDLTDIPPAPRGVPQIEVTFDIDANGILHVSAKDKATGKENKIVIKASSGLSEEEIENMVKDAEAHAEEDRKARELVEARNQADNMIHATNKSLSEFGDKIDSGEKQSIEEAIKELEEAMKGDDKEAIEAKTQQLAERSGKLAEKMYAAQGGEEAAEQAAGGEQQQAGGSGKSEDDVVDAEFEEVKDQDEDKDRK

SEQ ID NO: 5463 - protein, 639 aa, Alkalilimnicola ehrlichei MLHE-1
MAKNLILWIIIAVVLMSVFSNFQERGAPGPEQMKYSEFLRHVEAGEVREVMIQGDKITVERADGTRAHTYNPESDNRALIGTLLEHDVTIDAREPEGRNMLVQILISWFPFLLLIAVWIYFMRQMQGGGAGRGAMSFGKSKAKLMTEEQSKVTFNDVAGCDEAKDDVAELVDFLRDPSKFQRLGGTIPRGVLMVGPPGTGKTLLAKAIAGEAKVPFFSISGSDFVEMFVGVGASRVRDMFSQAKKHSPCIIFIDEIDAVGRQRGAGLGGGHDEREQTLNQLLVEMDGFEGNEGVIVIAATNRPDVLDPALLRPGRFDRQVVVPLPDVRGREHILKVHMKKVPLDDDVTPAILARGTPGFSGADLANLVNEAALFAARANKRVVDQEDFEKAKDKIMMGSERKSMVMKEDEKRLTAYHEAGHAIVGLVTPEHDPVHKVTIIPRGRALGVTMFLPEEDRYSYTKQRLNSMIASLFGGRIAEELIFGHERVTTGASNDIQRATEIARNMVTKWGLSARLGPLAYGDEEGEVFLGHSVTQHKDVSEETQHAIDEEVRAIIDANYTAAEKIIREHMDQLHVMADALMRYETIDRAQIDDIMAGREPRPPKGWSGPSDDDDDRAEGEKVGKDERGRIGGPATSEH

SEQ ID NO: 5464 - protein, 438 aa, Alkalilimnicola ehrlichei MLHE-1
MKNEHLSNTRFDTLGLHDALMDGIKRAGFEYCTPIQAATLPKALEGRDIAGQAQTGTGKSAAFLLAAMHRLMTVPVEEGKEGPWTLILAPTRELALQIHRDALQLGRYTGLKCAAIYGGTGYEAQRQQLQEGVDIIIGTPGRVIDFFKQRIFHLKHIEVVILDEADRMFDLGFIADIRYLMRRMPEPSKRMNMLFSATLSHRVMELAYEHLNDPEVVRIESEQITADKVRQKLYHVSKDEKIPLLLGLIRQEEAMNRSIIFVNTKRAADRVTGYLLGNDIEAAVISGDIPQKKRESLLKRFQDGELRFLVATDVAARGLHIEDVSHVINYDLPQDPEDYVHRIGRTARAGASGDAISFACEEYVFSLPDIESFIEQRIPAEMPSPEMMVEPKPPKRIQRSRPGGKGGRGRPGGAGNRRRSGNDRRGGNNGSNGSGGNN

SEQ ID NO: 5465 - protein, 396 aa, Alkalilimnicola ehrlichei MLHE-1
MTETVYIVAAQRTPVGKAPRGAFRHTRPDDLLAHVIRGAVDRCPGLDPAEIADVIVGCAMPEGSQGLNVARIGALLAGLPDRVPGYTVNRFCASGLQAVALAADRIRLGEADVVVAGGTESMSQVPMMGHKPQFNPALFQDDPHRAIAYGMGITAEKVAERWGVGREAQDAFALRSHQRAVAATEAGHFRDEILPYTVRESVLDPQGGAVALQERVVDSDEGPRPETSAEALAKLKPSFAARGSVTPGNSSQMSDGAGAVVLMSERRVSALGLTPLARFVGFSVAGVAPEIMGIGPVEAVPRVLRQAGLRAADVDWVELNEAFAAQSLAVMRDLELDPERINPQGGAIALGHPLGATGAIRTATLVHGLRRTGGRYGLVTMCVGTGMGAAGLFERM

SEQ ID NO: 5466 - protein, 341 aa, Alkalilimnicola ehrlichei MLHE-1
MNAQKTLVERQRRQPGEPASDERFRALGQAVLELEADAVRTLTERVDATFVRACRHMLACRGRVVVTGMGKSGHIAGKIAATLASTGTPAFFVHPGEASHGDLGMITRDDVVLALSNSGETNEITTILPLIRRLHVPLIALTGNPDSTLARAADDHLDVSVAQEACPLGLAPTASTTASLAMGDALAIALLEARGFTADDFARSHPGGRLGRRLLLLVEDVMHTGTRIPRVGEDTPLAEALLEITRKGLGMTAIVDGDDRILGVFTDGDLRRCLDQGLDIHRLRVGEVMTRGGRTVRPDALAAEALELMESHRINALLVTDDGQRLLGALNMHDLLRAGVV

SEQ ID NO: 5467 - protein, 639 aa, Alkalilimnicola ehrlichei MLHE-1
MCGITGFWGGPAVDEGIAGRMAARIASRGPDDAGAWRDVKAGVALAHRRLSVIELSPAGHQPMRSPCGRYTLVYNGEIYNHLDLRVALETAGGAPDWRGYSDTETLLAALAHWGVPETLTRLNGMFAFALWDNREATLFLARDRMGEKPLYYGRNGGTFLFGSELKALTAYPGWQGQVDRDALALYLRYNHVPAPRSIYRGIGKLPPAHYVAVRDGGRNVGEPQCYWSLGEIAEQGVMQAGGSAHELADELDGLLRDAVGRRMAADVPLGSFLSGGFDSSMVAAQMQAQSERPVKTFSIGFHEAGYNEADHARAVATHLGTDHTELYITPEEAMAVIPELPAIFDEPFGDSSQIPTYLVSRMAREHVTVSLSGDGGDELFGGYNRHVVGPALWGRLARLPAPLRRGLGRAVGVAARIDRLPGAGRVPQLGEKLDKLASAMRASGGTAFYKDLLSHWKTPATVVRGASEPASLPDRIEAMPNLPGLRERMLYLDMMTYLPDDILTKVDRASMAVSLEARVPLLDHRLVAFAWRVPTDYKVRDGQGKWLFRRVLDRYVPRALMERPKMGFAVPIEHWLRGPLRDWAEVLLDERRLEREGFFHPAPIRRMWAEHLSGRRRHHAPLWNVLMFQAWSERQERIG

SEQ ID NO: 5468 - protein, 393 aa, Alkalilimnicola ehrlichei MLHE-1
MTQALLVINAGSSSIKFALYTVAGGAPTPCYRGQADGLGASIGSLQIKDDQGKRLLHEELPESDGHDEALDRALSWLEERLEGHDLIGAGHRVVHGGPEFSHPVRITDDILERLDGFCELAPLHQPHNLRAIHAVARVRPHLPQVACFDTAVHRQQPRVAQRFALPRQYENKGVLRYGFHGLSYEYIASVLPDHDRQAAEGRTIVAHLGNGASMCALHGGQSVASTMGFTALDGLPMGQRCGNIDPGVILYLLQNEGMNAAEIEDLLYRRSGLLGLSGISADMRQLLESDRREAAEAVEYYVYRAVREVGSLTAALGGLDALVFTAGIGENAAPVRAAICEQLGWLGITLDREANAHNAGRITTTDSRIPAYIIPTNEELMIARHTLRTLDPA

SEQ ID NO: 5469 - protein, 352 aa, Alkalilimnicola ehrlichei MLHE-1
MSANAETVTQGVQGVHRVTLRFADDVEHRVEVAPGQSVLAAALAQGVPLISQCESGSCGTCVARVCDGDVRMNSKKQTALLSSEREEGYRLTCQAFAEADSVLELDYPSTLGEQTPEQSEAEITELEWLSSNVVRLALTLPEDQTFEFWPGQYARLRIPGTEDWRSYSMSSAPGEAPRVEFLIRILESGAMSDYLRERAAVGDHIEVEGPHGAFYLREPEGPLVMVAGGTGLAPMMAMLDTVRVQGSRAPKTLLSFGCATPDNLFHGDELELRCFWMSKLEVRTSVDQAPEGYAGRIGTPVDALQAADVAAPGTTAYLCGPPPMIEAARARLIELGLPADRIFAEQFTPSAE

SEQ ID NO: 5470 - protein, 342 aa, Alkalilimnicola ehrlichei MLHE-1
MSYKVLIEPTGHEFTVEPGEAVLTAALRHGLILPYSCRSGTCGACMGKVVSGEVTYPEGRPEALSDTEEAVGQALFCQAQPNTDLSIEVRELREAGELTPRTMPTRVVRIEDLAHDVRRLWLKLPQNERLQYLAGQYIDVLLRDGRRRGFSLANPPHDDELLEVHVRHVPGGEFTGYVFNELKEKALLRIEGPLGTFSLDEESDRPIIMLAGGTGFAPIKAMVEHAIYVGIQRPIHIYWGVRARRDLYLDGLPRRWASEHDHIHYVPVLSEPRPDDRWEGRVGLVHNVLLQDIPVLSRYEVYAAGPPAMIAAARRDLVAHGLPEDRFFYDAFEYSRDRPGAE

SEQ ID NO: 5471 - protein, 69 aa, Alkalilimnicola ehrlichei MLHE-1
MAERETGTVKWFDNAKGFGFIQREQGEDVFVHFRAIRGEGFRSLDEGQQVEFNVVRGPKGLQAEDVAAV

SEQ ID NO: 5472 - protein, 864 aa, Alkalilimnicola ehrlichei MLHE-1
MRQDKLTTKFQMAIADAQSLALGRDHQMIEPVHLMAALLDQEGGVGQLLSRAGVNINQLRTEMGRALDRLPTVEGSAGEVHVSNELGRLLNLTDKLAQKRKDQYISSELFVLAAVTDKGQLGELLRGAGATKEAVEKAIEELRGGQSVDDPNAEDQRQSLEKYTIDLTERAEQGKLDPVIGRDEEIRRTIQVLSRRTKNNPVLIGEPGVGKTAIAEGLANRIINGEVPEGLKTKRILSLDMAALIAGAKYRGEFEERLKAVLKDLAKQEGQIILFIDEIHTIVGAGKAEGAMDAGNMLKPALARGELHCIGATTLDEYRKHIEKDAALERRFQKVLVDEPSVEDTVAILRGLKERYEVHHGVEITDPAIVAAAQLSHRYITDRQLPDKAIDLVDEAASRIKMEIDSKPEEMDRLERRLIQLKIEREALAKEEDDASRKRLDALEGEINELEDEYKALEEIWNSEKAAVEGTQSIKEQLERARQELDTARRAGDLGRMSELQYGRIPELERQLDLALQAEMHDTQLLRTSVGTEEIAEVVSRWTGIPVSKMLEGERDKLLRMEEEIRKRVVGQDEAVAAVANAIRRSRAGLSDPNRPNGSFLFLGPTGVGKTELCKALASFLFDTEEAMIRVDMSEFMEKHAVARLIGAPPGYVGYEEGGYLTEHVRRKPYSVILLDEVEKAHADVFNVLLQVLDDGRLTDSHGRTVDFRNTVIVMTSNLGSDVIQQMAGEEHYQEMRSAVMEIVGTHFRPEFINRVDEVVVFHPLGREHIRSITDIQLRQLNARLADKELTLEVSDAAKDQLGEAGFDPVYGARPLKRVLQQRLENALAQRILRGEFMPGDSIRVDTEGDGLAFTKGAPAVSEA

SEQ ID NO: 5473 - protein, 295 aa, Alkalilimnicola ehrlichei MLHE-1
MKAGVIGLGAMGAGMAANLARQGLLAAVWNRTYDKAVDFAGRHGVAAAADAPTVAAQCDVIITCVSADADVLEVVDAMLPELGEGKVVVDTSTVSADTAREAARRVAETGARFLDAPVSGGKEGAEKATMVMMVGGDEATLEQVRPVLSAISRSATHMGPSGAGQVTKAVNQIMVAGIIQGVTEGLAFGQAQGLDMDKVIEVLSGGAGGSWLLQHRGPTLVRDSYQPGFKMALHYKDLEICRSMLESMGVALPVVEMTLKQYRPLIEQGYGEEDISALYRGKRAMFENGGNKKGL

SEQ ID NO: 5474 - protein, 67 aa, Alkalilimnicola ehrlichei MLHE-1
MITGTVKWFDDAKGFGFITPTDGGKDVFVHHSAINGSGFKSLAEGQQVQFETQNTPKGLAAANVSAL

SEQ ID NO: 5475 - protein, 821 aa, Alkalilimnicola ehrlichei MLHE-1
MRLIAPPFRLLSVGLILLLMALLTACGGGSSSTDDTSEDTYAVGGTLTGLEQGHTITLQLNGASDLTLDHTANDNPYSFAVKLPHGSAYEVTLPAEPPQHHCTIHNATGTVDGAVMNVDVECTAFPVLAAGGVHTLAMKADGTLWAWGQNNVGQLGLGDTEKRDTPAQVGSDTDWAAVSAGGAYTLAVKDDGTLWAWGENYFGQLGLGDTDDRHAPEQVGSDSDWVAVSAGRHHTLALKADGTLWAWGRNYFGQLGLGGTTNRNAPEQVGSHSDWAGVIGGDRHSLAVREDGTLWSWGQNNVGQLGLGDTVERRRPEQVGNDSDWATVSAGLLHTLAVKNDGTLWAWGGNGFGQLGLGDTDNRDAPVQVGSDNDWAALNAGQRYSLAVKNDGSLWSWGWNDFGELGLGDTDDRHAPEQVGGGMEWAAVTAGMYHTLGVKADGTLRAWGRNDFGELGLGVMVYITSPLQTVTEADWAAASAGQYQTQAVKADGSLWGWGRNHSGQLGLGDTDDRHAPVQVGGDSDWTSLSVGREHTLAVKADGTLWGWGQNYNGQLGLGDTDDRKTPERVGSDSDWATVSAGTGYTLAVKDDGTLWAWGRNSHGQLGLGDTNNRDAPVQVASDNDWAAVSAGSRHTLAVKNDGTLWAWGRNSDGQLGLGDTDNRDVPEQVGSDTDWAAVSTGSGHTLAVKTDGTLWAWGRNSDGQLGLGDTDERHAPEQVGGDSDWAAVTAGWQHTLAIKNDGTLWGWGLNLYGQLGLGDTDGRHAPMQVGSDSDWATVAAGRYHTLAVKDDGTLRAWGRNRFGQLGQRTYRFDQPQEVPGW

SEQ ID NO: 5476 - protein, 818 aa, Alkalilimnicola ehrlichei MLHE-1
MRLIAPPFRLLHVGLILLLMALLTACGGGSSSTDAPSEDTYPVGGTLTGLEQGHTVTLQLNGANDLTLDHTANDNPYSFAVKLPHGSAYEVTLPAEPSQHHCTIHNATGTVDGAVMNVDVECTAFPVLAAGDDHTVAVKADGTLWAWGRNGYGRLGLGDTDDRDVPEQVGTDSDWTAVSAGRDHTVAVKANGTLWAWGRSGRIGLGDSGDRDEPEQVGVDNDWIALSAGGSHTVAVKADGTLWAWGRNNAGQLGLGDTNHHYTPTQVGTDTDWAKKISAGRRHSLAVKADGSLWAWGDNEYGQLGLGDTDERHAPEQVGSNTDWAAISAGRRHSLAVKADGSLWSWGYNDSGQLGLGDTADRNAPEQVGADTDWDLVSAGGEHSLAVKADGTLMVWGLNHLGQLGLGDTVSRDAPVPIASGIALVAGRNHTVAVNPDGTLRAWGDNEYGQLGLGVMRYIVTPSQTVTGSAWAAVNGGSFNHSLGLRDDGTLWAWGRNNYGQLGLGDTDDRATPEQVGSHTDWAAVNAASYHTLAVKNDGTLWAWGRNSSGQLGLSDTNDRHTPERVGSDTDWATVSVGQSHTSAVKPDGTLWAWGWNHYGQLGLGDTSDRLSPEQVGGESNWLAVSTGLHHTVAVKTDGTLWAWGWNVRGQLGLGHTSDRHAPVQVGSDTDWAAVSASGYRTLAVKADGTLWAWGENNNGQLGLGDTDNRNTPAQVGNDADWAAVSTGLFHTLAFKEDDTLWAWGRNHDGQLGLGDTDNRDAPVQVGNETDWSTVSGGGYHTLATMSDGTLRAWGLNTSGQLGQRTMWFDQPQEVPGW

SEQ ID NO: 5477 - protein, 394 aa, Alkalilimnicola ehrlichei MLHE-1
MTQREVVLCAPVRTAIGTYGGTLKNTPATELGACAVRSVLSRTGLAPEKVQSVVMGNVIQAGNRMNPARQVGIHAGLPVEVPALTVNRVCGSGAQAIASAAMEIWSGMTDCAIAGGMENMDMAPYLMPQGRWGARMGDAKLFDSMLTDGLNDAFSGKHSGWHTEDLVSRYGVSREDQDRWAARSQQRFSEAQAAGRFDGEITPVEVNARKGVVPFERDEHNRGDVTAESLARMKPAFREGGTITAGNAPGLNSGAAAMVVADRAWAEAAGVVPMARLVAFGVGAVEPGYFGIGPVPAVRQALDRAGWAIGDVDRVEINEAFAAIALACLRELGLSEDVVNVEGGAIAHGHPIGATGAVLTTRLLHAMHRDGGHRGIVTLCIGGGQGIALALERL

SEQ ID NO: 5478 - protein, 1491 aa, Alkalilimnicola ehrlichei MLHE-1
MDNENLSAPTTLYRPEFEKDNCGFGLIAHMDGEPSHWLVDTAIKALARLTHRGAIAADGKSGDGCGLLITKPDRFLRAVAQEAGIRLGERYAVGSVFLSRDDASAARARQTLEDTLAEQGLEPAGWREVPVDTEACGEEALATLPRIEQLFVNAGAEMDEQALERRLFIARRQAEKALSDDPAFYVPSLSARVLSYKGLVLPENLPVFYRDLQDERLASSMAVFHQRFSTNTLPQWRLAQPFRYLAHNGEINTIQGNRNWANARSHVFETELLDMAEVRPLVNTDGSDSSSLDNMLDVMLNGGMDIFRAMRLLVPPAWQNVDSMDPDLRAFYEYNSMHFEPWDGPAGIVLTDGRHAACVLDRNGLRPARWVITDDRHITLASEVGVWDYAPEQVVAKGRLKPGEMLAADTHTGDLLQPADIDQRVKSAQPYKQWLKRHMRELGSSLPNGTSPRRASLNDRELDTYQKLFNVNFEERDHIIKVLAESGQETVGSMGDDTPLPVLSRKIRSPFDYFRQQFAQVTNPAIDPLRERIVMSLETCIGRERNLFQEKEEYAKRLTVDSPVLSDDKFTALLALGDRDPDYRHVRIDLNYDPDQDLKSAIEAVCDQAEQAVRDGTVLVVLSDRTITRDQLPIHAALATGAVHHRLVARGLRCDANIVVETGTARDPHHFAVLVGYGATLVYPYLAYDCVAQMARSGRIDNQNIAELLRNFRKGINKGLYKICSKMGISTIASYRGAQLFEAVGLHQEVVDLCFTGTTCRIQGTHFEDLEADQKALAAKAWRPSQPIEQGGLLKFVHGGEYHAYNPDIVAWLQRSVESGRYEDYQHYAKLVNERPAAVLRDLFKVKEAPQALPLEEVEPEEAILPRFDSAGMSLGALSPEAHESLAMAMNRLGGRSNSGEGGEDEERYGTDRVSKIKQIASGRFGVTPHYLVNAEVLQIKVAQGAKPGEGGQLPGHKVNEMIARLRYSKPGVALISPPPHHDIYSIEDLAQLIFDLKQVNPEALVSVKLVAEAGVGTVAAGVAKAYADLITIAGYDGGTGASPLTSVKYAGGPWELGLSETHQTLRQNNLRDKVRLQTDGGLKSGLDVIKGAILGAESFGFGTAPMVAMGCKYLRICHLNNCATGVATQQKVLRLKHFIGTPDKVMNFFRFVARETREWMARLGVRRLEDLIGRTDLLEILPGDTPRQQRLDLRPILSDWGLAEDKPQFCLSERNVPYDKGELAEQMVRDALPAIESKAGGTFEYAVKNNNRSIGARLSGEIARRHGNQGMADKPITVQLSGSVGQSFGVWNAGGLNLDLEGDANDYVGKGMAGGRLTLRPPRGSRFDTRETPIMGNTCLYGATGGKLFAAGLAGERFAVRNSGATAVVEGVGDHGCEYMTGGVVCVLGGTGLNFGAGMTGGIAFVLDQDNRFVDRYNHELIDINRLVSENRQAHREYLRRLLSEYVEATDSAWGHEVLDNFRDYVNRFWLVKPKAADINTVLDTLRQAA

SEQ ID NO: 5479 - protein, 377 aa, Alkalilimnicola ehrlichei MLHE-1
MAVKVAVPRETRPGERRVALAPAALRQFEKLGVELLMQKGAGLESGFDDADYKGVTLVDSEEELLGQADVVLKVQPPTEKEVGMMREGTVVMGYMTPHEGDSRIKELCKRKITSLSMELVPRISRAQSIDALSSQGAISGYKAVLIAAERSPRFFPMLTTAAGTIRPSKVLVIGAGVAGLQAIATARRLGAQVNAYDVRSATAEQVESLGAKFVDTGVKAEGEGGYARELTAEEKKKQAEVLADYIAASHAVITTAAIPGRPAPKIIDKATVERMGRGAVIVDLAAETGGNCELTQAGKDVDHNGVLIVGPKNVPSSVAIHASEMYSRNLYNLLTLLIKDGELHLNWDDQVIADSCLTHGGEVKHGPTRERLEGEKS

SEQ ID NO: 5480 - protein, 589 aa, Alkalilimnicola ehrlichei MLHE-1
MSKGHSDHPSAGESWHLYKRIFGFIKPYWRLGVLAIVCMVLAAAGQAAFAWIIQPLVDGTFIEQDPGARLWVPATLVGIFLFHGVTTFASDYTVAWVGRRVVKDVRQAVFEQYLRLPTSYFDKNSPGTLLAKLTYNVNQISAAASKAVVVLVRDTFTVIFLLAYMTYLSGWLVMIVFGLGPLVAVVVTAANKRFRKLSRRMQASVGEYAQIAEDGIRGQAEVKIFGGQRYEAERFDRTNTRHHRQLMRYKAVQAASQPLAQLGAVIALAIILYLATMDVILETISPGGMISFIAAMLLMLPPLKRVIGVNAEIQKALAAGESVFEVLDAPPEPDHGQRPLERARGLIEFDRVAFRYPESEDWVLRDINLSIQPGETVALVGRSGSGKTTLASLLPRFYDPQRGEIRLDGHPLAEYRLQALRSQMSLVNQQVVLFNDSLANNIAYGLSERPTAAQLQAAARAANALEFIEELPEGFDTVIGENGVMLSGGQRQRIAIARALLKDAPILILDEATSALDSESEKRIQEALEKLMRGRTTLVIAHRLSTIEDADRIVVLDAGRVVETGTHRELLDHNGHYASLHRVQFNGPS

SEQ ID NO: 5481 - protein, 188 aa, Physcomitrella patens
RRKTDKKSKDPVPPPRMIREPRVVVQTTSDVDILDDGYRWRKYGQKVVKGNPHPRSYYKCTNVGCPVRKHVERASNDPKAVITTYEGKHNHDVPAARNVGHDVAMQTAAPVAATARSLQDQGISFGNSFGQPPEDSASRWNRGSGDVELGMSVGLGPRVQGAREQGPLDATAVSLAASIGHPSFDDAR

SEQ ID NO: 5482 - protein, 145 aa, Physcomitrella patens
DGCQWRKYGQKMAKGNPWPRAYFRCTVSPGCPVRKQVQRCEEDTSILVTTYEGTHNHALSLAAAVMASTTSAAASMLLTGSTTSATPHMATTPQFITISGPQGQNSTAVPAISASSPFPTITLDLTNTPASQISNRSNNSPGTPS

SEQ ID NO: 5483 - protein, 230 aa, Malus x domestica
MVRKKVEMKRIENNTSRQVTFSKRRKGLLKKAYELSVLCDAEVAVIVFSQKGRIYEFSRSDMQRTINRYHKHENGSGPTNKVEVEQYVQHLKHESAIIAKKIEILEASQRKLLGNDLDSCPVEELQEISSQLERSLRSISERKAQLYTEQMEQHKARERFLLQEDAQLREECCAKPWMEFSPQEKRASASVSNEKAGASASAPINYRSQSSMSSEVDTDLLIGQPNGARC

SEQ ID NO: 5484 - protein, 525 aa, Bacillus subtilis subsp. subtilis str. 168
MFRVLVSDKMSNDGLQPLIESDFIEIVQKNVADAEDELHTFDALLVRSATKVTEDLFNKMTSLKIVGRAGVGVDNIDIDEATKHGVIVINAPNGNTISTAEHTFAMISSLMRHIPQANISVKSREWNRTAYVGSELYGKTLGIVGLGRIGSEIAQRRGAFGMTVHVFDPFLTEERAKKIGVNSRTFEEVLESADIITVHTPLTKETKGLLNKETIAKTKKGVRLINCARGGIIDEAALLEALENGHVAGAALDVFEVEPPVDNKLVDHPLVIATPHLGASTKEAQLNVAAQVSEEVLQFAKGLPVMSAINLPAMTKDEFAKIKPYHQIAGKIGSLVSQCMKEPVQDVAIQYEGTIAKLETSFITKALLSGFLKPRVDSTVNEVNAGGVAKERGISFSEKISSSESGYDNCISVKVTGDRSTFTVTATYIPHFGERIVEINGFNIDFYPTGHLVYIQHQDTTGVIGRVGRILGDNDINIATMQVGRKEKGGEAIMMLSFDRHLEDKIVKELTNVPDIVSVKLIDLP

SEQ ID NO: 5485 - protein, 249 aa, Cyanidium caldarium
MRIENKQNKRQHHLLIVDDENNIRKILQTRLTLLGYSVSTACNGEEALKIFTTHSIDLIILDVMMPKLDGYGVCQEIRKESDIPIIMLTALEDVLDKVTGLELGADDYVIKPFSPRELEARIQSILRRIQTRNAKLKPYDNINLFKTGSLNIDLEKKQIYKNNELIRLTEMEFSLLELLVSQSGKAFSRSKILKEVWGYKLSKHEPIADTRIVDVHISRLRAKLEDDPTNPTLILTARGTGYLCRKLIT

SEQ ID NO: 5486 - protein, 618 aa, Cyanidium caldarium
MEKIVGIDLGTTNSVIAVMEMGKPAVIPNSEGFRTTPSVVAYAKNGDLLVGQIAKRQAVINPSNTFYSVKRFIGRKFEEINEENRQVTYQVNKDPSGNVKIYCPFKNKDFTPEEISAQVIRKLTEGASKYLGEKITKAVITVPAYFNDSQRQATKDAGKIAGLDVLRIINEPTAASLAYGLDKKNNEKILVFDLGGGTFDVTILEIGDGIFEVLSTSGDTHLGGDDFDKKIVDWLVDEFKKSYNIDLSKDKQALQRLTEAAEKAKIELSSVSQTEINLPFITATSEGPIHFDKSLNRAKFEELVSELIARCKIPVENALKDAKLNKSDINEIVLVGGSTRIPAIQNLVKESLQKDPNQTVNPDEVVAVGAAIQGAVLAGEVKDILLLDVCPLSLGVETLGGVMTKMIPKNTTIPTRKTEIYSTAVDNQTNVEIHVLQGERELAKDNKSLGTFRLDGIPPAPRGVPQIEVTFDIDANGILSVTAKEKTTGKQQSVTITGASTLDKDEIQKIIKEAEINAQEDRKKKENIELKNQAETICYQAQKQLNEFKEKIDKNQYKRIEDLIAKLKQAISSNEYEEIKNLMEAIQKETMEIGKELYSKDSKNTKNSDVIDADFSET

SEQ ID NO: 5487 - protein, 254 aa, Cyanidium caldarium
MKETSVLTIQNLKACVNEFEVLHNINLQIKTNETHVIMGPNGSGKSSLLKVIAGHPSYKVIEGKIFVENIDITQATPEERSNLGVFLGFQYPIEITGVNNADFLRAVYNQKRKKQGLKDLDPLEFLEILSPILDLVSMDQTFLHRNLNEGFSGGEKKRNEILQMILSKPRLAILDEPDSGLDIDALRSISEVINKLRNQKQCMLIITHYQNLLDYVIPDKVHIMDHGKIVETGDVTLAIQLKRKGYKWIKQSTN

SEQ ID NO: 5488 - protein, 209 aa, Cyanidium caldarium
MIFKILVIDDENIVCDAIYSYLVEKGFQVSTCQNAWQAISILTREFFHLIILDIMMPQIDGYQFISLLRIKRPNLELPLILLTAKALTLDRIRGYETGCSIYLSKPFDPDELIAIINNLIKRHYKLKRPKKSYKLLKKQNVGIKPIKLTEKEQCILNLIAQGVVNKKIKKLTFIGARYVENYVSKMLKKSQSNNRSELVIKSIKNKIVI

SEQ ID NO: 5489 - protein, 214 aa, Cyanidium caldarium
MVLLKTLCANHQDGILIYPKNSVIKIQGLCLLLSGILQHYNMSNHKKCQTLSLIFNWTFFGSVVGSSDCKIQTKDFYKCVTDVRLLHFSLFELAEVVCSDSILHFDFFKIFNQRIKDIEFFIVITSHKNIGNRLSHFILLLACYFGIFSAEGIFLNIYISQHDIASILSTTRSTITRLINQLRKDNIIRYYRKRLILLKPVKLGYYFSHFKRYI

SEQ ID NO: 5490 - protein, 854 aa, Cyanidium caldarium
MNIQPNTFFLKAMLTLLNIKGNNMCWAHKKNMFERFTEKAVKVIMLAQEEARRLGHNFVGTEQILLGILGEGTGLAAKALKSMGITLKDARIEVEKIIGRGSGFVAIEIPFTPRAKKILELAIEESRILTHNYVGTEHLLLGLIKEGEGVAARVLENLGVDLPKLRSNIIRMIGETSEVSVGATSGRSKVPTLEEFGTNLTQMAVEGKLDPVVGRAKEIERVVQILGRRTKNNPVLIGEPGVGKTAIAEGLAQRIINNEVPDTLEDKKVITLDVSLLVAGTKYRGEFEERLKKIMDEIRMADNVILVIDEVHTLIGAGAAEGAIDAANILKPALARGELQCIGATTLEEYRKHIEKDAALERRFQPVMVEEPTVEETIEILRGLRDRYEAHHRLKISDSAIVAAAKLSDQYIADRFLPDKAIDLVDEASSRVRLMNYKLPPSAEYLDEELRHIQKIKNELIRSGDFEEASQFREREIEVKVQMAALMKAKKEAIEEELALNPPIVNEDDIANIVSSWTGIPVSKLTKSESEKLLHMEETLHSRIVGQNEAVIAVSKAIRRARVGLKNPNRPIASFIFSGPTGVGKTELTKAMASYFFGSEEAMVRLDMSEYMERHTVSKLIGSPPGYVGYNEGGQLTEAVRKRPYTVVLFDEIEKAHPDVFNLLLQILEDGRLTDSKGRTIDFKNTLLIMTSNIGSKVIEKKGGGLGFELEENIEELQYSRMRNLVNEELKQYFRPEFLNRVDEIIVFRQLTKDEVRDIAHIMLREIFERVKQQGISLQVTERFKNLLIEEGYNPSYGARPLRRALVRLLEDSLAEEVLSGKIKEGDNAMIDVDENKQVKILLGNSNNQHAFLA

SEQ ID NO: 5491 - protein, 1549 aa, Cyanidium caldarium
MISISKRTSIARINLSEFHTISKIDRYPWLNKEKDACGVGFIAHLDNKFGHKLMMNALEALATMEHRGACSADEESGDGAGILFSIPWKFFVEWSLRYKQFKINISQAAVAMLFLPCLSSDIQVSKNIVEEIFQDEDFIVIGWREVPYVKEVLGPLALRNMPQIYQIVVQSKRYQGRSLDFHLYRVRRKIEKEITVRAYSWAKDFYFCSCSNHTIVYKGMVKSTSLGQFYQDLYNPDFEISFAVFHRRFSTNTMPRWPLAQPMRILGHNGEINTLLGNLKWMEARESSLNHPTLNEVASIGPVVNVSNSDSANLDSVVELFLHVGHSCPEALMFLIPEAYENNPKLKYHQNLISFYEYCAGFQEAWDGPALIVFSDGHTVGASLDRNGLRPARYCVTEDNVLILASEGGVLNLDPSLIRLKGRLGPGEMIVLDLQEKLLMSNLEIKNKIASLRPYSDWIKQNRQVLIPTSFLTSTTLPLQEVFKRQTCFGYTSEDIELVIENMAIQGKEPTFCMGDDTPLAVLSGKSHVLYDYFKQRFAQVTNPPIDSLRESLVMSISSYLGSKTNSFEESSEKILKIKTPILSENDLVLIKNSELLTETLVTTFEAHFDSPQANGQSLFSTINQLCKQAKNLIQAGTKIIILSDKVCFESRTESYIPPLLVVGSLHQYLIKQGVRQKVSLIVETGQCWSTHHFACLLGYGASAVCPYLALETVRHWWMSERTQNLMSKGKMPNLTLIEVQNNYCKSVERGLLKILSKMGISLLTSYIGAQIFEILGLGKEVVDLAFEGTVSRIGGLSFADLAMETIDLCSAGFSKLNKKKLDNHGFVQYRPGGEYHLNNPEMSKALHKAVRENNYTLYEAYKQLLANRPPTNIRDLLEFNFRSCSVPLEKVENIFEITKRFCTGGMSLGALSREAHETLSIAMNRIGGKSNSGEGGEDSLRFTVLTDVDETGNSPSFPHLKGLKNGDSLSSAIKQIASGRFGVTPEYLVNAKQLEIKISQGAKPGEGGQLPGKKVSPYIATLRACKPGVTLISPPPHHDIYSIEDLAQLIFDLHQVNPECKVSVKLVSEIGVGTIAVGVAKAGAEIIQISGHDGGTGASPLSSIKHAGVPWELGLHEVHCLLVENNLREKVILRVDGGLRTGQDVVMAALLGADEYGFGTIAMIAGGCIMARVCHTNSCPVGVATQKEELRMRYPGVPENVVNYFIFLAEEIRVILSKLGFETLSQIIGRKDLINHNFDKKLCKTHCIDTSIFFNIKTNEYNFLEIPGGHSKKLKTSLLDYELLNSSDILYAIDNHKTLEKHIKISNSDRSVGAKLAGRLAKQYKNEGFRGSLILNFYGTAGQSFGSFNIKGVTLRLIGEANDYVGKSMSGGEIVIVPPSEVAFDASEQVILGNTCLYGATGGFLFAYGAAGERFAVRNSNAFSVLEGVGDHACEYMTGGRVVVLGKAGRNIAAGMTGGIAYFLDEYSNLPEKVNLDIVRIQRVVTNEARKQLIQLIEKHVLKTGSKKAVLILQQWEIFIHYFWQIVPPSESETSETNYFVENKVLAN

SEQ ID NO: 5492 - protein, 251 aa, Porphyra purpurea
MSDYILEIKDLHASVNDVPILKGVNLSIKPGEIHAIMGPNGSGKSTLSKVIAGHPAYSLLNGDILFYGRSILKMEPDERARAGIFLAFQYPVEIPGVSNADFLRIALNARRKFRELPELSPLEFFQLITEKINLVGMKESFLSRNVNEGFSGGEKKRNEILQMALLESNLSILDETDSGLDIDALKIIAQGINTLATSTNSIVLITHYQRLLDYIIPNFVHIMSDGKIVKTGNVNLAQDLEKHGYDWIKST

SEQ ID NO: 5493 - protein, 620 aa, Porphyra purpurea
MGKVVGIDLGTTNSVIAVMEGGKPTVIPNAEGFRTTASVVAYTKSGDKLVGQIARQAVINPENTFYSVKRFIGRKQNEISQEIRQTSYNVKTSGSSIKIECPALNKDFAPEEISAQVLRKLVEDASTYLGETVTQAVITVPAYFNDSQRQATKDAGKIAGLDVLRIINEPTAASLSYGLDKQNNETILVFDLGGGTFDVSILEVGDGVFEVLSTSGDTHLGGDDFDQQIVEWLIKDFKQSEGIDLGKDRQALQRLTEASEKAKIELSNLTQTEINLPFITATQDGPKHLEKTVTRAKFEELCSRLIDKCSIPVNNALKDAKLEASSIDEVVLVGGSTRIPAIQQMVKRLIGKDPNQSVNPDEVVAIGAAVQAGVLAGEVKDILLLDVTPLSLGVETLGGVMTKIIPRNTTIPTKKSEVFSTAVDNQPNVEIQVLQGERELTKDNKSLGTFRLDGIMPAPRGVPQIEVTFDIDANGILSVKAKEKATGKEQSITISGASTLPKDDVERMVKEAEENFDVDQKRRKNIDIRNQAESLCYQSEKQVKEFEDKIDEELKNRITNLISELRSNLEKEELDSIEANSEKLQNALMEIGKNATSAEKDTQNASNDDTVIDTDFSEAK

SEQ ID NO: 5494 - protein, 628 aa, Porphyra purpurea
MKLSWKTLLLWSLPIFVVGFFFWQGFLGPTTTDVGSNIASSRMTYGRFLEYLDMGWVKRVDLYENNHTAIVEAVGPELGNRVQRIRVELPASAPELITKLRKANVDLDAHPPKSTSAVWGLLGNLLFPLILVGGLAFLFRRSNNASGGPGQAMSFGKSKALFQMEAKTGVVFNDVAGVEEAKEEFQEVVTFLKQPESFTAVGAKIPKGVLLVGPPGTGKTLLAKAIAGEAGVPFFSISGSEFVEMFVGVGASRVRDLFKKAKDNAPCIVFIDEIDAVGRQRGTGVGGGNDEREQTLNQLLTEMDGFEGNTGVIVIAATNRADILDSALLRPGRFDRQVSVDVPDFRGRLAILEVHAKNKKMESKVSLETIARRTPGFSGADLANLLNEAAILTARRRKSAMTMSEIDTSIDRVVAGLEGTPLIDSKSKRLIAYHEVGHAIIGSLLEHHDPVQKVTLIPRGQARGLTWFTPSDDQSLISRSQILARIVGALGGRAAEEIIFGDAEVTTGASNDLQQVTSMARQMVTRFGMSKIGPLSLESQGSDPFLGRGMGGGSEYSDEVATNIDKQVREIVSECYKEAKKIVKDNRVVMDRLVDLLIEKETIEGNEFRHIVKEYTAIPEKNYYISQF

SEQ ID NO: 5495 - protein, 590 aa, Porphyra purpurea
MLSKQIIGSEKTGRFALLDSIVRHGVIHIFGYPGGAILPIYDELYAWEELSLIKNILVRHEQGASHAADAYSRSTGKVGVCFATSGPGATNLVSGIATAHIDSVPILAITGQVGRPFIGTDAFQEVDIFGITLPIVKHSYVVRDPRDMSRIVAEAFYICKHGRPGPVLIDVPKDVGLEKFNYFSVEPGQVKIPGCRPLSNLKSRQILMAAKMIQQSSQPLLYIGGGAIISDAHSIIKELVDLYKIPVTTTLMGKGIFNEDSEFCLGMLGMHGTAYANFAVSECDLLIALGARFDDRVTGKLDEFACNAQVIHVDIDPAEVGKNRIPQVAIVGDVTEVVTSLLNLLKNNFKPYPEQIISWQERIHRWRQQYPLLVPKKSTSISPQEILVTTNQLAQDAYFTTDVGQHQMWSAQFLKVKSKHWISSAGLGTMGYGLPAAIGAQVAHPNELVICVSGDSSFQMNMQELGTIAQYKLPIKIVIINNRWQGMVRQWQQAFYGERYSHSRMTEGAPNFQKLAEAFGIKAFTVNNRQNMESSLKDAMKYPGPVLLDCQVTENENCYPMVAPGKSNAQMIGIAKPQRGTASNYVSRNI

SEQ ID NO: 5496 - protein, 821 aa, Porphyra purpurea
MFERFTEKAIKVIMLAQEEARRLGHNFVGTEQILLGLVGEGTGIAAQVLKSMNVNLKDARVEVEKIIGRGSGFVAVEIPFTPRAKRVLELSLEEARQLGHNYIGTEHLLMGLVREGEGVAARVLENLAVDVSSIRAEVIQMLGENAEANVSGSNATQARSKTPTLEEFGSNLTQMAIEGGLDPVVGRQKEIERVIQILGRRTKNNPVLIGEPGVGKTAIAEGLAQRIANRDVPSILEDKLVITLDVGLLVAGTKYRGEFEERLKRIMDEIKSADNVILVIDEVHTLIGAGAAEGAIDAANLLKPALARGELQCIGATTLEEYRKHIEKDPALERRFHPVVVGEPSVEETIEILFGLRDRYEKHHQLTMSDGALAAAAKYANQYISDRFLPDKAIDLIDEAGSRVRLLNSQLPPAARELDKELRAVLKTKDEAIRAQKYETAEQYRAREMEIKAQIAAIAQSKKNEPDLNLEDPVVTEDDIAEIVAAWTGIPVTKLTKSESEKLMQMEETLHGRIIGQDEAVIAVSRAIRRARVGLKNPNRPIASFIFSGPTGVGKTELTKALASYFFGSEASMIRLDMSEYMERHTVSKLIGSPPGYVGYSEGGYLTEAVRKKPYTVILFDEIEKAHPDIFNLLLQILEDGRLTDAKGRTIDFKNTLLIMTSNIGSKVIEKGGGSLGFELSEDQTESQYTRVRSLVNEELKQYFRPEFLNRLDEIIVFRQLTKDEVREIAELMLNEVFARIKQQDIQLNVTERFKERLVEEGYNPSYGARPLRRAVMRLLEDSLAEEVLSGKIKAGDSPVVDVTNEGEVKVLLGEKLELLT

SEQ ID NO: 5497 - protein, 237 aa, Porphyra purpurea
MNNHYLNQGCSFEKVSKNILKKNSHCNPWLSFFNQQDSEHQIFSLKQNDIIIFDVNSKLYIILAGCLIVKKVFRNRKKIILNVLTSEDSFGHTQFASNRFYYEVEALDVAQVLSIEYSIIMNICQNYPNFSVFLVNHLLLCSIKANHFMEIISHKSITNRLISLLLLLSEHNGISQNNGILIDLTITHKVLAQIIGSNRVSITRIISKLIHTKFISMQKKKVIIHDPILLSQRFSNR

SEQ ID NO: 5498 - protein, 243 aa, Porphyra purpurea
MENQKEKILVVDDEASIRRILETRLTIIGYEVITASNGEEALIIFRKEYPSLVVLDVMMPKLDGYGVCQELRKESDVPIIMLTALGEVCDRITGLEIGADDYVVKPFSPKELEARIRSVLRRADKITTNLGVPNSGIISIGFLKIDTNKRQVYKNNERVRLTGMEFSLLELLVSKAGEPFSRASILQEVWGYTPERHVDTRVVDVHISRLRAKLEDDPSNPDLILTARGTGYLFQRIIEMNKL

SEQ ID NO: 5499 - protein, 1538 aa, Porphyra purpurea
MFNQKIIEQASGKLTGSLTKSSSLVSIEKERDACGVGFIADVNNIANHKIVVQALEALTCMEHRGACSADRDSGDGAGITTAIPWNLFQSGLKDKGIIIQKNESIGVGMLFLPTSKLQESKKIIENVLKEENLEVVGWRLVPTVEEVLGKQAYLNKPHVEQMFCRSSNLSKNELEQQLFLVRKKIERYIGINGKEWAHEFYVCSLSCYTIVYKGMMRSAVLGQFYQDLYHSEYTSSFAIYHRRFSTNTMPKWPLAQPMRFISHNGEINTLLGNLNWMRSREPLLKSPIWKNRIDELKPITNKDNSDSANLDAAVELLIASGRSAEEALMILVPEAFQNQPEFNKNTEISDFYEYYSGLQEPWDGPALVVFTDGKVIGATLDRNGLRPARYVITKDNLVIVSSESGVVQVEPSNIKSKGRLGPGQMISVDIISHKILNNKEIKTSVAGKTPYGDLLKESRQILGHQAFFSEQQVESKKLMQLQTAFGYTNEDVELVIEHMASQGKEPTFCMGDDIPLAILSEKSHILYDYFKQRFAQVTNPAIDPLRESLVMSLTIQIGHKSNLLDDQPVLAKHIKLDSPIINEGELNAILESKLSCAHINTIFKVEKGPNDFKKQIEQLCESASQAILSGNNILILSDKNDILESEKVSIPPLLAAGAVHHHLINKGLRQDASIIIETAQCWSTHHFACLIGYGASAICPYLAFETARHWWSNPKTKMLMSKGRLPACNIQEAQANYKKAVEAGLLKILSKMGISLLSSYHGAQIFEILGLGSEVVNFAFKGTTSQIGGLSMEELGQETVNIHSKAFSQVKTKKLANYGFVQYRPGGEYHINNPEMSKALHQAVRGYNPEYYNSYQRLLQNRPPTALRDLLKLKSNKQPIAIDKVESMENILHKFCTGGMSLGALSRETHETLAIAMNRIGGKSNSGEGGEDPVRFKVLNDVNESGNSDLLPHLKGLRNGDTASSAIKQIASGRFGVTPEYLMNAKQLEIKIAQGAKPGEGGQLPGKKISPYIATLRKCKPGVPLISPPPHHDIYSIEDLSQLIFDLHQINPTAKISVKLVSEIGIGTIAAGVAKGNADIIQISGHDGGTGASPLSSIKHAGSPWELGLSEVHQLLAENQLRDRVTLRVDGGLRTGSDIVLAAIMGAEEFGFGTIAMIATGCIMARICHTNKCPVGVATQREELRARFSGVPEALVNFFLFIGNEVREILASLGYKSLDEITGQNHLLIKNTDIELAKTRGIELNSLININTHTWTKFNSVHTNGPVMDDDILAIPEINDAIKLENEVAKHFKIANTNRTVGTRLSGVIAQKYGNEGFKGLIKLNFYGSAGQSFGAFLASGVNLKLMGEANDYVGKGMNGGSIIIVPPAGTTYEDNNQVIIGNTCLYGATGGYLFAQGQAGERFAVRNSLAKSVVEGVGDHACEYMTGGTIVVLGKAGRNVGAGMTGGLAYFLDEENKFIERVNSEIVKVQRVITKAGEQQLKNLIENHSAKTGSLKAHNILENWNTYLPQFWQVVPPSEANIEETNTAYSSNTITAY

SEQ ID NO: 5500 - protein, 107 aa, Porphyra purpurea
MDIETKKVIEQILDNNKIVLFMKGSKLMPMCGFSNTAIQILNTLNTDYFTYDILENENIRQAIKEHSSWPTIPQLYINREFVGGADIMLELFEQGELQAQVETLLAA

SEQ ID NO: 5501 - protein, 259 aa, Cyanophora paradoxa
MSTEKTKILEVKNLKAQVDGTEILKGVNLTINSGEIHAIMGPNGSGKSTFSKILAGHPAYQVTGGEILFKNKNLLELEPEERARAGVFLAFQYPIEIAGVSNIDFLRLAYNNRRKEEGLTELDPLTFYSIVKEKLNVVKMDPHFLNRNVNEGFSGGEKKRNEILQMALLNPSLAILDETDSGLDIDALRIVAEGVNQLSNKENSIILITHYQRLLDYIVPDYIHVMQNGRILKTGGAELAKELEIKGYDWLNELEMVKK

SEQ ID NO: 5502 - protein, 239 aa, Cyanophora paradoxa
MEINKKKILVVDDEISIRRILETRLSMIGYEVVTAADGEEALTIFQLEHPNLVVLDVMMPKLDGYGVCQELRKESDIPIIMLTALGDVADRITGLELGADDYVVKPFSPKELEARIRSLLRRTENPTLSTTSTNGENLQIGFLKIDINKRQVFKNGERIRLTGMEFSLLELLISKMGEPFSRAQILQEVWGYTPERHIDTRVVDVHISRLRSKLEENPSNPDLILTARGIGYLFQNTSN

SEQ ID NO: 5503 - protein, 885 aa, Odontella sinensis
MFEKFTEGAIKVIMLSQEEARRMGHNFVGTEQLLLGIIGQRHGIGARALKKQKVTLKKARREIELYIGRGTGFVASEIPFTPRAKRVLEMAVHEGKDLGQNFVGTEHILLALISESDGVAMRTLDKLGVNIPKLRNLILMYIEENQEEILRPLTQAEKFLLEREKKGSSTPTLDEYSENISKEAVDGKLDPVIGRDKEIHEVIKVLARRRKNNPVLIGEPGVGKTAVAEGLAQLIIAEKAPDFLDGNLLMALDLGSILAGTKYRGEFEERIKRIVEEVQNDSAIILVIDEIHTLVGAGAAEGAVDAANILKPALARGKFRCIGATTIDEYRKYIERDPALERRFQPVHVKEPTVGVTIEILLGLRSKFEEHHTLSYHDKAVEQAAILADKFIADRFLPDKAIDVLDEAGSRVRLENRRLPRGMKRLLKELQDTLRDKEESIKEHDFDIAKQLVDHEMEVRTHIRIMKQSILTNETLGLARKEIDTVLEGDVAEVIAGWTGIPVNKISDSESKRLLTMEETLHERLIGQHHAIVSVSKAIRRARVGLRNPDRPIASFIFAGPTGVGKTELTKALSEYMFGNEDSMIRLDMSEYMEKHTVAKLIGSPPGYVGYNEGGQLTEAVQTKPYSVVLLDEVEKAHPDVFNLLLQILDDGRLTDSKGRTIDFRNTMIIMTTNLGAKIIEKESGIKPKTKQDKPAFRIDESGCLGWEPTPEPIKDSALFEKVTELVNEELKEFFRPEFLNRIDEIIVFNHLTKYDIWEICGLMVKQLQKRLEEKELTLEVDVSVRNLLTEEGYDPVYGARPLRRAVMRLLEDTLAQQCLSKPLYPGTILRVSRVKEEGTLASYTNDVKVEIDYRRVDPRLLEQAEEKKEQNQEETKQNILKTDA

SEQ ID NO: 5504 - protein, 105 aa, Odontella sinensis
MKYAIVEISGRQFWIETGKYYDFNRIPTELGKEITLNRVLLLNNEGEILIGKPYLESVTVKGKILEHLRGRKTLVYKMRPKKKTRKKQGHRQELTRVLIEEIKTN

SEQ ID NO: 5505 - protein, 251 aa, Odontella sinensis
MNTNYPILEIKNLKACINENEILKDLNLKIHKGEIHAIMGPNGSGKSTFSKVLAGHPAYNILSGDILFKGSSILNLDPEERSHMGIFLAFQYPIEIPGVSNEDFLRLAYNSKQKFLNKDEVDPISFFTIINEKLKLVDMSPVFLSRNVNEGFSGGEKKRNEILQMILLDSELSILDETDSGLDIDALKIISKGINTFMNQNKAIILITHYQRLLDYVQPNYVHVMQNGKIIKTGTADLAKELESKGYEWLK

SEQ ID NO: 5506 - protein, 819 aa, Guillardia theta
MFERFTEKAIKVIMLAQEEARRLGHNFVGTEQILLGLIGEGTGIAAKVLKSMGVNLKDARVEVEKIIGRGSGFVAVEIPFTPRAKRVLELSLEEARQLGHNYIGTEHLLLGLIREGEGVAARVLENLALDLTKVRTQVIRLLGDTAEVSATNGQTKGKTPTLEEFGSNLTQKAAEGKLDPVIGRQKEIERVIQILGRRTKNNPILIGEPGVGKTAIAEGLAQRINNRDVPDILEDKRVVTLDIGLLVAGTKYRGEFEERLKKIIDEIRVANNVILVIDEVHTLIGAGAAEGAIDAANILKPALARGEMQCIGATTLEEYRKHIEKDSALERRFQPVMVGEPSVEETIEILYGLRDRYEKHHKLVISDEALSAAAKFADQYIADRFLPDKAIDLIDEAGSRVRLMNSQLPPAARELDKELREILKQKDEAVRSQDFETAGQLRDREMEIKAQIAAIAHSKKGDEENTKEVSVVTEEDIAQIVAAWTGIPVNKMTRSESEKLLQMEETLHGRIIGQDEAVVAVSKAIRRARVGLKNPNRPIASFIFSGPTGVGKTELTKALASYFFGSEEAMVRLDMSEYMERHTVSKLIGSPPGYVGYNEGGQLTESVRRRPYTVVLFDEIEKGHPDVFNLLLQILEDGRLTDSKGRTVDFKNTLLILTSNVGSKVIEKGGGGLGFDLSEDQTESQYGRIKALVNEELKQYFRPEFLNRLDEIIVFRQLTKDEVGEIAEIMLKEVFTRISEKGIQLEVTARFKTHLINEGYNPIYGARPLRRAVMRLLEDTLSEEFLAEKIKEGDTAVVDVDDDGKVKVLLGEKLELVAN

SEQ ID NO: 5507 - protein, 254 aa, Guillardia theta
MIKNRCLDIDLETKEKVLIVDDEASIRKILETRLSMIGYFVVTASDGEEALNLFHQEMPDVVILDIMMPKLDGYGVCQEIRKDSDVPIIMLTALGDVADRITGLELGADDYVVKPFSPKELEARIRAVLRRTNKAAFSSHLTTSGIINFNFLTIDLNKRQIYKDNERIRLTGMEFSLLELLISRSGQPFSRADILQEVWGYTPERHVDTRVVDVHISRLRAKLETDPSNPDLILTARGTGYLFQRITDQHVLKT

SEQ ID NO: 5508 - protein, 253 aa, Guillardia theta
MKKKILEVTNLHAAVNEIKIVKGLNLVVNAGEIHAIMGKNGSGKSTFAKIIAGHPDYTITNGDITYQHTSILELTPEDRAKRGIFLSFQYPIEIPGVTNADFLRLACNARRIYQGLPEMEPLEFFEYINSKLPLVDLKPSFLTRDVNEGFSGGEKKRNEILQMSILDTKLAVLDETDSGLDIDALRTVANGIKSLANDGNAIILITHYQRLLDYIKPDFVHVMQEGKIIKTGSASLALDLEKYGYDWLKNELK

SEQ ID NO: 5509 - protein, 627 aa, Guillardia theta
MGKVVGIDLGTTNSVVAVMEGGKPAVIQNAEGFRTTPSVVAYTKTGDRLVGQIAKRQAVINPDNTFYSVKRFIGRRSEEVSEELKQVSYIVKTDSNGNIKLDCPSLKKEFASEEISAEVLRKLVDDASKYLGESVKQAVITVPAYFNDSQRQATKDAGRIAGLEVLRIINEPTAASLAYGLDKKNNETILVFDLGGGTFDVSVLEVGDGVFEVLSTSGDTHLGGDDFDDKIVQWLLKEFETEHSINLKSDRQALQRLTEASEKAKIELSNLSQTEINLPFLTATETGPKHLERSITRAKFEELCSDLINRVKIPVENALKDAKLDSSKIDEVVLVGGSTRIPAIQELVKRILNKTPNQTVNPDEVVAIGAAVQAGVLAGEVKDILLLDVTPLSLGVETLGGVTTRIIPRNTTIPTKKSEVFSTAVDNQPNVEIHVLQGEREFAKDNKSLGTFRLDGILPAPRGVPQIEVTFDIDANGILSVTAKDKGTGKEQSITITGASTLPSDEVERMVNEAQNSAKEDKEKRDKIDLKNQSDSLCYQSEKQLKELEGKIDDTNKNKISSMISELRNAINNENYDEMRDLNSKLQTALMDLGKSVYEKTSKEQTSTSSPTNSNDSVIDADFSETK

SEQ ID NO: 5510 - protein, 115 aa, Fulvimarina pelagi HTCC2506
MSSMNEWIDNEVKSNDIVVFMKGTPSFPQCGFSGQVVQIMDYMGVEYKGVNVLTSDDLRQGIKAYSDWPTIPQLYVKGEFVGGCDIVREMFQAGELKQFFEDNGIATTAPQPAAG

SEQ ID NO: 5511 - protein, 417 aa, Fulvimarina pelagi HTCC2506
MARLVLKFGGTSVADIDRIRNVARHVKREVDAGHDVAVVVSAMAGKTNELVGWCREASPLHDAREYDAVVASGEQVTAGLLAIVLQAMGVNARSWLGWQIPLKTDDAHGVARIGDIDGSDIIRRFEEKQVAVVAGFQGIAPDNRIATLGRGGSDTSAVALAAALQADRCDIYTDVDGVYTTDPRIAPKARRMNKIAFEEMLEMASLGAKVLQVRSVELAMVHKVRTFVRSSFDDPDAPEMSDFDNPPGTLICDEEEIVEQEVVSGIAYSKDEAQISLRRVADRPGVAAAIFGPLADAGVNVDMIVQNISESGEATDMTFTVPSADLAKAVDVLEKTKAETGYDAIQSEAGLTKVSVIGIGMRSHTGVAATAFKELAKIPVNIRAITTSEIKISILIDSDFTELAVRRLHSVYGLDKV

SEQ ID NO: 5512 - protein, 389 aa, Fulvimarina pelagi HTCC2506
MLHLSRLRAEARNAPPSGIVAVMQHAFGREGVLPMWAGEGDLSTPDFIARAASESLAKGETFYTHQRGLPELRQALAGYVERLYGRPQSADRFFVTGSGMQAIQISIAALAGAGDEVVYFGPAWPNFAAAAGLIGAKPVEVALRPEDGAWHLDLDKVRDAVSAMTRAIFVNTPANPTGWTASEDELRAILHIARETNTAIIADEIYSRFFYAGTRAPSFHDVMAEDDTILFVNSFSKNWAMTGWRVGWIEAPAELDEVLANLIQYSTSGVAVFMQRAALAALQEGESFVEEQIARAHRARNIFADRLLATNRVALTPPAGAFYAFFSIDGVEDTRAAAFRIVDEAGVGLAPGTAFGPVGTQFLRACFHRRLDEVEMAADRIAGWIGRTL

SEQ ID NO: 5513 - protein, 318 aa, Fulvimarina pelagi HTCC2506
MSETRRDSRDADDEELLRRDPDESLLNAPDEGRTLADYFSFEEVFARVLSSADHELDVSNRYLFWSALGAGGAIGLTFLARVILTEAAGEETPGFLGNLMYPVGFLIIVIGRYQLFTENTLTPVVLVLTKLTSIASLLRLWTIVLIGNLVGAMAVAALIAYVDVLTVQRVAKAIEIGRHAYETEWLTIAARALIAGWIVAAMVWLVHAARDTVSRMMVVFILMYFLGICGFFHVITSSVEVFFLAFRTDVSFFALFPNFVAPVLIGNTVGGVIFVAVLNYAQFAEHRESKLFEPYGEPLSYRDWIFGSNSSSKKVRSA

SEQ ID NO: 5514 - protein, 508 aa, Fulvimarina pelagi HTCC2506
MTTFSELGLSAKVLAAVEATGYTQPTPIQAEAIPHALERRDVLGIAQTGTGKTASFVLPMLTMLEKGRARARMPRTLIIEPTRELAAQVEESFARYGKEQKLNVALLIGGMSFEEQDKKLDRGCDVLIATPGRLLDHFERGKLLLTGVEILVIDEADRMLDMGFIPDIERICKLLPFTRQTLFFSATMPPEITKLTQQFLQNPVRVEVAKPASAALTVEQRLVASGAKDYDKRARLRDLLRANEDVTNAIIFCNRKRDVSTLFRSLEKHGFSAGALHGDMDQRARMTMLHNFREDKLQLLVASDVAARGLDIPAVSHVFNFDVPIHAEDYVHRIGRTGRAGRSGKAFTLVTKSETKHLDAIKKLIGTEIEWLDGDLSKVEVTESDEGEGDRRSRSRGGSGRGGRNRKGRSRGGADKDDQQQQDDVAAKADDPKPQNDETETEDTVEAVAIQQNDNARKPNSRAHNGSRSRSGERGGRGGRGRSSRDDSNTMVGFGDDIPAFMLIATGT

SEQ ID NO: 5515 - protein, 348 aa, Fulvimarina pelagi HTCC2506
MTKYKLEYIWLDGYTPVPNLRGKTQIKSFDDFPTLEQLPLWGFDGSSTQQAEGHSSDCVLKPVAVYPDPARRDGVLVMCEVMMPDGTTPHVSNKRATILDDEGAWFGFEQEYFFYKNGRPLGFPEQGYPEPQGKYYTGVGYSAVGDIARTIVEEHLDLCLAAGINHEGINAEVAKGQWEFQIFGKGSKKAADEMWMARYLLQRLTEKYCIDIEYHCKPLGDTDWNGSGMHANFSTKYMREVGGKEYFESLMGAFEQNLEDHIAVYGPDNHMRLTGKHETAPWNKFSYGVADRGASVRVPHSFVNNGYKGYLEDRRPNSQGDPYQIASQILKTIAEVEERTEGGISVAA

SEQ ID NO: 5516 - protein, 312 aa, Fulvimarina pelagi HTCC2506
MSKVLAVGRYDDISNQAIEDEGWTFLPSMKQAMDLDEAARNKIEAIAYIGHHAFGGDLMDLFPNLGLIANNGVGYDAIDVDAASQRNIKITNTPDVLSDDVADLTVAMLLAQLRSLSRAEQHVRSGAWDQKQPFPLQRKMSGGKVGIIGLGRIGREIADRFAAFKMEIHYWSRKSKDTPDSWIYHENALDMMGAVDFAVVALVGGPATEDFVTKEMIEALGPRGILVNISRGTTVDENAMIEALQDGRLGGACLDVFRNEPHADKRFYDMENVVLQPHQASATVETRAAMGKLQRDNVKAFIAGQPLLTPVN

SEQ ID NO: 5517 - protein, 251 aa, Fulvimarina pelagi HTCC2506
MLEIKNLHARVADEGTEILRGVDLTVNDGEIAAIMGPNGSGKSTLSYILAGREDYEVTEGDILYNGESILEMEPDERAASGLFLAFQYPLEIPGVATMTFLKTALNAQRKARDEDELTTPEFMRRVKAAAGDLKINPEMLKRPLNVGFSGGEKKRAEILQMALLEPKLCVMDETDSGLDIDALKIVADGVNALRSPERSFLVITHYQRLLDYIVPDTVHVLSNGRIVKTGDKDLALQLEREGYSQIIEEAA

SEQ ID NO: 5518 - protein, 396 aa, Fulvimarina pelagi HTCC2506
MAGAPTRIYLDCNATWPLRPEAREAMVAALDSANPSSVHTEGRAARALVEDARRAVADLVGANPGEVTFTSGASEAANMALTPDWLIDGKPRNHNALAVLESDHSVFLEGGRFEASNVTALSVDRDGLLRTDALYRWLDDVGDNAAILAIGLANSETGVVQDICKIAETLRGRDIRLVVDAAQYAGRLPLDFDHCPADAILLSSHKLGGPKGIGAIVLKSTSTRPFPLIRGGGQEKGRRSGTEPVPEIAGFGVAVRAASFELRNDDGRMVRLRDLVDRSVLQRSPKTIVLGKAVTRLPNTSAYLTPGLKSETAQIALDLAGLAVSAGSACSSGKVGRSHVVSTMAAAGLDIDPADGAVRVSFSRETSEPELMRFVDEYVRLATKTESKPQNIDHAA

SEQ ID NO: 5519 - protein, 545 aa, Fulvimarina pelagi HTCC2506
MSVDHEMIPEQSVTNYEVGQDNVQKFGLDIHNPVFPISAGVIILFVAFTLIFPAVAGDFFGWLRPLLTSTFDWLFLIAGNIFVLFCLALIITPLGGVRLGGKDARPDYGYFGWFAMLFAAGMGIGLVFYGVSEPISHYSSAVGGITTENGVRTDWSPLGGAEGETLEARRLGMAATLYHWALHPWAIYAIVALGLAFFSYNWGLPLTIRSVFYPLLGDRVWGWPGHIIDTLAVFATIFGLATSLGFGAEQASAGLNFLFGIPDSTMTNVVLIAVITAVALVSVIAGLDGGVKRLSEINMVLALLLLGFVFLAGPTMDLVRGFFGNTAAYFREIVPLSVPFGREDDNFRQGWTTFYWAWWMSWSPFVGMFIARVSRGRTVREFVTCVLIVPTIVSIIWMTVFGGTALTQTIGGYAGIADAELPVQLFEMLSQIPLSSITSFIGIVLVIVFFVTSSDSGSLVIDTITAGGKLDAPTAQRVFWATFEGLIAIALLLGGGLAALQAAAVATGFPFVILLLILTFSVGKGLIAERKKPFLQNQGAYQAAE

SEQ ID NO: 5520 - protein, 70 aa, Fulvimarina pelagi HTCC2506
MSQTGTIKFFNESKGFGFVTPEGGSKDVFLHISALERSGISSVQEGDKITFDTEPDPRGKGPKAVNIQLA

SEQ ID NO: 5521 - protein, 532 aa, Fulvimarina pelagi HTCC2506
MAPRVLVSDKLSETAVQIFRDRGVEVDFQPNLGKDREKLLEVIGQYDGLAIRSATKVTEKIIDAATNLKVVGRAGIGVDNVDIPAASKKGIIVMNTPFGNSITTAEHAIAMMFAVARQLPAADASTQAGKWEKSRFMGVELTGKTLGVIGCGNIGAIVATRGVGLRMRVIAFDPYLSHERASQLGIEKVELDDLYKRADFITLHTPMTDKTRGMINAQSLAKMRDGVRIVNCARGGLIVEADLADAIKSGKVAGAGIDVFETEPAKDSPLFGLDNVVCTPHLGASTTEAQENVALQVAEQMSDYLTRGAVTNAINMPSITAEEAPILTPFVRLAECLGAFVGQVTEEPIRSVEIVYDGLVAEMNTKALTSATLSGLMKSQVAEVNMVSAPIMARERGIQITESTRDKSGVFDSYIKLTIVTEKFTRSVAGTVFSDGKPRFIQIKGINIDAEIGEHMVYTTNNDAPGIIGLLGTVFGKAGVNIANFQLGRNRPGGDAIALLYVDSAVPEGVLDQVRDHKEIHRAVALRFDGIS

SEQ ID NO: 5522 - protein, 70 aa, Fulvimarina pelagi HTCC2506
MAQTGTVKFFNTEKGFGFIKPDNGGADIFVHISAVQASGLAGLEENQKVSFETEPDKRGKGPKAVNLEPA

SEQ ID NO: 5523 - protein, 526 aa, Fulvimarina pelagi HTCC2506
MLQTLRQPVFLASTIIIVALVLVGASFPDLFKSNAQSALDWTVQSFGWFYLISVFGFVLILFYLALSKYGSIKLGPPDSQPEFSFFSWVAMLLAAGFGVGLVFYGMAEPMKHFVTPPYGLAEARSSDAAALAIQYSFFDWGVHQWSTFAIVGLIIGYHQFRRNEPGLVSTVLKEPVSKLPGAKRVGNAVDVFAVVATVMGVATSVGLGVLQMNGGLEILYGIPKNTFVEFSILAVLAACYLLSVSSGLDKGIKILSNINLALAGLLMLFVFLVGPTRVIAETIVSGFGDYLQNFFVMSLKATPFDGSTWANDWTIFYWAWVIAWSPFVGTFVARISYGRTIREYVLGVLIMPPLLAILWIGVFGGAALHLELAQNAGLADAVDDNITSALFELFKLLPLTQIFSLLSILLILIFLITSADSASYILAQMTHNGEADTPLFKRLTWGILLAAITLTLIASGGLEGLQAAAILAALPFTFIIYAMVAVLFRELERDRLKILRELQDIHGAPVAADQHEARKMSSAPGE

SEQ ID NO: 5524 - protein, 591 aa, Fulvimarina pelagi HTCC2506
MCGICGEIRFDGENASPERVQRMGDCLARRGPDGSGQVMRGRVGLAHRRLKIIDLSEKAEQPMVDPVLGLTIAFNGCIYNYPELKKELEAKGYTFFSTGDTEVIVKAYHAWGRDCVKRFHGMFAFAIHERETGRVMLARDRFGIKPLYLSQNDKRLFIGSSLQSILKSGDVDTGIDKVALHHYMTFHAVVPPPHTILKGVRKLPPATTRMIEADGTYDDEVFWWPEFAPKSGDEKLTSDDWRDMVMEAMKLAVDRRMVADVPVGVLLSGGVDSSLIVGLLAEKGQKDLNTFSIGFEDANGEVGNEFEYSDLIANHYGTEHHKLFVPGDELIQELPKAIEVMSEPMVSYDNIGFFLLSREVAKHIKVVQSGQGADEVFAGYHWYPKVAGANDPLAAYQRAFFDRDHETLGTHLNPEWMPETDVSKEFVANHFAMEGATEAVDKALRIDAHVMLVDDPVKRVDNMTMAWGLEARVPFLDHELVELAARVPADEKLKQDGKGVLKEVARQVIPSEVIDRKKGYFPVPQLKYLSGPTLDFVKDALHSDAAKSRGLFRKEYTDALFANPSEHITPLRGSELWQVALLEMWLQAQGV

SEQ ID NO: 5525 - protein, 401 aa, Fulvimarina pelagi HTCC2506
MAFLADALDRVKPSATIAVTQKARELKAKGMDVIGLGAGEPDFDTPDTIKEAAIAAIARGETKYTPVSGIPQLREAIAAKFKRENGLDYKPEQTIVGTGGKQILFNAFMATLNKGDEVIIPAPYWVSYPEMVAICGGTPVFVEAGIETNFKLTPEKLEAVITPRTKWFLFNSPSNPSGAAYTKDEIKALTDVLMRHGHVWVLTDDIYEHLVYGDFTFHTPAEVEPGLYDRTLTMNGVSKAYSMTGWRIGYGAGPIQLIKAMDMIQGQQTSGAASISQWAAVEALNGTQDFIPKNREIFQGRRDLVVSMLNQATGLKCPVPEGAFYVYPSCAGLMGKTTPDGKVLKTDEDFVTSLLETEGVAVVQGSAFGLGPNFRISYATSEALLEEACSRIQRFCGSLKD

SEQ ID NO: 5526 - protein, 334 aa, Fulvimarina pelagi HTCC2506
MKRASESFDPEGKPSTAILSALRTIATEAEGLKALSESLVGDRANAFERTIARILEMRGRIVVTGVGKSGHIGTKMAATFASTGTPAFFVHAAEANHGDLGMIGQDDIILALSWSGETSELKGILDYSRRFGITLIAMTSKPDSALGRSADEILQLPQATEACPHGLAPTTSTALQMALGDALAVALLEQRRFTPQDFRIYHPGGKLGASLVKVGDVMHSGDEMPLVTSNTLMSEAILVMSRKSFGCVAITDEAGRLSGIITDGDLRRHISSDLLAKTVDDVMTRNPKTVEPDTLAMAALETINASNITSLMVVREAQPVGIVHLHDLLRIGVA

SEQ ID NO: 5527 - protein, 292 aa, Fulvimarina pelagi HTCC2506
MAKTAFIGLGVMGYPMAGHLKNKGGHDVTVWNRTGSKAEKWAGEYGGAHAKTPGEAAKGAEFVFMCVGNDDDVRSVVYGDDGVLAGMESGATLIDNTTASAELARELAEACGKKGVRFIDAPVSGGQAGAENGQLTVMCGGDQAAFDAAKPVIECYAKMVGLMGTSGSGQITKMMNQICIAGLVQGLSEAIAFGQNSGMDIEKVISVISKGAAGSWQMENRWKTMNDDHYDHGFAIEWMRKDLGMCLAEAKRNGSQLPVTALVDQFYSEVEAMGGKRWDTSALLARLRKPAK

SEQ ID NO: 5528 - protein, 481 aa, Fulvimarina pelagi HTCC2506
MADSNPRLVAVSNRVGPLSDEGQAGGLVVGLSDALKRRGGVWFGWSGETSKEGTQGEAKTEVQENVEMTTIDMSQEELQGFYYDYANRSLWPLLHYRLDLAEFDRVSDKVYRQVNHRFAVRLMPHLKENDLVWVHDYHFFYMGSELRQAGYKGRLGYFLHIPFCAPEVFSALPASHDIVRALLAYDVIGFQTDTDRCNFVSFCISELGGEKLDEDRVRVGDRTVIAKPFPIGIDAEGYARFAVSPEAGEHEEMLLSMTRDRRNSDGEGAERKLIVGVDRMDYSKGLLERFYGFERLLEDYPENCGSAIFLQVAPLSRSELDAYAELRDELERTAGHLNGRFATLDWTPLQMMTRGFTRKALAGIYRAARVCLVTPLRDGMNLVAKEFVAAQDPEDPGVLILSRFAGALDELKCGCIVVNPYNTDDVAAAMQRALTMPLEERKRRWEAMREAVFTGTAQRWCQSFIDMLETSHHEPAAQTSS

SEQ ID NO: 5529 - protein, 311 aa, Fulvimarina pelagi HTCC2506
MPEVVISEFMDEAAVDALRARHETLYDPDLVDRIEDLKAALKGAKALVVRNRTKVTAEILKASSDLQCVGRLGVGLDNIDLKACEAAGVTVYPATGANDVAVAEYVVSSALSLLRGAYHRSADVAAGRWPRQQMIGREAMDKRLGLVGFGGIARQVAARGRVIGFEIAAHDPFLPEADAAWQNATRLDLGALLETSDVISLHVPLTEGTRHLIDGRAIAGMKPGAILINTARGGVVDEPALTEALRAGKLGGAALDVFETEPLTAEAGRIFDGIANLILTPHIAGVTEEANVRVSALTAENVLNHLAKGRP

SEQ ID NO: 5530 - protein, 378 aa, Fulvimarina pelagi HTCC2506
MPLDVVHAGYLPLLDSASLVVAVRLGFAERYGLDLKLHRERSWATVRDRMSVGHFDCAQMPAPLPIAMSLSLGPLNTETFAPMVLNTGGNAVTVGNEVAAALKDEAPTDQSPAAIGAALRFAVARLSERKGRQIRFAVVHRFSCHNYDLRYWLAACGIRPDTDVEITVVPPSLMPEALSSGQIDGFSAGEPWNTIAVRNGAGAIVATKAEIAPNSPEKVLGTSRAFVDDRRDVCERLIKCLLEAGQWCDALENRPALAELMAEARHVAVDETHLMPGLTGELETAPGERRIVGSFLSFSCQGNRPDAGYARWLYRQMMRWGHGRADPTAASIVEKVYQPSVFGTATSADQAPSAGPTATFEPLRFSLFDDGRSNLLSK

SEQ ID NO: 5531 - protein, 461 aa, Fulvimarina pelagi HTCC2506
MASFSSTTRRTVLGLLSATVLSTVSTKAIAEMVFPEKAELKFGFIKLTDMAPLAIAREKGFFEDEGLYVTLEPQANWKVLLDRVITGELDGAHMLAGQPLAATIGYGTQAHIVTPFSMDLNGNGITVSNAVWDEMKQNVPTNAEGKPEHPISASALKPVVDGYKSEGKPFNMGMVFPVSTHNYELRYWLAAGGLNPGFYSPSDTSGQIQADVLLSVTPPPQMPATMEAGTIQGYCVGEPWNQQAVFKGIGVPVITDHDIWKDNPEKVFGMTAEFVEENPQTAIAVTKALIRAGKWLDADDGANRQEAVEILSRPEYVGADAEVIANSMTGTFEYEKGDVRPAPDFNIFFAKNATYPFYSDAVWYLTQMRRWGQIAEEKPDSWYDETAKSVYKPDIYMSAAQSLIDDGHLDASEIPSDTDGYKPATAEFIDGVEYDGKKPNEYLSKFEIGLKGEETTASLSN

SEQ ID NO: 5532 - protein, 501 aa, Fulvimarina pelagi HTCC2506
MQIGVWISLAAYFVLMLAIGFYAWRKSTSSSEEYMLGGRQLSPSVAALSAGASDMSGWLLLGLPGALFASGLVEAWIGIGLFVGAFVNWIVVAPRLREQTERYDNSLTIPAFLGKRFPTKATALRTISAVIIVVFFSVYTASGLVAGGKLFESAFGEFINISGISDYSAGIWLTLAIVLAYTVVGGFLAVSLTDFVQGCIMMLALVIMPLVVLYAGEGSGFSGASNTLSGVDPDFLSLFNGLTFFGFLSAVTWGLGYFGQPHIIVRFMAVRSVREVPKARNIGMSWMAVSLIGAIGVGVFGRAYAQRNGLDVEDPETIFIVLAELLFHPLITGFLLAALLAAIMSTISSQLLVASSSLTEDFYRLFLRKKAGEMEMVNVGRVCVVLVAVVAAFIASDPNSQVLGLVSNAWAGFGAAFGPLIILALTWPAMSGAGAVAGLVTGAVTVIVWITLGWNSSFLGGPGIYEIIPGFLFALIAIVVVSKQTETSGEFRPEGRAQAAE

SEQ ID NO: 5533 - protein, 405 aa, Fulvimarina pelagi HTCC2506
MPLPRDVKKVVLAYSGGLDTSIILKWLQTELNAEVVTFTADLGQGEELGPAREKAERAGVKDIYIEDVREEFCRDFVFPMFRANAVYEGTYLLGTSIARPLISKRLVEIARETGADAIAHGATGKGNDQVRFELSAYALDPDIKVIAPWRDWEFKSRTELLDFAEKNQITVTKDKRGEAPFSVDANLLHSSSEGKVLEDPNEGPPPYVFMRTVSPEEAPDTPTTITIGFEKGDPVSIDGTAMKPHEILAKLNDLGRDNGIGRLDLVENRFVGMKSRGIYETPGGTILLAAHRAIESITLDRGAMHLKDQLMPQYAELIYNGFWFSPEREMLQAAIDKSQSQVEGTVRLKLYKGNVIVEGRESAKSLYNDALVTFEDDHGAYDQKDAAGFIRLNALRLRTLAKRDR

SEQ ID NO: 5534 - protein, 553 aa, Fulvimarina pelagi HTCC2506
MAQSNSVGRVETGPLGPFPHVSVPVFTISAALILGFIIFGAFFTELASSVFPWLQTQIVNKFGWLFIIIVNVALVICFYLAFSRFGDIRLGAQTEKPEYSLFNWVAMLFSAGIGVGLLYWGVAEPLYHFFSPPLEEAETAAAAKEAMVLSFLHWGLHAWAIYAMVGLALAYFHYRHGLPLSIRSALFPLIGTKIYGPLGHTVDILAVFGTMFGIVTTLGLGVIQLNDGMETIFGLPNSAFVQIILIAIITGFAATSVMMGLDDGIRRLSAFNIWLTFVLLAFAVVFGPTLFIFDSFIENTGNYLSQAMYFGSWAEAYSGTDWQVNWTIFYWAWWISWSPFVGIFIARISRGRTIREFILGILFIPCAILFFWFTAFGGVAVELSLNGDPGLIEATKESYGNTIFVLMESYPLTAIVQTLILVMIVVWFVTSSDSGSFVIDMLTAGGHDDPPKIQRLFWASTEGVIAAILLAAGGLNALQAAAVVAGFPFAFVLVLLMWGLVRALGRDKLPLYRNEQFYRNEAEAEAASPSPFVDEKLLKGPPQLLGGRGQPAE

SEQ ID NO: 5535 - protein, 318 aa, Fulvimarina pelagi HTCC2506
MSENEAIGGKEAAPGEAAAGAEATRSGFVALIGAPNAGKSTLVNQLVGTKVSIVTHKVQTTRALVRGIAIKDRTQIVFVDTPGVFSPRRRLDRAMVKTAWSGAKDADILLAIVDAERGVSPELELILERLKDVRQTKVLLLNKIDRIKRDKLLGLTQQIVDKVVFDQVFMISALDGSGCKDLMTWLAGALPEGPWYYPEDQISDLPLRQLAAEITREKVFLRLHQELPYASTVETELWETRKDGSVRIEQTIYVERDSQKAIVLGHKGETIKAIGQAARRDITEAADCKVHLFLFVKVRENWGDDPERYREMGLDFGA

SEQ ID NO: 5536 - protein, 462 aa, Fulvimarina pelagi HTCC2506
MADGSDISGSGTDYFAERQLKRGAAGWLLLVGLGVAYVVSGDFAGWNFGLQYGGWGGLLIATLLMATMYVCMCFSLAELATIAPTAGGGYGFARRAFGPWGGFLCGIAILIEYAIAPAAIAVFIGSYCGSLFGIDGWPVYLAFYAVFLGIHINGAGEALRLIFVITALAVLALIVFVIAMIPHFDTNNLFDIAATDAVGASTFLPFGYVGIWAAIPYGIWFFLAIEGVPLAAEETADPDRDLPRGLIGGISVLLLTAGLILVFGAGGAGSSVLQDSGNPLVAALEAPNAYGEPTLVSRFVNFVGLAGLIASFFSIIYGYSRLVFAMSRAGYLPKVLSLTNRRQSPYLALIIPGIIGFILSLTGQGDLLILVAVFGATISYVMMMASHIKLRLAEPELKRPYRTPGGMLTSGIALVLALIATIAGLLVDPRAVLRAAIVYALFIAYFAIYSRHQLVKGAPGEI

SEQ ID NO: 5537 - protein, 322 aa, Fulvimarina pelagi HTCC2506
MSKPKILVTRRWPEAVEKKLAETYDVTFNENDKPMSKDAMRQALMEYDAVCPTVSDSVDSSVLDVTDPKAKIIASYGVGYSHIDTDAAKKAGIVVTNTPEVLSECTADLAMTLMLMAARRAGEGERELRAGNWTGWRPTHMIGTKISGGTFGVLGFGRIGQEAAKRAHHGFGMKVIYYDAFPVSPEKAAATKAEPRDSIEAVLKEADVVSLHMPGGKENYHLINAERLAMMKPTAILVNSARGEVVDAKALADALNNGTIAGAGLDVFEGEPTIPPPLLETNAVMLPHLGSATKWTRDAMGWRVMDNLEAFFAGKEPGDRVA

SEQ ID NO: 5538 - protein, 371 aa, Fulvimarina pelagi HTCC2506
MRVGCPKEIKNHEYRVGLTPAAVREYVAHGHELIIETGAGSGIDAPDLDYETAGARIVDSAEDVFAAADMVVKVKEPQPQEWAQLRENQILYTYLHLAPDPEQTRGLIGSGVTAVAYETVTDQRGGLPLLAPMSEVAGRLSVQAGARALEKAHGGRGILLGGVPGVAPGKVAIIGGGVVGKEAAKIAIGLGAEVTILDRSIPRLRELDDLFEGRVMTRFSTPTAIDECVFQADLVIGAVLIPGAAAPKLVTRDMLSSMKTGAVLVDVAIDQGGCFETSKATTHAEPTFEIDGVVHYCVANMPGAVPITSAYALNNATLPFGLALADHGLEALKADPHLMAGLNVHRGKITNRAVADSLKTDFVDGPKALAA

SEQ ID NO: 5539 - protein, 562 aa, Fulvimarina pelagi HTCC2506
MYRYDEFDERFVRERVDQFRTQIARRLDGSLSEDEFKPLRLKNGLYLQLHAYMLRIAVPYGTMSGRQLRQLAKIAREYDKGYGHFTTRQNLQFNWPKLKDIPAILDLLADVEMHAIQTSGNCIRNTTADQFSGVAADESEDPRPTAELLRQWSSQHPEFVWLPRKFKIAVTGAEHDRAAIKVHDIGLKLKRNEAGEPGYEISVGGGLGRTPMIGKVIREFLPKDELLAYVEAIMRVYNAEGRRDNKFKARVKILVHETGAEEFTRRVEDEYAKLDGPTINAPQEEIERIAAYFAAPDYEDLPAESVTLDSARREDAGLDRFVEQNGFAHKQPGYIAFTVSLKPVGGVPGDMSADQMDAFADIAEKYSLGELRVTHSQNLVLPYVKKDDVPALYTELKAHGLATANAGLVTDIIACPGLDYCALATAKSIPIAQEIAKTFADDARQKEIGELPIKISGCINACGHHHVGAIGILGLEKGGRENYQITIGGDATEHASLGERLGPGIDGEDVPGAIEAIVETYLGEKQGSESFIETVRRVGADPFKTRFASFVEERSKALEAAE

SEQ ID NO: 5540 - protein, 339 aa, Fulvimarina pelagi HTCC2506
MTIKFLTAALGLSVAALATAGAQAQTAGTVKERGSLRCGVNTGLPGFASQNDQGEWQGLDVDYCRAVATAVLGDPQAVTFSPLSAVQRFPALQNNEIDLLARNTTWTMDRDTALGLDFAGVNYYDGQGFMVKNDLGVNSALELSGATVCVQSGTTTELNLADYFEANDMDYNPVVIESQSDVNSAYDSGRCDVLTTDASGLAASRLEMSNPDNHTILPEIISKEPLGPAVRQGDDQWADIVRWTHYALLNAEELGVNQGNVEEMKNSDNPDIRRLLGQDSNFGEPLGLPQDWAAQVISAVGNYGEIFERNIGVNTPLKIQRGQNALWTDGGLQYGMPVR

SEQ ID NO: 5541 - protein, 607 aa, Fulvimarina pelagi HTCC2506
MGKAYRLSFTSSKKLEGSKKQRNLRPLGRLVPYVRRHMGLAIGATIFLTIAALVTLSLPLAVRRLIDEGFTSSSAYMINGFFGLLFVLAGLLAVSSACRYFFVVTLGERVVAELRKDVFAHVTKLSPAFFDRALSGEIVSRLSADTTQIKSAVGSTASVFLRNAILFIGALGMMIVTSPSLSLIVIAAIPLIVLPLVAFGRGVRRRSREAQDTLADATAYASEAIGAMRTVQAFTSEGTVSKRYSDAVDKAFGAARASIKARAMLTAVAIFLIFSSIVAVLWIGASRVALDMLSPGTLGQFVLYAVFAAGALGQLSEVWGELALAAGAAERLSELLTEEPQVRAPAEPLALPSPAAGRIVFDHVTFAYPSRPDLPTIEDLSFTIAPGETVAIVGASGAGKSTIFGLIERFYDPVAGTITIDGINIAKTDPADLRTRIAFVPQDTTIFAVSAFENIAFGQPGASRAEVRSAAGSALASNFIDALDRDYDTLLGERGVTLSGGQRQRIAIARALLRNAPILLLDEATSALDAESEILVQKALDELMVGRTTLVIAHRLATVLKADRILVLEGGQIVEEGTHQTLIEKDGVYARLARLQFEAGQLRQAAE

SEQ ID NO: 5542 - protein, 642 aa, Fulvimarina pelagi HTCC2506
MAKVIGIDLGTTNSCVAVMDGKNSKVIENAEGARTTPSMVAFTDDGERLVGQPAKRQAVTNPENTMFAVKRLIGRRYDDPTAQKDKELVPYKIVKGDNGDAWVEADGEKYSPSQISAMILQKMKETAEGYLGEKVEKAVITVPAYFNDAQRQATKDAGKIAGLEVLRIINEPTAAALAYGLDKTDGKTIAVYDLGGGTFDVSILEIGDGVFEVKSTNGDTFLGGEDFDMRLVDYFAAEFKKDQGIDLKGDKLALQRLKEAAEKAKIELSSASQTEINLPFITADQSGPKHLTMKLSRSKFESLVDDLVQRTVGPMKAALKDASMSANDIDEVVLVGGMTRMPKVQETVKSFFGKDPHKGVNPDEVVAMGAAIQAGVLQGDVKDVLLLDVTPLSLGIETLGGVFTRLIDRNTTIPTKKSQTFSTAEDNQNAVTIQVFQGEREMAADNKSLGRFNLEGIPPAPRGVPQIEVTFDIDANGIVNVSAKDKGTNKEQRITIQASGGLSDADIEQMVKDAEANAEADKKRRATVEAKNQGEALVHSAEKSLEEYGDKVSEDDRNEIRSAIDDLKAELEKEDADAESIKAKSDTLGQASMKLGQAMYEASQAEQAETDAAADAAKDASNDDVVDADYEEVDDEDKRKSA

SEQ ID NO: 5543 - protein, 394 aa, Fulvimarina pelagi HTCC2506
MLQTISAFDRIGEENAFAVLARANTLSGEGHDVVNLGIGQPDFLTPPHIVEAAVKALQDGHHGYTPATGLPATREAVARRTFSLTGVEISPDSVMIMPGGKPTMFAAILMFGEPGAEILYPDPGFPIYRSMIEFTGAKPVPVPIREENGFAFSAEETLSLITDKTRLLILNSPANPTGGVTPKQEIDKLVAGLENFPDVAILSDEIYDVMTYDGEVHTSLLTYPEIRDRLIVLNGWSKTWAMTGWRMGWSIWPEKLYGMVRKLAVNCWSCVNAPSQIAGIAAIDGPQEDVKRMMEAFDRRRKLVVERANALPGVTCATPKGAFYAFPNISQTGWKSKKLSSALLEKAHVALVGGPDFGILGEGYIRISYANSEMNIARAMDRVAKFLEETEPQT

SEQ ID NO: 5544 - protein, 137 aa, Fulvimarina pelagi HTCC2506
MIQPFGVLNVNRLNKKTARRTCLRRISTRADQTNGDKMFAVIKTGGKQYRVAADDQFTIERIPGEAGDKVELAEVLMVGSKIGTPFVNGAKVTLEIVEQTRGKKVISFKKRRRQNSKRTRGHRQDLTRVRVADIAGA

SEQ ID NO: 5545 - protein, 351 aa, Fulvimarina pelagi HTCC2506
MKFLDQAKVYVRSGDGGAGSVSFRREAHVEFGGPDGGDGGRGGDVWVEAVEGLNTLIDYRYQQHFKAETGVHGMGRNRHGRNGEDITLKVPAGTQVFAEDNETLICDLQKVGEKKKIAAGGNGGFGNDRFKSSVNQAPRHANPGQPGQDLTIWLRLKLIADAGLVGLPNAGKSTFLSTVTRARPKIADYPFTTLHPGLGVAKINASEFVIADIPGLIEGAHRGVGIGDRFLGHVERTSVLLHLVSGNEEDVAHAYRTVRGELEAYGHGLTDKPEILCLSQVDTLDAEARAEKLAALKEASGKTALQLSAVSREGLTEALRRLASEIAAGRETPEEEPGEWRPDLAYGDPDR

SEQ ID NO: 5546 - protein, 644 aa, Fulvimarina pelagi HTCC2506
MNQNFRNFALWAIIALLLIALFQLFSNGSQTANAREIPYSQFLSDVDSGRVTSVTIQGQKITGSYNDGSQNFQTYAPDDANLVERLESGQVRISAAPPGDDTNPIWSMLLSFGPILLILAVWIFLMRQMQGGAGGKAMGFGKSKAKLLTEAHGRVTFADVAGVDEAKADLEEIVEFLREPQKFQRLGGKIPRGVLLVGPPGTGKTLTARAVAGEAGVPFFTISGSDFVEMFVGVGASRVRDMFEQAKKNSPCIIFIDEIDAVGRHRGAGLGGGNDEREQTLNQLLVEMDGFESNEGIILIAATNRPDVLDPALLRPGRFDRQVVVPNPDVTGREKILKVHTRNTPLAPNVDLRTIARGTPGFSGADLANLVNEAALMAARRSKRLVTMLELEDAKDKVMMGAERRSMAMTEDEKKLTAYHEAGHALVGIHVPGNDPLHKVTIIPRGRALGVTMNLPERDRYGMRKNEMEARLAMIFGGRAAEEIIYGAENVTTGASNDIQQATNMARAMVMEYGMSDKLGRLRYKQNQDEVFLGHSVAQQQNMSEDTARLIDSEVRGIVEVAENKARQILNDNIEQLHLLAKALLEYETLSGKEVDDLLNGRPLTRDMGDDTPPSRGSSIPKAGTSRPSHGGETGEGGMEPQPT

SEQ ID NO: 5547 - protein, 603 aa, Fulvimarina pelagi HTCC2506
MEMNRNFLIAMALSIMVLVGWQFLVIGPRMDEQQRQNEIAQNEGSLQTPQTPAGSDQDSLTAPSGRESMVPSPNLPQNQSREQVIAGGNRVTIDTPELTGSINLTGARLDDLRLKHYHETVDDSSPTIVLLSPEELPNGYFAEYGLIQPGTGQLVGANTEWQAEDGAELTPDTPVTLTATTESGLTVTRRISVDDNFMFTYEDTVENTGDAAVQVSPYGRIARYSKPEVAAAFVLFEGLLGVFGEEGLDEVSYSDIEDDTRLRQPASSGGGWLGITDKYWATALVPEVGRDFESQFLYRTNGRSHYQTEFVSDPVSIAPGAAASMVNRTFAGAKEVDKINAYEEQLNIRQFGQLIDWGWFYFITRPMFTALDYIYRLVGNFGIAILAVTVILKLIFFPLANKSYKSMARMKTIQPKVMELRERFKDDRQKQQQEMMQLYRSEKINPAAGCWPILIQIPVFFALYKVLYVTIEMRHAPFFGWIQDLAAPDPTSIFNLFGLLPYDVPGILLIGVWPLLMGLTMFIQMRLNPTPPDPTQAMIFTWMPVVFTFMLATFPAGLVIYWTWNNFLSIIQQSVIMKRNGAKIELFDNLRGMFKRKEKPSES

SEQ ID NO: 5548 - protein, 457 aa, Fulvimarina pelagi HTCC2506
MTSTTFDGFGLAEPLTRALARLELTTPTPIQERAIPHALAGRDMLGIAQTGTGKTAAFALPLLHHLMTVGGKPTTRTTKALILSPTRELAVQIAESIADLSEGTPISHCVVFGGVSVRPQIQALARGVDILVATPGRLLDLMEQRAIDLRETRHLILDEADRMLDMGFVRDVMKIVGKCPDDRQSMMFSATMPKPIEDLSKKILTNPQKVSVTPAVVTVEKIAQSVFSVPQRAKKHWLIDFVSKNDTGRIVVFTRTKHGANRLTSDLDKAGIQALAIHGNKSQTARQKALGAFQDGEIDVLVATDIVARGIHVDDISHVVNFDLPEEPESYVHRIGRTARAGRSGQAIALVDPSERAKLKQIIKLTGIDLTPQATDYTVNVLAGELDADDGKRRGPRNQQPRNGRPRNRGKNGNGGRPNGGAKRQNAGGETANRSSQRPSGKPRRSRRSGDRSAANA

SEQ ID NO: 5549 - protein, 320 aa, Fulvimarina pelagi HTCC2506
MADPRPDHAFTAPGTLGTSGDPTYAGALSFMRRRYTKDVAGTDVAVWGIPYDGAVSNRPGARFGPQAIRRASAIFDNDPQYPIHRDLFEHLSVVDYGDCALDHRRPEIAHTAIRAEASDLLEKTGFLLSLGGDHSVTFPLLEAYREWHEPLSLVQFDAHQDTWPVARDEDDKSRVDHGSFVKASVEAGLIDPETSIQVGIRTHAPETCGLDILYGYEVEEMSSKAIAERIYERTRGTNVYLTFDIDCLDPAFAPGTGTPVAGGPSSAKILAVLHHLKNLDFVGADVVEVAPAYDHADVTAIAGSTVAMYVLGILAEKKAA

SEQ ID NO: 5550 - protein, 333 aa, Fulvimarina pelagi HTCC2506
MSERQKPLVVITRKLPAPVELRMAELFDVRTNVDDRPMSHLDLVAAVREADVLVPTITDRIDRNIIEKAGEKLKLIANFGNGIDNIDISAAHERSIYVTNTPTVLNEDTADMTMALILAVPRRLVEGANLLQAPEPWAGWSPTWMLGRRIWGKKLGIVGMGRIGTAVARRAKAFGLEIHYHNRRRVNLQTEKELGATYWESLDQMLARADIISVNCPSTPATFHLLSARRLALIQPNAFIVNTARGDVIDEKALVDLIEAGKLAGAGLDVFETMPSSNRKLMKLAASGKVVLLPHMGSSTLEGRIDMGEKVIINVRTLMDGHRPPDRILPDRT

SEQ ID NO: 5551 - protein, 399 aa, Fulvimarina pelagi HTCC2506
MKVFIPREQEGETRVAASPDTVKKLKGLGAEVVIQSGAGEHSKITDKAFEEAGAKIGDDKSGEDADVVLKVIRPTKPEAAGYKDGAVVLALMDPYGNETALRDLAEAGILAFSMELMPRITRAQVMDVLSSQANLAGYQAVIDASHEFDRAFPMMMTAAGTVPAAKVFVMGAGVAGLQAIATAKRLGARVSANDIRPATKEQVESLGAKFIAVEDEEFKEAEDSGGYATEMSAEYQKKQAELVEQHIAAQDVVITTALIPGKPAPKLVSKAMIEAMKPGSVLVDLAVERGGNIEGSKAGEIVDVGPARVIGYKNVAGRIAASASLLYAKNLSSFLETMIDKEAETAALKIDFEDELVKATLLTRGGKVVNERFGGTSSADSQESSGETAAKGNKGEGDS

SEQ ID NO: 5552 - protein, 448 aa, Fulvimarina pelagi HTCC2506
MAAASVTVAAFLQASVALAQDAGAGAEAAAATVDKGDVAWMMTATLLVLFMTMPGLALFYGGLVRAKNMLSVLMQCTMICGIMIIAWVVYGYSFAFGGGTGYFWGGLGKLFLAGVTVDSTAATFTDGVEIPEYLFIAFQMTFAVITPALIVGGFAERIKFSAVIAFVLIWTTFSYYPVAHMVWDGAGLIFNGALSGGIAAVDFAGGTVVHINAGIAALVGAFVVGKRLGLGKDNMAPHSMTLTMVGAAILWVGWFGFNAGSNLESTAAAVLAMINTFTATAGALVAWAAIEAAARGKASMLGGASGIVAGLVAVTPACGTIGPVGAIVLGAIASAGCYFFVAVVKNKLQYDDSLDVFGIHGIGGIIGAVGTGVFTSSALGGIGYGEGVTMVSQVWAQIVGVLITIVWSGVVSVIAFKIVDLTIGLRPSQDDERQGLDLAYHGEVAYHS

SEQ ID NO: 5553 - protein, 458 aa, Fulvimarina pelagi HTCC2506
MNLKKIFYFAALGAGLTATAAFAQDAAAPAAEAAADAAAPAADAAASGEAPGDQTAYIFNTLLFLMGGFLVMWMAAGFAMLEAGLVRSKNVSMQCLKNIGLYSTAGIMYWACGYSLMYTGVDGGYIGTLAPYSWDPVGGDALSTGYSTASDWFFQMVFVATAASIVSGTLAERIKLGSFMVFVIILTGFIYPIAGSWQWGAGWLSEMGFSDFAGSTLVHSVGGWAALAGVLLLGSRTGRFAKDGTAVPMPGSSIPLATLGTFILWLGWFGFNGASQLAMGTIGDVTDVSRIFANTNLAAAGGVVVTMILLQVIYGRVDVTMVLNGALAGLVSITAEPLAPTAWQAILIGGVGGVIVVFTVPLLDKLKIDDVVGAIPVHLFAGIWGTIVVPATNGDASYVTQLIGVVAYGIFTFVASLVVFGIVKAIMGLRISAEEEALGLDRSEVGVEAYPEFATGQR

SEQ ID NO: 5554 - protein, 307 aa, Fulvimarina pelagi HTCC2506
MAKYLELPVGEALVRRFADQEIFVEIQENVRGEDVFVVQSTSYPANDHLMELLIIIDAMRRASARRITAVLPYFGYARQDRKAGGRTPISAKLVANLITHAGADRVMTLDLHAGQIQGFFDIPTDNLFAIPLFARDIKEHQDLSNLTVVSPDVGGVVRARALAKRLDAQLAIVDKRRERPGESEVMNIIGDVEGRNCILIDDIIDSAARSAMRPQPSSMPVRERFGYITHGVLSAARLHASLHQASSNSSSLIRSSRPRRSARPTISASSQPPISLAKRSLAQLRKNRSPACSTERFRPSIEARLEC

SEQ ID NO: 5555 - protein, 214 aa, Fulvimarina pelagi HTCC2506
MANRASAEYELFTADDLRLRFESRSDQPAPDREFGDHLLNPDIVQLMEREGAREAAVLVPIVDRRDGASVILTQRTQSLRKHSGQIAFPGGSVDKTDPSPEDAALREAHEEISLAPEEVKILGRLPRYLTTTGFRITPVVGIVRPGFELEANPAEVADIFETPLSFLMTEANHVRASKVWGGVERHFYEMPYGERYIWGVTAGILRTLYERYYA

SEQ ID NO: 5556 - protein, 434 aa, Fulvimarina pelagi HTCC2506
MTTPLRIGIAGLGTVGASLARLLQTKTDSITRRAGRPIELVAVSARAKTKNRGFDASGLAWYDDPSALAREAEIDGFVELIGGSEGAALECVRAALERGVPVVTANKALLAHHGVELARLAAENGTELLYEAAVAGGIPIIKTMREGLSGNEVSRVYGILNGTCNYMLTRMEREGLSFDLCLKDAQDLGYAEADPTFDIGGFDAAHKLGILTSLAFGTEIDADSIYVEGIEAVTAEDIAAAGELGYSIKLLAVAQRTDTGIEQRVHPALIPAAAAMAQVSGVTNAVAVDTDLLGSIMLAGPGAGGDATASAVLSDIMDIATGVVLPTLGIPADKLQPYVRARMRAHEGGYYIRLSVHDQVGAFASIATRMAENGISLESIVQRRRARAGDKANAQVILVTHETTENAVREALRAISDDGHLGGQPQMLRIERLD

SEQ ID NO: 5557 - protein, 601 aa, Fulvimarina pelagi HTCC2506
MDTMSNQSIEAGGKREMTGAEMVVTALKDNGVKDVFGYPGGAVLPIYDEIFQQTDVRHILVRHEQGAGHAAEGYARSTGKPGVMLVTSGPGATNAVTALQDALMDSIPLVCITGQVPTTLIGSDAFQECDTVGITRPCTKHNWLVKDVNDLARVLHEAFHVATTGRPGPVVVDVPKDVQFATGFYSPPPPDQTHESYRPKLTAEAEKISQAIELMASAKRPIFYTGGGVVNSGPEASELLTELVNLTGYPITSTLMGLGAYPASGKSWMGMLGMHGTYEANLAMHDCDLMICIGARFDDRITGRIDAFSPNSRKIQIDIDPSSINKNVRVDLPIIGDVAHVLRDLVAAWKKQGATTDKPALHDWWMQIEKWKARDCLAYSPNDDVIMPQYAVQRLYELTKDRETYVSTEVGQHQMWAAQFYGFEKPNRWLTSGGLGTMGYGLPAAIGAAIAHPDALSLCIAGDASVLMNMQEMSTAVQHNARIKIFILNNQYMGMVRQWQQLLHGNRLSNSYTEALPDFVKLAEAYGGHGIRCQKPGDLDDAIHEMLEYEGPVLFDCRVANLANCFPMIPSGKAHNEILLPDEATDEAVANAIDAKGRALV

SEQ ID NO: 5558 - protein, 394 aa, Fulvimarina pelagi HTCC2506
MSNTESIVIAGAARTAVGSFNGGLSSVPAHELGAAAIKEALSRAKVDPNEVDEVIMGQILTAAQGQNPARQAAMAAGCPKETTAWGLNQLCGSGLRTVAIGMQQIAMGDAKIIVAGGQESMSMAPHAQHLRKGQKMGDLKLVDTMLKDGLLDAFNGYHMGNTAENVSNQWQITREMQDEFAAKSQNKAEAAQKAGRFKDEIVPFTVKGRKEDTVVEDDEYIKYGVTAEGIAKLKPAFDKEGSVTAANASGINDGGSAVVLMTESEAEKRGITPMVRIVSWATAGVDPSIMGTGPIPASRKALEKAGWKIDDLDLVEANEAFAAQACAVNKDLGWDPEIVNVNGGAIAIGHPVGASGNRIFNTLIFEMQRRNAKKGLATLCVGGGMGVAMCVERL

SEQ ID NO: 5559 - protein, 370 aa, Fulvimarina pelagi HTCC2506
MDAHTPEPYKSPVPTGYFRWEPEEDEFLICRAVRDETHDVKTFVLAPRNERQFEFVSGQFMTFEFEIGGETIQRCYTISSPPSRRDTVSITVKRVPGGPVSNWLHDEFKPGMMVKATIPMGEFTWSGMQQSKYLFISGGSGITPMMAMTRSAYDLALISDIEFIHAARTPADIIFRDELDFMGRRNHWIKPTFICEQDAPFERWNGFRGRFDRQKLEVICPDYAERTVFVCGPAPFMKAVKTTLKDAGFDMSRFYQESFNFDSFTEEAQEQIAEATEAITTDVRVFQLEFTKTGRTVECPEGITVMEAARRAGIRVPSSCSKGLCGTCKSTITAGTVDMKHSGGIRQREIDRGMALLCCSKPTSDLVIDR

SEQ ID NO: 5560 - protein, 264 aa, Fulvimarina pelagi HTCC2506
MLKILTSTLVSTTLLAAVPALAQESDADKDWSNIVVGTEGAYPPFNFLDASGELQGFDVDIARALCNEMGVECSFVTQEWDGMIPALQNGNFDLIVASMSITPEREEQIDFTNKYYNTPPAVAVLKDSDITDATEEALSGKTIGAQVSTTHARAAEEYFPDAEVRQYPSAEEYKLDIESGRVDAVLDDVVVLDQWLKSEAGACCKLLGTLPAEEQIYGEGIGIGLRKDNEKLQGMVNEAIAAIREDGTYEEIQSKYFDFDVYGE

SEQ ID NO: 5561 - protein, 458 aa, Fulvimarina pelagi HTCC2506
MICTGRSDYPNQVNNVLCFPFIFRGALDCGATHITEKMKMAAVDAIAALARENVNEVAAKAYGSGTPIFGPQYLIPTPFDPRLILKIAPAVAEAARQEGVATRPIEDMNQYMEQLNRFVFRSGLIMKPIFKVTQGTDHKVIFADGEDERVLRASQVLLEDRVCQPILVGRPSVIESRLERFGLSIAPGKDFQVVDPTDDPRYRDYVDAYFAKVGRKGISPDSARTIMRTNSTVIAATAVTRGEADAMICGLEGRFPHHVRDISQVIGLEPGVRRFAALSVLIAQQGSKFFVDTYVQRNPSADDIAEMTILAADEIKRFGIEPKAALVSHSNFGSDDTEDTRKLRNALGIIREQRPDIEIDGEMHGDAALNQATRDRTMPASTLTGEANLLVFPTLDAANITLNVVKTMLDALHVGPILLGTNSPAHVLTPSVTSRGVVNMAAIAAAQCVQNAKQIENG

SEQ ID NO: 5562 - protein, 322 aa, Fulvimarina pelagi HTCC2506
MLLTDPIDACEAARLGENAEVVTFDETGDLTFEEELAEASFVVVRRAIPAGALENAPKLRALVRHGAGLDFIPVQAASRLGIAVTNTPSVNAKSVAEHVFGLIICLARRIVENDAGIRRNEWHALRAAAPGSCEIAGKALGLIGYGGIGQAIAQIGKLGFGMNVLAATRWPREDEDGVSFHPLTDVAAKADILVVACPLSEETRNLVSEEIIAAMPPNAILVNVARGPIVDEAALSAALRAGHIRGAALDVFSDQPLPADSPLRSAPNTLLSPHVAGVTAEAMARMSRTAVDDILTMILGNQPRHLVNRKAWPMIARRWSHL

SEQ ID NO: 5563 - protein, 249 aa, Fulvimarina pelagi HTCC2506
MFGTTSSQAKGRAMTGTASEDLGAREKSLSKTLLFQALEPAARRDLSTYAFTRTHGAGDPIFAAGDEGRAMMAIVTGQVRISLVTPNAREVVLADLHTDEVFGEIALLDGGERSADARALTNVTLLVLERRDVMKVLKAYPESALKLLELLCARIRRSDERMAELAFLDISTRLARALLRILDGPNRTGRKGIQRLSLSQTEMAQMIGSGREPVNRCLKGWERRGVVELKDGWLVVSDRGALELLAAQE

SEQ ID NO: 5564 - protein, 176 aa, Escherichia coli
MGSSHHHHHHGSSQKYLFIDRDGTLISEPPSDFQVDRFDKLAFEPGVIPQLLKLQKAGYKLVMITNQDGLGTQSFPQADFDGPHNLMMQIFTSQGVQFDEVLICPHLPADECDCRKPKVKLVERYLAEQAMDRANSYVIGDRATDIQLAENMGINGLRYDRETLNWPMIGEQLTRR

SEQ ID NO: 5565 - protein, 176 aa, Escherichia coli
  misc_feature (20)..(20): Xaa can be any naturally occurring amino acid
  unsure (1)..(176): unsure at all Xaa locations
MGSSHHHHHHGSSQKYLFIXRDGTLISEPPSDFQVDRFDKLAFEPGVIPQLLKLQKAGYKLVMITNQDGLGTQSFPQADFDGPHNLMMQIFTSQGVQFDEVLICPHLPADECDCRKPKVKLVERYLAEQAMDRANSYVIGDRATDIQLAENMGINGLRYDRETLNWPMIGEQLTRR

SEQ ID NO: 5566 - protein, 69 aa, Hyphomonas neptunium ATCC 15444
MATGKVKWFNDQKGFGFIKPDDGGADIFVHISAVERSGLKTLAENQSISYELYKDERRGKTSAVDLKVL

SEQ ID NO: 5567 - protein, 253 aa, Hyphomonas neptunium ATCC 15444
MLKIENLSATVGEPDAAKTIINGLSLEVPAGEVHAIMGPNGAGKSTLSYVLTGREGYEVTGGSATLDGQDILALDPEDRASAGLFLSFQYPIEIPGVPVMTFVRTAMNAQRKARGEPEISAPDYLKKSRDVAKMLNLDADMLKRPVNVGFSGGEKKRLEIYQMLMLEPRFMVLDETDSGLDIDALRTVAEGVNALRAPERGMLVITHYQRLLDYIKPDKVHVLAKGRIIKSGGPELALRLEKEGYDGVLAEAV

SEQ ID NO: 5568 - protein, 639 aa, Hyphomonas neptunium ATCC 15444
MNVRNLAIWGALALLVIGMAVMMGGNPEVARADPTKLSEIYQLAEDGKLADATLGDTTIIAKTTDGRTLKSELRALDMKTEDILTQNNVPFSVKPDTGRNNVASVLLSLLPILLIVGFVFFMMRQMQGGGTRGAMSFGKSRARLLTEKHGRVTFDDVAGVDEAKEELQEIVEFLQDPSKFQRLGGKIPKGALLVGPPGTGKTLLARAVAGEAGVPFFTISGSDFVEMFVGVGASRVRDMFEQAKRSAPCIIFIDEIDAVGRSRGAGLGGGNDEREQTLNQLLVEMDGFEANEGIIIMAATNRPDVLDPALLRPGRFDRQVTVGNPDIIGREKILRVHMRNVPLAKDVETKTIARGTPGFSGADLANLVNEAALLAARRGKRVVAMQEFEDAKDKVLMGPERRSMVMSEKEKILTAWHEAGHAVVAMKVPAADPVHKATIIPRGRALGMVMQLPEDDKLSMSKVEMTSRLAIIMGGRVAEELKFGDDNVTAGAASDIQQATRLARAMVTRWGYSDIIGPVDYGSDQGDVFLGQQLMQSSHISEDTSRKIEEEVRKLIEKGKEDARQVMTEFRKEWEAIATGLLEFETLTGEEIAGLLKGTPPSRPDISDDDAGPASAVPVIGKRKKPKDDGIGDAEPNPA

SEQ ID NO: 5569 - protein, 337 aa, Hyphomonas neptunium ATCC 15444
MKKPPRRVVVTQKFFDDAAIAFLQDRNIEVILPNLPEGKGEGDLNVEDIRLLLEGAGGWVVGHARITRAVFEALPDLAVISRRGVGYEKVDVEAARDLGRVVAIAAGGNDASVADQVIGMMISIGRRFQEAQSAMKAGKWNILVGTELYRRKVGIVGFGRIGRSLARRLSGFEAEILVCAPRLASEDIETFGLRHVAFETLLKEADYISVHAPLTPETRHMFNAAAFGRMKPSAVLINSARGGLVDDTALLAALESGQILGAGLDVYESESDPSKQPVTDALIARHDVIAAPHAGASTHEALARTNRIAALCAAEVIDGGNPPAACIVADGRSAPGS

SEQ ID NO: 5570 - protein, 491 aa, Hyphomonas neptunium ATCC 15444
MAKTILVVDDDPTQRRLLQAAVEKAGFACRTAPDGETGLQMASDAREGVDVVLLDLTMPGLSGMDTLERLNGKRPDLPVIMLTATSGIDTIVQTMRRGAVDFIVKPANPERVVVSIRNALKMQSLTGEVKRLSRKVEGGMKFEDMIASAPAMRSVIRMAERGAASDIPVLILGESGVGKEVVARCIQGASQRAGKPFVTVNCGAIPENLVESILFGHEKGAFTGAVSKAPGKFVEADGGTLFLDEVGELPLDAQVKLLRALQEGEVDAVGSRRPTKVDVRIISATNRDLAGQVKAGTFREDLFYRLNVFPIDMPSLNERREDIPALVDHFIARFNASEGTKVAGASEDTLKMLYSYDWPGNVRQLENAVFRAVVLCDGDELRPQDFPQISGQMADVMMMPAIPAQRPPEAPPVPANDVKRGFVGDVPVAIKDEDGEIRSLQDIERDLLQYAIEFYDGHMSEVSRRLGIGRSTLYRKVREYDLEVRGDRETG

SEQ ID NO: 5571 - protein, 342 aa, Hyphomonas neptunium ATCC 15444
MPPSNSRTRHQRQPGVRSITVLTSQSDLDLARNVIRTERNALEKLEQTLGPSLEEAVSTILATDRHVIVAGVGKSGHIGQKIAASLASTGTPSFFLHPTEASHGDLGMIVPGSVVIAISYSGESRELIDLLRYCKSNAIPLIAMTRARESTLGRYADVLLELPTVPEACPNGLAPTSSTTMALALGDALTIVLMARRGFSTEDFGFRHPGGKLGRTLQTAGDYIRDHKDPLPLASAGASFEELVIAVSEGRKGCVGIIDETRKLIGMVTDGDLRRAILAGRTNASAREVMTPGPRTIDPDARMMSVIKSFSENRISNAFVVDETGAPAGLIDMKDLLAEGYV

SEQ ID NO: 5572 - protein, 400 aa, Hyphomonas neptunium ATCC 15444
MQIFLQGAGLIERLYIREVMIYADYNATAPLRPEARAAMLAAYELGPVNPSSVHKAGRAARAVVEKARAEVGAAIGSRAEDIVFTSGGTESLALAIQGAVAGLDGAATLIVSAIEHEAASKAAAHAGVPVETAYILPTGQVDLDDLRVRLAAWDRGLKGTPILVLMLANNETGILQPVAEAAALIREAGGLTVCDAVQGLGKVAVNVALLGVDYLALSAHKVGGPQGTGALWHRAGAPLKAVLYGGGQERGLRSGTENVAGIAGFGAAMSQAVLDLSRYVSLGTHRDAMEARLKAEGGVIVIGEGSPRLAGVSNFARAGFRAETQVMALDLAGVCISAGSACSSGKVKRSLVLMAMGADDALAESAIRTSFGWNSRPEDFRHVADAWLEAARRTVLKESV

SEQ ID NO: 5573 - protein, 373 aa, Hyphomonas neptunium ATCC 15444
MRIGVPTEIKKQESRVGLTPESAGELVRAGHQVNIQAGAGIASGFADETYTAIGAAILPDAEALFAQSDLIVKVKEPQPEETARLTKDHTLFTYLHLAPDPVQAKGLMNSGCLAIAYETVTDAHGGLPLLRPMSQVAGRMSMQVAAGALMRTKGRGRGILLGGVPGVAPAKVVIIGGGVSGTHAAEIAVGMRADVWVFDRNNERLGELDEQFRGTINTMYSTAHSLAEAIKDADLVIGAVLIPGASAPKLVSRAQLSTMQPGSVLVDIAIDQGGCFETSRPTTHDDPIYEVDGILHYCVANMPGAVPRTSTYALNNATLPFVMQIANLGARNAINANKHLANGLTADQGTIAHKLVARDLGEKYVRPDWLTVV

SEQ ID NO: 5574 - protein, 755 aa, Hyphomonas neptunium ATCC 15444
MTTQRPSFTDQEALDFHSHPTAGKISMVPTKPMGTQRDLSLAYSPGVAIPVLAIAENPDKAYDYTSKGNLVAVISNGTAILGLGNLGPMASKPVMEGKSVLFKRFADIDSFDVEVDTTDVEDFIRTVRNIGATWGGINLEDISSPACFIIESRLRDELDIPVFHDDQHGTAIIAAAGLINACHITGRQLKDTKVAISGAGAAGLSVAGLIRHLGVKAENILICDTAGVVYEGRTEKMDQFKSAFAVKTAKRTLTEAMDGADVFLGLSVKGAVTKEMVKSMAKNPIIFAMANPDPEITPEEIKSVRSDAIIATGRSDYPNQVNNVLGFPYIFRGALDVRARGINEEMKVACARALAELAREDVPDEVAAAYHGARPSFGREYIIPSPFDPRLISFVPPFVAQAAMDTGVARKPIADMDNYRRSLIRRADPSAAFLQGLQARARETQRRIVFAEGEEPAVVRAAYSFKNQGLGHPILIGREAQVERAMEQMGIPLGSLDIINARLSDKNPVYVDFLYERLQRRGYLKRDVQRLVNQDRNIFGSCMLKNGDADGMVTGVTRNYDAALKDAMLVLDPIAGQALIGMSMVINLGKTIFIADTSVHELPDGPTLANIALEAARAVRALGFTPRVAFLSYSTFGNPMGERGDRVREAVAILDQRTDIDFEYEGDINADVAMNPNHRMVYPFSRLSGPANVLVMPAIHSASIATNLLEAMSRATVIGPMLFGLEKPVQISSLGATVGDIVDLATIAAYDTDNV

SEQ ID NO: 5575 - protein, 380 aa, Hyphomonas neptunium ATCC 15444
MIPLRLGYVPLNDCAPLVMAQALGLFEAQGLDVRLVRQNAWSTARELIQLGMLDGGHMLAPAVVARWLDGGPGGLVAPMALSLNGNSIIVSLALYGRMCDALGHPPRTALEAARSLHTVVSADAAAGRRPLTFAAVFPESRQYIELKRFFSAGGIDPDLIRILIVPPPEVDGFLERDLVDGYCVGEPWGSYSVARGYGAMVASSLDLRPAGIEKVLAVGPPILEADATGALVRAVSGASVWLDQPGNRAAAAGVLSQKGFVPVPEEVVRRGLEGQIVRYPGGAAETHADFMVFDRYAAGFPWLSQARLIAEELVASGVSVSAMGAEQAFRPDLYRAALAGSGRSLPGTDEKPEACHPAGWTFGDADQPIEMGPDRPLFDL

SEQ ID NO: 5576 - protein, 403 aa, Hyphomonas neptunium ATCC 15444
MAADIRLSDAIARVKPSATIAVTTKANEMKRQGLDVIGLGAGEPDFDTPENIKEAAIRAMREGKTKYTPSDGIPELKEAIVAKFARENGLTYKPSQVNVSPGGKAVLFNAFMATLNAGDEVVIPAPYWVSYPEMVLLCGATPVAVPCGADTAYKLSPEKLEAAITPKTKWLILNSPSNPTGAAYTGAELKALADVLLRHPQVWILTDDMYEHLVYDGFEYKTIAQVEPALYDRTLTMNGVSKAYAMTGWRIGYAAGPEKLIGAMRKVMDQSTSNPCSISQWASVEALNGPQDFLPVFRAAYAKRRNLMVDGLNQAAGIVCPKPEGAFYVYPSCAGLIGKKTAGGAVIDSDKTFAAELLEQEKVAIVFGEAFGLPETFRISYATSDAALTEALVRIQRFCASLS

SEQ ID NO: 5577 - protein, 280 aa, Hyphomonas neptunium ATCC 15444
MAYLAPTDFVTKMIDAGEAKIFMSTRDTLVRAYMAGAILALAAAFAITVTVQTGNPLAGAILFPVGFCLLYLLGFDLLTGVFTLCPLALIDKRPGVTLGGVLRNWTLVFFGNFAGALTVAVMMAIIFTTGFTEAPNVVGEKIGTIGEGRTVGYAAHGWAGMLTLFVRAVLCNWMVSTGVVGAMLSTSVSGKVIAMWMPIMLFFYMGFEHSIVNMYLFPSGLMLGGDFSFMDYLLWNELPTVLGNLVGGLAFVGLTLYSTHIRPGAARNTPARGIVTSPAE

SEQ ID NO: 5578 - protein, 661 aa, Hyphomonas neptunium ATCC 15444
MFKPFIINRPVFFGSVFITLVFLSVGVFFPTRAETIFGTIERFLLENFGWFYLLAVGIVLVAVLLMCLGRYGRLRLGPDDATPDFAFLSWLAMLFAAGMGIGLMFYAVGEPMSHFMAPPTAEPRTIEATREAMAVTFFHWGIHAWAVYAVVGLSLAYFGYRYNLPLTIRSGLYPLLKEKINGPIGHAVDIFAVVGTLFGIATSMGFGVTQINAGLNHLIGLPISPQIQITLIAGITLLATISVVTGLDKGVRILSETNLVIAVLLMLFVLVVGPTADLLRSFVQNLGLYLDSLLLRTFNIYAYEPTPWIDAWTLFYWTWWISWSPFVGMFIARISRGRTVREFILAVLFIPAGFTFFWMTVFGNTAISIDTGVAAGELGQAIAADISVGLFQFFEYLPFPALTSTLAVLLVTIFFITSSDSGSLVIDSIAAGGETVTTTGQRVFWCALQGIVAGSLLLAGGLDALQSATIASALPFTFVLLALVWSLVVGMRADLHQQAHAAARHVPGAQPAAGLTWQRRLALILHAPTQAEVEKFIAREVRPALEQVAQELSDTGRPTQVAQEEHGGVALRSPADGSRDFVYGVSVTPQRLASLSPLQTRPEFRFEARTYFSSGGRGYDVMGMHREQLIADILVQFERYLAVVQSPEAQLLHGAPGHDFE

SEQ ID NO: 5579 - protein, 288 aa, Hyphomonas neptunium ATCC 15444
MARTAFLGLGVMGFHMAGHLARAGHQVAVWNRSPAKSAAWTGVHRGEAAKDPASAVFGAEYVLLCLGDDPDVRAVFDAFEPSLGAGMTVIDHTTASAALARELAERCRAKGAHFIDAPVSGGEAGAINGKLTIMCGGEEAPFAKAEPVMNAFARAITLIGPSGAGQLAKSVNQICIAGIVQGLAEGLHFAEKAGLDAEKVIAAISGGAAQSWQMENRWKTMTDGKFDFGFAVDWMRKDLRITLDAARENGASLPLTAQVDQYYADVQAMGGNRWDTSSLIARLGRKPD

SEQ ID NO: 5580 - protein, 606 aa, Hyphomonas neptunium ATCC 15444
MEPQEQRNFLIAMAAMIAFVFLYQYFVMEPAQKRYEAEQAVAVAAEQAAVTDTGVAEILGPKSLEDALAEDGRVKFDANAVDGTIRLAGARIDDLSLKQFYTTVEREAEIRLLRPEATEGAYFGTYYWADGNALVAGRNSVWTQVGGDTLTTATPVTLRLETEGMTIDREISIDANYMFSFRDTLTNTSGAARTVRAIGSFERHGDWKRFLEITDPASATSGGPAHLGLMGVADGELRLQKYKPLMQSKKISGESGEGTFFSDEGGWWGLTDMYWMGALVPEQARPFTASVNRASLARGGPLEVRTEGAAIEVAPGASVTVENGLFAGAKQFEVLQGYEKSGLPRFVDAIDWGWAYFLTKPFFYVLHWLNGYLGSFGWSILAFTVLVKLPLVPLYNASFKSMAKLKKLQEPMKQLNERFAADPQRKQQELMKLYKEEGANPIGGCLPILFTIPIFYALYKTLYVSLEMRHAPFAYLKDLSAPDPTAIGNLFGLIPFWSGADVKSIPIIGIIIGIGILPILYGATMAALQSLSPPPPDKMQARIIMAMPIVFMFVFGGFAAGLVMYWVWSNVLTFIQQYIIMRMNGVETELGKFVATRLGLKKAQAE

SEQ ID NO: 5581 - protein, 1513 aa, Hyphomonas neptunium ATCC 15444
MSDYVTKYEQNRQRLIDGHAYNPEDERDACGVGLVVALDGKPRREIVEMGIKALKNVWHRGAVDADGKTGDGAGIRLDVPQDFFREHVSRTGHSPTDDRICVGQIFMPRTDFGAQEAARTLVEREVLHFGFYIYGWRQPPVDVSVIGQKAKDTRPAIEQIMFRDARNRSPEELERALYICRRRIERRAREAAIQSFYICSLSHKSLIYKGMFLAQDIDNFYLDLRDERFVSAFAIYHQRYSTNTFPQWALAQPFRTIAHNGEINTLRGNRNWMKSHEIRMVSETFGDHTQDVKPVIPDGTSDSGALDAVWELLCKSGRPAPMAKAMLIPEAWSKRDSVMPVAHRALYDYCNSVMEPWDGPAAIAAYDGRWAVAGLDRNGLRPLRYSLTTDGILAVGSETGMCPLGNHEVTRRGSIPAGGMIAADLATGKFYDHREIVDFLAAQAPYEEWLQAVTELEPEIGPGPEPVLFNKEELLRRETAAGYTLETLELILAPMVEGGKEALGSMGDDTAPAVLTMAYRPMSHFFRQNFSQVTNPPIDPLREGRVMSLRTRFKNLGNVLDTDKSQQEVFVLESPVLTTGMYQRLIERIGLGTEIIDCTFDAADVTFEGAALKSALERIRREAEEAVRAGREHIILTDENQSASRIAVPMVLATGAVHSHLVAQGLRTFCSITVRSAECLDTHYFAVLVGVGATCVNAYLAQDAIADRHARGLLGDISIGKAVQNYKEAIEAGLLKIISKMGISVISSYRGGYNFEALGLSRALVADYFPGMSSRISGLGLAGLEENALVRHQQAFDEDVISLPVGGFYRLRASDEPHALDGNLIHTLQAACDRGDYSIYRKYVDAVHARDPLQLRDLLDFKAAGPEVPLSQVQSINEIRKRFLTPGMSMGALSPEAHGTLNVAMNRIGAKSVSGEGGEDRARYRPLPNGDNMNSAVKQIASGRFGVTAEYLNECREIEIKVAQGAKPGEGGQLPGFKVTELIAKLRHATPGVTLISPPPHHDIYSIEDLAQLIYDLKQINPEARVCVKLVAQSGVGTVAAGVAKAKADIILIAGGVGGTGASPQTSIKYAGLPWEIGLAEAHQILSLNNLRDKITLRTDGGLRTGRDIVIAAMLGAEEYGIGTASLVAMGCIMVRQCHSNTCPVGVCTQDEALRAHFTGNPDKVVNLMSFIAEDVREILASLGLTSLDEAIGRTDLLKQVSRGATHLDDLDLNPLLVQVDTDSPVIYKPNHREPVPDTLDAQILRDAEPFFERGEKMQLEYGVQNTMRAIGARASSRITRKFGMHALPEGRLHIRLEGSAGQSLGAFSVQGLLLEVLGDANDYVGKGLSGASIVVTPRPRDRRAAVGDAIIGNTCLYGATSGKLFAAGTAGVRFAVRNSGAKTVVEGCGANGCEYMTGGRAVILGPVGDNFGAGMTGGVGFIWDPQERFERVVNPDSIDWYPLADMPDEYVGEAKALIEEHVRRTGSVRGKELLDAWDTTLSQMLMIVPKEIANLLLVRKGDGAKQKQAERA

SEQ ID NO: 5582 - protein, 631 aa, Hyphomonas neptunium ATCC 15444
MSKIIGIDLGTTNSCVAVMEGGQAKVIENAEGARTTPSVVAFTENGDRLIGQPARRQGVTNPDFTFYAIKRLIGRTFDDPTAQKDKAMSPFSIVKAPNGDAWVKGRDKDYSPQEISAFILTKMKETAEAYLGSKVTQAVITVPAYFNDAQRQATKDAGRIAGLEVLRIINEPTAAALAYGLDKGGNKTIAVYDLGGGTFDVSLLEIGDGVFEVLSTNGDTFLGGEDFDLRVVDFLASEFKKEQGIDLKGDKLALQRLKEEAEKAKKELSSATQYEVNLPFITADATGPKHLNIKLTRAKFESLVEDLVKRTIDPCQKALKDAGKTPAQIDEVVLVGGMTRMPAVQEAVKKFFNREPHKGVNPDEVVAIGAAIQGGVLQGDVKDVVLLDVTPLSLGIETLGGIFTRLIERNTTIPTKKSQVFSTAEDNQPAVTIKVAQGEREMASDNKQLGQFNLEGIAPAPRGLPQIEVTFDIDANGIVSVSAKDKATGKEQQITIQADGGLSEADIKNMMADAESNASTDKARRELVEAKNHAEALIHQTEKQLIEHGAKVTDAIKGDIEKAIADLKEAAAGDNAADIAAKHQALMNAAMKLGEAIYAAQGADAGEGEDAPQSGNDDVVDADFEEVDERK

SEQ ID NO: 5583 - protein, 205 aa, Hyphomonas neptunium ATCC 15444
MFAVIKTGGKQYKVAEGDTIVIERLAAAAGETVTFDSVLMVGAGAGVTVGAPMVAGATVTGEVAAEVRGPKLITRKKRQRQTYRRTIGHRQDLMEVTITSINTDGKAPAKKAAAKKEEAPKADTAPKAAAAPTEEAAAGGDNLKKITGIGPALEKKLNAAGITTFAQIAALSADDIAKLEEELSLAGRFAKDGWVEQAAELAKEA

SEQ ID NO: 5584 - protein, 415 aa, Hyphomonas neptunium ATCC 15444
MARTVLKFGGTSVGDLDRIANVAEIVAARAAKGEKMAVIVSAMSGETNKLVALADGAAGKDLPRSLYDDEYDVVVASGEQVTAGLLALALRRRGLKARSWLGWQLRLKTDNSHGRARIMGFDDSSLPDSIDSGEIAVVAGFQGVTDDFRVTTLGRGGSDTSAVAVAAALGAQVCDIYTDVDGVYTTDPRIVPKARRIDKISYEEMLEMASLGAKVLQTRSVELAMNHGVPVRVLSSFVKPGEESPGTLVCSEEEIVEKQVVSGVAYSRDEAKVTLYGVPDKPGSSAKIFSALARAGVNVDMIVQASSREASKANLVFTCTDRDSPFARETLEGLQAEVGYDRIEVIRDVSKISIIGVGMKSHTGVAEKMFTALSEKSINIDVIATSEIKISVLIAAPYTELAVRALHTAFGLDAD

SEQ ID NO: 5585 - protein, 393 aa, Hyphomonas neptunium ATCC 15444
MSEKDPVVIVGMARTPMGGLLGELSSFSANELGAHVVKAAAAEAKLGAAEVDEVIMGNCLPAGQGQAPARQAAIKSGLDKNTEATTINKMCGSGMEAVIMGRNALLAGEATVIVAGGMESMTNAPHLITLRQGHKYGAAFARDHMATDGLEDAYEGGPMGNFADMIAREYQFTREQQDAYALETLRRAQDATKNGKFKREIAPLTVKTRKGETVVDTDQLPREAMPDKIPTLKPAFNKDGTVTAANASAISDGAAALVLMRESEAKKRGLTPIAKIVSASSHAQEPAYFTTAPVPAMQKALKKAGWKAEDVDLWEVNEAFAVVPMIAMKELGISHDKLNVNGGACAMGHPIGASGARVLITLLAAMEDRGLKKGMASLCIGGGEGIAMAVERV

SEQ ID NO: 5586 - protein, 296 aa, Hyphomonas neptunium ATCC 15444
MTKIAFIGLGNMGGGMCANLVKAGHAVAAFDLNGEAVAAAAAKGARAAASVADAVKDADVIVSMLPAGKHVLGVYFGPDGVGAHAAKGTLLIDCSTIAVTDAREAHSQAEQAGFLMVDAPVSGGVAAAEAGTLTFMAGGTAAAYERAAPILKAMGKNIFHAGGAGNGQAAKIANNMLLGISMIGTCEAFNLAEKLGLDAETFFRISSVSSGQCWSMTSYCPAPGPVPTSPANRDYKPGFAVAMMLKDLHLAADAAKAAGADIRLGEMAEGIYQNLSERGFDGLDFSGVMKDLKGEL

SEQ ID NO: 5587 - protein, 610 aa, Hyphomonas neptunium ATCC 15444
MAETGAHVVEDRRTALPEGGEAIGRPRGRSLKPLALLWPYARRHWITVSVALVFLVAAAALSLAIPMLLGRAADAGQRAGNDPELLKALIDEAFLWVFAAAVGSGVLGAIRFYFVSRFGERIAADLRRDLYAHLLRLSPAYHARMRSGEAVSRLTADITLLETFLGSSASLAARTLMTTTGALVLMLAVNWQLGLTLLAMLPIAILPIMIIGRTIRKMSNEAQARLSDAGAEAAETLDSIELVQAYGREGGQLSVFQRAVEGTFTAAMRRNGARALMIVLVSVLLFGGFTAVLWMGARAVASGEMSFGDLATMVMYAAFAGSGFGMLAEVYGEFMRAAGAADRAAEVLRAVPDISAPAQPKPLPAKGQGALSFDKVTFRYGENAASALEDFSLDVKPGEFVALVGPSGAGKTTVFRLALRLFDPQAGDIRLDGVSSIEAEPRDWRRCFAYAPQESALFTGTAAENIRFGDEAADEALLEQAARMAEAMGFLDEKEGLATELGQKGRSLSGGQRQRIALARALVRNAPVLLLDEATSALDSESEAAVRRAIENAATGRTTLVIAHRLSTVRRADRIIVMEHGRIVEEGTHDSLVARGGLYARLADLQFAEG

SEQ ID NO: 5588 - protein, 552 aa, Hyphomonas neptunium ATCC 15444
MYRYDQFDARIVAERVAQFRGQVARRLSGELLEDEFKPLRLQNGVYLQLHAYMLRIAIPYGQLSPVQLRRLAEVARDYDRGFGHFTTRQNIQFNWVALKDIPDVLEKLAEVEMHAIQTSGNCIRNTTTDHFAGAAQDEVFDPRPWCEIIRQWSTFHPEFAFLPRKFKIAVTAAEHDRAAIRVHDVGLHIRQKDGVTGFEVWVGGGQGRTPVIATLVNPFVPESQILDYLEAIMRVYNRYGRRDNKYKARIKILVTELGDAEYIRQVEEEFAAQRAHEKIDMPADEIARIHAYFAPPQLAEKPAVSRTLELATAADPAFARWVRINLHPHKVPGYASVTVSLKPIGIAPGDATDTQMELVADLAEKFGHGDIRVSHAQNLILPHVALDDLPEIYAALHAAGLSAANESRITDMIVCPGLDYCNLANARSIPVSLEVQKLFADPAYEEDIGRLHINVSGCINACGHHHVGHIGILGVDKKGEEFYQILLGGRADEKAALGNIVGPGLKAEEVPGAIHRVVEYYRAQRTSKDEKFIDTLERLGHQPFQEALYAAD

SEQ ID NO: 5589 - protein, 391 aa, Hyphomonas neptunium ATCC 15444
MATAYIVAANRTAGGRKNGALAEWHPGDLGAQVLNAIVAETGVDPKAIEDVIMGCVSQAGEQAGQIGRTAVLASNLPNSVPAVTIDRQCGSSQQSIQFAAQAIMSGTQDLVIAAGVESMTRCPMGINARAGKVFDIPTDPTPKSVKEKFGIKHFSQFAGAEMIAKKHGHTKEQLDAFSVESHRRAAAATKSGAFAKEIVIIKGRNGEGQEVMHDKDEGIRYDASMEGMASLKILMEDGVMTAANASQICDGASAVMIASEAAIKAHNLTPLARIHNVTVTAGDPVIMLEEPLFATDRALQRAGMKIGDIDLYEVNEAFAPVPLAWLKHVGADPSKLNVNGGAISLGHPLGASGTKLMATLVHALRARGGKYGLQTMCEGGGVANVTIIEAL

SEQ ID NO: 5590 - protein, 328 aa, Hyphomonas neptunium ATCC 15444
MPASKLKVVVTRKLPAPVELRMKELFDARLNESDRPFSVEELAQAMQTADVLVPTVTDKIDGRLMARAGDQLRLIAQFGAGVDNIDVASAVQRGITVTNTPGVLTDDTADVAMALILAVPRRMHEGVQIMEAGKFDGWTPTWMMGRRLSGKRLGIIGMGRIGQAVARRARAFGMQIHYHNRKPVSSRIEESLEATYWDSLDQMLARMDIVSINCPHTPATFHLINARRLGLMKPEAYIINTARGEVIDEAALARAIRAGKIAGAGLDVFEREPAVNPELIGLPNVLLLPHMGSATIEGRTEMGEKVIINIKTFADGHRPPDRVIPAIL

SEQ ID NO: 5591 - protein, 356 aa, Hyphomonas neptunium ATCC 15444
MKFLDQAKVYIRSGGGGAGCVSFRREKFVEYGGPDGGDGGRGGDVWIEAVEGLNTLIDFRYQQHFKAARGGHGMGKQRTGARGEDAVLKVPVGTQIYEEDQETMIADLTEVGQRVLLAPGGNGGWGNLRFKSSINQAPRRSNPGEEGEERWIWLRLKLIADAGLVGLPNAGKSTFLSVATAANPKIADYPFTTLHPGLGVVDLGTSTRFVLADIPGLIEGAAEGAGLGHRFLGHVERCKVLLHLIDCTQDDPAGAYRTIRSELEAYDADFADRPEIVALNKIDALTPELVKEQLKQLKKVYKGKPLLISGVTGAGVKDALYAIAQHLGFNNDDIPLPKPSNADEEDPDTDQPWSPV

SEQ ID NO: 5592 - protein, 455 aa, Hyphomonas neptunium ATCC 15444
MGRLVAISNRTAADAGAQAGGLAVAVWDALKATGGLWAGWSGDIVSDSPGSKQFESEDGVSFLLTDMTEDEHDGFYLRYSNSTLWPIFHYRVDLATFDRGAFDHYLAVNERLANLTIEHLREHDMVWVHDYHFLPMADALRRAGWKGRTGFFLHIPFPTPDMFRALPEHSWLARALCQFDLIGFQSESDRTNFERYLVDSLDADASEAPIYTVAGRRVRVGVYPIGIDAAAFEEAARSPAAGDAAARIGRFLGNRDLIIGVDRMDYSKGLPQRFEAVGAFFDNHPELHGKVSVTQIATPSRTKVEEYRQLRYELDQLVGRINGDYGDLDWIPLRYLARSYSRDELAGLFRIARVGLVTPLRDGMNLVAKEYVMAQDPEDPGVLILSEFAGAAEQLHEALIVNPHDRSTLAETIRIALTMPLEERKRRWEALRDVVRRTDIAWWRDLFLNDLRAKI

SEQ ID NO: 5593 - protein, 199 aa, Hyphomonas neptunium ATCC 15444
MAHPVNDHALDIIFRDARSQNGYLDRSVPEVLIRAVYDLAKMGPTSANCSPARFVFVTTPEGKERLLPFMSAGNREKTAAAPWTVIMAFDMRFADKIPQLFPHNPDAKHWFDNNTEETAFRNSTLQAAYLMLAARSLGLDCGPMSGFDVAGVNREFFESQEGEEQHWKANFICNLGYGDKTKIMARSPRLEFDEGCRIL

SEQ ID NO: 5594 - protein, 216 aa, Hyphomonas neptunium ATCC 15444
MKFFVDTADTQDIADLAATGLIDGVTTNPSLIAKSGRPFAEVIAEICALTDGPVSAEVVAIDFDGMMREGRKLAKIADNVTVKLPLTLEGLKACKALTSDGIDVNVTLCFSANQALLAAKAGATFISPFIGRLDDIHIDGMELIQEIRQIYDNYMFETEILAASIRSPNHVRLCALAGADVMTAPPAVIRSLVSHPLTDKGLETFLADAKKAGIEV

SEQ ID NO: 5595 - protein, 118 aa, Hyphomonas neptunium ATCC 15444
MILSMLKAKLHGATVTQCDLHYEGSVSIDQDLLDASGILPHEKVDIWNVTNGARIQTYALEAPRGSRTIGVNGAAARHFAVGDTVIIAAFCGVEAEKARQHAPTVVLLGEGNEIKRAS

SEQ ID NO: 5596 - protein, 440 aa, Hyphomonas neptunium ATCC 15444
MSDAPPAADGLKRNVGLFGVVSLGLGTAVGVSIFSILAPAAAVAGPAMLVSMVIAIVPMIVFALIYSFMGAAAPATGASFEWPRRFVHPFAGFIISWMRIAGSTAALIVLTMVLVSYMSSLIALPTKLVMFGIFAAIFLINLAGVSFVARSQAVMLVILLATCAVFVFGGAGHVEPANFQPFADKGILGILAAIPLLISLFLGIESATEVGGEVRNPRRNIPLGIGISVALTAAIYFGVAVIAIGILGAAALGASSAPLLDAALVSLGEGGRALILVCAFVAIGSSINATFVIMTRFLYAMSRAGMLPSFLGKTNEARGIPQNAVFLAFGLCCLGLFMPQNLVFLFLAVNIPTILKYAATCLAAIGLCRREPELRAAASFSLPANIVYALAGAGIVLGFLIILLGISADWRPYVLLGGWATLGIAYYLFYLRPRGAGTAP

SEQ ID NO: 5597 - protein, 578 aa, Hyphomonas neptunium ATCC 15444
MMTGAQIVVEALREQGVSVMFGYPGGAVLPIYDALYGQDAIRHILVRHEQGAGHAAEGYARSTGKCGVALVTSGPGATNMVTPITDAMMDSIPMVVLTGQVPTHLIGTDAFQECDTTGITRTCAKHNYLVTDVNQLARTIHEAFYIATNGRPGPVVIDIPKDIQFATGPYVGKAGILKPTYVPQTEPAPEAIKAVVDLMTKAWRPIFYTGGGVINSGPRASKLLRELQEMTGIPVTSTLMGLGAFPANHADWLGMVGMHGSFEANNAMHDCDLMICVGARFDDRVTGRVDAFSPNSKKVHIDIDASSINKIVRVDIPVLADCAQALEAILKELKARKAQLPDLAPWKEEIGAWRARRCFAYKGSSDVIKPQYAVERLYALTKDHDAYITTEVGQHQMWAAQFYHFNEPNRWMTSGGLGTMGYGLPAAVGVQAAHPDALVIDIAGEASIQMMMQELSTAVQHKLPVKVFILNNEWMGMVRQWQELLHGERYSHSYSESLPDFVKLADALGAYGIRCDDPAELDGKILEMVNHPGPVLFDCRVERAENCLPMIPSGSAHNQMILGEITGNEIGEAGRGLV

SEQ ID NO: 5598 - protein, 413 aa, Hyphomonas neptunium ATCC 15444
MSNAASAPKKVVLAYSGGLDTSIILKWLQVEFGCEVVTFTADLGQGEELEPARKKALAAGVKPENIFIEDVREEFVRDFVFPMFRANAVYEGVYLLGTSIARPLIAKRQIEIADMVGADAVCHGATGKGNDQVRFELGYYGLNPDIKVIAPWRDWAFKSRTDLLKFAEEHGIEIAKDKRGEAPFSVDANLLHSSSEGKVLENPAEPAPEFVHMRTVSPEDAPDQAEVITISFEKGDAVAINGEAMSPATLLTALNAYGKKHGIGRLDLLENRFVGMKSRGIYETPGGTILLVAHRGIEQATLDRGAAHLKDELMPKYAELIYNGFWWSPEREMLQAAIDHSQRWVTGDVTMKLYKGNAYLIGRSSPYSLYSEKIVTFEDDHGAYDQKDAAGFIKLNALRLRLLAGRDRKFGKN

SEQ ID NO: 5599 - protein, 403 aa, Hyphomonas neptunium ATCC 15444
MRDVVIVEPVRTAVGGFGGAFKGVHAHELGAAVVEGLMARTGLAKDKVDDVIFAQCYPSMDAPALGRVVALDAGLPVEVTGMQIDRRCGSGLQAIINATMQVATGAMDCVIAGGAESMSNAPFYSTNWRWGLGQGNMTVHDGLVNGRLTAGGKNFPVPGGMLETAENLRRDYQITRQAQDEFAAASHAKAVAAQNSGVFDEEIIPFTVKGRKGDTVVTKDEHPRPDSTLEVLSKLKPIRQKQDAEATVTAGNASGQNDGGSACLVMTREMAEANGLKPLARLVSWSVAGVGPAVMGIGPVPSTEKALARAGLTLKDIDLIELNEAFAAQVLACTKAMGFAKEDYARLNVHGSGISLGHPVGATGGRILATLLREMDRREARYGVETMCIGGGQGLAAVFERVN

SEQ ID NO: 5600 - protein, 453 aa, Hyphomonas neptunium ATCC 15444
MGQLIGRWIRGATLAPLALLTAGMAFAQEDDVATRLAALEEAVGGSASAYVDNSYLFLIGGLIVMFMAAGFCMLEAGLVRSKNAAMQSMKNVTLFSVAGLMFWITGYNLAYPGDATLFNGLLPTNFGPWSGGDLSVESDGGYAPASDWFFQMVFVATAASIVSGTVAERVKIWPFLIFTAVLTAFIYPVVASWEWGGGYLDSVWSFSDFAGSTLVHSTGGWAALTGAIIIGARSGKYSGKTVNPMPGSNIPLAALGTFILWFGWFGFNGASQLAAGTAADINSVSQIFANTNMAAVGGVLAAMVTTAVLYKGKLDATLIFNGAIGGLVSITAEPLAPSMGMSVLIGAVGGVLVVVSVPLLDKFKIDDVVGAIPAHLICGIWGTMIVPLTNSGASYAGQAVGVALTGVFVVIISSIIWFALKFTIGVRPSEEDEEMGLDRAELGLEAYPEFSNR

SEQ ID NO: 5601 - protein, 708 aa, Hyphomonas neptunium ATCC 15444
MNLPETLPAALRAAIHERGYETLTEVQAAATAPELEGRDLLVSARTGSGKTVAFGLAIANELLGGEDTFLIRAATPLGLIIAPTRELALQVARELRWLYANTNAEIATCVGGMDMRDERRALERGAHIVVGTPGRLVDHINRGSFDTSAIRAVVLDEADEMLDLGFREELELILEDTPKERRTLMFSATVPKGIAALATRYQKNGLRITTDSDTTAHADIAYEALVVAPGDEENAIVNIVRHSDTESAIVFCSTRASVNHLVARLGNRGFSVVALSGEFSQKERANALSSLRSGRARVCIATDVAARGLDLPKLDLVIHADLPRDPATLLHRSGRTGRAGRKGISTLIVAPKARRRVERLLQDAKVEARWGRPPSADEVINRDDTRLLADTALTNPMADKEADLVARLMAEHTPEQIATAFIRKARAGRTAPEDLRDVDDRPPARKPREERGDRGDWQDRPQRAERAPREPREWGEREPREPRAPRPQRERASLDGAVWIAINVGRKKNADPKWLLPMLCKAGDIDRDQIGQIRINNGNTHVELTPEGAQRLFENAVNGRLEGSLQAFPLEGIPEREDPGAPPPRERDRRPDRPAASRPERSFERKPDWNPAERPPRPERPDRPERPERSERPAGKPYEKRSAPRSDRPREDGDRPAKTPWTGSKGKSFGGASKGPNKGPGKPKTGGKPAGGKGVKPKTFQGLKKPRA

SEQ ID NO: 5602 - protein, 551 aa, Hyphomonas neptunium ATCC 15444
MPKGSDLFVAALENEGVDYIFGVPGEENLDFLESLRTSRIRLILTRHEQAAAFMAATHGRLTGRPGVCLATLGPGALNMATGAAYAHLGAMPMILITGQKPVKSARQARFQIVDIVASMKPLTKMSRQIISAGSIPAIVRDAFRTAMEERPGPVHLELPEDVASEETGGAFMIPVHDIARPIASPSELDKAADVILAAEHPLVMIGAAGNRPCLVEPLSAFIRRTRIPFFNTQMGKGAVTGGSSLFMGTAALSEGDYVHEAVDRADLIIAIGHDTVEKPPFLMKNAGGQTVLHIGYHSADVEEVYHPDFEVIGDIGATVEGLGERLEGRLQPDQGMLDLRQKILAHLNDRAEEDRFPITPQRIVHDVRKVMPEDGIVCLDNGMYKIWFARNYRTHVANTLLLDNALATMGAGLPSAMMAAMLYPGRRVLAVCGDGGFMMNSQEMETAVRLRLNLVVMILNDSAYGMIRWKQAVDGFADFGMRFGNPDFVHYAEAYGAMGTRVTSVADLAPALEAAFLGGGVHLVDVAIDYSENTRVLVEELRNRKPDVDCA

SEQ ID NO: 5603 - protein, 312 aa, Hyphomonas neptunium ATCC 15444
MKLISCNANRPLSDAIADYLDMRLTRSEVKTFADQEIFVRIDENVRGEDVFVIQSTSYPANDNLMQLLIMMDALRRASARRITAVIPYFGYARQDRKTDGRTPISAKLVANLISTAGADRVLTVDLHAGQIQGFFDIPTDNLFGGPVMVDDIKERYGKEKIIVVSPDVGGVVRARSLAKRLDDADLAIVDKRRPEAGKSEVMNIIGDVRGARCIMLDDMCDSGGTLANAAAALKEHGASSVSAYVTHGVLSGSAVERIEKSVLDELVMTDTIQPSEHALKSKNIRVLPISPLLGEAIRRIANEESVSKLFDR

SEQ ID NO: 5604 - protein, 553 aa, Hyphomonas neptunium ATCC 15444
MISDAALIRELKVIVGSGHVNVRDDRRASGKPVTFVRPRTLVEVWRVARASVRAGRIILMRAGGTSLTGGSAPNGAYDRGVVVINTMRLKGIHMLNAGAQVLCLPGTTLFELERELRPLQREPHSELGSTWLGASVIGGVCNNSGGAQVRRGPAYTEAALYAHVDETGELRLVNELGMDLGRDPEEQLESLERGEFVRVLHDMHERACSAHGFVERVRDVDAPSPARFNADPRYLKGASGSAGRLIVFAVRLDTFPRAANTQVFHVATDDAGVLSDVRRRMLGQAALVPISAEYMHRDTFRMAEREGKDLLLAVRTAGADRLPFLFGFKAGVDGVARWLGFGRACLTDRLLQAVGRLAPPQLSETLRQMGEQYAHHLFLKVEADQAAGVRALLADVVPALKGACHECSPAEGRQVFLHRFAATGAAARHAAMSRGKAGAVVELDVALRRNDKAWWYVLPDHLKGMVEHTLVHGHFFCHVFQQDYILKKGADAAAFRRGMAAHYEARGAECPAEHNVGHRHKAKPALAAFYRKLDPTNTLNPGIGRTSRDKNWK

SEQ ID NO: 5605 - protein, 315 aa, Hyphomonas neptunium ATCC 15444
MTETEIRRAGFCAVIGAPNAGKSTLTNRLVGAKVAIVTHKVQTTRFPVRGVAQVGDAQIVIVDTPGIFAAKRRLDRAMVKAAWGGADEADCVVHLVDASAWVAEQTGRPSGAQRHSLEDDRRVIEQLKEAGKRVFLALNKIDLFPHDQVLPVIAALSEAGVYEETFLISAENGEGVDRLEAAIAARMPEGPALYPPDQIADLPMRLLAAEVTREKLMLRLHQELPYQLMVDTESWEERGDGSVRIQQVIIVGRDGHKAMVLGKGGSLIKEIGRLARLDLTQMLERPVHLFLFVKVDERWQEKRERYQGIGLEFDV

SEQ ID NO: 5606 - protein, 111 aa, Hyphomonas neptunium ATCC 15444
MTDQATLDAIEKAVKSNDVVLFMKGTPTFPQCGFSSTVVQILDYLGVEYVATNVLEDQNVREGIKQYANWPTIPQLYVKGEFVGGCDILKEMFENGELRDLMAENGIELAE

SEQ ID NO: 5607 - protein, 207 aa, Hyphomonas neptunium ATCC 15444
MAWQNLDDFVDRVTAKLDPPAGQGRLTEMGDMDFLTPEEVAIIRPAAVLFGVIPRKEGPTALLTLRPTTMADHAGQVALPGGKVDPIDLDEVAAALREAHEEVGAHPDDVDVLGKASPYITGTRYRITPVVGLLPADFIPIPEPGEVAAIFETPLELLMNPKSYTTGQAFYKGAHREYYEMPYNGFRIWGVTAGIIRRLYQTLYESD

SEQ ID NO: 5608 - protein, 464 aa, Hyphomonas neptunium ATCC 15444
MTKVIMSDFQSLGLTGRILTSLTKAGYTAPTPIQEQAIPLVIQGRDIVGLAQTGTGKTLAFAAPILDRLSRNASPAPVRGTRVLVLAPTRELAGQIATSFGTYGAGLNLRVVMVCGGAKIGGQIRQLERGAHILVATPGRLIDLMEQRAVSLDKVETLILDEADQMLDLGFIHALRAIAKNVPSKRQTLFFSATMPKAVESLAATFLRNPAEVSVAPPATTAGRIEQRVCFVEQPEKASLLIEKIRDPELRSAIVFTRTKHGADGVVKRLAKADIDSVAIHGNKSQSQREKALEAFKAGRVPILVATDIAARGIHVDALTHVINYDLPDVPEQFVHRIGRTARAGNSGVAISFCSRDERPTLRAIEKLTGLKLAPNGVSLPDEPLRKPGKPQGNRSGNGGGRGGARSGGGYQGQSSGSQSGGSHSGRPHRKGPPGGGANASGQNSQRSSNGAARPRRFKERADA

SEQ ID NO: 5609 - protein, 371 aa, Hyphomonas neptunium ATCC 15444
MLKERRSGETRVAATPETVKKLIGLGHTVTVEGGAGTVAGFLDAAFTEAGASIAGSAAEAASGADIVFKVRRPEPAEIAALPEGSALIALMEPFAYPAEEIAALNAKKIAALSMEFTPRITRAQSMDALSSQSNLSGYRAIIEGAQIYGRAMPMMMTAAGTIAPAKVFVMGAGVAGLQAIATARRLGAVVTANDVRPAAKEQVASLGAKFIAVEDDEFKAAETSGGYAKEMSAEYQAKQAALTASHIAKQDIVVTTALIPGRPAPVLITEEMVKSMKPGSVIIDMAVAQGGNCPLSKADEIVDVGGVKVAGFSNLPARLPADSSSLYAKNLFAFIPLITAENGAINLDTEDEVVVAMLLTRNGATVSERLK

SEQ ID NO: 5610 - protein, 518 aa, Hyphomonas neptunium ATCC 15444
MIFDRVKPLDAILATAEKKGLQRTLGAFQLTMLGIGAIIGTGIFVLTSEAAQKAGPGMMISFLIAAAVCAVAALCYAELASMVPVSGSAYTYTYAVMGELLAWMVGWALILEYAVAASAVSVGWSGYFVGLLASWGIVLPDALVMGPYAGGIMNLPALLIALLITCLLMIGTTESARVNAVLVAIKVTALTVFIVLTLPVIKGANFEPFTPNGWFGAGHGAGLGIVGAAASIFFAYVGFDAVSTAAEETKNPQKNVPIGLIGSLGICTIFYLLVAAGAIGAMGSQPVNGPAGEILAPGTPALAAQCQSLLAMGQEPLVCSREALAHVLREIGHERLGDMIGIAAFLALPSVILIMLFGQTRIFFVMARDGLLPEFLSKIHPKWKTPHIVTMITGSVVAVFAAFLPVGQLADISNSGTLFAFFMVAIAVLILRRKQPERHRPFRTPMVWIVAPLAIFGTLGLYLNLPTEAKLVLPVWGSIGLVVYFLYSRGKSHVGRGIIDVHEDDPDAPPQPVPPIRD

SEQ ID NO: 5611 - protein, 176 aa, Hyphomonas neptunium ATCC 15444
MNKHRPALFLDRDGVINIDRGYVSRIEDFEFIEGAAETIAAFNQRGWYVFIVTNQSGIARNYYTEDDMHALHDWMQARLAEKGAHIDRIYFCPFHEDGENLRYRKDSFDRKPKPGMLLRAMADFPVKREASFLIGDKEADIEAAKAASVAGFLFTGGNLATFAEWTLASFEDGNRG

SEQ ID NO: 5612 - protein, 531 aa, Hyphomonas neptunium ATCC 15444
MPKVLIGDTLSPAAVEIFKARGIETDIKVGLSKEDLIKIIPDYDGLAVRSACKPDADVIAAATNLKVIGRAGIGVDNIDIKAATAKGVVVMNTPFGNAITTAEHAIAMLFAAARQIPAANADTQAGKWPKSGYMGVELSYKTLGLIGCGNIGSRVAERAIGLKMKVVAYDPFLTEERAIELGVEKVDLDTLLARADFITLHVPLTDQTKNVLSREALEKTKKGLILVNCARGGLVDEEAVRDLLESGHLAGAAFDVFAVEPAKENVLFGAKNFVATPHLGAATAEAQENVALQVAEQMADYILTGAVTNALNMPSVTAEEAPRLKPFATLAEKLGSFAGQISDYGYEEVVIEYEGEVSELNRKPITAALLAGLLRASRGDVNMVSAPAILADSGVKLTETKTETSPVYDSLIRIKVKTKATKNSPEGGWRTLAGALIAGKPRIVEVKGMALEGDFSPVTLYVNNIDKPGFIGALGQMLGEAKVNIATFHLGRQEAGGEAIALIGIDSTPPASLVEKLDALPQVRYVKVLSF

SEQ ID NO: 5613 - protein, 146 aa, Vitreoscilla stercoraria
MLDQQTINIIKATVPVLKEHGVTITTTFYKNLFAKHPEVRPLFDMGRQESLEQPKALAMTVLAAAQNIENLPAILPAVKKIAVKHCQAGVAAAHYPIVGQELLGAIKEVLGDAATDDILDAWGKAYGVIADVFIQVEADLYAQAVE

SEQ ID NO: 5614 - protein, 488 aa, Cryptomeria japonica
MATTVPLAYQNATGIPNWLNKGDNAWQMVAATVVGLQSMPGLVILYGSIVKKKWAVNSAFMALYAFAAVLICWVTWAYKMSFGDELLPFWGKAGPALGQKFLIKQAKVPETEHKYNNGTIETEALEPFFPMATLVFFQFVFAAITMILLAGSLLGRMNIKAWMAFVPLWLTFSYTVGAYSLWGGGFLFQWGVIDFSGGYVIHLSSGIAGFTAAYWVGPRLQKDRERFPPNNVLLMLAGAGFLWLGWCGFNGGGPYSANVVSSMAVLNTNICAATSLLVWTCLDVIFFKKPSVIGAVQGMITGLVCITPGAGVVQGWAAIVMGVLSGSIPWWTMMIVHKKSALLQKVDDTLAVFHTHAVAGLLGGALTGLLAEPTLCGLFLAVKNSKGAFYGDGMQFVKQIVGATFIIGWNIVVTTIIMLAIQFFIPLRMPDDELLIGDDAVHGEEAYALWADGEKYDHTKHGSYSDERQHFKGNGVGQGAAGGLTMEL

SEQ ID NO: 5615 - protein, 433 aa, Cryptomeria japonica
MATTVPLAYQNATGIPNWLNKGDNAWQMVAATVVGLQSMPGLVILYGSIVKKKWAVNSAFMALYAFAAVLICWVTWAYKMSFGDELLPFWGKAGPALGQKFLIKQAKVPETEHKYNNGTIETEALEPFFPMATLVFFQFVFAAITMILLAGSLLGRMNIKAWMAFVPLWLTFSYTVGAYSLWGGGFLFQWGVIDFSGGYVIHLSSGIAGFTAAYWVGPRLQKDRERFPPNNVLLMLAGAGFLWLGWCGFNGGGPYSANVVSSMAVLNTNICAATSLLVWTCLDVIFFKKPSVIGAVQGMITGLVCITPGAGVVQGWAAIVMGVLSGSIPWWTMMIVHKKSALLQKVDDTLAVFHTHAVAGLLGGALTGLLAEPTLCGLFLAVKNSKGAFYGDGMQFVKQIVGATFIIGWNIVVTTIIMLAIQFFIPLSQTMNF

SEQ ID NO: 5616 - protein, 487 aa, Taxodium distichum
MATTVPLAYQNATGIPNWLNKGDNAWQMVAATVVGLQSMPGLVILYGSIVKKKWAVNSAFMALYAFAAVLICWVTWAYKMSFGDELLPFWGKAGPALGQKFLIKQAKVPETEHKYNNGTIETEALEPFFPMATLVFFQFVFAAITMILLAGSLLARMNIKAWMAFVPLWLTFSYTVGAYSLWGGGFLFQWGVIDFSGGYVIHLSSGIAGFTAAYWVGPRLQKDRERFPPNNVLLMLAGAGFLWLGWCGFNGGGPYSANVVSSMAVLNTNICAATSLLVWTCLDVIFFKKPSVIGAVQGMITGLVCITPGAGVVQGWAAIVMGVLSGSIPWWTMMIVHKKSALLQKVDDTLAVFHTHAVAGLLGGALTGLLAEPTLCGLFLAIKNSKGAFYGDGMQFVKQIVGATFIIGWNIVVTSIIMLAIQFFIPLRMPDEELLIGDDAVHGEEAYALWGDGEKYDHTKHGYSDERQHFKGNGVGHGAGGGLTIEL

SEQ ID NO: 5617 - protein, 333 aa, Petroselinum crispum
MEYSSSFVDTSLDLNAKPLQLFSETPIQQVQGSFIDFGMRTSVKEENNGALIEELNRVNTENKKLTEMLTVMCENYNTLRNNLMDYMSKNPEPNLETTTTKKRKSVERSSTTSCMIKNNASSAKNNDNSESCSTDEDHNSTKKPKEEHVKAKISRVYFRSEASDTTGLIVKDGYQWRKYGQKVTRDNPSPRAYFKCSYAPTCPVKKKVQRSIDDQSILVATYEGEHNHPHPAKLEPNDSSSNRCVTPASLRCSTSLNLSAPTLTLDMTKSKKSITEDANKKATTKKIDSPEFQQFLVDQMASSLTKDPSFKAALAAAISGKILQQNQQRNGEH

SEQ ID NO: 5618 - protein, 302 aa, Pimpinella brachycarpa
MMIHQREDHLGLSLSLSSPAHRPSSSSSPLQLNLAPSMPTPSTPPFNLFHKKETSDGYILDACRVETRSFLKGIDVNRLPATTVDMEEEAGVSSPNSTISSVSGKRSLERSENGNGDDLLDCSRGLINSDEEDGDNSRKKLRLSKDQSAILEDSFKEHNTLNPKQKLALAKRLGLRPRQVEVWFQNRRARTKLKQTEVDCEFLKRCCENLTDENRRLMKEVQELRALKLSPQFYMQMTPPTTLTMCPSCERVSAPPSSSTGPSSTPVETPRPHHSGSSHHRVAFNPWAIAPAGHRSFDAVPH

SEQ ID NO: 5619 - protein, 491 aa, Archaeoglobus fulgidus DSM 4304
MADTITVSIVLAYFVVTLALGFFAARKIKTAEHYYGARKLFGMFVTAVAVFSGIASAFTFIGGPGLVYPMGGTVNWVIWTPVISMPLIWYLLGKRIKLITEARPVATLPDLTAARFKSDAVRFLTAVALIFGIITYLAGNVMGAGLVLTDMLGTPLELSIAIVFGIIMLYTAFGGMVASILTDFFQGLVMMVAAIIFVVFILIMTGGVENLFATIAESNPRHIDPIGVGPIWLGIMGWWWALNIGSSVQPHAVTKFFALKDYRDLKWGALVTTIAWTLACLMWFFGGYASVWVVIKGLAEAPARSDQAIFGVIAQMPVVLKAVIYAGVLAAIMSTVSGFISMGTAAVVRDIPTAIGKSLSQRGQILWGRVVTVILTVVAALFGYYGGYVVGILVTLGLGYFASMLFPLLVIGLNWKRATKEAAIITTALTVAMNLGFLVYEKVLSMSLPYGLPGYGVTFAVGIITMVLVSLITKGAALDDMDEDIRAAMSL

SEQ ID NO: 5620 - protein, 436 aa, Archaeoglobus fulgidus DSM 4304
MAIEVELHKLREWMWKYSLGRDGGNNSDHFLRIKIPGGIISPDRLRGVAELSDKYGRGYAEITTRQDIQLHWIEAEDALEIFAEMEKLGFTTDLCSQAFAETCHGDVRNAVCCPLSGKKGYDAYWLVREITDFFSGNPDYVSLPHKFKIGISTCESNCIREEAQDLAMQWNGEGFVPLVGGGLGASKPGVRKAKSLRIVVYEEDAFDFIRTVIDIYKDFRAERKAEARFKNFFETAGCEWLRREIELRMGVKFDLADDFNCNPPSEHTEGLQDDGSNYYTLPVFAGILDSERLSFIAEVAEEFDGGIRLTPWQNVVFTDIDDLKALKERLSEQFDLSAPRMHIACASNFCGKTLVHAKDVLRHIPASDRFVGVSGCSNACACHPLAEIGLCGKVKAGKQLYDVFIHGWKEAENLSVEEAVELIKKHLGDGYGAKAD

SEQ ID NO: 5621 - protein, 392 aa, Archaeoglobus fulgidus DSM 4304
MVCSISEVVEMPYFDYASTKPVDERVVEAMLPYMTEHFGNPSSVHSYGFKAREVIEEARGKISELINGGGGDIVFTSGATESNNLALIGYAMRNARKGKHVLVSSIEHMSVINPAKYLQKQGFEVEFIPVDKYGTVDLEFIEEKIREDTILVSVQHANNEIGTIQPIKEISEIINGRAALHVDATASLGQIEVDVEKIGADMLTISSNDIYGPKGVGALWVRQGVRLQPIILGGGQEKGLRSGSENVPAIVGFGKAAEITAKEWGEEAGRLRRLRDRIIDNVLKIEESYLNGHPEKRLPNNVNVRFSYIEGESIVLSLDMAGIQASTGSACSSKTLQPSHVLMACGLKHEEAHGTLLLTLGRYNTDEDVDRLLEVLPGVIERLRSMSPLYRR

SEQ ID NO: 5622 - protein, 461 aa, Archaeoglobus fulgidus DSM 4304
MVKLIEFLYAFIGYIIIGTAIAIMAMKGLRTQEEYYIAGRKVSGVISALTYAATTYSAFMMVGLVGLSYFSGVGALGFELFYLVGTLFLLSYYAPRVWEMAKERGYVTPGDMIAERYGSEVAKLMAVIVSIALIPYISVQLIGVSLILSKTNAMSFEAGIVASAILIALWAFLGGLRGVAWTDALQGVFMLLMAIAAILWVHQYGFAEKDFFTEVSRLGELLVVPNSIWTPVKFISLTLPWFFFALTNPQVFQRLYIPKDRSALRRMVILFGFFGLIYTVIVTLIGLELRTMTEMGVFPKVPDRDAVTPTMLAMMPPLLGAAISLSIFAAAITTANSIVLTLSSMITRDLLGSEKVGSGRVLIVILTVAVALFAYSRPGYIVELSVLSSTILLCQLPLILGVFHLNRGGRLAGIATLSAGFITAVVLSFQKLSPLSIPASVWTFIISFAVFLALSSSEKQP

SEQ ID NO: 5623 - protein, 551 aa, Archaeoglobus fulgidus DSM 4304
MKEVIMKYVVQNAAKYGKASEKAVMGKVMAENPELRKKAKEVLELVKECITEFEALSEEVRKELIKKYSMDSEAKRELETKKLPELEGAEKGKVVMRFAPNPNGPPTLGSARGIIVNGEYAKMYEGKYIIRFDDTDPRTKRPMIEAYEWYLEDIEWLGYKPDEVIYASRRIPIYYDYARKLIEMGKAYTCFCSQEEFKKFRDSGEECPHRNISVEDTLEVWERMLEGDYEEGEVVLRIKTDMRHKDPAIRDWVAFRIIKESHPLVGDKYVVYPTLDFESAIEDHLLGITHIIRGKDLIDSERRQRYIYEYFGWIYPITKHWGRVKIFEFGKLSTSSIKKDIERGKYEGWDDPRLPTLRAFRRRGFEPEAIKSFFLSLGVGENDVSVSLKNLYAENRKIIDRKANRYFFIWGPVKIEIVNLPEKKEVELPLNPHTGEKRRLKGERTIYVTKDDFERLKGQVVRLKDFCNVLLDEKAEFMGFELEGVKKGKNIIHWLPESEAIKGKVIGEREAEGLVERNAVRDVGKVVQFERFAFCKVESADEELVAVYTHP

SEQ ID NO: 5624 - protein, 382 aa, Archaeoglobus fulgidus DSM 4304
MAYFDYTSAKPVDERVLEAMLPYMTESFGNPSSVHSYGFKAREAVQEAREKVAKLVNGGGGTVVFTSGATEANNLAIIGYAMRNARKGKHILVSAVEHMSVINPAKFLQKQGFEVEYIPVGKYGEVDVSFIDQKLRDDTILVSVQHANNEIGTIQPVEEISEVLAGKAALHIDATASVGQIEVDVEKIGADMLTISSNDIYGPKGVGALWIRKEAKLQPVILGGGQENGLRSGSENVPSIVGFGKAAEITAMEWREEAERLRRLRDRIIDNVLKIEESYLNGHPEKRLPNNVNVRFSYIEGESIVLSLDMAGIQASTGSACSSKTLQPSHVLMACGLKHEEAHGTLLLTLGRYNTDEDVDRLLEVLPGVIERLRSMSPLYRR

SEQ ID NO: 5625 - protein, 128 aa, Archaeoglobus fulgidus DSM 4304
MKQQVEVRQLREGGYVVIDDEPCEILSISVSKPGKHGAAKARIDAIGIFDSQKRSIVQPVTAKIYVPIVERKRAQIISVTGNVAQLMDLETYETFELEVPEELKDKMEQGREVIYLESLGKRKIERMA

SEQ ID NO: 5626 - protein, 275 aa, Archaeoglobus fulgidus DSM 4304
MHIDSYFSLSNCDAEEAEYLIYGIPYDATQSFKPGSRFAPNAIREASWNLESYSNLFDVELSLVKVGDAGNINCDGGFEQIVERTKEFLGEVEGFPVAIGGEHSISFAATSKFRKACFVVFDAHFDLRDEFDGDRFNHACTTRRIFESGMRVAIFGVRSGIKEEKRFAEENGIKYLHAWDFEVEKAVKMVEDFDKIYVSLDVDAFDPAFAPGVSTPEPFGLKPIDFIRFFAGIADRVVGFDVVEVVPDSNKVTQTLAAKIILEAIAAKVRCDIPK

SEQ ID NO: 5627 - protein, 462 aa, Archaeoglobus fulgidus DSM 4304
MRIVMKFGGVSVKDGENIYHCANLVKKFSEGNEVVVVVSAMQGVTDALLKAAHRCCSEPSAGFIKMFIADMMKRHYEAIEYAVRNDEIKAKVIAAVERLLDELEKVLLGISYLGELTRRSEDYIVSFGERLSAPIFSAALLSLGVDSVALTGGDAGIITDRNFGRAKPLPGVYTTIRNRLEPLLTIKKTIPVVTGFIGATDDGSITTLGRGGSDYTATILAAALDADEVWLWKEVDGIMTCDPKYVPNARVIPEISYQEAMELSHFGAKILHPRALEPVMRKNIPVRIKNTFNPDAPGTVIGPTTKDSSEIVKALSLIPQAGIVNVSGAGFDFAEIMSEVFGRLAEERVNVIMVAQSSSELNLSIVVDIRDLEKAYNALKSLENGVIKVEKIPYIAVVSAVGSGMAGTPGVAGKIFSALGKNGINVIMISQSCSEYNVSFVVDGSDGVNAVKVVHDEFGLGN

SEQ ID NO: 5628 - protein, 527 aa, Archaeoglobus fulgidus DSM 4304
MKVLVAEPISEEAIDYMRKNGLEVEVKTGMSREELIREVPKYEAIVVRSQTKVDAEVIQAAKNLKIIGRAGVGVDNIDINAATQRGIVVVNAPGGNTISTAEHAIALMLAAARKIPQADRSVKEGKWERKKFMGIELRGKTAGVIGLGRVGFEVAKRCKALEMNVLAYDPFVSKERAEQIGVKLVDFDTLLASSDVITVHVPRTKETIGLIGKGQFEKMKDGVIVVNAARGGIVDEAALYEAIKAGKVAAAALDVYEKEPPSPDNPLLKLDNVVTTPHIAASTREAQLNVGMIIAEDIVNMAKGLPVRNAVNLPSIEPSDFEFMMPFLTLAEKMGKIASVRLGGAIRKVKVTCSGKLATKNTEFVTRALLKGLFEPILSNEINLVSAKPVAVERGITIEESKVESVEHYESLLEVWVESNGKEMYLAGTCFGNEYRILKIDVYNVNFVPKGHYIISLHEDKPGVIGRVGTLFGRNNINIAGMIVGRSGDKPGGIQLMLLLVDDPPTPEVLEEMTKLDGIIDATYVEL

SEQ ID NO: 5629 - protein, 344 aa, Archaeoglobus fulgidus DSM 4304
MQIVEENLRDNEGEIKLIPETLDDLWHLRFIIEKGDVVFATTKRASQSSDKLRSDKEMVTVRLGIEVEKVEFHRFANRLRVSGKIVAGIEESGYHTLNITVGKELSIIKKWKPEQLERLRRAVEDSNRPEIVMLTIEEGYAVAGVLRQWGVEEIFEERMGYGKGMGDSRKEFFGEVAAKLESFDFKYLIVAGPGFAKNDFLDFLKERYPEMAKNAVVVDVSSVGSRGFIEILKRRVVDKIVGEVRLAEEAEYIDRLLEGIAKGERVAYGLDEVREAHNYRAIEVLLVADEFLLEEREKWDVDGLLREVEESGGKVVIMSTEFEPGKRLMSLGGIAALLRFNVKG

SEQ ID NO: 5630 - protein, 511 aa, Archaeoglobus fulgidus DSM 4304
MMLEGEFHTHMLPEFMIERRQDRCIRCRVCERQCGFNVHWYDEEMDMMREDEMKCVGCQRCAVMCPTNALVVKPHPGNYKPNANWTRERLQDLKKQAETGGVLLTGSGNDKPYRIYWDHIVLNASQVTNPSIDPLREPMELRTFLGRKQDRLEFKYSEDFEDIEITTELYPNVQIETPIVFSAMSYGAISYQAFKSLAMAASEFGTLFNTGEGGLPKELRKYGKNAIVQCASGRFGVDPEYLNVAAVVEIKIGQGAKPGIGGHLPGEKVTLPISVTRMIPEGTDALSPAPQHDIYSIEDLSMLIYALKEATNYEKPVSVKIAAVHNVAAIASGMVRAGADIIAIDGLRGGTGAAPKMIRDNVGIPVELALAAVDQRLRDEGIRNKASILVAGGFRCSADVVKAIALGADAVYIGTPALVAMGCTLCQKCHTGICNWGICTQDPYLAKRLNPEITAKRLVNLLRAWSHEIKEMLGGMGINAIESLRGNREQLRGVGLEDWELEVLGIKGAGE

SEQ ID NO: 5631 - protein, 491 aa, Archaeoglobus fulgidus DSM 4304
MIIEAVLIGYLAVVLLIGIYEYRKTRGLLDYYLAGKKLGTLVVSFSFFATYFSTAAFLGGGGTGFLLGFQWSAFLTFFHVLFAILAWMVIAPPMKRIADEYGALTIPELFRKRAGVFSQIVAAVVIIFFFELYMVSIYKGAGNLLQVMLSMDYTTGLVITAVIVMVYTAIGGFRAVVMTDLIQGVIVLIGGVALFLTLIYSLGGFSSAIEALSNAKIFGEMVGKALFEIGKVGPPPIVKAGMIVPFVLSLTFAISVAQLASPQLVVRFVAARDSRVIANGMILTPLIIGIFAICVFSIGPFGWLVIPKYTDDVTQFLKDVDLVVPFIAMKLFPAGINALLLTAIIAAAMSTINSLIHLVATAFVRDLVQNVKKIEERTALNLTRFAVFIFATIPVIFAINPMGVIVEIVGVSFSVITSAFLVPLIACLYSEKPNSAAISASMVAAVLASVLWYFYYYKVYWIYPVVPGLLVSIAVFAAFSLAFPQPSKAEA

SEQ ID NO: 5632 - protein, 424 aa, Archaeoglobus fulgidus DSM 4304
MAVIVGAARTPVGRFGGSLKDVAAYELGAVAIKGMLKKLGVAPKPTPESIEFYPEKLEKGRIDLESAYDYDGVEVEIDEVIMGNVLQAAQGQNPARQASILAGIPKEIPAYTVNKVCGSGLKAIALAYHAVKAGDAKAIIAGGMESMSNAPYALPKARWGYRMSVTAKDEILDLMVYDGLWEKFYGYHMGMTAENIVERYGISREEQDQLAYESHMRAVRAIDEGKFAQEIVPVEVKQKKGAVVVDTDEHPRRDTSLEKLAKLPPVFKKDGTVTAGNASGVNDGAAAVLVMDEKAAKDYGLEPKVRILAVASAGIDPAYMGLGPIPAIRKVLKKAGPEIKDIGLIELNEAFAAQALACIKELGLDMEKVNVNGSGISLGHPIGCTGARITTTLIYEMERRGVDYGLASLCIGGGQGMAMVVERV

SEQ ID NO: 5633 - protein, 474 aa, Archaeoglobus fulgidus DSM 4304
MYFLVTTLGVGFYLMKRMEKSEEDYLVAKRGLGAVPVGVTLALTVLGTPHILGVMESAYDIGLPAVWFSFAHAIMLAIVCLFTGRWARKLKVESVPEFLDVIFSNYWLRLMVGAVIAGAIFGICTLETQGLGVFVSILTGTSIEVGIVIGALIGILYVVLSGMKEVAWLNVLNAVILYIGIIAATFVLGSGLQNGWEGVNEFYISNDLAGKLNIFGSWEVFVGFALVNVLATVFFQGISQQGLHAALAAKSPDVLRKAMLIAVPVNGSFAVFAAVMGMAARATPEFAELGAKTATPAMIVSVLPTWASALLLATCLVAVLSSYAITLLAPTTIFVNDIYKAVLKPNASHEELLRLSRILTVLLAVAALIPAVSLPPILAAMMWLFSWLVPVFWFVIFGLFWKRSAPAAIITCLLVWVTINAWTMTPLPEVLGAPGWLHQVYLALIVTLVIGSLLNAVLPGKPGLFREKALAVRG

SEQ ID NO: 5634 - protein, 479 aa, Archaeoglobus fulgidus DSM 4304
MADFVAASGQLGFWTYCLLMIGSVFSGMTLIGVAGLAFTTGYANVWERIIGPPFAIAFGTILIGYKLFNLKDKNGILTIQDYLAFRYDDPKIIRILAGLISAVTCFVYLIGQYTAIGVVSYVVLGIPYWLGAVIAAVIVVAYVMSGGMFSTAWTTFLQSILMLLGIYVTVPFIIAWVGGFEAMNQALAAMPEIQNATRGVAENFMFAKYLSKPFAPASVPLAGWVYNLTLFGITVPLGLMVAPHIVNNMLTFRKIEYTRWGPLVMYVIGFSAIFLTALAGMAARVAWAKGMIDIPSLTLGSIEVKWSDMAYPTIASKALPYWLFVLLLPTILAGVMSTTDRLILTAANNISYDVLRNALGKNLSENALKKVNMLVVPLIGFGSLLIALFPQQLLAWFIWAALSLMTNCFFFPIMLGLYWDRMTKNAARLSMIAGFVVTLATFAIYGKTIYIAGIPAYSVLPGFVASFVLAVGVSLLEKG

SEQ ID NO: 5635 - protein, 733 aa, Archaeoglobus fulgidus DSM 4304
MSDKKGEEITLRVAEAFYRDVGRGVARIDPAVMEKYGLQSGDIIEIIGKSTVPAIVWPSYPEDRGTGIIRIDGSIRSNAGVGIDDKVRIRKVTAKPAEKVTLAPTEPVRLMGGEAYLLRLLEGRPVIKGQKIRVEVFGHTLTFVITATRPSGVVVVTRNTAIELKEKPAEEVKRAVPDVTYEDIGGLKRELRLVREMIELPLKHPELFQRLGIEPPKGVLLYGPPGTGKTLIAKAVANEVDAHFIPISGPEIMSKYYGESEQRLREIFEEAKENAPSIIFIDEIDSIAPKREEVTGEVERRVVAQLLALMDGLEARGDVIVIAATNRPDAIDPALRRPGRFDREIEIGVPDKEGRKEILEIHTRKMPLAEDVDLEELAELTNGFVGADLEALCKEAAMHALRRVLPEIDIEAEEIPAEVIENLKVTREDFMEALKNIEPSAMREVLVEVPNVKWEDIGGLEHAKQELMEAVEWPLKYPEVFRAANIKPPRGILLFGPPGTGKTLLAKAVANESNANFISVKGPELLSKWVGESEKHVREMFRKARQVAPCVIFFDEIDSLAPRRGGIGDSHVTERVVSQLLTELDGLEELKDVVVIAATNRPDMIDPALLRPGRLERHIYIPPPDKKARVEIFKIHLRGKPLADDVNIEELAEKTEGYSGADIEAVCREAGMLAIRELIKPGMTREEAKEAAKKLKITKKHFEEALKKVRPSLTKEDVEKYEKLIEDFHRMYA

SEQ ID NO: 5636 - protein, 449 aa, Archaeoglobus fulgidus DSM 4304
MVSFRRFGCDGGVSAAIQVRNSSEHGCNHHCLHICFEHCRGAFNNLRSIARRLHNRIFGDKCYLRTFLCVRNRSFALRQSCFVAGASRNTYPRPQGPYRCEVEEVAMEQIILNLALWFGLYTIVSLSLNIEYGFAGIPNFGRALAVLMGAFTVGGLVNRLLMLAFNIQGGELKEATGRLASTVNEIIANNPAFGIGLILLSVVLAMIIGAVTGALFILPSAKLSEDYLAITLLAISEVAFMVFYYHTGIIGGYYGVSVPDVLAFLPGQYRSHAFAVIALLFALLVYIFVERLLNSPYGRLLRAMRENESVVEAMGKSVMTLRIKTAAIGSSIAAIAGALFSLYSVNVIATSFSRVEWTFYPFLMVLLGGAGNNRGVVVGTFTFVLVKILLTMYKYEIKSALMLPFEAVWLEYILFGLLMYFVLLYRPEGLIKEKPIFSKVILKKVKGKA

SEQ ID NO: 5637 - protein, 371 aa, Archaeoglobus fulgidus DSM 4304
MAIYAFPEFDGESRRASRIYASARYPSRQEGNVFFDSEEVPNLKYADEMPLKIRNFYSVVAFRPSHIFLSRDVLGGRPLYYGSDMSISSFKSYIDGEVYEVMPGEVVKMDYTGEILERRKYAFEDVFRVGREDVNEMADRILNSLSSYKPRVGCIAFSGGVDSSLLAALYDAPLVSVTASDAEEEWLKTAARMLGKEIEILKVGESAIREVVDTVRKTIETGDFLQLSIAVPVYLTMQFAKSLGFTEIIFGQGADELFGGYKRYEGLSEHELEDALVKDLKSIGESNLVRDCKLAYKNEIKLVTPYLCWDVIDAALKIPPEYKVRREGGKVVRKYILRKIAEKFLPEEIAWRDKKAIQYSTGIAKILKKCL

SEQ ID NO: 5638 - protein, 736 aa, Archaeoglobus fulgidus DSM 4304
MQVQVSLSRDLSFFDITMIGIAGMIGAGVFALTGIAAGIAGPAIILAFFLNGIIATLTGLAYAELGSAMPQAGGGYLWIKEAMGDYAGFMAGWIDWAAHTIACALYAVTFGAFFAEMLVGFVGLPLPHVLTAKISSLAMVSFLAYVNYRGAKESGFLGSLVTVLKVLILLVFAGFGIIKMLSYPDWQSSFTPFFPTGFAGVLAAMGLTFIAFEGFEIIVQSGEEVKDPEKNIPKAIVVSLWVAVAIYILIAFSLLGAVRADVPSWMYLGQLAELSLVKVADSIMPLGGWMILAGGLISTISAMNATIYSSSRVIFALSRSGYLHRSLSAINERTKTPHYAIFFSYIIIAAASLAPIEAVASAASLMFIILFLAVNVTLIILRLRRPDIQSAFRLPLVPVLPAIAAALLAVVSYFLITQVEHGEGVFLITIAWMFLGSFFYFAYSEKELEKREEEEVMTVFTEKPVEKMEYTILVPVANPVIAKKLVRFAELIARKKKGAVVILNTVRLPQQTPISAPAKDVKKAKELVEGLMNLSVPSGGVVKVSHSVSEAILSTAEEWKANMIVMGWRGRTFRRDVVLGSTIDPVLLKAKCDVVVIRFEPGEKIPEFRDVLISTIGGPHAKLGYEIARALVEDKSGRIKLLYVGSSEKEREKAEKVFEEAMEILNGLNVEREFAISSSPSDVVAREAESFDLVIVGASERTFLKNFLTGLFPEKVVMKTSKTVAMTRKWVGLLNR

SEQ ID NO: 5639 - protein, 390 aa, Archaeoglobus fulgidus DSM 4304
MRKTGGLPLSRRLARRVEELKPSGIRRFFDLVVGRDDVISLGVGEPDFPVPWRIREEMIYSLEKGYTSYTSNLGLPELREGIAEYYTRFGVKALPEQVMVTSGVSEGVDIAIRALIEPGDAALIPEPCYVSYKPLVEICGGEAVTIPTAPEFRLTYEMLMQYRDAKAKILVLNYPANPTGVSYSKKELEEIADAVNELDLIVLSDEIYAELTYTGRHVSMAALNGMEDRVVIFNGFSKAFAMTGMRVGYVIAPPDIFAGMLKIHQYCMLCAPITGQIGAIEALRSLDEVERMRAEYMRRRNFVVKRLSEIFEIKKPEGAFYAFPKISSTGMSSEEFAEKLLLEKSVAVVPGNAFGECGEGYVRLAYAVKFEKLKEAMDRIKEFVEEHGEG

SEQ ID NO: 5640 - protein, 459 aa, Archaeoglobus fulgidus DSM 4304
MEEMPLIKTPPPHGGKLVERVVKKRDIAEKMIAGCPTYELKPTTLPDGTPIRHVYREIMSVCYGFFSPVEGSMVQNELERVLNERRLLSEWIFPYPILFDISEEDYKALDVKEGDRLLLMLKGQPFATLDIEEVYKIDPVDVATRTFGTPEKNPEVVREPFDDKHPGYVIYKMHNPIILAGKYTIVNEPKFKEPYDRFWFPPSKCREVIKNEKKWRTVIAHQTRNVPHVGHEMLMKCAAYTGDIEPCHGILVNAIIGAKRRGDYPDEAILEGHEAVNKYGYIKPERHMVTFTLWDMRYGNPIESLLHGVIRQNMGCTHHMFGRDHAAVGEYYDMYATQILWSQGIPSFGFEAPPNEVDYGLKIIPQNMAEFWYCPICQEIAYSENCGHTDAKQKFSGSFLRGMVAEGVFPPRVVMRPEVYKQIVKWWKVYNYPFVNRKYLELKNKELEIDLPAMEVPKA

SEQ ID NO: 5641 - protein, 552 aa, Archaeoglobus fulgidus DSM 4304
MRAADAIVKALEMEGIEVVFGIPGGAIIEVYDALYDSGIRHITTRHEQGATHAADGYARASGKVGVAFATSGPGATNTVTGIATAYMDSSPLVVFTGQVPTSMIGNDAFQEADITGITMPITKHNYLVTDTKDLLGTIKEAFHIASTGRPGPVLVDLPKDITTADIDFNYPKKVSLPGYKPKLEGHPRQIAKAAELIMKAERPVILAGGGVIISNASKELVELAETIPAFVVTTLMGKGSIPETHPLSLGFAGMHGTKYANYALSESDLIIAVGCRFSDRTTGNVAMFAPEAKIIHIDIDPAEIGKNVRVDVPIVGDARKVLAKLKKAVEYKQRKEWEDKVNDWKKRYPLKYKKEGFKPQYVIERACEIMPDAIITTEVGQNQMWAAQFFKTKYPRQFITSGGLGTMGFGFPAAMGAQVAFPEKTVIDIAGDGSFFMNIQELATCVKYEIPVKVLVLNNGYLGMVRQWQELFYRERYSATCIGCEKTGFEAIARGFGAIGMTVEKPSEVDDALKEAKEVDAPVVIDFRVDYQANVFPMVPPGAALNEIIDEE

SEQ ID NO: 5642 - protein, 468 aa, Archaeoglobus fulgidus DSM 4304
MVGRMCVAVLIVLLLVATAGADPNGAETLKENPELPVDFVWALICGFLVMFMQAGFAMLEAGFSRAKNVANVMMKNLMDFAVGSLAFFAVGFALMMGADWQGIAGTTGWFLAGESYDVSTIELWFFMLVFAATAATIVSGSIAERPKFSVYLVYSAVVSAVIYPIYGHWLWGGGWLSSSEFMVKLGGGYGALDFAGSGVVHALGGYIALAAVMLLGPRLGKYDSDGNPRAIPGHNLAFAVIGTFILWFGWFGFNAGSTLSAHELRVSIIASNTNLAAAAGAVTAMAITWLRNGKPDVGMTCNGAVAGLVAITAPCAWVQPWSSVVIGTIAGFIATYGYWWLEKRGLDDVVGAIPVHGFSGTWGLIALGIFADGSYGLYATESPLVTGLLYGNWGFFIVQLISAIVNFAWAFGTGFALFWILKKVIGIRVSPEEEMLGLDIAEHAAVAYPNFVCTETELPLAMKQGGGR

SEQ ID NO: 5643 - protein, 531 aa, Archaeoglobus fulgidus DSM 4304
MREKIGFWEAVSIGIGGMIGGGIFAVLGLSVQLAKGSAPIAFLIAGIVALFTAYSYAKLSLRFPSEGGTIEFLIKAYGTGLLAGGLNILLLVSYVVMIALYSYAFGSYAANALGTPILKSFLIAFVVIFFTVLNSLGAVVSGRAEDLLVAFKLAVLVIVAAAGLAFVNPERLMPSNWADAVSIIAGGMIIFLAYEGFELIANAGGDVEHPKVLEKAFYVSVVVVIAVYVLIAIITVGTLPYEKIMEARDYALAIAAEPALGQLGFWFVTFAALASTSSAINATLYGTARASYMVAKFGELPEFVGKKLWRQAYEGLVVIPILSIILSITTNLETIATAGSGGFLLIFAAVNLAAVKLRRKVKVNPLISSAGAIMALAAFTILALRMAEENLYALAVMLSLIAASFLFEWTYRWYTGREIGRYVDRKLIEREKNLRNWEEWIPAVVDELRRRYSDSEVYLVGSLARGEAEKAGDVDLLVLTDAVENGEKEGITRDIKKKLELGPQHCLDLHFEKKSLRDEALKRAVSYRRLK

SEQ ID NO: 5644 - protein, 323 aa, Archaeoglobus fulgidus DSM 4304
MVKVVSFSPIAEPLLKGLIGSVYSGEVEVVVIGEYDERRILEAVRDADIVIGDYTFKIPITEEMMRAMEKVKLIQQPSTGYNNIDVEAAKKLSITVANVGGVNALSVAEHTVMFALALLRRLIYAHNSVLSGRWEQDEMANLGVYELHGKTWGIIGMGAQGREVTKRLQGWGVKIIYHDVRRAEDIEEYGVEFRDFDALLREADIVSLHVPLTEETRGMIGERELKMMKNSAILINVARGEVVDENALVRAIKERWIAGAALDVFAKEPPEGSELLELKSHNVIFTPHIAGATNEARLRIIREAMENIGRALRGEEVKHVVSR

SEQ ID NO: 5645 - protein, 545 aa, Archaeoglobus fulgidus DSM 4304
MDAAHAVAECLKNFGVGRVYGIIGTSIVDFVDALYDYREEIRYISCRHEQVAASMADAEGRLTGFPGVSLVHAAPGTLNAAIGVANAYKDGSPMVVISGGAKRKLYGKNTMLEVDQQSVMRPITMATFRVEDAAKAQSIIAKAFSIAVRECGPVYVEFAEDVWLEESSSEDVRIEAEKPRAGDAEIESVAEMLREAKKPLILAGFGVNSEEGSELLTQLVEKTSIPVATTGNGRGALDDNHRLCLGRAGFGGGSIHADEALRNSDFLLCLGCQLTDVTTYGYNWMPSGKVVAVTLDREAGKKLNYALVSYSDAVDFLRRLIEKVEGYRAPESWLHEIEVWRKSWEQMVENAVNMEYKGFANPAKFFKKLNEALPENAVVSAGQGMHVLYPQAYVKARRPRSYLAATNHGAMGFGFPAAMTAALLGYTAIAVVGDGEFMMTVQDLETAVRESIPVKVVVVNDNSYRVLYFRQKVQKMGRVYGTLHTNPDFAELAGVFGADGVTVSSDSQIEDAIGEMLNSERPFVLDLRISPDCFAPFNPQPSVRM

SEQ ID NO: 5646 - protein, 140 aa, Archaeoglobus fulgidus DSM 4304
MGMLIDPFEELRRMQERFNRLLEEFGRFPEVKEFRVTMPVDVIDEGEQIRVVADLPGFSKEDLEIYFEDGDLVIKAEKKEEFEEKKGEYLRRERRMGKVYRRIALPAGLDIDAVKAKYNNGVLEITIPKLKKDRKAVQIE

SEQ ID NO: 5647 - protein, 398 aa, Archaeoglobus fulgidus DSM 4304
MGDSEIQYLLEKLKKLEEDYYKLRELYRRLEDEKKFIESERIRYEREVRRLRSEVERLRSPPLLVGVVSDILEDGRVVVKSSTGPKFVVNTSQYINEEELKPGARVALNQQTLAIVNVLPTSKDPMVYGFEVEEKPEVSYEDIGGLDVQIEEIREAVELPLLKPELFAEVGIEPPKGVLLYGPPGTGKTLLAKAVANQTRATFIRVVGSEFVQKYIGEGARLVREVFQLAKEKAPSIIFIDELDAIAARRTNSDTSGDREVQRTMMQLLAELDGFDPRGDVKVIGATNRIDILDPAILRPGRFDRIIEVPLPTFEGRIQIFKIHTRKMKLAEDVDFKELARITEGASGADIKAICTEAGMFAIREERAKVTMLDFTKAIEKVLKKTTPIPDLKGVMFV

SEQ ID NO: 5648 - protein, 543 aa, Archaeoglobus fulgidus DSM 4304
MDGAEAVAKALLREKIDCAFSLPSGEILPVCEYLEAEGVRVIFTRHEQAAGNAADGYARVTRRPGFCIVPTGPGLANLMPALAQAYYASSPVVAIAGHSRYVNLDREAFEEIDGYLWVKEYTKWSRLVPFTHRLHEYVQEAFRRALSGRYGPVLLEIPKDVLNADIDGKVELAEPRNYRYTGRVGCEEEYIYRALEMLLNAEKPLIVAGSGVYWSRAENFMIAFAEKLSIPVSVSGLGGCCISPDHPLFAGQASASPAVMQSDFVLVVGTRFDEFLGFGQKFKGKVVHVDIDACELAKNRYVDIAISCDAGYFFSKALAMLEGEKKFENWARPIMEGVNRMFEEAAKGEDKPMKPQRLMRELNEVLSRDDIVILDGGETTAWGLLYLKKGKVISSQGPFGHLGAGIPMGIAAKAAYPEKRVFVVTGDGSFLFNGAEIDTAVRHGLQVVVVVVNDSAWGLVNHTRLLSTKSAERASYGVMLNPAARYDRFAESLEAYGELVEKSGEVKEAVKRAFDSALPAVLDVRVKLDEISPLAYLLSGSEG

SEQ ID NO: 5649 - protein, 811 aa, Archaeoglobus fulgidus DSM 4304
MGDNMEITLKVNQAYPSDSGRGIARLDPDTMLKLQISPGDIIEIEGARKTVAKVWRAPKRDWGKNIIRIDRFIRENAGVGVGDVVKVRKVEYQPAKTVILAPLKKMDLRIYGVDIGEYLKHQFLKRPVVEGDLVPLVGSPALSGFGRYNQQNQAVVFVAVKTEPKGPVVIDETTKVVYRDRPAKGFERFGKAGITYEDIGGLKEELQKVREVIELPLRYPELFQRLGIEPPKGVLLYGPPGTGKTLIAKAVANEIGASFFTINGPEIMSKFYGESEQRLREIFEEAKENAPSIIFIDEIDSIAPKREEVTGEVERRVVAQLLTLMDGLEERGQVIVIGATNRIDAVDPALRRPGRFDREIEIGVPDREGRYEIFQIHTRNMPLEAKYSREFVLDAIERFKRQVDDPELIKNLDFLYDEIKNSETEEEVKGAVKNLLPQEVIDELEVEITKAMLRSLADQTHGFVGADIEALCKEAAMKALRRYLPQIDLNEDEIPIELLESIRVTWDDFMDALREIEPSAMREVFVEIPKVTWNDVGGLEDVKREIIEAVEWPLKYPEKFKKFGIKPPKGVLLYGPPGTGKTLIAKAVANESEANFISIKGGQILSKWLGESEKAVRKIFRKARQVAPCIIFFDEIDAIAQMRGIDEGSRAVERVLNQLLTEMDGLEELHGVVVIGATNRPDILDPALLRPGRFDRMVYVRPPDKKSRLAIFKIHTRDMPLSEDVDLEELADLTEGYVGADIEAICREAVMLAIRENINAEKVEMRHFLEALKKIKPSVNEAMLNFYERFEEKMRTERMQVAATKPFMGYG

SEQ ID NO: 5650 - protein, 575 aa, Archaeoglobus fulgidus DSM 4304
MAQISGGELLVRCLIKENVRYIFGVPGGQLLTFLDAIKRVGEKHGMKFVNCRHEQAAASMADAYARVSGEIGVCVGTIGPGGADLVPGVYPAFADSVPMLVITAQNQTWKSYPDHGSMQALDQYHLFKPITKWNAVVSHWERIPELVQRAIRIALSGRPGPVHLDFPSDVLYNGQEESFAKVYGPERYRPMKPPVGHPELVEKAAEMLYNAERPLIHAGTGVLRAKAWNELRELAEYLGAVVTTTMGGRGAIPEDHPLCILPASPAAITAQNEADVILVVGSKMGDLDFWGKPPAWGDPEQQKTIQIDIDPEMIALNRPVDVAIVGDAKETLKALIEAVKKKGEKREPVDRLKEYRKMQQDWLEGFLKLAESGEKPIHPLRVIKEVREFYPRNAISCVDGGNTAVWASYLNRIYEPNTFLWAADSGHLGTGLPYAIGAKLANPDRPVYLIAGDGAFGLTMEELETASREGVKITAVVMNDGCWGMIKGSQKAAFGGRFIGVDFKDVRYDKVAESMGWYGQRVEEPEDIATALDKAESSDKPALLDVKISQEANLSPPDLITLSIVWLEGCNPPPV

SEQ ID NO: 5651 - protein, 379 aa, Archaeoglobus fulgidus DSM 4304
MMQRGANRIEVVQPSATLRVSTMAKELKREGKDVVDMSVGEPDFPTPDFIIEAAYKAMKEGKVFYTPTKGVPELIDAIVEKLRNENGIDVGAENIIVTPGAKYAIFEAMMCLLQEGDEVILLDPSWVSYEACILMAGAKPVWVPHEEGFEDAPIEDYITSNTKMIVVNTPSNPLGVVYPKEFLKKVRDLAVDKDILVMSDEIYEKIIFEGEHYSLAAMDGMLERTITINGFSKTYSMTGWRLGYAAAPEWIIKLMNRMQSHSVSHPTSFVQYAGVAALKGDQSFIKEIVEEFRARRDMIMAKLDEMGIEYAPPKGAFYIFMNVGRDSNEFCEEFLKREYVALTPGSAFGVAYKSWVRLSYATSRERIGEFLSRLERFLG

SEQ ID NO: 5652 - protein, 390 aa, Archaeoglobus fulgidus DSM 4304
MKVVLSYSGGLDTTVCIPLLKEKYGFDEVITVTVDIGQPEADIKQAEERGKKYADKHYTIDAKKEFVDSLFMLIKANGNYEGYVLGTALARPLIAEKVVEVAKKEGAEAVAHGCTGKGNDQLRFENIFRQHGFKVIAPVRELNLTREWEIEYARQHGIEVPATKEKPYSIDENLWSRSVEGGKLEDPSFEPPEDIYEWTASPEKAPDKPEIVKIDFEKGVPVALNDERMGGFELIKALNEIGGKHGVGRTDMIEDRVLGLKARENYEHPAATILITAHRDLENLVLSRRELKFKKFVEEEWAELVYYGLVNDPLFDALNAFIDKTQERVTGWVKVKLYKGSAVVVARNSPYALYSEELVSFDTESIDQRLAEGFAAFHGLQGRLFRRLFQ

SEQ ID NO: 5653 - protein, 254 aa, Archaeoglobus fulgidus DSM 4304
MGVLRVVNLGVKVGEKKILKNVNLFIKEGETFVLFGPNGSGKSTLLNALIGNPSYKVTSGRILFKKVDITNLPTNERVKLGIGIAFQNPPKISGVKLIDVLRYCARVGGYGEDKILELAEKMRMTDHLYREINMGFSGGEVKRSELLQLMLMNPDLVLLDEPDSGVDLENVALIGEAIRTLLERDKEEGERTKSGIIITHQGHILDYVDADYAAILYNGRIACIGEPKDILNQIRNHGYEGCLAKCLANMENSE

SEQ ID NO: 5654 - protein, 373 aa, Archaeoglobus fulgidus DSM 4304
MREAARLSQISTSMIRRMFEIVERAKKEGREIISLTIGEPDFDTPQEVIERACRAMNAGFTHYTSNFGLEELRSAIAERYGVDSSNVMVTAGGSEALLNASLAFIEEGSKVVIPSPNFLSYFTYAKMCGGQIVQLRTHNNGFLPDVEKLNEIIDRNVSVIFLNYPNNPTGAVIDEKDARAVVEIAADNKAIVVSDEIYDQIYYDVKPTSLAGYENVVCVNGFSKSLSMTGWRIGFTIADEKLLDPMLKVHQVNGVCAPAFAQKAVAEVMAERLFDSIVSRMVKEFRQRRDYLYSELSKIYDVVKPEGAFYMFVNVNQDCMEYAENLINLGVAVTPGLPFGDGNETYVRISYANSLENLKKAAEIIREYESQRA

SEQ ID NO: 5655 - protein, 143 aa, Arachis hypogaea
MVRAPCCEKMGLKKGPWTAEEDQILISYIQKHGHGNWRALPKQAGLLRCGKSCRLRWINYLRPDIKRGNFTIEEEETIIKLHEMLGNRWSAIAAKLPGRTDNEIKNVWHTHLKKRLIKPNQMNSSSSDTKRVSNKSKIKRSDS

SEQ ID NO: 5656 - protein, 76 aa, Phyllostachys edulis
GGNDMRTFYTLVMVDPDAPSPSDPNLREYLHWLVTDIPGTTGAAFGQEVVCYESPRPTMGIHRFVFVLFQQLGRQT

SEQ ID NO: 5657 - protein, 87 aa, Pharus virescens
KPSQVVHQPRVDVGGNDLRTFYTLVMVDPDAPSPSDPNLREYLHWLVTDIPGTTGAAFGQEVMCYESPRPTMGIHRFVFVLFQQLGR

SEQ ID NO: 5658 - protein, 87 aa, Puelia ciliata
KPSMVVHQPRVDVGGTDMRTFYTLVMVDPDAPSPSDPNLREYLHWLVTDIPGTTGAAFGQEVVCYESPRPTMGIHRFVFVLLQQLGR

SEQ ID NO: 5659 - protein, 87 aa, Guaduella marantifolia
KPSMVVHQPRVEVGGTDMRTFYTLVMVDPDAPSPSDPNLREYLHWLVTDIPGTTGAAFGQEVMCYESPRPTMGIHRFVFVLFQQLGR

SEQ ID NO: 5660 - protein, 87 aa, Sasa kurilensis
KPSMVLHQPRVEVGGNDMRTFYTLVMVDPDAPSPSEPNLREYLHWLVTDIPGTTGAAFGQEVMCYESPRPTMGIHRFVFVLFQQLAG

SEQ ID NO: 5661 - protein, 79 aa, Phyllostachys aurea
  misc_feature (2)..(3): Xaa can be any naturally occurring amino acid
  unsure (1)..(79): unsure at all Xaa locations
PXXKFGANDMRTFYTLVMVDPDAPSPSEPNFREYLHWLVTDIPGTTGAAFGQEVVCYESPRPTMGIHRFVFVLFQQLGR

SEQ ID NO: 5662 - protein, 87 aa, Olyra latifolia
KPSMVVHQPRVDIGGNDMRTFYTLVMVDPDAPSPSDPTLREYLHWLVTDIPGTTGAAFGQEVMCYEPPRPSMGIHRFVLVLFQQLGR

SEQ ID NO: 5663 - protein, 527 aa, Pinus taeda
MTHDNSTHSRSGRSRIEEDRQREEDRARGRGTGAVMRVIVPLQGVVQGRGGVVLGSVIPCALFYFLQLYLKRHRSERAPREEVPPPPRRPSRSPRKPALVSSRALHVIEDENSPYYRGWQAYKENPYDAEHNPDGIIQMGLAENQLSLDLIEGWLKSHPEVSSWEGISDTPLSLRGIASHQDYYGMPILRSVMADFMCEVMKAPFNPDQIVLTAGATPAIEMLGFCLADPGNAFLVPSPYYPAFCRDLKWRAGVELVPVPCRSSDNFNVTINALDRAFSQTKKRRLTVRALLISNPSNPVGNILDSATLTMLLEFATEKNIHLVCDEIYAGSVYDSPNFTSIAKVLESGEFDKSRVHIIYGTSKDLCLPGFRVGVIYSYNDKVLKAAQQMSRFCSVSSQTQHLLINMLSDAQFIQQYLSENQRRLRKASLVLTEGLKEAGIKYVKSNAGLYCWVEMGSLMPSYSEKGELNLWDKLLNEAKINVTPGSACYCIEPGWFRICFSTLSCQDMTVALRRIQEFSKRRKRSL

SEQ ID NO: 5664 - protein, 481 aa, Pinus taeda
MTHDNSTHSRSGRSRIEEDRQREEDRARGRGTGAVMRVIVPLQGVVQGRGGVVLGSVIPCALFYFLQLYLKRHRSERAPREEVPPPPRRPSRSPRKPALVSSRALHVIEDENSPYYRGWQAYKENPYDAEHNPDGIIQMGLAENQLMADFMCEVMKAPFNPDQIVLTAGATPAIEMLGFCLADPGNAFLVPSPYYPAFCRDLKWRAGVELVPVPCRSSDNFNVTINALDRAFSQTKKRRLTVRALLISNPSNPVGNILDSATLTMLLEFATEKNIHLVCDEIYAGSVYDSPNFTSIAKVLESGEFDKSRVHIIYGTSKDLCLPGFRVGVIYSYNDKVLKAAQQMSRFCSVSSQTQHLLINMLSDAQFIQQYLSENQRRLRKASLVLTEGLKEAGIKYVKSNAGLYCWVEMGSLMPSYSEKGELNLWDKLLNEAKINVTPGSACYCIEPGWFRICFSTLSCQDMTVALRRIQEFSKRRKRSL

SEQ ID NO: 5665 - protein, 405 aa, Triticum turgidum subsp. durum
MGSSDSSSGSAQKAARHQHEPPPPRQRGSAPELPPGFRFHPTDEELVVHYLKKKAAKVPLPVTIIAEVDLYKFDPWELPEKATFGEQEWYFFSPRDRKYPNGARPNRAATSGYWKATGTDKPILASGTGCGLVREKLGVKKALVFYRGKPPKGLKTNWIMHEYRLTDVSGSTTTSRPPPPVTGGSRAAASLRLDDWVLCRIYKKINKAAAGDQQRSTECEDSVEDAVTAYPLYATAGMAGAGAHGSNYASPSLLHHQDSHFLEGLFTADDAGLSAGATSLSHLAAAARASPAPTKQFLAPSSSTPFNWLDASPAGILPQARNFPGFNRSRNVGNMSLSSTADMAGAAGNAVNAMSAFMNPLPVQDGTYHQHHVILGAPLAPEATTGGATSGFQHPVQVSGVNWNP

SEQ ID NO: 5666 - protein, 396 aa, Triticum turgidum subsp. durum
MGSSDSSSGSAPPRHQPPPPQQGSAPELPPGFRFHPTDEELVVHYLKKKAAKVPLPVTIITEVDLYKFDPWELPEKATFGEQEWYFFSPRDRKYPNGARPNRAATSGYWKATGTDKPILASGCGREKVGVKKALVFYRGKPPKGLKTNWIMHEYRLTDASSSATTSRPPPVTGGSRSASLRLDDWVLCRIYKKINKAAAGDQQRSMECEDSVEDAVTAYPLYATAGMTGAGAHGSNYDSLLHHQDSHEDNFLDGLLTAEDAGLSAGPTSLSHLAAAARASPAPTKQFLAPSSSTPFNWLDASTVGILPQARNFPGFNRSRNVGNMSLSSTADMAVDNGGGNAINTMPPFMNHLPMQDGTYHQQHVILGAPLAPEATAAATSAFQHPVQISGVNWNP

SEQ ID NO: 5667 - protein, 383 aa, Aegilops tauschii
MGSSDSSSGSAPPRHQPPPPQQGSAPELPPGFRFHPTDEELVVHYLKKKAAKVPLPVTIIAEVDLYKFDPWELPEKATFGEQEWYFFSPRDRKYPNGARPNRAATSGYWKATGTDKPIMASGCGREKVGVKKALVFYRGKPPKGLKTNWIMHEYRLTDASSSATTSRPPPVTGGSRAASLRLDDWVLCRIYKKINKAAAGDQQRSMECEDSVEDAVTAYPPYATAGMTGAGAHGSNYDSLLHHQDSHEDNFLDGLLTAEDAGLSAGATSLSHLAAAARASPAPTKQFLAPSSSTPFNWLDASTVGILPQARNFPGFNRSRNVGNMSLSSTADMAVDNGGGNAINAMPPFMNHLPVQDGTYHQQHVILGAPLAPEATAAATSAF

SEQ ID NO: 5668 - protein, 890 aa, Triticum monococcum
MGSSTSKASDSSSHRDGPKRPDQGLSVGTSSLMALHGKLTQLERQIQQARLASIKEKLEANRRALRKHTCGLFDVAALAEAASRGSESSNVLSQLAAEGQSRIVGWNLARGSGEREVVHVQEESLSADGTLVLSSSGDSAQSIVLQLVKLPLVDKIPPYTTWIFLDKNQRMADDRSIAGRRRIYYDSAGNEALICSESDEEIPQPEEEKHVFTEGEDQLIWKATQERGLSQEDLNVICQFIDASPSEIEGRSEFLFEKHEKHSEFSDKIESQLPLDKTVDIVLDSFDNLFCRRCLGFDCRLHGCSQNLVFPSEKQPCGFELDGNKSPCGDQCYLRRREGFQDIRKHDYASSATHNMESRSTLHKVGTDMVSESEDSNREEEIIKSSISVGTSRSKISFESAEKHTTLPSGDASETENVSTDMLLRSLGKRKVSKGPRSSDDFPYKKPRMLASDIPFASHILNNHSTSEIGDTRPDIREFGGNQRDDPNKKTSNKDSCGGSPTSTAEDAARNTNKESSANNLFSSSREHPLSHWSTLERDLYLKGIEIFGKNSCLIVRNLLCGLKTCMEVASYMYNNGAANVSKSISGDFTETEQNYMEQGMVVRTKVCRRRGRTRKHKYPSKAAGHPAIRKKVGDGKQCDRQYTPCGCQEMCNKNCPCVENGTCCEKYCGCSKSCKNRFRGCHCAKSQCRSRQCPCFAASRECDPDVCRNCWVSCGDGSLGEPPERGDGYQCGNMKLLLKQQQRILLGKSDVAGWGAFIKNPVHKNDYLGEYTGELISHKEADKRGKIYDRANSSFLFDLNDQFVLDAYRKGDKLKFANHSSSPNCYAKVMMVAGDHRVGIYAREHIEASAELFYDYRYGPDQAPAWARRPEGAKKDEASGSHRRAHKVA

SEQ ID NO: 5669 - protein, 180 aa, Cucurbita maxima
MPRNRDPLVVGRVIGDVVDSFSRSISIRVVYDSREVNNGCELKPSQAVNKPRVEIGGTDLRTFFTLVMVDPDAPSPSDPNLREYLHWLVTDIPATTEATFGQEIVCYENPRPTVGIHRFVLVLFRQLGRQTVYAPGWRQNFNTRHFAELYNLGSPVAAVYFNCQRENGSGGRRRAGDECS

SEQ ID NO: 5670 - protein, 179 aa, Cucurbita maxima
MPRDRDPLVVGRVIGDVIDSFTKSISIRATYNNREISNGCELKPSQVVNQPRVEIGGTDLRTFFTLVMVDPDAPSPSDPNLREYLHWLVTDIPATTGANFGQEIVCYESPRPTVGIHRLVLVLFRQLGRQTVYAPGWRQNFNTRDFAELYNLGLPVAAVYFNCQRESGSGGRRRTQDDF

SEQ ID NO: 5671 - protein, 533 aa, Solanum peruvianum
MASSGGNMNTFMNSFNSFSSSQFMTSSFSDLLSDNNNNNNSNNDNKNWGFSEDRSKSFPMMNSSTSPASPSSYLAFPHSLSPSMLLDSPVLFNNSNTLQSPTTGSFGNLNSKEGNSRNSEFSFQSRPATSSSIFQSSAPRNSLEDLMTRQQQTTEFSTAKTGVKSEVAPIQSFSHENMSNNPAPVHYCQPSQYVREQKAEDGYNWRKYGQKQVKGSENPRSYYKCTFPNCPTKKKVERNLDGHITEIVYKGSHNHPKPQSTRRSSSQSIQNLAYSNLDVTNQPNAFLENGQRDSFAVTDNSSASFGDDDVDQGSPISKSGENDENEPEAKRWKGDNENEVISSASRTVREPRIVVQTTSDIDILDDGYRWRKYGQKVVKGNPNPRSYYKCTFTGCPVRKHVERASHDLRAVITTYEGKHNHDVPAARGSGSYAMNKPPSGSNNNNNNMPVVPRPIVLANHSNQGMNFNDTFFNTTQIQPPITLQMLQSSGTSSYSGFGNSSGSYMNQMQHTNNSKPISKEEPKDDLFFSSFLN

SEQ ID NO: 5672 - protein, 504 aa, Dendrobium hybrid cultivar
MSIFLITSLLLCLSLHLLLRRRHRSRFPLPPGPPNLPILGALPFIGPMPHSGLALLARRYGPIMFLKMGIRRVVVASSATAARSFLKTFDSHFSDRPSGVISKEISYNGQNMVFADYGPKWKLLRKVSSLHLLGSKAMSRWAGVRRDEAFSMIQFLKKHSDTEKPVLLPNLLVCAMANVIGRIAMSKRVFDEEGEEAKEFKEMIKELLVGQGASNIGDLVPSIGWLDPMGVKKRMLGLNRRFDRMVSKLLVEHAETAGERQGNPDLLDLVVGSELTGEDGEGLCEDNIKGFISDLFVAGTDTSAIVIEWAMAEMLKNPSILQRAQQETDRVVGRHRLLDESDIPKLPYLQAICKEALRKHPPTPLSIPHYASEPCEVEGYHIPGKTWLLVNIWAIGRDPDVWENPLLFDPERFLQGKMARIDPMGNDFELIPFGAGRRICAGKLAGMLMVQYYLGTLVHAFDWSLPEGVGELDMEEGPGLVLPKAVPLSVMARPRLAPAAYGLL

SEQ ID NO: 5673 - protein, 124 aa, Fusobacterium necrophorum
MKVLVINCGSSSLKYQLINPDSKEVFAKGLCERIGIEGSKFEYEVPAKDFEIKLESPMPTHQEALKLVVDHLVDQEHGVIASVEEVDAIGHRVVHGGETFASSVLITEEVIKAIEDNNDLAPLH

SEQ ID NO: 5674 - protein, 218 aa, Listeria monocytogenes
GLVFWGAAEPLSHYAVQAPGGEVGTQAAMKDALRYSFFHWGISAWSIYAIVALALAYFKFRKNAPGLISATLYPILGKHAKGPIGQLIDIIAVFATVIGVATTLGLGAQQINGGLTYLFGVPNNFTVQFTIIIIVTILFMLSAMSGLDKGIQLLSNVNIYVAGVLLVLTLILGPTLFIMNNFTNSFGDYLQNIIQMSFQTAPDAPDARKWIDSWTIFY

SEQ ID NO: 5675 - protein, 218 aa, Listeria monocytogenes
GLVFWGAAEPLSHYAVQAPGGEVGTQAAMKDALRYSFFHWGISAWSIYAIVALALAYFKFRKNAPGLISATLYPILGKHAKGPIGQLIDIIAVFATVIGVATTLGLGAQQINGGLTYLFGVPNNFTVQFTIIIIVTILFMLSAMSGLDKGIQLLSNVNIYVAGVLLILTLILGPTLFIMNNFTNSFGDYLQNIIQMSFQTAPDAPDARKWIDSWTIFY

SEQ ID NO: 5676 - protein, 416 aa, Oryza sativa Japonica Group
MAPPPHSDSDLLKPRDVCIVGVARTPIGALLGSLSSLPATKLGSVAIQAALRRANVEPALVQEVFMGNVLSANLGQAPARQAALGAGLPDTVPCTTVNKVCSSGMKAVMLAAQTIQLGMHDVVVAGGMESMSNAPKYVAAARRGSRFGHDVLIDGMLKDGLWDVYNDFPMGMCAELCADQHSISREEQDLYAIQSNERAIAARDSGTFSWEIAPVEISSGRGKPPLIVDKDESLAKFNSAKLRKLGPTFKKNGSVTAGNSSSISDGAAAIVLVSGQKAKSLGLQVIARIRGYADAAQAPELFTTTPALAIPKAVSNAGLQTSQIDYYEINEAFSVVALANQKLLGIPSGKLNLSGGGVSLGHPIGCSGARIIVTLLGILRHKNGKIGVAGVCNGGGGASALVVELMQPSLFTRSSL

SEQ ID NO: 5677 - protein, 316 aa, Oryza sativa Japonica Group
FRAVQAEGWTQLRHHHREAQHQVERCRRPRERQASAAGGRHIACQVPAVLLYGPPGTGKSYLAKAVATEADSTFFSISSSDLVSKWMGESEKLVANLFQMARENAPSIIFIDEIDSLCGQRGEGNESEASRRIKTELLVQMQGVGHNDDKVLVLAATNTPYALDQAVRRRFDKRIYIPLPDLKARQHMFKVHLGDTPHNLNESDFENLARRTDGFSGSDIAVCVKDVLFEPVRKTQDAMFFFKADGDMWMPCGPKQSGAVQTTMQELASKGLAAKILPPPISRTDFEKVLARQRPTVSKKDLEVHERFTKEFGEEG

SEQ ID NO: 5678 - protein, 597 aa, Oryza sativa Japonica Group
MDTTIGSVPTASDAAAPAPAANSAPREATLGRHLARRLAEVGARDVFTVPGDFNLTLLDELEAEAGAGHGGVRLVGCCNELNAAYAADGYARARGGGVGACAVTFTVGGLSAINAVAGAFSENLPVVCIVGGPNSNDYGSNRILHHTIGLPDFTQELRCFQTVTCYQAVVNNLEDAHEQIDAAISTAIKESKPVYISISCNLPSIPHPTFSRHPVPFFLSPRLSNQMNLEAAVETAAAFLNKAVKPVLVGGPKMRVAKACKSFVELADACGYPVAVMPSAKGLVPEHHPRFIGTYWGAVSTPFCAEIVESADAYLFAGPIFNDYSSVGYSLLLKKEKAIIVQPDRVVIGHGPAFGCVLMKDFLHALSARLKKNTAAYENYRRIYVPPGEPPLSEPGEPLRVNVLFQHIQKMLSANSAVIAETGDSWFNCQKLKLPEGCGYEFQMQYGSIGWSVGATLGYAKAAKDKRVIACIGDGSFQVTAQEVSTMLRWGQKSIIFLINNGGYTIEVEIHDGPYNVIKNWNYTGVVEAFHNGEGKCYTAKVRTEEELKEAIEEAQGPKKDCLCFIEVIVHKDDTSKELLEWGSRVSAANSRPPNPQ

SEQ ID NO: 5679 - protein, 203 aa, Oryza sativa Japonica Group
MAAQEQEQEKQQVKTSTTSSLPSSSERSSSSAPNNLKEGGGVESDEEIRRVPEMGGGGGSASSGAGADERQGKEDGKQQGGGGGGAAAAGGGQEQAPPARKRGRSAGDKEQNRLKRLLRNRVSAQQARERKKAYMTELEAKAKDLELRNAELEQRVSTLQNENNTLRQILKNTTAHAGKRGGGGGGKGGDGGGGGKKHHFTKS

SEQ ID NO: 5680 - protein, 796 aa, Oryza sativa Japonica Group
MGTGGGEGDKSAVLPLEALLALGLDQRTAENALVNSKVTANLAAVIAEAGISGCDKTVGNLLYTVATKYPTNALVHRPVLIDYIVSTKIKNPAQLDAALSFLTNTGPDSLDTGKFEEACGVGVVVSIEEIKSTVNEVLKHNMEAILEQRYHINVGNLCGQVRKRHPWGDAKATKDEIDKKLAEILGPKTDADNVKPVKKKKEKAAKVEEKKAAVVTAAPPSEEELNPYSIFPQPEENFKVHTEIFYSDGNIWRAHNSKEILEKHLKATGGKVMTRFPPEPNGYLHIGHAKAMFIDFGLAKERNGHCYLRFDDTNPEAEKKEYIDHIQEIVHWMGWEPYKVTYTSDYFQALYEHAVELIRKGLAYVDHQTAEEIKEYREKKMNSPWRDRPIEESLKLFEDMRRGLIAEGAATLRMKQDMQNDNKNMSDLIAYRIKFTPHPHAGDKWCIYPSYDYAHCMVDSLENITHSLCTLEFDIRRPSYYWLLVALGLYQPYVWEYSRLNISNTVMSKRKLNRLVTEKWVDGWDDPRLLTLAGLRRRGVSSTAINSFICGIGITRSDNSLIRVDRLEYHIREELNKTASRAMVVLNPLKVVITNLEDEKVIDLDGKMWPDAPADDASSYYKVPFSRIVYIEKTDFRLKDSKDYYGLAPGKSALLRYAFPIKCTEVVYGDNPDDIIEIRAEYDPSKTTKPKGVLHWVAQPAPGVEPLKVEVRLFDKLFLSENPAELEDWLGDLNPNSKEVIKGAYAVPSLATAVLGDKFQFERLGYFAVDTDSTPENIVFNRTVTLRDSYGKAGPK

SEQ ID NO: 5681 - protein, 507 aa, Oryza sativa Japonica Group
MDVVVESPPVRDEKKVDVAAIGGAPPIVFESFAPSTQRDSTIIKKEEKMEAAKAEMGEVREENERLKTMLTRIVSDYKSLHTHFLDVVKVKEQTAAELSGDDDDDEPDDLVSLSLCTRPNAAATRRKGHERTPSSGGGGDDGRLSLGLSCARGGVASDDDDDKQASRRALPPMPVLNLSSDSSGDAAGAGAGEPTQPNKASRSSSGGGDGADDEVLQQQQAKKARVSVRVKCDTPTMNDGCQWRKYGQKISKGNPCPRAYYRCTVAPNCPVRKQVQRCADDMSILITTYEGTHSHPLPPAAAAMASTTSAAAAMLTSGSTNSTMHGSGGVHHHLPFASAVGGGGGVGLLGPTTISTATSCPTVTLDLTAPHSLLHPSSASPYAAAAAGYESSRALPAAWSSGYLAYGGAAAAQPYYAKGVAPSPFGHHFGMMGMAAAAARPAPEQLFGGQTTSPYLQRAIGGGGVAPAAVTDTIAKAITSDPSFQSVLAAAITSYMGRGGGAAAPNK

SEQ ID NO: 5682 - protein, 347 aa, Oryza sativa Japonica Group
MGDSSRSVSIDVERISFGGKEHRVRTRYGSVSVSVFGDEDKPALITYPDVALNYMSCFQGLFFCPEAASLLLHNFCIYHITPQGHELGAAPISSDVPVPSVDELVDQVADVLDFFGLGSVMCLGVTAGAYILTLFATKYRDRVIGLMLVSPLCKAPSWSEWLYNKVLLNLLYYYGSRGLVKECLLQRYFSTEVRGNGQDPESEIVQACRSLLHERQGSNVWRFLQAINERHDLTEALKKLQCRTLIFVGENSQFHDDAVHMTTKLDRRYCALVEVQACGSLVTEEQPHAMLIPMEYFLMGYGLYRPSQLDSSPRSTLNPFCISPELLSPESMGVKLKPIKTRISLKV

SEQ ID NO: 5683 - protein, 276 aa, Oryza sativa Japonica Group
MTGSSCPADSSQLLYPRRGAPTTTTTSRPPLHPLIAHAPYDVVLHRSVVLSISSARDQAELASFWCYIRLGGGASAKRAAGEDDRSRSSLTAARGGGGETMSGRGRGDPLVLGRVVGDVVDPFVRRVALRVAYGAREVANGCELRPSAVADQPRVAVGGPDMRTFYTLVMVDPDAPSPSDPNLREYLHWLVTDIPATTGVSFGTEVVCYESPRPVLGIHRLVFLLFEQLGRQTVYAPGWRQNFSTRDFAELYNLGLPVAAVYFNCQRESGTGGRRM

SEQ ID NO: 5684 - protein, 991 aa, Oryza sativa Japonica Group
MLASRIPLKRCTAAAVVPLPGELEMEEGPTPPAGGGEGSGAAVVPAKRRRERVVPSRFRDSVVSLPLPPAKKGRPAKKAAAREGGDGEVYDVEVRAVEQQGATAAAFGAVETAVWPGDERPAQTEEELYRACRNIRRSSSSSGFSGSVVTSLSNAGGSVAPEGKPVVVVECKPKREGGDKKEDFYWPEDFVLGDVVWARSGKKCPAWPAVVIDPLLHAPAVVLNSCIPGALCVMFFGFSSGGHGRDYGWIKQGMIFPFVDYLDRFQGQALYKLKANRFRQAIEEAFLAERGFCELEMDEGCSLEKSVNDQSVPDGLQEGSGSNNDQECQSEAQVVGKSTGCCDSCGNRVPPKIAKKKKQAGEQLLCRHCDKLLQSKQYCGICKKIWHHTDGGNWVCCDECQIWVHVECDLTCINMEDLENADYFCPDCKSKRKTVPPVEQMNTPNSSECASTSKEKLPEMIPVFCFGMDGMYLPKKHMILCQCNSCKERLMSLSEWERHTGSRKKNWKMSVKLKSNGDPLVTLLDDIPCANVKSSTPSINKEELLKLLANSFRPVNARWTTERCAVCRWVEDWDYNKIIICNRCQIAVHQECYGARDVQDFTNWVCRACELPKQKRECCLCPVKGGALKPTDIDQLWVHVTCAWFQPKVSFPVDETMEPAMGILSIPSEYFKKACVICKQMHGACTQCYKCSTYYHAMCASRAGYRMELQYSEKNGRNITRMVSYCAFHSTPDPDNVLIVKTPEGVFSTKFLPQNNEKQSGTRLVRKENLQEKVLPAKISDCPAARCLPYEMLKNKKEPGEAIAHRIMGPRHHSQESIEGLNACMDQKDEKSFATFRERLRYLQKIENKRVSCGRSGIHGWGLFAAKKIQEGQMVIEYRGDQVRRSVADLREARYHREKKDCYLFKISEDVVVDATEKGNIARLINHSCMPNCYARIMSVGDEKSQIILIAKRDVSAGEELTYDYLFDPDESEDCRVPCLCKALNCRGYMN

SEQ ID NO: 5685 - protein, 335 aa, Oryza sativa Japonica Group
MGCLLMLCLVSPLLLATSVHGNPWYGYGYGLFPQFYDHSCPKAKEIVQSIVAQAVARETRMAASLVRLHFHDCFVKGCDASVLLDNSTTIISEKGSNPNMNSLRGFEVVDEIKAALEAACPGTVSCADILALAARDSTVLVGGPYWDVPLGRRDSLGASIQGSNNDIPAPNNTLPTIITKFKRQGLNIVDVVALSGGHTIGMSRCTSFRQRLYNQSGNGMADYTLDVSYAAQLRQGCPRSGGDNNLFPLDFVSPAKFDNFYFKNILSGKGLLSSDQVLLTKSAETAALVKAYADDVNLFFKHFAQSMVNMGNISPLTGSQGEIRKNCRRLNNYYH

SEQ ID NO: 5686 - protein, 731 aa, Oryza sativa Japonica Group
GPPTPQPLIPHADQQRRPARPPLHLRLRLRLRFLFSSSLPPSSERKRELTSRCPAGRGGEHGFAFGWSSRLCTRSTAANSSFLDFFTLSPRTAQMSDGNDFAELLWENGQAVVHGRKKHPQPAFPPFGFFGGTGGGGGGSSSRAQERQPGGIDAFAKVGGGFGALGMAPAVHDFASGFGATTQDNGDDDTVPWIHYPIIDDEDAAAPAALAAADYGSDFFSELQAAAAAAAAAAPPTDLASLPASNHNGATNNRNAPVATTTTREPSKESHGGLSVPTTRAEPQPQPQLAAAKLPRSSGSGGGEGVMNFSLFSRPAVLARATLESAQRTQGTDNKASNVTASNRVESTVVQTASGPRSAPAFADQRAAAWPPQPKEMPFASTAAAPMAPAVNLHHEMGRDRAGRTMPVHKTEARKAPEATVATSSVCSGNGAGSDELWRQQKRKCQAQAECSASQDDDLDDEPGVLRKSGTRSTKRSRTAEVHNLSERRRRDRINEKMRALQELIPNCNKIDKASMLDEAIEYLKTLQLQVQMMSMGTGLCIPPMLLPTAMQHLQIPPMAHFPHLGMGLGYGMGVFDMSNTGALQMPPMPGAHFPCPMIPGASPQGLGIPGTSTMPMFGVPGQTIPSSASSVPPFASLAGLPVRPSGVPQVSGAMANMVQDQQQGIANQQQQCLNKEAIQGANPGDSQMQIIMQGDNENFRIPSSAQTKSSQFSDGTGKGTNARERDGAET

SEQ ID NO: 5687 - protein, 594 aa, Oryza sativa Japonica Group
MASSASLQRFLPPYPHAAASRCRPPGVRARPVQSSTVSAPSSSTPAADEAVSAERLEPRVEQREGRYWVLKEKYRTGLNPQEKVKLGKEPMSLFMEGGIKELAKMPMEEIEADKLSKEDIDVRLKWLGLFHRRKHQYGRFMMRLKLPNGVTTSEQTRYLASVIEAYGKEGCADVTTRRQIRGVTLPDVPAILDGLNAVGLTSLQSGMDNVRNPVGNPLAGIDPDEIVDTRSYTNLLSSYITSNFQGNPTITNLPRKWNVCVIGSHDLYEHPHINDLAYMPAVKGGKFGFNLLVGGFISPKRWEEALPLDAWVPGDDIIPVCKAVLEAYRDLGTRGNRQKTRMMWLIDELGMEAFRSEVEKRMPNGVLERAAPEDLIDKKWQRRDYLGVHPQKQEGMSYVGLHVPVGRVQAADMFELARLADEYGSGELRLTVEQNIVIPNVKNEKVEALLSEPLLQKFSPQPSLLLKGLVACTGNQFCGQAIIETKQRALLVTSQVEKLVSVPRAVRMHWTGCPNSCGQVQVADIGFMGCLTKDSAGKIVEAADIFVGGRVGSDSHLAGAYKKSVPCDELAPIVADILVERFGAVRREREEDEE

SEQ ID NO: 5688 - protein, 229 aa, Oryza sativa Japonica Group
MMGATSPSGLELTMAVPGLSSSGSEGAGCNNNNAGGGCNMRDLDINQPASGGEEEEFPMGSVEEDEEERGVGGPHRPKKLRLSKEQSRLLEESFRLNHTLTPKQKEALAIKLKLRPRQVEVWFQNRRARTKLKQTEMECEYLKRCFGSLTEENRRLQREVEELRAMRVAPPTVLSPHTRQPLPASALTMCPRCERITAATGPPAVRPPPSSAAAAAPSPFHPRRPSAAF

SEQ ID NO: 5689 - protein, 809 aa, Oryza sativa Japonica Group
MEGSRVDAVAGGRRWGEGEEGGRRGGGGGGGGGGGGTGGGGGGGGRRGGEDGGEVSLREWLDRPGRAVEAPECLHVFRQVAESVAIAHAQGVAVGSARPSCFVVSPPFARVAFIESASGSDVSGSCSGSDGSEEADPEPSPPRRRRDGASGGEDRGGKTFPLRSVLAMELTWYTSPEEADDRGGATFASDVYRLGVLLFELFCTFETMEEKMRAMANLRHRVLPPQLLLKWPKEASFCQLLMHPVPETRPKMSDVLQSEFLNRSRNSLEEREAALRLREEIEEQELLLDFLLQLQRRKQDIADNLQDTVAFLSSDINEAHQQSALGQCGNFSFELDKEVCSETVEDQSDCGSRKRFRPELPAVDMEEQNRSLEECSGTVPSSVLIQESVLSKSSRLMKNFKKLETAYFLTRSKLAKQVGNPVSSCHQVVKRTTGSPVVTEGSSIDDFALEGHYGTRQRGWMNSFLEGLCSYLSFSKLKVKAELKQCDLLNSSNLVCSVGFDRDKEFFATAGVNKKIKVFEYNMIVNEHCDIHYPVVEMSNRSKLSCICWNSYMKSHIASSDFEGIVQVWDVTRSQVFVEMREHERRVWSVDFSLADPTKLVSGSDDGSVKLWNMNQAILFLHLAGSVGTIRTRANVCSVQFQPDSARSIAIGSADHKIYCYDLRNIRAPYCTLVGHTKTVSYVKYVDASTIVSASTDNSLKLWDLSMSQARIIDSPLRTFTGHTNTKNFVGLSISDGYIATGSETNEVFVYHKAFPMPVLAYKFSVTDPISGQEIDDPSQFISCVCWRGQSSTLLSANSSGNIKILEMD

SEQ ID NO: 5690 - protein, 316 aa, Oryza sativa Japonica Group
MSSSATGVNVSDRPISPDTTRVAWVGTGVMGQSMAGHLLAAGYALTVYNRTASKAEGLVSRGATLAESPRAAAAAADVIFLMVGFPSDVRSTSLDPSTGALAGLAPGGLLVDMTTSDPTLAAEIAEAAAAKSCAAVDAPVSGGDRGARSATLSIFAGGDAAVVARLAPLFKLMGNALYMGGPGAGQRAKLGNQIAIASTMVGLVEGMVYAHKAGLDVAKWLEAISTGAAGSKSLDLYGKRMLERDMAAGFYVRHFVKDLGICLSECQAMGLALPGLALAHQLYVSLLAHGEGGLGTQALILAIERLNNTCLDKKPE

SEQ ID NO: 5691 - protein, 194 aa, Oryza sativa Japonica Group
MVMEDGEMSLSNLVLGFFEEAEREQRWPENGDDDDEGSSGSGAAESKAFWQNQHSQLHVSEHSYVDVVVQTRSGKAVRVVVELNFRAEFEVARASAEYRALVTALPEVFVGRADRLRAVVKAMCAAAKQCMKENNMHMGPWRKHKYMQSKWLGTPERVAAAAAAPVAVWSPEKQTKFRASMLSFDFARAAVEVA

SEQ ID NO: 5692 - protein, 305 aa, Oryza sativa Japonica Group
LPASAPRLAARRPASAPRAGAWSTLSPEYSAWIWVNSGSFRQGDLCCARSRSSLAVDRPVQIRVVYTVRGCSSIYGSDLGLMENRVGESSATAVDGGGGAKDSGSFECNICLELAQDPVVTLCGHLFCWPCLYEWLHVHAHSRECPVCKAGLEEEKLVPLYGRGKASTDPRSRSVAGVQIPSRPAGQRPATASQPDHHHDHLPHHDPWFMGGAGAPVAGGRWGNYTFSAAIGGLFPLLSFQVHGFPQAAAYGPAAGFPYGYGHSFHGWHGHGFPHQAPQGQHVDVFLKVLLVLVGVLVIASLIVF

SEQ ID NO: 5693 - protein, 793 aa, Oryza sativa Japonica Group
CATPREYCGGMDVMNEGKETSDNFCVDKLEKEDEVGSCPTRYCNDTSHSLGSASRKEVMPIIAEKQAFCATTVHDERSWAANAWRARLVKAISQKDSVLPKNADNIHSTSAFGSIGNTENMPGKLTSMLGNRNDSSQDQAMQEKHKDGLIVARCESVSAVNPVARCELASGVNPLARHESTSGCNPRKLEKGKEKLIYDMSNCVSNTNEGDDSNESIESCPSTKAPKRKHGQFSAAEMTSGNKRCRREDNESSCSGLFHKNDSSFFNWMSTLTNGVKVFDETTAVPLNQKFSAATGEEFPTNPVPLQNNCGVPLQSVGFNSLFQSLYSQNVMITSRNTCHQSESSYTANRLTLGFKSSKPVSMGRETLNVATETLAAGRIQMDSYGDRGAFQNQMGIFPLRAERNQNGFHGSSSNAASGHKDDFSESLWVSRLLPKTPMKVMDTTRCDEETDFCSANPKGLGDSSSPQDFNVEKELNNSQYFTSKGSDNETTSSKCAAPQDENKPSETMASIFAKRLDALRHANTSAVHVAITCDHGTPKGRNHKTSSFVVSYNSHDEQESGQKTHKSSGGEGRIVLWTGDKGKEQLSPGNDKELGEKVLSKHENQNCEGSSDGKVVPPKCNLETNTYIEEIDRKRLQNKEGAPNSMENQPDNKQMVPYGIVPNDVYDEASVVFGALQRLRLSRSDIIRWMRSPVMHTTLDGFFLRLRFGKWEEALGGTGYHVARINGVLDKNRLSVTIRNSTCQVDSRFVSNHDFHQDELKAWWSAAMKSGWKLPSQEELNTKLRERELLRF

SEQ ID NO: 5694 - protein, 323 aa, Oryza sativa Japonica Group
SMNMDEFVANIWNAEEFQATTGGCKGAMEEAKVVDSGSGSGDAGGSGLCRQGSFSLPLPLCQKTVEEVWTEINQAPAHTSAPASALQPHAGSGGVAANDRQVTLGEMTLEDFLVKAGVVRGSFTGQAAMGSGMVNGPVNPMQQGQGGPMMFPVGPVNAMYPVMGDGMGYPGGYNGMAIVPPPPPAQGAMVVVSPGSSDGMSAMTHADMMNCIGNGMMIENGTRKRPHREDGCAEKTVERRQRRMIKNRESAARSRARKQAYTVELEAELNYLKQENARLKEAEKTVLLTKKQMLVEKMMEQSKEKMNANRGGSQLRRSGSCMW

SEQ ID NO: 5695 - protein, 458 aa, Oryza sativa Japonica Group
MAASTSATSFSTPTKPASSSSSSSSPNSVCFARASGRCRMASVVVRAEAVDATISPTVSALRPSKTMAITDQATALRQAGVPVIGLAAGEPDFDTPHVIAEAGMNAIKDGYTRYTPNAGTLELRKAICNKLQEENGISYSPDQVLVSNGAKQCITQAVLAVCSPGDEVLIPAPYWVSYPEMATLAGATPVILPTSISENFLLRPELLASKINEKSRLLILCSPSNPTGSVYPKELLEEIADIVKKYPRLLVLSDEIYEHIIYQPAKHTSFASLPGMWDRTLTVNGFSKAFAMTGWRLGYLAAPKHFVAACGKIQSQFTSGASSISQKAGLAALNLGYAGGEAVSTMVKAFQERRDYLVKSFKELPGVKISEPQGAFYLFIDFSSYYGSEVEGFGTIKDSESLCMFLLEKAQVALVPGDAFGDDKCIRMSYAAALSTLQTAMEKIKEAVALIKPRVAAK

SEQ ID NO: 5696 - protein, 465 aa, Oryza sativa Japonica Group
MNKNAAPEDVESGEHERTGTVWTATAHIVTAVIGSGVLALAWSVAQLGWVAGPLALAGFACVTYYTSTLLANAYRAPHPVTGTRNRTYMDAVRSYLSPREVFMCGIAQYVNLWGTMVGYTITATISMVAIRRSDCIHRNGAGAAARCDNTSATVLMLAFSIVQVVLSQFPGLEHITWLSVVAAVMSFAYSFIGLGLSVAEWVSHGGHLSGRIQGATAASSSKKLWNVLLALGNIAFAYTFAEVLIEIQDTLKPSPPENKTMKKAAMYGIGATTIFYISVGCAGYAAFGSDAPGNILTASGMGPFWLVDIANMCLILHLIGAYQVYAQPIFATMERWISSRWPEAKFINSEYTVNVPLIQRGSVTVAPYKLVLRTVVVIATTVVAMMIPFFNAVLGLLGAFSFWPLTVYFPISMHIAQEKITRGGRWYLLQGLSMVCLMISVAVGIGSVTDIVDSLKVATPFKTVS

SEQ ID NO: 5697 - protein, 488 aa, Oryza sativa Japonica Group
MGENVVGTYYYPPSAAAMDGVELGHAAAGSKLFDDDGRPRRNGTMWTASAHIITAVIGSGVLSLGWAIAQLGWVAGPAVMVLFSLVTYYTSSLLSDCYRSGDPVTGKRNYTYMDAVNANLSGFKVKICGFLQYANIVGVAIGYTIAASISMLAIGRANCFHRKGHGDPCNVSSVPYMIVFGVAEVFFSQIPDFDQISWLSMLAAVMSFTYSVIGLSLGIVQVVANGGLKGSLTGISIGVVTPMDKVWRSLQAFGDIAFAYSYSLILIEIQDTIRAPPPSESAVMKRATVVSVAVTTVFYMLCGSMGYAAFGDDAPGNLLTGFGFYEPFWLLDIANAAIVVHLVGAYQVFCQPLFAFVEKWAAQRWPESPYITGEVELRLSPSSRRCRVNLFRSTWRTAFVVATTVVSMLLPFFNDVVGFLGALGFWPLTVYFPVEMYVVQKKVPRWSTRWVCLQMLSVGCLVISIAAAAGSIAGVMSDLKVYRPFKGY

SEQ ID NO: 5698 - protein, 570 aa, Oryza sativa Japonica Group
MAIALRLAAAPLRLRLVSPAPPAIGGAGDGGRRGGGGAARIGVLGRARCRRRRGGGGRLEVAAAAADDSARCRAKGVGAAAAAAETLGGIGVGGGDQLSVVMKFGGSSVSSAARMREVAGLILAFPEERPVVVLSAMGKTTNLLLLAGEKAVGCGVIRVSEIEEWNLIKDLHIKTVEELALPRSVIHTMLDELEQLLKGIAMMKELTLRTTDYLVSFGECMSTRIFAAYLNKIGVKARQYDAFDIGFITTDDFGNADILEATYPAVAKRLHGDWIRDPAIPIVTGFLGKGWKSGAVTTLGRGGSDLTATTIGKALGLREIQVWKDVDGVLTCDPNIYPNATTVPYLTFEEAAELAYFGAQVLHPQSMRPAREGDIPVRVKNSYNPKAPGTLITKQREMDKVVLTSIVLKSNVTMLDIVSTRMLGQFGFLAKVFSIFEDLGISVDCVATSEVSISVSLDPSKIWSRELIQQELDHVVEELEKIAVVHLLQQRAIISLIGNVRRSSLILEKAFQVLRKSGVNVQMISQGASKVNMSLIVHDSEAKQCIKALHQAFFEDDVLTEVEEEALHMS

SEQ ID NO: 5699 - protein, 518 aa, Oryza sativa Japonica Group
MLPRSRTLPPRIHDGVVVVERDVRRYQQLPQQVEMEMTTTKRQQDHQVETMTTKKIDEEDEEVDDDGRAKRRGTVWTAASHIITAVIGSGVLSLAWAIAQLGWVVGPTVMLLFAAVIYFTSNLLADCYRTGDPATGRRNYTYMDAVKANLGGAKVKVCGCIQYLNLLGVAIGYTIAASISMMAIQRSNCFHARGEQDPCHASSNVYMIMFGIVQVFFSQIPDFDQVWWLSILAAVMSFTYSAVGLALGAAQVAQNRTFAGSAMGVAVGFVTKTGDVVTPAQKVWRNLQALGDIAFAYSYSIILIEIQDTLRSPPAEARTMRKATGISVVVTSVFYLLCGCMGYAAFGDDAPGNLLTGFGFYKPYWLLDVANMAIVVHLVGAYQVYCQPLFAFVERRAERRWPNGLPGGDYDLGWIKVSVFRLAWRTCFVAVTTVVAMLLPFFNDVVGILGALGFWPLTVYFPVEMYIAHRRIRRWTTTWVGLQALSLACLLVSLAAAVGSIAGVLLDLKSYRPFRSTY

SEQ ID NO: 5700 - protein, 547 aa, Oryza sativa Japonica Group
MAAPPLLSLSQRLLFLSLSLPKPQLAPNPSSFSPTRAASTAPPPPEGAGPAAPSRGDRFLGTQLAAEAAARVLAPEDAERRRRRREKRKALARKPSAAACYGCGAPLQTADEAAPGYVHPATYDLKKRHHQLRTVLCGRCKLLSHGHMITAVGGHGGYPGGKQFVSADQLRDKLSYLRHEKALIIKLVDIVDFNGSFLARVRDFAGANPIILVITKVDLLPRDTDLNCIGDWVVEAVVKKKLNVLSVHLTSSKSLVGVTGVISEIQQEKKGRDVYILGSANVGKSAFISAMLRTMAYKDPVAAAAQKYKPIQSAVPGTTLGPIQIEAFLGGGKLYDTPGVHLHHRQAAVIHADDLPSLAPQSRLRARCFPANDTDVGLSGNSLFWGGLVRIDVVKALPRTRLTFYGPKKLKINMVPTTEADEFYEREVGVTLTPPAGKEKAEGWVGLQGVRELQIKYEESDRPACDIAISGLGWVAVEPLGVPSSNPDESAEEEDNESGELHLRVHVPKPVEIFVRPPLPVGKAASQWYRYQELTEEEEELRPKWHY

SEQ ID NO: 5701 - protein, 188 aa, Oryza sativa Japonica Group
MAMSPHDQHEHEPDHAHRSPSNGTAATSTIATNRWGPYSGAGDFASNMAVILAALLAALALALALNAAVRYLLRRHRRARQQPAAAAAAAEDPEKPPVQEADPPPPPPALVYSAAGTKLAGAAECAICLAEFVDGDTVRVMPVCGHGFHARCIERWLAGGRRSSCPTCRAPAATPPGATATEPAAVAP

SEQ ID NO: 5702 - protein, 241 aa, Oryza sativa Japonica Group
MAAAARHRGTVKWFNDTKGFGFISPDDGSEDLFVHQSSIKADGFRSLAEGEQVEFAISESEDGRTKAVDVTGPDGSFVKGGAGGGGGGGGGFGSRGGGGSGGGGRSYGGSWGGGRRSGGGGPGGGCFKCGESGHMARDCFNGGGVGVGGGGGGGGGAGGGCFKCGEMGHMARDCFNSGGGGGGGGGGGGGGACYNCGETGHLARDCYNGGGGGGGGRFGGGGDRSCYNCGEAGHIARDCHK

SEQ ID NO: 5703 - protein, 599 aa, Oryza sativa Japonica Group
MQGSVVTARRAVHGILVAVVVVQRLLAAGASPPADPVHCASGTARCTVTNAYAAFPDRSTCRAAAAAYPASEEELLRVVAAAAASGTKMKAATRYGHSVPKLSCPGAGDGRGLAISTSALNRVVAVDAAGMAITVESGVTLAELIDAAAGAGLALPHSPYWLGVTVGGLLSTGAHGSSVWGNGSAVHEYVNGMRIVTPAPAREGYAKVRVLAAGDPELDAAKVSLGVLGVISQVTLKLQPMFKRSVAFQHCGDGDLAERVVAFAGEHEFADILWYPGHGKAVYRIDDRVPSNTPGDGVYDFVGFRATPTLAIQAKRLVEDGLEATGNAAGKCLAASTTNSILAARNYGLTRNGQLLGAFPGTAVVGYQNRIQSSGSCLAGADDGLLTACPWDPRVEHGTFFFQSGISVPLSRAAAFIRDVQRLRDLNPDALCGVELYDGVLMRYVRASAAHLGKPEDSVDFDLTYYRSRDPATPLLHEDVVEEVEQMALRKYGGVPHWGKNQNAAFEGAAAKYGGARAAAFMRVKRAYDPEGLFSSEWSDKVLGVAGAGGVSVVRDGCALEGLCVCSEDAHCSPEKGYLCRPGRVYKEARVCRRVADDL

SEQ ID NO: 5704 - protein, 187 aa, Oryza sativa Japonica Group
MAAACSSAAFLAYPGSLGAGPRPLRLFRAFAAASSSGSGSKKKARKSKGAGNKGEASGGGGGKGKEKALEPPPAVIRRAPAGSASVFQQPEPGFTPGGGGGGKGPTEEERRQRQANENAFLLAWLGLGLIILAEGLALAASGFLPEEWDSFFVKFLYPSFTPTVILFLGGTVGYGVFKYFEGEKSNS

SEQ ID NO: 5705 - protein, 873 aa, Oryza sativa Japonica Group
MNICAAILLFYILQFVHGQPDSQGSTQWKATADSQCSHVSFRGFISIDCGIPEKSSYQDPTSSIIYVSDYGFISTGANHNISSAYIKPSLAQRNYNVRFFPDGTRNCYTLRSLQEGNKYFVRAVFYYANYDSLNKLPVFDLYLGANYWHEVKFSNADAVNWMDIIVVAPADYLQVCLVNKGTGTPFISGLDLRPLKSTLYPEANTTQSLVLINSNRFNMGPTDNSITRYPLDPHDRLWSTYDTIPDWTEISATSVVQNYLTDVYDVPSAVMQSAATVNSSRINFTWDPSDPSVNISSKYFFVLYFSELQSVPSNGLRQFDIIVNNNTWNTQPYTPPFLFADSLSGTVQGLASYSVSLVATKNATLPPILNAMEMYLVKPLTEFATDPRDARAMMEVQQNYDVKKNWMGDPCAPKAFAWEGLNCSYPPADSSKITSLDLSHNNLSGPIPNFLGQLPLLMFLDLSSNDLSGPIPYNLLQKSQNGSLSLRVGYNAKLCGNDTECGSGQKKIKGSLLSAIIITIVATVALIVVLFLLLRRMLKAKDKRRAAGPTYESALLENREFSYRELKHITNNFSQQVGKGGFGAVFLGYLENGNPVAVKVRSESSSQGGKEFLAEAQHLTRIHHKNLVSLIGYCKDKNHLALVYEYMPEGNLQDHLRGLEYLHVACKPALIHRDVKSRNILLTTNLGAKIADFGLTKVFSESRTHMTTEPAGTFGYLDPEYYRNYHISEKSDVYSFGVVLLELITGRPPVIPIDESVSIHIGEFVHQSLDHGSIESIVDARMGGGGGYDINSVWKVADLALHCKREVSRERPTMTEVVAQLKESLELESHGDRKHLVTGDDDVSVSNLGEETALEVEEQSGEISRVSPGPAVR

SEQ ID NO: 5706 - protein, 203 aa, Oryza sativa Japonica Group
MAGVGVGEGEVRYRGVRRRPSGRYAAEIRDPAKKTPIWLGTFDSAEAAARAYDAAARSLRGAAARTNFPPSTSSSAPPPPPPQHQPPQHLPPAAAAATSSHSSTVESWGVTVAAAAASAGALGLPPPRNGGSNPAADEDCRSYCGSSSSVLCEDGASGAGDEAAAPRCSPLPFDLNLPASSPSAAAAAEADEMDWRCDTLLHL

SEQ ID NO: 5707 - protein, 344 aa, Oryza sativa Japonica Group
MGSLPVSSPECAPGRRVTVAASDLAPLFGAQRRHLDHFFDRLDLSQAAAFAQALVDAPGAVFFTGVGKSGIVARKLAQTLASLGFTRAGFLSPVDALHGDIGSVFPGDLLVLLSKSGASDELLALAPCARAKGAHLISLTSAASGADCPLAAVCDLNVHLPLQAEVCPFGLAPVTSTAIQMVFGDTVVAAIMEARRLSRDQYASNHPAGKIGKSLIFKVKDVMKKQNELPLCKEGDMIMDQLTELTSKGCGCLLVVDDEYHLIGTFTDGDLRRTLKASGQAIFNLTVGEMCNRHPRTITADAMAVQAMEKMESPPSPVQFLPVVDSNNVVCGIITLHGLVSAGL

SEQ ID NO: 5708 - protein, 433 aa, Oryza sativa Japonica Group
MDGGMKEQGILLVRKAVEEDDAGNHARALPLYVHALDYLAAHLKYERNPRVRDAITAKLAGYIARAEEIRDALLPAAGDDATPPAAAAEEGKAKCGGGEDESDRAKLRAGLHSAIVSEKPNVRWSDVSGLDGAKQALQEAVVLPVEFPQFFTGKRKPWKAFLLYGPPGTGKSYLAKAVATEADSTFFSISSSDLLSKWMGESEKLVTNLFQMARENAPSIIFIDEIDSLCGQRGEGNESEASRRVKTEFLVQMQGVGHNDDKVLVLAATNTPYALDQAVRRRFDKRIYIPLPDLKARQHMFKVHLGDTPHSLTKGDFESLARRTDGFSGSDIAVCVKDVLFEPVRKTQDAMFFFGTAEGDGDGGAWTPCGPTRPGAVQITMQELAAKGLAAQITPPPITRTDLDKVLARQKATVSEKDLEVYTRFTREFGEEG

SEQ ID NO: 5709 - protein, 222 aa, Oryza sativa Japonica Group
MEVGNGKCGGGGAGCELCGGVAAVHCAADSAFLCLVCDDKVHGANFLASRHRRRRLGVEVVDEEDDARSTASSSCVSTADSASSTAAAAAAVESEDVRRRGRRGRRAPRAEAVLEGWAKRMGLSSGAARRRAAAAGAALRAVGRGVAASRVPIRVAMAAALWSEVASSSSRRRRRPGAGQAALLRRLEASAHVPARLLLTVASWMARASTPPAAEEGWAECS

SEQ ID NO: 5710 - protein, 795 aa, Oryza sativa Japonica Group
MRMAAGGRCCFRRGAPAAVLVLPLLLLIAAAALPRRALAATVAADVAAINGLYVALGSPALPKWTANGGDPCGDGWQGVVCIGSNIDSIIFNAANLEGQLGSLGNFTSITTINLSNNNIGGTIPEDLPVTLQHFFMSDNQLTGSIPTSLSMLQSLTDMSLNDNHLDGKLPDAFGSLTGLVNFDISSNNFSGSLPPSLGSLSSLTTLHMQDNQLSGTLDVLQDLPLKDLNIENNLFSGPVPPKLLNVPNFKKDGNPFNTSIAPSASPSSTPTGSTPTQTPSSPSSSGTPSPSSSPSNSSGGSTARDSSSPSSRKHKSSTLRIVGYVLLAIVLFIVTVLLVIFCLSKYQERQSRRDYTTSQVGRVHQRVEEPKVKQASVQSRNDAKKGSTEVPERRQVREINLAVPAALEKPPEKRKEHVINLQRSETEIFASTPPPPPPPPPPPPPPPPTPPPPPPRPPPPPPPPPPVEKVIVNPIVKPEKRVSTPPRTGPSTSATSFSVASLQQYTNSFEEGNLIRESRLGKVYLAELPEGRFLEVMKIDNANDRIPVDEFLELVASVSDIRHPNILELVGYCAEYGQRLLVYNHFSRKTLHDVLHEGEELDGALSWNARLQVALGAAKALDYLHESCEPPVVHQNFEPANVLLGNGFSVRVAECGLAELTLSGSVTQLSGRMRALLNYEAPEIHEAGTFTYRSDVYSFGVVMLELLTGRKPYDSSRPRAEQHLVRWADSQFHDIESISKMVDPSIQGECSEKVLSRFADIISRCIRPEPEFRPSMSEIVQDLARIISVTSEESE

SEQ ID NO: 5711 - protein, 199 aa, Oryza sativa Japonica Group
MRRGGAAEEDAEAARFRGVRKRPWGRYAAEIRDPAKKARVWLGTYDSAEDAARAYDAAARALRGAKAKTNFPLSLPHAQPQLHHHHHHHLTYPAAAVVAARPATSSLSSTVESFGTRPRPVLPPRPPPPPPIPDGDCRSDCGSSASVVDDDCADAAASPSCRLPFQFDLNLPPGGGGGGGGGFGCAYDDEELRLTALRL

SEQ ID NO: 5712 - protein, 360 aa, Oryza sativa Japonica Group
MATTRASLTDPLLPSPAARAPVKAKKLSWSMLHASSKDERRGQSGEAEAEASGGVHANPSSPARMQEQATSSRPSSSERSSSSGGHHMEIKEGKEAPLRSLLLPFLDFHFTVPLSGMESDEEIGRVPELGLEPGGASTSGRAAGGGGGGAERAQSSTAQASARRRGRSPADKEHKRLKRLLRNRVSAQQARERKKAYLNDLEVKVKDLEKKNSELEERFSTLQNENQMLRQILKNTTVSRRGPVLLKIPKSGLREAAPAGCGGLREAEGDEKFVLNGFTAANLSFDGMATVTPNGLLMLTNGTNQLKGHAFFPALLQFHRTPNSMAMQSFSTAFVIGIISAFEDQGSGSPAAAGGSGRAA

SEQ ID NO: 5713 - protein, 175 aa, Oryza sativa Japonica Group
MELSVVGGEPLLAVAMQQLLDLDLPDELERQLNPPTRAYVRDRRAMANTPMDVKELRASGALVLAVDMPGVAPADVRVEVEDGNVLAISGERRRPAGDGDDGGEGVKYLRMERRMGKFMRRFPLPESADLDGVRAEYKDGVLTVTVDKKPPPEPKKPRVVEVKVAGAGEPKGKGK

SEQ ID NO: 5714 - protein, 348 aa, Oryza sativa Japonica Group
MGDSGGSVVSIDVERISFGGKEHHIHTNHGPVSVAVYGDHDKPALVTYPDIALNHMSCFQGLLFCPEAASLLLHNFCIYHISPPGHELGAAPISPNAPIPSVDDLADQVADVLDFFGLGSVMCLGVSAGAYILTLFAAKYRDRVLGLILVSPLCKPPTWTEWFYNKVASNLLYYYGMCGLVKEGLLQRYFSKEVRGCSDLPESDIVQACRSLLDQRQSMNVWRFVQTMNMRYDLTEDLKQLQCRTLIFVGEYSQFHTEAVHMTSKLDRRYCALVEVQACGSLITEEQPHAMLIPMEYFFMGYGLYRPSQLDCSPRSPLSPFCISPDLLSPESMGVKLKPIKTRVRLEV

SEQ ID NO: 5715 - protein, 539 aa, Oryza sativa Japonica Group
MSGNPSFSQLGAVDAAMNGGYFMAASGNGADVPLFHPAMAPPHDHGGSFGYGDAAAAAMDVGAHFAAANNLVLASLATQLFGAAPAAAAHGHGDYLGATTPPEEEMGGGYDVAVGDSSGGAVSLACLGHGQPGDMAAGWCSTSARKPSCNWSSSNAGVHGGSYYLAGVPEAAGFVSAAAAASELSLSLCSKSSSDSMLNAGGDQCSSAASRSGLTQMSRVVVVEPEPPLVPYYPAANFAVVVARSRYAAVAQQVLNDAVGCVLGGVADAAADSASGVDSGSSRPSSCSVAGGAPSSAVSSNNQLIASSGEHTHGGGDASAQRLRSELLTMLQLMDQKYNQCLDEIQSTTARFNTLTHATARAAGMSSSSICAPFAHRAVSAMYHGLRRRIAGEIMSAAAAAGRPCRGGESSSAVTGGERERSWESAFIQKHWAVQQLRRGEQQCWRPQRGLPEKSVAVLKAWMFENFLRPYPKDSEKEMLAARSGLSRNQVSNWFINARVRLWKPMIEEMCEELKRSSGGGAGNQALAMEHMNSQDVVS

SEQ ID NO: 5716 - protein, 355 aa, Oryza sativa Japonica Group
MAAMSASGRRVFLLGALLLVAVSCHGGFGGVGVAEGLSTRYYAKTCPAVESVVRSVMARAVAADRRMGASVLRLFFHDCFVNGCDGSVLLDDAPPGFTGEKGAGANAGSARGFEVVDAAKARVEAACRATVSCADVLALAARDAVALLGGTTWPVRLGRKDARTASQAAANGNLPGPVSSLTSLLATFAAKGLSARDMTALSGAHTVGRARCATFRGRVNGGDANVNATFAAQLRRLCPAGTGGDGNLAPLDAETPDVFDNGYFRELTKQRGLLHSDQELFAAGGGGRSSSQDALVRKYAGNGAKFARDFAKAMVKMGNLAPAAGTPVEPSSEQVQSPKSHLFSQFPKVNNHATR

SEQ ID NO: 5717 - protein, 335 aa, Oryza sativa Japonica Group
LIKICEITMASRSSWHCCLLAFFLLSSAAGAAYGQQLSTTFYAASCPTLQVVVRATVLGALLAERRMGASLVRLFFHDCFVQGCDASILLDDVPATSFVGEKTAFPNVNSVRGYDVIDQIKRNVELLCPGVVSCADIVALAARDSTALLGGPSWAVPLGRRDSTTASLSAANSDLPAPSSDLATLIAGFGNKGLSPRDMTALSGAHTIGFSQCANFRDRVYNDTNIDPAFAALRRRGCPAAPGSGDSSLAPLDAQTQNVFDNAYYRNLLAQRGLLHSDQELFNGGSQDALVQQYSSNPALFAADFAAAMIKMGNIKPLTGAAGQIRRSCRAVNSS

SEQ ID NO: 5718 - protein, 321 aa, Oryza sativa Japonica Group
MASRTWHCWLLLVFFLLSDDASGQLSTSYYADSCPSVEKVVHATVASAIQAERRMGASLIRLFFHDCFVQGCDASILLDDVPATGFVGEKTAAPNNNSVRGYEVIDQIKANVEDVCPGVVSCADIVALAARDSTALLGGPSWAVPLGRCDSTTASRSEANSDLPGPGSNLTMLIARFGNKGLSPRDMTALSGSHTVGFSQCTNFRAHIYNDANIDPSFAALRRRACPAAAPNGDTNLAPLDVQTQNAFDNAYYGNLLVRRGLLHSDQVLFNGGSQDALVRQYAANPALFAADFAKAMVKMGNIGQPSDGEVRCDCRVVNDS

SEQ ID NO: 5719 - protein, 334 aa, Oryza sativa Japonica Group
MAAASSTTTRFCLLLALVLPMISSAAAGDDALPLPMTPSYYRKSCPTLEAIVRGTMLSAIKAERRMGASILRLFFHDCFVQGCDASILLDDVPSKGFVGEKTAGPNTNSIRGYEVIDKIKANVEAACPGVVSCADILALAAREGVNLLGGPSWEVPLGRRDSTTASKSEADSDLPGPSSSLADLVAAFGKKGLAPRDMTALSGAHTIGYAQCQFFRGHIYNDTNVDPLFAAERRRRCPAASGSGDSNLAPLDDMTALAFDNAYYRDLVGRRGLLHSDQELFNGGSQDERVKKYSTDPDLFAGDFVAAMIKMGKICPLTGAAGQIRKNCRVVNSS

SEQ ID NO: 5720 - protein, 442 aa, Oryza sativa Japonica Group
MEEAAAEVPSYFLCPISLEIMRDPVTLATGITYDRSSIERWMFGGGGGDGGKGTCPVTRRQLAPAEREATPNHTLRRLIQAWCAAHAVERFPTPRPPVDSCRVAALVDEGTTTMLGGGGRQRQLAALREIKAIAAESDRNKRCVEATPGAVEFLVSVVVQSHAAASTSASSDDDDLFDSVIDSPMSTSSPEEEALGVLYSLKPSEPTLRRVLGKDNGVGFLDTLASVLRRPSYRSRAYAILLLKAVTSAMPPERLMAVSPELVEEVVRVVSDGVSSKAVKAALHVLCRLCPWGRNRVKAVEAGAVAALVELLLDEEGGGGRRRAAELAVVAIDHLCGCAEGRSELVAHPAGLAVVSKRAMRVSPAATESAVRALHAVARNAATPAVLQEMLAVGVVAKLLLVLQADGGERARARAREMLRANARVWKDSPCLQAHLKASYPS

SEQ ID NO: 5721 - protein, 349 aa, Oryza sativa Japonica Group
MELELSLGDSPAPVKATIAPTPVLIPTCMGDEEDLELVLGVRATRRDEQDDQTTCTQSSEEAMEGEEDETRPHGEAPVESLSFPLFVSSAETGSANSEMCTRGFDVNTRPADGGAEAGRPSSPSSMQEASTRQQVADQEAADDEDNGGGGARKKLRLSKEQSSFLEDSFKEHSTLTPKQKSDLANRLNLRPRQVEVWFQNRRARTKLKQTEVDCEHLKRCCERLTRENRRLQREVAELRGTLRTTTSSYPPLYGLHHLPAAAGTVFRVCPSCEHSKVVAAAASESFSPRVFAGGGAPAAITAAAAVPSPGAGSPPSSSAALFGARRPHFGPFAAAVIPPVLRRQPSATS

SEQ ID NO: 5722 - protein, 162 aa, Oryza sativa Japonica Group
MYSKPEDVGGGVTTAFAMQGKVPLAAWSTGLFNCFDDCGNCCVTCLCPCITFGQIAEIIDRGSSSCGTSGALYALVMLLTGCNCVYSCFYRAKMRSQYGLQEKPCADCPVHFFCEPCALSQEYRELKKRGFDMNLGWHANMERQGHKPAMTMPPHMFPGMTR

SEQ ID NO: 5723 - protein, 145 aa, Oryza sativa Japonica Group
MQDQAAPVPWSTDLFDCFDDSSNCFMTWLCPCITFGQIAEIVDRGSSSCGTSGSLYALVFLVTGCSCIYSCIYRSKLRSQYGLQETPCPDCLVHLWCEPCALCQEYRELKKRGFDMSLGWHANMEKQGQNPAATMAPEMYPGMTR

SEQ ID NO: 5724 - protein, 447 aa, Oryza sativa Japonica Group
MVSMPPSLPPLPLPPQLSLADLKALSVLGRGARGVVFHVVPAGGAAAAVSATADEDPMALKAISRAAARHKCAEVAGGPGGDGHRRIWFERDVLLALRHPLLPSLRGVVATDSVVGFAIDRCAGGDLNALRRRQAGRVFSVAAIRFYAAELVLALEHLHGLGVVYRDLKPENVLIQDSGHIMLVDFDLSTTLPPPPPPPPPDTAPPPQTARSRGGRRDSTKAAAAVFGCFSSRRAAASRPSPSSSSSSRSPPSTSRTASSSSSSTRCSSAAAKSNSFVGTEDYVAPEIVAGSGHDHAVDWWGLGVVLYEMLYGRTPFRGRSRRETFHRVLAARPDMPGEPTPLRDLIGLLLEKDPGRRLGAHGVKRHAFFRGVDWDRVLHVARPPFIPTPDDDDAGAAAEALDVEKVLHEAFAASTAAAAGETAAVETAAPEAGSDRGRDEDFSVFF

SEQ ID NO: 5725 - protein, 200 aa, Oryza sativa Japonica Group
MARVYVGNLDPRVTAREIEDEFRVFGVLRSVWVARKPPGFAFIDFDDRRDAEDAIRDLDGKNGWRVELSTKAGSGRGRDRSGGSDMKCYECGEPGHFARECRLRIGSGGLGSGRRRSRSRSRSPRYRGRSRSRSPRYRRSPSYGRSPRDRSPKRRSYSRSPPPARARSYSRSPPPPRERSYSRSPAQPANREESPYANNA

SEQ ID NO: 5726 - protein, 133 aa, Oryza sativa Japonica Group
MGMAQSSSSSSRPSDSEQLEEPSKPVMALDKAKEIVASSPVVVFSKTYCPFCARVKRLLAELAASYKAVELDVESDGSELQSALADWTGQRTVPCVFIKGKHIGGCDDTMAMHKGGNLVPLLTEAGAIATPSL

SEQ ID NO: 5727 - protein, 498 aa, Oryza sativa Japonica Group
MATCLDSLGPLLGGAANSTDAANYICNRFTDTSSAVDATYLLFSAYLVFAMQLGFAMLCAGSVRAKNSMNIMLTNVLDAAAGALFYYLFGFAFAFGTPSKGFIGKQFFGLKHMPQTGYDYDFFLFQWAFAIAAAGITSGSIAERTRFSAYLIYSAFLTGFVYPVVSHWFWSTDGWASAGRLTGPLLFKSGVIDFAGSGVVHLVGGIAGLWGAFIEGPRIGRFDAAGRTVAMKGHSASLVVLGTFLLWFGWFGFNPGSFTTISKIYGESGTIDGQWSAVGRTAVTTSLAGSVAALTTLYGKRWLTGHWNVTDVCNGLLGGFAAITAGCSVVDPWASVICGFVSAWVLIGCNKLSLILKFDDPLEATQLHAGCGAWGIIFTALFARREYVELIYGVPGRPYGLFMGGGGRLLAAHIVQILVIVGWVSATMGTLFYVLHRFGLLRVSPATEMEGMDPTCHGGFGYVDEDEGERRVRAKSAAETARVEPRKSPEQAAAGQFV

SEQ ID NO: 5728 - protein, 496 aa, Oryza sativa Japonica Group
MATCADTLGPLLGTAAANATDYLCNQFADTTSAVDSTYLLFSAYLVFAMQLGFAMLCAGSVRAKNTMNIMLTNVLDAAAGALFYYLFGFAFAFGAPSNGFIGKHFFGLKQVPQVGFDYSFFLFQWAFAIAAAGITSGSIAERTQFVAYLIYSAFLTGFVYPVVSHWIWSADGWASASRTSGSLLFGSGVIDFAGSGVVHMVGGVAGLWGALIEGPRIGRFDHAGRSVALRGHSASLVVLGSFLLWFGWYGFNPGSFLTILKSYGPPGSIHGQWSAVGRTAVTTTLAGSTAALTTLFGKRLQTGHWNVIDVCNGLLGGFAAITAGCSVVDPWAAIICGFVSAWVLIGLNALAARLKFDDPLEAAQLHGGCGAWGVIFTALFARKEYVDQIFGQPGRPYGLFMGGGGRLLGAHIVVILVIAAWVSFTMAPLFLVLNKLGLLRISAEDEMAGMDQTRHGGFAYAYHDDDASGKPDRSVGGFMLKSAHGTQVAAEMGGHV

SEQ ID NO: 5729 - protein, 584 aa, Oryza sativa Japonica Group
MAPTAVDSKRISDITEDGSMDRRGNPAVKAKTGNWRSSILLLVNYGLVTCAFFGVGVNLVVFLRRVLHQDNAEAANSISKWTGTVYIFSLIGAFMSDSYWGRYITCAIFQMIYVTGLVILSLASWFLLVKPTGCGAAGEHCDAPSSAGVALFYLSTYMIAFGNGGYQPSIATFGSDQFDETDPREARSKVAFFSYFYLALNVGSLFSNTVLVYYEDEGRWVMGFWVSAAAAAMALVLFLLGTPNYRHFKPTGNPLTRIAQVFVAAFRKWRAEVPRSELLHEVDGDESQIAGIRKILHSDQIRFLDKAATVTEEDYCTPENMQDPWRLCTVTQVEEVKCILKMLPIWLCTIVYSVVFTQMASLFVEQGTTMNTNIGSFHVPAASMSVFDILSVLAFIAIYRRVLVPVMSRLSGNPQGLTELQRMGVGLVVGMAAMVVAGVVEVERLKRVGAPDQPSSLSVLWQVPQYALIGASEVFMYVGQLEFFNGQAPDGVKSFGSSLCMASISLGNYVSIMLVSVVTSLTAGDRRPGWIPGNLNSGHLDRFYFLLAALSLVDLAVYVACAVWYKGIKLDSNEEKANKITVHV

SEQ ID NO: 5730 - protein, 382 aa, Oryza sativa Japonica Group
MAEQANQPTVLQKFGGQFHLGSSFSEGVRARNICPSVSSYDRRFTTRSYMTQGLVNGGINVPMMSSSPIFANAPAEKGGKNFMIDFLMGGVSAAVSKTAAAPIERVKLLIQNQDEMIKAGRLSEPYKGIGDCFGRTIKDEGFASLWRGNTANVIRYFPTQALNFAFKDYFKRLFNFKKDKDGYWKWFGGNLASGGAAGASSLFFVYSLDYARTRLANDAKAAKGGGERQFNGLVDVYRKTLKSDGIAGLYRGFNISCVGIIVYRGLYFGMYDSLKPVVLTGSLQDNFFASFALGWLITNGAGLASYPIDTVRRRMMMTSGEAVKYKSSMDAFSQILKNEGAKSLFKGAGANILRAIAGAGVLSGYDQLQILFFGKKYGSGGA

SEQ ID NO: 5731 - protein, 452 aa, Oryza sativa Japonica Group
LSNSSSSEIDKRTGTAWTATAHIITAVIGSGVLSLAWSVAQLGWVGGPAAMVLFAGVTLVQSSLLADCYIFHDPDNGVVRNRSYVDAVRFYLGEKSQWFCGFFLNINFFGSGVVYTLTSATSMRAIQKANCYHREGHDAPCSVGGDGYYMLMFGLAQVVLSQIPGFHDMAWLSVLSAAMSFTYSLIGFGLGVAKVITNGVIKGGIGGIAMVSATQKVWRVSQAIGDIAFAYPFASVLLEIEDTLRSPPPESETMRTASRASIAVTTFFYLCCGCFGYAAFGDATPGNLLTGFGFYEPYWLIDFANLCVAVHLLGGYQVYSQPVFAAVERRMGGAGAGVVEVAVPAAVAWPSRWRRGCRVNVYRLCFRTAYVAATTALAVWFPYFNQVVGLLGAFTFWPLSIHFPVEMYLVQKKVAPWTPRWLAVRAFSAACLATGAFASVGSAVGVFSSKTS

SEQ ID NO: 5732 - protein, 356 aa, Oryza sativa Japonica Group
MASLTDLVNLNLSDTTEKIIAEYIWIGGSGMDLRSKARTLSGPVTDPSKLPKWNYDGSSTGQAPGEDSEVILYPQAIFKDPFRKGNNILVMCDCYTPAGEPIPTNKRHNAAKIFSSPEVASEEPWYGIEQEYTLLQKDINWPLGWPVGGFPGPQGPYYCGIGADKSFGRDIVDSHYKACLYAGINISGINGEVMPGQWEFQVGPSVGISAGDQVWVARYILERITEIAGVVVSFDPKPIPGDWNGAGAHTNYSTKSMRNDGGYEIIKSAIEKLKLRHKEHISAYGEGNERRLTGRHETADINTFSWGVANRGASVRVGRETEQNGKGYFEDRRPASNMDPYIVTSMIAETTIIWKP

SEQ ID NO: 5733 - protein, 396 aa, Oryza sativa Japonica Group; identical to SEQ ID NO: 445

SEQ ID NO: 5734 - protein, 626 aa, Oryza sativa Japonica Group
MAYSLETSALLNSPRANNSALVPPPSSAINNHTRRTHGHPHRNSAPPPPPSPAMASSASLQRFLPPSSHVAASRRRPPAVRTRPVQSLTVSAPSSSTPVADDAVSAERLEPREKVKLGKEPISLFMEGGIKELAKMPMEEIEADKLSKEDIDVRLKWLGLFHCHKHQYGRFMMRLKLPNGVTTSEQTRYLASVIEAYGKDGCADVTTRQNWQIRGVTLPDVPAILDGLNAVGLTSLQSGMDNVRNPVGNPLAGIDPDEIVDTRSYTNLLSYITSNFQGNPTITNLPRKWNVCVIGSHDLYEHPHINDLAYMPAVKDGKFGFNLLVGGFISPKRWEEALPLDAWVPGDDIIPVCKAVLEAYCDLGTRGNRQKTRMMWLIDELGMEVFWSEVEKRMPNGVLERAAPEDLIDKKWQRRDYLGVHPQKQEGLSYVGLHVPVGRVQAADMFELARLADEYGSGELRLTVEQNIVIPNVKDEKVEALLAEPLLQKFSPQPSLLLKGLVACTGNQFCGQAIIETKQRALLVTSQVEKLVSVPRAVRMHWTGCPNSCGQVQVADIGFMGCLTKDSAGKIVEAADIFVGGRVGSDSHLAGVYKKSVPCDELAPIVADILVERFGAVRREREENEE

SEQ ID NO: 5735 - protein, 357 aa, Oryza sativa Japonica Group; identical to SEQ ID NO: 519

SEQ ID NO: 5736 - protein, 1315 aa, Oryza sativa Japonica Group
MARQARAQARNGWHGDLSGVGGSGIEREREQREGGKKERERALSCSGLERRTCLARAGKDGGERRDGLRGNGRGEEIGPRTRGRQNRLFREDLIRDRLRRHDGTDATGMQVEEPEKCMQYGTIEMLAALFPGIETCGVGKQVFMILHSNPGRAPNQPTLTSRIGCRCSPHTPNQRRCSSSYTPDLVQVLRPLGDSFRRTVDGPMRSTLTFDNNHSVVPSQNIDYGQPMFHPQIVGGGTSPRVPLPSLEIADDGPIYVNPKQYHGILRRRQLRAKLEAQNKLVKTRKPYLHESRHRHAMKRARGTGGRFLNTKQLQLQQQSHTTSTKTTTDSQNSSGSVHLRLGGGAIGDQTPFPFKAMDSQANIKRAAASASTFTVTSAAQKDDAFFDRHGHHLSSFSGHFGQASAQGGVGSMHNGDEEQPRISAAPRLCPSGVNVILRREKTTGNPRDNPREIVGIGSVQIKTHDGMTRTLKDVRHIPGIARNLISLSTLDAEGYKYSGSGGVVKVSKGSLVYMIGDMNSANLYVLRGSTLHGSVTAAAVTKDEPSKTNLWHMRLGHMSELGMAELMKRNLLDGCTQGNMKFCEHCVFGKHKRVKFNTSVHRTKGILDYVHADLWGPSRKPSLGGARYMLTIIDDYSRKVWPYFLKHKDDTFAAFKEWKVMIERQTEREVKVLRTDNGGEFCSDAFDDYCRKEGIVRHHIIPYTPQQNGVAERMNRTIISKSRCMLSNARMNKRFWAEAANTACYLINRSPSIPLNKKTPIEVWSGVKGYKLWNPETNKTFMSRSVVFNESVMFNDSLPTDVIPGGSDEEQQYVSVQVEHVDDHETEIVGNDVNNTVQHSPPVLQPQDEPIAHRRTKRSCGAPVRFIEECDMVYYAFSCAEQVENTLEPATYTEAVVSGDREKWISAMQEEMQSLEKNGTWELVHLPKQKKPVRCKWIFKRKEGLSPSEPPRFKARLVAKCFSQIAGVDYNDVFSPVVKHSSIRTFFSIVAMYDLELEQLDVKTTFLHGELEEEIYMDQPEGFIVPGKEDYVCKLKRSLYGLKQSPRQWYKRFDSFMLSHGFKRSEFDSCVYIKFVNGSPIYLLLYIDDMLIAAKSKEQITTLKKQLSSEFDMKDLGAAKKILGMEITRDRNSGLLFLSQQSYIKKVLQRFNMHDAKPVSTPITPHFKLSALQCASTDEDVEYMSRVPYSSAVGSLMYAMVCSRPDLSHAMSLVSRYMANPGKEHWKAVQWIFRYLRGTADACLKFGRTDKGLVGYVDSDFAVDLDKRRSLTGYVFTIGSCAVSWKATLQPVVAQSTTEAEYMAIAEACKESVG

SEQ ID NO: 5737 - protein, 172 aa, Oryza sativa Japonica Group
MTELFDTAVTSLLHLPEVLDRLGAAAGDRRSAGDHAHHAAHGHGQHRISGIGGGAPVDIMETPGEYAFVLDVPGLSKSDIQVTLEEDRVLVMKSSNGAGNGKRKREEEEGECKYIRLERRASPRAFARKFRLPEDADTGGISARCENGVLTVTVKKRPPPEKKTKSVQVTIA

SEQ ID NO: 5738 - protein, 365 aa, Oryza sativa Japonica Group
MCGGAIIHHLKGHPEGSRRATEGLLWPEKKKPRWGGGGRRHFGGFVEEDDEDFEADFEEFEVDSGDSDLELGEEDDDDVVEIKPAAFKRALSRDNLSTITTAGFDGPAAKSAKRKRKNQFRGIRQRPWGKWAAEIRDPRKGVRVWLGTFNSAEEAARAYDAEARRIRGKKAKVNFPEAPTTAQKRRAGSTTAKAPKSSVEQKPTVKPAFNNLANANAFVYPSANFTSNKPFVQPDNMPFVPAMNSAAPIEDPIINSDQGSNSFGCSDFGWENDTKTPDITSIAPISTIAEVDESAFIKSSTNPMVPPVMENSAVDLPDLEPYMRFLLDDGAGDSIDSLLNLDGSQDVVSNMDLWSFDDMPVSDFY

SEQ ID NO: 5739 - protein, 426 aa, Oryza sativa Japonica Group
MNGGIGDALMQPQHVQVMSSSLPMVASTFVAEPAAAANKPRAAGLPPTPPQVFAAQRAAAAAGGDVCMEESAQGGGGGLPPRKAHRRSSSDVPFGYLAGQHQLLPPKVEAGWGHLGAGAGGAAAADDLFNAYLNLEGLDGLNSSDDRHDEGDSRGSSIKTNGADSSENESEECADDTRGGIRLWSADGGERREGVKRNAAGEPATAPLARHARSLSMDSLIGKFNFTAGTAAAAGNGVALGPNRFSLEFGSGEFTPSEMKKIMADEKLAEMALADPKRVKRVLANRQSAARSKERKMRYIAELEQKVQILQSEATNLSAQLTMMQRDSAGLATQNNELKFRLHAMEQQAQLRDALNEALTTEVQRLKLATAELGDSCSSSSLAQQIQLNAQNQMFQLQQQQATQIPFYQLQQSQQNGAAKNNESKE

SEQ ID NO: 5740 - protein, 1017 aa, Oryza sativa Japonica Group
MKNLFKSKIKWQHRSNDPASSQGQGQGLPQQTPPSPSPASSPSGGPPALSVSTVSSSSPSAAATPTGAAAAGAGGGGGGTGGEDYMLSEEEFQMQLAMALSASNSECVGDLDGEQIRKAKLISLGRGDRFAAVRDDEQTADALSRRYRDYNFLDYHEKVIDGFYDIFGPSMESSKQGKMPSLADLQTGIGDLGFEVIVINRAIDTTLQEMEQVAQCILLDFPVANIAALVQRIAELVTDHMGGPVKDANDMLTRWLEKSTELRTSLHTSLLPIGCIKIGLSRHRALLFKILADSVGIPCKLVKGSNYTGDDDDAINIIKMNEREFLVDLMAAPGTLIPSDVLSWKGNSLNSNARLTQNPLAGSSSTTDSNLSANALPPGHKGGQLPLFSSGDWISASQSGYEKDGATTSSQASSSGTTSVAAGSAFDSSWTLVSHGQSDDPSTSAGMSAQQKVILPGGEHPWNENINARNENIKLVSDLQGNSESINLFADLNPFGGREPKRTSVPLNGPDNRNNELQRRRENVVPSTRRPQQRLVMKNWSPYNDVSNNKQYNYVEDSFARRNIGDNAASSSQVPRPSAKNTNLNVVVRTDTPYMAAHNYDNSMAGSSAMKMTSTAGIGKVPDKVLYGDLDKGLTNSRLGDQPPIERHKWGNSVEGRIPTGTVHNQAKEHKENFDGKQDNKKLHPDPKKSPLDRFMDTSMPSRNPESVSPSFARSHKLDTMFDDVSECEIHWEDLVIGERIGLGSYGEVYRADWNGTEVAVKKFLDQDFYGDALDEFRSEVRIMRRLRHPNIVLFMGAVTRPPNLSIVSEYLPRGSLYKILHRPNCQIDEKRRIKMALDVAKGMNCLHISVPTIVHRDLKSPNLLVDNNWNVKVCDFGLSRLKHSTFLSSKSTAGTPEWMAPEVLRNEQSNEKCDVYSFGVILWELATLRMPWSGMNPMQVVGAVGFQDKRLDIPKEIDPLVARIIWECWQKDPNLRPSFAQLTSALKTVQRLVTPSHQESQSPPVPQEIWVNSSTP

SEQ ID NO: 5741 - protein, 656 aa, Oryza sativa Japonica Group
MEFQPFPQGVHPNTSEPAMEPMASESSVPIGTAFADLLLQGPEHPSLWNDLTGMFRKAFRWQGADKRFTLSVYVMSVLQGLFPILDWWKTYNLKFFRSDLMAGLTLASLSIPQSIGYATLAKLDPQYGLYTSVVPPLVYAVTGSSREIAIGPVAIVSLLLSSMIQKIVDPSVDPAFYRKMVFTVTFLTGVFQFAFGLFRLGFLVDFLSHAAIVGFMGGAAIVIGLQQLKGLLGLSHFTNRTDVVSVTKAVWVSVHETWHPENVFIGCSFFMFILAMRFIGRKYKKLFWVSAIAPVLSVALSTLFVYATRADKHGVKIIQKVNSGINASSVEQIDLKGGYAAECAKIALVCAVIALTEAVAVGRSFSAINGYRLDGNKEMVAMGFMNIAGSLSSCYVATGSFSRTAVNFAAGCKTTVSNIIMAATVMVALELLTKLLYYTPVSILASIILSALPGLINVQEVCFLWKVDKMDFLTCMGSFLGVLFGSVEIGLSVALLVSFAKIIIQSIWPQVEILGRLQGTEIFCNVKQYPVVHETPTVLTVRIETSFLCFVNSSSIKEKIMGWVTDEREAFCSVVLDMSNVVNMDTSGLVALEELHKELACLGIQMAIAKPGWQVIHKMKLARLVDGIGEGWFFLTVGEAVEACLANKAGNALECC

SEQ ID NO: 5742 - protein, 392 aa, Oryza sativa Japonica Group
MGALRRWLPCCCCCCRGGGGGGGGGSVGDGLVWDVALKAHASGDYSVAVAQANEALEDQAQVFVSPAATLVGVYDGHGGPEAARFVNKRLFSLIQEFAAQSGGISAEVLEKAFGETEEEFVASVQRSWPSQPRILSVGSCCLVGAIEDGTLYVANLGDSRAVLGRRSAAGAAHGRKGKNRVVPERLSRDHNVADEDVRRELKELHPDDSHIVLNTHGVWRIKGIIQVSRSIGDVYLKKPEICKSNPMLQQTICPFPLRRPVMSAVPTIKTRKLRPGDQFVIFASDGLWEQLTDEAAVAIVAGSPRRGVAMRLVRAAQLEAARKKDVKYERIRTIEKGQRRHFHDDITVVVLFLDKCRGKAGRGDEIDGTDGPVDVFSLSPDDREDPTRPVLR

SEQ ID NO: 5743 - protein, 262 aa, Oryza sativa Japonica Group
MASASASLSLAFSPLLLPTPRPRPYSRPINPGFPTPLRLSLACSPPSRRAGPVAAVPDGVAVADVVEKDWSFLDAAAAAAAAGGSLPRALAAGALSPASRVLAVTPAPSFVDALLSGHPCELLVAAHESLYVLAGIKEGHDEVRCFHLEGGGGGRGGGVVEGVPERFDAFDAVFVCYFPGMGVSAAALLKSLAKRCSKGGRVVIFLDQGRQSLEQHRREHPEVVTADLPTRPSLEKATAGSKFEILEFVDEPTLYLAVLQFQ

SEQ ID NO: 5744 - protein, 167 aa, Oryza sativa Japonica Group
MAFASASNGAVRFTEEQEALVLKSWAIMKDDSANIGHRFFLKIFEVAPSARHLFSFLRNSDVPLEKNPNLKKHAMAVFVMTCEAAAQLRKTGRVTVRDTTIKRLGSTHFKNGVSDTHFEVARFALLETIKDGIPASMWSPEMKNAWGEAYEHLVAAIKEGMKPVALL

SEQ ID NO: 5745 - protein, 730 aa, Oryza sativa Japonica Group
MVFQKRSSLEMESGGGSHVAEMPRVPKSARGKRSIRKKESQGQVMCAFDLLATVAGKLLDEGEGSLGNASSGTPAVDASPKDVRVKQEQCDEEAKHFKNEVMDQDSCNESALVSHIAFQRPVNHHGRKGEDPEGSHAVIEDPKAKSEALDKESSMISCTKAELGCNFAAIADRWSPESVESGAFTGDAAAIAMPATTSGFHKNAPDMYNLLDPMDVDVKPPPLVSSDSTGEMPLYGNKIRRSTSFPRVPKGGAGFTVDRDEDDDDKSSGCTHPSTATNRGFRPNCTAGHSRVKKLLACKHRKVAPARMHKGDLSYSGEHCEIPFTFSFFEEHCIDGTHIQTCLLYSYLSSLILLDVDRKPSFRNKKMYYTRQRTQRSTFKRRKMFDRHSAQVSEEYAKANTKFAARDSHAVSLEANKGTNSTAFQKSQESSDCHVKLRIKSFKVPELLIEIPETATVGSLKKTVLEAVNAILGGGLRVGVLHHGKKVRDDNKTLMQAGISHDEVLDNLGFSLEPNCAPHPSQLSPPEDNEFMETVDTTEPLARIAPADSSSKHGEVDASQELALAPLSANYQGSDHDFVHSPGGMSSPDKASTNSRAIVPVTPADSNAGAIVPANKAKRSPEQGQRRIRRPFSVAEVEALVLAVEKLGTGRWRDVKLRAFDNAKHRTYVDLKDKWKTLVHTASISPQQRRGEPVPQELLDRVLAAQAYWSQQQAKLQPKTPPLAEALLLT

SEQ ID NO: 5746 - protein, 646 aa, Oryza sativa Japonica Group
MAAERSGRPLVNPAVPRAGCSNSSQKLNKLKHRGPDWSGLYQCEGNFLAQQRLAIVSPLSGDQPLYNADRTIVVVVRELTHPSIHRQFVTCDKSCHVYLVCCLLNLLCWVGIELKANGEIYNHKKIRKQFASKHTFSTGSDCEVIIPLYEEYGEDFVDMLDGVFAFVLYDTRTKTYMAARDAIGVNPLYIGRGSDGAVWISSEMKALNEDCVEFEIFPPGHLYSSAAGGLRRWYKPQWFAENVPATPYQPLLLREAFEKAVIKRLMTDVPFGVLLSGGLDSSLVAAVTKRHLIKTEAAEKFGAELHSFVVGLEGSPDLIAAREVADHLGTIHHEFHFTVQDGIDAIEEVIYHDETYDVTTIRASTPMFLMARKIKALGVKMVLSGEGSDELLGGYLYFHFAPNKEEFHKETCRKVKALHQYDCLRANKATSAWGLEVRVPFLDKEFINVAMSMDPEWKMYNADLGRIEKWVMRKAFDDEEHPYLPKHILYRQKEQFSDGVGYNWIDGLKAFTEQQVSDEMMKNAAKVYPHNTPVNKEAYYYRMIFERLFPQESARETVPWGPSIACSTPAAIEWVEQWKASHDPSGRLIASHNSASASANHTNHANANANGNSNGKANGNCAMAANGTNGVGLVVANGTANGKMEA

SEQ ID NO: 5747 - protein, 605 aa, Oryza sativa Japonica Group
METHIGSVDGAAAAADNGAVGCPASAVGCPMTSARPAPVSAGEASLGRHLARRLVQVGVSDVFAVPGDFNLTLLDHLIAEPGLRLVGCCNELNAGYAADGYARARGVGACAVTFTVGGLSVLNAIAGAYSENLPVICIAGGPNSNDYGTNRILHHTIGLPDFSQELRCFQTVTCHQAVVTNLEDAHEQIDTAIATALRESKPVYLSISCNLPGLPHPTFSRDPVPFFLAPRLSNKMGLEAAVEATVEFLNKAVKPVLVGGPKLRVAKAGKAFVDLVDASGYAYAVMPSAKGLVPETHPHFIGTYWGAVSTAFCAEIVESADAYLFAGPIFNDYSSVGYSFLLKKDKAIIVQPERVIVGNGPAFGCVMMKEFLSELAKRVNKNTTAYENYKRIFVPEGQPLESEPNEPLRVNVLFKHVQKMLNSDSAVIAETGDSWFNCQKLKLPEGCGYEFQMQYGSIGWSVGALLGYAQGAKDKRVIACIGDGSFQVTAQDVSTMIRCAQNSIIFLINNGGYTIEVEIHDGPYNVIKNWNYTGLVDAIHNGEGKCWTSKVKCEEELTEAIGMALGEKDCLCFIEVIAHKDDTSKELLEWGSRVSAANSRPPNPQ

SEQ ID NO: 5748 - protein, 565 aa, Oryza sativa Japonica Group
MSKGAIIGASTVLVVAVVAAVCVVSFKNGSSNAKEDGELSTSVKSIKSFCQPVDYRETCETTLEQTAGNATNPTDLAKAIFKATSERIEKAVRESAVLNDLKNDPRTSDALKDCEELLDYAIDDLKTTFDKLGGFQTSNFKRAVDDVKTWLSSALTYQETCLDGFENSTSTEASEKMRKALKSSQELTENILAIVDQFADTLANLDITGFSRRLLGDDGVPVWMSNAKRRLLEATPGSKEFKPDVTVAADGSGDFKTINEALAKVPVKSTGTYVMYVKAGTYKEYVSVARNVTNLVMIGDGATKTIITGNKSFMLNITTKDTATMEAIGNGFFMRGIGVENTAGSKNHQAVALRVQSDQSAFYECQFDGHQDTLYTHTSRQYYRDCTITGTIDFIFGNAQVVLQNCRIQVRRCMDNQQNIVTAQGRKEKHSAGGTVIHNCTIEPHEDFKADAAKFKTFLGRPWKEYSRTLYIQSDIGGFIDPQGWLPWLGDFGLNTCYYAEVENRGDGADMSKRAKWRGVKTVTYQQAQQKYTVERFIQGQTWLPKFGVPFIPGLLPQEQSGRIH

SEQ ID NO: 5749 - protein, 1171 aa, Oryza sativa Japonica Group
MASGSRATPTRSPSSARPAAPRHQHHHSQSSGGSTSRAGGGGGGGGGGGGGAAAAESVSKAVAQYTLDARLHAVFEQSGASGRSFDYTQSLRASPTPSSEQQIAAYLSRIQRGGHIQPFGCTLAVADDSSFRLLAYSENTADLLDLSPHHSVPSLDSSAVPPPVSLGADARLLFAPSSAVLLERAFAAREISLLNPLWIHSRVSSKPFYAILHRIDVGVVIDLEPARTEDPALSIAGAVQSQKLAVRAISRLQALPGGDVKLLCDTVVEYVRELTGYDRVMVYRFHEDEHGEVVAESRRNNLEPYIGLHYPATDIPQASRFLFRQNRVRMIADCHAAPVRVIQDPALTQPLCLVGSTLRSPHGCHAQYMANMGSIASLVMAVIISSGGDDDHNISRGSIPSAMKLWGLVVCHHTSPRCIPFPLRYACEFLMQAFGLQLNMELQLAHQLSEKHILRTQTLLCDMLLRDSPTGIVTQSPSIMDLVKCDGAALYYHGKYYPLGVTPTEVQIKDIIEWLTMCHGDSTGLSTDSLADAGYPGAAALGDAVSGMAVAYITPSDYLFWFRSHTAKEIKWGGAKHHPEDKDDGQRMHPRSSFKAFLEVVKSRSLPWENAEMDAIHSLQLILRDSFRDSAEGTSNSKAIVNGQVQLGELELRGIDELSSVAREMVRLIETATVPIFAVDTDGCINGWNAKVAELTGLSVEEAMGKSLVNDLIFKESEETVNKLLSRALRGDEDKNVEIKLKTFGPEQSKGPIFVIVNACSSRDYTKNIVGVCFVGQDVTGQKVVMDKFINIQGDYKAIVHNPNPLIPPIFASDENTCCSEWNTAMEKLTGWSRGEVVGKLLVGEVFGNCCRLKGPDALTKFMIVLHNAIGGQDCEKFPFSFFDKNGKYVQALLTANTRSRMDGEAIGAFCFLQIASPELQQAFEIQRHHEKKCYARMKELAYIYQEIKNPLNGIRFTNSLLEMTDLKDDQRQFLETSTACEKQMSKIVKDASLQSIEDGSLVLEKGEFSLGSVMNAVVSQVMIQLRERDLQLIRDIPDEIKEASAYGDQYRIQQVLCDFLLSMVRFAPAENGWVEIQVRPNIKQNSDGTDTMLFLFRFACPGEGLPPEIVQDMFSNSRWTTQEGIGLSICRKILKLMGGEVQYIRESERSFFHIVLELPQPQQAASRGTS

SEQ ID NO: 5750 - protein, 329 aa, Oryza sativa Japonica Group
MDMAHERDASSEEEVMGGDLRRGPWTVEEDLLLVNYIAAHGEGRWNSLARSAGLKRTGKSCRLRWLNYLRPDLRRGNITPQEQLLILELHSRWGNRWSKIAQHLPGRTDNEIKNYWRTRVQKHAKQLKCDVNSQQFKDVMRYLWMPRLVERIQAAAAGQQQQQEGGTDTPPLSWQHGGSDGLYESPELPAPDASCWPAEYCAAAGGAQSGGTPAPELSSTTAGSSSLSTDSGAGAQPSWPTQADGAEWFTTACDASSATGGVAMRDTELELAQPPCQGGQTWTTSESSLPGLTFPDLAVADFEIGGFDVDSFWTSMEDDQLWCPTQAAV

SEQ ID NO: 5751 - protein, 320 aa, Oryza sativa Japonica Group
MGYSYSSAAVAVSVLVVALAAAASGQLSTTFYASSCPTALSTIRSAVNAAVAREPRMGASLLRLHFHDCFVQGCDASILLADNATFRGEQGAFPNVNSLRGFEVISSIKMQLEASCRQTVSCADILAVAARDSVVALGGPSYPVELGRRDGMTTNQTMANTNLHPPTTDLGNFVTSFAGKGLSPTDLVVLTGAHTVGVAQCTNFRSRLYGESNINAPFAASLRASCPQAGGDTNLAPLDSTPNAFDNAFFTDLIAGRGLLHSDQELYRGDGSGTDALVRVYAANPARFNADFAAAMVRMGAIRPLTGTQGEIRLNCSRVN

SEQ ID NO: 5752 - protein, 101 aa, Oryza sativa Japonica Group
MGSLQALERRLAGLGWERYYEDRAVVQLHRRDGGADLISLPRDFARFRSTHMYDVVLKNRDHFKGGSAEERAWLRRLSATSTAAGGGPGCGGAKDRSGSRW

SEQ ID NO: 5753 - protein, 318 aa, Oryza sativa Japonica Group
MEEQKHTDKAKAKLSMLKSKVICCKLYISESQNAKVVDAITRIGQKDPEVVLLSKFEDDHYNRVRYTLASYIINENSTGEVKFSPMRRVLLEMIEKAFSTINLETHTGTHPRIGVIDDMSFHPLNQATMEDAAQLAKTVASDIGNFLQVPVFLYGAAHPTGKPVTAVRRELGYFQPNYMGIQWMGQVLPDILPVKPDEGPDHVSRERGAIMIGAAPLPLNYNVPVLSKDIPTIRRITRRVTGRGGGLPTVQALALSHGDDCTEIACFLDPDHVSADQVQQQVEQIAAEQGLEVEKGYFTDFSKDAMLEKYFKIVLSVD

SEQ ID NO: 5754 - protein, 362 aa, Oryza sativa Japonica Group
MDRAALTVGPGMDMPIMHDGDRYELVRDIGSGNFGVARLMRSRADGQLVAVKYIERGDKIDENVQREIINHRSLRHPNIIRFKEVILTPTHLAIVMEYASGGELFERICNAGRFSEDEARFFFQQLISGVSYCHSMQVCHRDLKLENTLLDGSTAPRLKICDFGYSKSSVLHSQPKSTVGTPAYIAPEVLLKKEYDGKIADVWSCGVTLYVMLVGAYPFEDPDEPKNFRKTIQRILGVQYSIPDYVHISPECRDLIARIFVANPATRISIPEIRNHPWFLKNLPADLMDDSKMSSQYEEPEQPMQSMDEIMQILAEATIPAAGSGGINQFLNDGLDLDDDMEDLDSDPDLDVESSGEIVYAM

SEQ ID NO: 5755 - protein, 537 aa, Oryza sativa Japonica Group
MAMSSWVATIVTLLIGVAVASLRGRQRRTKARLNLPPGPRGWPVFGSLGALAGALPPHRALAALAARHGPLMHLRLGSFDAVVASSAGAARLVLKTHDAAFADRARTAAGELVAYNYKGIVHTPYGAYWRMARKLCATELFSPRRVDSYERIRAEEIGALARDLFGRAGRAVAVRERLASATLRNILRMSVGDKWSGVYGSADGEAFRRTLDEAFEVSGAVSNVGEWVSLLGWLDVQGFRRRMKRLSKMYDRFLEQILHEHEASMAAAGDGGQPAAAACDLVDVLLQLSGEEEEGSAGAGADSEARLTRDGVKAFILDIIAGGTESSAVAMEWAMAELLRRPDAMAAATDELDRVVGTARWVTERDIPDLPYVDAVVKEALRLHPVGPLLVPHHAMEDTVVAGGYVVPAGARVLVNAWAIARDPASWPDRPDAFLPERFLPGGGAAAAGLDVRGQHYELLPFGSGRRVCPATNLAMKMVALGVASLVQGFAWRLPDGVAAEDVSMEELVGLSTRRKVPLVAVAEPRLPAHLYAGTAA

SEQ ID NO: 5756 - protein, 741 aa, Oryza sativa Japonica Group
MERRDNFLQPPAAAAAPAAGGGKGLPVPATGDATNLTSSSSSTSSLTLSPPDFLRQVQAALKRHRPTGSMQSNQPRATRVLVSRGEGSTKAVANPSVAQNPEGKVMQQRRGLLGASRLRNAAPDQNKAVVSSQDELLLTTPLTLGTITDTHDQNGGQNHQPKSDTDLLVDRKKSSMEVSSSQMASANALVGEDFKKDLFYLTSDPQLTSQRDNFPVAQVADDQGKNHKEIGIASAAVEMDIKYDAANLSRRIDEACDQNHGEPMTRCSAMGSSVTAVSLYSGPTIQSKSAAQIDQYASPAQMPQCGRESSGVSGHGSQKLHGVAMNHADCNTNKQQVDTNGGMDKPVSSSAVCLPSQGLSGNDQSLSAKDDGAPRRSKVEKECRKKNYDPDVFFKVNGKLYQKLGKIGSGGSSEVHKVISAECTIYALKKIKLKGRDYPTAYGFCQEIEYLNKLKGKSNIIQLIDYEVTDKSLLQDDSLSPRDGRIKDDHYIYMVLEYGEIDLANMVAQEWKKRNTSNMKIDENWLRFYWQQMLKAVNTIHEERIVHSDLKPANFLLVRGALKLIDFGIAKAIMNDTTNIQRDSQIGTLNYMSPEAFMCNEQDSGGNVIKCGRPSDIWSLGCILYQMVYGKTPFADYKNFWAKFKVVTDKNHKIKYEPVDNPWLIDLMQRCLAWDRNDRWRIPQLLEHPFLVPLVPRDLPSIDQDPCRLLMERVRVHWANPKLHSFIAELEKDQCRPATQM

SEQ ID NO: 5757 - protein, 161 aa, Oryza sativa Japonica Group
MSDSEEHHFESKADAGASKTYPQQAGTIRKNGHIVIKNRPCKVVEVSTSKTGKHGHAKCHFVAIDIFNGKKLEDIVPSSHNCDVPHVNRTDYQLIDISEDGFVSLLTESGGTKDDLRLPSDEALLTQIKDGFAEGKDLIVTVMSAMGEEQICALKDIGPKN

SEQ ID NO: 5758 - protein, 150 aa, Oryza sativa Japonica Group
MAKPSAAPVTGVPVGSAAWSTGLCDCFDDCGLCCLTCWCPCITFGRVAEMVDRGSTSCGTGGALYGLLCAFTGCQWIYSCTYRGKMRTQYGLAEAGCADCCVHFCCEPCALCQEYRELVARGYDPKLGWHLNADRAAAAGAAPAVQYMGR

SEQ ID NO: 5759 - protein, 520 aa, Oryza sativa Japonica Group
MRHVVVQCATSWDTPRTSTTNGSHAEPSAVVKAGTAPLIQALKSTANQDVSCFHFPGHNRGKASPPSLSELIGSRTFLHDLPELPELDDLFSPKGVILDAQKRAAELFGSFKTWFLVNGSTCGIQASVMATCSPGDYLIIPRNCHISVISALVLSGAVPKYIVPEYNSGWDIAGGITPSQVDKVVKELEEDRKKVGAVLVTSPTYHGICSNIQGIVNVCHLQGIPVIVDEAHGAHFRFHRNFPSSATEQGADLVVQSTHKVLCSLTQSSMLHMAGDLVDADKVSQCLQLLQSSSPSYLLLSSLDAARAQLSENAESFDEPVSMALETKHQLRIIPGISVLDLSSFLSDFPAIDPLRITLSASDLQLSGYEADDFLAEEHQIVSELVGTQAVTFAVNLGTRRHDVQRLVHSVKHLSEKYFSENGSSSRKENPASSPLDKFSIKLTPREAFFLKKRRVSIEDSLGEICGELICPYPPGIPVLIPGEIVTQDSLSYLMDVRDNGIAISGAADGELKSIMVCNV

SEQ ID NO: 5760 - protein, 177 aa, Oryza sativa Japonica Group
SPAAAADFVRRSCRATRYPQVCERSLMPQAPAVGRSPRLLAQAALTVGADRARSCSGYLGGGGSSSSSKRSGGGGRGGAVGDCADTLRDAEERLRQSAAEMSRMGRSGSPRFAWRLSNVQTWASAALTDASTCLDSLATYAAPGIDVDALRKRVGAVSQATSNALALVNNLDPHHHL

SEQ ID NO: 5761 - protein, 340 aa, Oryza sativa Japonica Group
MGGVAAGTRWIHHVRRLSAAKVSADALERGQSRVIDASLTLIRERAKLKAELLRALGGVKASACLLGVPLGHNSSFLQGPAFAPPRIREAIWCGSTNSSTEEGKELNDPRVLTDVGDVPIQEIRDCGVEDDRLMNVVSESVKTVMEEDPLRPLVLGGDHSISYPVVRAVSEKLGGPVDILHLDAHPDIYDAFEGNIYSHASSFARIMEGGYARRLLQVGIRSITKEGREQGKRFGVEQYEMRTFSKDREKLESLKLGEGVKGVYISVDVDCLDPAFAPGVSHIEPGGLSFRDVLNILHNLQGDVVAGDVVEFNPQRDTVDGMTAMVAAKLVRELTAKISK

SEQ ID NO: 5762 - protein, 658 aa, Oryza sativa Japonica Group
MSSSQSLLLLAAPLSPPTLPRLVPPPPTSAPRLPRLAANLSRPPPLAISSPGCDGGGGGGGGGGGGGWWRQGGSGPPDPGDGWWRWLQSLHPELLLLFVLLHSGAFAAIPAALAEAIGGSGGREGASVWEVRGGARTLLVPDPTGTSYVVAGDGRRKQAEGEDAEKAGAGRAELAALRRQLELSWRRCATVAVQLLLPDGYPDSVSSDYLQYSLWRGVQGIASQISGVLSTQALLYAVGLGKGAIPTAAAVNWVLKDGLGYLSKILLSKFGRHFDVNPKGWRLFADLLENTAYGLEILTPVFPHLFVPIGAAAGAGRSAAALIQTIFTHFMLENANHMRKAATRSCFYAGFAVQRNFAEVIAKGEAQGMVSKFLGIMLGIALANRIGSSVSLALISFAGVTAVHMYCNLKSYQSIQLRTLNPYRASLVFSEYLLSGQVPSVKEVNDEEPLFLNLSIGTSRKESKILSPQAKDAAEIICRRLQLGSKLSEIIENKEDACALFDLYKNEQYLLTEYKGKFCVILKEGSSPEDMLKSLFHVNYLYWLEKYLGIKPSDVASACRPGGRLEASLDYTQREFSHVKLDGSNGGWVMDGLIARPLPLLKGFGLLDPALKAWSAGRRWPHKTTKNIKPIGEIQLQITIPVSNWDSANVKGRLCSSE

SEQ ID NO: 5763 - protein, 451 aa, Oryza sativa Japonica Group
MGEESSPAAAPAVEVLSYFVCPISLEIMRDPVTLSTGITYDRESIERWVFTDGHGECPVTKQRLAPADREPTPNHTLRRLIQGWCAVHAVERFPTPRPPVDAARVAAIVDAARPLLRRRRQREELMASLRELADIVAESDRNRRCVQGASGAVEFLLSVVKERASVAGVDDATSAKPEETTCGGVHDPAKASSPEEAALSILHSLKLSEESFKRVLEGSGGEDFLETMACVLRRPSYLSRMQGIHLLKSALPAMAPARLTSARAALVDGVVGVVADRPSAKAVKVALHVLCRLCPWARNRVKAVDAGAVSALVRLLLDEGCGGGGGDRRACELAAVAIDHICRLRGGAPGSGGAPGGAQRQVACSADRCPHTAGAESAVRALHAVARHSATSAVLQEMLPVGVVARLLFLVQVGASGERTRARAREMLKMHARVWRDSPCLASHLNASYPR

SEQ ID NO: 5764 - protein, 431 aa, Oryza sativa Japonica Group
MARDAPRPTARCRRAMAVAPPDPDVGRPNPAKEVPDPPPPQAAPPSSPLVVVVDVVSPTPSSSHQGKGCCSGRPRRRLPGSPLTSSGGGEEEQGRPTQLGEPKIFSCRIPKKAFVHTPRVEMYSRRILLHTPFSGQPSGPSQPVSGATIVEGGSPGSNFDANIVMILAVLLCALICALGLNSIVRCALRCSSRMVVDPEPSRVTRLAQSGLRRKALRSMPILLYSTGLKLNTVSPMCAICLSDFEDGEHVRVLPKCNHGFHVRCIDRWLLARSTCPTCRQSLFGAPQKASGCSESEGSQAEPAPARPVLAPLRPEGVTAKLACTAVHCVGRNRSEDFRSNHMAVLHQQSTIMLVGNQALVAKVQVSGTSIFSCNYREIRALLSECIVVIYVPELTGGSTADYALCTLAILCCLLQKLESGYENVVAVLHIA

SEQ ID NO: 5765 - protein, 659 aa, Oryza sativa Japonica Group
MALLSATAPAKTRFSLFSHEEAQHPHPHALSACCGGGASGKRQRARARVAAAMRPADAAASVAQAASPGGGGEGTRRPRVLVAGGGIGGLVLALAARRKGYEVTVFERDMSAVRGEGQYRGPIQIQSNALAALEAIDMSVAEEVMREGCVTGDRINGLVDGISGSWYIKFDTFTPAAERGLPVTRVISRMTLQQILARAVGDDAILNDSHVVDFIDDGNKVTAILEDGRKFEGDLLVGADGIWSKVRKVLFGQSEATYSEYTCYTGIADFVPPDIDTVGYRVFLGHKQYFVSSDVGAGKMQWYAFHKEPAGGTDPENGKNKRLLEIFNGWCDNVVDLINATDEEAILRRDIYDRPPTFNWGKGRVTLLGDSVHAMQPNLGQGGCMAIEDGYQLAVELEKSWQESAKSGTPMDIVSSLRRYEKERILRVSVIHGLARMAAIMATTYRPYLGVGLGPLSFLTKLRIPHPGRVGGRFFIKYGMPLMLSWVLGGNSTKLEGRPLSCRLSDKANDQLRRWFEDDDALEQAMGGEWYLLPTSSGDSQPIRLIRDEKKSLSIGSRSDPSNSTASLALPLPQISENHATITCKNKAFYVTDNGSEHGTWITDNEGRRYRVPPNFPVRFHPSDAIEFGSDKKAVFRVKVLSTLPYESARGGPQILQAA

SEQ ID NO: 5766 - protein, 179 aa, Oryza sativa Japonica Group
SPTDERFLHFTERVRAAASHPRESIDDPWPAATRREANNPPVASWSSGLCDCYDDVGGCCLTFFCPCVAFGRIAEIVDQGATSCCARGTLYMLLAMATGFACAYSCCYRSRLHQQYGLQEKPCGDCCVHWCCGPCALCQEYRELKSRGFDMSLGWQGNMERMGKGVATAPPQMHPGMTR

SEQ ID NO: 5767 - protein, 466 aa, Oryza sativa Japonica Group
MALGDGDDGAAAAAVPLISDRPKHAAIVRSGTEWTAAAHVITAVIGSGVLSLAWSVAQLGWLAGPGMMLVFAAVTALQSALFADCYRSPDPEVGPHRNRTYANAVERNLGSSSAWVCLLLQQTALFGYGIAYTITASISCRAILRSNCYHTHGHDAPCKYGGSYYMLMFGAAQLFLSFIPDFHDMAWLSVLAAVMSFSYSFIGLGLGLANTIANGTIKGSITGAPTRTPVQKVWHVSQAIGDIAFAYPYSLILLEIQDTLKAPPAENKTMKKASIISIVVTTFFYLCCGCFGYAAFGSDAPGNLLTGFGFYEPYWLIDFANACIILHLLGGYQVYSQPIYQFADRFFAERYPASRFVNDFHTVKLPLLPPCRVNLLRVCFRTVYVASTTAVALAFPYFNEVLALLGALNFWPLAIYFPVEMYFIQRHVPRWSPRWVVLQSFSVLCLLVSAFALVGSIQGLISQKLG

SEQ ID NO: 5768 - protein, 463 aa, Oryza sativa Japonica Group
MSLADDLAAVERGGHMVPSKAAGVDGDGEPRRTGTMWTASAHIITAVIGSGVLSLAWGVAQLGWVAGPAVMLLFGAVIYCCSVLLVECYRTGDPYTGQRNRTYMDAVRANLGGTKVRLCGVLQFANFFGVCVGITIASSISMLYRHDQREACGGSSRPYMVVYGALQVVFSQIPNLHKMWWLSTLASAMSLSYSAIGIALGVAQIVVLDMFEIEFAANGGIRGTITGVFVGAGAGVTSMQKDTVKPVAPPSTETKVMRKAVAVSVATTTAVYLMCGCVGYAAFGNDSPDNLLTGFGFFEPFWLLDLANAGVVVHLVGTYQVVAQPVFAFLDGRAAAGAWPGSAALGKRRRVLRVGSLAEIEVSPFRLAWRTAFVCVTTAASTLLPFFGSMVGLIGAASFWPLTVYFPVEMYIAQRRVPRGSAQWLSLQALSAGCLVVSVAASAGSIAGVVEAFKAHNPFCWTC

SEQ ID NO: 5769 - protein, 112 aa, Oryza sativa Japonica Group
MALAKAKETVASAPVVVYSKSYCPFCVRVKKLFEQLGATFKAIELDGESDGSELQSALAEWTGQRTVPNVFINGKHIGGCDDTLALNNEGKLVPLLTEAGAIASSAKTTITA

SEQ ID NO: 5770 - protein, 534 aa, Oryza sativa Japonica Group
MYGVGGGGGGFNAPYTASARRRNHEDDDDEEEEESGEGRVLEAWERAYADDRSWEALQEDESGLLRPIDTKTLVHAQYRRRLLLRSAASAAARIQKGLIRYLYIVIDLSRVVNKILFGTAPDLRSMAASEMDYRPSRMAVVAKYAEVFIREFFDQNPLSHVGIVTMKDGISHRLTEIGGSPESQIKALMGKLECSGEPSLQNALELVHGYLDQVPSYGHKEVLFLYSALNTCDPGDIMETIAKCKKSKIRCSVIGLAAEIFICKYLCEETGGSYTVALDESHFKELLLEHAPPPPAIAEYAAANLIKMGFPQRGAEDLISICSCHKKIKSGAEGYICPRCKVNIVNLASMFAVQNATNTSALIAIFTSMRACTIAQVARVSVVLHRDAIVVLIFVFLTQEATRCCKLSRTLTLLSGDEQWRSSCIITYTQHIPGSLHSDESVLPVAIMSTLLKRMDDRQRCQCSFSPVARPSCGHDELQAAAPSCAFSTVDHSSPLERNTDGIRLNIYFLKNKTEHVFALNRRSFRVGEPVLVK

SEQ ID NO: 5771 - protein, 498 aa, Oryza sativa Japonica Group
MATCAADLAPLLGPVAANATDYLCNRFADTTSAVDATYLLFSAYLVFAMQLGFAMLCAGSVRAKNTMNIMLTNVLDAAAGALFYYLFGFAFAFGTPSNGFIGKQFFGLKHMPQTGFDYDFFLFQWAFAIAAAGITSGSIAERTQFVAYLIYSAFLTGFVYPVVSHWIWSADGWASASRTSGPLLFGSGVIDFAGSGVVHMVGGVAGLWGALIEGPRIGRFDHAGRSVALKGHSASLVVLGTFLLWFGWYGFNPGSFTTILKTYGPAGGINGQWSGVGRTAVTTTLAGSVAALTTLFGKRLQTGHWNVVDVCNGLLGGFAAITAGCSVVDPWAAIICGFVSAWVLIGLNALAARLKFDDPLEAAQLHGGCGAWGILFTALFARQKYVEEIYGAGRPYGLFMGGGGKLLAAHVIQILVIFGWVSCTMGPLFYGLKKLGLLRISAEDETSGMDLTRHGGFAYVYHDEDEHDKSGVGGFMLRSAQTRVEPAAAAASNSNNQV

SEQ ID NO: 5772 - protein, 444 aa, Oryza sativa Japonica Group
LETGELVGFFGGANILMEYVLSNAAVARSFTDYLASTCGITEPDAWRIQVDGIAKGYNALDFPAVALILVLTLCLCYSTKESAMLNMVITVFHLLFFVFIILAGLWNGSARNLVSPHGLAPYGVRGVLDGAAIVYFSYIGYDSASTMAEEIRDPARALPVGIAGSVLVVSALYCLMSLALCAMLPYTEIAESAPFSAVFREKAGWEWAGSVVGAGASLGIVASLLVAMLGQARYLCVIARARLVPAWLAKVHPSTGTPMNATIFLGLCTASIALFTELQVVFEMISIGTLLVFYLVANALIYHRYAKLGANRSLHVLLFLLILTLSSLGFSLSRRIHGQCRWGMALFGATSVTITAMFHCAVRRDMPEPPSEWMVPLMPWPAAASVFLNVFLMTTLKVMSFQRFGLWSFVIIVFYVCYGVHSTYSAEENEAVNAMIHHANMDIS

SEQ ID NO: 5773 - protein, 512 aa, Oryza sativa Japonica Group
MSSEVTSVPPTPTPPPVSTPPSQIQSPAAPASSRASPLRGMGTPNIASPVRKAVASVSGYLGEVGQMTRLADPRDAWLPITESRSGNAYYAAFHSLSSGIGFQALVLPVAFSLLGWTWAIICLTVAFAWQLYTLWLLVKLHEPVAGGTRYSRYMYLATTVFGEKWGKILALLPVMYLSAGTCTALIIVGGGSMKLLFNIACGEVCLARPLTTVEWYLVFVCVAALLSQLPNLNSIAGVSLVGATAAVAYCTMIWVVSVAKGRVAGVSYDPVRTTDEEDGAIGILNGLGIIAFAFRGHNLVLEIQATMPSTLKHPSHVPMWKGVKAAYVIIALCLYPVAVGGFWAYGDQIPPNGILSALYKFHSQDVSRVVLGTATLLVIVNCLTTYQIYAMPVFDNMETGYVHKKNRPCPWWMRAGFRALFGAINLLIAVALPFLSELAGLLGGISLPVTLAYPCFMWVAIMRPAKGTAMWYTNWGLGSLGMGLSFVLIVGNLWGLVEKGLHVKFFKPADFQ

SEQ ID NO: 5774 - protein, 578 aa, Oryza sativa Japonica Group
MAAKPSSSSSSTGGHHTVDIRAAQAQPEDARQSAMSGPINIRGERRPPPMQRAFSRQVSLGSGVTVLGMDKVGKNGGRGQQRALPRSGKSLGVLNHTGALGQAAAGDGAARRGDFSMFRTKSTLSKQNSLLPSRIREPDLELPPHVEGPSVGRQGGEDPLNKSVPAGRYFAALRGPELDEVRDYEDILLPKDEVWPFLLRFPVGCFGVCLGLGSQAILWGALAASPAMRFLHVTPMINVALWLLALAVLVAVSVTYALKCVFYFEAIRREYFHPVRVNFFFAPSIAAMFLTIGLPRAVAPERLHPAVWCAFVAPLFGLELKIYGQWLSGGKRRLCKVANPSSHLSVVGNFVGAILAARVGWAEAGKFLWAIGVAHYIVVFVTLYQRLPTNEALPKELHPVYSMFIATPSAASLAWAAIYGSFDAVARTFFFMALFLYMSLVVRINFFRGFRFSIAWWSYTFPMTTASLATVKYAEAEPCFTSRALALSLSLMSTTMVSLLLVSTLLHAFVWRSLFPNDLAIAITKDRQNGAFKPHGKGRKAGKRVYDIKRWAKQAPLSLVSSITKSNSADKEEEEKTE

SEQ ID NO: 5775 - protein, 613 aa, Oryza sativa Japonica Group
MAAPSQTTATTTHHRVLLPSHHHHRAVPPSLLRLPLRAARRGRLSAAAAAAAPAASTAAPSEPAAGAVPGKPTVLVAEKLGAAGLELLRGFANVDCSYGLSPEELRAKIPLCDALIVRSGTKVGRDVFEASGGRLRVVGRAGVGIDNVDLAAATEHGCLVVNAPTANTVAAAEHGIALLTAMSRNIAQADASLKAGKWQRNKYVGVSLVGKTIAILGFGKVGSEVARRAKGLGMHVIAHDPYASADRAHAIGVELVSMEDALTTADFISLHMPLTPATNKMLNDETFAKMKKGVRIINVARGGVIDEDALVRALDSGIVAQAALDVFTKEPPAPDSKLVLHENVTVTPHLGASTVEAQEGVAIEIAEAVIGALKGELAASAVNAPMVPAEVLSELAPYVVLAEKLGRLAVQLVAGGGGIKSVKVTYASARAPDDLDTRLLRAMITKGLIEPISSVFVNLVNADFTAKQRGVRITEERILLDGSPETPIDYIQVHIAHVESKFPSAISESGEITVEGKVKDGIPHLTKVGSFQVDVSLEGSLILCRQVDQPGMIGAVGSVLGEENVNVSFMSVGRIAPRKHAVMAIGVDEEPKKSTLTKIGEIPAIEEFVFLKL

SEQ ID NO: 5776 - protein, 339 aa, Oryza sativa Japonica Group
MESLCGQLEHEHEQQLHQSSSSSLLPYCFLSAPEPLPVPGFPAGCSNLEEKAAAAMAAYEYESSSCSSLDPTSMPMVYSPIVLQPQECPLSFVFDNAAAAAGDNKWVPGIQGSCPCSLGSTQDMDASWGKSRKHKRSNVGLKGLEEKKARRVVLHQHDDDVKKKAKEAAGGEPPAGYIHVRARRGQATDSHSLAERVRREKISERMKMLQSLVPGCDKVTGKALMLDEIISYVQSLQNQVEFLSMKLASLSPLMYEFGPGIDMHPDVLRQLAKMPHEMVQCMGQMGSTGISLQGLGGGPTGFAQDGSSHINMVVMQVGEQGQQQGSLHQVEMSSHCFFH

SEQ ID NO: 5777 - protein, 505 aa, Oryza sativa Japonica Group
MLRGNDTGSDLAELLWDNGAPAPLRPPPPPPFQPFTCSAAATTSPPAHDYLFIKNLMRGGGAANHHHHDDDDDDDDDVPWLHYHPVVDDDDDADADTAPLPPDYCAALLSGLSDHLPPPAAAASRVDPDPCSSSHGAVVPSTSAAAAKQARTSGGGGGGVMNFTFFSRPLQQRPSGGETASASASAAATSTVPVESTVVQAATNRLRSTPLFSDQRMAWLHPPKPSPRAAAPPPPPPLAPTTRHRLDTAAATATVAQRLPPSEARAPDAPPPAATATATTSSVCSGNGDRRQLNWRDSHNNQSAEWSASQDELDLDDELAGVHRRSAARSSKRSRTAEVHNLSERRRRDRINEKMRALQELIPNCNKIDKASMLEEAIEYLKTLQLQVQMMSMGTGMFVPPMMLPAAAAAMQHHHMQMQQMAGPMAAAAHFPHLGAAAAMGLAGFGMPAAAQFPCPMFPAAPPMSMFAPPPPPPPFPHAAATAVEQTPSPPGAADAGNAPAVKQA

SEQ ID NO: 5778 - protein, 758 aa, Oryza sativa Japonica Group
MKFDLEGLTVHFPYAAIYPEQHAYMGELKRALDARGHALLEMPTGTGKTSALISLITSYSLASPSRPLRLIYCTRTVHEMEKTLAELRLLFAHLPAAASRSLLALGLSSRKNLCVHPQASAAAARDSVDTACRRLTASWVRDRAASDPDSTPLCDFFESFDRAAAAGDLASYMPPGVYTLADLRALGRDRGICPYFLARQMVKYANVVVYSYQYLIDPKVASIVSREMQKECVVVFDEAHNIDNVCIEALSVSIRKQTLEGAERNLRRISQEIDRFKATDANRLRAEYNRLVDGLAQRGNLPISDAWLANPALPEDILKEAVPGNIRRAEHFLAVLRRLVRFLDGRLETENVENEMPVAFVASIHSQAGIDQKMLRFCYDRLHSLMLTLEITDTDEFMHIQTICDFATLIGTYTRGFSIIIEPYDERMPDIRDPVIQLSCHDASLAIQPVFERFQTVVITSGTLSPIDLYPRLLNFNPVISRSFTMSLTRDCICPMVLTRGSDQLPVSTKFDMRSDPGVVRNYGRLLLEMASAVPDGIVCFFVSYSYMDGIVNSWNEMGILQDIMQHKLVFIETPDVVETTLALDNYRKACDCGRGAIFFSVARGKVAEGIDFDRHYGRLVIMFGVPFQYTLSRILLARLEYLRETFQIKEGDFLTFDALRQAAQCVGRVIRSKADYGMMIFADKRYSRHDKRSKLPGWILSHLHDAHLNLSTDMALHIAREFLRRMAQPYDKTGSGGNKTLLTEEDLQNMAQDAMEM

SEQ ID NO: 5779 - protein, 250 aa, Oryza sativa Japonica Group
MATARLLLLLTVVAAAAGSCFCSGQEAKPPTPPPPPPYCGSVRTAVEAHNIIGWKTLPADCAKYVADYITGDRYGRDSDVVINEAVAYAESLKLSGSGKEVWVFDVDETALSTVPYQAKHGYGVQPYDHANFLQYVAGGSAPALQGTLRLYQRLLQLGIKPVFLTDRTEDQIAITTHNLLSQGYSSWEKLLLQPIGLQTSTQAFKTSERKKLVDAGYVIIGNIGDQWSDILRSPEGCRTFKYPSPMYYVA

SEQ ID NO: 5780 - protein, 265 aa, Oryza sativa Japonica Group
MATARLILLLTVAAAAAGSCCFCSAQEVIVGGVGEQLATAPPAAPAPSPPPPYCGSVRTAVEAHNIIGWKTVPADCAEYVSDYLTGERYGRDSDVVINEAIAYAESLKLSGHGKEIWVFDVDETALSTLPYQAKHGYGTKPYDHASFVQYVAGGSAPALQGTLRLYRRLLQLGIKPVFLTDRTEDQRAVTTHNLLSQGYYSWEKLLLQPVGLQTTTQAFKTGERQKLVSAGYVIVGNIGDQWSDILGSPEGYRTFKYPNPIYYVA

SEQ ID NO: 5781 - protein, 332 aa, Oryza sativa Japonica Group
MATAARLLLLLFLTAAASAWEMNIRLPMERLAYGGGEAVVAPLIHALRPLLGSGGQLAARAGVACDSWRLAVEAHNVIRWKTLRGLRRPLHARRPLPPRLTVVVDEAIAYVDSLKLAGNGKEIWVFDIDETSLSNLPYFAKHGFGTTLYDDTCFREYVVEGSGLALPETRRLYRRLLQLGVKPVFLTSRTEDERNITVTNLRRQGYSGWMKLLLKPAVHTAGELLGSVVAFKSGERQKLEDAGFTIVGNIGDQWSDILVYDSPIYIRRFKPAVHTAGELLGSVVAFKSGERQKLEDAGFTIVGNIGDQWSDILGAPEGARTFKLPDPLYYIG

SEQ ID NO: 5782 - protein, 204 aa, Oryza sativa Japonica Group
SGGRRCRPGARATSATTCSGGHYRRDSAVVIDEAIAYAESLQLSGNGKEIWVFDIDETSLSNLPYYAKHGFGATLYNDTSFREYVAEGSAPALPETRRLYRRLLQLGVKPVFLTGRTEDQRNITVTNLRRQGYSGWMELLLKPAVHAAGELQGSAVAYKSGERQKLEDAGFTILGNIGDQWSDILGTPEGARTFKLPDPMYYIG

SEQ ID NO: 5783 - protein, 362 aa, Oryza sativa Japonica Group
MGDSSGSGSGSGSVSVDVERISFGGKEHQVRTRCGSLSVAIYGDEDKPALITYPDIALNHMSCFQGLLFCPEVASLLLHNFCIYHINPQGHELGAAPIPSDVPVPSVEDLADQVADVLDFFGLGSVMCLGVTAGAYVLTLFATKYRERVIGLMLVSPLCRAPSWSEWLYNKVLLNLIYYYGTRGLVKECLLQRYFSKLLDERQGENIWRFLHSINEYALPPLILFPSQWEYFISWSSYKLHSIRRHDLTDALRKLQCRTLIFVGENSQFHEDAIHMTTKLDKRYCALVEVQGCGSLVTEEQPHAMLMPMEYFLMGYGLYRPYQMNSSPRSPLSPCCISPELLSPESMGVKLKPIKTRIAVDY

SEQ ID NO: 5784 - protein, 258 aa, Oryza sativa Japonica Group
MRPLLARLFAPTYIAMGFSSSASPPSRRLAHLTRHLLLSSGELSSSVGAPAAAARPAYLAAPKGYAAVLVCLFEDPHGGDPRVILTKRAASLSSHSGEVSLPGGKVEEGDADATATALREAKEEIGLDPALVSIVTVLEPFLSKNGLHVTPVIGILSDKALFKPVLNESEVADIFDAPLEMFLKDDNRKTQESNWMGMNIPVQSFEYQSEDKTFVIWGLTAHILTRAAAVVLPREPSFVEFRPRYVNSPSGDTNETKR

SEQ ID NO: 5785 - protein, 487 aa, Oryza sativa Japonica Group
MASSTGGLDHGFTFTPPPFITSFTELLSGGGGDLLGAGGEERSPRGFSRGGARVGGGVPKFKSAQPPSLPLSPPPVSPSSYFAIPPGLSPTELLDSPVLLSSSHILASPTTGAIPAQRYDWKASADLIASQQDDSRGDFSFHTNSDAMAAQPASFPSFKEQEQQVVESSKNGAAAASSNKSGGGGNNKLEDGYNWRKYGQKQVKGSENPRSYYKCTYNGCSMKKKVERSLADGRITQIVYKGAHNHPKPLSTRRNASSCATAAACADDLAAPGAGADQYSAATPENSSVTFGDDEADNASHRSEGDEPEAKRWKEDADNEGSSGGMGGGAGGKPVREPRLVVQTLSDIDILDDGFRWRKYGQKVVKGNPNPRSYYKCTTVGCPVRKHVERASHDTRAVITTYEGKHNHDVPVGRGGGGGRAPAPAPPTSGAIRPSAVAAAQQGPYTLEMLPNPAGLYGGYGAGAGGAAFPRTKDERRDDLFVESLLC

SEQ ID NO: 5786 - protein, 204 aa, Oryza sativa Japonica Group
MSAAVAASSGAPAADVEKGAAAADANVDGGGAPAAAAASGEGVVSAVVRRWRRQDLLEKSGSALRVAAWAFSLLAFVVMGANDHGDWRQFEHYEEYRYVVAIGVLAFIYTTLQLVRHGVRLTGGQDLQGKVAVLVDFAGDQVTAYLLMSAVSAAIPITNRMREGADNVFTDSSAASISMAFFAFLCLALSALVSGFKLAKQTYI

SEQ ID NO: 5787 - protein, 496 aa, Oryza sativa Japonica Group
MGENGVVASKLCYPAAAMEVVAAELGHTAGSKLYDDDGRLKRTGTMWTASAHIITAVIGSGVLSLGWAIAQLGWVAGPAVMLLFSFVTYYTSALLADCYRSGDESTGKRNYTYMDAVNANLSGIKVQVCGFLQYANIVGVAIGYTIAASISMLAIKRANCFHVEGHGDPCNISSTPYMIIFGVAEIFFSQIPDFDQISWLSILAAVMSFTYSTIGLGLGVVQVVANGGVKGSLTGISIGVVTPMDKVWRSLQAFGDIAFAYSYSLILIEIQDTIRAPPPSESRVMRRATVVSVAVTTLFYMLCGCTGYAAFGDAAPGNLLTGFGFYEPFWLLDVANAAIVVHLVGAYQVYCQPLFAFVEKWAQQRWPKSWYITKDIDVPLSLSGGGGGGGRCYKLNLFRLTWRSAFVVATTVVSMLLPFFNDVVGFLGAVGFWPLTVYFPVEMYIVQKRIPRWSTRWVCLQLLSLACLAITVASAAGSIAGILSDLKVYKPFATTY

SEQ ID NO: 5788 - protein, 687 aa, Oryza sativa Japonica Group
MARPRRASTATTMQLGLLLAALLLFTSSLAGSVAAAAPPPPAGAKGGGAKSGGGGGTVIGIDLGTTYSCVGVYRNDRVEIIANDQGNRITPSWVAFTDGGERLIGEAAKNQAAANPERTIYDAKRLIGRQFSDAEVQRDMKLLPFAVVDRNGKPHVRVEVKDGDVRVFSPEEVSAMVLTRMKETAEAYLGEKVTRAVVTVPAYFNDAQRQATKDAGVIAGLTVDRIINEPTAAAIAYGIDKKGAEKNVLVFDLGGGTFDVSILAIDNGVFEVLATNGDTHLGGEDFDQRLMDHFVKVIRRKHGRDIAGDARALGKLRRECERAKRALSNQHQVRVEIESLFDGVDFSEPLSRARFEELNGDLFKKTMVPVRKAMADAGLGKGDIDEIVLVGGSTRIPKVQQLLKDYFGGKEPNRGVNPDEAVAYGAAVQASIISGHVDENTESMILLDVAPLTLGLETAGGVMTKLIPRNTVVPTKKTQVFTTYKDRQTTVTIQVFEGERSMTRDNRLLGKFDLTGIAPAPRGAPQIAVTFEVDANGILSVLAADKATGRSEKITISGDDRKISQEEIDRMVREAEEFADEDRRHREQVDARNSLEAYVYNVKSTLGGKMADAMEGEEKEKVEEAVREAHEWLDGNPDAGKEEYEEKLRELEDVCNPVMSAVYQRSGGGGGAPEDGNVDDEDDHDEL

SEQ ID NO: 5789 - protein, 165 aa, Oryza sativa Japonica Group
MAGGGRADDERRIGVAMDYSASSKRALDWAIANLLRRGDHLVVLHVLHHGGEEAKHALWGKSGSPLIPLSEFRDPTAMQQYGVHCDAEVLDMLDTAARQLELTVVAKLYWGDAREKLCDAVEEQKIDTLVMGSRGLGSIQRILLGSVTNYVLSNASCPVTVVKGK

SEQ ID NO: 5790 - protein, 605 aa, Oryza sativa Japonica Group
MELALVGNPSNGVAKPSCNSVGSLPVVSSNAVINPPVTSAAGATLGRHLARRLVQIGATDVFAVPGDFNLTLLDYLIAEPGLKLIGCCNELNAGYAADGYARARGVGACAVTFTVGGLSVLNAIAGAYSENLPVICIVGGPNSNDYGTNRILHHTIGLPDFSQELRCFQTITCYQAVINNLDDAHEQIDTAIATALRESKPVYISVGCNLAGLSHPTFSREPVPLFISPRLSNKANLEYAVEAAADFLNKAVKPVMVGGPKIRVAKAKKAFAGIAESSGYPFAVMPSAKGLVPEHHPRFIGTYWGAVSTTFCAEIVESADAYLFAGPIFNDYSSVGYSLLLKREKAVIVQPDRVVVGNGPAFGCILMTEFLDALAKRLDRNTTAYDNYRRIFIPDREPPNGQPDEPLRVNILFKHIKEMLSGDTAVIAETGDSWFNCQKLRLPEGCGYEFQMQYGSIGWSVGATLGYAQAAKDKRVISCIGDGSFQMTAQDVSTMLRCGQKSIIFLINNGGYTIEVEIHDGPYNVIKNWDYTGLIDAIHNSDGNCWTKKVRTEEELIEAIATATGAKKDCLCFIEIIVHKDDTSKELLEWGSRVSAANSRPPNPQ

SEQ ID NO: 5791 - protein, 367 aa, Oryza sativa Japonica Group
MELTESKCDGGQEVSLLDAQLELYWNTFAVIKSMALKSALDLRIADAVHLHGGAATLAEIASEVALHPSKIPCLRRLMRALTVSGVFAAAVKPGDGGGGEPVYELTPSSRLLVGSSNLSGIMSMILHPTLVVPFLGVGEWLRRDREPPEEDPYCIFKQAHGRSLWELAGRDAAFDALINDGMVSDSRVIMDYVVREHGEVFRGIASLVDLAGGLGAAAQVISKAFPEVRCSVMDLGHVVAKAPAGTDVEYIAGDMFESVPPADAVFLKWVLHDWGDDDCIKILKNCKKAIPPRDKGGKVIIMDIVVGAGPSDQKHREVQALFDMYIMFVNGIERDEQEWKKVFMGAGFSGYKIMPVLGFRSMIEVYP

SEQ ID NO: 5792 - protein, 370 aa, Oryza sativa Japonica Group
MGSLELSKNKCNGGQEVSLLDAQLELYSNTFAVIKSMALKSALDLGIADAVHRHGGAATLAEIASEVALHPSKIPCLRRLMRALTVSGVFAAAVKPGDGGGGEPVYELTPSSRLLVGSSNLSGIMSMILHPTLVVPFLGVGEWLRRDREPPEEDPYCIFKQAHGRSLWELAGRDAAFDALINDGMVSDSRVIMDYVVREHGEVFRGIASLVDLAGGLGAAAQVISKAFPEVRCSVMDLGHVVAKAPAGTDVEYIAGDMFESVPPADAVFLKWVLHDWGDNDCIKILKNCKKSITPRDKGGKVIIMDIVVGAGPSDQKHREVQALFDMYIMLVNGIERDEQEWKKVFVEAGFSGYKIMPILGFRSMIEVYP

SEQ ID NO: 5793 - protein, 947 aa, Oryza sativa Japonica Group
MERSTPGTMAARSWLLLLCFVAVATAGVLQARAQPDSNGFISVDCGLPGKTGFVDDKTKISYAADDGFTDGGACHNISAEYITPGLAKRYHTLRSFPDGKRNCYTLRSLVAGLKYLFRTTFFYGNYDGLNKLPVFDLYVGVNYWTMVNITGPGDAVIVEAIVVVPDDFVQVCLVNTGAGTPFISGLDLRPLKNTLYPQSNATQGLVLLGRLNFGPTDYTDVIRYPDDPHDRIWFPWVDSTKWSQISSTKKVQDLDNDMYETPTAVMQTAITPRNASRNIEFSWDPVPLPNDPTPGYIAIFHFSELQLLPGNAVREFYINLNGKPWSLTAFKPEYLYNDATFNRNPFLRYPQYNISINATANSTLPPLINAVEVFSVIPTATIGTDPEDVAAITAIKEKYQVVKNWMGDPCVPKMLAWDKLTCSYAISNPARIIGLNLSSSGLSGEVSSYFGNLKAIQNLDLSNNKLTGPIPDALSQLPSLTFLDLTGNQLSGSIPSGLLKRIQDGSLNLRYGNNPNLCTNGDSCQPAKKKSKLAIYIVIPIVIVLVVVIISVAVLLCCLLRRKKQAMSNSVKPQNETVSNVSSNGGYGHSSSLQLKNRRFTYNELEKITNNFQRVLGRGGFGYVYDGFLEDGTQVAVKLRSESSNQGAKEFLAEAQILTRIHHKNLVSMIGYCKDGEYMALVYEYMSEGTLQEHIAGKNNNRIYLTWRERLRIALESAQGLEYLHKACNPPLIHRDVKATNILLNTRLEAKIADFGLSKTFNHVNDTHVSTNTLVGTPGYVDPEYQATMQPTTKSDVYSFGVVLLELITGKPSILREPGPISIIQWARQRLARGNIEGVVDAHMHGDHDVNGVWKAADIALKCTAQTSTQRPTMTDVVAQLQECLELEDRRCGMEDTYNNFYAGNNNDPNSSYNMYNTDQSTDVSQNNTMEHNFERVPTMATGPVAR

SEQ ID NO: 5794 - protein, 704 aa, Oryza sativa Japonica Group
MARYPDDPHDRIWMPWVSPSYWVEVSTTRPVQHTDEDVFDAPTKVMQTAIAPLNASSNIEFAWVPYTQPKDPAPGYITVMHFSELQLRSSNATRQFYINLNGNMVFSQGYTPAYLYADAIFNSNPFLRYPQYNISINATANSTLPPIINAIEVFSVFSTATVGTDGQDASAMMVIKEKYQVKKNWMGDPCVPKTLAWDKLTCSYDSSKPARITDINLSSGGLSGEISSAFANLKALQNLDLSNNNLTGSIPDALSQLPSLAVLDLTGNQLNGSIPSGLLKRIQDGTLNIKYGNNPNLCTNDNSCQPAKHKSKLAIYVAVPVVLVLVIVSVTILLFCLLGRKKKQGSMNTSVKPQNETASYVPTNGSHGHGSSMQLENRRFTYNDLEKITNNFQRVLGEGGFGKVYDGFLEDGTQVAVKLRSESSNQGDKEFLAEAQILTRIHHKSLVSMIGYCKDGKYMALVYEYMSEGTLREHISGKRNNGRYLTWRERLRIALESAQGLEYLHKWCNPPLIHRDVKATNILLNAKLEAKIADFGLSKTFNLENGTHVSTNTLVGTPGYVDPEYQATMQPTTKSDVYSFGVVLLELVTGKPAVLRDPEPISIIHWAQQRLAQGNIEGVVDARMHGDHDVNGVWKATDIALKCTTQVSAQRPTMTDVVAQLQECLELEEGRCAISNANNNFYTDNNSNSNSSYDMYATDHSIDR

SEQ ID NO: 5795 - protein, 954 aa, Oryza sativa Japonica Group
MHVRTTHVAEWIDQQWRLGGGCCCCSASPSPASFAARAARLTRPVSFKLRSPTRRHFGLVYMLFMHREYRAGFISIDCGLPEKTSYVDDATKLKFTSDDAFTDAGTIHNVSSEFATPTTTTDRSLYNVRSFPAGARNCYTVPSVVPGSKYLVRAKFLYGNYDGLNKPPVFDLHLGVNFWQTVTVPSADWLGNAEVIAVVPDDFLQVCLVNTGAGTPFISGLDLRPLPSSLYAPANATQGLVLLDRRNFGASGSTVIRYPDDTYDRVWWPWSNPPAEWSDISTADKVQNTIAPVFDVPSVVMQTAITTRNSSIPIQFSWDTKPNHVYPDPGSIFTLYVTELELLAGNAVRQFNVTINGVIWTKAPYKPVYLSTDAMYNGDRPYRGITRYNFSLNAAGSSTLPPILNAAEAFSVISTADLATDAQDVSAITAIKAKYQVNKNWTGDPCAPKTLAWDGLTCSYAISTPPRITGVNMSYAGLSGDISSYFANLKEIKNLDLSHNNLTGSIPNVISQLQFLAVLDLTGNQLNGSIPSSLLKRSQDGSLTLRYGNNPNLCSNSSSCQLPQKKSNSMLAVYVAVPVVVIGAVAVFLIFFIRKKKNKSKGAVKPQILGNGVQSHSQNGSGGSLLELHNRQFTYKDLAVITNNFQRVLGKGGFGPVYDGFLKDGTHVAVKLRDESSSQGYSEFLTEAQTLTKIHHKNLVALIGYCKDEIHLALVYEHMSEGTLEDKLRGKDRKGRSLTWRERLRIVLESAQGLEYLHKACSPRFVHRDVKSSNILLNANLEAKVADFGLTTAFKCDGDTHVSTVRVVGTYGYLAPEYATALQVSEKIDVYSFGVVLLEVITGQPPIIKLPEPTTIIQWTRQRLARGNIEGVVDVNMPDDRYDINCIWKVADVALKCTAHAPGQRPTMTDVVTQLKECLELEETSFKGDTSSSYMSGSSIDPNSSYNTYTTEMS

SEQ ID NO: 5796 - protein, 763 aa, Oryza sativa Japonica Group
MASSHQEDREEEEEHSHGDDEITAPFLRPSTSRGSPELEEEENSPIEQVALTVPVSDEPETPVLTFRMWVLGTASCAVLSFLNQFFWYRKEPLTITAISAQIAVVPLGRLMAAALPERAFFRGRPWEFTLNPGPFNVKEHVLITIFANSGAGTVYAIHVITAVRVFYGKHISFFVSLLVVLTTQVVDDQVLGFGWAGIFRRYLVEPAAMWWPSNLVQVSLFRALHEKEARSKGGLTRNQFFLVAFICSFAYYIFPGYLFQMLTSLSWICWVFPHSVLAQQLGSGLSGLGIGAIGLDWSTVSSYLGSPLASPWFATANVAAGFFFIMYIITPIAYWFNFYKAQNFPIFSDGLFTSTGQKYNISSIVDSHFHFDTKAYEKNGPLYLSTFFAVTYGVGFASLTATIVHVLLFHGSEIWQLSKSAFQEKRMDIHTKLMRRYKQVPEWWFVCILIANIAVTIFACEYYIEQLQLPWWGVLLACAIAFFFTLPIGIITATTNQTPGLNIITEYIMGYLYPGRPVANMCFKVYGYISMSQALTFLQDFKLGHYMKIPPRTMFMAQVVGTLIAAFVYIGTAWWLMETIPNICNTELLPSDSPWTCPGDHVFYDASVIWGLISPRRIFGDLGTYSAVNWFFLGGAIAPVLVWFAHKAFPNQNWILLINMPVLIGATGQMPPATAVNYTTWILVGFLSGYVVYRYRRDWWERHNYLLSGALDAGLAFMAVLIYLCLGLENISLNWWGNDLDGCPLASCPTAKGVVVDGCPVYT

SEQ ID NO: 5797 - protein, 760 aa, Oryza sativa Japonica Group
MASSHHQEVQEQGHGDGEEEEQDNSQITSPLLRSSMRLGSPEENSPVEQVALTVPVGDDPATPVLTFRIWVLGTASCVVLSFLNTFFWYRKEPLTVTAISAQIAVVPLGRLMAAALPERVFFRGRPWEFTLNPGPFNVKEHVLITIFANAGAGSVFAINVITAVRVFYGKRISFFVSLLVVLTSQVLGFGWAGIFRRYLVEPAAMWWPSNLVQVSLFRALHEKERRSKGGMTRTQFFLVAFVCSFAYYIFPGYLFQMLTSLSWICWIFPKSVLAQQLGSGLHGLGIGAIGLDWSSISSYLGSPLASPWFATANIAAGFFIYIYVITPIAYWINLYKAQNFPIFSDGLFTVTGQKYNISTIIDSQFHFDTKAYEKNGPLYISTFFSISYGLGFACLTATVVHVLLFHGSEIWQLSRSAFQDKKMDIHTKLMKRYKQVPEWWFISILIASVAITMFTCEYYIEQLQLPWWGVLLACALAIFFTLPIGIVTATTNQTPGLNIITEYIMGYLYPGRPVANMCFKVYGYIGPQQALAFLQDFKLGHYMKIPPRTMFMAQVVGTLIAAFVYLGTAWWLMDTIPNICNTELLPPGSPWTCPYDHLFYDASVIWGLIGPRRIFGDLGTYSAVNWFFLGGAIAPLLVWFAHKAFPGQKWILLVNMPVLIAGISQMPPATSVNYTAWIFVAFLSGYVVYKYRRDWWERHNYLLSGALDAGLAFMAVLLYLCLGLEKISLNWWGNDLDGCPLASCPIAEGITVQGCPVASA

SEQ ID NO: 5798 - protein, 179 aa, Oryza sativa Japonica Group
MAGSGRDRDPLVVGRVVGDVLDAFVRSTNLKVTYGSKTVSNGCELKPSMVTHQPRVEVGGNDMRTFYTLVMVDPDAPSPSDPNLREYLHWLVTDIPGTTAASFGQEVMCYESPRPTMGIHRLVFVLFQQLGRQTVYAPGWRQNFNTKDFAELYNLGSPVAAVYFNCQREAGSGGRRVYP

SEQ ID NO: 5799 - protein, 486 aa, Oryza sativa Japonica Group
MGWLTKFFRGSTHKISEGQYHSKPAEETIWNGPSNSAVVTDVPSEFDNEDIARAISLSLLEEEQRKAKAIEKDMHLEEDEQLARAIQESLNVESPPRARENGNANGGNMYQPLPFMFSSGFRTCAGCHSEIGHGRFLSCMGAVWHPECFRCHACNQPIYDYEFSMSGNHPYHKTCYKERFHPKCDVCKQFIPTNMNGLIEYRAHPFWLQKYCPSHEVDGTPRCCSCERMEPRESRYVLLDDGRKLCLECLDSAVMDTSECQPLYLEIQEFYEGLNMKVEQQVPLLLVERQALNEAMEGEKTGHHHLPETRGLCLSEEQTVSTILRRPRMAGNKVMEMITEPYRLTRRCEVTAILILYGLPRLLTGSILAHEMMHAWLRLKGYRTLSPDVEEGICQVLAHMWIESEIIAGSGSNGASTSSSSSASTSSKKGGRSQFERKLGDFFKHQIESDTSMAYGDGFRAGNRAVLQYGLKRTLEHIRLTGTFPF

SEQ ID NO: 5800 - protein, 507 aa, Oryza sativa Japonica Group
MAHTSSQKHGNDDVDTGAEAAMDQLAGRSSLSPAREKTRRRPEKSGTVWTATAHIVALLIGSSVLAVAWTFAQLGWVAGPAVVVALSVVTYYSSALLADCYRDDDPLHLGGGAVHGEYIAAVRSYLGPKSVTFCGIIQYGVLWAAMVGYTITSSSSMSAVRRVNRFHRNWLAAGDGDGGGGGGGATGVRYMVVFGAFQLLLSQLPSLENVAWLSVIAVATSFGYSSICLGLCAAKWASHRGGVRGTLAGAAAGSPGEKVFNVLLAVGNIAISYIYSPVLFEIQDTVRTPPSESKTMKRASLYGLAMSAVFYLVLGASGYAAFGDDAPSNILTGAAFHEPFWLVDVANACVVVHFLGAYQVIAQPVFARLEAYVGGRWPESRLVTASYELRLRVPAWTSAPPTAVTLSPARMALRAAVIVATTAVAAMMPFFNAVLGFIAALGFWPLAVYLPVSMHIARVKIRRGEARWWALQGASAALLVVAVGMGVASVRDMVQRLNEAAPFKTTG

SEQ ID NO: 5801 - protein, 289 aa, Oryza sativa Japonica Group
MQEFHPVPGLAGRLFGGAAAAAAVAAVEEVRCPRCDSSNTKFCYYNNYNLSQPRHFCKACRRYWTKGGLLRNVPVGGGCRKPKRPAPPPSSSFTGGGGGGGGCGHRDSKSARSAGGGGDGSGSTASATATPAAAPASSNTLSAAVSQPSSVDALSPPPAPMFADQATAFASLFAPPPPPPSQALPAFASFTAQPKAEEDVADAPALAATEQHRSSSAASFAAHSISPPFAAARSSDGPAAAAAAAAADWAPPTAVLDAGMFDLAGAIGGDTSYWNAASWTDHDGTIYLP

SEQ ID NO: 5802 - protein, 407 aa, Oryza sativa Japonica Group
MGALCDFCGEQRSMVYCRSDAASLCLSCDRNVHSANALSRRHTRTLLCDRCASQPAMVRCLVENASLCQNCDWNGHSAGSSAAGHKRQTINCYSGCPSSSELSKIWTFVSDIPNVAPEPNCEQGISMMSISDSGVSNQDNAAGDSSLLDIASATLMSDLGTAGKPKSLIGSSSEAGVNLLPLATDQMAGSVDSTSAKVPYTADQDMFSKDSIYEDFCVDDVDLSFENYEELFGTSHIQTEQLFDDAGIDSYFESKEIPSGNSDEPKLMQPVTSNAVSADSGMSIPGAKGDSSLCIPVRQARSSISLSFSGLTGESSAGDYQDCGVSPVLLMGEPPWHPPGPEGSFAGATRDDAITRYKEKKKRRKFDKKIRYASRKARADVRKRVKGRFVKAGEAYDYDPLCETRSY

SEQ ID NO: 5803 - protein, 376 aa, Oryza sativa Japonica Group
MAMWRAAAGHLLGRALGSRAAHTSAGSKKIVGVFYKGGEYADKNPNFVGCVEGALGIREWLESKGHHYIVTDDKEGLNSELEKHIEDMHVLITTPFHPAYVSAERIKKAKNLELLLTAGIGSDHIDLPAAAAAGLTVAEVTGSNTVSVAEDELMRILILLRNFLPGYQQVVHGEWNVAGIAYRAYDLEGKTVGTVGAGRIGRLLLQRLKPFNCNLLYHDRLKIDPELEKEIGAKYEEDLDAMLPKCDVIVINTPLTEKTRGMFNKERIAKMKKGVIIVNNARGAIMDTQAVADACSSGQVAGYGGDVWFPQPAPKDHPWRYMPNHAMTPHISGTTIDAQLRYAAGVKDMLDRYFKGEDFPVQNYIVKEGQLASQYQ

SEQ ID NO: 5804 - protein, 378 aa, Oryza sativa Japonica Group
MAMWRAPSAAGQLLGRALASTAAQTSAGSKKVVGVFYKGGEYADKNPNFVGCVDSALGIRGWLESKGHRYIVTDDKEGINCELEKHIEDAHVLITTPFHPAYITAERIKKAKNLELLLTAGVGSDHIDLPAAAAAGLTVAEITGSNTVSVAEDQLMRILLLLRNFLPGHHQIVNGEWNVAGIAHRTYDLEGKTVGTVGAGRIGRLLLQRLKPFNCNLMYHDRVKIDPELEKEIGAKYEEDLDAMLPKCDVVVINMPLTEKTRGMFNKERIAKMKKGVTIVNNARGAIMDTQAVADACASGHVAGYGGDVWFPQPAPKDHPWRYMPNHAMTPHCSGTTIDGQLRYAAGVKDMLDRYFKGEDFPAQNYIVKAGQLASQYQ

SEQ ID NO: 5805 - protein, 327 aa, Oryza sativa Japonica Group
MGFLFARSSGYSFVALALLACVLLAPCQAAKAGLSIKFYAKTCPGVDTIVRSVVAQAVAKEPRMGASIIRLFFHDCFVNGCDASILLDDTLTFTGEKNAGANINSVRGYEVIDAIKSQVEAACKGVVSCADIVALASRDAVNLLGGPTWNVQLGRKDSRTASGTAANANLPGPASSGASLVAAFAGKGLSAREMTALSGAHTVGRARCLMFRGRIYGEANINATFAAALRQTCPQSGGGDGNLAPFDDQTPDAFDNAYFKNLVAQRGLLHSDQELFNGGSQDALVRKYAGNAGMFAGDFAKAMVKMGGLMPAAGTPTEVRLNCRKVN

SEQ ID NO: 5806 - protein, 324 aa, Oryza sativa Japonica Group
MAGVVITGRALVAAVAVVVAVLLGGAAEAQQLSPNFYSRTCPNLATIVRSGMASAVRTEPRMGASILRLFFHDCFVNGCDGSILLDDTSTFTGEKSAGPNANSARGFEVIDAIKTQVEASCKATVSCADILALAARDGVNLLGGPTWSVALGRKDSRTASQSAANSNLPGPGSSLATLISMFGNQGLSARDMTALSGAHTIGRAQCQFFRSRIYTERNINASFASLRQQTCPRSGGDANLAPFDVQTPDAFDNAYYQNLVSQRGLLHSDQELFNGGSQDGLVRQYSTNPSQFSSDFVSAMVKMGNLLPSSGTATEVRLNCRKVN

SEQ ID NO: 5807 - protein, 173 aa, Oryza sativa Japonica Group
MANDSLTRSHIVGDVLDQFSNSVPLTVMYDGRPVFNGKEFRSSAVSMKPRVEIGGDDFRFAYTLVMVDPDAPNPSNPTLREYLHWMVTDIPSSTDDSFGREIVTYESPSPTMGIHRIVMVLYQQLGRGTVFAPQVRQNFNLRSFARRFNLGKPVAAMYFNCQRPTGTGGRRPT

SEQ ID NO: 5808 - protein, 318 aa, Oryza sativa Japonica Group
SLAWAMAQLGWVAGPITLLLFAAITFYTCGLLSDCYRVGDPATGKRNYTYTDAVKSYLGGWHVWFCGFCQYVNMFGTGIGYTITASISAAAINKSNCYHWRGHGTDCSQNTSAYIIGFGVLQALFCQLPNFHQLWWLSIIAAVMSFSYAAIAVGLSLAQTIMDPLGRTTLTGTVVGVDVDATQKVWLTFQALGNVAFAYSYAIILIEIQDTLRSPPPENATMRRATAAGISTTTGFYLLCGCLGYSAFGNAAPGNILTGFGFYEPYWLVDVANACIVVHLVGGFQVFCQPPAPPPSRASSTRSRPTCPSRPGPDSTSP

SEQ ID NO: 5809 - protein, 565 aa, Oryza sativa Japonica Group
MSTSSNPSYHQLGLDAISCCFVAGGGGAEAAAPFFGFGFGDVDGEFLVASPVAAVGDELACAVPLRRPQGSVSEEEVNAAAVAAAAAGGAESCSTVHSVLGSVEFGCGTSSGVTIAQASRMGRLAGEAPCGDAGGGGWIYGGSGIAPLHGAYYLSGFSSGAGAGFLSPFAASSVAAAAPAASELSLRLGATKCSSPSSMANASSEVSCSGLTHVSSGGGLGYHQAAAAGAGAALFHPTHGDDAAAAAAGELRQAYHSRAPPHFSQVVSRSAVLAHVAQELLNGFVACLLQDVAADAASGVDGGEASQALSSGFSARITTAPTEDASPGSGGARWAAEAQRLRKLLQLFLVEHLRNRFLVRTNGDEMQVDEKCNQCVEEMQSTAARFNSMVRSTGGGGGGLTAAFAGRAVAAAYRRVRRRVMGQLVAAATARSSSSAAAAALEEKERSWESSFIQKHWAMQQLRRGDQQSWRPQRGLPEKSVAVLKAWMFENFLRPYPKDSEKDMLAARSGLSRSQVSNWFINARVRLWKPMIEDMYEELKKTSGGSDGAAEIEHLSSKDVLSLES

SEQ ID NO: 5810 - protein, 348 aa, Oryza sativa Japonica Group
MGDSGGSVVSVDVERISFGGKEHHIQTNHGSVSVAVYGDHDKPALVTYPDIALNHMSCFQGLLFCPEASSLLLHNFCIYHISPPGHELGAAPVSPSSPVASVDELADQVSDVLDFFGLGPVMCLGVTAGAYILTLFATKYRERVLGLILVSPLCRTPSWTEWFHNKVMSNLLYYYGMCNMVKDCLLQRYFSKGVQGCSAVPESDIVQASRSFLDQRQSMNVWRFIHTINERHDLTESLKELQCRTLIFVGQNSQFHAEAVHMTSKLDERYSALVEVQGCGSVVTEEQPHAMLMPLEYFLMGYGLYRPSQISCSPRSPLNPFCISPELLSPESMGVKLKPIKTRANLEV

SEQ ID NO: 5811 - protein, 176 aa, Oryza sativa Japonica Group
MTIKRKDDGQVVKQSVKAVGGGLLERVDSDDEEIVGRVPEFGLALPGTSTSGRGSVRVAGDAAATAAGTSSSSPAAQAGVAGSSSSGRRRGRSPADKEHRRLKRLLRNRVSAQQARERKKAYMSELEARVKDLERSNSELEERLSTLQNENQMLRQVLKNTTANRRGPDSSAGGDS

SEQ ID NO: 5812 - protein, 452 aa, Oryza sativa Japonica Group
MGRRSSASSAAAGEPLLPAAASAKGGGGGGGRASMLQRCVSRADDELQWFRSCLRWVCMDHSGPWGAALSWLLFLLLAVAVPAAAHFLLAFRASRRPFSAVVQVSLSAASAAGFLCLSSSFRRIGLRRLLYLDKLRTKSDRVRLNYTARLSFSFRLLASLVAPCFAAEAAYKVWWYATSGDRVPFFGNDVLSNAVACSVEMAAWMYRSAIYLLTCVLFRLICHLQGLRLEDFAGTLLVEVEEGRAGVERVLREHLDIRKQLKVISHRFRKFIVASLLIATASQFASLLLTTRHDSVDDLLNTSELALCSVVLMSGLIIILSSAAKITHQAQALTGQTTKWHACCTIEPVPDEEAEPGSNHSSMLEVEPVSDSDGESSEETGDEDLLENTKIMLPQAHVISFQKRQALVTYLENNRAGITVFGFTLDRSYLHTIFMLEWTLFLWLLGKTIGFS

SEQ ID NO: 5813 - protein, 629 aa, Oryza sativa Japonica Group
MALAPPLCHLLAAPPPSTSAAADAAHDHAGALAPHRRASPLRRRGRLFLACRVPAAAPSARGVAAEAAAGRPTVLVTEKLGDAGLELLRRFANVDCAYELTAEELRAKVSLVDALVVRSATRVTREVFEAARGRLRVVGRAGVGIDNVDLQAATEAGCLVVNAPTANTVAAAEHAIALLAAMARNVAQADASLKAGKWQRNKYVGVSLVGKTLAIMGFGKVGSEVARRAKGLGMDIISHDPYAPVDRARAIGVDLVSFDEAISTADFISLHMPLTPSTAKLFDDETFANMKKGVRIINVARGGVVDEDALLRALDNGTVSQCVLIKGCFSLFPDCFEAALDVFTEEPPPKDSKLVHHEHVTVTPHLGASTSEAQEGVALEIAEAVLGALKGELAATAVNAPMVPAEVLSELSPYVILAEKLGRLVVQLVAGGSGIKGVKIGYSSSRDPDDLDTRVLRAMVTKGIIEPISSAFVNIVNADYVAKQRGLRISEERILLDGSPEIPIDSIQVHLANVESKFAGALSDEGDIRVEGEVKDGKPHLTLVGPFSVDVSLEGNLILCRQVDQPGIIGKVGSILGKMNVNVNFMSVGRTAPGKQAIMAIGVDEEPEKEALKLIGDIPSVEEFVFIKL

SEQ ID NO: 5814 - protein, 188 aa, Oryza sativa Japonica Group
MRKSKQPQPQPSPEIRYRGVRKRPSGRYAAEIRDPAKKTPIWLGTFDSAEVAARAYDDAARSLRGPTARTNFPLAAPSAPPPRPPAAAAAAATSSHSSTVESWSGGAPRAAASALARSAAPMEATQEEDCHSYCGSSSSVLCEDGSDDAAASRTPLPFDLNMPPPEEELDMAAVADQMGIRYDTLLRL

SEQ ID NO: 5815 - protein, 555 aa, Oryza sativa Japonica Group
MGAITSAELNFLIFRYLQESGFIHAAFTLGYEAGIHKGGIDGNLVPPGALITIVQKGLQYIELEANTDENDEDLAKDFALLEPLEIITKNVEELQQIVKKRKREKTQSDRDKDKGKEKERMEEHERRPGGERERERHDQEKELEKEKDRAERDRDQDKEKEKLHTERIDKVKAEEDSLAGGGPTPMDVSTTAHEISSADVTVLEGHSSEVFACAWSPAGSLLASGSGDSTARIWTIPDGPCGSITQSSPPGVHVLKHFKGRTNEKSKDVTTLDWNGEGTLLATGSYDGQARIWNSDGELKQTLFKHKGPIFSLKWNKKGDFLLSGSVDKTAIVWDTKTWECKQQFEFHSAPTLDVDWRNNNSFATCSTDNMIYVCKIGDQRPVKSFSGHQSEVNAIKWDPTGSLLASCSDDWTAKIWSMKQDKCVYDFKEHTKEIYTIRWSPTGPGTNNPNQQLLLASASFDSTIKLWEVEQGRLLYSLAGHRQPVYSVAFSPGGEYLASGSLDQCLHIWSVKEGRILKTYRGSGGIFEVCWNKEGSKIAACFSNNTVCLMDFRM

SEQ ID NO: 5816 - protein, 239 aa, Oryza sativa Japonica Group
MAEHFSHAGMYIGYTADAAASSSSSSSSSSSSSSEMLRFDTGWPDETPAPSSVAGRRRSAGGDHRQGRGQTEAAAAFIGVRRRPWGRFAAEIRDSTRNGARVWIGTFDSAEAAAMAYDQAALSARGAAAALNFPVERVRESLHALSLGAAGGSPVLALKRRHSKRKRRKKAELLAAAAATAATANATPQTRRISKSTELTTATTDEQKRFVVELEDLGAEYLEELLWLSEINGGSDPAD

SEQ ID NO: 5817 - protein, 75 aa, Oryza sativa Japonica Group
MASEWSKEENKLFEQAIAYYGEGAPDLWHKVSRAMGGTKTADEVRLHFEILVDDIKLIEARRVPFPKYNTQGAWN

SEQ ID NO: 5818 - protein, 368 aa, Oryza sativa Japonica Group
MGRAPCCEKSGLKKGPWTPEEDEKLIAYIKEHGQGNWRTLPKNAGLSRCGKSCRLRWTNYLRPDIKRGRFSFEEEEAIIQLHSILGNKWSAIAARLPGRTDNEIKNYWNTHIRKRLLRMGIDPVTHAPRLDLLDLTSLLKPAAAAAYYPTQADLDTLRALEPLAGYPDLLRLASAILPAATTTGAAAAAAAEQAQLLLPWLLQAQMAQQQQQVTPPPPPPPQAAATEQFLQATSTACHQMPGLVHASPTQQLAQQPQDHMAAATCHRRGAVQHPSYDNQLDYVPALMQMASDASNLQQWSSTVSSSNNHNVNSGVSTPSSSPAAAGQINSSSTTTTTTYGLNASGDVDDAGLLINMHLSELLDVSDYM

SEQ ID NO: 5819 - protein, 342 aa, Oryza sativa Japonica Group
MCGGSILGDLHLPVRRTVNAGDLWGDAGKGRDGGDGLKKRKGSSWDFDVDCDDDDDDDFEADFEEFEDDYGDDDDVGFGDDDQESDMNGLKLAGFSTTKLGLGGSRKRKTRYRGIRQRPWGKWAAEIRDPRKGVRVWLGTFGTAEEAAMAYDVEARRIRGKKAKVNFPDAAAAAPKRPRRSSAKHSPQQQKARSSSSSPASLNASDAVSKSNNNRVSSAGSSTDATAAAIAIDDGVKLELLSETDPSPPMAAAAAAWLDAFELNDLDGSRCKDNAFDHQIHKVEAAVADEFAFYDDPSYMQLGYQLDQGNSYENIDALFGGEAVNIGGLWSFDDMPMEFRAY

SEQ ID NO: 5820 - protein, 1166 aa, Oryza sativa Japonica Group
LRPARYWRTSDDFVYVASEVGVIPMDESKVVMKGRLGPGMMITVDLQTGQVLENTEVKKSVASANPYGSWLQQSTRSIKPVNFQSSVAMDNETVLRHQQAFGYSSEDVQMVIETMASQGKEPTFCMGDDIPLAVLSQKPHMLFDYFKQRFAQVTNPAIDPLREGLVMSLEVNIGKRRNILEVGPENADQVTLSSPVLNEGELESLLNDSKLKPKVLSTYFDIRKGLDGSLDKAIKVLCDEADAAVRNGSQLLVLSDRSEALEPTRPAIPILLAVGAIHQHLIQNGLRMSASIVADTAQCFSTHQFACLIGYGASAICPYLALETCRQWRLSNKTVNLMRNGKMPTVTIEQAQRNFIKAVKSGLLKILSKMGISLLSSYCGAQIFEIYGLGQEVVDLAFCGSVSKIGGLTLDELGRETLSFWVKAFSEDTAKRLENFGFIQSRPGGEYHANNPEMSKLLHKAVREKSDNAYTVYQQHLASRPVNVLRDLLELKSDRAPIPIGKVEPATSIVERFCTGGMSLGAISRETHEAIAIAMNRIGGKSNSGEGGEDPIRWSPLADVEDGYSPTLPHLKGLQNGDTATSAIKQVASGRFGVTPTFLVNAEQIEIKIAQGAKPGEGGQLPGKKVSAYIARLRNSKPGVPLISPPPHHDIYSIEDLAQLIYDLHQINPKAKVSVKLVAEAGIGTVASGVSKGNADIIQISGHDGGTGASPISSIKHAGGPWELGLSETHQTLIQNGLRERVVLRVDGGFRSGLDVLMAAAMGADEYGFGSVAMIATGCVMARICHTNNCPVGVASQREELRARFPGVPGDLVNYFLFVAEEVRATLAQLGFEKLDDIIGRTDILKAKHVSLAKTQHIDLKYLLSSAGLPKWSSSQIRSQDVHSNGPVLDETILADPDISDAIENEKEVSKTFQIYNVDRAVCGRVAGVIAKKYGDTGFAGQLNITFTGSAGQSFGCFLTPGMNIRLVGEANDYVGKGMAGGELVVVPVEKTGFVPEDAAIVGNTCLYGATGGQVFVRGKTGERFAVRNSLGQAVVEGTGDHCCEYMTGGCVVVLGKVGRNVAAGMTGGLAYILDEDDTLVPKVNKEIVKMQRVNAPAGQMQLKGLIEAYVEKTGSEKGATILREWEAYLPLFWQLVPPSEEDSPEACAEFERVLAKQATTVQSAK

SEQ ID NO: 5821 - protein, 752 aa, Oryza sativa Japonica Group
MAPAVAVVAAAAAFPFRLFSAEARRNTKGSRSKRGSARPLKPSPPPRPSASSSAAGGGGATTFTRLPLRNAPASVEVTLDRFPTANPEPRASTFTRRNGERLGDDEEDEEEEEDEVELGLRGATTFARLPLRDSPDGGDLTIGHFDAGVAPQEGLRSRAISRQLVEHLDDVEEEEEEQVVSRLDIFEGAKGREARAFLPDEDDEDDDVVVFDPEYDGYSDDEEFVATAVEQSPRGDAIAVAELEKLKYDNDDDDDDDDEVVVFHPDDDEEVDVFEDYDDDEEEETKEKGVPAVMRCFDTAKIYAKAGDGGNGVVAFRREKYVPLGGPSGGDGGRGGNVFVEVDGDMNSLLPFRKSVHFRAGRGAHGQGRQQAGAKGDDVVVKVPPGTVVRSAAGDVELLELMRPGQRALLLPGGRGGRGNAAFKSGTNKAPRIAEKGEKGPEMWIDLELKLVADVGIVGAPNAGKSTLLTAISAAKPTIANYPFTTLLPNLGVVSLDFDATMVVADLPGLLEGAHRGYGLGHEFLRHSERCSVLVHVVDGSGEQPEYEFEAVRLELELFSPSLVDKPYIVVYNKMDLPEASERWNKFQEKLQAEGIEPYCISAMNRQGTEDVVLAAYKVLQKDRQRMKDDEEWNGPENLNHVADAIKRERRAPMNEFEIFHDKGTNTWNVVGAGIERFVQMTNWQYSESLKRFQHALEACGVNKTLIKRGVKEGDTVVVGEMEMVWTDEPSKTRSSKTMNSKDDSVRWPEFG

SEQ ID NO: 5822 - protein, 106 aa, Oryza sativa Japonica Group
MAGGGVWVFRNNGVMELEEQATSRKALVHVATSEVIRSTEALERRLGALGWERYYEDRATLQLHRRDGSADLISIPRDFSRFRSTHMYDVVVKNRDHFKVDVMEKN

SEQ ID NO: 5823 - protein, 315 aa, Oryza sativa Japonica Group
MASSLSVAVLLCLAAAAAAQLSPTFYDTSCPRALATIKSAVTAAVNNEPRMGASLLRLHFHDCFVQGCDASVLLADTATFTGEQNALPNKNSLRGFNVVDSIKTQLEGICSQTVSCADILAVAARDSVVALGGPSWTVGLGRRDSTTASMDSANNDLPPPFFDLENLIKAFGDKGFSVTDMVALSGAHTIGQAQCTNFRGRIYNETNIDAGYAASLRANCPPTAGTGDSNLAALDTTTPYSFDNAYYSNLLSNKGLLHSDQVLFNGNSTDNTVRNFASNRAAFSSAFSSAMVKMANLGPLTGSQGQIRLSCSKVN

SEQ ID NO: 5824 - protein, 317 aa, Oryza sativa Japonica Group
MASATNSSLSLMLLVAAAMASVASAQLSATFYDTSCPNALSTIKSVITAAVNSEARMGASLLRLHFHDCFVQGCDASVLLSGQEQNAGPNVGSLRGFSVIDNAKARVEAICNQTVSCADILAVAARDSVVALGGPSWTVLLGRRDSTTASEALANTDLPAPSSSLAELIGNFSRKGLDATDMVALSGAHTIGQAQCQNFRDRIYNETNIDSAFATQRQANCPRPTGSGDSNLAPLDTTTPNAFDNAYYSNLLSNKGLLHSDQVLFNGGSADNTVRNFASNAAAFSSAFTTAMVKMGNISPLTGTQGQIRLSCSKVNS

SEQ ID NO: 5825 - protein, 314 aa, Oryza sativa Japonica Group
MASASSVSLMLLVAAAMASAASAQLSATFYDTSCPNALSTIKSAVTAAVNSEPRMGASLVRLHFHDCFVQGCDASVLLSGQEQNAGPNAGSLRGFNVVDNIKTQVEAICSQTVSCADILAVAARDSVVALGGPSWTVLLGRRDSTTANESQANTDLPAPSSSLAELIGNFSRKGLDVTDMVALSGAHTIGQAQCQNFRDRLYNETNIDSSFATALKANCPRPTGSGDSNLAPLDTTTPNAFDSAYYTNLLSNKGLLHSDQVLFNGGSTDNTVRNFSSNTAAFNSAFTAAMVKMGNISPLTGTQGQIRLNCSKVN

SEQ ID NO: 5826 - protein, 311 aa, Oryza sativa Japonica Group
MAKATCISLLVVVALATAASAQLSATFYDTSCPRAMSIIKSAVTAAVNSEPRMGASLLRLHFHDCFVQGCDASVLLSGNEQDAPPNKDSLRGYGVIDSIKAQIEAVCNQTVSCADILTVAARDSVVALGGPTWTVPLGRRDSTGASAALAISDLPPFTASLQELVDAFAKKGLSVTDMVALSGAHTIGQAQCSTFRGRIYNETNIDSAFATQRQANCPRTSGDMNLAPLDTTTANAFDNAYYTNLLSNKGLLHSDQVLFNNGSTDNTVRNFASNAAEFSSAFATAMVNMGNIAPKTGTNGQIRLSCSKVNS

SEQ ID NO: 5827 - protein, 566 aa, Oryza sativa Japonica Group
MSKGAIIGASTVLVVAVVAAVCVVSFKNGGGGKEDGELSTSVKSVKAFCQPTDYQQTCEEELGKAAGNGASSPTDLAKAMFAVTSEKISKAISESSTLEELKNDKRTSGALQNCKELLEYAVDDLKTSFEKLGGFEMTNFHKAVDDLRTWLSAALTYQGTCLDGFLNTTTDAADKMKSALNSSQELTEDILAVVDQFSATLGSLNIGRRRLLADDGMPVWMSEGGRRQLLEAAGPEAGPVEFKPDVTVAADGSGDVKTIGEAVAKVPPKNKERYTIYVKAGTYNEYVSVGRPATNVNMIGDGIGKTIITGNKNFKMNLTTKDTATMEAIGNGFFMRGITVENTAGPENHQAVALRAQSDMAVFYQCEFDGYQDTLYPHAQRQFFRDCTVSGTIDFIFGNSQVVLQNCLLQPRKPMDNQVNIITAQGRREKRSAGGTVIHNCTVAPHPDLEKFTDKVKTYLARPWKEYSRTIFVQNEIGAVVDPVGWLEWNGNFALDTLYYAEVDNHGPGADMSKRAKWKGVQSLTYQDVQKEFTVEAFIQGQEFIPKFGVPYIPGLLPQTQQGRMH

SEQ ID NO: 5828 - protein, 587 aa, Oryza sativa Japonica Group
MESNGGGGGSPKEAAVVVPSSGDATLGGHLARRLVQVGVSDVFAVPGDFNLTLLDHLIAEPGLRVVGCCNELNAGYAADGYARARGVGACAVTFTVGGLSVLNAIGGAYSENLPLICIVGGPNSNDYGTNRILHHTIGLPDFSQELRCFQPLTCYQAVVNNLDDAHDQIDRAISTAIRESKPVYISVSCNLPAVPHPTFSRDPVPYFLSPRLSNQASLHAALDATLAFLDKAVKPVLVAGPKLRVAKAGGAFVDLADASGHAVAAMPSAKGLVPETLPRFIGTYWGAVSTAFCAEIVESADAYLFAGPIFNDYSSVGYSCLLKKEKAVVVQPDRVTVGNGPAFGCVMMRDFLSELAKRVRKNTTAFDNYKRIFVPEGQLPECEAGEALRVNVLFKHIQRMIGGTEIGAVMAETGDSWFNCQKLRLPEGCGYEFQMQYGSIGWSVGALLGYAQAVQKRVVACIGDGSFQVTAQDVSTMLRCGQRSIIFLINNGGYTIEVEIHDGPYNVIKNWDYVGLVNAIHNGEGRCWATRVRCEEELEAAIATATGDKADSLCFIEVVAHKDDTSKELLEWGSRVSAANSRPPNPQ

SEQ ID NO: 5829 - protein, 382 aa, Oryza sativa Japonica Group
MLPGVITSRVRGDGAAAAAAAGWRGRTGWRPSPGWPSGASTPSAPPPTAAPIPSRSASGTGSLPNPNPPLLRDHRFALSNQIIRQFDPNPCRYLSVEKARYVYVRLFPEPGRVAKERPPLARFLLRACWSGPPRRSCVSPVHEHLLRSSEDFFWQLDTMYAGRFTIDVEFLDLKIASNNAAESSTSIWPNESIAVQNIASKSSLGCLSRMLTESIHADVTINTTDGVLKAHKAILASCSPVFESMFLHDLKEKESSTININDMCLESCSALIGFIYGTIKLDQFWKHRLSLLAAANKYSISDIKDCCEESLLEDINSSNVLERLHVAWLYQLQKLKKGCLTYLFVFGKIYDVREEINSFFQHADRELMLEMFQEVITAWKPI

SEQ ID NO: 5830 - protein, 455 aa, Oryza sativa Japonica Group
MAAESSAAAAAGGGERRGPMDLNLYLGLPPLPPPPGRLDVAADYPSLLLNSAATVANEQRGSVVVAAPPPAAAAYSPSNALSAPEQVLVDPVAAWLVDPGEQQPVPPLETPSYMARASSTLPQIFACAALEMLVQTGGAIPPTGLIRGAEIAAASRPMTPENRLRRLIQVSDQHGVGNGRAGTGPVSRSRRANSPEADNLARAIQRSHNSLEASRRQMLDGDGSDATKKDDGCGCNGSFECNICFESAKDPVVTPCGHLFCWPCIYQWLHGHSEHSDCPVCKGEVLEVNVTPIYGRGGGEENSSRNDIQIPPRPSAQRTESLRQQLQRPDTRGGIANMVRRLMQNQDIVVGQAASSAPRPRGRGRRQARQDAPSAPATQQQVVNADAGSGNQAPLPPPDANGAAPAAAVAPQQSSSVEQASTSSTVGVIAGGPAQGRRSRVSESTPARRTRRRHQ

SEQ ID NO: 5831 - protein, 676 aa, Oryza sativa Japonica Group
MARPRRASTMQLGLFLAALLLLTPSPAGSVAAAKGGGAKSGGGGTVIGIDLGTTYSCVGVYRNGHVEIIANDQGNRITPSWVAFTDGGERLIGEAAKNQAAANPERTIYDAKRLIGRQFSDAEVQRDMKLLPFAVVDRNGKPHVRVEVKDGDVRVFSPEEVSAMVLTRMKETAEAYLGEKVTRAVVTVPAYFNDAQRQATKDAGVIAGLTVDRIINEPTAAAIAYGIDKKGAEKNVLVFDLGGGTFDVSILAIDNGVFEVLATNGDTHLGGEDFDQRLMDHFVKVIRRKHGRDITGDARALGKLRRECERAKRALSNQHQVRVEVESLFDGVDLSEPLSRARFEELNSDLFKKTMVPVRKAMADARLSKGDIDEIVLVGGSTRIPKVQQLLKDYFGGKEPNRGVNPDEAVAYGAAVQASIISGHVDENTESMILLDVAPLTLGLETAGGVMAKLIPRNTVVPTKKTQVFTTYKDKQTTVTIQVFEGERSMTRDNRLLGRFDLAGIAPAPRGAPQIEVTFEVDANGILSVLAADKATGRSEKITISGDDRKISQEEIDRMVREAEEFAEEDRRHREQVDARNSLEAYVYNIKNTLGGKMADAMEGEEKDKVEEAVREAYEWLDGNPDAGKEEYEEKLRELEDVCNPVMSAVYQRSGGGGGGAPEDGNVDDEDDHDEL

SEQ ID NO: 5832 - protein, 274 aa, Oryza sativa Japonica Group
MSLSDGGETREENFQNMPSNSPCFQNMPSNSCYFQNTPSKHEFSSFRATLSLPSIAPSSSSETPIMSRSSLAMALLLLAFFAAAATANGGAAPAASNFIRKLCRATQYPAVCVQSQASYGGAPLPRSPPELVHAVLSVSVDKAQSVSMYVGRICGPGGSRGVAGPVRDCLENMADSVGHLCDAAQELGGNMGRAGSPGFKWHLSNVQTWCSAALTDKNTCLDGLSRGVDAATRSATRGKIVVGVHRRRPPSSSTAWRGCGGRRLLVAGRARTRA

SEQ ID NO: 5833 - protein, 862 aa, Oryza sativa Japonica Group
MVSKSYSNLLEMSCGDGVDFRQPFKSLPRVVTSPGIISDPDWDTRSDGDSVGSASSVERKIIVANFLPLNCTKDEAGQWSFSRDDDALLMQLKDGFSNETDVIYVGSLKVQVDPSEQDQVAQKLLRDYRCIPTFLPPDLQQQFYHGFCKQQLWPLFHYMLPICLDKGELFDRSLFQAYVRANKLFADKVMEAINTDDDHVWVHDYHLMLLPTFLRKRLHRIKLGFFLHSPFPSSEIYRSLPVRDEILKSLLNADLIGFQTFDYARHFLSCCSRLLGLHYESKRGYIGIDYFGRTVSLKILSVGVHVGRLESILKLPATVKKVQEIEQRYKGKMLMLGVDDMDIFKGISLKLLGLELLLDRNPKLRGKVVLVQIVNPARSTGKDVEEAITESVSVAERINLKYGSVDYKPVVLIDHRIPFYEKIAFYAASDCCIVNALRDGMNLVPYEYTVCRQGNEEIDNARGSDTNCHHTSTLIVSEFVGCSPSLSGAFRVNPWSVDDVADALHHATDLTESEKRLRHEKHYRYVRSHSVAYWAHSFAQDLERACKDHYSRRCWAIGFGLNFRVIALSPGFRKLSLEHFASSYNKATRRAIFLDYDGTLVPQSSINKAPSDELITILNSLCDDPKNDVFIVSGRARSLLDEWFAPCQKLGIAAEHGYFVRWNKAAEWESSYPNHDFEWKHIAEPVMQVYTETTDGSSIEPKESALVWHYLDADHDFGSCQAKELLGHLERVLSNEPVVVKCGHYIVEVKPQGVSKGLVVDKVIHRLMNNGKTPDFVVCIGNDRSDEDMFKSIDSMTSSSAFPAVPEVFACSVGQKPSKAKYYVDDAGEVVRLLKNVAGISSHREAVSHGRVTFRDVMDYVE

SEQ ID NO: 5834 - protein, 349 aa, Oryza sativa Japonica Group
MDPGRVVFDSGVARRACPGGAQMLLFGGGGSANSGGFFRGVPAAVLGMDESRSSSSAAGAGAKRPFFTTHEELLEEEYYDEQAPEKKRRLTAEQVQMLERSFEEENKLEPERKTELARRLGMAPRQVAVWFQNRRARWKTKQLEHDFDRLKAAYDALAADHHALLSDNDRLRAQVISLTEKLQDKETSPSSATITTAAQEVDQPDEHTEAASTTGFATVDGALAAPPPGHQQPPHKDDLVSSGGTNDDGDGGAAVVVFDVTEGANDRLSCESAYFADAAEAYERDCAGHYALSSEEEDGGAVSDEGCSFDLPDAAAAAAAMFGAAGVVHHDAADDEEAQLGSWTAWFWS

SEQ ID NO: 5835 - protein, 296 aa, Oryza sativa Japonica Group
MSSQQQHAGEAPASAAAAARARLRWTGQLHERFVLAVAELGGADRATPKSVLRAMAVPGLTLYHLKSHLQKYRQAVSRGGNGGGGGSGSLNDRSSSSERQPADHDGDSAADEPRTIAYDGDSDGDAKEGLRDSSRSMVQMQREVQRKLQEQIEVKRHLQLRMEAQGRYLQSVLRRAQQVLADHSLASSPEAATAELSELASAVDIECMSSSSPPRHHRQSAATDSCVTTTSSSEAESKAAGSKRLHTSDCTVEQPVQGKRAFNFLQRHNQADQEEEQEEEYAGAEDGSSSEIDLNR

SEQ ID NO: 5836 - protein, 387 aa, Oryza sativa Japonica Group
MELGLSLGDAVTVADGGRLELVLGLGVGVGAGVRRGEEEERGRREDVVGAGRWAAMAAASPEPSVRLSLVSSLGLHWPSETGRSEAAARGFDVNRAPSVAAGAPGMEDDEEGPGAAPALSSSPNDSGGSFPLDLSGQGLRGHAEAAAQGGGGGGGGERSSSRASDDDEGASARKKLRLSKEQSAFLEESFKEHSTLNPLLLFLEYARTRECLFLLARSWPLTLMLLTGGEQKQKVALAKQLNLRPRQVEVWFQNRRARTKLKQTEVDCEYLKRCCETLTEENRRLHKELAELRALKTARPFYMHLPATTLSMCPSCERVASNPATASTSAPAAATSPAAAPTAAARTAVASPEPHRPSSFAALFAAPLGFPLTAAQPRPPPPASNCL

SEQ ID NO: 5837 - protein, 448 aa, Oryza sativa Japonica Group
MASPVLVLALVAATLLPASHCSVSGVGFQLKLRHVDAHGSYTKLELVTRAIRRSRARVAALQAVAAAAATVAPVVDPITAARILVAASQGEYLMDLAIGTPPLRYTAMVDTGSDLIWTQCAPCVLCADQPTPYFRPARSATYRLVPCRSPLCAALPYPACFQRSVCVYQYYYGDEASTAGVLASETFTFGAANSSKVMVSDVAFGCGNINSGQLANSSGMVGLGRGPLSLVSQLGPSRFSYCLTSFLSPEPSRLNFGVFATLNGTNASSSGSPVQSTPLVVNAALPSLYFMSLKGISLGQKRLPIDPLVFAINDDGTGGVFIDSGTSLTWLQQDAYDAVRRELVSVLRPLPPTNDTEIGLETCFPWPPPPSVAVTVPDMELHFDGGANMTVPPENYMLIDGATGFLCLAMIRSGDATIIGNYQQQNMHILYDIANSLLSFVPAPCNIV

SEQ ID NO: 5838 - protein, 557 aa, Oryza sativa Japonica Group
MERQTSFRLGALEKLKSFRGMEKQKSFKMMSTDNFRRHRDSPGKRGDTPLHLAARSGNAAGAQRIIAEFDPEVAAERAAQANHDGETPLYVAAERGHTDVVREILKVSDVQTAGVKANNSFDAFHIAAKQGHLEVLKELLQAFPALAMTTNSVNATALDTAAILGHTEIVNLLLESDANLARIARNNGKTVLHSAARLGHVEIVRSLLSRDPGIGLRTDKKGQTALHMASKGQNAEIVIELLKPDISVIHLEDNKGNRPLHVATRKANIVIVQTLLSVEGIEVNAVNRSGHTALAIAEQLNNEELVNILREAGGVTAKEQVHPPNPAKQLKQTVSDIRHDVQSQIKQTKQTKMQVQKIKKRLEKLHIGGLNNAINSNTVVAVLIATVAFAAIFTVPGNFVEDITQAPPGMSLGQAYVASNPAFLVFLVFDALALFISLAVVVVQTSLIVVEQKAKRRMVFVMNKLMWLACLFISVAFIALTYVVVGRDDWWLAWCTMAIGAVIMLTTLGSMCYCIIAHRMDERKIRKASTSQSRSWSQTVDSDPDLLNSEYKKMYAL

SEQ ID NO: 5839 - protein, 457 aa, Oryza sativa Japonica Group
MDDPGAADPGARPHHLSPGQPPVVPRSPTPLDLSSAAAAAAAASYRRLSPSLRPPAHPQARLPSPYPQIPSSSSAAAAGSSGHHARSLSQPLFFSLDSLPPLPYADLAAPPAIPPSPPSSSSDPPPPGLPPRKGGHRRSQSDIPFGFSHLSPPLPPPAPVKREAATAAEGCRSDGDDFALYDLVNSYMDLDGMEALNSSEERHEDRDSRASGTRTGSVADSSENEAESHSTPVERKDGGGKSRHCRSLSVDSFIEKLNFDESPKLPLPSPSGGLSRSGSGSLDGGAASLFGAEFANGEFTEAEKKKIMANERLAEIALTDPKRVKRILANRQSAARSKERKMRYIQELEHKVQVLQTEATTLSAQLTMLQRDSTGLATQNNELKIRLQAMEQQAQLRDALNEALTAEVQRLKLATGEITDGRMSKGLQQQMNSQLIQLQQLQIQQQQSSQTTQQDRL

SEQ ID NO: 5840 - protein, 433 aa, Oryza sativa Japonica Group
TPSLLRLVHSAAAAAARSSSFRSGLNLGLGAAMASDNIGSRDVCVVGVARTPMGGFLGALSSLSATKLGSIAIEAALKRANVDPALVQEVFFGNVLSANLGQAPARQAALGAGIPNTVVCSAVNKVCASGMKATMFAAQSILLGINDIVVAGGMESMSNAPKYIAEARKGSRFGHDTLVDGMLKDGLWDVYGDFAMGNCAELCADNHALTREDQDAYAIQSNERGIAARNSGAFAWEIVPIEVPVGRGKPPVLVDKDEGLDKFDPVKLKKLRPSFKENGGTVTAGNASSISDGAAALVLVSGQKAQELGLQVIARIKGFADAAQAPELFTTSPALAIPKALANAGLESSRVDYYEINEAFSAVALANQKLLGIPSEKINVHGGAVSLGHPLGCSGARILVTLLGVLREKGGKIGVAGVCNGGGGASALVLELA

SEQ ID NO: 5841 - protein, 804 aa, Oryza sativa Japonica Group
MALLVSFVVFVLAAAHGAVGFLSIDCGLDGNYSSGYKDPDEGITYVPDGTYVDAGENHRVAADRESGRLRSDLTVRSFPSGVRNCYALPTVAGAKYLVRVIAFYGNYDGKNSSSLQFDLYLGVNYWNTVSADGDEVYEAMFVAWASWAPVCLVNTGGGTPFVSSVNLRTLGSGVYHPVLAANQSMCLFDRRNMGSNVSILRYPDDPYDRYWWKMRSDPTWKNLSTASTIEQNDNFVVPLPVMQTAIEASNNDTIIKVTRKDKTAHKCMIFAYLADFQNSQLRQFNITLSDTKPLLYSPPYLSAGIVDISDWDMPNNGMYTITLEPTSASKLPPMLNAFEIYTLIPSDNPMTFPRDSWDGVKCSNPSDNTSRIISLDLSNSNLHGPISNNFTLFTALEHLNLAGNQLNGPIPDSLCRKNNTGTFLLSFDSDRDTCNKSIPGINPSPPKSKLVFVGIVSADVPHSEPELEIAPASRKYHEDGLQRVENRRFTYKELEKITNKFSQCIGQGGFGLVYYGCLEDGTEVAVKMRSELSSHGLDEFLAEVQSLTKVHHRNLVSLIGYCWEMDHLALVYEYMSQGTLYDHLRGNNGARETLSWRTRVRVVVEAAQGLDYLHKGCSLPIIHRDVKTQNILLGQNLQAKIADFGLCKTYLSDTQTHISVAPAGSAGYMDPEYYHTGRLTESSDVYSFGVVLLEIVTGESPMLPGLGHVVQRVKKKIDAGNISLVADARLIGAYDVSSMWKVVDIALLCTADIGAHRPTMAAVVVQLKESLALEEARADSGFKGSIGTLSDTTISTSTFGPSAR

SEQ ID NO: 5842 - protein, 863 aa, Oryza sativa Japonica Group
MALLVLVAVLVFEAAVRADGQTGFLSIDCGLEADDSYPDDLTGITYVPDGHYTDAGENHKVTTVYRNAWWGPDRTLYTVRSFPSAEGQRNCYSLPNDVRSKYLVRLKFLYGNYDGLDSSSLKFNLTLGVKHWDTVSIDTTDGNDGYNVHEAVFVAWASWAPVCLINIGQGTPFMSMVELRPLGILPYPAVMGNVSLSLYVRSNVGSSPDDDKLVRYPDDQYDRFWSTDEAHPLSTNISTQTTIQASTEFAVPSPVLQKAIVPSGNSMKLVFFSDQVDVLLHNHFVILHFADFQNNKSREFTVSIDNGVQSSPYSTPYLKGLSVTGGWSSNSEGKYNFTIAATATSALPPILNAYEVYGRIIHDNPTTFSQDFDAIMAIKYEYGIKKNWMGDPCFPPEFVWDGVKCSDAGDKIMRIISLDLSNSKLNGSISNFFTLFTALKYLNLSCNQLNGTIPDSLLKNNGSIDFSYESDGNMCKTHATPSLSRNTLAVSVVAPVLVLAILVLAYLIWRAKRKLNTSSTDLAMVPELMGAPGHITNHWDHLQKPENRRFTYQELEKFTENFKHLIGHGGFGHVYYGCLEDSTEVAVKMRSKLSSHGLNEFLAEVQSLTKVHHRNLVCLVGYCWEKEHLALVYEYMSRGNLCDYLRGKTGMGEILNWKTRVRVALEAAQGLDYLHKGCNLPIIHGDVKTNNILLGQNFKAKIADFGLSKTYHSDSQTHISAAAAGSMGYIDPEYYTTGRLTESSDVYSFGVVLLEITTGEPPIIPENGHIVQRVKQKIVSGNISSVADAHLGGAYNVSSMWKVVNIAMMCTTDIATQRPKMGDVVVQLKESLDLVEVHGDRGDMENLASDTMSSMSTFGPSAR

SEQ ID NO: 5843 - protein, 842 aa, Oryza sativa Japonica Group
MDADGFLSIDCGLEGDKNGYTDNSNGIVYTPDGAPYVDTGVTNNVSAQYVNTWDRALNTLRSFPLTLFGERNCYALPTVPGAIYLVRLRFAYGNYDNMNSESVQFDLFLGVNKWDEVYIANKDKEYSSEAMFVAWASWASVCLVNTYQGTPFVNTVELRQLDSMLHFRKIMGNSSIYLYERRNMGPSSRDNPIIRYPNDTYDRFWYPWGSEDDPTYSNLSAPSTLIIPPSPSYAVPSPVLETAVVPADNNKSVLSIIQTNDKEIHEYLVLVHYADFQSTLQRQFQAYSNGDPIQGTGGPYVADYTGQTVGTIDWISAETSGKYNITLAATDSSQLPPIVNAFEVYGRIPLDNPSTFPTDYTCKIISLAYNKLNRWIKELRLIKVPHKVDAIMTIKFEYGIKKNWMNDPCFPSNLVWNGVRCSTGSDNTMRIISLDLSNSNLHGSISNNFTLLTALEYLNLSGNQLSGTIPSSLCENNAGSFVFRFSYLFNVDIGDNFVHLDSTYGPEFLNAPGSTKNHWDHMQKTENRRFTYEELEKYTDNFERLIGHGGFGQVYYGCLEENIEVAVKMRSESSQHGLDEFLAEVQSLTKVHHRNLVSLVGYCWENDHLALVYEYMSGGNLCDHLRGKISVGESLNWATRLRILLEAGQGLDYLHKGCNLPIIHGDVKTNNILLGQNLKAKIADFGLSKTYHSDTQTHISATAAGSVGYIDPEYYNTGRLMESSDVYSFGVVLLEVVTGEPPIIPGHGHIVQRVKQKIVTGNISSIADARLDAYNVSSMWKVVDTAMMCTADVAAQRPVMATVVAQLKEGLALEEAHEERVDLENIASDIVSSVSTFGPSPR

SEQ ID NO: 5844 - protein, 886 aa, Oryza sativa Japonica Group
MPCSPPSYLFIIVTGVLLVLVHSQTSLDEDFISIDCGLPSGFSYVDEKTNITYISDDQYIDTGENHNISSQLQGAEQFRSGLNLRSFPTGGRNCYTLYPAIKGQKYLIRGMFMHGNYDNKGQDLVSSPVTFDIRIGLNFWNRLNIINATMTYTSEAIVVAIVNSVSVCLVDNGEGTPFISSLEMRPMKSSNYPAATPNHPLLLQDRRSMGASRIIRYPDDPYDRVWWLPQITSGLIKISTRSLISRYTDDVYEVPVAVLKTAATTSSTSTALNFLWAAPTGWDATPGYLIGLHFTDFQQGQLREFDIYYNNDLWNYDNKKTKPPYLLANYINGTTPYTSDNYLYNISLVATNASVLPPMLNAIEIYYQVQQDEKMTYSEDVEAMMTVKIDYQVKKNWMGDPCLPEKYTWSGLKCRSQGVTSRIISLDLSSSDLQGAISEQFSMLRSLEYLNLSNNDLTGSLPESLTNLPNIHVLDLSGNQLNGTFPEALCKNRALTLRYDTANGDPCSPRSSKKKHKAVLAVAVVVPVVIVVILISAMLMLLFWKKQAIVKSRGQEQYGDHIHIPENREFTYEELVKITNNFSVFIGEGGFGPVFHGQLKDGTQLAVKMRSPTSMSGKGMPEFLAEVESLTTVHHRYLVLLVGYCTDQDHLGLVYEYMPNGSLYDHLRGKNAIIQRLSWQHRAKIAHEAAQGLDYLHTGCVLPIVHRDVKSHNILLGCDLTAKISDFGLSKSYLNVAQSHITATAAGTLGYIDPEYCLSGRLTISSDVFSFGVVLLEIVTGEPPIIPTNGHIVQRIKEKVNMGNIEAIADPRLHGEFDISSIWKVVDIALLCTKEASSERPTMSMVVAQLKDALALEEARLSYSTSDISQGGANAELSINSMPTAR

SEQ ID NO: 5845 - protein, 854 aa, Oryza sativa Japonica Group
MALFLFLAAIVLAAASPAVGQLPAGFLSIDCGLEANYSGYKDTDTGIVYVSDDPYVDTGKNHRISADSTYQRFYQTIRSFPTGERNCYALPTVYGDKYIVRVMISRNSQMISLLWPTLPQFALHLGANYWDTVQDDSTEVYEALFMAWASWAPVCLVNTDQGTPYASAIELRPLGNELYPAVMANQSMRMSIRCRMGQTDSSITRFPDDQHDRYWWTTPTNPMWANLSTTSDIQEESSLFGVPSAILQKAVTVVGNGTMLNVTWEDRLFIEFMVFLHFADFQDSKIRQFNVYFNNDSPLLYTPLYLAADYVYSVVWYSSTNGKFNITLVATAKSLLPPMLNAYEIYTLIAHSTPTTFSKDFDVIMAIKFEYGIKKNWMGDPCSPSQFAWDGVICRNTSDNIPRIISLDLSNSNLHGVISNNFTLLTALENLNLTGNQLDGTIPDSLCKLNAGSFIFSYNSDQDVCNKTSPSSSRSRATILAISIAAPVMVVAILGTSYMIWRVKRKSNFFAYNPPRVLEHTNASRNEKYHWDHLQENENRQFTYEDLEKITDNFQLIIGEGGSGRVYHGRLEDNTEVAVKMLSGTSSSGLNGFLAEVQSLTKVHHKNLVSLVGYCSEKAHLALVYEYMSRGNLFDHLRGKSGVGENLNWAMRVRVLLDAAQGLDYLHKGCNKSIIHRDVKTSNILLGQNLRAKIADFGLSKTYISDSQSHMSATVAGSMGYIDPEYYHTGWITENSDVYSFGVVLLEVVTGELPILQGHGHIIQRVKQKVDSGDISSIADQRLGSDYDVSSMWKVVEIALLCTEPVAARRPSMAAVVAQLKDSLTLEEAREERGLKENPTDEVAMLPTSGPSAR

SEQ ID NO: 5846 - protein, 396 aa, Oryza sativa Japonica Group
MCGGAIISGFIPPSAAAAAAAAVAKKQQGRRVTADVLWPGMLRKGKAAAAEEDFEADFREFERGMSDDEAEGGGGEEEEDDDDVVVVVPPPAAARFVVRAAAKAAPPTADGMLTTKLVQHDGPTARSAKHKRKNQYRGIRQRPWGKWAAEIRDPSKGVRVWLGTYNTAEEAARAYDAEARKIRGKKAKVNFPDEPAVAQKLSLKQNAAKQEKLAPPLKTCGDDAFFQLNSSDNDLFAMLAKVPAKPAEPVDLMPPVKPLASTETFEMNMLSDTSSNSFGSSDFGWEDDTLTPDYTSVFVPNAAMPAYGEPAYLTGGAPKRMRNNYGIAVPQGNGMPNLAQNMPTFDPEMKYLPLPYVESSSDESMDNLLQNDATQDGASNEGIWSLDELLMAAGAY

SEQ ID NO: 5847 - protein, 90 aa, Oryza sativa Japonica Group
LSKEQSAFLEESFKEHSTLNPKQKLALAKQLNLRPRQVEVWFQNRRARTKLKQTEVDCEYLKRCCETLTEENRRLQKELAELRALKTVHP

SEQ ID NO: 5848 - protein, 466 aa, Oryza sativa Japonica Group
MNLAGFLATPATATATRHEMPLNPSSSASFLLSSLRRSLVASLRKASPAAAAALSPMASASTVAAENGAAKAAAEKQQQQPVQVAKRLEKFKTTIFTQMSMLAIKHGAINLGQGFPNFDGPDFVKEAAIQAINAGKNQYARGYGVPELNSAIAERFLKDSGLQVDPEKEVTVTSGCTEAIAATILGLINPGDEVILFAPFYDSYEATLSMAGANVKAITLRPPDFSVPLEELKAAVSKNTRAIMINTPHNPTGKMFTREELEFIATLCKENDVLLFADEVYDKLAFEADHISMASIPGMYERTVTMNSLGKTFSLTGWKIGWAIAPPHLTWGVRQAHSFLTFATCTPMQAAAAAALRAPDSYYEELRRDYGAKKALLVNGLKDAGFIVYPSSGTYFVMVDHTPFGFDNDIEFCEYLIREVGVVAIPPSVFYLNPEDGKNLVRFTFCKDDETLRAAVERMKTKLRKK

SEQ ID NO: 5849 - protein, 205 aa, Oryza sativa Japonica Group
MGEESPAAGGGAAAAAAGKPSGTALPRRGKSCKGCLYYSSMLRSRGFNPVCVGIPRSIPQVPSYVVDEPREEAAAQGHDLRQFKYACAGYSMFVVDNKDGRSGEKEGKTLLPYCQGLELLVDSRLVEKKSPNNEPATASYRKEAATSSRQQGQRPGQLTGQDFYARFRKSAGLVASGVAKNLNKTAIYIKENVADILYPDRRPPK

SEQ ID NO: 5850 - protein, 972 aa, Oryza sativa Japonica Group
MKIPFVTKWSHRSHEPAAPSNPAAQQQPPPPSPAGVSSAAAAAVVEEAEMETGGDDFITQEEEYQIQLAMALSASASVSAPSGGGGSGDTEGEQIRKAKLMSLGRGDLSAAADRGVGDSAEALSRRYRDYNFLDYNEKVIDGFYDIFGLSGESARQGKMPSLAELQTSIGDLGFEVIVVDHKFDSALQEMMEVAQCCMLGCPDTTVLVRRIAEVVAGHMGGPVIDATEMFTKWLGKSIEQRTSHQTSLLPIGRIDIGLSRHRALLFKILADSVGIPCKLVKGSHYTGVEDDAINIVKMNNEREFLVDVMAAPGTLIPADVFISKGTPFNLTKPLVQNQVVELASNIENDPSAAHSEHVGNRLHMFGNGNSLSENQSGCEKTMIAGSEVSQLWTLAPQMQSDQQSTSAGAHSMQKEDLKLTPDSQENEESKKQISETDSFRGIELGKSSLAFKGLNNRNNEYQRHRENIAPAPGRSQQPLVMKNWSACNDISNKQYNIAERLVRRRNTSDNAASSSQLAWSTAKHYNPNGRERNDRLCAAPGRNYDNRKVGASTTATASATGERLDRPNLAPVHYYDDKPNGISSVNAASTSGIVKVAEKGPHDLEKVPIYSRFDSQIYSSMQGYSPEVKENKENYDRHDNMRLHPDPRRSPLDRFMDTSRQNSESVSPPQAGSSTVDMVLGEVSECEILWEDLLIGERIGLGSYGEVYHADWNGTEVAVKKFLDQEFYGDALAEFRCEVRIMRRLRHPNIVLFMGAVTRPPHLSIVSEYLPRGSLYTIIHRPDCQIDEKCRIKMALDVARGMNCLHTSVPTIVHRDLKSPNLLVDNNWTVKVCDFGLSRLKHGTFLSSKSTAGTPEWMAPEVLRNEQSNEKCDVYSFGVILWELATLQMPWSGMNPMQVVGAVGFQDRRLDIPMEVDPLVASIIQDCWQKDPNLRPSFSQLTSYLNTLQRLVIPCHQETAGSYVPQEISLYR

SEQ ID NO: 5851 - protein, 400 aa, Oryza sativa Japonica Group
MNTTSANELMMHRHVQAAPYAAAPQQQGGKQRAPGLPPTPPPPPAAASSHSSHGDVCMDDTARGGLLPPRKAHRRSRSDVPFGYFQPLPPPSPKMEAGGGWALPGCGGAGDVDLLNAYMSLEGMGGADGLNNSDGDSRGSSMRTNGADSSENESEDYVGADSQALLWGGAGGGEAAGKKRRNNAAGEKAARHARSLSMDSLMGKLSFAANGEPAKFSLEFGSGEFTPAEMKRIMADEKLAEMALADPKRVKRVLANRQSAARSKERRMRYIAELEQKVQILQTEATTLSAQLTLLQRDSSGMATQNNELKFRLQSMEQQAQLRDALNEALTAEVQRLKLAANEVCDTSSSSNLAHQIQLRCQNQMLDLHKQQQQQVEQIPFYQLELPEQQNGTARNHESK

SEQ ID NO: 5852 - protein, 230 aa, Oryza sativa Japonica Group
MVRGRTELKRIENPTSRQVTFSKRRNGLLKKAFELSVLCDAEVALIVFSPRGRLYEFASAPSLQKTIDRYKAYTKDHVNNKTIQQDIQQVKDDTLGLAKKLEALDESRRKILGENLEGFSIEELRGLEMKLEKSLHKIRLKKTELLEQQIAKLKEKERTLLKDNENLRGKHRNLEAAALVANHMTTTTAPAAWPRDVPMTSSTAGAMDVETDLYIGLPGTERSSNRSETG

SEQ ID NO: 5853 - protein, 311 aa, Oryza sativa Japonica Group
MEMMVHGRRDEQYGGLRLGLGLGLSLGVAGGAADDEQPPPRRGAAPPPQQQLCGWNGGGLFSSSSSDHRGRSAMMACHDVIEMPFLRGIDVNRAPAAETTTTTARGPSCSEEDEEPGASSPNSTLSSLSGKRGAPSAATAAAAAASDDEDSGGGSRKKLRLSKDQAAVLEDTFKEHNTLNPKQKAALARQLNLKPRQVEVWFQNRRARTKLKQTEVDCELLKRCCETLTDENRRLHRELQELRALKLATAAAAPHHLYGARVPPPTTLTMCPSCERVASAATTTRNNSGAAPARPVPTRPWPPAAAQRSSA

SEQ ID NO: 5854 - protein, 937 aa, Oryza sativa Japonica Group
MPSASAAAAALVLLFLAFSLSNAQPGFISLDCGGDDDYTDGIGIQWTSDAKFVSAGQEANLLLQNQQLQQYTTVRSFPADNRKYCYTMNVRNRTRYLVRATFLYGNFDNSNVYPKFDLSLGPTPWTTVVIDDATTPVVQEAIILAAAPTLSVCLSNASTGQPFISTLELRQFNGSLYYTTDEKQFFLRLSARINFGAESNASVRYPDDPFDRIWESDLVRRANYLVDVAPGTERISTTKPIFVSTNEEPPQRVMQTAVVGKNGSLTYRIDLEDFPGNAWGVSYFAEIEDLAPNQTRKFKLVIPGKPEFSKPTVDVEENAQGKYCLYEPGYTNIPLPFVFSFGFKKTNDSSEGPILNAMEIYKYIEISVGSQDANIMASLVSRYPEAGWAQEGGDPCLPASWSWVQCSSEAAPRIFSISLSGKNITGSIPVELTKLSGLVELKLDGNSFTGQIPDFTGCHDLQYIHLEDNQLTGALPPSLGELPNLKEFFSGNSDLRMGHSNTGRTIVIIVCAVVGAILILVAAIVCYLFTCKRKKKSSDETVVIAAPAKKLGSFFSEVATESAHRFALSEIEDATDKFDRRIGSGGFGIVYYGKLTDGREIAVKLLTNDSYQGIREFLNEVTLLSRIHHRNLVSFLGYSQQDGKNILVYEFMHNGTLKEHLRGGPDDVKITSWVKRLEIAEDAAKGIEYLHTGCSPTIIHRDLKSSNILLDKNMRAKVADFGLSKPVVDGSHVSSIVRGTVGYLDPEYYISQQLTEKSDMYSFGVILLELISGHEPISNDNFGLHCRNIVEWARSHMESGDIHGIIDQSLDAGYDLQSVWKIAEVATMCVKPKGVLRPSISEVLKEIQDAIAIELQRELPSSIHHLMSKTSPSEAVNTTGSVQDLEQNASFDELLMRPGLRLNGTGRAAQAASEILNETAILVEQFQGKRNRDFVMN

SEQ ID NO: 5855 - protein, 317 aa, Oryza sativa Japonica Group
MASPKSFACSVIALLFAAHLVSAQLSANFYDKSCPNALSTIRTAVRSAVAKENRMGASLLRLHFHDCFVNGCDGSVLLDDTPTFTGEKTAAPNNNSLRGFDVIDNIKAQVEGICPQVVSCADILAVAARDSVFALGGPTWVVQLGRRDSTTASLDTANNDIPAPTLDLGDLTKSFSNKGLSATDMIALSGAHTIGQARCVNFRNRIYSETNIDTSLATSLKSNCPNTTGDNNISPLDASTPYTFDNFYYKNLLNKKGVLHSDQQLFNGGSADSQTTTYSSNMATFFTDFSAAIVKMGNIDPLTGSSGQIRKNCRKVN

SEQ ID NO: 5856 - protein, 597 aa, Oryza sativa Japonica Group
GGCISSLFCRRRATMRRLLLAGILRRASSSPSSHHHLHLVRALSASSPLPASDADLRKYAGYALLLLGCGAATYYSFPLPPDALHKKAVPFKYAPLPDDLHAVSNWSATHEVHTRVLLQPDSLPALHDALAAAHGECRKLRPLGSGLSPNGLALSRAGMVNLALMDKVLGVDAKKKTVTVQAGIRVAELVDALREHGLTLQNFASIREQQVGGIIQVGAHGTGARLPPIDEQVISMKLVTPAKGTIELSREKDPDLFYLARCGLGGLGVVAEVTLQCVERHQLIEHTFVSNADEVKKNHKKWLSENKHIKYLWIPYTDTVVVVQCNPPSRWRTPKFTSKYGKDEAIQHVRDLYHESLKKYRTKAESNDPEVDQLSFTELRDRLLTLDPLDKDHVIRINKAEAEYWKKSEGYRMGWSDEILGFDCGGQQWVSETCFPAGTLAKPNMKDLDYIEELLQLIEKEDIPAPAPIEQRWTACSRSPMSPASSSQEDDIFSWVGIIMYLPTSDARQRKEITEEFFNYRSKTQTNLWDGYSAYEHWAKIEVPKDKDELAELQARLRKRFPVDAYNKARMELDPNKVLSNAKLEKLFPVTEVQHEK

SEQ ID NO: 5857 - protein, 610 aa, Oryza sativa Japonica Group
MDKGALVVQVMDDSSNGGVGAAAAGGSFSSLRAYGRALAQTPRRLARRACAATSPGEEMSRVRARSGARMARRLRWHDLVGLGLGGMVGAGVFVTTGRATRLYAGPGVVVSYAIAGLCALLSAFCYTEFAVDMPVAGGAFSYLRVTFGELAAFLTGANLIMEYVFSNAAVARSFTAYLGTAVGVDAPSKWRIAVPGLPKGFNEVDLIAVGVILLISVCICYSTKESSVVNMVLTAVHVAFILFIIVMGFWRGDTRNLTRPVDLAHNPGGFFPHGAAGVFNGAAMVYLSYIGYDAVSTMAEEVERPSRDIPVGVSGSVVLVTLLYCLMAASMSMLLPYDAIDTEAPFSGAFKGSSGWGWVSNVIGAGASLGILTSLMVAMLGQARYLCVIGRSGVMPAWLAKVHPCTATPVNASAFLGVFTAALALFTELDVLLNLVSIGTLFVFYMVANAVVYRRYVAADDDDADHRRAWPTLVFLAAFSLVALCFTLLWQFAPAGRARTGLLAACGAAAVATVGAFRALVAEARRPELWGVPAMPWVPAASVFLNVFLLGSLDRPSYVRFGFFTAAAVLVYVLYSVHASYDAEEGGGAGAGAAALDGAKVQDEAADFKV

SEQ ID NO: 5858 - protein, 476 aa, Oryza sativa Japonica Group
MGKAAAMEVSASAAAEAGMMVGHGEWRDDDGRARRMGTVWTASAHIITAVIGSGVLSLAWAIAQLGWVAGPAVMLLFAFVIYYTSTLLAECYRSGDPCTGKRNYTYMDAVRANLGGSKVRLCGVIQYANLFGVAIGYTIAASISMLAIKRADCFHEKGHKNPCRSSSNPYMILFGVVQIVFSQIPDFDQIWWLSIVAAIMSFTYSTIGLSLGIAQTVANGGFMGSLTGISVGTGVTSMQKVWRSLQAFGDIAFAYSYSIILIEIQDTIKAPPPSEAKVMKRATMVSVATTTVFYMLCGCMGYAAFGDKSPDNLLTGFGFYEPFWLLDVANAAIVVHLVGAYQVFVQPIFAFVERWAAARWPDGGFISRELRVGPFSLSVFRLTWRTAFVCATTVVSMLLPFFGDVVGLLGAVSFWPLTVYFPVEMYIAQRGVRRGSARWLCLKVLSAACLVVSVAAAAGSIADVVDALKVYRPFSG

SEQ ID NO: 5859 - protein, 326 aa, Oryza sativa Japonica Group
MAHFQGQQHGHPAARVDEYGNPVAAGHGITGTQEAGAGGYGAAGNVAQPQHAFGGATDAGGYGRQAGYGATGTGTHDAAGYGGSGQPAYGATGTGVHDAGGLMPGHTAGHGTTGTGVHHGAGAGLPAGQTAGYGTTGVTGAQHGAGGLGTGHTAGYGTTGAHHGAGGLGTRHMAGHGATTTPDTMAYGTTGTGAPHGATAGTGAYPHAGGQFQPAREEHKTGGILRRSGSSSSSSSSEDDGMGGRRKKGIKEKIKEKLPGGNKGGQQQPTATAATGGYGAGTGHTAAAGTTTDAGGTAYTPTTQPTHEKKGMMEKIKEKLPGGGHH

SEQ ID NO: 5860 - protein, 164 aa, Oryza sativa Japonica Group
MDNYQGQHGYGADRVDVYGNPVGAGQYGGGATAPGGGHGAMGMGGHAGAGAGGQFQPAREDHKTGGILHRSGSSSSSSSSEDDGMGGRRKKGIKEKIKEKLPGGNKGNNHQQQQMMGNTGGAYGQQGHAGMTGAGTGVHGAEYGNAGEKKGFMDKIKEKLPGQH

SEQ ID NO: 5861 - protein, 278 aa, Oryza sativa Japonica Group
MPQVRNQNLGMVADTESSGSLGGSSNAASDKAVDGSLDKRSQEKAPKKTHKAEREKLKRDQLNDLFVELSSMLDPERQNSGKATVLGDAARVLRDLVSQVESLRKEQSALLTERQYVGSENNELQEENIMLRAQILELHNEICARMGNNHLNQSNLAMSQPVANNGSNSATQPVPHHIWGNGPNLAMVHPTNTLSPLHNQHHQSAGASQVYASRPQELQLFPGTSVSTERERSRAGSGSTPATSSGLTDSLPGQLRLSLPQSSQEENSSGSKKGRKKG

SEQ ID NO: 5862 - protein, 260 aa, Oryza sativa Japonica Group
MEMVLQRTSHHPVPGEQQEAAAELSSAELRRGPWTVDEDLTLINYISDHGEGRWNALARAAGLKRTGKSCRLRWLNYLRPDVKRGNFTAEEQLLILDLHSRWGNRWSKIAQHLPGRTDNEIKNYWRTRVQKHAKQLNCDVNSKRFKDAMKYLWMPRLAERIHARAGAVDDSGDYSNNDLSCVSGVTMATVANCFDGSPSMVTSSSSDSFTSESQDLKKINLHVHGDDEKMNSEDWMQEVDHEFWSTEIQPNNEQFQDQPA

SEQ ID NO: 5863 - protein, 422 aa, Oryza sativa Japonica Group
LFKKSIIFNFSGNSDLRMGHSNTGRTIVIIVCAVVGAILILVAAIVCYLFTCKRKKKSSDETVVIAAPAKKLGSFFSEVATESAHRFALSEIEDATDKFDRRIGSGGFGIVYYGKLTDGREIAVKLLTNDSYQGIREFLNEVTLLSRIHHRNLVSFLGYSQQDGKNILVYEFMHNGTLKEHLRGGPDDVKINSWVKRLEIAEDAAKGIEYLHTGCSPTIIHRDLKSSNILLDKNMRAKVADFGLSKPVVDGSHVSSIVRGTVGYLDPEYYISQQLTEKSDMYSFGVILLELISGHEPISNDNFGLHCRNIVEWARSHMESGDIHGIIDQSLDAGYDLQSVWKIAEVATMCVKPKGVLRPSISEVLKEIQDAIAIELQRELPSSIHHLMSKTSPSEAVNTTGSLQDLEQNASFDELLMRPGLR

SEQ ID NO: 5864 - protein, 327 aa, Oryza sativa Japonica Group
MAQPTWSARRVTAALVVMVVVVLAVAGGSWAQLSPSFYSYSCPGVFNAVKRGMQSAIAREKRIGASIVRLFFHDCFVQGCDASLLLDDTASFTGEKTANPNNGSVRGFEVIDAIKSAVETICPGVVSCADILAIAARDSVAILGGPSWDVKVGRRDSRTASLSGANNNIPPPTSGLANLTSLFAAQALSQKDMVALSGSHTIGQARCTNFRAHIYNETNIDSGFAMRRQSGCPRNSGSGDNNLAPLDLQTPTVFENNYYKNLVVKKGLLHSDQELFNGGATDALVQSYISSQSTFFADFVTGMIKMGDITPLTGSNGEIRKNCRRIN

SEQ ID NO: 5865 - protein, 271 aa, Oryza sativa Japonica Group
MAAMATAPCFPATPGLPARGAVAARSRMAAGGSRSQRRRSSSGVFLCRSSTTGSTRMEDYNTAMKRMMRNPYEYHHDLGMNYAIISDSLIVGSQPQKPEDIDHLKDEEKVAFILCLQQDKDIEYWGIDFQTVVNRCKELGIKHIRRPAVDFDPDSLRTQLPKAVASLEWAISEGKGRVYVHCTAGLGRAPAVAIAYMFWFENMNLKTAYEKLTSKRPCGPNKRAIRAATYDLAKNDPHKESFDSLPEHAFEGIADSERRLIQERVRALREA

SEQ ID NO: 5866 - protein, 583 aa, Oryza sativa Japonica Group
MRRLLLAGILRRASSSPSSHHHLHLVRALSASSPLPASDADLRKYAGYALLLLGCGAATYYSFPLPPDALHKKAVPFKYAPLPDDLHAVSNWSATHEVHTRVLLQPDSLPVLHDALAAAHGERRKLRPLGSGLSPNGLALSRAGMVNLALMDKVLDVDAKKKTVTVQAGIRVAELVDTLREHGLTLQNFASIREQQVGGIIQVGAHGTGARLPPIDEQVISMKLVTPAKGTIELSREKDPDLFYLARCGLGGLGVVAEVTLQCVERHQLIEHTFVSSADEVKKNHKKWLSENKHIKYLWIPYTDTVVVVQCNPPSRWRTPKFTSKYGKDEAIQHVRDLYRESLKKYRTKAESNDPEVDQLSFTELRDRLLALDPLDKDHVIRINKAEAEYWKKSEGYRMGWSDEILGFDCGGQQWVSETCFPAGTLAKPNMKDLDYIEELLQLIEKEDIPAPAPIEQRWTACSRSPMSPASSSQEDDIFSWVGIIMYLPTSDARQRKEITEEFFNYRSKTQTNLWDGYSAYEHWAKIEVPKDKDELTELLARLRKRFPVDAYNKARMELDPNKVLSNAKLEKLFPVTEVQHVK

SEQ ID NO: 5867 - protein, 475 aa, Oryza sativa Japonica Group
MASGQKVVKPMEVSVEAGNAGEAAWLDDDGRARRTGTFWTASAHIITAVIGSGVLSLAWAIAQLGWVAGPAVMLLFAFVIYYTSTLLAECYRTGDPATGKRNYTYMDAVRANLGGAKVTFCGVIQYANLVGVAIGYTIASSISMRAIRRAGCFHHNGHGDPCRSSSNPYMILFGVVQIVFSQIPDFDQIWWLSIVAAVMSFTYSGIGLSLGIVQTISNGGIQGSLTGISIGVGVSSTQKVWRSLQAFGDIAFAYSFSNILIEIQDTIKAPPPSEAKVMKSATRLSVATTTVFYMLCGCMGYAAFGDAAPDNLLTGFGFYEPFWLLDVANVAIVVHLVGAYQVFVQPIFAFVERWASRRWPDSAFIAKELRVGPFALSLFRLTWRSAFVCLTTVVAMLLPFFGNVVGLLGAVSFWPLTVYFPVEMYIAQRGVPRGSARWVSLKTLSACCLVVSIAAAAGSIADVIDALKVYRPFSG

SEQ ID NO: 5868 - protein, 598 aa, Oryza sativa Japonica Group
MVQIEPLEVSLEAGNQADSALLDDDGRPRRTGTFWTASAHIITAVIGSGVLSLPWATAQLGWVGGPAVMVVFGGVTYFTATLQAECYRTGDEETGARNYTYIGAVRAILGGANAKLCGIIQYANLVGTAVGYTIAASISMQAIKRAGCFHANGHNVPCHISSTPYMLIFGAFEIVFSQIPDFHEIWWLSIVAAVMSFTYSGVGLGLGIAQTVADGGFRGTIAGVTNVTATQKAWRSLQALGNIAFAFAFSNVYTEIQDTIKAPPPSEAKVMKQASLLSIVATSVFYALCGWMGYAAFGNAAPDNLLTGFGFFEPFWLVDAANVAIAVHLIGAYQVYCQPVFAFVERKASRRWPDSGFVNSELRVWPFAISAFRLAWRSVFVCFTTVVAMALPFFGVIVGLLVSQQARVSGCNLNNEADDLEPPLTASAAVSPGRRSRSRGGHRFFFLYRHRACRKRDQSLRPRPFVIVVVKQHSTTVAAGLGSRPAPRPPRSATARRRRGRRIPACMAGVAVVGRSRVRGDPSGRPHRLLFRLDRRLCPPGRHDRRDRVGRRLGSPLPPPADFLQDARGRPSSSTMPTPFPSARLRQVDLLLPCLLFF

SEQ ID NO: 5869 - protein, 160 aa, Oryza sativa Japonica Group
MSDSEEHHFESKADAGASKTYPQQAGTIRKNGYIVIKNRPCKVVEVSTSKTGKHGHAKCHFVAIDIFTAKKLEDIVPSSHNCDVPHVNRTEYQLIDISEDGFVSLLTENGNTKDDLRLPTDDNLLSQIKDGFGEGKDLVVTVMSAMGEEQICALKDIGPK

SEQ ID NO: 5870 - protein, 157 aa, Oryza sativa Japonica Group
MDRVMKLASERAVVIFTLSSCCMCHTVTRLFCDLGVNALVHELDQDPRGKEMERALLKLLGRGPPVPVVFIGGKLVGGTNKIMSLHLGVTKAFYNIDLFTTEGDIYICLIKRTLFFLPKSRLKRSQSKKEVLQYGVSKSNIVKNKARKNHFNIHKVF

SEQ ID NO: 5871 - protein, 388 aa, Oryza sativa Japonica Group
MAKSRRIAAAHLTCMEIFNRALDWALERELHTSRRGADDDRQILKLVHAATARGRRSRGRGSTSPPRKGGMESSVPMIMADKKASAFHIRRTGKNIWKKPDRDFSKIPFPMAGVHQGSHPEAGANKHTEVEEEQEDRLRADTRVINMVTVREEIRKGPWTEQEDLQLVCTVRLFGERRWDFIAKVSGLNRTGKSCRLRWVNYLHPGLKRGRMSPHEERLILELHARWGNRWSRIARRLPGRTDNEIKNYWRTHMRKKAQERKSNMSPSSSSSSLTYQSCHPETPSMIIGIEEQELHGGSGCITSIMKSTPVDMDGYPMDQIWMEIEAPNVLPGPCFDEAKDSASNSLSGPLLPYPMWDYYCPETCLRMDDEIKVAPQFGYGKGVGPCY

SEQ ID NO: 5872 - protein, 303 aa, Oryza sativa Japonica Group
MATAGDEQQQQAAAAQTAEVTEAAAKEVVSVEMPAPEGWTKKFTPQRGGRFEIVFVSPTGEEIKNKRQLSQYLKAHPGGPASSEFDWGTGDTPRRSARISEKVKAFDSPEGEKIPKRSRNSSGRKGKQEKKEATENEEAKDAEADKEAPSEDAPKETDVETKPAEEAKEAPSEDAPKDTDVEMKTAEDASKTADADTPAPAPAGTEKEDAKPAESEAAPPAPSEGGEKKEDAKPAEPEAAAAPPSNPTEPSAPKAAAAAPVENSADKGPHQDSQPPSAAAPAKESSPVNNGQLPAGASAVKCT

SEQ ID NO: 5873 - protein, 228 aa, Nepenthes mapuluensis
  misc_feature (1)..(2): Xaa can be any naturally occurring amino acid
  misc_feature (6)..(7): Xaa can be any naturally occurring amino acid
  misc_feature (9)..(9): Xaa can be any naturally occurring amino acid
  misc_feature (18)..(18): Xaa can be any naturally occurring amino acid
  misc_feature (32)..(32): Xaa can be any naturally occurring amino acid
  misc_feature (48)..(48): Xaa can be any naturally occurring amino acid
  misc_feature (59)..(59): Xaa can be any naturally occurring amino acid
  unsure (1)..(228): unsure at all Xaa locations
XXGWAXXFXIPAISMGIXITSFFSGTALYRLXKPGGSPLTRMCQVLVXSFRKSRLALPXDSSLLYETSDKNSVIEGSRKLEHTNELKCLDKAAVVSDKEIKCEDFSNPWRLCTVTQIEELKILIRMFPIWATGIIFSAIYAQMSTMFVEQGEVMDRTIGSFTIPAASLSMFDTISVIFWVPVYDKILVPLARKFTGKQRGFSELQRMGIGLFISILSMAAAALVEMKR

SEQ ID NO: 5874 - protein, 224 aa, Nepenthes madagascariensis
  misc_feature (13)..(13): Xaa can be any naturally occurring amino acid
  misc_feature (32)..(32): Xaa can be any naturally occurring amino acid
  misc_feature (51)..(51): Xaa can be any naturally occurring amino acid
  misc_feature (62)..(62): Xaa can be any naturally occurring amino acid
  misc_feature (107)..(107): Xaa can be any naturally occurring amino acid
  misc_feature (131)..(131): Xaa can be any naturally occurring amino acid
  misc_feature (136)..(136): Xaa can be any naturally occurring amino acid
  misc_feature (157)..(157): Xaa can be any naturally occurring amino acid
  misc_feature (213)..(213): Xaa can be any naturally occurring amino acid
  unsure (1)..(224): unsure at all Xaa locations
NLGWALGFGIPAXSMGIAIASFFSGTALYRLXKPGGSPLTRMCQVLVASFXKSKLTLPEDSXLLYETSDKNSVIEGSRKLEHTDELRCLDKAAVLSDKEIKCEDFSXPWRLCTVTQVEELKILIRMFPIWXTGIVXSAIYAQMSTMFVEQGEVMDRXIGSFTIPAASISTFDTISVIFWVPVYDKILVPLARKFTGKQRGFSELQRMGIGLFXSILSMAAAALV

SEQ ID NO: 5875 - protein, 235 aa, Nepenthes khasiana
  misc_feature (7)..(7): Xaa can be any naturally occurring amino acid
  misc_feature (9)..(9): Xaa can be any naturally occurring amino acid
  misc_feature (32)..(32): Xaa can be any naturally occurring amino acid
  misc_feature (37)..(37): Xaa can be any naturally occurring amino acid
  misc_feature (39)..(39): Xaa can be any naturally occurring amino acid
  misc_feature (44)..(44): Xaa can be any naturally occurring amino acid
  misc_feature (69)..(69): Xaa can be any naturally occurring amino acid
  unsure (1)..(235): unsure at all Xaa locations
LIVWVQXNXGWALGFGIPAISMGIAIASFFSXTALYXLXKPGGXPLTRMCQVLVPSFRKSKLALPEDSXLLYETSDKNSAIEGSRKLEHTDELRCLDKAAVLSDKEIKCDDFSNPWRLCTVTQVEELKILIRMFPIWATGIVFSAIYAQMSTMFVEQGEVMDRTVGSFTIPAASLSTCDTISVIFWVPVYDKILVPLARKFTGKQRGFSELQRMGIGLFISILSMAAAALVEMKR

SEQ ID NO: 5876 - protein, 223 aa, Nepenthes pilosa
  misc_feature (223)..(223): Xaa can be any naturally occurring amino acid
  unsure (1)..(223): unsure at all Xaa locations
LGWALGFGIPAISMGIAIASFFSGTALYRLQKPGGSPLTRMCQVLVASFRKSKLALPEDSNLLYETSDGNSVIEGSRKLEHTNELKCLDKAAVVSDKEIKCEDFSNPWRLCTVTQIEELKILIRMFPIWATGIIFSAIYAQMSTMFVEQGEVMDRTIGSFTIPAASLSMFDTISVIFWVPVYDKILVPLARKFTGKQRGFSELQRMGIGLFIAILSMAAAALX

SEQ ID NO: 5877 - protein, 234 aa, Nepenthes insignis
  misc_feature (12)..(12): Xaa can be any naturally occurring amino acid
  misc_feature (15)..(15): Xaa can be any naturally occurring amino acid
  misc_feature (219)..(220): Xaa can be any naturally occurring amino acid
  unsure (1)..(234): unsure at all Xaa locations
IVWVQENLGWAXGFXIPAISMGIAIASFFSGTALYRLQKPGGSPLTRMCQVLVASFRKSKLALPEDSNLLYETSDENSVIEGSRKLEHTNELKCLDKAAVVSDKEIKCEDFSNPWRLCTVTQIEELKILIRMFPIWATGIVFSAIYAQMSTMFVEQGEVMDRTIGSFTIPAASLSMFDTISVIFWVPVYDKILVPLARKFTGKQRGFSELQRMGIGLFXXILSMAAAALVEMKR

SEQ ID NO: 5878 - protein, 235 aa, Nepenthes villosa
  misc_feature (39)..(39): Xaa can be any naturally occurring amino acid
  unsure (1)..(235): unsure at all Xaa locations
LIVWVQENLGWALGFGIPAISMGIAIASFFSGTALYRLXKPGGSPLTRMCQVLVASFRKSKLALPEDSNLLYETSDENSVIEGSRKLEHTNELKCLDKAAVVSDKEIKREDFSNPWRLCTVTQIEELKILIRMFPIWATGIVFSAIYAQMSTMFVEQGEVMDRTIGSFTIPAASLSMFDTISVIFWVPVYDKILVPLARKFTGKQRGFSELQRMGIGLFISILSMAAAALVEMKR

SEQ ID NO: 5879 - protein, 235 aa, Nepenthes clipeata
  misc_feature (7)..(7): Xaa can be any naturally occurring amino acid
  misc_feature (39)..(39): Xaa can be any naturally occurring amino acid
  misc_feature (138)..(138): Xaa can be any naturally occurring amino acid
  unsure (1)..(235): unsure at all Xaa locations
LIVWVQXNLGWALGFGIPAISMGIAIASFFSGTALYRLXKPGGSPLTRMCQVLVASFRKSKLALPEDSNLLYETSDENSVIEGSRKLEHTNELKCLDKAAVVSDKEIKREDFSNPWRLCTVTQIEELKILIRMFPIWXTGIVFSAIYAQMSTMFVEQGEVMDRTIGSFTIPAASLSMFDTISVIFWVPVYDKILVPLARKFTGKQRGFSELQRMGIGLFISILSMAAAALVEMKR

SEQ ID NO: 5880 - protein, 235 aa, Nepenthes gymnamphora
  misc_feature (7)..(7): Xaa can be any naturally occurring amino acid
  misc_feature (39)..(39): Xaa can be any naturally occurring amino acid
  misc_feature (138)..(138): Xaa can be any naturally occurring amino acid
  unsure (1)..(235): unsure at all Xaa locations
LIVWVQXNLGWALGFGIPAISMGIAIASFFSGTALYRLXKPGGSPLTRMCQVLVASFRKSKLALPEDSNLLYETSDENSVIEGSRKLEHTNELKCLDKAAVVSDKEIKCEDFSNPWRLCTVTQIEELKILIRMFPIWXTGIVFSAIYAQMSTMFVEQGEVMDRTIGSFTIPAASLSMFDTISVIFWVPVYDKILVPLARKFTGKQRGFSELQRMGIGLFISILSMAAAALVEMKR

SEQ ID NO: 5881 - protein, 235 aa, Nepenthes sumatrana
  misc_feature (39)..(39): Xaa can be any naturally occurring amino acid
  misc_feature (138)..(138): Xaa can be any naturally occurring amino acid
  unsure (1)..(235): unsure at all Xaa locations
LIVWAQENLGWALGFGIPAISMGIAIASFFSGTALYRLXKPGGSPLTRMCQVLVASFRKSKLALPEDSNLLYETSDGNSVIEGSRKLEHTNELKCLDKAAVVSDKEIKCEDFSNPWRLCTVTQIEELKILIRMFPIWXTGIVFSAIYAQMSTMFVEQGEVMDRTIGSFTIPAASLSMFDTISVIFWVPVYDKILVPLARKFTGKQRGFSELQRMGIGLFISILSMAAAALVEMKR

SEQ ID NO: 5882 - protein, 235 aa, Nepenthes lavicola
  misc_feature (39)..(39): Xaa can be any naturally occurring amino acid
  unsure (1)..(235): unsure at all Xaa locations
LIVWVQENLGWALGFGIPAISMGIAIASFFSGTALYRLXKPGGSPLTRMCQVLVASFRKSKLALPEDSNLLYETSDENSVIEGSRKLEHTNELKCLDKAAVVSDKEIKYEDFSNPWRLCTVTQIEELKILIRMFPIWATGIVFSAIYAQMSTMFVEQGEVMDRTIGSFTIPAASLSMFDTISVIFWVPVYDKILVPLARKFTGKQRGFSELQRMGIGLFISILSMAAAALVEMKR

SEQ ID NO: 5883 - protein, 235 aa, Nepenthes adnata
  misc_feature (138)..(138): Xaa can be any naturally occurring amino acid
  misc_feature (220)..(220): Xaa can be any naturally occurring amino acid
  unsure (1)..(235): unsure at all Xaa locations
LIVWVQENLGWALGFGIPAISMGIAIASFFSGTALYRLQKPGGSPLTRMCQVLVASFRKSKLALPEDSNLLYETSDQNSVIEGSRKLEHTNELKCLDKAAVVSDKEIKCEDFSNPWRLCTVTQIEELKILIRMFPIWXTGIVFSAIYAQISTMFVEQGEVMDRTIGSFTIPAASLSMFDTISVIFWVPVYDKILVPLARKFTGKQRGFSELQRMGIGLFXSILSMAAAALVEMKR

SEQ ID NO: 5884 - protein, 235 aa, Nepenthes glabrata
  misc_feature (138)..(138): Xaa can be any naturally occurring amino acid
  unsure (1)..(235): unsure at all Xaa locations
LIVWVQENLGWALGFGIPAISMGIAIASFFSGTTLYRLQRPGGSPLTRMCQVLVASFRKSKLALPEDSSLLYETSDKNSAIEGSRKLEHTDELRCLDKAAVVSDKEIKCEDFSNPWRLCTVTQIEELKILIRMFPIWXTGIVFSAIYAQMSTMFVEQGEVMDRTIGSFTIPAASLSMFDTISVIFWVPVYDKILVPLARKFTGKQRGFSELQRMGIGLFISILSMAAAALVEMKR

SEQ ID NO: 5885 - protein, 235 aa, Nepenthes albomarginata
  misc_feature (208)..(208): Xaa can be any naturally occurring amino acid
  unsure (1)..(235): unsure at all Xaa locations
LIVWVQENLGWALGFGIPAISMGIAIASFFSGTALYRLQKPGGSPLTRMCQVLVASFRKSKLALPEDSNLLYETSDENSVIEGSRKLEHTNELKCLDKAAVVSDKEIKREDFSNPWRLCTVTQIEELKILIRMFPIWATGIVFSAIYAQMSTMFVEQGEVMDRTIGSFTIPAASLSMFDTISVIFWVPVYDKILVPLARKFTGKQRGXSELQRMGIGLFISILSMAAAGLVEMKR

SEQ ID NO: 5886 - protein, 235 aa, Nepenthes boschiana
  misc_feature (7)..(7): Xaa can be any naturally occurring amino acid
  misc_feature (77)..(77): Xaa can be any naturally occurring amino acid
  misc_feature (109)..(109): Xaa can be any naturally occurring amino acid
  misc_feature (185)..(185): Xaa can be any naturally occurring amino acid
  misc_feature (208)..(208): Xaa can be any naturally occurring amino acid
  misc_feature (220)..(220): Xaa can be any naturally occurring amino acid
  unsure (1)..(235): unsure at all Xaa locations
LIVWVQXNLGWALGFGIPAISMGIAIASFFSGTALYRLQKPGGSPLTRMCQVLVASFRKSKLALPEDSNLLYETSDXNSVIEGSRKLEHTNELKCLDKAAVVSDKEIKXEDFSNPWRLCTVTQIEELKILIRMFPIWATGIVFSAIYAQMSTMFVEQGEVMDRTIGSFTIPAASLSMFDTISVIXWVPVYDKILVPLARKFTGKQRGXSELQRMGIGLFXSILSMAAAALVEMKR

SEQ ID NO: 5887 - protein, 235 aa, Nepenthes burbidgeae
  misc_feature (39)..(39): Xaa can be any naturally occurring amino acid
  misc_feature (138)..(138): Xaa can be any naturally occurring amino acid
  misc_feature (211)..(211): Xaa can be any naturally occurring amino acid
  unsure (1)..(235): unsure at all Xaa locations
LIVWVQENLGWALGFGIPAISMGIAIASFFSGTALYRLXKPGGSPLTRMCQVLVASFRKSKLALPEDSNLLYETSDENSVIEGSRKLEHTNELKCLDKAAVVSDKEIKREDFSNPWRLCTVTQIEELKILIRMFPIWXTGIVFSAIYAQMSTMFVEQGEVMDRTIGSFTIPAASLSMFDTISVIFWVPVYDKILVPLARKFTGKQRGFSEXQRMGIGLFIAILSMAAAALVEMKR

SEQ ID NO: 5888 - protein, 235 aa, Nepenthes thorelii
  misc_feature (7)..(7): Xaa can be any naturally occurring amino acid
  misc_feature (39)..(39): Xaa can be any naturally occurring amino acid
  unsure (1)..(235): unsure at all Xaa locations
LIVWVQXNLGWALGFGIPAISMGIAIASFFSGTALYRLXKPGGSPLTRMCQVLVASFRKSKLALPEDSNLLYETSDENSVIEGSRKLEHTNELKCLDKAAVVSDKEIKFEDFSNPWRLCTVTQIEELKILIRMFPIWATGIVFSAIYAQMSTMFVEQGEVMDRTIGSFTIPAASLSMFDTISVIFWVPVYDKILVPLARKFTGKQRGFSELQRMGIGLFISILSMAAAALVEMKR

SEQ ID NO: 5889 - protein, 235 aa, Nepenthes densiflora
  misc_feature (55)..(55): Xaa can be any naturally occurring amino acid
  misc_feature (138)..(138): Xaa can be any naturally occurring amino acid
  misc_feature (185)..(185): Xaa can be any naturally occurring amino acid
  misc_feature (220)..(220): Xaa can be any naturally occurring amino acid
  unsure (1)..(235): unsure at all Xaa locations
LIVWVQENLGWALGFGIPAISMGIAIASFFSGTALYRLQKPGGSPLTRMCQVLVXSFRKSKLALPEDSNLLYETSDENSVIEGSRKLEHTNELKCLDKAAVVSDKEIKYEDFSNPWRLCTVTQIEELKILIRMFPIWXTGIVFSAIYAQMSTMFVEQGEVMDRTIGSFTIPAASLSMFDTISVIXWVPVYDKILVPLARKFTGKQRGFSELQRMGIGLFXSILSMAAAALVEMKR

SEQ ID NO: 5890 - protein, 235 aa, Nepenthes diatas
  misc_feature (7)..(7): Xaa can be any naturally occurring amino acid
  misc_feature (39)..(39): Xaa can be any naturally occurring amino acid
  misc_feature (55)..(55): Xaa can be any naturally occurring amino acid
  misc_feature (136)..(136): Xaa can be any naturally occurring amino acid
  misc_feature (138)..(138): Xaa can be any naturally occurring amino acid
  misc_feature (220)..(221): Xaa can be any naturally occurring amino acid
  unsure (1)..(235): unsure at all Xaa locations
LIVWVQXNIGWALGFGIPAISMGIAIASFFSGTALYRLXKPGGSPLTRMCQVLVXSFRKSKLALPEDSNLLYETSDGNSVIEGSRKLEHTNELKCLDKAAVVSDKEIKCEDFSNPWRLCTVTQIEELKILIRMFPXWXTGMVFSAIYAQMSTMFVEQGEVMDRTIGSFTIPAASLSMFDTISVIFWVPVYDKILVPLARKFTGKQRGFSELQRMGIGLFXXILSMAAAALVEMKR

SEQ ID NO: 5891 - protein, 235 aa, Nepenthes ephippiata
  misc_feature (7)..(7): Xaa can be any naturally occurring amino acid
  misc_feature (39)..(39): Xaa can be any naturally occurring amino acid
  unsure (1)..(235): unsure at all Xaa locations
LIVWVQXNVGWALGFGIPAISMGIAIASFFSGTALYRLXKPGGSPLTRMCQVLVASFRKSKLALPEDSNLLYETSDENSVIEGSRKLEHTNELKCLDKAAVVSDKEIKREDFSNPWRLCTVTQIEELKILIRMFPIWATGIVFSAIYAQMSTMFVEQGEVMDRTIGSFTIPAASLSMFDTISVIFWVPVYDKILVPLARKFTGKQRGFSELQRMGIGLFISILSMAAAALVEMKR

SEQ ID NO: 5892 - protein, 235 aa, Nepenthes eustachya
  misc_feature (6)..(7): Xaa can be any naturally occurring amino acid
  misc_feature (13)..(13): Xaa can be any naturally occurring amino acid
  misc_feature (15)..(15): Xaa can be any naturally occurring amino acid
  misc_feature (17)..(17): Xaa can be any naturally occurring amino acid
  misc_feature (24)..(24): Xaa can be any naturally occurring amino acid
  misc_feature (34)..(34): Xaa can be any naturally occurring amino acid
  misc_feature (38)..(38): Xaa can be any naturally occurring amino acid
  misc_feature (66)..(66): Xaa can be any naturally occurring amino acid
  misc_feature (185)..(185): Xaa can be any naturally occurring amino acid
  misc_feature (230)..(230): Xaa can be any naturally occurring amino acid
  unsure (1)..(235): unsure at all Xaa locations
LIVWVXXNLGWAXGXGXPAISMGXAIASFFSGTXLYRXQKPGGSPLTRMCQVLVASFRKSKLALPXDSNLLYETSDGNSVIEGSRKLEHTNELKCLDKAAVVSDKEIKCEDFSNPWRLCTVTQIEELKILIRMFPIWATGIVFSAIYAQMSTMFVEQGEVMDRTIGSFTIPAASLSMFDTISVIXWVPVYDKILVPLARKFTGKQRGFSELQRMGIGLFISILSMAAAAXVEMKR

SEQ ID NO: 5893 - protein, 214 aa, Nepenthes faizaliana
LGFGIPAISMGIAIASFFSGTALYRLQKPGGSPLTRMCQVLVASFRKSKLALPEDSNLLYETSDENSVIEGSRKLEHTNELKCLDKAAVVSDKEIKREDFSNPWRLCTVTQIEELKILIRMFPIWATGIVFSAIYAQMSTMFVEQGEVMDRTIGSFTIPAASLSMFDTISVIFWVPVYDKILVPLARKFTGKQRGFSELQRMGIGLFIAILSMA

SEQ ID NO: 5894 - protein, 235 aa, Nepenthes fusca
  misc_feature (7)..(7): Xaa can be any naturally occurring amino acid
  misc_feature (39)..(39): Xaa can be any naturally occurring amino acid
  misc_feature (77)..(77): Xaa can be any naturally occurring amino acid
  misc_feature (185)..(185): Xaa can be any naturally occurring amino acid
  unsure (1)..(235): unsure at all Xaa locations
LIVWVQXNVGWALGFGIPAISMGIAIASFFSGTALYRLXKPGGSPLTRMCQVLVASFRKSKLALPEDSNLLYETSDXNSVIEGSRKLEHTNELKCLDKAAVVSDKEIKREDFSNPWRLCTVTQIEELKILIRMFPIWATGIVFSAIYAQMSTMFVEQGEVMDRTIGSFTIPAASLSMFDTISVIXWVPVYDKILVPLARKFTGKQRGFSELQRMGIGLFISILSMAAAALVEMKR

SEQ ID NO: 5895 - protein, 235 aa, Nepenthes gracilis
  misc_feature (50)..(50): Xaa can be any naturally occurring amino acid
  misc_feature (66)..(66): Xaa can be any naturally occurring amino acid
  misc_feature (80)..(80): Xaa can be any naturally occurring amino acid
  misc_feature (110)..(110): Xaa can be any naturally occurring amino acid
  misc_feature (124)..(124): Xaa can be any naturally occurring amino acid
  misc_feature (129)..(129): Xaa can be any naturally occurring amino acid
  misc_feature (136)..(136): Xaa can be any naturally occurring amino acid
  misc_feature (138)..(138): Xaa can be any naturally occurring amino acid
  misc_feature (167)..(167): Xaa can be any naturally occurring amino acid
  misc_feature (176)..(176): Xaa can be any naturally occurring amino acid
  unsure (1)..(235): unsure at all Xaa locations
LIVWVQENLGWALGFGIPAISMGIAIASFFSGTALYRLQKPGGSPLTRMXQVLVASFRKSKLALPXDSNLLYETSDENSXIEGSRKLEHTNELKCLDKAAVVSDKEIKCXDFSNPWRLCTVTQXEELKXLICMFPXWXTGIVFSAIYAQMSTMFVEQGEVMDRTIGXFTIPAASLXMFDTISVIFWVPVYDKILVPLARKFTGKQRGFSELQRMGIGLFISILSMAAAALVEMKR

SEQ ID NO: 5896 - protein, 235 aa, Nepenthes hirsuta
  misc_feature (7)..(7): Xaa can be any naturally occurring amino acid
  unsure (1)..(235): unsure at all Xaa locations
LIVWVQXNLGWALGFGIPAISMGIAIASFFSGTALYRLQKPGGSPLTRMCQVLVASFRKSKLALPEDSNLLYETSDGNSVIEGSRKLEHTNELKCLDKAAVVSDKEIKCEDFSNPWRLCTVTQIEELKILIRMFPIWATGIVFSAIYAQMSTMFVEQGEVMDRTIGSFTIPAASLSMFDTISVIFWVPVYDKILVPLARKFTGKQRGFSELQRMGIGLFISILSMAAAALVEMKR

SEQ ID NO: 5897 - protein, 235 aa, Nepenthes inermis
  misc_feature (39)..(39): Xaa can be any naturally occurring amino acid
  unsure (1)..(235): unsure at all Xaa locations
LIVWVQENLGWALGFGIPAISMGIAIASFFSGTALYRLXKPGGSPLTRMCQVLVASFRKSKLALPEDSNLLYETSDENSVIEGSRKLEHTNELKCLDKAAVVSDKEIKCEDFSNPWRLCTVTQIEELKILIRMFPIWATGIVFSAIYAQMSTMFVEQGEVMDRTIGSFTIPAASLSMFDTISVIFWVPVYDKILVPLARKFTGKQRGFSELQRMGIGLFIAILSMAAAALVEMKR

SEQ ID NO: 5898 - protein, 234 aa, Nepenthes maxima
  misc_feature (1)..(1): Xaa can be any naturally occurring amino acid
  misc_feature (228)..(228): Xaa can be any naturally occurring amino acid
  unsure (1)..(234): unsure at all Xaa locations
XGWVQENLGWALGFGIPAISMGIAIASFFSGTALYRLQKPGGSPLTRMCQVLVASFRKSKLALPEDSNLLYETSDENSVIEGSRKLEHTNELKCLDKAAVVSDKEIKREDFSNPWRLCTVTQIEELKILIRMFPIWATGIVFSAIYAQMSTMFVEQGEVMDRTIGSFTIPAASLSMFDTISVIFWVPVYDKILVPLARKFTGKQRGFSELQRMGIGLFISILSMAAAXLVEMKR

SEQ ID NO: 5899 - protein, 345 aa, Aspergillus oryzae
MSCDMEKTMSSVDSLPATPASEVPVLTVSPADTSLNSADVKTQEVKPEEKKPAKKRKSWGQELPVPKTNLPPRKRAKTEDEKEQRRIERVLRNRAAAQTSRERKRLEMEKLENEKIQMEQQNQFLLQRLSQMEAENNRLSQQLAQLAAEVRGSRANTPMPGSPATASPTLTPTLFKQERDELPLERIPFPTPSLSDYSPTLKPSTLAESSDVAQHPAVSVAGLEGDGSALPLFDLGSDLKHHSTDDVAAPLSDDDFNRLFHGDSSVEPDSSVFEDGLAFDVLEGGDLSAFPFDSMVNFDSEPVTLEGIEMAHGLPDETTCKTSSVQPGFGASTTRCDGQGIAAGC

SEQ ID NO: 5900 - protein, 350 aa, Emericella nidulans
MKSADRFSPVKMEDAFANSLPTTPSLEVPVLTVSPADTSLQTKNVVAQTKPEEKKPAKKRKSWGQELPVPKTNLPPRKRAKTEDEKEQRRIERVLRNRAAAQTSRERKRLEMEKLESEKIDMEQQNQFLLQRLAQMEAENNRLSQQVAQLSAEVRGSRHSTPTSSSPASVSPTLTPTLFKQEGDEVPLDRIPFPTPSVTDYSPTLKPSSLAESPDLTQHPAVSVGGLEGDESALTLFDLGASIKHEPTHDLTAPLSDDDFRRLFNGDSSLESDSSLLEDGFAFDVLDSGDLSAFPFDSMVDFDTEPVTLEDLEQTNGLSDSASCKAASLQPSHGASTSRCDGQGIAAGSA

SEQ ID NO: 5901 - protein, 518 aa, Saccharomyces cerevisiae
MSIAWSSVFKRELRLERFLPRVYSTKVPDNAPRAADNEQWLETLRPITHPEQKKSDHDVSYTRHINVPLGEVTSVNYLQRYNKHKHSQGNFVDVRIVKCKSGAGGSGAVSFFRDAGRSIGPPDGGDGGAGGSVYIQAVAGLGSLAKMKTTYTAEDGEAGAARQLDGMRGRDVLIQVPVGTVVKWCLPPQKVRELVEREMRKDNNATLRSILGSTAVNLSVSSGSHRKKIQLYRHEMAESWLFKDKAKEYHENKDWFKDLHKKMEAYDHSLEQSELFNDQFPLAGLDLNQPMTKPVCLLKGGQGGLGNMHFLTNLIRNPRFSKPGRNGLEQHFLFELKSIADLGLIGLPNAGKSTILNKISNAKPKIGHWQFTTLSPTIGTVSLGFGQDVFTVADIPGIIQGASLDKGMGLEFLRHIERSNGWVFVLDLSNKNPLNDLQLLIEEVGTLEKVKTKNILIVCNKVDIDAEKSESFAKYLQVEKFSKSQEWDCVPISALREENIDVLKKKMFKCARQSEFDK

SEQ ID NO: 5902 - protein, 244 aa, Musa acuminata
MGRGRVELKRIENKINRQVTFAKRRNGLLKKAYELSVLCDAEVALIVFSNRGKLYEFCSSSSMLRTLERYQKCNYGAPETNIISRETQSSQQEYLKLKARVDGLQRSQRNLLGEDLGPLNIKELEQLERQLDASLRQIRSTRTQYMLDQLGDLQRLGTNAMWSLIKPWKIRLEESSEADQQQLWDPNTHAVAYGRQQPQPQGDGFFQFIDCEPTLQIGYHPDQMAIAAAAAAAPGPSYMPGWLA

SEQ ID NO: 5903 - protein, 211 aa, Aloe vera
MISRAMQARNYNLGVRSQPMKLAAAAAPPQPKPTKLYRGVRQRHWGKWVAEIRLPKNRTRLWLGTFDTAEEAALAYDKAAYKLRGDYARLNFPHLKHTGAHLAPGGPLHSSVDAKLQAICQSLEQNKSSNSNSSKKEKRGDAVEEKSDKVVVVVAEGEESCSSSSMNTGSASSPSSEIESLDFTEVPWDESEDFVLRKYPSWEIDWDAILS

SEQ ID NO: 5904 - protein, 131 aa, Triticum monococcum
AVLDGGIPFNKAYGMSAFEYHGTDPRFNRVFNEGMKNHSIIITKKLLEVYKGFEGLGTIVDVGGGVGATVGAIVAAYPAIKGINFDLPHVISEAPPFPGVTHVGGDMFQKVPSGDAILMKWILHDWSDEHC

SEQ ID NO: 5905 - protein, 909 aa, Nicotiana tabacum
MNPEKFTHKTNEALAGALELALSAGHAQFTPLHMAVALISDHNGIFRQAIVNAGGNEEVANSVERVLNQAMKKLPSQTPAPDEIPPSTSLIKVLRRAQSSQKSRGDSHLAVDQLILGLLEDSQIGDLLKEAGVSASRVKSEVEKLRGKEGRKVESASGDTTFQALNTYGRDLVEQAGKLDPVIGRDEEIRRVVRILSRRTKNNPVLIGEPGVGKTAVVEGLAQRIVRGDVPSNLADVRLIALDMGALVAGAKYRGEFEERLKAVLKEVEEAEGKVILFIDEIHLVLGAGRTEGSMDAANLFKPMLARGQLRCIGATTLEEYRKYVEKDAAFERRFQQVYVAEPSVADTISILRGLKERYEGHHGVKIQDRALVVAAQLSSRYITGRHLPDKAIDLVDEACANVRVQLDSQPEEIDNLERKRIQLEVELHALEKEKDKASKARLIEVRKELDDLRDKLQPLMMRYKKEKERIDELRRLKQKRDELIYALQEAERRYDLARAADLRYGAIQEVETAIANLESTSAESTMLTETVGPDQIAEVVSRWTGIPVSRLGQNEKEKLIGLGDRLHQRVVGQDHAVRAVAEAVLRSRAGLGRPQQPTGSFLFLGPTGVGKTELAKALAEQLFDDDKLMIRIDMSEYMEQHSVSRLIGAPPGYVGHDEGGQLTEAVRRRPYSVVLFDEVEKAHPAVFNTLLQVLDDGRLTDGQGRTVDFTNSVIIMTSNLGAEYLLSGLMGKCTMETAREMVMQEVRKQFKPELLNRLDEIVVFDPLSHKQLRQVCRYQMKDVALRLAERGIALGVTEAAPDVILTESYDPVYGARPIRRWLERKVVTELSKMLVKEEIDENSTVYIDAGVSGKDLTYRVEKNGGLVNAATGQKSDILIQLPNGPRSDAVQAVKKMRIEEIEDDEMED

SEQ ID NO: 5906 - protein, 402 aa, Amycolatopsis sp. HR167
MRDAVIVEAVRTPVAKGKPTGAYAAVHPVELHAHVLRSAVERVPGLDPSEVDDVIGGAVGQVGEQSGNTTRFAALAAGFPESVAGVTVDRQCGSSQQALSFAAQGIVAGAYDIVLASGVESMSHVPIGSSANVDGVRADVWGPSVEKRYPGGLIPQGVAAELIASKWNLSRTQLDEFAVTSHERAAAAWRDGHFAGQVAPLKVTAADGTVTQLDVDETIRPGTSLEVLAGLRPAFAHEHWTARFGEIDWKVTAGNSSPVNDGAAALVLTTSEIARQRGWRPRARIHTATVTGDDPIYMLTGIIPATAKVLARAGLSVSDIDAFEVNEAFSSVVLAWLAETGADPAKVNVDGGAIAIGHPLGASGARLATTLLGVLERTGGRFGLQTMCEAGGTANATIIERI

SEQ ID NO: 5907 - protein, 442 aa, Candida albicans
MVNLLKKLHITKSHQSNHSNSDSNSLNSNTSMDNHQQQQQLQQYQQQFQQPQQQLYPGEQIVHPAAAQTGQNTTNVTAVSSSNITQSATSSLHSQQLQHVDVSKSAAEEAIRRSLLPERSTVSKGKYSLTDFSIMRTLGTGSFGRVHLVRSVHNGRYYAIKVLKKHQVVKMKQVEHTNDERRMLKLVEHPFLIRMWGTFQDSKNLFMVMDYIEGGELFSLLRKSQRFPNPVAKFYAAEVTLALEYLHSHDIIYRDLKPENILLDRNGHIKITDFGFAKEVSTVTWTLCGTPDYIAPEVITTKPYNKSVDWWSLGVLIFEMLAGYTPFYDSTPMKTYEKILAGKIHYPSFFQPDVIDLLTKLITADLTRRLGNLINGPADIRNHPWFSEVVWEKLLAKDIETPYEPPITAGVGDSSLFDHYPEEQLDYGSQGEDPYASYFLDF

SEQ ID NO: 5908 - protein, 1112 aa, Acetabularia acetabulum
MLCSSQLISRPQYFFQKLSQAKHRGVNLLKQQQKCQIRRGKFGARVRLIPNAVIADKPSVVQEVEEEKKGVPATAVTVGIPKETKEGEKRVAATPDSVKMLVKEGFKVIIESEAGFHASFSDDMYRDAGADILDGDTVLSTADIVLKVRPPFEEVNKFKEGATVISFIQPGENIELVKQLQAKNITAFALDCMPRTLSRAQTFDVLSSMANVAGYRSVVEASNAFGRFFAGQFTAAGKIPPAKVLVIGAGVAGLAAIQQAKNMGAIVRAFDVRSSVKEQIQSVGAEFLEVKIEEEGEGTGGYAKQMSQEFIDAEMELFRQQARDVDIIITTALIPPGPAPKLILKDMIESMKPGSVVVDLAAENGGNIETTKPGEIYEYSGVTHIGITDLPSMPAQSSTLFANNVTKYLLSMGEKGQFYIDHEDEAVRGAMVVENGEMMWPPPKKEVPPPPPPSETPATPAPVAEVVPEPVPNIFLDKLSDAVLAGISVSALLAIGAFGGKALTDMFSTLALACLAGSQVVYGVTPALHSPLMSVTNAISGMTAVGGIILMGGNILPQTTAQYLAAIAVLVSMVNVSGGFIMTSRMLGMFKIKGAEEDSSEKYKFLYFLPAALFLGLYVYGMYNGLSNLNQMAYLISGMCCIFAIGSLASQETAEFGNALGAVGVAGGLVATLGITSFTNQVYKQVAGVMLAGAAIGASIANSIEVTGLPQLVAAFHSLVGLAACFTAFGSLLVSGDHTMSAVHSVSTFIASIIGAVTVSGSIVAFGKLQGILSGKPLKFGGQNLFNFGLVAVTGAMFYKFIEQISVMSSALTYLGAATAVSLVLGYLVTSQVGGADMPVVITLLNSASGWRSVEGFVLDNNLLTIVGALIGSSGAILSAIMCKAMNRTIWKCCRLPRNPRRQAVSLPVSVLLLVSAQNVVLMMLLVHWLLLRKVVIVPGYGVAVSKGQYAFRKMMQLLAANNIDVKVCIHPVAGRMLGQLNVLLAEAGIPYDRVFEMEEMNEPEDWADVDISLVVGANDTVNSSAEDDPNSPIAGMPVIRVWKSDNVVVLKRSMGTGYAALENPVFYNDNTNMLLGDADAPWKPSETNQEISMKEFVSCPMCCLKSDFFMF

SEQ ID NO: 5909 - protein, 402 aa, Avena fatua
QQQPWGYQQQPGAMDAGANAASFSAPAVQATSSEMAPSGGVYRQTHSQRRSSDDGYNWRKYGQKQVKGSENPRSYYKCTFPNCPTKKKVETSIEGQITEIVYKGTHNHAKPLSTRRGSGGGGGGAAQVLQSGGGGDASEHSFGAMSGAPVSTPENSSASFGDDEIGASSPRAGNVGGDDLDDDEPDSKKWRKDGDGEGSNSMAGNRTVREPRVVVQTMSDIDILDDGYRWRKYGQKVVKGNPNPRSYYKCTTVGCPVRKHVERASHDLRAVITTYEGKHNHDVPAARGSAALYRPAPRAAADSAMSTSQQYTANQQQPSAMTYQTSAAAGTQQYAPRPDGFGSQNQGSFGFNGSFGFSAGFDNPTGSYMSQHQQQQRQNDAMQASGAKEEPREDMFFQHSQF

SEQ ID NO: 5910 - protein, 697 aa, Ostreococcus tauri
  misc_feature (78)..(85): Xaa can be any naturally occurring amino acid
  unsure (1)..(697): unsure at all Xaa locations
MADEDAREGVSDESARKNDAKRALKEAQKRSKKRPDARGLELIELGMRSMGLKAYDEARAMFEEAERVCANSDARAEXXXXXXXXARRADATHLPEPDPRAHHGEMKENCLRAMTDHLKATEGRWRTRFPPEPNGYLHIGHAKAMYFDFGVAKRHGGTTILRFDDTNPAAEKQEYIDSIISSVKWLGHEPVETTYSSDYFDKLYDFAVELIKNGKAYVCFQQKEEVGASRKIIQSFQRMCAEGNLPRYETPLPKGAESPWRETSPEENLALFEKMKNREFKEGECCLRMKGDLRSDIPSMWDLAAYRIKYETHPHSGDKWCIYPTYDYTHCLVDSLENITHSLCTLEFETRQAPNGSYYWLLDALDAYKPVTWEFSRCNITYNVMSKRKLNTLVTKGYVNGWDDPRLLTLEGLRRRGYTARAVNRFCSILGVTRNDNTQPLGKLEEVMRDEMKDTASRYFAVLDPVEVNITNHPGGEIICEAPVHPSFPERGMRRINLTPTIFIEQSDFKTEDVDGYFGLAPGKKIRLQFGYDITCTGFETNEDGSVKKIDVTIDMESRAQKPPKGILHWATTDFVKGECRLYDKLFSVEIPGKAEASAGAEELENAPTVEDDDDEEEEAGVGSVDWLSQLNPNSLIIHKNALLEPSLVQFAAKPLETQVQLQRLGFFTFDKDSTAAAPVMNRIVTLKESALKKQIK

SEQ ID NO: 5911 - protein, 423 aa, Ostreococcus tauri
MSATTSAPARARVSGRARGLGRWRRRRATATTATATATGVDGRVDDALDWAHTTVMKFGGSSLADAARVREVGAIVRSFPEETPVVVLSAMGKTTNDLLRAGELALRCDGDHETIETMEPLVATYEKIQARLAPRPGQGPAVRVVTGFLGRGIKTGAVCTLGRGGSDLTATVIGKALGLEEVQVWKDVDGVLSADPREVSNTVPMPFLSFQEATELAYFGAQVLHPHSMRPAMDSGKLAVRVKNSYNIRAPGTVIGHKRAEDLHKDWLLTSIVRKKNVTMLDITSTRMLGQYGFLAKVFNIMATNGISVDVVATSEVSVSLTLDPSKLWERDLAKEELEKLKLDFENDGIANVAVSSGHSIISLIGNVERNNEIMERAFRALGSKDIKVKMVSQGASKTNISLLVNDSQGADAARAIHAEFFE

SEQ ID NO: 5912 - protein, 341 aa, Ostreococcus tauri
MASATTVNENDHDARYEAVNDALLGTGSYGYTKLMRERATGKMYALKYIERGEKITEHVRREITNHRNLSHPNIVKFKEVLVTPTHLAVAMEPVGGGELFGYVQQQGSFTESQARYFFQHLISGVEYLHNMRISHRDLKLENTLVDLTTTPVLKICDFGFSKGGFDSQPKTQIGTPAYISPEVYSGAQPYDGAASDVWACGVLLYVMLVGRYPFSDPQDPNNSHKMMQRVLQARFALPKDMTDECKDLLTKIFNVDPRKRLTVAGIYHHPWFLHDLSPNVPLGPKQPGPLAPDTEGLQSLDDINAVIDVAREPPAKSSSPWGYDEIDGEVIDDGSYLDDDY

SEQ ID NO: 5913 - protein, 301 aa, Ostreococcus tauri
  misc_feature (1)..(1): Xaa can be any naturally occurring amino acid
  unsure (1)..(301): unsure at all Xaa locations
XRAAATATAVAAAADGTTTTTENGKRCARDGAKTDDGRASAPGRDGTTWGKTGAPSARDVRAVQSLLERSLRLYMSKEEVVNHLKTLANIDPLFTHLVWAQLEKDNEEFFKAYHVMVRVKEQILRFNSLLDKYYELAREKGEIDADRHPIGQASEANGSGKMAKQEPARRGGAQRKQSTAKANTPTKTPVRATNASGARASELPVMTPGALADWGARGPETTSAAATPRVPAFVSPYEAHPELSDEIAKLMRTPQMIGMADLQLDFDNHIGQLTSPDAEPFQLASLFPRDFSLDEVPDLGI

SEQ ID NO: 5914 - protein, 150 aa, Ostreococcus tauri
MTVSGSSGRAKRSTTQAKAAEQMATKPQARRASEAGTSAVVKGFSHIPHGNTALSVKADEARLASITDEKERKRLKRLLRNRVSAQQARERKKAYLSSLEQQEDEKEHRMNELENRVRILERENQMLRQVIQTVTRKSVPANPQPGDFAV

SEQ ID NO: 5915 - protein, 214 aa, Ostreococcus tauri
MSLRRAALRVVTAVERACAPACARTSSTRARAALWSSSSSPPLEPPSTAIASAGARVRVRTYASGLTVDGGVTPAVEAVPTSIARAPSDEAWTRDLARGTEARRKEVFGVVQIRSHQFKVSPDDLIYVDKVKDVEVNDVVTLPRVLMLGNKSETVIGRPTVPGAEVVALVEEHVRDGKKLIFKKKRRKNHRRMNGYRAQLTGLRVLEIRGIEEA

SEQ ID NO: 5916 - protein, 351 aa, Ostreococcus tauri
MAHAAFGTSPGSFGASPTFYGSSPTAIPQVSRPMAQPERGLGFPGLSSSLPGKHHIGSPNSGFSAFSPPMNMKDSPRSLASFSSSPPVRSGGVHKPSTSVTKVKRMELARAAVSEATAAAQAVASLPNAAAVSSPPLNSSGKPQKSVYRGVRQRPWGKYAAEIRDPTRGSRLWLGTFDSAEEAALAYDAAARAIRGDAAVTNFGKDVPIPASVRSQLPPLPTRPVQGRGGGIPRDDSALSGRMSKLSTSTKPANLEEEAEMLLMLQGADSGKGSTPERSESIEDGAGGMDLDEDNGASSVTVGLTLRAQKSNAQPIAPMASMPRETGDTSNAMISALKASNVSTRPRRGNA

SEQ ID NO: 5917 - protein, 1813 aa, Ostreococcus tauri
MSRCSSSAWALVALVFSLVTLTRAVPSVPSSSSATATAYSRTTLSFPGTADGSGDALETIIVGSTDPDYGTLYTDEGLTTTVSTLGVTTACANAGNVTGRRLTSQTAYYVAPNATATCDTTETRRTIVTSLTYRLIDGAGNCSDESSINITVKVFDASLSRFVRACKAMWVTRSEDMNTIDAVDWWNPNLTLPLTGTDAENNGQFMKQANSSSVVYGWGDNGMKQLSLGDDISRTFPETNTNFAQVKQFTYIAATLSGETVFGIEHESGYVWGWGYDARRVLGLETVTPSASTIAAQPVRIGSLALITKLAAGAFHVVAMTESGKVYTWGADDLGQLGRGWMPGMLQSIKSEAFKKSKSLPARVVNNGFRGVVTVDIASGEFHTLALTSSGDIWAWGSNIEGQLGLKPCEISKYGNGLGECRESAPEMPYTDSPQIVAVGANVKFAAIAAGARYSMALTAADETGAGGGRVFAWGYGENGQLGLVLDGRNVERALVPQPLTTLGDEVIVFIAAGESHVAAIASTGELYTWGSNTFGQLGHGDRVDRGKPTKVQILSDANIKIHSVSCGRSHTVAVSDYGEVFTWGSNEYGQLGTEPRPADDTERNMTLTLRGWSRSSSVSSRRRLLAVYGSSTTSKTIFSAFSDFQDASGRSGSSNAELSALVMGAARPFKGGYVSKTELGLYGDIEYVATPVIVAALQQVTAVVAAGGSSFALRLSCNVGYERDTTTGRCTACSAGSYTNDFTSFACQACPVGQYQDGRASSSCKLCEAGQYAQTTGSSACSFCAAGKFVPFEGSFSSIFCEDCPRGTKSVANGSQTCTPCAKGEYQDSIGQSTCKVCPAGTFNDRMGSQQEADCVKCPPGTFAANNGSATCTPCPAGFDADVAGASACQQCALGKYSPGGRPQCTPCPAGTSGNVTAVMTSVDECVPCALGFYMNAPGAEACLSCEVGTYSDTQGATKCTPCPVGYEAKIDVRNGTSLGQACQVCGTGKYNAIAGGSCTVCNEGTYQDQTGQSECKKCPIGKEGSSAGAQSIDDCVNCAAGYESKYEGMVKCTPCAMGFYGTGDRDDTSACQQCPAGTYSQQISSTTIEDCEECPAGFFSQGDKPCEQCPAGQYQANTAQSSCDLCPAGTYLESTGAKSEGECLPCNPGTFSATAGSVTCTQCAAGSYAATERLEACVQCPVGTISTVVGSQTEDDCLPCPAGSTSDGEGKTTCTPCAAGSYRTAESAECVPCPAGTYSNVPGASSEAACLPCPAGSFSNLVGQTVCTQCAAGTYQAVLGSTECVGCPAGTSSGVDGAETSSTCQPCAPGTFSDVVGSIVCDNCLAGTFMPTAGNSSCINCPAGTYSTVEGSSTASNCLLCTAGQYSLEAATTCADCDPGSYAPNPGTALCDACPAGTYGEEQGGTNIDVCLPCPIGRYSSIEGAQECLPCPAGKFGNETGLSECYSCRPGTFSTVTGAVTGDETVCTPCATGTSSFLGGKSSCTPCDPGTYADVTGSINCTKCGPGTYGIAVGATKLSACKRCPLYRFNSTLGSSSIEDCVYYHSATSRSSVIPFSSLVPTRGDETARSASASDPLAHPLDYFTPPNVTPPIPHTRSPHRRHACSPRARTSFTRRPSHLASPRVGVFARTFSRWRRTASTSCAWRNLHRILRQKGTEPARTGEYDKFYPTEGHFVCRGCGTPLYSAKAKFDSGCGWPAFDKCYTGAVKTEVDNSFGMRRVEIMCAGCDGHLGHVFENEGFSATMERHCVNSISVRYVKEQKEAEEGKVVDESVASSAFGFVQTPIMALIGAYALSDLLGRVMNFWAARQG

SEQ ID NO: 5918 - protein, 308 aa, Ostreococcus tauri
MIARASGASDVASADRSVAKPTANGEKSFSGMDGTEWFSRNFSEQGRKFSEVFPVRYAETGPNGEATMVTIADLIQECACNHAQGIWGVGQSMPAEMAKGHLAWVCTRLHLCVRKYPKWGEKMEVSTWFEPQGKIAARRDYSITDESGVQIGEATSQWVVLNLNTRRMARIPNSVLEDFKYQALERQVMEEGYASDKLADVTEIAANQCVSPITHHVRRNDMDMNGHVNNVVYVQWILESVPQETWNGRALQEIILEYRSECNFGECITATCCEVEEQSDSYVLLHKLARGDDEIVRAKTVWTKQKTS

SEQ ID NO: 5919 - protein, 335 aa, Brassica oleracea var. alboglabra
MLKQESNWAQTCDTCRSAACTVYCRADSAYLCTNCDAQVHAANRLASRHERVRVCQSCERAPAAFFCKADAASLCTACDSQIHSANPLARRHQRVPILPISGSMVTNHSSETTETEDIVVVGQEEEDEAEAASWLLPSSLKNSGDNNNNNNNNNSENRFSVGDEYVDLVDYNKYQQDYNVPQRSYVADGVVPLQVGVLKSHMHHEEHNFQFGFTNVSSEASPIHMVSLVPESTLSETTVSHPRSPKVATEELHDAPVQMLSPVERKARVMRYREKKKKRKFEKRIRYASRKEYAEKRPRIKGRFAKRNEVDAEEADKAFSSMVMFDTGYGIVPSF

SEQ ID NO: 5920 - protein, 366 aa, Brassica oleracea var. alboglabra
MFKQESNNICNRENNRGAPACDTCGSTICTVYCHADSAYLCNSCDAQVHSANRVASRHKRVRVCESCERAPAAFMCEADDVSLCTACDLEVHSANPLARRHQRVPVVPITGNSCSSLATANHTTVTEPEKRVVLVQEDAKETASWLFPKNSDNHNNNNNQNNELLFSDDYLDLADYNSSMDYKFTSQYNQPRHKQDCIVPEKNYSGDRVVPLQLEETRGNLRNKQQNITYGSSGSQYNNNGSINHNAYNPSMETDFVPEQTAPDTTVSHPKTHKGKTAQLPEPLIQILSPMDREARVLRYREKKKRRKFEKTIRYASRKAYAERRPRINGRFAKMSETEVEDQEYNTMLMYCDTGYGIVPSFYGQK

SEQ ID NO: 5921 - protein, 506 aa, Petunia axillaris subsp. axillaris
MMLLTELAAATLITLIAHIIISTLISKTTSRRLPPGPRGWPVIGALPLLGAMPHVSLAKMAKKYGAIMYLKVGTCGMAVASTPDAAKAFLKTLDINFSNRPPNAGATHLAYNAQDMVFAHYGPRWKLLRKLSNLHMLGGKALENWANVRANELGHMLKSMSDMSREGQRVVVAEMLTFAMANMIGQVMLSKRVFVDKGVEVNEFKDMVVELMTIAGYFNIGDFIPCLAWMDLQGIEKRMKRLHKKFDALLTKMFDEHKATTFERKGKQDFLDVVMENGDNSEGERLSTTNIKALLLNLFTAGTDTSSSAIEWALAEMMKKPTILKKAQAEMDQVIGRNRRLLESDIPNLPYLRAICKETFRKHPSTPLNLPRISNEPCIVDGYYIPKNTRLSVNIWAIGRDPQVWENPLEFNPERFLSGRNSKIDPRGNDFELIPFGAGRRICAGTRMGIVMVEYILGTLIHSFDWKLPSEVIELNMEEAFGLALQKAVPLEAMVTPRLQMDVYVP

SEQ ID NO: 5922 - protein, 165 aa, Vicia faba
MVEDRKVGVGIDFSKNSKNALKWAIVNMADKGDTFYLIHINSNSSDESRSKLFAKTGSPLIPLEELKEAGVMKQYGVQTDVEVIDLLEIAATQKEVSVVAKLYWGDARQKLMDSIEDLKLDALVLGSRGLSTIKRILLGSVSNFVMVHSPCPVTIVKDYSSSSSD

SEQ ID NO: 5923 - protein, 164 aa, Vicia faba
MVEDRKVGVGIDFSKNSKNALKWAIVNMADKGDTFYLIHINSNSSDESRSKLFAKTGSPLIPLELKEAGVMKQYGVQTDVEVIDLLEIAATQKEVSVVAKLYWGDARQKLMDSIEDLKLDALVLGSRGLSTIKRILLGSVSNFVMVHSPCPVTIVKDYSSSSSD

SEQ ID NO: 5924 - protein, 164 aa, Vicia faba
VEDRKVGVGIDFSKNSKNALKWAIVNMADKGDTFYLIHINSNSSDESRNKLFAKTGSPLIPLEELKEAGVMKQYGVQTDVEVIDLLEIAATQKEVSVVAKLYWGDARQKLMDSIEDLKLDALVLGSRGLSTIKRILLGSVSNFVMVHSPCPVTIVKDYSSSSSD

SEQ ID NO: 5925 - protein, 319 aa, Pimpinella brachycarpa
MMVQERDELGLSLSLSFPGSSHEQNKSNTTNNKHNQMPHASTPLELNLMPSQPLNLLHNNTTTTWTHPASHDRKMEACRVDRRSLLTGIDVNRIPAMTVDMEEETGVSSPNSTISSLSGNKRSLVNERSELANGDEILECSRSDDEDGDNSRKKLRLTKDQSAILEESFKEHNTLNPKQKIALAKRLGLRPRQVEVWFQNRRARTKLKQTEVDCEFLKRCCQTLTEENRKLQKEVQELRALKSSPQFYMQMTPPTTLTMCPSCERVGGLQSATTTSSAGPSITQAEPLRSHPMNSNHHRLPFNPWASPQRPLDALHPRS

SEQ ID NO: 5926 - protein, 298 aa, Pseudomonas aeruginosa UCBPP-PA14
MKQIAFIGLGHMGAPMATNLLKAGYLLNVFDLVQSAVDGLVAAGAGAARSARDAVQGADVVISMLPASQHVEGLYLDDDGLLAHIAPGTLVLECSTIAPTSARKVHAAARERGLAMLDAPVSGGTAGAAAGTLTFMVGGDDEALEKARPLFEAMGRNIFHAGPDGAGQVAKVCNNQLLAVLMIGTAEAMALGVANGLDAKVLAEIMRRSSGGNWALEVYNPWPGVMENAPASRDYSGGFMAQLMAKDLGLAQEAAQASASSTPMGSLALSLYRLLLKQGYAERDFSVVQKLFDPTQGQ

SEQ ID NO: 5927 - protein, 471 aa, Pseudomonas aeruginosa UCBPP-PA14
MSSVGEQKVQDGSLKRELGERHIRLMALGACIGVGLFLGSAKAIQMAGPAIMISYILGGLAILVIMRALGEMAVHNPVAGSFSQYAKDYLGPLAGFITGWNYWFLWLVTCVAEITAVAVYMGIWFPDVPRWIWALAALASMGTINLIAVRAFGEFEFWFALIKIVTILAMVVVGIGMIAFGFGNDGIATGISNLWAHGGFMPNGIQGVLMSLQMVMFAYLGVEMIGLTAGEARNPTKTIPSAINSVFWRILLFYVGSLFVIMSLYPWNEIGTQGSPFVMTFERMGIKTAAGIINFVVITAALSSCNGGIFSTGRMLYSLAQHRQAPAFFGKASRSGVPRRALILSILALLLGVLLNYLVPEKVFVWVTSIATFGAIWTWAMILLAQLRFRKTLSPAECDKLQYRMWLYPLSSYLALAFLVMVVVLMAFFEDTRIALYIGPPFILLLTVLYYAFNLAPKEPAGTGSVSRAAS

SEQ ID NO: 5928 - protein, 704 aa, Pseudomonas aeruginosa UCBPP-PA14
MHTFFIAPTGFGVGLTSISLGLLRALERAGLKVGFFKPIAQLHPGDLGPERSSELVARTHGLDTPKPLPLAQVERMLGDGQLDELLEEIISLYQRAAADKDVVIVEGMVPTRHASYAARVNFHLAKSLDAEVILVSAPENETLTELTDRIEIQAQLFGGPRDPKVLGVILNKVRGEADAANAEDGVADFARRLTEHSPLLRDDFRLIGCIPWQDELNAARTRDIADLLSARVINAGDYEQRRVQKIVLCARAVPNTVQLLKPGVLVVTPGDRDDIILAASLAAMNGVPLAGLLLCSDFPPDPRIMELCRGALQGGLPVLSVATGSYDTATNLNRMNKEIPVDDRERAERVTEFVAGHIDFEWLKQRCGTPRELRLSPPAFRYQVVQRAQKAGKRIVLPEGSEPRTVQAAAICQARGIARCVLLAKPDEVQAVAQAQGIVLPEGLEIIDPDLVRQRYVEPMVELRKGKGLNAPMAEQQLEDSVVLATMMLALDEVDGLVSGAIHTTASTIRPALQLIKTAPGYNLVSSVFFMLLPDQVLVYGDCAVNPDPSASDLAEIAVQSAASAQAFGIPARVAMISYSTGDSGSGVDVDKVREATRLAREQRPDLLIDGPLQYDAAAIASVGRQKAPNSPVAGQATVFIFPDLNTGNTTYKAVQRSADCVSVGPMLQGLRKPVNDLSRGALVEDIVYTIALTAIQADAQAPA

SEQ ID NO: 5929 - protein, 204 aa, Pseudomonas aeruginosa UCBPP-PA14
MLKIVLLVTGVAALLLSFIPSLRTEATPFLQHPDAIYLAILGLINLLFAPVLQSSHPTRPLQAGAAALLVLGVVLQALILLAPLPTIADQPAIVLPLLSLVLATALQLAGSLKPGKPVSRSASAPTALGGSQDSGNRETGTVKWFNTSKGFGFISRDSGEDIFVHFRAIRGEGHRILIEGQRVEFSVVQRDKGLQAEDVIASRR

SEQ ID NO: 5930 - protein, 417 aa, Pseudomonas aeruginosa UCBPP-PA14
MSQSLKRALFSALLVILVSYPILGLKLRTVGIKLEVLGADAQTLWTIAVAALAMFVWQLFRDRIPLKLGRGVGYKVNGSGLKNFLSLPSTQRWAVLALVVVAFVWPFFASRGAVDIATLILIYVMLGIGLNIVVGLAGLLDLGYVGFYAVGAYTYALLAEYAGFGFWTALPIAGMMAALFGFLLGFPVLRLRGDYLAIVTLGFGEIIRILLRNMTEITGGPNGIGSIPKPTLFGLTFERRAPEGMQTFHEFFGIAYNTNYKVILLYVVALLLVLLALFVINRLMRMPIGRAWEALREDEVACRALGLNPTIVKLSAFTIGASFAGFAGSFFAARQGLVTPESFTFIESAMILAIVVLGGMGSQLGVILAAVVMVLLQEMRGFNEYRMLIFGLTMIVMMIWRPQGLLPMQRPHLELKP

SEQ ID NO: 5931 - protein, 588 aa, Pseudomonas aeruginosa UCBPP-PA14
MPAILSSRQRIALRLAWRFMAPYRWRMLGALVALLFTAAITLSLGQGIRLLVDQGFLTASPELLNRYILLFFVLVLGLAVGTFVRFYLVSWIGERFVADIRKRVFDHLIELHPGFYETNRSSEIQSRLTADTTLLQTVIGSSLSMALRNALMLVGGVLLMFVTNAKLTSIVVLALPLVIAPILLFGRRVRSLSRESQDRVADVGSYVGETLGQIKTVQAYNHQAQDRQRFAGTVERAFDTARKRIAQRAWLITVVIVLVLGAVGIMLWVGGRDVIAGSISAGELAAFVFYSLIVGMAFGTLSEVIGELQRAAGAAERIAELLRARSEIRPPAQPRKLAARVSGRIELQAVRFAYPTRPEHWAIDDISLAVEPGETLALVGPSGAGKSTLFDLLLRFFDPQQGRLLLDGQPIVELDPADLRRSFALVSQNPALFFGSVEENIRYGRPHASAAEVEAAARAAHAHEFILGLPQGYATHLGEGGIGLSGGQRQRLAIARALLVDAPVLLLDEATSALDAESEHLIQQALPGLMSGRTTLVIAHRLATVQSADRIAVIDQGRLVAIGSHARLIAENPLYARLAELQFAVGGR

SEQ ID NO: 5932 - protein, 533 aa, Pseudomonas aeruginosa UCBPP-PA14
MTTCGEFLVKQLEAWGVETVFGIPGVHTVELYRGLPGSRIRHVTPRHEQGAGFMADGYARVTGKPGVCFIITGPGMTNILTAMAQAYADSIPMLVISSVNERARLAHGNGYLHELPNQRNLVGNVCAFSHTLMSAEELPAVLARAFAVFDSERPRPVHIELPLDVITAPAEHLALRPRTVASRPAPALAPLREAAARLRNAKKPLLLLGGGCVEAAAEARALAAALDAPTALTINAKGLLPADHPLLLGSNQSCVPVRELAAEADVVLAIGTELGETDYDVVFDGGFALDGELIRIDIDPQQLMRNYTPSLAIHSDARLAMRVLLAELPGGEASPDSPGARRAAAVRQRLAEDFAGWSHYRQLFAAILAEWPDARFVGDSTQTVYSGNHLVDLDEPRRWFNASTGYGTLGYGLPAAIGAKLGEPGRPVVSLMGDGGLQFTLPELASAVEAKVGIVVLLWNNHGYGEIKRYMERREITPLGVDIYTPDFLAIARGFGCAAERARDLEHLRELLRGAPADRPLIVEVLQAAPFHP

SEQ ID NO: 5933 - protein, 319 aa, Pseudomonas aeruginosa UCBPP-PA14
MDKNLHQPLGGNEMPRFGGIATMMRLPHVQSPAELDALDAAFVGVPLDIGTSLRSGTRFGPREIRAESVMIRPYNMATGAAPFDSLNVADIGDVAINTFNLLEAVRIIEQEYDRILGHGILPLTLGGDHTITLPILRAIKKKHGKVGLVHIDAHADVNDHMFGEKIAHGTTFRRAVEEDLLDCDRVVQIGLRAQGYTAEDFNWSRKQGFRVVQAEECWHKSLEPLMAEVREKVGGGPVYLSFDIDGIDPAWAPGTGTPEIGGLTTIQAMEIIRGCQGLDLVGCDLVEVSPPYDTTGNTSLLGANLLYEMLCVLPGVVRR

SEQ ID NO: 5934 - protein, 288 aa, Pseudomonas aeruginosa UCBPP-PA14
MTAVAFLGLGTMGYPMAGHLQREGYHVCVYNRSSAKALRWVEEYAGRYADTPREACAGAELVFCCVGNDDDLRAVALGEQGAFAGMAPGSLFVDHTTASAEVARELSLLAAERELGFLDAPVSGGQAGAVNGALTVMVGGEEAFYRRAEPLLRSYARMVRRMGDVGSGQLTKMVNQICVAGLLQGLAEALHFAQCAGLDGEAAMQVIGKGAAQSWQLENRHQSMLAGEFDFGFAVDWMRKDLSILLAEARRNGAQLPVTALVDQFYAEVQAMGGGRWDTSSLIARLRS

SEQ ID NO: 5935 - protein, 573 aa, Pseudomonas aeruginosa UCBPP-PA14
MPLARWVPGLDSLLHYRRAWFRPDVQAGLSVAAIQIPTAIAYAQIAGFPPQVGLYACILPMLIYALIGSSRQLMVGPDAATAAMVAAAITPLAAGDPQRLVDLSMIVAIMVGLFSIVAGLARAGFIASFLSRPILVGYLNGIGLSLLVGQLGKLFGYEAATSGFVAGILALLENLLHIHWPTLILGSLSLLLMVLLPRRFPQLPGALCGVLLASLAAALLGLDRYGVELLGEVPAGLPQLSWPQTSLEELKSLLRDATGITVVSFCSAMLTARSFAARHGYSINANHEFVALGLANIGAGVSQGFAISGADSRTAVNDMVGGKTQLVGVIAALVIAATLLLLNKPLGWVPMPALGAVLLLAGWGLIDVQALKGFWKLSRFEFSLCLLTTVGVLSVGVLPGIFVAVSIAVLRLLYYTYRPSDAVLGWMHGIDGQVELAKYPQATTLPGLVIYRFDAPLLFFNADYFKQRVLAVVDGSERPNAVLLNAEAMTNLDISGLATLHEVQQILKAQGVHLSLARVTGQTLDLLQRSSMLGEIKPPLVFSSVRSGVSAYRYWLRQQERLAAQAAATSGNA

SEQ ID NO: 5936 - protein, 402 aa, Pseudomonas aeruginosa UCBPP-PA14
MTDRAIRSQAWAGGSDAPEKSALDIGFMALTDSASLIVAATQGFAQPYGLTLNLRRQPSWATLRDKLLSGELDAAQCLYGLVYGVQLGLGGSAASEMAVLMGLCQNGQAINLSEPLKQAGVTSAEALLRHRRQNGARLTLAQTFPTGTHALWLNYWLASIGLHPLHDVHSVVVPPAQMVGHLQAGRIDGFCAGGPWGALAVDQGQGFTIATSQAIWPDHPEKVLGTTRAFVDAYPNTARALVMAVLDASRFIEQNAENRLGTAQLISGRDYVDAPLGAIQPRFFGRYQDGLGNAWQDPHPLRFYADGEVNRPWLSDGMWFMTQFRRWGLLREDPDYLGIARRVQQTALYRDAATALGLRLDGADMRRSTLIDGRTWDGSDPAGYARSFPIHALAETGQGIDL

SEQ ID NO: 5937 - protein, 556 aa, Pseudomonas aeruginosa UCBPP-PA14
MSKPETTAAPNFLRQIVQADLDAGKHAKIVTRFPPEPNGYLHIGHAKSICLNFGLAQEFAGDCHLRFDDTNPAKEDQEYIDAIEADIKWLGFQWSGEVCYASNYFDQLHAWAIELIKAGKAFVCDLGPEEMREYRGTLTEPGRNSPYRDRSVEENLDLFARMKAGEFPDGARSLRAKIDMGSPNMNLRDPILYRIRHAHHHQTGDKWCIYPSYDFTHGQSDAIEGITHSICTLEFEDHRPLYEWFLANLPVPAQPRQYEFSRLNLNYTVTSKRKLKQLVDEGHVSGWDDPRMSTLSGYRRRGYTPESIRNFCEMIGVNRASGVVDIGMLEFSIRDHLDATAPRAMCVLKPLKVVITNYPEGQVENLELPRHPKEDMGVRVLPFGRELFIDAGDFEEVPPAGYKRLIPGGEVRLRGSYVIRADEAIKDADGNIVELRCSYDPDTLGKNPEGRKVKGVIHWVPAEGSVECEVRLYDRLFRSANPEKAEEGGSFLDNINADSLQVLTGCRAEPSLGQANPEDRFQFEREGYFVADLKDSRPGKPVFNRTVTLRDSWGQG

SEQ ID NO: 5938 - protein, 451 aa, Pseudomonas aeruginosa UCBPP-PA14
MAGGEKAGKRGMGFWTCSALVIGNMVGSGVFLLPSSLAAFGGLSLFGWLVSSTGAVLLALTFARLARVNPGAGGPYAYTRDGFGSFAGYLCAWTYWKAAWIGNAAIAVTLVGYLRVFIPALADPLLMVCVAIAAIWLCTLINLRGIGTFSVVQNLLTILKLLPLLLVGILGWFHFNPEHLAIPARSELPNMGYAQAIATTAALTLWSFIGLESATVPADDVEDPRRTIPRATLFGTLAAAALYILSITAVQGLMPPEVLARSTSPFADAARILMGDWGYYLVAAGAVIACLGALNGWVLLQGQIPVAPARDGLFPESLGQLNKNGAPAHGLLASGLLVTALVMVDGHGDLVDVFNVIILLGTMTGVVPYAFCTAALLQLLAVRPDEFSPRSRRQLLVIGSLGFAYSLWALYGTGQQAIFWGFLVLMAGIPMYTWRQWRNQVNGVPTLKAND

SEQ ID NO: 5939 - protein, 393 aa, Pseudomonas aeruginosa UCBPP-PA14
MQDVVIVAATRTAVGSFQGSLAGIPAPELGAAVIRRLLEQTGLDAGQVDEVILGQVLTAGSGQNPARQAAIKAGLPVGVPAMTLNKVCGSGLKALHLGAQAIRCGDAEVIVAGGQENMSLAPYVMPGARTGLRMGHAKLVDSMIEDGLWDAFNDYHMGITAENLAEKYGLTREEQDAFAAASQQKAIAAIEGGRFRDEITPIQVPQRKGEPLSFDTDEQPRAGTTVEALAKLKPAFRKDGSVTAGNASSLNDGAAAVLLMSAAKAKALGLPVLARIASYASAGVDPAIMGIGPVSATRRALDKAGWSLEQLDLIEANEAFSAQSLAVGRELGWDAARVNVNGGAIALGHPIGASGCRVLVTLLHEMIRRDAKKGLATLCIGGGQGVALTLARD

SEQ ID NO: 5940 - protein, 456 aa, Pseudomonas aeruginosa UCBPP-PA14
MSNPPPTAERTQLRKSLKLWQIVMIGLAYLTPMTVFDTFGIVSGISQGHVPTAYLLALAGVLFTAISYGKLVRQFPTAGSAYTYAQRAINPHVGFMVGWSSLLDYLFLPMINALLAKIYLTALFPEVAPWVWVVMFVLIMTLINIKSVNLVANFNTVFVLVQLAIIVVFIGLVIHGLNNGEGTATVLSTQPFFSEHAHLSAMVAGATILCFSFLGFDAVTTLSEETRDAAKVIPRAIFLTALYGGVIFITVSYFLQSYFPTNVRFKEPDAALPEIALYVGGKLFQSIFLCATFINTLASGLASQASVSRLLYVMGRDNVLPERIFGFVHPKWRTPSINVLIVGMVALSAISFDLVTATALINFGALVAFTFVNLSVIVHFYVRGGRNRSLKEHFHYLVLPLLGAAIVAVLWLNLESTSLVMGLIWAGLGFGYLFYLTRSFSRPPPRFQESELSPTQ

SEQ ID NO: 5941 - protein, 393 aa, Pseudomonas aeruginosa UCBPP-PA14
MSSLPLYFDYAATTPVDERVIRAMVECLGYQACFGNPASNFHAYGRQARRAVERAREQVAALVGASAGQIVWTSGATESNNLALKGVAQALDAPGHLITSRLEHKAVLDTVQQLADDGWSVTWLAPGTDGLIRPEQVEAAWRADTRLVSLMRVNNELGTLTDIAAIGERVRERGALFHVDAAQASGKVAIDLGRLAVDLMSFSAHKTYGPKGIGALYVGPRAERRLKAQIHGGGHEQGLRSGTLATHQIVGMGEAFALAGELFEEEGRRIAGLQRRLLEGLAQIDGWRLNGSADARIAHTLNLTFDNPAFVPQALESSLAVSSTSACNSARPAPSHVLLALGHDAASAGRSVRLSLGRYTREADVDAAVAALKAAADSGAPAWQPFLGVSRAG

SEQ ID NO: 5942 - protein, 610 aa, Pseudomonas aeruginosa UCBPP-PA14
MCGITGWTDWSRDLGEQRSILERMTRTLAPRGPDAEGLWLSRHALLGHRRLAIIDLENGAQPMLAEAGGRVALTYSGEVYNFRELRAELETLGQVFRTRSDTEVVLRAYLQWGEASFARLRGIYGFALWDEREQSLWLVRDRFGVKPLYYYPTAGGVLFASEPKAIFANPEANPVLDASGIAELFALTTAPTPGHGLYKGLRQVRPGQALRFDRNGVRELVYWALRAERHEEGAEDSAERAGQLLREAVAEQLVADVPLGSLLSGGLDSSAISAFAVAALDGDARRLPTFSVDFPGEGRGFVPTPWQSSWDEPYAQLAANFLGTPHRTVLVAPEEVLEQDEAVLQARDLPGWGELDASLYLLFRQVREHTTVALSGESADEVFGGYPFFHDPSALAHDGFPWLAGKSGPWQLLRREVAERVAAPEYIRARYREALAEVPRLDGEDAAQRRQREVAYLALSRWLPAMLERKDRMSMAVGLEVRVPFCDHRLVEYVWNLPWALKSVAGESKSLLRRALRGHLPQAILERRKSGFPANPDPRYLALLRERVGRLLADGRSPLFELVDAGRVRQALEQGTPLPSPRASASPTAGLAYLLNLDRWLTRHGVDISL

SEQ ID NO: 5943 - protein, 291 aa, Pseudomonas aeruginosa UCBPP-PA14
MKVGFLGLGGMGAAMATRLVQAGLEVTLWNRSAAACEPLVALGATRAEEVGELFGLDVVISMLADDQAIRAVLLDSGALERARPGLIHLSMSTLSLDCVEALDQAHQRQGIAFVAAPVFGRTDVAEAGKLNIVVGGPEEAIEQVKALLEIMGQKTWFFGKDPRSAMAVKISGNFMIASAIESMGESVALVKRLGVEPGRFMELMSSTLFDAPVYRNYGPQIVEQRFTPARFRLVLGLKDVDLALSAGKRHNVPLPLASLLHDVLLEAIAHGDGESDWTALAKVALSRSGQI

SEQ ID NO: 5944 - protein, 268 aa, Pseudomonas aeruginosa UCBPP-PA14
MKKLPAITALALALISGLAQADRLEDIRKAGVLRVASFDSNPPFGFVDAKSKQIEGLDVDYAKALADKLGVRLQVLPTNPANRIPLLTANKVDLVLANFTITRERAQQVDFSIPYFSSGQQFIVKKGTLTSPEVLNKWRVGVDKGTVNEGVLREKFPGAKVIAYDDTPFAFTALRNGQVQAITQDGPKLIGLLANVPDRDKYEVPPFTISNDLIGVGIPKGEKSLTEFVDKSLRELEQDGQAQKIYDTWFGPQTKTPLARLYKIGDKS

SEQ ID NO: 5945 - protein, 328 aa, Pseudomonas aeruginosa UCBPP-PA14
MKKVVLYKRLSAPLMERLRERVEVLLIEEPGRDGLARLRDALPEAHGLLGASLRLEAGLLDLAPRLEAIASVSVGVDNYDIDYLDRRGILLSNTPDVLTETTADTGFALILATARRVVELAGWVRAGEWKKSVGAAQFGTDVHGKTLGIVGMGRIGEALARRGHHGFGMRVLYHSHSPKPHVEERYAASYRSLDALLEESDFVCLTLPLTAATEGLIGAAQFARMRPQAIFINISRGRVIDEAALIEALAQRRIRAAGLDVFEREPLSPDSPLLRLPNVVATPHIGSATEETREAMARCAVDNLLAALAGERPLNLVNPSAWARRRGA

SEQ ID NO: 5946 - protein, 399 aa, Pseudomonas aeruginosa UCBPP-PA14
MCLDDPTHSRRDILKLAALLSAAGALPLLSSLQARAAAEPDAPVRIGYLPITDATPLLVAHANGLFEAEGIQAERPVLLRSWAQVIEAFISGQVNVIHLLSPMTVWARYGSKVPAKVVAWNHVGGSGLTVAPEIDDVRQLGGKSVAIPFWYSIHNVVLQQLLRDNGLRAVSRAVGAALAADEVNLVVLPPSDMPPALASKRIHGYIVAEPFNALAENLKVGRVQRFTGDVWRNHACCVVFMHEHDLERRPQWSQKVVNAIVKAQLWTREHRAEAAQLLSKAGANRYTPHAPEVLGRVLAPGAEEQQAYLASGAIRHADWQERRIDFQPYPYPSYTEELVRRLKDTLIEGNNAFLASLDPRQVASDLVDDRFVRQALAEVGGLQAFGLAEGFQRSEEISP

SEQ ID NO: 5947 - protein, 340 aa, Pseudomonas aeruginosa UCBPP-PA14
MNHKVALSFADGKTLFLPVGHDDLLLDAALRHGINLPLDCREGVCGTCMGRCEAGSYSLDYADEDTLSAADLEQRKVLACQTRVRSDAAFYFDFASTLCHAAAAQAHSGVVRELRLLSEDTALLRLDAGAAGRQLDFLPGQYARLQVPGSDCRRAYSFANRPNPQNHLQFLIRLLPGGAMSDYLRQGCRVGDEIRFEAPLGTFYLRQVERPLLLVAGGTGLSAFLGMLDELAERGCERPVHLYYGVRRAADLCELQRIAGYAERLPGFRFVPVLSEADADWDGRRGYLHEHFDAARLRDEAFDLYLCGPPPMVEAVRQWLRGRSLEHLRLYLEKFTESGD

SEQ ID NO: 5948 - protein, 396 aa, Pseudomonas aeruginosa UCBPP-PA14
MTREDPIVIVSAVRTPMGGFLGDFKDVNAATLGAAAVRAAVERARLQADEVDEAVLGCVLAAGQGQAPARQAVLGAGLARGTPCSTLNKMCGSGMKALMLAHDTLLAGSAGVALAGGMESMSNAPYLLERARSGYRMGHGKVLDHMFLDGLEDAYDKGRLMGTFAEDCAEAYGFTREAQDEFAVASLTRAQQAMRDGRFQAEIVPLTVTAGKTERLVDSDEQPPKARLDKIPTLKPAFREGGTVTAANSSSISDGAAALVLMRLSEAERRGLAPLAAIRGHASFADAPNLFPTAPVGAVKRLMQRTGWSLGEVDLFEVNEAFAVVGMAAMRDLDLSHEHLNVHGGACALGHPIGASGARIVVTLLNALQQYDLERGVAAVCIGGGEATAIAVERLR

SEQ ID NO: 5949 - protein, 382 aa, Pseudomonas aeruginosa UCBPP-PA14
MTVLIQGAGIAGLALAREFTKAGIDWLLVERASEIRPIGTGITLASNALTALSSTLDLDRLFRRGMPLAGINVYAHDGSMLMSMPSSLGGSSRGGLALQRHELHAALLEGLDESRIRVGVSIVQILDGLDHERVTLSDGTVHDCSLVVGADGIRSSVRRYVWPEATLRHSGETCWRLVVPHRLEDAELAGEVWGHGKRLGFIQISPREMYVYATLKVRREEPEDEEGFVTPQRLAAHYADFDGIGASIARLIPSATTLVHNDLEELAGASWCRGRVVLIGDAAHAMTPNLGQGAAMALEDAFLLARLWCLAPRAETLILFQQQREARIEFIRKQSWIVGRLGQWESPWSVWLRNTLVRLVPNASRRRLHQRLFTGVGEMAAQ

SEQ ID NO: 5950 - protein, 393 aa, Pseudomonas aeruginosa UCBPP-PA14
MLSNAQRALIKATVPLLETGGEALITHFYRTMLGEYPEVRPLFNQAHQASGDQPRALANGVLMYARHIDQLQELGPLVAKVVNKHVSLQVLPEHYPIVGTCLLRAIREVLGEQIATDEVLEAWGAAYQQLADLLIEAEESVYAASAQADGGWRGVRRFHVARKQAESEEITSFYLEPVDGQPLLAFQPGQYIGLRLDIDGEEVRRNYSLSAASNGREYRISVKREAGGRVSNHLHDRVAEGDELDLFPPAGDFVLRDSDKPLVLITAGVGITPALAMLQEALPQARPIRFIHCARHGGVHAFRDWIEDVSAQHEQVEHFFCYSEPRVGDSPDAEGVLSREKLADWLPQERDLDAYFLGPRPFMAQVKRHLADLGVPSQQCHYEFFGPAAALDA

SEQ ID NO: 5951 - protein, 407 aa, Pseudomonas aeruginosa UCBPP-PA14
MIGFEIFLAIGMFTAIVLGLVAIILVARAKLVSSGDVTIQINGEHSLTVPAGGKLLQTLATNNVFLSSACGGGGTCAQCKCVVVEGGGEMLPTEESHFTRRQAKEGWRLSCQTPVKQDMQIRVPEEVFGVKKWECTVESNPNVATFIKELTLRLPDGESVDFRAGGYVQLECPPHVVEYKDFDIQPEYRGDWDKFNMWRYVSKVDETVIRAYSMANYPEEQGVVKFNIRIASPPPGSDLPPGQMSSWVFNLKPGDKVTVYGPFGEFFAKDTEAEMVFIGGGAGMAPMRSHIFDQLRRLKSNRKISFWYGARSLREAFYTEEYDQLQAENPNFQWHLALSDPQPEDNWTGLTGFIHNVLFENYLKDHPAPEDCEFYMCGPPMMNAAVIKMLTDLGVERENILLDDFGG

SEQ ID NO: 5952 - protein, 391 aa, Pseudomonas aeruginosa UCBPP-PA14
MSLNPRDVVIVDFGRTPMGRSKGGMHRNTRAETMSAHLISKLLERNPKVDPAEVEDVIWGCVNQTLEQGWNIARMASLMTQIPHTSAAQTVSRLCGSSMSALHTAAQAIQTGNGDVFVIGGVEHMGHVGMMHGVDPNPHLSLYAAKASGMMGLTAEMLGKMHGISREAQDKFGARSHQLAWKATQEGKFKDEIIPMEGYDENGFLKVFDFDETIRPETTVETLAQLKPAFNPKGGTVTAGTSSQITDGASCMIVMSAQRAQDLGIQPMAVIRSMAVAGVDPAIMGYGPVPSTNKALKRAGLTIADIDFVELNEAFAAQALPVLKDLKLLDKMDEKVNLHGGAIALGHPFGCSGARISGTLLNVMKQNGGTLGVSTMCVGLGQGITTVFERV

SEQ ID NO: 5953 - protein, 460 aa, Pseudomonas aeruginosa UCBPP-PA14
MKIKESPRAFHAASGTLRNICRRKAAVRTTTTASSWCVEGWAWAFLVLSLYARRLPQSMDNLNSAVQVLIHGSNTLFILLGAVMVLAMHAGFAFLEVGTVRLKNQVNALSKILSDFAISALAYFFVGYWIAYGVTFFHPAAALTVDSGYALVKFFFLLTFAAAIPAIISGGIAERARFGPQLCATALIVAFVYPFFEGLVWNGNFGLQEWLKLEFGAPFHDFAGSVVVHALGGWLALAAVLLLGSRNGRYRDGKLVAMAPSSIPFLALGSWILIIGWFGFNVMSAQTLAGVSGLVAVNSLLAMVGGTMASLLIGRNDPGFLHNGPLAGLVAVCAGSDLMHPIGALATGLVAGALFVWAFTATQVRWKIDDVLGVWPLHGLCGVWGGIACGIFGQQALGGLGGVSLASQALGSLLGVTVAFAGGLLVYGLMKALLGIRLSQEEEYYGADLSIHKIGAISHE

SEQ ID NO: 5954 - protein, 404 aa, Pseudomonas aeruginosa UCBPP-PA14
MPTLHLDALSTTALALLLLALGSQLKKRSRWLTRLCVPSPVIAGFGFAFLVWLLRDRGWLDIGLDTSMQTPLMVAFFTTVGLGGSLGLLRKGGKTLLVYLSACWALAILQNLIGVGSAGLLGLDPLLGIMAGAVSLEGGFGAAAAFGPVAEGLGAQGATTVALASATFGMVAGGLLGSPVARWLIERNRLPVQAESDNRLEALGQQERRQHAAATLDGNLLLRLLTCVLLVMVLGFWLGDALQERLGLVLPSYVGAMFIAIVLRNLDDRLGWLRIPDHAVGTLGDVCLGIFLTMAMMSLKFWELENLGLPLLGVLFIQVAVLLLLTIFALFRLLGRNYDAAVLCAGFLGHGLGATPNAVANMGAVCEHYRVFSHKAFIIVPLCGAVLIDLVAIPAITWFINAFS

SEQ ID NO: 5955 - protein, 69 aa, Pseudomonas aeruginosa UCBPP-PA14
MSNRQNGTVKWFNDAKGFGFITPESGNDLFVHFRSIQGTGFKSLQEGQKVSFVVVNGQKGLQADEVQVI

SEQ ID NO: 5956 - protein, 298 aa, Pseudomonas aeruginosa UCBPP-PA14
MTDIAFLGLGNMGGPMAANLLKAGHRVNVFDLQPKAVLSLVEQGAQGADSALQCCEGAEVVISMLPAGQHVESLYLGADGLLARVAGKPLLIDCSTIAPETARKVAEAAAAKGLTLLDAPVSGGVGGARAGTLSFIVGGPAEGFARARPILENMGRNIFHAGDHGAGQVAKICNNMLLGILMAGTAEALALGVKNGLDPAVLSEVMKQSSGGNWALNLYNPWPGVMPQAPASNGYAGGFQVRLMNKDLGLALANAQAVQASTPLGALARNLFSLHAQADAEHDGLDFSSIQKLYRGKD

SEQ ID NO: 5957 - protein, 382 aa, Pseudomonas aeruginosa UCBPP-PA14
MIQSKLPNVGTTIFTRMSQLAAECGAINLSQGFPDFDGPPELREAVGRHIAAGHNQYAPMTGLPALREQVAKKIEQFYGRRVSADSEVTITPGATEAIFSAIQALVHPGDEVVVLDPSYDSYEPSVQLAGGRCVHVPLALPDFSIDWQRMAEAIGPRTRLVIINTPHNPSGALISREELDRLAALIRDRDIYLISDEVYEHLVFDGVAHTSVLSHEELYPRSFVVSSFGKTYHVTGWKTGYVVAPPALSAELRKVHQYVNFCGVTPLQWALADYMAGHPEHLRQLPGFYQAKRDLFCDLLLDSRFRFTRAPGTYFQCVDYSAVRPDLDDVAMAEWLTREHGVAAIPVSVFYEKAPDAMRLVRFCYAKREETLRQAAEKLCAI

SEQ ID NO: 5958 - protein, 493 aa, Pseudomonas aeruginosa UCBPP-PA14
MVPVIALVGRPNVGKSTLFNRLTKSRDAIVAEYAGLTRDRQYGEARWQGRTYIVIDTGGISGDEEGIDAKMAEQSLQAIEEADAVLFLVDSRAGMTAADQMIAEHLRKRNKRSFLIANKVDTIDPDLARAEFSPLGLGDALPIAAAHGRGINHMLQEALGIFPKDNAEEEGEGEPASEEVAEGEEPTRIPGPSEKDGIKIAIIGRPNVGKSTLVNRMLGEERVIVYDQAGTTRDSIYIPFERNEEMYTLIDTAGVRRRGKIFEAVEKFSVVKTLQAIQDANVVIFVMDAREGVVEHDLNLLGFVLETGRALVIALNKWDGMEAAERDYVKTELERRLLFVDFADIHFISALHGTGVGHLYKSVQESFRSAVTRWPTSRLTSILEDAVQVHQPPMVNGRRIKLRYAHLGGANPPLIVIHGNQVDAVPKAYTRYLEKTYRRVLKLVGTPIRIEYKGGENPYEGKKNSLTARQVNKKRRLMSHHKKAEKKKKDKRR

SEQ ID NO: 5959 - protein, 341 aa, Pseudomonas aeruginosa UCBPP-PA14
MTIMKGTWLLLAAVCLGASATAEAGATLDAVKRKGYVQCGVSDGLPGFSYADAKGRFKGLDVDICRALAAALFGDAEKVRFTPLPATERFSALQSGTVDLLSRNTSWTSSRDTALGIHFTGVTYFDGQGFLVNRKLGVSSARELKDATVCIQSGTTNELNVADYFRAHGIRYKAVLDDSYEKSARALEAGQCDVLSSDQSQLYAQRLKLAKPDQYVVLPEVISKEPLGPAVRQGDEAWFNIVRWTLYGLLNAEELGVTSSNVERQARDSRNPDVARLLGSEGDAGKDLQLPRDWVVQMVRQVGNYGEIFARNVGDGSPLKMPRGLNAQWNLGGLHYAPPIR

SEQ ID NO: 5960 - protein, 325 aa, Pseudomonas aeruginosa UCBPP-PA14
MKKNVFVFSRLAPEHLERLQRQFNVRVLEPKQGDIDAQYAAALPDTHGMIGVGRPLGARQLEQAKQLEVISSVSVGYDNYDLDYLNRRGIALTNTPDVLTETTADLGFALLISAARRVAELDAWVKAGNWKRTVDAPQFGTDVHGKKLGILGLGRIGAAIARRGRFGFGMQVLYHGNNRKPELEQELGARFLGFDELLGEADFVCVVVPLGAQTRRLIGARELGLMKPSAILVNVARGQVVDEAALVAALREKRILGAGLDVYEKEPLAESPLFALDNVVTLPHIGSATHETRRAMAERALQNFEAALRGERPLDLVNPQVWRRG

SEQ ID NO: 5961 - protein, 391 aa, Pseudomonas aeruginosa UCBPP-PA14
MSDIVIVAGARTPMGGFQGSLTGVSAVDLGAVVIREAVQRAGIAAEDVQEVIMGCVLPAGLKQGPARQAALAAGLPAATGCTTINKLCGSGMKAVMLAHDLLKAGTNQVMVAGGMESMSNAPYVLEKARSGLRMGHGEIKDHMFLDGLEDARTGRLMGSFAQETADKYGVTREEMDAYAIESLKRAQAAIADGSLAAEIVPVTVTSRKGESVVKDDEQPLTANLEKIPSLKPAFRKDGTITAANASSISDGASALVLMTAEEAQRRGLKPLARIVGHATQSQDPSEFTLAPIGAMTNLFARTGWNKDDVDLFEINEAFAMVTMLAMREHGLDHAKVNVYGGACAQGHPVGSTGSRIILTLINALRQKGGKRGVASLCIGGGEATAVAVELL

SEQ ID NO: 5962 - protein, 557 aa, Pseudomonas aeruginosa UCBPP-PA14
MYQYDEYDQALVSERVAQFRDQIARRLDGELSEEEFLPLRLQNGLYLQKHAYMLRVAIPYGTLSSPQLRALAHVARHYDRGYGHFTTRQNIQFNWIELEQVGDILEHLAGAQMHAIQTSGNCVRNITTEAFAGVAADEWTDPRPLAEILRQWSTVNPEFLFLPRKFKIALSSAVEDRAAVQMHDIGLYLYRHPDAGELRLRVLVGGGLGRTPMLGQVIRDDLPWQHLLSYVEAILRVYNRYGRRDNKYKARIKILVKALGIEAFAREVEEEWQHLRDGPAQLTAEECQRVAERFVLPRYLPPAGGELAYGSARAVDPAFARWASRNVQAHKVPGYASVVLSTKPGASAPPGDVTAEQMERVADWAERYGFGEIRVAHEQNLVLPDVRLENLHALWREACAAGLGTPNQGLLSDIIACPGGDYCALANAKSIPIAQGIQQRFEDLDHLHDIGELSLNISGCMNACGHHHIGNIGILGVDKNGSEWYQVTLGGAQGKDSALGKVIGPSFSAAEVPAVIERIVETFTDLRVGPERFIDTFNRVGLEPFKARVYARMEEPA

SEQ ID NO: 5963 - protein, 547 aa, Pseudomonas aeruginosa UCBPP-PA14
MAKAADVVVQCLENEGVQYVFGIPGEENLDLLESLRKSQIRLVLTRHEQSAGFMAATYGRLTGKTGVSLSTLGPGATNLVTAGAYAYLGGMPMLMITGQKPIKKSKQGRFQILDVVGMMQPLTKYTHQLASADNIPSRVREAFRLAEEEKPGAVHLELPEDIAAEQTDSLPIPPSLSRRPLAEYKAICAAVEKLRAARSPILVIGAGANRKMTAKVLKQLIDKTGIPFVTTQMGKGVVDERHPRFLGNAALSAGDFVHRAVEAADLIVNVGHDVIEKPPFFMVRGGTEVIHVNFRSAEVDPVYFPQIEVVGDIANAIWQIGEALDDTAHWDFTRLLAIREANEAQVAEGADDPRFPLYPQRLVADVRRALPSQGIVALDNGMYKIWFARNYKAHMPNTVLLDNALATMGAGLPSAMAAHLVYPDRPIVAVCGDGGFMMNSQELETAVRLKMNLTVIILRDNGYGMIRWKQSNMGFADFGLDYGNPDFVRYAEAYGAHGHRVDSAEGFLPLLERCLGTPGVHVIDCPVDYSENDRILNVELRERALAV

SEQ ID NO: 5964 - protein, 402 aa, Pseudomonas aeruginosa UCBPP-PA14
MSEPIDILIAGAGIGGLSCALALHQAGIGKVTLLESSSEIRPLGVGINIQPAAVEALAELGLGPALAATAIPTHELRYIDQSGATVWSEPRGVEAGNAYPQYSIHRGELQMILLAAVRERLGQQAVRTGLGVERIEERDGRVLIGARDGHGKPLALGADVLVGADGIHSAVRAHLHPDQGPLSHGGITMWRGVTEFDRFLDGKTMIVANDEHWSRLVAYPISARHAAEGKSLVNWVCMVPSAAVGQLDNEADWNRNGRLEDVLPFFADWDLGWFDIRDLLTRNQLILQYPMVDRDPLPHWGRGRITLLGDAAHLMYPMGANGASQAILDGIELAAALARNADVAAALREYEEARRPTANKIILANREREKEEWAAASRPKTEKSAALEAITGSYRNQVERPR

SEQ ID NO: 5965 - protein, 326 aa, Pseudomonas aeruginosa UCBPP-PA14
MNMSQNLDFIHSAQRTIGLERDAVDSLLARIGDDFVKACELLLAGKGRVVVVGMGKSGHIGKKIAATLASTGTPSFFVHPAEASHGDMGMITKDDVVLALSNSGSTAEIVTLLPLIKRLGITLISMTGNPESPLAKAAEVNLDASVGQEACPLNLAPTSSTTVTLVLGDALAIALLEARGFTAEDFAFSHPGGALGRRLLLKVEDVMHVGEGLPQVLLGTSLTGALMEMTRKGLGMTVVLDEHGKLAGIFTDGDLRRALDRGIDVRQVTIDQVMTVHGKTVRAEILAAEALKIMEDNKIGALVVVDADDRPVGALNMHDLLRAGVM

SEQ ID NO: 5966 - protein, 323 aa, Pseudomonas aeruginosa UCBPP-PA14
MSHALRAVFLDHASLDLGDLDMRPLRAAFDELQLHAASQPQEVAARLHGARVAISNKAPIDAQCIAACPELELILVSATGTNNIDLAAARERGIVVANCHGYGTPSVAQHTLALLLALATRLPDYQQAVRSGRWQQSSQFCLLDFPIVELEGKTLGLLGHGELGGAVARLAEAFGMRVLLGQLPGRPARADRLPLGELLPRVDALTLHCPLTEDTRGMLGAAELALMKPGAFLVNTARGGLVDEQALADALRGGHLGGAATDVLSVEPPRNGNPLLAPDIPRLIVTPHNAWGSREARQRIVGQLAENAEAWKAGRALRVVNAG

SEQ ID NO: 5967 - protein, 390 aa, Pseudomonas aeruginosa UCBPP-PA14
MATSYSARSRAIEPFHVMALLARANELQAAGHDVIHLEIGEPDFTTAEPIVEAGRAALAAGHTRYTAARGLPALREAIAKFYGERYGVDLDPQRVLVTPGGSGALLLASSLLVDPGRHWLLADPGYPCNRHFLRLVEGAAQLVPVGPDSRYQLTPDLIERHWDSDSVGALVATPANPTGTLLDRDELAGLSGALKARGGHLVVDEIYHGLTYGVDAASVLEVDDDAFVLNSFSKYFGMTGWRLGWLVAPAAAVPELEKLAQNLYISAPSMAQQAALACFEPTTIAILEERREEFARRRDFLLPALRELGFGIAVEPEGAFYLYADISAFGGDAYAFCKHFIETEHVAFTPGLDFGRHQAGHHVRFAYTQNLSRLQEAVERIARGLKNWRP

SEQ ID NO: 5968 - protein, 126 aa, Pseudomonas aeruginosa UCBPP-PA14
MHAIMLKAKLHRAEVTHAVLDYEGSCAIDGDWLDLSGIREYEQIQIYNVDNGERFTTYAIRAENGSKMISVNGAAAHKAKVGDRVIICAYAHYSEAELASHKPRMLYMAPGNQLSHTSEAIPIQVA

SEQ ID NO: 5969 - protein, 366 aa, Pseudomonas aeruginosa UCBPP-PA14
MALLPLALLTPLLAPLRRLAARGWLPQADVDGLLRHAHPLASLNRHYARVEARYWVADDMLALALRTAPGWPPARPGQHIQLLAERDGVRVGRSYSLTRVVGERLEIAVKRHPDGLLSPWLCEHLAVGQRVELQPAQGDLRWPMQAEAVCLLAAGSGLTPLLGLLREALENGYRGPVLWLHYARHPGQRAWFGELEALAARHPNLELRWSLTRGARADGCLEGHFQPRHLDGWAADLARSQALACGPAAFVEAVGEQLGARFAGLQTESFSVPRWRSGEAPREVRLRFARSQREVSGDSAASLLEQAEAHGLRPAHGCRQGICASCTCVLLSGCVRDLRSGALCSEPGQSIRLCVSAAHGDLALDL

SEQ ID NO: 5970 - protein, 528 aa, Pseudomonas aeruginosa UCBPP-PA14
MKTVHSASYEILRRHGLTTVFGNPGSNELPFLKDFPEDFRYILGLHEGAVVGMADGFALASGRPAFVNLHAAAGTGNGMGALTNAWYSHSPLVITAGQQVRSMIGVEAMLANVDAGQLPKPLVKWSHEPACAQDVPRALSQAIQTASLPPRAPVYLSIPYDDWAQPAPAGVEHLAARQVSGAALPAPALLAELGERLSRSRNPVLVLGPDVDGANANGLAVQLAEKLRMPAWVAPSASRCPFPTRHACFRGVLPAAIAGISRLLDGHDLILVVGAPVFRYHQFAPGDYLPAGAELVQVTCDPGEAARAPMGDALVGDIALTLEALLEQVRPSARPLPEALPRPPALAEEGGPLRPETVFDVIDALAPRDAIFVKESTSTVTAFWQRVEMREPGSYFFPAAGGLGFGLPAAVGAQLAQPRRQVIGIIGDGSANYGITALWSAAQYRVPAVFIILKNGTYGALRWFAGVLEVPDAPGLDVPGLDFCAIARGYGVEALHAATREELESALKHALAADRPVLIEVPTQTIEP

SEQ ID NO: 5971 - protein, 317 aa, Pseudomonas aeruginosa UCBPP-PA14
MIEVIVGAIRLEAQDIHSFELFRADGAALPSFEPGAHIDLHLPNGLVRQYSLCGPAERPRHYRIAVLRCRDSRGGSATLHAELRVGQRLRIGEPRNLFPLSPEPGPRLLFAGGIGITPLLAMAERLARDGANFQLHYCAHSAERAAFVDYLDRCAFADRVHCHFDHGDSSRRADLRALLAASPRDAQLYLCGPAGFMQWIEESARELGWEASRLHREHFAAAPRDANADGTFEVQLASNGALIRVAAGQTVLAALREAGVDLPASCEQGICGTCLTRVLDGEPEHRDLYLSEEEQAANDCFTPCCSRSRSPRLVLDL

SEQ ID NO: 5972 - protein, 393 aa, Pseudomonas aeruginosa UCBPP-PA14
MRYSDFTQRIAGDGAAAWDIHYRALARVEQGEEILLLSVGDPDFDTPAPIVQSAIDSLLAGNTHYADVRGKRALRQRIAERHRQRSGQAVDAEQVVVLAGAQCALYAVVQCLLNPGDEVIVAEPMYVTYEAVFGACGARVVPVPVRSENGFRVQAEEVAALITPRTRAMALNSPHNPSGASLPRATWEALAELCTAHDLWMISDEVYSELLFDGEHVSPASLPGMAERTATLNSLSKSHAMTGWRVGWVVGPAALCAHLENLALCMLYGSPEFIQDAACTALEAPLPELEAMREAYRRRRDLVIECLADSPGLRPLRPDGGMFVMVDIRPTGLSAQAFADRLLDRHGVSVLAGEAFGPSAAGHIRLGLVLGAEPLREACRRIALCAAELLGQA

SEQ ID NO: 5973 - protein, 603 aa, Pseudomonas aeruginosa UCBPP-PA14
MSDSPQNPGPSSLKIYFRLLGYVKPYIGMFLLSIVGFLIFASTQPMLAGILKYFVDGLSNPDAALFPNVQWPWLRDLHLVYAVPLLIILIAAWQGLGSFLGNFFLAKVSLGLVHDLRVALFNKLLVLPNRYFDTHSSGHLISRITFNVTMVTGAATDAIKVVIREGLTVVFLFLYLLWMNWKLTLVMLAILPVIAVMVTTASRKFRKQSKKIQVAMGDVTHVASETIQGYRVVRSFGGEAYEEKRFHDASQSNTDKQLRMTKTGAVYTPMLQLVIYVAMAILMFLVLWLRGDASAGDLVAYITAAGLLPKPIRQLSEVSSTVQRGVAGAESIFEQLDEAAEEDQGSVEKERVSGRLEVRNLSFRYPGTDKQVLDDISFVAEPGQMIALVGRSGSGKSTLANLVPRFYQHNDGKIMLDGVEVEDYRLRNLRRHIALVTQQVTLFNDSVANNIAYGDLAGAPREEIERAAKAANAKEFIDNLPQGFDTEVGENGVLLSGGQRQRLAIARALLKDAPLLILDEATSALDTESERHIQAALDEVMKGRTTLVIAHRLSTIEKADLILVMDQGQIVERGSHAELLAQNGHYARLHAMGLDEQAPAPVG

SEQ ID NO: 5974 - protein, 1481 aa, Pseudomonas aeruginosa UCBPP-PA14
MKAGLYHPETFKDNCGFGLIAHMQGEPSHQLLQTAIEALTCMTHRGGINADGKTGDGCGLLIQKPDLFLRAVAREAFSVDLPEQYAVGMVFFNQDPVKAEAARENMNREIVAAGLELVGWRKVPIDTSVLGRLALERLPQIEQVFIGGAGLSDQDFAIKLFSARRRSSVANAADSDHYICSFSHKTIIYKGLMMPADLAAFYPDLGDERLQTAICVFHQRFSTNTLPKWPLAQPFRFLAHNGEINTITGNRNWAQARRTKFTNELIPDLEELGPLVNRVGSDSSSMDNMLELMVTGGMDLFRGLRMIIPPAWQNVETMDADLRAFYEYNSLHMEPWDGPAGVVLTDGRYAVCLLDRNGLRPSRWVTTKNGYITLASEIGVWDYKPEDVIAKGRVGPGQILAVDTETGQVLHSDDIDNRLKSRHPYKQWLRQNALRIQATLDDDHGVASYDADQLKQFMKMFQVTFEERDQVLRPLGEQGQEAVGSMGDDTPMAILSRRIRSPYDYFRQQFAQVTNPPIDPLREAIVMSLETCLGVEQNIFEEAPHHANQAILTTPVISPAKWRTIMTLDRPGFDRHFIDLNYDESMGLEAAVRNIADQAEEAVRGGKVLLILSDRHIAPGKLPVHAALAVGAVHHRLVQTGLRCDSNILVETATARDPHHFAVLIGFGASAVYPFLAYEVLADLIRTGEVLGDLYEVFKYYRKGISKGLMKILSKMGISTVASYRGAQLFEAVGLSDEVTGLCFTGVASRIQGARFVDIENEQKLLAAEAWSNRKPIQQGGLLKFVYGGEYHAYNPDVVNTLQAAVQQGDYEKFKEYTALVDQRPVSMIRDLLQVKTAAQPLALDEVEPLEAIFKRFDAAGISLGALSPEAHEALAEAMNTLGGRSNSGEGGEDPARYGTLKSSKIKQVATGRFGVTPEYLVNAEVLQIKVAQGAKPGEGGQLPGGKVNGLIARLRYAVPGVTLISPPPHHDIYSIEDLAQLIFDLKQVNPQALVSVKLVSEPGVGTIAAGVAKAYADLITISGYDGGTGASPITSIKYAGSPWELGLAETHQTLRGNDLRGKVRVQTDGGLKTGLDVIKAAILGAESFGFGTAPMIALGCKYLRICHLNNCATGVATQNDKLRKDHFIGTTAMVINFFTFIATETREWLARLGVRSLGELIGRTDLLEILPGETAKQQNLDLAPLLGSDLIPADKPQFCEVEKNPPFDQGLLAEKMVELSKAAIEGLSGGEYELDICNCDRSIGARVSGEIARLHGNQGMAKAPVVFRFKGTAGQSFGVWNAGGLHLYLEGDANDYVGKGMTGGKLVITPPKGSPFKTQESAIVGNTCLYGATGGKLFAAGTAGERFAVRNSGSHAVVEGTGDHCCEYMTGGFVCVLGKTGYNFGSGMTGGFAYVLDMDNTFVDRVNHELVEIQRISGEAMEAYRSHLRKVLVEYVNETASEWGANILENLDDYLRRFWLVKPKAASLGSLLTSTRANPQ

SEQ ID NO: 5975 - protein, 467 aa, Pseudomonas aeruginosa UCBPP-PA14
MTHDTGLRRGLNARHIRFMALGSAIGTGLFYGSASAIQMAGPAVLLAYLVAGAAVYMVMRALGEMAVHEPVSGSFGHYASSYLGPLAGFVTGWTYAFEMIIVCLADVTAFGIYMGFWFPDVPRWIWVLSIVLFIGGLNLCHVKVFGELEFWLSLVKVGAIVAMILAGLGIMFFGFSLDGAATSATGVHNLWQHGGFLPNGWAGLVASLSVVVFAFGGIEIIGITAGEAQDPQRVIPRAINAVPLRILLFYVLTLFVLMAIFPWQQIGSNGSPFVQIFDGLGIESAAAILNVVVITAAISAINSDIFGAGRMLYGMARQGQAPVGFSRVSRHGVPWMTVLLMAVALLLGVALNYLIPQSVFLLIASIATFATVWVWLMILLAQVGMRRRMGPRQVAALKFPVPLWPFAPAAAIVFMLFIFVVLGYFPDTRPALWVGAIWIAVLVIAYRRWVRPKGDAAHGVLQAQGGL

SEQ ID NO: 5976 - protein, 482 aa, Pseudomonas aeruginosa UCBPP-PA14
MSQESSQKLRLGALTALVVGSMIGGGIFSLPQNMAASADVGAVLIGWAITAVGMLTLAFVFQTLANRKPELDGGVYAYAKAGFGDYMGFSSAWGYWISAWLGNVGYFVLLFSTLGYFFPIFGKGDTVAAIVCASVLLWALHFLVLRGIKEAAFINTVTTVAKIVPLFLFILICLFAFKLDIFTADIWGKSNPDLGSVMNQVRNMMLVTVWVFIGIEGASIFSSRAEKRSDVGKATVIGFITVLLLLVLVNVLSMGVMTQPELAKLQNPSMALVLEHVVGHWGAVLISVGLLISLLGALLSWVLLCAEIMFAAAKDHTMPEFLRRENANQVPANALWLTNICVQVFLVVVFFTSGDPDGMDPYTKMLLLATSMILIPYFWSAAYGLLLTLKGETYENDARERSKDLVIAGIAVVYAVWLLYAGGLKYLLLSALLYAPGAILFAKAKHEVGQPIFTGIEKLIFAAVVIGALVAAYGLYDGFLTL

SEQ ID NO: 5977 - protein, 442 aa, Pseudomonas aeruginosa UCBPP-PA14
MVGNPALAELLRAPRLIPWRNWSGAQSCLPLAREAPKDLDELVRVIRQASGRIRPVGSGHSFSALVPTDGTLLSLAYFSGLLSHDSATLQAEFGGGTPMSQMGAPLKEIGQALVNMADIDYQTLAGAIATSTHGTGVGFGSYSAQVRGLQLVTASGEVLECDAKRNVEVFDAARVSLGALGVVTRVRLQNRAAYRLRERQWIARTEELLEDVEKNTRENQHWEMLVVTHSDYALSIALNETDEPKTPPLDPAKEGGNEFVGLIEGLDKYLSDFPETRRTLLNSLRHFARFDERVDDSYAVYANVRNVRFNEMEYSVPAEHGPACLREILALIRDKDLRTWFPIEYRYVKADDIPLSMFEGRDSCSISVHQHYSMDHHNFFAAVEPIFWKYAGRPHWGKLHGLNAHQLQGLYPRWKAFAEVRQALDPRGRFLNAHLSSILGVT

SEQ ID NO: 5978 - protein, 516 aa, Pseudomonas aeruginosa UCBPP-PA14
MFFGSTALILVLTAALILYPDSAGALLGRIQAWLSHSFGWYYMLAIGAYLFFVAWVAFSRFGTLKLGEEHEKPDFSYGAWAGMLFSSGIGISLLYFAASEPIDHLYHPPEGVPGSPQAARQALQLTFLHWGLHGWAIYALVGLAVGYFAYRHRQPLALRSALYPILGERWVKGAAGHAVDCFGIFVTLLGLVTNLGIGALQVSSGLEYLTGMPHSKGTLLAVILVMSLVATLAAVSGIEKGIRRLSNLNIVLFSSLLLFVLVCGSTLELLNGFVQNLGDYLDGLVLKTFDLYVYTGAGAGKSEEWLGLWTLFYWAWWISWAPFVGMFIARISRGRSVRELVCGVLLIPLGFTLAWLSVFGNSALDLVMNHGATDLGKAALEQPSMSIYLLLEHYPLSKIVIGLSIFVGFVLFLTPADSGSVMLANLSRSGGELDEDAPNWLRILWSAVVTLVTIGLLFAGNFTAMQTVVVLAGLPFSAVLILFMFGLHKAMRADYEAQVGDRRTYQPVPAPTQHQT

SEQ ID NO: 5979 - protein, 447 aa, Pseudomonas aeruginosa UCBPP-PA14
MSDQVIFVDDEATIREAVQQWLELSGFEVRLCLRAEECLEALDKSFAGVVISDVRMPGMDGLQLLANLQAVDRDLPVIVVTGHGDVPMAVEAMRQGAYDFIEKPFTPERLLGSLRRALEKRRLVLENRRLKEQASLKDQVDARLLGVSKPMEALRRQVLALAPTPVNVLIRGETGSGKELVARCLHDFGPRADKPFVALNCAAIPEQLFESELFGHESGAFTGAQGKRIGKLEHAHGGTLFLDEIESMPLAQQVKLLRVLQEQQLERLGSNQSIHVDLRVIAATKPDLLAEARAGRFREDLVYRLNVAELRLPPIRERREDIPLLFEHFASVASQRLGREPQPAAPAELARLMAHDWPGNVRELANAAERHVLGLERGDAEEGGGLTSGLAERMEAFEAECLRQALGQCRGDIKAVMELLQLPRRTLNEKMLRHGLSRSDFVGEEPA

SEQ ID NO: 5980 - protein, 178 aa, Pseudomonas aeruginosa UCBPP-PA14
MSRSLLILDRDGVINLDSDDYIKTLDEWIPIPSSIEAIARLSQAGWTVAVATNQSGIARGYYDLAVLEAMHARLRELVAEQGGEVGLIVYCPHGPDDGCDCRKPKPGMLRQIGKHYGVDLSGIWFVGDSIGDLEAARAVDCQPVLVKTGKGVRTLGKPLPEGTLIFDDLAAVASALLQ

SEQ ID NO: 5981 - protein, 517 aa, Pseudomonas aeruginosa UCBPP-PA14
MWTRLLPFLAWLPGLRRGTLRREAWVGLNGAILALPQSMAYALIAGLPAEYGLYAAMLPVAIACLWGSSRYLVSGPTAAISVLLFSSVAPLAPLGSPQYVQAVLLLTFLAGAFQWLLGVLRVGSLVNFVSHSVMLGFTLGAALLIVLGQLPYLLGLAASGEGAAPGNGWRLLARFAEFDGPSLLVGGFSFALSLLVRRLRPRWPALLLGLLGGATLVWALPGTFASVAHVQALSSALPGWNPLVFDSRSILDLLPAAVACGMLGLVTSLSIARALAARQGDAFDANQEVRAQGLSNLLGPWLSASLSAGSFTRSGLNLEAGARSPLAGAFSALWVALLAVLGARLIEHVPLPAMAAGILLIAWGLIDRPALRALYRSGRAECLVAGLTALATLLLPLQNAIYAGVLASLFFYLRRTSTPRVLRQRNDEEEVLRIEGSIFFGACDYLQRLMRQCDRPRLVLDARQVNFIDFAGAVLLQQEARRLHAEGRRLVLRHARPQVREALGRQADEGCRLHYEG

SEQ ID NO: 5982 - protein, 401 aa, Pseudomonas aeruginosa UCBPP-PA14
MSREVFICDAVRTPIGRFGGSLSAVRADDLAAVPLKALVERNPGVDWSALDEVFLGCANQAGEDNRNVARMALLLAGLPESVPGVTLNRLCASGMDAIGTAFRAIACGEMELAIAGGVESMSRAPYVMGKADSAFGRGQKIEDTTIGWRFVNPLMKEQYGIDPMPQTADNVADDYRVSRADQDAFALRSQQRAGRAQAAGFFAEEIVPVTIRGRKGDTLVEYDEHPRPDTTLEALARLKPVNGPEKTVTAGNASGVNDGAAALVLASAEAVEKHGLTPRARVLGMASAGVAPRIMGIGPVPAVRKLLRRLDLAIDAFDVIELNEAFASQGLACLRELGVADDSEKVNPNGGAIALGHPLGMSGARLVLTALHQLEKSGGRRGLATMCVGVGQGLALAIERV

SEQ ID NO: 5983 - protein, 464 aa, Pseudomonas aeruginosa UCBPP-PA14
MASQRNNGILIGGKRPEYVHSAQGTGLRRILGLPALVFFGLVYMVPLTMFTTYGVVTEITGGRTASAYLITLAAMLFTAFSYSFMVKKYPIAGSAYSYTSLSFGPCVGFLAGWSLLLDYLFLPMINYLLIGLFLNIAFPMVPAWVFVLTAIGLVTVLNVIGISSVAGMSNVIVGAQFVFAVVFVAMAVKHLAGIPSLDLSLPFVGDGSQPGFAPLMAGAAVLCLSFLGFDAVSTLAEETRDPQRDIPRAIVITTVGAGLLFTVLAVFSQLVFPGSVFQDAESAANEVMLAAGGKFLASFFTAAYVAGAAGSALASQASVSRILYSMGRDGILPRRVFGSLSERFKTPVIAILVVSVISLLAVVIDLTTLASMISFGALVAFSAVNLAVIRSYLLLDGRRAPRDLLRYGLVPAIGLGLTLWLWTSLSALTLVIGLTWFAAGLAYLALHTGGFRRKAPTVTFSEQN

SEQ ID NO: 5984 - protein, 639 aa, Pseudomonas aeruginosa UCBPP-PA14
MSFSSLGLSEALARAVEAAGYSQPTPVQQRAIPAVLQGRDLMVAAQTGTGKTGGFALPVLERLFPAGHPDREHRHGPRQARVLVLTPTRELAAQVHDSFKVYARDLPLNSTCIFGGVGMNPQIQALAKGVDVLVACPGRLLDLAGQNKVDLSHVEILVLDEADRMLDMGFIHDVKKVLAKLPPKRQNLLFSATFSKDIVDLANKLLHNPERIEVTPPNTTVERIEQRVFRLPAPQKRALLAHLVTVGAWEQVLVFTRTKHGANRLAEYLTKHGLPAAAIHGNKSQNARTKALADFKANDVRILVATDIAARGLDIDQLPHVVNYELPNVEEDYVHRIGRTGRAGRSGEAISLVAPDEEKLLKAIEKMTRQRIPDGDAQGFDPEAVLPEVAQPEPREAPQKQPRRDKERRSSRERKPKDAQASNPDSNVAAAQDGTEKPAGKRRRRGGKNKENREAGQAQQPRQSREARPAKPNRPPEVDGNRDPEEFLDDDFDNFGNRADYVSPYQGQENKGRGRRGGQQKPQGGTGQQGRGQGQGQARGKSQGAAQGGARGQGAGQGKAKKPRASKPRGQGRENASRMSDAPLREPSEYGTGKQPSRQPVVINKRDLVRMDRFPTAEQLDELEPRRKGERPALLTRNR

SEQ ID NO: 5985 - protein, 486 aa, Pseudomonas aeruginosa UCBPP-PA14
MPTSGGVYRCRGLSLGDSGAVAATPIRVAFLNDDQTPAPLPVPRPSPCPGLLRIVQALDGGICRIKLDAGRLDAAQARAVAAAARDCASGVIEATNRSNLQLRGVRRGEEERLVRRLLDAGLGPRHGALAGADDVRNLMLSPAAGLDPHLSLDVRPLAARLLLRLQADSRYHALSAKFAIQLDGGEDLAMLEHPHDIWLSPMPAAPTATLVFGLAGCPARDRPLAALPAERGESLVLALLDLFLERAQPQQTRMRHLLQELAGESLLEALQARLDFPLRRDERVAAWRRPPGRAWSHLGVQPQRQPGLAMVGAAAPLGRLDSACLEGLAELVERHGDGSLRLTPWQGVLLPNLAQAEAHQALLGLRGLGLLTEPDAPLARLIACSGSSACARGLADTKGDALRLAERLGPRSDLPQLHLCGCERSCAAAHRAPLTLLARSGGFYDLYRRDPCHPGFGQLLASRLTFATAADYLAALPSQPTSGKPA

SEQ ID NO: 5986 - protein, 559 aa, Pseudomonas aeruginosa UCBPP-PA14
MGARALRRERRLLWSPNWTRILPMQPQKTLTAGQALVRLLANYGVDTVFGIPGVHTLELYRGLPGSGIRHVLTRHEQGAGFMADGYARVSGKPGVCFVITGPGVTNVATAIGQAYADSVPLLVISSVNHSASLGKGWGCLHETQDQRAMTAPITAFSALALSPEQLPELIARAYAVFDSERPRPVHISIPLDVLAAPVAHDWSAAVARRPGRGVPCSEALRAAAERLAAARRPMLIAGGGALAAGEALAALSERLAAPLFTSVAGKGLLPPDAPLNAGASLCVAPGWEMIAEADLVLAVGTEMADTDFWRERLPLSGELIRVDIDPRKFNDFYPSAVALRGDARQTLEALLARLPQEARDAAPAAARVARLRAEIRAAHAPLQALHQAILDRIAAALPADAFVSTDMTQLAYTGNYAFASRAPRSWLHPTGYGTLGYGLPAGIGAKLGAPQRPGLVLVGDGGFLYTAQELATASEELDSPLVVLLWNNDALGQIRDDMLGLDIEPVGVLPRNPDFALLGRAYGCAVRQPQDLDELERDLRAGFGQPGVTLIELRHACAR

SEQ ID NO: 5987 - protein, 413 aa, Ostreococcus tauri
MSTRAIASRVGTRATSSRAVRGRRAVDSGRPPPVLRKFAKWASTARVTATTATTDDADDSETFDDAIVSESVDENADEGSWDEDEDEDEPEPELVPYIGGELLKADPPGHKSGYVAIVGRPNAGKSTLMNDLVGTKLSIVTFKPQTTRHRILGIVSEDAYQMVLLDTPGVMVEEFNKLDGIMLKSVRNSMANADVMFYIVDAARDPYGAWEGLAPKKGKRVPTALILNKCDLVGDRERIMELIDYFRAQDGIDDVLPISALNSTGVENVKNWALDRLPLGPTLYPKEAISEHPERFFIAEIIREKIFLQYKQEVPYSTQVWIEAHKERDGAKKDLILAKVYVERQSQIGIIVGQGGAAMKKLSSTAREDIEKFLGRPVFLDIQVKVRDGWRQDEASLEDLGLDDPNRLEQPSI

SEQ ID NO: 5988 - protein, 1382 aa, Ostreococcus tauri
  misc_feature (818)..(824): Xaa can be any naturally occurring amino acid
  unsure (1)..(1382): unsure at all Xaa locations
MCMLPTDAAAAANAKKLLEESCVAEGLEVLGWRAVPVDSSVVGPLAKMTCPVHEQILVAGAGVTGEELERKLFIARKTCEKKAAAAGMEESFYICTMGSRTIVYKGMLRSAVLGKYYKDLEDPDYETQFSIYHRRFSTNTTPKWPLSQPMRFLGHNGEINTLQGNLNWMASKEADMANPIWGGREPEFRPICSPAASDSANLDRVAELLVQTGREPTETMMLLVPEAHRNHPELDRTFPEVHDFYDYYAGMQEAWDGPALLVFSDGKKLGARLDRNGLRPARFWRTSDDYIYVASEVGVLGDVISNASNVVSKGRLGPGMMIVADLETGDFKENTQIAKEVAARHPYGEWMKSIERFKGIKPSTANTLEPIQLIECQARAGYAAEDITMIIESMAAEGIEPTWSMGDDTPLPVLSSRPRMLYDYFKQRFAQVTNPPIDPLREGLVMSLEMTLGAKGNLLDTQGKESPPVMLDTPVLFDSELDAVKNHPKLKTATIPARYAAGGGAGALKAGLDKLCEDAAAAIRAGSQCVVITDRPDQGPDSPAIPSLLAVGTVHHYLIAQGLRTRASIVVESASAFSTHHFATLIGYGAHAVCPWLALETCRSWRMSPKIENAIKRGKMGDVSVEGVQTNFKAAINKGLKKILSKMGICAITSYQGAQIFECYGLGPEVIGTAFKGTVSRIGGLTLDEVAKETHMFIQSSFPGEAEEMAKVEARGMFQVKPGLEYHGNNQDMSKLLHKAVGLGGGEKNDEFWSAYQEHRNDRPYTCLRDQLEIKSDRKPISIDEVESVADICTRFCTGGMSLGAISQECHESIAVAXXXXXXXMSANQTEIKVAQGAKPGEGGQLPGKKVSPYIAWLRRSKAGVPLISPPPHHDIYSIEDLAQLIYDLHMVNKDSKVSVKLVAQAGIGTVASGVAKANADVIQISGGDGGTGASPLSSIKHCGGPLEMGLVETHRTLVENGLRERVILRADGGCRSGLDVIQTALMGADEYGFGTVAMIATGCVMARICHTNNCPVGVASQREELRARFPGAPSDLVNFFQYAAQEVREILASMGYRSLDEVIGRNDLLSQIDKAPSKTGSLDLSFLTTSSGECGASSDRINQPVHNDGVVLDDKILSDPEVIKCIETEGTLVKKVEIVNIDRAATARVAGQIAKRYGDNGFAGSLTLDIEGSSGQSFGAFVVGGMKVRLVGEANDYVAKSMSGGEIAIMPPSNSPFAPDSASIAGNACLYGATGGQVFISGRAGERFAVRNSLGEAVVEGTGDHCCEYMTGGCVVVLGPVGRNVGAGMTGGIGYFLDEDGAFQAKVNGEIVAMQRVCTPAGEAQLKGLISAHAEKTNSPKAKAILADWASYLPKFWQLVPPSEANTPEATSTPTEVATTA

SEQ ID NO: 5989 - protein, 536 aa, Ostreococcus tauri
  misc_feature (536)..(536): Xaa can be any naturally occurring amino acid
  unsure (1)..(536): unsure at all Xaa locations
MNRRRGERATDSDASTDDASTSDRALRRALSRVDILFLGVGGIVGAGVFVLTGEVASRRAGPGVAASYALAAMTSAITGLAYAEFATMMPEAGSSYSYAYAAFGEFGGVITGGNLVLELLIASAAIARGWTSYAAALVGCERGGGAVERHRGRRRRGRRRGIGRGAMTACSSRGAKETARFNFAVTCASLLVIALVVVAGSTKIDVANWSPFAPYGVGGIISGAAVVIFSFVGFDTVATCAEEVADPSVDLPIGILGSLGICASLYVIMCLVITGMISYADIDVNAPFAVAFTNFGMSWVASFVSVGALAAITTSLLLSMMGQPRIFMVMARDGLLPPWFSRVSERFGTPANATIFSGIVTGVMAVLLDINLLAQLVSIGTLSVFCCVNLGILIVRCTPEDADWSRRTPPLRRALGLLLSSLAFGLDYRQRGSAVSWFGVLCLALVVVSTLSFLTLPVVAKSGSRKTFRAPMVPFLPAVGVLLTCVLIGGLGAMAWIRYIVYTLACTAAYVTFAWRQYEHQKASSSASSGIELAEX

SEQ ID NO: 5990 - protein, 680 aa, Ostreococcus tauri
MIDTSQQSTKNQIITRSSVDGASNDAPRVCVVGTTSCPHCKRAKAALEAKNIAYEEISVDGDGDLRAVSSALAGFRSVPQVYVGGVIYGGADDTCDGLKSGEFERLVREAEIEARGGAPGKLRDAADARTAGRELPEPVPPAPAARSSWLTQLVKESETSSSGKTSAKEVANEMAKEDGGVTRSTRRRFGGLSSGPFGLVKTHVGTFTPREAVDWMIANKKAETTEDAVRLGEEMVLERLIQDVDAAAPFVLDGDALFRFRSEAPSLGCAPLNCAKLYVGESRDAKSVVEDVRNRILKLYDDAGFKDFVESSEELQRVNLNALSREERIAFFINVYNALVIHATCVFGAPKNTIERLDFFSKASYDIGGSTYTCDDIENGILRGNRPGAATIGALTGRPSLSRGPFRAGDPRRNHVVIPMDPRIHFALVCGARSCPPIRVYTAADIERELEDATYAFFESEIDIKRGEDGEVASAAVSKIVGEWYKFDFGSTDVERLKYASKYMKSGDDRDALIRALERSNATNRIFNSFHSSLTHLTPFSSTNFANFGRVRVPSSTQFPMDVPLAGDARGVALELRGCSSLASPSTASRSLFVFFSTSSVSNNPSFMNDNACTASISHHPRGALTSSTSTTRLDSAHAESSPPLARTSPASAHTFPSHPSRAQTRARSDTTVASPPRRW

SEQ ID NO: 5991 - protein, 443 aa, Ostreococcus tauri
MGWGARGGDDARAVCAVAAFGVAPVPSARPVGVAPPVRTTTKSLSASDGSHNTTHLDGDGEDAPAIEDCASTERLTQRQDAHFSGRAGHGLAVMIPQTSFDQVPLALRNARLDALAIPDRSQTPGVKSPFSAANVLLNMMACGSDEENEAPGTRGNKRDSLHPLSVPCPKKRRTSKSLRARSNLNTLNVDAKPEAAAEAHASGKPKAHRPWSLPEVEALVRGVAHYGRGQWADIKALRLDGVSETLINRSAVDLKDKWRNLLRVAVLPALYKRREINGVPAEILERVRVLASAKVEARVGKHGAPRDAVGKGMSVATVKMSSPGQSDADKTEDDAGAKGVRRSKHHSPWTMKEAMALVDGVDRCGGCRWTVIKKSDDPALGRRTAMDLKDKWRNLLQLASLPPQSRRKQETPADFLQRVLDLEAKYGGARRKGRKPVNKMAQA

SEQ ID NO: 5992 - protein, 187 aa, Ostreococcus tauri
MRTNVRRIAHRATTVLSAASARASSSVPSATLAKSRSTSPSTSSVRHLARVSSHATRTRSFASSADDTHDDFKPKVNSVNAGDIKDVIEGDVKANEVLIYMKGSPSAPQCGFSNMACRILDHHGVDYASRNVLASDELRNGIKEFSAWPTIPQLYVKGEFVGGSDIMMNMHQSGELADLFKDVKKRA

SEQ ID NO: 5993 - protein, 448 aa, Ostreococcus tauri
  misc_feature (1)..(1): Xaa can be any naturally occurring amino acid
  unsure (1)..(448): unsure at all Xaa locations
XFFEKVRKYEPFGGPIQLQCNAQGALDSIDPDVAEAVMRAGTITGDRVNGLLDGVSGEWFYRFDTRKPCHENGLPLTLVLSRFELLDILSKGVGAENIEMGTVVEKYEHRGDKIVATLTDGTEHEGDVLIGADGIHSRLRKQMRGAETKLAYAGYAVYTAICDYSQPHREPVNTDPNKVGYQVFLGPKQYFVSSDVGNGQQQYYAFLEVPPGGDDEFAKCERWANYRDMLLDRFSDWCPAVLERLECTKPEDVERRDVNDLLPDPRWVDGRMALLGDSAHAVQPNLGQGGGQAIEGAYVLADELSKCEGGKGVQKALMMYAARRFLRTGAIHGLSRFSSLMNTFYRRYLGDEPYGWYPEPAKEMWHEVSKAKIPHPGSVVGQIALMATMPIILEYVGAGYGIPGVLGGASTGNGKDRVPKSQVPGISAPKRDLTADDFKMKGIPGLAK

SEQ ID NO: 5994 - protein, 448 aa, Ostreococcus tauri
MRVARARARATNAVADARRDHARARARAPRTRARAVDQSLNPRVEALRPSKTVALTDLARQLRADGKDVIGLAAGEPDFATPRAASEAGKRAIDAGKTKYSANAGDAELRKAVREKLRRENGLTYDWASEIVLSNGAKQSVAQCVLATCGPGDEVIVPTPYWVSYPEMVTLSGAECVVAETTADEGFLLTPEKLRACITEKSRLLILCSPSNPSGAVYPRETLEALAKIVVEHPRLLVLSDEIYEHIVYAPASHHSIAACDDMWERTLVVNGFSKSFAMTGWRLGYVAAPKHFARAMSMLQSQITSGPNSISQEAALAALQQLGPRGGDAVAEMVRAFERRRDFVSARLCAIDGVKLPRVDGAFYVFPDVSALVGDGASAEGFGPIADVDELCRYLLEKGLVAVVPGSAFGVPNCLRVSYAAADSVLDEALSRIERCLDPSVYTRPSK

SEQ ID NO: 5995 - protein, 297 aa, Ostreococcus tauri
MPDVDGFKLLEIIQFELNLPVLMMSANSDSSVVLRGIIHGAVDYLLKPVRIEELRNIWQHVVRRDYSARNSGSEDGVNPSSPSKRLKTSGSDSKSEEVERAANEAGSSKARKKPAGKKGAKGSKEKEAERKGDAIDSSKKPRVVWSAELHTQFVTAVNQLGIDKAVPKRILDLMGIQGLTRENVASHLQKYRLYLKRLQGNDLMRNGSNASSSGGVSQSRAKEQPMTIKGKNVNPFLDDNIFRADDLGLPGDLGNIGYDASFDPSLLAPLDLDKVGKSDVLGADPSDNILNFFFQGD

SEQ ID NO: 5996 - protein, 197 aa, Ostreococcus tauri
  misc_feature (1)..(1): Xaa can be any naturally occurring amino acid
  unsure (1)..(197): unsure at all Xaa locations
XDKHVVEIAAGSFHLLMRTRNGEVMSYGNGSYGQLGLGATGAADVCRVIETFGRLGVVKIAAGGWHSAAVTAGGVLYTWGRGEYGRLGHGDDVKDKVVPKLVELDESVFIADIALGGSHSCAITAEGNVLSWGRTTLGRLGRVIRDPSSSTCGVPSRVAFPPLPNGKRWKALKISCGGRHTLAVCTVSTDDADVPTA

SEQ ID NO: 5997 - protein, 679 aa, Ostreococcus tauri
MHANARAQRTPTTALSVQNARVSRRAAIRARSQIRRVLSLKSPAVREPGASEYVDPSQFTELELTTSQMTAYASRRPIGHFQSRFADDEPRKGADILVEALEREGVDCVFAYPGGASMEIHQSLTKSVTGIRNVLCRHEQGEVFAAEGYAKSTGKVGVCIATSGPGATNLVTGLADALLDSVPMVAITGQVPRPMIGTDAFQETPIVEITRQITKHNYLVMNVEEIPRIVREAFFLASSGRPGPVLIDIPKDVQQQLAVPYWEPKVSLHGYLSRLPGPPTNPQIQQVVDLIKKSKKPIVYAGGGCLDASKELVEFCRATGIPVTNTLMGLGTFPQSDDLSLSMLGMHGAVYANYAIDSADLLLAFGVRFDDRVTGKLAEFAKRAAIVHIDIDPAELGKNKKPFCSIFSNIKPALRSLNKLIALDAANLPDFSDWRAEIEVKRKEFPFPIPKQQGDVIAPQAAIELLCKLTEGKAIISTGVGQHQMWAAQHYKFDEPRNWLSSGGLGSMGFGLPAAIGAQAARPDELVIDIDGDGSFVMNIQELATLHAEELPVKCFILNNQYLGMVVQWEDRFYKANRGHTYLGSPNDDYQVSKEEAHIFPDFVTISNGFRVPAERVTRMSELEGAIKRMIETPGPYLLDVMVPHVEHVLPMVPGGGTFADTIVTGDGRTPEEKDMKTL

SEQ ID NO: 5998 - protein, 738 aa, Ostreococcus tauri
MASHRISEGGAHAPSLDPIVARAFGAFDHTFTVCDATKPDCPIVYASDGFLRMTGYAAAEVIGYNCRFLQGEKTNKNDVRELREAIKNGDRWSVRLLNYKKDGTPFWNYLVVAPVKLADGTVVKYIGVQTDVTEVKDADTGERGIEFDEKGQPVPSRYDARAAAATLGRVSEVEQAVRTAEGLGNQAQRRTGMDLASTLERIEQSFVITDPSLPDHPIVFASDGFMEFTGYSVDEILGRNCRFLQGPKTDRAAVAKIREAIENGEECTVRLLNYTKTGEEFWNMFTLAPVRDEQGIVRFFAGVQVDITAHDPQTEHETVAEITFKEEDNDANVQVSKSAAQLVAGAAAKDKEFEPPWKHMSGHMLQPKPHQLENRRHWEALWRVTNYNDRPLTIDDFVPIRRIGQGDVGTVHLVALAKEKDVRFALKILTKQEIIDRNKLHRLQTESTILNQIDHPFVATLFASFQTSTHVYFLMEYCEGGELYDFLQKAPGKRLSEEATKFYAAEVLVSLQYLHLLGFVYRDLKPENVLLRRNGHIMITDFDLSFCASCQPHIKVRPGNPTWYPGQRATAHAKKKKLKPPRLPKSGSNPTIVAEPFTFTNSFVGTEEYLSPEVLNGTGHSGAVDWWELGIFMYEMAYGTTPFKAATRDETFSNITNAKLTFPDNIPMSEDFKDCVRKLLQRDSTSRLGTLGGAEEIKSHPFFSCVNWGLLRWEEPPYVPKPRRAAPVRDEEIFEMEI

SEQ ID NO: 5999 - protein, 451 aa, Ostreococcus tauri
MITMNKLSCSARSSVAHRRSTASKTTKAVARVTHRNTARSSVKARAGPSGDVKKVVLAYSGGLDTSIILKWLQDTYGCEVVTFTADLGQGEELEPARAKAQQMGVKEIFIDDLREEFVRDYVFPMFRANAVYEGKYLLGTSIARPLISKRQIEIAKMVGADAVCHGATGKGNDQVRFELGYYGLKPDVKVIAPWREWDLNSRTKLLAYADANGIPVAQSKRQDAPYSTDANLLHISYEGNALEDPWVEYSEDMFTRSVSPENAPDTPTYIEVEFEKGDPVAINGKRYSPAEMLTELNRLGGENGIGRLDIVESRFVGMKSRGVYETPGGTILLEIRRALETVCLDRGEMHYKDEMMPRYAELIYNGFWFSPEREMMQSAIDLCSQNVTGTVRAKLYKGNVMVVGRKADNSLYNDRLSTFEDDGGAYDQKDAAGFIKLQALRLRTLKTARGE

SEQ ID NO: 6000 - protein, 425 aa, Ostreococcus tauri
MARASVEAKEAWRRRRETTDGRRRAIVAGASAAADGGESVAIVNTVKAIFGAGGFALPWAFAQGGIALVGSCMFASLVLALESLRMLVKSQDVLVAAGDASAAEVATYAGLTKTAFGPIGDVACRVMNVLTCFGITVSYLVFIAKTLQVLMPALGVSAFGVAPTLVSMLNVVGPFMIALGCIREMSGVATISAVGTASVAIGMIMTATAALSNPLQLGALPLANFAAFPGFFGTVAFLFFIHFTLFGIKEAMPQPDKFFGAAVKAFTGAAVFAAAFGVAGAAGYGPAVSDVVVTMLTGWSGVFVQLLLCLNLLATYPIMAQSALRICENVFEGDKPGSISTPASIGVRTAFTAGAIWTAGNVPNFGVVLGYVGGVCCSILSLVLPAMILYQSQNKVKNTMTANELARIGGVFATGLTCIVLSIVL

SEQ ID NO: 6001 - protein, 371 aa, Ostreococcus tauri
MSTPSTACVIANASRLNFDGAIDFSSIVRACGGDADAVEIRGVDATPSADAIAAMCVGRKILITKEVFVDVEKLPRTIEMIAEAGTGYNNIDIERARELGITVTNVPSYSSDAVAQLVITFVLASSVELCEQYGALRRGDRDGFREDFGGLPKMFELRGRSIGLVGGTGGIGSRVAELARALGMKVLVFSRSAQTCEEYEATTFDELMKRSDFISVHCPLMPSTRGLIDARAISLMKPTAKIINTARGAIINERDLIEALKAKKIAGACLDVQEVEPPASTSELYTLENVYMTPHIGWKRVETRQRLVDCVAENIHAFISGSPINVVEPLEKKSEASGAPVERFTRASSRIHFPSRSRIAHDVHHRHFSVN

SEQ ID NO: 6002 - protein, 190 aa, Ostreococcus tauri
MARDTDSFFRDIFRDADDTFVSSGLVSSRLVWETDSRKRSQFFQNFHGHPGMGNAFMPLAHRPQGSGGVGSTALIAGLRVIPVDVLEDDKSYVLRADLPGMKKEDVNVEVDGQIVRISATKKDSKKWEDEGYKYHRAERRDTMEYSQRALRMPQNTDFSKLEASFDDGTLTVTFGKQATSTPTAKTIAIK

SEQ ID NO: 6003 - protein, 364 aa, Ostreococcus tauri
MAFSISAKVSAFTGAKVNATRAQKARRANVAVKAQGTDYGLGLQMSTTADKNIDPNGRAKVPLEMEKMELPLNTYKNKEPFVGTIRSVERIVGPNATGETCHIIIEHGGKMPFWEGQSYGVIPPGTKVNSKGKEVPHGVRLYSIASSRYGDSYDGLTATLCVRRATYWDPEMNAEDPAKKGICSNFLCDAKPGQEVMMTGPTGQVMLLPKDPATPVIMVATGTGIAPMRSYLRRFFLEDIPSWEFKGLAWLFMGVANSDAKLYDDEFQEMVKRFPDQFRIDYALSREDTNKNGGKMYIQDKVEEYKDQVFQLLDGGAHMYFCGLKGMMPGILSMLEGVCKEKGISYEEWLEGLKKNGQWHVEVY

SEQ ID NO: 6004 - protein, 1181 aa, Ostreococcus tauri
MGNGPERYDAPRRRQGGGRDEFLTSAMLCVGAVSVCIVSVMIAGGLAFVGLSESRSDRAAMDYISRSPDAWSGMSSYRGGELQSSGGLSTGGRASSPRERFDYFAQPDRVNQDSLVEELDRRYGERLQAMMRELREQGNAGSQAKMDPTSMTLASTQTRGEDPSYLPPAPMTEAERDANAAAEPPRTTTMMRVILIPRKSPRMIRSMSERKRHTFGVLAVEEREYAETKKPQAAVNKARERFEQFENTPEWHGKIRRDCDSYVERLREIENLVKNAEGSKATRASKQINLGVEAVRQWHATISRDLKNKLAVMEVALEKIADAKSEDKELRVHALSEDIEDELDALTTTMDRVDKLKTALSDVVHALTSAAADASATNKTETGSTKRAANRGRGRSDSNPKSSRTSTFAALGSAWGSNDWVGTDAADATWDPIRGENDGVYVDDAAKRLDWTIPPGGSSTSKLAQSELDRTPTPDDEDFDEKSKQRAVEKFAQAEHKSAEAWRMEAMKAQQKLEDLAASTLENDGEMKKSAEAVERLKGLVSEFKKALRNYSKRNPHDRPRSARTSKSAWHKPTTWDSALEDIKTEAAAKEADDSDSVDSLIDGAPTFETTIAVSSYDVPKKDVKLFRGATLSLLAARAPGACAEKTMDVKKSTADDGSVRLSIKCVNAKNVEAVSKATEALKWATESGRMGANLVKIGFKSAAAEDFSSDILTALKPIRFALIAGAEIQSLYNNLDANFLLSSAYLVFFMQAGFAMLCAGSVRSKNTKNILIKNVLDACVGALAWFYFGYGFALGEASNGKLNSFIGSGNFAMKGVSGNTGIAMYLFQWSFSAAATTIVSGSVAERTKFEAYLGYSFFLCAFVYPVVVHWGWSGQGWLGPWRCEGSSNGCGPLLAGSGMLDFAGSGIVHMTGGVAGLVGAIIVGPRTGRFAPDGRVNPMPGHSAPLVVLGTFILWLGWYGFNPGSQLAIVAFGGAAADNSRVIARTAVTTTLSAAGGGIMAMVLNYVLYHVWDLIAVCNGILAGLVGITAGCSTTEPWAAPICGALSALVIHASSKLLLKLKIDDPLEAAPMHGFCGAFGVLWVGFMAKQSYVAEVFGTARNGYMPAGVFYGGNGKLLGAQIAGICVITAWVGATLGAFFLLMKKLNLLRTSVEEETMGLDESKHGGSAYAMELVAPEPA

SEQ ID NO: 6005 - protein, 1079 aa, Ostreococcus tauri
MFKRFDPKSMFFWRIPRHLPNLCAVVRYFSTMRANFSRVNASSEVSWNISAAWNTSPKTTTTSAGVRKFPRSRIHRSIFPTCRLFSNARPSAAHASSARNASTSIVHALDPPSPPPRAMTSIFPPFSRSHARSTYANPSRLARRSNASRIASLPRPSATRPLDSYALTRSIPTAPHHDAISANLSHVALASSPIPSRARTNAAVRGFASARVRVSLPGPARDAPTGDVEDITRAPRAIDRAHDATATHDRRTRCRTTSAITLRAQIIRANWVVFLLATVTLWGFVIGVTTSEANVRGAGQVSAVSTFFANATSAITHNFTWFYTLTQNAWLVVVFYVLLKKKYANVRLGTQDDAPEYSDLVWFILIFTTGLGTGIFYFGVSEPMYYYRDDAGALNTNSNYLAKIPFMNDDQRASMAMFLTFFHWGFHGWAPYLVVGLTTGVVCYRLGRPLTLRSAFYPLFGDYVNGLFGDIIDAMSIACTTFGLSTSLGLGANSINATIHRMNSAIPNDNESVKSFIIWIITALTTGAVVSGLDRGMVPMAILAFGVLSALILLLFMLDNTWYIANIFTQTTGTYMQYFIQAGFDNDALPQLALEFQEKDPHLWGNPGIKGRVEIALGTTMADSQTYYESTPASFMNSWTVFYWAWWITWAPFVGLFIARISRGRTVREIILVGMFVPMISGFFALSVLGSLGIRMERIAELSLKYAPDWRKGVVNCAGLGYLNNEPASDAAIKLANDVGIYALACRKSTDRILDILEPYGNLTKLLQLLVLIGVISFFVTSADAGAFTDDMIAAGGIDNAPVLQRVWWSITQGATAQALLSTSKTGLSTISSVSICAALPYTFALNAMCVALFRALDEANGDPKYLSMRKNFSTSIIDVFDNFNGPDGSPDGKIMSTKERLILLLRIILNPYHAMFISALELFTPFGISVFSFTCTTIYYAWILLLCLTPLKQGTHSLAWLMYLLFAMLTTAIRYNLRAKWHIVGNLMDDFIACFFFYPFALAQMKLEVESHKGRAPPSRPRDWSVRGRIMNDTSVRSGRSDASIRGKRHLPSVTAANVAHFESKSNENGVTDVADMA

SEQ ID NO: 6006 - protein, 575 aa, Ostreococcus tauri
MAKRAMRVIVARRKQIVFLLGVFFLGLFAKVANAEHPRDASNFQGKHPCARGVRSSTPKSVRDVSEIVRQSESVRANGAGHSWHPGLYCPARGGTRVDLLNVRSVESSTRWILDERARVVRADAGLLTRDLLDGLASRGYTLPAFPWFIDQTIGGAVATASHGSSLRAGSLSSQLVAVTVVLADGSVEHYAETKTSPALFESLRANVGRLGVVVDVSLRVVENSRITRNNEDIAPDAFVVEMFHVQAATRACAKQYPDDLKAQWSCAMSKPEVRALDETQYFWYTPLQEMSRITFQREKPGALNFTAYDERSASSALSSVNFGSLSSGSLVRDSPPRARDITSPVTLMGSEGMASAWARTWKRATLLNIAPVTDEQRDSFLSMTEEQYLLHERYGYEQLEVAVPFTKAGDCMQAFKTALYDDRELNLGFRSQALLRFIQPESAWLSPAHGRLGTLYINIEDFVKYSRVFDTLGNPRFDAAVAILRGDKCDGRLHWGKFGFPKRGCFDGAKEYGVSFCHFGCQVSRLDPTNKFLGDSDALQFSGIDFAACCGADGLFVENTTCKCVLNDRIPADQC

SEQ ID NO: 6007 - protein, 2007 aa, Ostreococcus tauri
MGGVGADARETTPLASYVHGDVVFARASSRATEPLWPAVVVEPWDAPEGVRKQCEPESVCVMFLGPSATRGRARDYCWATEERLAPYARAEALFAQKVAKRMRPNAFNEACAEARELVEANGGDASLGPRAFIGDEEDENLGGGRGDQRDGLTSSASVGFPGVPVGALKNVKKAEPEIACGSCGVTGDEGLKSKNAQGRCSLCQKLYKEGQFCPVCDRVWQWATGDPMVGCDRCDMWIHRECDALAAEVLDREENDGEELAYECPKCRTKTPAQIAEEERRAEAARIEAKRKAEIKERKRLEKLLAKPRVGRPSRAVKEARLALKRLTKSSLSFSPGIKSPHAVSKKQNTVPKRPKSSWQLFAQDFFQNYKDENVDDTMDFAEIYRMQGAAWRDLPTEERERYEDLAREEAGRFRELIMEMYENGDLDEQQQKRYDKVLHPERYEAAQRAKAERGSIDANRAARRSKAGEISKLTGGSDLPATLAVVCNGVAADYYTRLNQVLCQCSECAGEQKYMTPTEFEKHAGMAQAKKWKASLRMVEPAKMPIGRFLDGSDFNARRSSEDDGSTLDYDVVKVSWSVDRCAVCDDERDFDYDQLITCEACAVTVHQSCYGVPDIPDDTVGWLCRACEHTGGAVSETPLCCLCPVEGGALKPTTIPSLWAHSACCQWIPETTVLDIERMEPIDNIANIQKERWTLLCTVCKQRMGAKIQCCHPGCYIAYHPLCARATGLYMDANDDGEDDDSPLQLLSYCHRHCRVDTERAQIYAGDKGLRIGQDGRLIQCGANTERKRTKAERRAAQEAKEREEAAVQIAEESELSSDSEYDWTQCAKFRTYVPVGHPRTEADIKDDDEDVPGSAAKKIRVRKRVLHADEDDDADVDDQGDDDDDDDDDDDGDDDKIVECMDTDKVDTTSVKTNPEAPVAMELDTDDDDLSTDLDVKYKTEPTDHEEDDPVADSELPTKVAKVEVDIPRGESSKRKADDLSESSPKSTTFGLPKESAPAATSQNAAQPCLPGGLPVPEGNVPRPELPETLVRCKTFRGIFRPADTYIKCLCGRCKREAELAKRDEPALWEANRWEAHAGMKHTKKWKISIRIAKEDENEDNDDDQTFGDWLDAHGVVVLANKDKAARTTLNPPKPKKLKKLRGTSALKDLGLGTFEDDKLGDRSEEKTKAHALVGRRVQIDHGTVHIPDWRDGSIMDCTISRTGIRYKVIFDDGTDQLMSFTRAAQNLKFLDGEAPDLTFLPEAPKANESRNTQAETQIAIANAQYTSAKRPADPSDRAKIADLARPKKPREKEAWVQCENASCGKWRRVPQSFAEKLSADDADMWTCQKNPMAAYAVCSIPQEFEDDEIDRRIALGDDAPYMEGSDDEESDDDEDAVRTHVPDDLPAMVSVVCRGVLGTYHVQTRRIECLCRACVDNDDGPVYHERTKFEAHVGLKGPKRWAQTIRVVLNNRTLISLGKWLETWGCEVRREKAAIDLSATALSHHSKLTRKQLEEIQANVYKRLGLDKHDKNAKVTGPPPKTGKRLYVELTPYIVRAHAARSKAKLIASKKYTPDEFAALQAERKARGSAGASEDKIVEQQGMTMREKLEHMTATYSDRLTFCKSNIHGWGLLAKTAHKAGSIVTEFKGETCRSTVADMRETAYEEEGVDCYLLKQDDDTVVDCTFQGNLARFTNHSCNPNMYSKIVKVDGENHIIFFARNDIKAGEELTYNYRFESEDGKVPALKFIIIIGNNSPPSTRFRPESDSPPRTSSKPRTAPTLPRVSRRDLRRTPLKRVARHVHAPRPPTASRDDVRARHRPSSERRAHVVVAMSRDRAPVEHRSLTGRAPIEHRSLTDQSPVDRRSSTDHSPVEHRSSTDQSPVDRRSSTDRAPVDHRSRTDRSPVEHRSRTGRAAAATARTRRRARMAPTAANAEATFTLEGEDHTLGNALRYVLNANPSVTLCGYSAPHPMERRVNVRVQTHGREGATARGAMRDALLDVISVCDHVHESYEKAERAVGGKT

SEQ ID NO: 6008 - protein, 1013 aa, Ostreococcus tauri
MAPSRARARLEDAYERASVPARAANVDGSDVLGAGNFGTARLMRRRRTGELVAVKFIERGAHVDENVKRELVNHRGLTHPNVVGFIECAVTDKHLAIVLEYASGGELFDRVLKSPGGHFAEAEGRYFFQQLISGVAYCHAKGVAHRDLKLENALLDGGAVPRLKICDFGYSKNSFIDSDPKSTVGTPAYIAPEVLERKPYDGKTADVWSCGVTLFVMLCGKYPFEDRRRPRDFRSTIVKIRNCEYEIPRNVVLSPGCVDLIKRIFVVDPQRRIDIPGIQAHPWFVTDLPLELVDANGINDAAPRTSMTVEDILAVVEEAKVPHGGEQHHRELEDDHHDMVTSGEFDDDDRAASLLRADYKAQSRALSLISKTSTGHPIQIMKRKNPPRLELDLDVNPRRKLERHERIDRLCRRLVHVDQSVVRASLEVFPAVLVNVRRAQDAEDASLRRKRHRTRDARLSRLCRLDDLIACALHVVRLERAQANANFLGLHSGLQEMRRMPSALVMRLHEIEAVKFGEFTLKSGIVSPIYVDLRVIVSYPDVLSSVAECMWDVLKANGATFDNMCGVPYTALPIATCMSLAHDCPMVMRRKEVKAYGTKKQIEGAFEAGQTCLCVEDLVTSGASVMETVEPLERVGLKVKDVVVLIDREQGGEARLASHGLRLHSVLPLSRVLRTLEANGKMRCSSRLRDHSRVSEFSRTQHRHWSLRNPFPGRRLSCGSSRWICTNILETLSHFIAANQTMPAAGEQAKKPTRMSYTARSELTDNACAKQLFNLMETKKTNLCVAADVNTAKELLELAEVLGPEICMLKTHCDLYPDFTESFGEQLMAIAEKHNFMIFEDRKFADIGNTVVGQYSSGVHKIADWSHITNAHIVPGSGIIDGLKSVGLSKGRGLLLLAEMSSKGTMAKGEYTEAAIGMAAQHPDFVMGFISTNPKAWKAEWSKGLINMTPGVQLQQGGDAMGQQYNTPHNVIVENGSDVIIVGRGIYRAADPAAAAKEYRAAGWEAYQTSISA

SEQ ID NO: 6009 - protein, 649 aa, Ostreococcus tauri
MALSHVAFSGRRASLDMCGIFAVLRLTGDARKNRRRVYDLAKRLRHRGPDSYGMEVRVDERSGAQTFMVHKRLSIVAPGKSGDQPLYTDASRKTTFIANGEIYNHAELREKYGIVSENKSDCQVIGHLYEQHGPGFVSELDGMFAFVIEDRENDVIVAARDHMGKIPMYMANGKDGSVWFSSEMKTLHDDPGVASYEIFPPGHVYVKKGDEPATIERWFNPQWIAEESYVPTTPADLPALRECVVDAVTKRLMADVPYAVLLSGGLDSSLITSIAVRQRKLAKNTYGADEPVHSFSIGIKGAPDLVAARKVAEQLGTIHHEVHFTPEEALDALPDVIWHLETFEQVRASVPMYLLSRHIKSLGFKMVLSGEGADELFGGYLYFHKAPNPTEFHAECRRKTMRLHQWDVLRANKSTMSWGIEVRTPLLSQQVIDMAMNMRPEDKMIDVNKKDADGHPFLEKYILRKAFDTPEDPYLPQEVLWRQKEQFSDGVGYDWVDGLAAHAELEVSDEMFAKRAERFPLHPPTTKEYYLLRSIFEEHFVTGFENGDCAYATCPFGKSIACSTPEAVSWDPEWEKSVGDISGRAVKNVHVAADKFDVKKEKANETVAASLVGRGKASCSSESAVTFASLACVRRLSRGFYFCRAPPCL

SEQ ID NO: 6010 - protein, 1074 aa, Ostreococcus tauri
MVSTVLVATCALALALAATPVRAQYGNVYKPYSTYYGQPGYTGPTTANSMACTTDGTTKITKFGPDFGTACASSSSASVCSGTASASTGCCDRDAAGGGGACNQYTWEYETYKYWVQDERPNLPKPFTGIPRVDIKTNKEYKGQMAITDSYIGSIIGQALPGLVIAILLAAVCATAASGRAPYTRKSLHIAKGIQLVFVVLPRCGCFVIFAGSPDVHDGVSLLTSGLLNASVALQDDVDILANAVGSRLGTEVTDLQNAADTVTSAIKSTNKAIDRAKDQVQLGADIVSGVLLGIAVLTMILSILNFWRILILFSILTSLILIITWIVVGALAAVGVFLDDFCYSVDRYVEDPQQIDLSKDIPCAKEKDVIEFGNAFRQLIASVTDEMNKAIDASYSGNPGPGYICMPYEMQTLDDLCGTSAALQAGSFRGPLWNDEYANYVCKAYHQAKLPPGTTAFPSWGCLTSPACGTGYTNGTVSTRSAACMFKKDLATVDNTTYPNLASDSTFTSNLADVQALNNAIPTLESLLKCDFIRNTFIAISPGCGATVDALQMVWRGFIVTAVGYLCLWICMLVTLGRMSNADLMIDGGRFNAKKAGKRRSGRSSTLARRASRKSRPRLFAPLCQRRLLRIRLRVKRNHPLRRSRVGWFTQRPRRRLQAHQPRLVKRVLRPWKHPQLPHRLLTPHVSRQHPFHRLPQRERWVPIEHLPRRARHQPPDVSGVPVIQLLLHLFPRERHLGRVHDDDDVSAPRTGRVRRLILPLNRHRQPRGQAPENLARGVDEAIPRAGEILDILHRSENPVAPASTHANADGDYEGTLRLFLDSADVEVFDAWLPTGLFVGVTTNPAILERDGVECSVDSLLALARNALEFDAVEEFQVQTWGEDSDEMWKNGIALARLDPDRVVVKVPATLEGIKAANALVVDGVRVTITAVYAPHQVLVAAAIGANYVAPYLGRMNDAGRDGMGTVISMQETVEELSSDMRVLVASIRTAAEISKLAAKGCDTFTISEKVAMEMFADPLTTQAALDFQSAAQRMSPKPPAKKEKPAEVEEVFETVEDSDDVPIEEEASSDAR

SEQ ID NO: 6011 - protein, 455 aa, Ostreococcus tauri
MLVARAAAVAAASASASSARSSARTRRTSSSGGVLRARGRRASVAVGAGAVEGASEMFARAQDATANAHAALVSSPLFDLAADKAGRLEIDYDDADALKAAGIQKGGWLGPITDALEGALRGIDGVLDGKVPYSYGYSILLLTVLVKLATFPLSKQQVESSIQMQAMQPRIKELQAMYANDPERLQLEQARLYREAGFNPLAGCLPLFATLPVFIGLYRALSNAAAEHLLDDGFYWIPSLGGPTSIAARNDGNGFAWLWPFVDGHPPLGWYETGCYLVLPVLLVVSQFVSQTIISPQPKTDDPAQQQSQAILKFLPFMIGFFSLNVPAGLTLYWFFNNIITTAQTVVLRKITKPIEVPTGAGAGSSPASAEPVRVEYVPKSQRRSGAQMPPVRAAPPKVEEVSSVVANEFADFDDGPTQIIDVEAKDVEDEGSSGRSSRRSSGRRSSRKRRSSRN

SEQ ID NO: 6012 - protein, 479 aa, Ostreococcus tauri
MLRGRATRALRSTATYASVRASIGSEGATDAGANAVRTLHRGLSSTSTTMRANAATERERASAVGLGEFEMKGVTLRGRPLYLDMQATTPLDPRVLDAMMPYMTEQYGNPHSRTHMYGWETEDAIERARKEVADLIGADAKEIVFTSGATESNNASLKGVAHFYKDKKRHIITTTTEHKCVLDSCRQLEREGFDVTYLPVKANGLIDMKELEAAMREDTVVVSIMAVNNEIGVIQPLKEIGALCRSKKIFFHTDGAQALGKIPMDVNELNIDLMSISGHKFYGPKGIGALYVRRRPRVRLEPIINGGGQERGLRSGTLPTPLIVGIGEAARVAKEELHRDEVHVKRLSDRLINGLQSRLEHTQINGDLEARYHGNVNMSFAYVEGESMLMGLKEIAVSSGSACTSASLEPSYVLRALGVNEEMAHTSIRYGIGRFTTEAEVDRAIEATVRQVEKLREMSPLWEMVQEGIDLKTIEWAQH

SEQ ID NO: 6013 - protein, 472 aa, Ostreococcus tauri
MGRASDNSVNPAVLAAEYAVRGPIVQKAQQLEKDLASGAKLPFDKVVYCNIGNPHALGQKPVTFFRQVLAALDCQGLDGAFPSDVVARAQEYKGSIRGGTGAYSESKGVYVLRERVAKGITARDGIKCDADDLFLLDGASAGCHHIMNVLIKSADDAIMCPIPQYPLYSAALTLYGGTLTPYYLDEEGGWTLNVEHLKEQVASARAAGKNVRALVVINPGNPTGNVLPDENLTATAQFCADEGLMLISDEVYQENVYADGKKFTSMRKIVHDAGLTDKLACLSFQSISKGYYGECGRRGGYMELTGNWDEGIKDALLKLASIALCPNLAGQVCTSMVMDPPKQGEPSYELFSKERDDILASLKRRSIKLSAALNALEGVTCNAADGAMYCFPNLTFPQKFMDDCVAAGKVPDAEYCSRLLLATGIVTVPGSGFGQKPGTWHYRITFLPSEEDIEGVAIKLADFHENFMAQYK

SEQ ID NO: 6014 - protein, 601 aa, Ostreococcus tauri
MAYDPSDTLSDVLRRADEARSAKTNDWASSLAAYREEAASKERQRSEMGAELAAMERVETARDDLIDTVWVNDAGSVARKEFKGLQAGEDAATFGDDEADFIDFGGDDDDVWDPSEGGFGKFIEVGDDDIFEPREEKSRGIPREMRCFDTAKIFVKAGDGGDGQVAFRREKFVPQGGPSGGNGGLGGGIYFVGDKNINSLDIFRKKVHHRAEGGKRGLGDKMAGRNGRDLEILVPPGTIIRDSRTQKIIGEITKGGQRVLALVGGRGGRGNASFKTAKNKAPMIAELGEKGKEFWAELELKLVADVGIIGVPNAGKSTLLASVSAAKPKIADYPFTTIVPNLGVVDRDYERMVFADIPGILEGASEGVGLGFEFLRHTKRTRVLVHVIDCTSETCLEAYEAIRTELELFDAVLLDKPEIVALNKVDDVEATERALQMKEMFDAQGVTSHCISAVTGEGVEELLGDVQAALRALPPVEDEWEAEVAETGKRAADGKSIEEFEIEDTPYAFIVRGDAIERFTQMTNWDYYESYKRFARVLEMAGIDRALDAAGAGEGDRILVGDYEFEWSKDRRDRTLYESFRQRQADLPGAARGSRHWPHAA

SEQ ID NO: 6015 - protein, 276 aa, Ostreococcus tauri
MTSRRARSRARPRGRDRRAVRARAVGEVLLDVVDLRAKVAETGEEILRGVNLTIREGETHAIMGKNGSGKSTLTKVLVGHPAYEVISGTATLKGEDLFAMEPEARARAGLFLSFQSPIEVPGVSNTDFLRMMCNERRKARGEEELDPLEFYGFLTPKLEQLNMDPSFLTRNVNEGFSGGEKKRNEILQLAVMESEMSILDEIDSGLDVDALRDVAKAVNILREGDKALLLITHYQRLLDAIHPDKVHIMQKGQIVQTGGIELATQLEEGGFASLAN

SEQ ID NO: 6016 - protein, 635 aa, Ostreococcus tauri
MSPEPTTTTSGTKSALARDAHRHRICRRHHLSKSVMAATPSTRGARGRHDAVRTLVTCPICLDPFSDAHCVATCGHTFCHACARATLDASASGGGERMAACPTCGSRFTNEQLVPNAAVNGMVAEMRRMLEEEEEKAAAGSIVADGADDLERLTPLVKKLSEKHRELVLESRAASREVLKEFLLESRARKEASAEALERELRCLSSDINAVRREIQLLGGGDDSEQLQDLLRSRGEVYDKEVITRAMEALGLTRVGDIVVDESKRRRVLRQFNELQSWYSRRRCLEKTDDEGAEPADDACPSDSETIEEFSKLIDTFKRFSNITMATELVTTEGGGTNTGSPISSIEFDSTEENFATAGVSKRIQFYNLERVLAGSRQPAEQIMTHSKLTCLSYNKLIRQHIAASDYEGVVSIWDVEKKRAIIDFEEHEKRIWSVDFCRSNPSLLVSGSDDYLVKIWNTDQRNSVHEIDMEANVCCVQFSPNDDHGIAISCVNQKAYIFDLRRLDEPLHVLEAHRKAVSYIKYLNAKEVVTASTDNTINVWNTNSGDLTCTLKGHLNERNFVGLTTAGSQHIACGSETNEVFLYRKDLPMPITSISFAQERAPEERGFISACTWKSDDSVLIGANSNGVVRVFHV

SEQ ID NO: 6017 - protein, 530 aa, Ostreococcus tauri
MSKRARDDDSDSDVVDVGYVGRGRGTSIEGRVNAYAEHARALNVQFLKHVERKIAQEPTALLLSAVRDYARYAREIRDEFQDVLAREGAMEARAETVRERASGTVFAWGNGDSGQLGMGGDVDEKRRPASVEYGVMENVKVLSVACGGTHTIALTSGGTCFSWGNNDGGALGRRVDKDKNPEAEYEPGKVELPLDVKVLAISTGDSHGLALAENGSVYAWGAFRTANGEWAFNPKTLDAKKTMFPFQIYTPKTQKERVKAIASGVDHALALTQEGGVYSWGSSEKGRLGRFAESEAENNEEAGDELKRRLLTPGRVSFPTSGGAAIGSAFGGEPVMTAIVAGDFHSFAISANEDGSKSTVYGWGLSNCNQLGIFDTNPDLRGDQQVTYFPKRVDCLSGRRIVSGDAGTHHSIFLTGDGKVISVGRWTDGRSACDPGEIEDLPGRVVKITCGGTNGGAILEDGHAYVWGSQYMGQLGLGPREEDAHLPEKLQYTKPMAGKVFSEIGFGGQHAAAVLVDETEAGRGSKRARA

SEQ ID NO: 6018 - protein, 588 aa, Ostreococcus tauri
MLARTSTRASTARARARSSRSSNAGARAPGERAARRHRARTRASNDPAATTATARERARCYGCGVGVQTRSNDVAGYVDVATYERKATHGQWDMMLCARCAKLSNGAYVNAVEGQGGVKASPGLITPKELRDQLKPIREKKALVVKVVDATDFHGSFLKKVRDVVGGNPIVLVVTKIDLLGNAVDHDALERWVAKEAETRRLTLAGIALVSSRRGSGMREAVLQMMRERNGRDVYVIGAANVGKSSFIRAAMEELRSAGNYFAPTKRLPVASAMPGTTLGVIPLKAFEGKGVLFDTPGVFLHHRLNSLLSAEDLSEMKLGSSLKKFVPPTPECAEPPGFASFKGYSLYWGSFVRVDVLECPPNVTFGFFGPKSTRVSLMKTADVPETISGQEEAALRLVQEIDFLPPMHVDGPLVDLSVSGLGGWIRVEKTSGRGDGPIRAHIYGIRGLEENVIFRNCFAHVSVRATHGLVQRVPHNRSMIDDGVLNPQELPPPSDAQRARGWRYDYSSCTREHLDALKQLFVDKQTIALDKFVARPTQTDAKGNQITLYDFTGGAKIRQAKQMARNDELEHEQERLKRWRDGNDACL

SEQ ID NO: 6019 - protein, 917 aa, Ostreococcus tauri
MPRLARRLAARLASTAATARYASAARPYAVLGGRAALARQKASTSGRNEGKEQRRFGTLARGALFVAASAYVFTSGGPFGASDAEDEHGVATTSETMENWSGTKTVTCERVRAPETIEELEKVVKAGKRGKLRVVGSALSPNGCAFEERGMVSMGLLDGVVAVDAETKRATIRAGARVREVVETLRPHGLTLQNYASIREQQMGGFTQVGAHGTGARIPPVDETVVEMKLVTPSRGTITLSAEKEPELFKLAKCGIGALGAVAELTIQCVDAHKLVEQTWTATPDEIETNHERWIREYQHIRYMWIPYTDTVVVVASNPLKPNEKEPRTRSAYSEKKKVEPLVRLLRQVAPGVDPEGMGFGQLRDELLKVNPLDVEHVKRVNAAEAEFWKRSAGTRVDWSDQILGFDCGGQQHVLEVAFPAGNLAEEPPAAGAPLRSDLQFMRELRKMIEDDEIPAHAPIEQRWTSGSSSPMSPAAGAPDSLHSWVGIIMYLPTADEKERDAITRAFRAYGEKEFDALGDAYALRAHWAKIEVPEDPARLARDKARLRGALPVKEFNAARRYLDHTGLHNASCRPLRYEERNRRTENASPDSPPRPRSSTPARMDADDADADDDYVLDLTRDWSDADADARVVRARAWSADVAPTIAPSSSTDRADARDARARASADAPYALPLPRARAPLLVGQAHKKELGTVVWRAAVILCEALRARALDADFLRSRSVLEIGAGCGVCGFYAAALGARAVTIADCGPHTMRNLERTLLAFREVAEPECRDAVVIRRHLWEEDAEILNARRLGETPRRVRHWSNIESDGDGSESIHPDATFDVVIGSDLLYFASQEESLLNAINLRLKPDGVCYIVQTMRSNNGEVFARFVAAARTIFELTVESIALPLDGFPAAKETPHALANDPYRFLTLRKL

SEQ ID NO: 6020 - protein, 490 aa, Ostreococcus tauri
MSAMRCAGGRGGGTWVDADARGEAEGAAASTRATRDERRIRGVGGGGRRARDRGVGDRRVGGSGARACAGTGGWGAAGRDERLTGAFRATQEGKGDKQSKKATTSQYRGVRQRPWGRYFLTTFCAIDSWAAEIRDPNRGARLWLGTFDTAEEAARAYDAAARHIRGPNAKTNFQLAPGEEPPPFVLPEPPSGGRGMGGGAGGGGRGRGSDMGLPSTGYGGAGPSRQPNMMKKQKPVKGGVSTIYGFGTPTGEKSGVPKRGSIGFGSGIDLSALANANLALANQNLASAGSARKESESGFMKLFANGSLGDTPSSTGGSPLIMPESIEFRDGIFGMSGEIPVISTKRDRGPSSAFFGTSFGVAGSFGSMFPPDMGLSSTPDAGDGSNFSGFPMSPNTGIDGDFNVGSLGTIGDLGDALPAVGSFELGSPVDLDSMMNSMSRNSGGKAQPMASILGKPKKQEHDSPLGRASTRSSRDTRSKSAQLDALSALK

SEQ ID NO: 6021 - protein, 325 aa, Ostreococcus tauri
MSCASALSHARTSIVLGRRNTVHAHRRSSVVSRATTEKTSTPMKLAFLGCGIMGVPMAKNLIAAGHDVTVWNRTESATKPVVEAGATLAKTASEAARAADVVFVMVSTPEAALAVAHAAKEGLSSGKGYVDVSTVDAGTSRAIAEVVRSTGAEFLEAPVSGSKKPAEDGALIFLCAGDEGLYTRCTDPLDVMGKAHFFLGDVGQGAKMKLVVNMIMGSMMGAFAEGLTLADKSDLSQETLLQVISLGAIASPMFALKGPSMVAGNYPPAFPLKHQQKDMRLAIALADELAQDMPVAAAANELYKRARRDGCDDEDFSAVLKAVKK

SEQ ID NO: 6022 - protein, 453 aa, Ostreococcus tauri
MEFVGHVRSTVERVFDVSDGAIAVDGGSSMRDAMMPVQAEERAAKIASGEIQAPQRMEGWLAPVSNALEDLLFTIKGQLLDLGVPYPTGNAIIIVTILVKMVTYPLTKDQVVSSLNMKNLQPQIAAIREKYEDDQERMNKEINRVYEENGVNPLAGCGPALLSFPVLAGLYRAFNNAGIDGAFDEPWFFLPSLAGPTDARDLSWLLPLDADLAPPIGWDDASLYLLFPIMTTLSQFVSMEVLKPEEDEKTKEMQNQSVLLKLLPFFIGYISLTVPAGLALYWFWNNVFTTGIQVYLRNGGAVATVEATEVRIKIPLGCVVIPEDAEILPADYKPEGPSVVWDEEWLANWQQEQIEAAPDAAFENALAAGMSEEEAKNMEEMLRNRLPRKKSIAERKLATETELKALIREYKAKDDAETVKVLEDGLEALRAYKAELKLKAETDELGVEDITMA

SEQ ID NO: 6023 - protein, 554 aa, Ostreococcus tauri
MFRSQGARGAQMCSVLAMYDPNAALESGREELMRELSARMRTRGPDGSGYFGSKRYGLAHERLAIMDPEGGKQPIVYEDGAKTYAVCANGEIYNFRKLQAKYGLTAAKTGSDSEVLLQLYKHLGCDFVKELNGIFGFVVIGDDGDHMIAARDHAGIKPLYVGYGENGVMWFASELKAICDQKCERIEEFPAGYYWTPKDGFVKWYNPAWDFDDAVGTKDTSHVRAILEEAILDQTMADVPIGLLLSGGLDSAVVSTVLKPFLEKSGQEYLSFTVGQEGSPDVTAARMMSEFLGTKHHEYLFTSEEACANIENVIYHLETYEPELIRSAIPNYFLAKLTSQHVKVVLTGEGSDELFAGYLYFRDAPSSKHVHNELRRIFGHLHNVNCQRADRMTMAHSLEARVPFLDPRVIDAVMEVDPQYKTIEGEEKPEKHALRALFDGEIPDPVLWRTKAMQCEGVGLNWVDDLQTFCNEQVSDEDYAKAEEIYPINPPQSKEEMYYRRIFEKYYHGMDKFVHVWEGGCRAGGAAWENNQYTRAGVKNVKQLAKGLTGVRGA

SEQ ID NO: 6024 - protein, 683 aa, Ostreococcus tauri
MTIEEQYVADEGEVVIKVKADADPADVDNFGMSETTVQALRKRGVDALFPIQQAVLRPAMDGQDVVGRARTGTGKTLAFSLPVIEKLLSNGRGSGGRGYRNPKCIVLAPTRELAKQVENEIFITAPTLDTACVYGGTPIGQQESKLRRGVDIVVGTPGRIMDLMNRRALDLSEIEFVVLDEADQMLNVGFEEDVEAILHDCPAGRQTFLFSATMPQWVKQITKKFLKAQHVVVDLVGDNKQKVADTIDLMTCAVSQTSRTSIVMDLVTVYAKDKKCICFTQTKRAADELTAALGKRVSCEVLHGDIAQAQRERTLQRFRDNRFTVLIATDVAARGLDISDVDLVIHYELPNDVESFVHRCGRTGRAGQQGAAIAMYTDRESYMIRRIQKETGCDFRAIDIPSSTEVMDACAVTASNALSKVDSELLPFFAPTAKKLLPEDAGEDITQILAAALAAISGQTEAPPPRSLLTGAPNSCTYMVVDSADSEPAIRAGDLLRALTEIDRKLADGCGKIRFLANKNGLCFDIDAAYMSDLETVTDLNGFDLSVCTKLPDLMAEQTRERSGGRGGGRFGGRGRGGRGGRSFGGRGGGRGRGGGFRDDYGERRGGRGGGRDFGDRRGGGGRGDFGDGGGRSDRPRRDFGDRPPRRDFNDRPPRRDYGGDGYGSRERSPAPRGGDSGGWGGW

SEQ ID NO: 6025 - protein, 958 aa, Ostreococcus tauri
MASRARARRRLLEEYRAATSAEESRRAREERDALVEPVRENMERPEAWLMFLESEEALYVGAEPTTELGKPSAATGSRNGVSLHRLYELATKTIPRRGNVNDENYVRIWLGLARQQMLSNMDDARDTFKFLKSCGIGHKHAIYWCEWAAFGFTFKGREKAVKILKRGLDSRAEPRGAIECFLADIEGQRYEPVQHTQHTPFPSLAPQYTSAIKPVKPRHANEMEDDTRAAPKAPVVATPGNLSKRAAALANFQATPTAKFTAPTHQAPTHQAAGTAYVTSSTTMPGSVSSYHSARTNGFRGAGEKTENSMPPPSSSGMDATVTLRSRLAEAKEKYSAMSASRALVAERTPSAAEHTPMDPPRGAPSRPRATEHTPATGGERRVESGAMASADKHPNRPREDDNTVFVNGVKYTKLECVGQGGTCKVFKVVSPKRKILALKRIRLDGKENETVAGFIDEIKLLKTLRGRDNIIQLIDAEVCPREKLIFMVLEFGEIDLAHMLAKREKQRENNGGGGIDDNFLRLYFEQMVEAVNTIHEERIVHSDLKPANFLFVEGALKLIDFGIARAIQTEQAPDHTNIVRDHQVGTVNYMSPEAILNGQASALGGPMKVGRSSDIWSLGCILYQMVYGHTPFSKITGMIQKLHAITDPRHAISFPPLPVDNPALIDLMRRCLERDPRKRISVKEILSHKFLRPVADLASPASADAGLSMTQLADLLAQIQKYGANVDVGAVTTEVFRQISAGEPVALSPIVRRHSRLARYGDENVAPSVSYARTRPRATHHRSRLSWRTSSSCQAPDARRRCSRNIVRDVRVTTPAMPDPHLCRQKIWIPHCEDVLKCDEESIVVGHSSGAVCALRLAERRRLRAIVLVAGYDDDLGDANERASGFFDSAFDYEKIKENCSGRIDCVIGLRDGLVPAEMQRELASKLGVREPTICEKRDHFFTPPAEEIIESIKRFV

SEQ ID NO: 6026 - protein, 844 aa, Ostreococcus tauri
  misc_feature (1)..(1): Xaa can be any naturally occurring amino acid
  unsure (1)..(844): unsure at all Xaa locations
XVCSQKESFAMRIFAQAGVKDLKVVLTKTRDFIQAQPTVSGAPQQVLGRFLETLVDDARNISKDMSDEFVAIEHLVLALAKDERFGKGLMADLGVTYASLEGAVITLRRGENVTDQDAESKYEALKKYSRDLTEEARQGKLDPVIGRDDEIRRTIQILSRRSKNNPVLIGEPGVGKTAVAEGLAQRVVSGDVPTSLQDVQIMSLDMGLLIAGAKFRGEFEDRLKAVMKEVADSMGKIILFIDEIHTVVGAGGGGGGNGMDAGNLLKPMLGRGELRCIGATTLDEYRTYIEKDPALERRFQQVLVAQPSVEDTISILRGLRERYELHHGVSISDSALVDAATLSDRYIADRFLPDKAIDLVDEAAAKLKMEITSKPTVLDEIDREILKLQMEKISLSRPGAARDQRSIQSKLDKLDTDLKSLSVKQAELNSQWQGEQNKLKAIQTLKEEIDSVAISIQRAEREYDLNKAAELKYGTLMNLQRKLNEAEEVLEQATSSGEPTLLRDEVTETDIADVISKWTGIPVSKLQQGEREKLLDLPAELHKRVVGQDEAVRSVCEAIQRSRAGLSDPNRPIASFMFLGPTGVGKTELCKTLASFLFNTEEAMIRIDMSEYMEKHSVSRLIGAPPGYVGFEEGGQLTEAVRRRPYSVVLFDEMEKAHGDVFNVLLQILDDGRVTDSQGRLINFKNTILIMTSNIGSQYVLDSNESSKDTRRERVMEAVRGHFRPEFINRVDEWIVFDPLAKDQVTAIVEQQIMRVADRLKDRKIGLEVSTAAVTLLSDAGFDPAFGARPVKRAVQSLLETAIAQAILRGDVIDDQIAVVDVSADVPGKLAVTTKARVPEPTSR

SEQ ID NO: 6027 - protein, 414 aa, Ostreococcus tauri
MTLIGAEGGGSESDSDEIDAERAQASLRAWEKKYQSERAWEDLEEDPLTGRLRVNARAVELRARERRAKMASAALRGGAAKGMMRFAYVVVDLSRAANEEDFRPNRLSVVGHCAAAFVREFFNQNPLSQLGIIVARNGVAERLTELSGSPEAHCAALRNALDASGDFSLQNTLNAARTSLKSIPSYGSREVLYIMSSLATCDPGNVWTEIQATKAAKVRVSVVAVAAELHVARRLSEETGGTYGVSMNADHLDDLIMAHAPPPPLAEDATKSCLVQMGFPQKKHVSKDALIVGTRGDYVCPRCSGRIDELPSQCTVCRLTLVSSPHLARSYHHLFPVPAFKEYASRNVSAKESGIVALECSACLASITDASLASECEHCSNVFCFACDIFIHERLHNCPHCSCATHVESRKKAS

SEQ ID NO: 6028 - protein, 425 aa, Ostreococcus tauri
MAAAASASRARVVRRGDAGVDDAHVVDSTEDALERVRWARARAGALDDGFLRPAPSARGEGAETVNDEALARALQAEEDAAAERADNGSAVGTASGGEGDANACAGCGCGFSGLELALGGTVGALGRRWHAKCLRCDDCGEALSGRFGGEFCVAGKPGGRRQVYHKRCYQQRHRPRCDVCAEFIAASADGYIPLRRRPVHALACKPSSWIHKTRSRCTEIALGPGAAELPPLYMCTQDVINHVDEEEAWHRGRTSQVRGMCVSHVETISTVYRQPTWRQANTGSIFDLLGHLDVVEHRIPRSTSQKVTAILVLSCLPRMLAGSILAHECMHMYLRLNGYPHLEPVVEEGLCQLFALLWVERQTIAPGSSSDDAAFGAYVASQIREDPSDVYGVGARRAIAANESHGLREVLSTVKRTGTFPVSQP

SEQ ID NO: 6029 - protein, 512 aa, Ostreococcus tauri
  misc_feature (72)..(78): Xaa can be any naturally occurring amino acid
  unsure (1)..(512): unsure at all Xaa locations
MAIRVITRRRLAVARARARAIARASAWVTIARAAADGRRTRAVRRWRAPGGPGWVPCTAESVSAQTPPRAPXXXXXXXILETPHDIFLVMEYVKSGELFDYIVEKGRLGENEARHFFQQIISGVEYCHRNMVVHRDLKPENLLLDSRNNVKIADFGLSNVMRDGHFLKTSCGSPNYAAPEVISGKLYSGPEVDVWSCGVILYALLCGSLPFDDESIPNLFKKIKGGIYTLPSHLSPGARDLISRMLFVDPLKRITMAEIRQHPWFVVHLPRYLVVPPQTQISQTSNLDGETLDMVVNLGFEREPLISALQHQVRNKATVTYYLLLDNRRNIYGGYLGAEYDDAEMMAEHNNMRGHGVASALGVRRPSQIQSHMMQTRLVAEQRWMLGTASKMGAQDVINELLRVLRAMNIAWKKNGPYNMKCMCVFHPDNDGEMDAGDYGESDAMEADAGDVSMATRSHAPGNAREPSVLKFELQVYKLPNDRLMVDYQRVEGGVMVALDFAAKLMTFMNLQ

SEQ ID NO: 6030 - protein, 960 aa, Ostreococcus tauri
MGVCVRAATIDDLWAMQRCNLMCLPENYQMKYYLYHALSWPSLLQVADVDGAVVGYVLAKLDEESTTEIKGHITSLSVLRTHRKLGLAATLMRAAHRALTECYGARDVSLHVRVSNEAAIHLYRDVLAYEEVGVEEKYYADGENAYNMRLTFDYGGEDATRGLARDAAKLAVHATEATTSAPARRPHSSPVPSARDMSAFEDLGLCPELIVAADVAGFTLPTPIQSEAIPLCLTGGDVLASAETGSGKTFAFGAPVLQLTRETMMVERERERGGTWTRGTTTTSEAVETLGTRARLSANARSATCATDYASGRTQSRSMTSWGGVRGRYGIDPRREGETVGKVMFEAEVTDDGLARFGFSSRFGALDGLGADAHSYGYGGTGKKSHNKSFEDYGEKFKKGDVVGCLLDIEGGVVSFTKNGKSLGDAFRLSEQSAKSDGLFPAVCLKNAECVVRFVEEDFKHAPPEGYVGFGSLNSRDAVDGDDPASAEARSKSGVRIPRALILEPARELAEQTHEFFVNFASEFRDPAIVPGLFIGGVKEGPQHALLREGVDIVTGTPIRVLELVQNGKLDLSAIRYFVLDEADRLLDTGNQATILKLFERMPKLAASATERLQVMLFSATLHSPEIRELAGFLTVNATWVDLKGKDAVPETVHHALVLVDPTTQDVDALEPKVLTDRAHSLASTLDGDDALSESIKRLKPHILRGIIDAHEMDQCMIFCRTNFDCDNLEKFLNESGGGKRFRGADVGGVEGKYSCCVLGGARNMDERRRNLQAFKNGDVRFLICTDVAARGIDIKNLPYVINMTLPDKSEDYIHRIGRVGRADTMGLAISIVAAKNERVWYCTKKGYKPWFDPKPDDVKLMSEGGHTIWYNEPKLLKDIEKRLGSTVAPLGPNYALPDSFGVQDKDAYGKARDEKPNEETNEHLLAYAPHVRALAALETKVQSSFWELKRKFAACESME

SEQ ID NO: 6031 - protein, 5068 aa, Ostreococcus tauri
MTASSDDATVEQEDEEDEDARLRFILRLAGTCRDGGEGDVHGFASGSRRAVLEFLDKGRDEVLVLKFRERVIDEVKPSKALTDTTNACEPMRDVGGGRQNDSMRGTLELVAGASDGQEPVLFLVRPDSLHDTTSIDLEALSNAMYGFYPHGASLGELHATLRYSFLSAIESSEAAESRSFAKHIREFIDRVSVSPTTLRERNSFSFSVGANGQRALAEVDPETASDDDNFVRQVEAALAEWCEVMSAAKARNEHDPGVKGDSVHEGPLVEIRLWRARNNDLSGLIKQLEDPGMQVVLDVLHRFATKRPDSSDDFTSRVCGVLESFQSLRGELMHLHNVSSDNIKFLSTLEKHFHVLSYGCLRDVLRTIAPTVRALRLVWVISHHYNDDSRMGTLLARLSDALVHRVRGCVCYQELFTKVSGGEDLCEVLRDVTLAQMIMSSWKEEYSKTREEIERSNRDSRWEFDRDRLFSKSDYVAGVSKHLGEMIVVINDFRNFLSPRLKKLTLDADGVNDISARVDALCLSIKMSQVDIFDVSQAESWKSMHKSFIMEKTRIERVLCNFIDACFKRLRSSSDALELVKELKKTMNSQTSESSPTGSTRKMLNNQIIGKMQDVLEQFSREIDSARHTFNTNRRSPPLNRDQPPVSGSVHWARALFFKLRCTMRLFSECVADQQSIRNTPVSQEVNAKFLALAKLMLKYEKQRAKTWNDEIKTTLSSSLTQPILRKDATGELVINFRPELITLIKETRGLERLGFVIPAEARGVELQSEKYGVYRGILGKMLSRRRDVLDSLSSLETQIFHTRIEALDGASLQRGTRTCNWNSLSVPDFVAAYTKELDEFAAMLSAMRATDCDIERAVGRISGASFFDITKIIDSDRQITSGDFFARLATQCNVVSSNIRDEYLGIMRLLLKVEEIVHGSSTGKVVHLKEYYARWENAIYEALILATERAIADMEEQFNKSAIYDYAIFKLDICLRAGEIVCDPPLKELSRSIMHAAKSIARSVSVLGRWMDGTCLEVPEQKVASSSDVSLSALLAMEIGDGMNTLARTFNFGNEILENERVHDALMSLSNTTNICVGEIRRHMEIWKRHQAVWKADQQSVIHEHVKDMSALRLQRTFLQYEDTIRAMEEESCISVGSVHVSAKNLADVVKDMSVRWIEEIGAATYNVDVELMNNVYDRLDAIMKIFSTNPVGFKEVKSLLEAIRDVREDTQTEFFASCVIRRFIVRTKHKIEQDPSNQYRAMMMIPTFSKLRERATSVCDEACAQVSECKIELRKMVREFQEGGNDFAKRLRSQGPTSADLLVNIDAGFIIFESFREELLRTESVMDGIRDSERVFGVESAVFESLELARIDLESMAKIYECRRAYQHQLQQIQDVRITDIVTSNVQSSVVNVGRKLLTKLPEALQSHRLLLAVQDEISNIEVDLNLIEDLKFDGFRPRHWINVFRVVGFEDETAEPAQFTMQTLLRMKLHSHAQKIMDITAAAEKELKIENDLNAIDKSWREMRFDLKPYSKGKSKKHSQPTHVLCAVEEISLALEDTGLTLQSMSASRHSDPLIDVVREWEATLALVGNVLQVWTDTQQRWMYLLSIFGGSDDIRMQLPEEADHFDDVDTKFRKLMSETVKTKFILDICRAEGRLELLKDLRAELEVCQKSLSQYLDTKRDAFPRFFFISDEELLSILGAVDPTSIQEHMLKLFDNCANLSFSSDKSSIVGMSSAEGESFKFKSPVKIQGPVEDWMSAVEEEMRATLRALCKYGVARYMTCEREDWIKEQLGMITLVGSQIWWTWEVQSVFKAISAGDKLAMKKYSDKLSSQLHILTKMVRGELSSNERKKVNTLIIIDVHARDIVDSFLRDSILDEADFAWESQLRFKWDKSRDDIVINQCSGEFKYGYEYMGLNGRLVITGLTDRCYITLTTALTYRLGGAPSGPAGTGKTETTKDLAKSMALLCVVFNCGEGLDYKAMGAIFSGLVQCGAWGCFDEFNRIEAEVLSVVSSQIKQIQEALKHNLTRFHFEGKEIKCDSRTGVFITMNPGYAGRTELPDNLKALFRPVTMIVPDLEQICEIMLFSEGFNAAKTLAKKMTMLYRLAKEQLSKRSHYDFGLRALKSVLVMAGGLKRDSPELSEEVVLMRALRDMNLPKFVFDDVPLFLGLINDLFPGISCPRVRYPTLNDVIERDLAERGYQVMTGPGEQVDKIIQLYETMLTRHTTMLVGETGGGKSVILETIARAQTTIGRNTKLHILNPKAQTVSELYGELDPDTRDWTNGLLSNIFRDCNKPLANGRENDLKYIVFDGDVDAVWVENMNSVMDDNRLLTLPNGERIRLQDHCKLLFEVADLKYASPATVSRCGMVYVDPKNLGYKPFLKTWTASVNTRHREPLTCMFEKYMDKMTAFCYEGADLDGSVTALIKTSINRNFLDVIDSQLNDEDVSVAETYSSTLESAFIFCLVWSFGATVVETAGKSDRARFDDFVRRLADVGDTLPREETLYDYGFNIEQNAWYDWKSLTTPLTLQPNTAFSSILVSTAHTARTNWLMDVMCSCNANTLLTGDSGTSKTVVVKNYLQERLKDGKTNTLTINFSSRTTANDVHSSIMDSVEKRTKDTVGPPLGKRLLCFIDDLNMPAVDKYGTQQPIALLKLMLDRGGTYDRGRDLNWLHMKDIQYIAAMGHPGGARSDVDARFVSMFQVFEMQTPDESNLKIIYGSIIENTSKTLDIRRDTRELIVNMTLDLYKSVISKLLPTPSRFHYVFNLRDLSRLFEGMSKATPSTIRNANELLRLWRNEATRVFHDRLISDEDRSFVHSKISSLIHHSCTDEYESVSANPILFADYAPECTNSDVDEFGNDEMGENISKERVRVYQDVGDYAKVKPWFEELVSVHNGKLKDGSAPTELVLFDHALEHLTRIHRVLRTENGHALLVGVGGSGKQSLARLAAEMAHCEVFEITLTRGYDDETFRDDLKKLYNTLGVQNKATMFLFTDNHVVEEGFLELINNMLTTGIVPALFADEEKDALVNAIREDLHANKVPVTRDEGWRFFISRCRANLHIVLAMSPVGDMLRHRCRNFPGLVNNTVIDWFTEWPKEALLEVSNSLLSTVSLPEEFKEKIDSHIVYTHCAAIALNEKFKSRLDRHNYVTPKHYLDFIASYKTALNEQRTSIDNSIKRLSGGLEKLIQASAEVDVMRTKLNDAQVVVTQQATECDALLERITTRTAEVETKAENASNKEEELIKDSERIAKEKTEAEADLEAAIPALEEAAAALNNLKKDEITEIRSFAKPNIVVQRVCECVMILKGLPNVSWSGAKGMMADTNFLRSLVEFDKDGIKEKQMKAIREYTKDSKFNPEEVTKISTAGAGLLKWVFAMINYNKVARMVNPKRAAVANAEKTLSIKEVELVETKSELKSLQEELKQLSTQFEEKSARQQDLKQSAELMANRLNAAERLISGLASEKVRWTNEMQELSTRKERLIGDCLLTSAFLSYAGPFTFDFRRQFVHNHLQEHLRSLGVPMSEPFKLQALLTDENEINSWFAEGLPGDELSVQNGMLTMRAGRFPLCIDPQMQAVKWIKSREGALLDGKVKRQTDADFLKQLELAIQYGLPFLIENLGEYIDPVLDPVLKKSFYYAPNGAKMIKLGDSEVEWDENFRLYMTTKLPNPHYDPDVTGKTIIINYSVTELGLQEQLLSVTVKQERPDLETEREKLVKETVANRALLKTLEDTLLHELSTAQGEIVDNVELIETLESAKTKSIEISEKLVLAAKSANELNQAQLCYSPVAKRGAILFFVISALSNLNAMYEYSLSSFLDVFCNTLVVTPTCDNLHKRLADLVDRLTYDVYRFACLGLFKRDKLALSFQMTTRIQEGQGRLNVKLLQFFLKGCVTLDDASETSQPIEWWSERGWQDLIHLSNEVAKRDGGCTALTEITSRIERNACEWREWYDCEKPEATSLPDDFSDKLSELERLCLLRCARLDRVPMAVSNYIVKTMDVRFVTPPISDYNAIFKLSSKLTPVVFILSPGADPAFDIFALGEAMGFKPGGKLKFMALGQGMGPKAEELILTCASRGLWLMLQNCHLLPKWLATLEKVIDGLVNPHKDFRLWLTTDPIATFPIGILQRSLKVVTEPPDGLKMNMKASYGRLSEDVLGSCRNPFFRALAYVLAFFHAAVQERRKYGKLGWNVAYDFNETDFRISFSLIKAYCDKVRGDRNGSRMIPWTALKYLIGEAMYGGRVSDHYDRRVLNAYLEEYFGDFLFDGLQKFMFYDDEENGGVRYELPAKNMTYDEQLCVIDALPDVQTPEVLGLHANADVAHSTRAAKELWSNVLSLQSKLEVAASDVDSDKNNSQDMTLVIACEILKVVTNEEFEFDTAKLQRGFDGETPSPTTVVLFQEIERHNYLKIVIQRSLRELIKALKGEIGSSRELDAVADALSCGYLPDEWKAAAPPTDKDVQSWMTWYKTREKQFKSWALEGEPKVMWLSGLHCPETYIAALIQSACRARGWPLDASAMYTEVTEFISVDDVEEKPELGCLISGLFLEGAVWDLDRRVLTQPSDKCLVSELPILRLVPYRRSSTDLGGASSDANTNVNTFKTPVYFTQNRRDAMGRGLVFEADLGSQDHASAWTLRGTMANVPSRRPRALGVSPCPHSPARQFRCTSTVMSQDAASRRVRSLANHVVAPTSGANAFGVASANKGFTKSPDDVVVVAACRTPITRAKKGGLAKTPADDLVAAVLQAATRRANIDPSEVGDVVVGSVLGSSSQRANECRIAMFLAGFPKEVPVRTTNRQCSSGIQACADIAAGIKAGYYDVGIGAGVETMTSNPMKWEGGFNPRVASSSDAQNCLIPMGVTSENVAEKYGISRETQDTMAARSHARAAAARASGRFKNEIVPIHTKNAEGADIIVSEDDGIRPETTLATLARLPAVFKKGGSTTPGNASQVSDGAAAVVLARRSYAEARGLPILATWRSFSAVGCDPALMGIGPAVAIPAALKAANLTVDDIDLYELNEAFASQATYCIEKLGLDPERVNVNGGAIALGHPLGATGARCLATLVYEMHRRGAKTGMFSCCVGSGMGVAALVSVED

SEQ ID NO: 6032 - protein, 454 aa, Ostreococcus tauri
MSTAVEERSTASKLRAPLAAGALGLAAVTLGGPASAAAAAVPAIVAADTCWILISSALVLFMTIPGLAAFYAGLVRRTNTLSVLIQCFALTAHMSALWFLCGYSLSFSTVGMKEGVVGLASFIGGLDKVALAGVSMSSVAGTIPEALWVLYQMTFAIITPALMIGSLVERMKFNSVMWFSTLWMFAVYFPACHMVWGGAGGYFADMGVLDFAGGIVVHITAGIGALVAAMYLGPRKEAKIHQGNLVLTFLGTAMLWVGWFGFNGGSAGAASAGAAFACLATQLSASVAAIAWTALDVIENGKVSVLGTCTASIAGLAAITPAAGFIGPVGACLMGLASAIVCRFFSTNVKEYFGYDDALDVFGVHGIGGFLGTVMLGILCHPFFGGFNDVPMMKQTAVQMFAAVATAVYTAGASWACLKATDIITNGIRVPAEAEEMGLDVYSHGETAYSPMPR

SEQ ID NO: 6033 - protein, 418 aa, Ostreococcus tauri
MSHERSASGDKMIEAGEKLERAYSPSLRSGEHAEVGCRDSMEDAVVLDDNVRVKGAEDVVAFYGVFDGHGGRAMAEFLRDNLMKNVVENDHFISNPELALKEAFYRTDEDFYATAGPSDTSGSTGLAACVIGGKLYIANAGDCRAVLSRKGKAIDLSIDQKPSSQSEMERIKSAGGFVEDGYVNGLLGVSRAFGDWHIEGLKGRGGKPGPLTVDPEIEKTRLTEEDEFLILACDGLWDVFSSQNAVDMARASLRQHNDPTSTARELASEALRRHSSDNVSVVIVCLTPEPPKKETFIRTSPSLLRSLSIDAISQVSRAMAEDANAPPVPQAFAPKRVHSLRDLSHVRSCSGDSDDSLAAEIASQPSAEQVSQVLESIAAINVQNNVQTGALGLERMNSSSVGLEPMSELDTLDEEEAT

SEQ ID NO: 6034 - protein, 532 aa, Ostreococcus tauri
MILPGPVGRPAPRPRQIPCYFARRQPALTPFLRIDEDGTAVHGKMKTSFGRVVRATDASRAHSFARVPSVRRVASRSSLDVRVRVTTMRASMRALTSCAASSSGRGGGRGASKGGRRPSGGRGGGGRGGGVDGRRSGKKESDARAIGEKEKHLYFDEAAIVVVGGAGGDGEGWTGQAKPKVVKNFKYQWGRNLKKYIELPAAEPADGGRGGNVYLRVDRTCDSLLHLHERKTWRAKKGYHGSAADYAAGGRERHRVAPDQEHMYIPVPPGTVVRRKRTGELLGDMTKHGQTLLVAEAKAGEPSPKRQAEDFEASDIAIDTASLVSSAGEAGEELSIELLMRVVADCGLVGLPNVGKSSLLKAVTRASPEIANYAFTTLMPNLGVIKTEDDLAPTGESSTVMADLPGLIQGAHKGLGLGRAFLRHLRRTRAMVCVVDASGQDPLNDYVVVRQELKLYNPEYVQRPHILVLNKMDIEWAALRTDELMQGVEALNEDMIGVPPVAVLPISAKEGTGVPEFMEALEQLMKEEDARR

SEQ ID NO: 6035 - protein, 761 aa, Ostreococcus tauri
MLRINWVSAGLASLVLWGFVIWALSAGVNAATEVKGWQAWITVNWTWLYILTQDVWFIFIIYLLFTKFKDVKLGRDDEEPAFSDYEWFSMLFACGIGVGLYTYGVAEPMWYYRMNYYNPQKIPINNDDQRAQQAIFITLFHWGIHGWIPYVLVAITLGVVCYRHGRPMTIRAAFFPLLGENVNGLIGDLIDALSISCTTFGVCTSLGLGVTTIATTIARLNSDVDPNSDTTKGLIIWIITGIACGSVLMGLKNGIRVLSKITFSIGLIFLGALYALDDPMFLLSSVTQSIGHYLQWITVVGWDCDAWPILTQGLLGAGTNGWTHDDGSWKTTAKSWAGYALGKSNEHNVIDAVRATAGGELDATAMWGKRTYFGFMDDWTIFYWGWWISWAPFVGMFIARISRGRTVGQLIKGAFIAPILFGFVYLTTLGSLGIKMQRVAESAIGTNSSVDWSGNSVDCDAFGYGETKMLNMTSAGYAAGKQLQDAGYYPLSCRNGSDHILDVVEPYGKLARPLQTLILIAVSLYFITSSDSGSYVDDLISAMGYENPPVLQKVYWCFTEGALATALVYSGGLKMVQAVSIVAGFPYTLALNFMCISLWRALLDEDENEEHRRKRKSFNTCLFDFLEAFKPDTATSNAPNARERTICALKNFIFPYESIVKCKRATGASEQIAMIHGGIITGLLWTFIGLLASTKAGANAHGVAWLMFFIFVFCVASIRRELRTARNIIGGAMEDFCSVGALFPFALAQMEHEAECIEKMA

SEQ ID NO: 6036 - protein, 841 aa, Ostreococcus tauri
MPAKRARASSNTTVDSDEILRTFQNATACDEAYARRRLSQNAWSLAKALDAHFASTEALDARERKRGATLTSLVRPRAKEVSKQDELDAEDGMERLKRDAADAVRRAQTAFAADADGFFRSIPLNEEAEMFTSGSYEALATLVCERVGEEGFRDDAFPPAPGSVDGRGNASGNAPQCRCGLQAKVKQVHKDGVTQGRLFYGCEKRVDRCDFFAWCSKETLVHTDAAKALRWKRFAPPRFKFARRTSAADIRQGSVGDCWFLSSLAVIAEREDLLEQVVGVSRRHAGVFEKHGAWFVRLFLGGRWRAIVVDDMLPVKTPKTKKDDEYSLAFSRAANNQLWVSLTEKAYAKAHGSYSAISGGYVSEGLHDLTGSATEQIDFHANDFDSEECWARLMSFSAAGFPLGCATSFSAEGIVGHHAYSVLEVREVVGVKKGVQTKLTEVYARGKDALDVEVENLRLLKIRNPWGKREWRGEFSSNSDAWTKRLGDVLSRTRADDGEFWMSYRDFLMHFSSVDVCKSPRGWHSMNLETVLSDTRERGPTFLIRVDDDGGCWCHVLLLQHTKRGRPNGHWYTDLSVLVWSRDVGSSDWTPMGGMFGARERESCQGEIMLDAGLEYAFHILSIAGGRDVPVTLRLCSAKPVRARLGPPGIPASVARNLHLAIHGDSAITGGSKFKRSHLALCGGFATCATSKGLNFVFIQAGAARASDLAVRVAYRFDDERGAACYQHDDVVVARPGFSRLAVVASGVSTHARHKFEFDYAVAECACGNATSESIHDDDDDDDCVVIGETVAKNTERAREKRPEIAPMRCEALFEQVDAAFWSPPRASTKHTARGTFSAVI

SEQ ID NO: 6037 - protein, 613 aa, Ostreococcus tauri
MSDPSEVVPDVQEPMTTNARENRREDSDSGGSRAAYVDANDDGFRDADSEFSGQNRNDDEDNCEMDYDGTTTEIREGMLSGMESDAREELTPIAAKEDIEMEKKEGEPGGMIASGIALEIPAHFQCPITMELMQDPVMIATGHTYDRPAIQRWLDQGHRTCPVTGVRLRHLELIPNHAIRTAIQSWAPAELSALRPLAPLHDKAVVDIHRQNSDIIGLRDALGAGAAVVAPAANADASDDQHPVYTIAEGHDEIVWGVDTTPTTLFSASADKTIRAWDISSRRCVQVLEEHTRPVLCLAVCVKHDKLFSGSYDCTVRVWNLSTYRRITYLPGHTDAVRALQVYNDTTLYTASYDHTIRAYDIESLELLKVLRGHNGPVRTLVTVNDYVFSGSYDRTVRVWPAYSEDIGPSAGTDLVKTLKGHKDAVRALACFPRRQATSSNRAIGPYVFSGSDDSNVRVWNAGTFECIQELKGHTDNVRVLTVDDRYLYSGSWDKTIRVWDLETFSCKHIINGHTEAVLALCVMGGHLVSGSYDTTVRLWGVQSETEFECVGVFHAHNDAVRVLTSAGRNAATVFSGSYDGSIGFWRLPISDPRDWPPSRSHALGWVGQRSPH

SEQ ID NO: 6038 - protein, 317 aa, Ostreococcus tauri
MTVASLSRALAAVVYVSEGRRTVVLDAIERVARDASLKNRVALVNVFVDREYNRTGFTLAGAHTDGIANTALDIAKKSLELIDFSTHDATHPRLGVVDHVSCHELRGERDAGAALARNIGRGLGDQGVPVKLYGDAASDKVGLAEIRRRAGYFSGSKEGRWMGDGGLRELAFEYGPSEMSSKIGFGCRGCRCPWVCNYNVPLTFTFDAGVDADERIRRALAFGRAAAKCVSERGGGLPSVQSMALPHGDRVEVACNLLDMDVTSTADVQRATESTVASINAWDYLGVGSTVRVDQGYVTNQTPESMLEAIAALERGS

SEQ ID NO: 6039 - protein, 340 aa, Ostreococcus tauri
MSVALTDAVAYDAFTAARDRAIVHFTASWCEPCAAMEIVLEKIREKHAGVVTATCDAEAVEDVAEREGVSAVPYFVFYRDGKRVDAVEGADAATVTNKTRMYFPATATQTTATTAKGADAVKSTEASGKQALQARLKSLIESQPVVLFMKGHPDEPKCGFSRKVVDALNGAGIKFGSFNILADEDVRQGLKEYSNWPTYPQLYVDGELLGGCDIILEMAESGELAEACSEASGDGKVKKALNERIKRMLDAQDVILFMKGDRNVPRCGFSGKVVKALDATGVEYATFDILGDEPIRQGLKEYSNWPTYPQLYYKGELIGGCDIILELAEAGELATELGAA

SEQ ID NO: 6040 - protein, 814 aa, Ostreococcus tauri
MKNDSKYTMGIVSAMGVISKGEPKVTDCLINATDMAAARNEKYTEELNKLEDKHVTTAKALLTDEAEYDAYITAFHEELNDLKAMFKAIYIAGCSTQAFGDFVVGHGELWTARLCAAHIRCKGGKAVWIDARDILVVTDSEDGGVDVNYNLSNANLDKWFDAHMQEGAVVMVTGFIARTPEGVPTTLKRNGSDYSATIFGALVQGRNITIWTDVDGVYSADPRRVKGAKSLASLSYNEAWELAYFGANVLHPRTTLPAMKYNIPVTLRNYFNQAAPGTSIGMTCNVPSVEGEGVVGKYETRDSSGELVKGIATIDDVCLINVEGTGMVGVPGTANAVFSAVKEAGCNVVMISQASSEHSICFAVRSHEADKAVSALNKKFEKAIAAGRISNIEAVKDCSVMAIVGQNMCKTPGVAAMLFEALAQSAVNVIAIAQGASEYNITVVVSKKDVNKALQAVHGRFYLSKTAISVGLVGPGLVGKTLLRQMKEQLQTLQDEFQVELRTVAITGGRKMRSTATAFRPTWMPSRSMCLNRAFAQTKSIVDCSASTKVRGSPTTHWVVHRVARRHGRTEGDRGPLAYYKDLRSIQRNSYTHYFYEATVGAGLPIISTLRSLLDAGDKVERIEGIFSGTLSYIFNTLEPGVAFSDIVAQAKEAGYTEPDPRDDLSGMDVARKVTILARECGLNIELSDVPIQSLVPEPLREVATADEFMKELPKFDGDIAKQQEEADKVGEVLRFVGVVDVKAGTGSVELRRYPKDHPFAQLKGSDNIISFTSRYYTSAGPLVVRGPGAGAEVTAGGVFGDILRVCAYLGAPS

SEQ ID NO: 6041 - protein, 400 aa, Ostreococcus tauri
MEMTWTATATATATTTTTGPARGFAASAEALIAPHGGELVNLVLADDGAKAKAIASCTRALELSDRNACDVELLSVGGFSPLRGFMNEDEYEHCVENMRLKGSNLLFGLPIVLDTACEDTKVGDRVLLKYQGKDVGVLTVESKWKPNKPKEAKMCYGTSSIEHPGVAMISMERRKYYIGGKVEGLNLPQRPFPCPTPSEVRATLPKGKDVVAFQCRNPVHRAHYELFTRALHADNVGKDAVCLVHPTMGPTQDDDISGLVRYKTYVVLAEEVKNPQNSLGLPPAIQHMIIRKNYGVTHFIIGRDMAGSKSSLDGEDFYGAYDAQDMANAHAAELGMQTVPSLNVVYTEEEGYVTADVAKEKGLEVKKLSGTKFRQMLRGGDDIPEWFAFKSVVKVLRENI

SEQ ID NO: 6042 - protein, 356 aa, Ostreococcus tauri
  misc_feature (1)..(2): Xaa can be any naturally occurring amino acid
  unsure (1)..(356): unsure at all Xaa locations
XXASGAQKPKGAASDADGELAKMKGQLGGAIVTEKPNVKWDDVAGLQGAKDALKEAVILPVKFPQFFTGKRKAWSGFLLYGPPGTGKSYLAKAVATEADSTFFSISSSDLVSKWMGESEKLVSQLFALAREQAPSIIFIDEIDALCGARGENGESEASRRIKTEILVQMQGVGSSAGKVLVLAATNTPYSLDQAVRRRFDKRIYIPLPDEAARAHIFRVHVGETPSDLTDEDYQMLGAQSEGFSGSDIDHVVKDVLYEPVRKVQEATHFITVKNPAHAPTGTDAQDEYYVPCSPGEPGSWPSSLEELARLGYAARVLPPPITANDFRKVLLRARPTVAPADLEIHERFTKEFGEEG

SEQ ID NO: 6043 - protein, 986 aa, Ostreococcus tauri
MGARGRSTGTRSTDAGAGRRGGRGRGNGTTRARPVRGVHVRRRAVVEPERGATGGERRAWHAADAASLGAFNEETIARYAKYPEPVREDAHVYKDADGYYVVKEEWRKPTNPFEKLKLEKDPMRELIGLAGLEAMAEASAVDFKAWDEALNDPDETDQRPKWAGLFHRRKGHYGRYMMRLKLPNGLINSTQMRYLASVIENYGEDGCADITTRQNIQLRGVELKDAPEILRKLEELGMCSLQSGLDNVRNATGNPLAGFDPQEIVDTRPYTLAIQEYVTGGGRGNPAIANLGRKWNVCVVGSSDFFEHPDINDLAFIPAMKDGKMGFNIIVGGFISSQRAAESISLDAWVPEGEVVAATHAVLTTFRDYGHRGNRQKCRMMWLIDEMGLDNFRLEVASRMPIGELARAAEKDLIDRDSPRRSYIGVHEQKQDGFSWVAAAVPGGRMQPEDLREMADLSDKYGTGEIRLTVEQNFIIPHVPTEKVDDILKERLFQEYTPFPGKLVSNMVACTGNQFCGFAQIETKRQALEMAEHLESVLDLTKDVRMIWTGCPNSCAPVQVADIGLMGAQVKNPSGEKGMVPGVNIFIGGTVGPNGHLKEKPEIEKVACTELKPILEDIMIERFGATRKAVPTPNPGRASRWKINKSAQYTKGVPKAMGKATHICTACGYIYQETKKFNELPADYVCPSCSAPKTKFEAMKQEVDPASARPTVEYPEGTLVTLKQGETVNLKLIEKEQVTSNTVRFRFELPSPEHILGLPVGQHVTVTIDGVSRPYTPITRDADKGFMDLLVKVYDKGELTQKLNSVTVGSMVAFEGPSGLVTYSARGEFSTLNPATGVVSKKACKNIAMIAGGTGITPMLQVIRQIFSDVGDTTRVSLLFANVSSADIILKKELDELAAAHKNLSVHYTIDKQEPNWTGDVGYVSKDMIEKCKLLDDNTGFFKKLFSSSDANDTAVLMCGPPVMLEKAVVPALDALNVPSECRILF

SEQ ID NO: 6044 - protein, 333 aa, Ostreococcus tauri
MHARGTPSSQRNDGLEKENAQASSRGMKSATPPSGKTPGRSGLQSRTENASESGRGDEREATKEWTLDDFDIGKPLGKGKFGSVYLAREKRSKYIVALKVLHKSQLCASHVEHQLRREIEIQSHLRHPNILRLYGYFYDNTRVFLILEYAALGELYKELQRAKRFSERKSATYIASLARALIYCHKKHVIHRDIKPENLLVGIKGELKIADFGWSVHAPNSRRQTLCGTLDYLPPEMVEGRDHDYAVDVWSLGVLAYEFLVGTPPFEAEGHSETYKRILRVDLQFPSYVSENAKDLIRSLLVKEPAQRLPLSRLLDHPWIKENASPNGIPLPE

SEQ ID NO: 6045 - protein, 306 aa, Ostreococcus tauri
MGEAAIFFVRATQGGVSGSIAKTATAPIERVKLLIQTQDANPRIMSGEVPRYTGIVNCFTRVTAEQGFGSFWRGNLANIVRYFPTQAFNFAFKDTIKGLFPSYSPKEAFWPFFAVNMASGGLAGAGSLLIVYPLDFARTRLAADVGNKSTREFTGLVDCLTKIAKRSGPMALYQGFGVSVQGIIVYRGSYFGLYDTGKGALLTKDSRHQRCRRLVLPLRYRPSSSHDELGLRQEVVQRHHGCLRQNLPARRCRRLLQGRILQRSSWCRWRSCARDVRRNQGCHQPVNKRARDVGLFTPRSRANSRT

SEQ ID NO: 6046 - protein, 276 aa, Ostreococcus tauri
MTTLHRTPPPVTRAMCDGDGSDVENDRSVSNSGRSTPVRAHRARKERAHGDGAHGARRNPLANETTNAATTSRVAREDESSASLARLLQEQERAYFMMQFGERGADAVVEDALVEDALVEDERVVEEMEEDESLALARQLQEEEERAYRQRMLAMAGIDPDAEEDSEAEGIDTDAMTYEELCELGDTVGKVSCGLTEEQLASLPARIVDAKVAGTKCAVCCMEFDLGESACQLPRCGHVYHGECVEPWLKENKSCPTCKTEVFEDKTEKKTVRRAL

SEQ ID NO: 6047 - protein, 878 aa, Ostreococcus tauri
MASVRGGTTSMDRVPSTSSLNDGPVTTSDVHVLVVDDERICRTVTSSLLRRCGYRVTMAESGEEALELLRRGTEFHMLLTDVMMPGIDGPALLQIVRNDERLRDMPVVMMSANEHSDTVFRCIQHGAEDYLLKPVSRRAVKHMWTHVWRKSQVNVSRTVPQLGEDGEELLEDDEDRGEMVHGVPSVPQHGEEVTNSGEYNVIDRVHSPAGMRRNVSMLSLASAGLSTKASLFSAPVQTEGEDVSQKEEATMDIDEDVGKSNIQIVPEPVVHSLPPPLAGLETGARCLREWLDDETSGAQATRKEERWHVAWRITAFVDGLKYGTSAASYDMFDANCLNISPQGDITFAAKAHNEERSFVELAQELDDRDALFVVGLIILNMFWPEVFITVYEAEYPEKALTQVLAMSGFAKQAMTGEFEAAKVVVNHDLDVTGFEAARKRARKESTSGATEVGVSCYDDGTLMHKNLNSVVKSAFRSAKSLERQVFEDLEISLFDKCIVAMRQTSPSDCDSDGAWLKRVRENVGGSGYSVCNALDDFESEIRLVTRSVSLKRCASIGGDVTDFVANNSMVCCASWDRDGELFATAGTSRSICVYEADAVMKLGARVHCPAVEFEANDKVSSLCFNHYVKQSIASGDYQGVVQLWDVHKEVSTWENNTHRRRVWSLDFSSIDPTKLASGSDDGTVRVFSTTTKEATCTIQNHANVCSVRFHPTAPHLLAIGSANHKIHCYDLRQLNNPLLTLQGHRKAVSYVYWVGDELLSASTDNTLKLWDVKRNNPQTACVRTYTGHTNEKNFVGLSANADGYIACGSEDNVVHLYAKHSSVPVSSYSFSDKPAPVTQHRRDKAGFISSVVWSPDSKHLLAANSKGHLKILALSKSV

SEQ ID NO: 6048 - protein, 398 aa, Ostreococcus tauri
MRAKAEANGIKIENDVEREIKADEVTILDGHTSEVFICAWNPTKQLLASGSGDSTARLWTIPAGPSGREAQTKLSKPKVLEHKSDEGDAVDAMDTDEAKNGEFTADGSKQKDVTTLDWNADGTLLATGSYDGQARIWDASGKLVRSLKMHKGPIFSLKWNKTGEYLLSGSVDKTAIVWEVATGAMKQQFAFHSAPTLDVDWRDAQSFATSSMDHSIYVCKLGDDKPIKSFKGHNDEVNAIKWDPSGTLLASCSDDFTAKVWNVKKDTCVHDLNEHEKEIYTIKWSPTGPGTDNPNLPLILATASYDATIKLWDVDSGKCLHTLEGHTDPVYSVAFSTDDKYLASGSLDKILHIWKVKDKTLIRTYHGEGGIFEVCWNKEGTKIAACFSNNRVSVLDFA

SEQ ID NO: 6049 - protein, 995 aa, Ostreococcus tauri
  misc_feature (995)..(995): Xaa can be any naturally occurring amino acid
  unsure (1)..(995): unsure at all Xaa locations
MRSSASTARAGSIGRRTARARGGGRSARARASPGTSKRVRELRDEGAYAVGDAARALERRGRRVVRLEIGQPQFETPENVCEAGVGAIERGETRYSAPAGTAALREAVRGYVARTRGVTYDVDEVIVGPGAKPGLFLPALAIVDEGDEVVYPDPGFPTYAAMVSTAGGTRVPVALTNDGSSFDMDALERAVNEKTKMIVINSPGNPTGGVMPRADVERVAALAKKFNCWVLSDEIYSRLRYDDDGNGASESDDGLEDIFSIAALDGMKERTILVDGFSKTYCMTGWRLGWMCCPKALAERIRLLTVHSVGCVAPFTQAAGVEALTGPQDSVRAMREEYRARRDYLVDALNAIPGIRCPKPQGAFYVFPEFTYDCTAKELADYLLEDAGVALLPGTDFGVRGEKHLRLSYVGSMDDLREAVALMTTSLRRKFPRELRFDVIPSLRAPRRPSARRARNRLTRGPFDVRNTLPRTHRRDARTSSRVRRRDAPSGVPSTDVDLDRSPHRSFALGVVVVEARRRKIARKTSPARTMMENDHSADVERRSAGARAEETSSERTEMRSRASRSTRGGRWTLAVTCALGALSARGARAQTPPTDAACDYYMQVGGAGEAASGGGTSDVPFGSLEEAQLALTAGDTLCVRGGQYRLNTFIGAEILVRGNATHPITIKGLKGSDGNLPTFLFKSGVAFDFRGAKYINFESLDVDGSAYNVPLRAVLTAHWWRDKPSPRVKIGQTCFRLRENTRHVNISHCACHDVHSNAVNVVDAYYTRIAHNAFYRIGFYRFKGEVAAVKRTFVKASQEVEEDGYRLDIEGNVIWNVESHLYQRTENASTGNILETNALNFDSVTDLDSKIRVQGNLLAFNGGPDLKFKNAPYLVVMSNTMHASPTVDSVMISDGTSDTSRLIMKNNMFFATQSSKSVIDIDVSMLNSTISDDDTILNNFVSGGGGFVNGTQAGFSVIDASEPVFANVSAGDFRILSTTTGVDATDMPGVSDSX

SEQ ID NO: 6050 - protein, 442 aa, Ostreococcus tauri
MSPDFPTARVDNLSSGRRDARVRLHRATVEPHFSDAPTVRAMKITSRAFERDAKGWIKARARRTLTIAPFASRAIQVIPENPDDIWHVYNLISVDDDVECTTTRKIKGLEGERVRDSSAKTKRITLRVRCEDVEYDAEGSTIRIKGRNQTECEEVKLNAYHTLEIAIGRGVKIEKSEWDAVDVRRLEEAADPSTTADLAAVLIVEGQANVVLVSPTRTIVKGRIEASMPRKRGMALMGYEKAETKFFNNVAAVVERHVDFDRVKCLVIAGPGFAKDTFYDFLKLEAVRRNWKTLQTNFNRIVKAHSSSAYVHSLSEVLENPTVRALIADTKAASEVKALDDFFEMLANDPARAFYGPAHVMAAHELQAIDKLLITDGTFRTKNVAHRKMWVRVTEEIAKSGGVTHVFSSAHASGEQLEQLTGVAALLKFPLPDLADAELAPL

SEQ ID NO: 6051 - protein, 568 aa, Ostreococcus tauri
MSTAGRARADGAGENYMKPLARARGEGEGGTGGRERVTPRLSFVRRRDSAPVHPTLEDEGDADEGTGEGSAAASGANDGSGARAGDDEGPPPSAPPAPRAGDARRRTPTPSVDDPMSCAAPLPPWADAGAKRRFTLRSLPNDGTHARCHVLRKRGLFGAFPTYVLYLDGRETTTATLADAVPILVARKRKKAKCTHYVIGDDGAERAVNEAHPSYVGKLKANFIGTRFELFDAGARPRAWGAPGHLGHASDDESDEDDDVPPRRTLANIRYAVNVLGVAGPRSLAVNVMDERGDTVTTALESARPRWNPSHQAYVLDFNGRVTKPSVKNFQLAVVDSAEAEAAAEANRTSRRVVAQFGRVDDDLFTLDFAHPLGPLTAFAALSRGVRSRPARVPMGFSRARPPPDIAHARSPADAVASTSDPSYEGDGRVGESTIVGAGLGVFATRRLPRGSTARGVTYGGDVMTLLEAVAMPKKDKAYVMALHLNVHVDARRHYGYVGRYVNDSAGTANALNAEFVKDAANRRATLRTVRDVEAGEEFFAAYGKGYWERERAIEGDGVATVERSDDG

SEQ ID NO: 6052 - protein, 308 aa, Ostreococcus tauri
MTSVGFLGLGIMGARMALVLARSGRSVRVWNRSRDKSLRLLEEFEETKTPTCGAVVVANAAEEVRERCEMTFAMLADPKAARAVAKAYAGNDARAADGVRRTYVDCSTVDGAAGEETKAVMKSAGIDFLAAPVSGGWREAAKGELLFLCGGDGEAYDAASPHLEVMGAKKWLVGDSPTHAARAKLMLQIMMGNVVAALGEMHGLSERAGLDTDAVLEMLSHSAMGSPLTTSKGKLMRARNFSPNFQVYLQQKDLRLALDLGDELEYPMPISAATNSQYLRAKSLGHANSDFSAVAVAYTNERAPGTTN

SEQ ID NO: 6053 - protein, 512 aa, Ostreococcus tauri
MSFSDPAAANAVNATIAAFDALGVNVYLLSLDIRKADAVFLNVCAMLVFAAQIGFAMLEVGSVRVKNTKGILLKNVMDLCASAVSFFLIGYGLALGKSVGGGVFGGRVGDGFAMRTDNLSGSEATGDVVVSYTQAFFTMCFSATSATIVSGAVAERCSFRAYFVAATLVSGLIFPVVVHWSWGDDGWLAPVRSQHKLLSSVGVLDYAGSGFVHVVGGCAAFWLTYLIGPRQGRFTKGKRAPNPMPQQSPVFQVIGGLIMWYGWYGFTCGSIKTLAGPRIASLARVGLIHTLSGAVGGCTVMAIDLYLEPNVFMPFRMIYGSLSALVAASASAAHIHISISLCIAFVAGFIYVITSHLMTHVWRLDDVVDAVPIHFFNGIWGVIAAALFSDKRFLQQTYGEAYAGCGLRLRMRQGSRFTFVPVMWLIKKYGWLRISSEQERIGTDAALHGGESYPEFQSAIFNFKDKITGSQSKLEMRVRASEAAKIATTLAALMDTSVTSDEQSLPDFDESP

SEQ ID NO: 6054 - protein, 630 aa, Ostreococcus tauri
MDQESSLTMANYGWLYGLIATYGCASGGAAWFAYARNKAAANDAGDAMRNHFGAGRGLGGVALFFTLSASLFSAYSVEGIAWEAWFKGWFATRWIPAGVGVYMAFLVLAPRLHALGKARGYLTLSEVVYDRFSAPNSRSQLTAHALRVITWGCLLLPIFTYQISQFVSMGKITGGILIFALIMIVVEVVGGLRAVAYTDVIQGVMLIAGSLIFFIASGVEFGGLKRAKEYFVEIDKFQKIPKTDGSWSIISYTSFTLRVAVAATMFPHLAMRLFVAKDRKMLQRGLAGMNFTFFWVQLSTMIAGWTAVYALRGQTGLADIVNQQSIFGKLALQLKNASAFGDFAASLLVLAAFAAMISTADSGLLAFSTMFIRDIYEPYAQKIFGPKAPVDPSALRVVGLISSLSALAIGLSLSILNIREGKPDITGLFSIQTVTPIHAIPAVWGGLHLHWLSGEAVLAGMVAGIVSGLAFVLDTGFNVKRNLGLDEHSSGWNTCVFAFLINIGVVLAYTMVERFVLAPSAASPVVEKNSESKGGRGRPLFIGKKVDKMLSNPIPWFFMMLTLLAACPFWYGPDSKVKYVGSMATWAFTSLFFSFVLAMEVSLMYIFRWEDFELPEENEDAPTKGAAGKV

SEQ ID NO: 6055 - protein, 641 aa, Ostreococcus tauri
MDEVFGRASGASGDGLSMGVRAPTWAEDARAEAEQREERRFEADLAAAISASLGEKQSATDDGGRGESGMMEEERAMLEARRQSLRERFGGSAMAERFYSRYSLNFSERLADGFYSIYPNPVDGTFPKTFDLESLRAFVADDGEGEREVSIVDRSTDLLLQECDASPELARLVAERMGGPAESDETLRERWEVERRRLSKEHGGAVFPIGSIKVGLQRHRALLFKSVADFLEIPSQIVRGKYYCGHDDGVMIIVMCGGMKRMLNLMDSPGRMQQPFNSDSKTPSVYSDSGRMSPDNTADAGHFGVMPQENLPSHETKETPLRLQIAVDLTIDPSQILLGERIGIGSFGEVHRALWRGTEVAVKRFLDQDISRNLLDEVTFEIDIMRRLRHPNVVLLMGAVTVPGNLSIVTEFLHRGSLFKLLHREQPPAVAAALDNRRRMRMAMDVVRGMHYLHSFEPMIVHRDLKSPNLLVDKSFVVKVCDFGLSRMKRNTYLSSKTNAGTPEWMAPEVLRNEASDEKADVWSFGVILWELATVLEPWQGLNPMQVVGAVGFAGKQLEIPSDVDEVIANMCRDCWQTNPRERPSFEHLAESLRSVPLAPSLPSDPPSRERSRLTVPTVPPVPEEASKPNPDDWSDDRFRV

SEQ ID NO: 6056 - protein, 567 aa, Ostreococcus tauri
MGVRVWIILIIALSARGGGVDGARVRLDRDFNHLRLTKTTRDADAVRELPGYGAPPTAQFSGFLDASSSTPGTMLHYWFAAKETADWLTEPTVFWFNGGPGSSSLLGFLQEQGPLLINATGGLMRNPFSWTKHANFVALESPAGVGWSYCEEMTRGGDCANDDISTAADARAAVVSFFEKFPELRRNKLYLTGESYAGVYVPTLARSILDYNDAQSGNESRIPLAGVAVGDPCTDNESQKDSMDMLWYGHKYGFVPETEFKLLWHTCNHRYTKPLTHGKWKKKTLKKSLFEVFDHVVDKGTSEECKVAHRKFLWQTSNAFSQDWRFAWINDLSLFGPAALAEGGENVPGTLDYMTTQWMMRGDVRKALHVDESAAKQWPGPTDNWLYTKSWAACNDDADTSTQSMIDFYRSISPRLERTIVYNGDTDPCVSYEGTREAIIKVGFAELKGGSQRPYFFNASGVPASLLQEKPLLYGPDLATIDAGAQFAGHVVDYENNLSFITIHGAGHMCPQFRPQTSQLLIRKLLTGDAFAPPMPTNNRLASTNEEEFQRDMDAWVVEAQGSKYID

SEQ ID NO: 6057 - protein, 838 aa, Ostreococcus tauri
MRYRARVRCAALVASEVDVGGRSSGDLSAQSGASETRGDRVFVVSNTLPLKMREDAAAGKMYGHAYAFEADEESIYDQCREGALKGGQFEVVINVGQLPMEVPMEMQDAVANDLERRYNCMPVFLPKEVKENFYNGFCKQYMWPLMHYVLPMSPMDARFETHQWQAYIASNKRFADKLMETVSSDDDLVWVNDYHLMLLPTFLRKRFNAVKCGFFLHCPFPSSEIFRTTPTRDLILRGLLNADFVGFHTFDYARHFLSCCTRLLGLNHRMERGSLVIDNHGRLVSVKICPTGVKISRLQQVLDTDVCRNRRQELLKEVAGRKILLGVDDFDEFKGIDLRMTAFERMLEEHPRLAEQVCLMQTCTPPRSSGRDINELRNTVNELVERINAKYSVNGVPVLKFEIKPVAIHERIALHSVADVSVVTATRDGMNLAPYEYITCRQGPSDEARGTAEGFSLPRQSALIISEFTGCSPSLSGALRVNPWHIQDVADAMYKALQMSGHEHEARHEKHWRYVSEHHVGFWAQSCLAELQRVTEKANGNRCYGLGFGLNFRVVHLSSQFRKLDTPTVVADYLKAKRRKLVIDYDGTLVPLVSYAQPPSAHLLSLLTVLTSDQANEVCIVSGRERGTLDKWFGNIPRLWMVAEHGYWFRKGSDVAWKELAPIGTDTSVHEWKETVLPILEQYSEATDGSFIQTKESAYVWHYRDADPDFGAWQAKELLDHLDSVLHGDGVDVISGNGTVEIKPKGVHKGLVIDELLNVDEAASNVADFVLAVGDDKSDEDMFSAVATHTALPLYAGSSVYTSTIGQKPSKAPAYLDDTDDVVNLLQTLAQYNVCHRH

SEQ ID NO: 6058 - protein, 878 aa, Ostreococcus tauri
MYATTMDAAVASPAVTRLERPASTRDAHGFDEEELRLALEASVKETSGDLLAVELEYEGRSVNGAGTRTRGRALASKFWIQQALDADDALDASADGFYDVRGEAFEDLVDGKLPELAQLLNDPVIADEEALVVDRRTDVFLAALDDLARETCEAAPNTRAKCALLARLVSDRLGGSVKTVDDAELARSVAMDREDLLANGRGCVFHIGHLTKGNERHRAILFKALASVVDIPCRLVRGEYYCDGRDTARVIWAGEGEGEMWVDLCVVPGALRSCSESAGVEDIPPTPPRYIEETDKHWEYSHASYRMDKGKSPLISGKSTSQPPNDHSESSIDDLVAFANGSRTQNSTTSTSPKEADVDDLTDLYDAIAVAHGVSLKSVASAFKLTEDDMERANLLCNSLGAVLEEEACLSEEQRGVEYTEPVLLQEMFNLLVTSKWIVADAVRAFNTRRRAQLADAAAKLAEIAELKEAKRIETERIEAEERSRRRREEKERAADDLIRAAEERVEQFREERVKLCEDSERAAQLRHDFRAEWTAKVASMNLAETLECFGVVVEGGSHANAKQLRTAYRRALLQFHPDRQRSKDLVARVEAEERFKILSDKMEKFISFHLTCYLSIRRRHDPDHRLHVDVETGQREHGACPEAPDASLDDRRVVCAVHEKRTAVANEQEHTQSDHLRRPCASPPVAAHHSRSALIVISRPIITIAGSDTAKDDTPVGARVHSKHNDAATISLSATGSKNAPNALLAFNFRARNPSNQSVIAAAMNITPQITAAFFIALAVGNHRKRVPRSAFANPYRASFSSLALATVRARPVLREDDRVRAGAFTAPLDAERERARPESIGNVTSLKFVRSNASRATMTRWSARLDARAAGWVRGG

SEQ ID NO: 6059 - protein, 792 aa, Ostreococcus tauri
MRFTIDDGGSAPIEVFFPYDSVYPEQVALARTRRLTRSARVRSIAKVAYMREMKRALDARGHGAVEMPTGTGKTITVLSMCVSYQLAHPEVGKIIYCTRTVPEMEKVLEEMKALQAYIEKELGAETARMLSLGLSSRKNMCVNPAVADEGSRESVDGRCRRLTASWVRERRLERQARDAGRTVAAEDGEGDNEGGVSCCDWFEEFETAGEKAVLPPGVYTLHDLRQFGRAKKWCPYFLARNMISFANVIVYNYQYMLDPKVASLVSSALEKECVVVFDEAHNIDNVCIEALSVNLRQQTLENAGRSITSLNARIDKAKQTDERRLRQEYERLVNGLAQQGVLARGGGEDMLMNPVIPDDILREAVPGNIRRAEHFVAVLKRFVEYLKFRLQSTQHCAANAGIDGKTLKVLLRSPDESVEDARGGRHGRVQRIVVGGELCCARGDIFQGFRSHTRALACLDASLAIKPVFERFQSVFITSGTLSPIDLYPKLLGFNPVCAKSLEMTLTRECLCPMVITRGADQQAVSTKFDVRDDPNVIQNYGRILVGLAQTVPDGIVAFFVSYSYMENIVSKWHETGILREIMQHKLVFIETTDVVETSLALDNYRRACNCGRGAIFLSVARGKVAEGIDFDRHYGRAVVMYGVPYQYTLSRILRARLEYLRETFQIKESDFLAFDAVRQAAQCVGRVIRSKKDYGLMVFADKRYNSQDKRGKLPGWITSHLHEEVLNLSTDMAMQVARTFMRSMSQPFSHDDSKKSLFDQEMLNRLAAEGGYREALPAQARKLAPEIMMHI

SEQ ID NO: 6060 - protein, 486 aa, Ostreococcus tauri
MPREVSRVGAYALKRSLGKGAFGFVKLGVQDKTGRKVAVKDGARETDASCATWGQILDRENLLRVDEQEQLKAEIKALADLFHPCIVDLIEVLTNETSVFMVMTYCPGGELYDVIRAKGALNEEQARRHFQRLIQGVDFCHKKRIYHRDLKPENLFLDENGDLCIGDFGLAALREDEEDNNLRTICGTPHFAAPEVMGGSRRLVGNKNFKTVNTKTRTEGYDGAPADVWSCGCILYFLLTGVFPFDGQNFVQLQMLVQKTEPYFAPQRISKPCEKLIRGMLVKDPAKRWTIEQVMKSSWFKTDYEPVQVQESKKDSRHYDDEDPALEEFWSPDTGLVVKTAGESSMSEVDKMRPIKQLNAFELINLAAFDVESIFDEDENTVSNATRFMSKESIDKVQAAVIKRAEQDLNTVAKRKTLSRVTFEDVNNGVVVTMRTYQVIPGVCVYDFSRDEGGRDRFHAWFQKLRDPSGPVGALINIDDAQHTAP

SEQ ID NO: 6061 - protein, 223 aa, Ostreococcus tauri
  misc_feature (207)..(213): Xaa can be any naturally occurring amino acid
  unsure (1)..(223): unsure at all Xaa locations
MYLGAVDDSWPSNAASAPRSARALDGARVDAAVDRAGARARRGARAPAVLVPLMERGGGTEVLLEVRPTTMRAHGGEVSFPGGKRDEDDADDVATALREAREEVGIEEEDVEVLGRLPVILSRFATSVRPIVGVLREDFEVREEKISRSEVAEVFTAPLEMFLEARNHRHDDFAWPNATRPIRVHYFDYDRGGGAEVLTIWGLTAMXXXXXXXLCCAKYCIFN

SEQ ID NO: 6062 - protein, 488 aa, Ostreococcus tauri
MGTKGTPARSSSVARAVKMSTREGVDAEATPTMVGTLCEGGGHPVAKTLAAPFVLTYRATRAYVQPCVGAYAGSLARAVSERLCCCFAGMWRYEDKKWCGNAAIGDDPEHRDCDWVRVEELSAGSDEKPMVLYQGTIEPRDCVQGALGNCWLVSALACLAEHPGAVKRIILQNEKTIRGKYQVRFYDGKEKRFVIVTVDDLIPCKKGTKKPIYMQPHENEFWPLIVEKAMAKFMGSYSALDGGHGTWATHALTGDHVFMLKKRQGATSRYWRRHNMKFIGKPGDGRKKDAVFHKEVEEDIVRDKLFNILEQYNKIDSLIAVARVGKNGESKDENNGLVEGHLFSVISVRWAGRSFGVGGRRMVKIRNPWSSYEWKGPWGDGTKEWDKHPSIAKELGYENKNDGIFWMEFDDFVEYFNQISVCDRTTKNDLMLHYDQDFPCTGPIKGCLGGCFCFWVGCRGPRTIYCGHESTEELREARACGCVKVGNT

SEQ ID NO: 6063 - protein, 309 aa, Ostreococcus tauri
MSIELGGVDVLPAGAFDVDGVARVVPTRYGPITVTTQGDPSKPALVTFHDVGLNHRTCFQPLFVCAGRQSDLVKRFCVYHIDYPGCQDGAVEFREDDVPRTLDALAEQVEDVVKHFGLRSVTCMGVGAGATVMALYAGRAGSRCEAGIFVSPSVSSARTMESALGYAFQWNIRRHGWTPWTLKHVMKRMFSYRGLGGMREAFESDLAKTARREISELNPRAVLAFYESSLARLNNDAIYESLDIDALILAGRHSPWYKDSIVMNSLMNTAKTAWVEMEDAGTVVTVEDPSAMLSPLNLFIQRLASEGLA

SEQ ID NO: 6064 - protein, 663 aa, Ostreococcus tauri
MTAKRKIMRRLTLCTLLAVIFAAACAPQGRAESTTSEITGTVIGIDLGTTYSCVGAYVNGKVEIIANDQGNRITPSYVAFTDTERLIGDSAKNQASANPTRTVFDAKRLIGRKFTDKEVQRDLKMFPFKIVDKDSKPCIEIELKDGKKIFQAEEISAMVLTKMKETAEAYLGKDIKNAVVTVPAYFNDAQRQATKDAGIIAGLNVARIINEPTAAAIAYGLDKKGEKNILVFDLGGGTFDVSILTIDNGVFEVISTNGDTHLGGEDFDQRIMEYFIKLIKRKHGKDISSDSKAVQKLRREAERAKRTLSNQHQVRVEIEALFDGMDFSEPLTRARFEELNNDLFRKTMGPVKKAMDDAGMKKSEIDEIVLVGGSTRIPKVQDLLRDFFDGKEPNKGVNPDEAVAYGAAVQGGILSGEGGDETKDILLLDVAPLTQGIETVGGVMTKLIPRNTVIPTKKSQTFTTYQDNQQTVMIQVFEGERAMTKDNHLLGKFELTSIPPAPRGVPQIEVTFEIDANGILNVGAEDKGTGKSEKITITNDKGRLSQEEIERMVEEAEEFAEEDRKTKERIDSRNSLETFAYNMKNTVSDSDKLADKLEEDDKSTIEEAVKEALDWLDDNQSAEKDDYDEQLKKLEEVCNPIVAKAYQSGSADDSETVDEHDEL

SEQ ID NO: 6065 - protein, 987 aa, Cryptococcus neoformans var. grubii H99
MDSMHPDPTPEVPPSLPDLKAQVARLEASHKEKGLPLSGRIIHVMHHLPVEIVRIVPADALESAGTGFLSPPMTPEFKPEDAETTVESADAKWRIHARTAHPALVSGIKSLSETHDQLLVAWTGEVLIQPDNTQSPQQPSQATFSSIASNLLAPFSAGDATPQPQPPPQQGSLMVFGGEFNEADQKEIASELDRFAEAEAKFDPTDRLKYIPVFLPPDVSKGHYEGFCKKTLWPLFHYLLWLDSTATVPSPDPSWLAYQKTNQMFAQRVAQIYKPGDLIICHDYHLLLAPKMIRESLGQVFHPNAGWGTAHPSPSLHHAQRKGFDWESNQQTPTPEKAKGEKIGAFMNHVGTALGNHLGTMEHGLQNEIMIGMFMHTPWPSSEIFRCLPKRREILDGMLGANLVSFQTYSYSRHFVSTCIRVCGYESTPGGVDANGQVTAVGYCPIGIDIKRVVHDRDQPGVLPKMQALRDLYKDKKIIVGREKLDVAKGVYNKLQAFEKFLQVYPEWRGKVVLIQVTTPALSESPKLERMTAELVSHINGTYGSLDFTPVHHYHQALEKDEYFGLLSCADLALITSLRDGMNTTSMEFILCQDKTSKSPLVLSEFMGTAPSFASALQINPHDLLGVAQAINKGLTMRKEEKAERHANLLEGVLAHTSHTWAATILKQLLENVGGEHTAHHTPALDTAQFTDAYKKANKRLLLFDYDGTLTPIVKVPSHAVPTERTRNAIAALCKDPKNVVYLISGRDGDFLEEHWGHLDRLGLSAEHGSFVKQPGEEDFINMTEALDMSWMSEVEEIFKYYTERTTGSTIEVKKASITWHYRNSDPDFGEFQCKQALDLLESSLAPRRPIEVLVGKKNLEVRPLAVNKGEIVRRLMYENPDVDLIFCAGDDKTDEDMFRALRTIFPPGGVVDNNPVVMKPPVAVTSALEPEEVAELPDVELTIRSKGVFATTVGPPAKRTLAGWHVTCPEEVVEAFESLLEEIQVV

SEQ ID NO: 6066 - protein, 583 aa, Synechococcus sp. RS9916
MLKQSEAGFRRLLPLLRPHLRQLSLGLVCMLVYVGSFLLLLNLAGDLFPALGSKDLSRVLALIGQGVLIFAVQKLAQFGQDSLLAGPALQVSKTLRSDLFSRLQTVELGALEKLSAGDLTYRLTEDADRVSEVLYKSVHDTLPSVLQLIAVLGYMLWLDWKLTASILLLAPLIIWLISLFGAKVMAATERSQTKVSELAGLLGEAIEGLPLVRAFAAEPWLQGRFEDEIDQHRKARHRTYSLVALQHPVVGMIEVVGLFSVLGLAAWRIQSNDLSIAGLSSYLTGLVVLIDPIAHVTNNFNEFQQGQASLRRLRQIEREPQEASDPSPSIPIGRPQGHLQLQQVNFAYDNGKPVLHNIDLSIAAGQVVALVGPSGAGKSTLFSLLLRFNTAQSGEILLDGNNLSQVKARELRQQMALVPQRTTVFSGSIAEAIRFGRPASQSQLMEAARLANAHDFIMGLPKGYDTQLEERGTNVSGGQLQRIAIARAVLGNPAVLLLDEATSALDAEAEAAVQVGLRQAMQGRTVLVIAHRLATVQEADLIVVLDKGRISEQGSHDQLMTSNGRYRELCERQLIRMNAPTNV

SEQ ID NO: 6067 - protein, 349 aa, Synechococcus sp. RS9916
MHFRTLSGLLAGVLMLQGCATLGEGGASRLGLIQQRKSLRCGVSGKIPGFSFLRPNGSYSGLDVDLCKAFAAAFVGDATAVEYRPLTAPERFTALRTGEIDLLSRNTTFNLSRDAAGGNGVSFAPVVFHDGQGLIVKKTSGIRQLTDLRNQSICVGSGTTTEQNLNDALEAQGIAYTPIKYQDLNQVVAGYLQDRCSAMTSDRSQLAAARSGFANPQEHVILNAVLSKEPLAPLSVGGDQRLGDAMRWVVYALITAEELGLTQANVQERLAKAQNNPQMTQLRRFLGVDGELGTKLGLAPDFVVRVIEATGNYGEIYNRHLGPDSAVPIPRGLNQLHRDGGAMTAPPFQ

SEQ ID NO: 6068 - protein, 107 aa, Synechococcus sp. RS9916
MDSQTKERIEALIQTSPIFVFMKGTKLMPQCGFSNNVVQILNAMGMAFETFDVLSDMEIRQGIKEFSEWPTIPQVYVKGEFIGGSDILIEMYNSGELKEKLEIALAS

SEQ ID NO: 6069 - protein, 599 aa, Synechococcus sp. RS9916
MDLSAADLKAAEAKSTEETATHGEAAESNEVFTTVIDAKEEPSGFAGFGFSEALVKTLTEKGYKEPSPIQAAAFPELMLGRDLVGQAQTGTGKTAAFALPLLERLQKDATKPQALVLAPTRELAMQVAESFKAYSAGHPHLNVLAIYGGSDFRSQIHALKRGVDVVVGTPGRVMDHMRQGTLDTTGLRSLVLDEADEMLRMGFIDDVEWILDQLPEERQVVLFSATMPSEIRRLSKRYLREPAEITIKTKEKEARRIRQRCITLQNSHKLEALNRVLEAVTGEGVIIFARTKAITLNVSESLEAAGHDVAVLNGDVPQNQRERTVERLRKGTVNILVATDVAARGLDVDRIGLVINYDMPFDSEAYVHRIGRTGRAGRSGEAILFVTPRERRFVNNLERAVGQEIEPMAIPSNAEINQSRLDKLRQRLTDAATGEPNQSDEAVLLQELLQRVGQEHDLDPSRLALAALTLAVGDGPLLVQGDESWIQNSGRQRFDRRDGRDGRDGRFGDRRRSERASRPPEDNMQRYRVEVGHRDRVKPGNLVGAIANESGLQGRMIGRIQIFESHSFVDLPKGMPQDVFSSLQRLKVMNRELQISPAS

SEQ ID NO: 6070 - protein, 351 aa, Synechococcus sp. RS9916
MKLIPALTRRPALLGRSQATADLRDQLESDLHTVGVDSVQVELEYDCCEHDLQRLQDTLNSHGCDGVIAAGGGKVLDAGKLLADRLQLNCITVPLSAATCAGWTALSNIYSTDGAFEGDVALQRCPDLLIFDHSFARLAPARTLASGIADALAKWYEASVSSGASNDGIIQQAVQMARVLRDQLLLDAKEALENPKSEAWVRVAEACGLTAGVIGGLGGAQCRTVAAHAVHNGLTQLPACHQVLHGEKVGFGILVQLRLEERLGGSQLAAQARRQLFPLLHDMGVPVTLEDLGLGQAGLHELRQACQFACRAGSDLHHLPFPVSETELLEALVSTQSGVAAPTRQANRSGS

SEQ ID NO: 6071 - protein, 467 aa, Synechococcus sp. RS9916
MDTPLLPLLRTRRGSRLHLPAHGGGSGLAPGLRAVLRLRPGHWDLPELPEIGGPLEADGAVVESQRAAAAAFGADHCWYGVNGATGMLQAALLAMAKPGQSLLLPRNSHRSLLQACALGGIHPLLFDLPFLPDRGHVAAVDHSWLERVLTSSALQSHQPVGAVLVQPTYNGYAVDPAPLIERLHQRGLPVLVDEAHGSHFLPGVDPSLPASALRVGADLVVHSLHKSSTGLGQTAVLWHQGQRVDPDAVARSLGWLQTTSPSALLLASCEASLEDWTTRAGLRRLSRRLAQARALADQLRDRQLPLLDTADPLRLIWHTAAVGISGLDADEWLMARGLVGELPEPGCLTFCLGMATRPGLQRSMVRHWHGLLQHLGQARPLPPFTAPPIPLITSPAMECGEAWRAPSRAVPWADALGGIAAQLVCPYPPGIPLIVPGERLDQARVAWIEQLRQFWPDQISGRVRIVA

SEQ ID NO: 6072 - protein, 331 aa, Synechococcus sp. RS9916
MTSFLTAARAEQEKIHQDNRRLRLFSGTANAALSQEISAYLGVPDGPRVCKRFADGELYVQIQESIRGCDVFLIQPTCAPVNDHLMELLIMVDACRRASARQITAVVPYYGYARADRKTAGRESITAKLTANLLAKSGVDRVLAMDLHSAQIQGYFDIPCDHIYGSPVLVDYLSAQELGEVVVVSPDVGGVARARAFAKQMNDAPLAIIDKRRTGHNKAESLTVIGDVEGKTAILIDDMIDTGGTICSGARLLRQQGAKRVIACATHAVFSPPACERLSSEGLFEQVVVTNSIPIPADRTFPQLKVLSVANMLGEAIWRIHEESSVSSMFR

SEQ ID NO: 6073 - protein, 392 aa, Synechococcus sp. RS9916
MRVSTAGSGGSDERMFTVISQVPQADRQRKTERSYFVPYSRLEATLRFITSSGGQVLSVTPASESPAASDQPKPTPAKAVPSKASSKKAPVTKKPAHQAVPVNLYKPKTPFIGTVTENYSLLQEGAIGRVNHITFDLSGGEPHLHYVEGQSIGIIPDGEDAKGKPHKLRLYSIASTRHGDDMADNTVSLCVRQLQYEKDGETINGVCSTFLCDIEPGAKVKITGPVGKEMLLPDDEEANVIMFATGTGIAPMRTYLRRMFESSEREKNGWNFRGKAWLFMGAPKTPNLLYDDDFNRYESEYPENFRYTKAISREQQNTKGGRMYIQDRVLEHADEIFAMIEDPKTHVYMCGLRGMEPGIDEAMSAAAAAKGLDWSVLRPQLKKAERWHVETY

SEQ ID NO: 6074 - protein, 381 aa, Synechococcus sp. RS9916
MILPRLLIPVETATAETRVAASPETVKKFIGLGCSVAIERGAGASAGFVDSAYTEAGAELVSVADAQAWGQADLLLCVQTPAAQNLARLRHGALVVGLLSPYSNQALASSLQSGGLSAMALELLPRISRAQSADALSSQANIAGYKSVLLASAALDRYFPMLMTAAGTVQPAKVVILGAGVAGLQAVATARRLGAVVFVSDIRPAVKEQVESLGARFIEPPELEDKPSESGGYAKQASEAFLAAQRQQLSDQLAEADVAICTAQVPGRQAPRLISEDMLDRMRPGSVVVDLAVAQGGNCADTKPSQTVDRKGVKLVGANDLPCTVPNHASALYARNLLALLEPTLKDGQLSLDPDDELIAGCLIAQDGSIRRGDVLTPGAN

SEQ ID NO: 6075 - protein, 320 aa, Synechococcus sp. RS9916
MHGGGGMVATKADQGSTFRSGFVALIGRPNVGKSTLVNQLVGDKVAITSPVAQTTRNRLRAILTTETAQLILVDTPGIHKPHHLLGERLVQSARAAIGEVDQVLLLLEGCEQPGKGDAFIVNLLQQQRLPVQVVLNKWDRVPVETRPEADAAYRELLSTTNWPLHHCSALSGEGCPDLVEAISAQMPEGPQLYPPDMVSDQPERLLMAELIREQVLTHTREEVPHSVAVQIERVEDMPAKGQGKSRTAVLATVLVERKSQKGILIGKGGAMLKTIGQGARLQMQTLIDGPVYLELFVKVVPNWRTSAAKLNELGYSDDRM

SEQ ID NO: 6076 - protein, 380 aa, Synechococcus sp. RS9916
MIGYISDNLLIPILDFFYGLVPSYGLAIVALTVVIRLALFPLSAGSIRSARRMRIAQPVMQKRQAEIKSRFANNPQKQQEELQKLMKEFGSPLAGCLPLLVQMPILFALFATLRGSPFADVPYTLNMKVLPAEQIAAVEPKPFNSASHSIFITETNHVPVIASLPGGTKLGAGESAKIQLQTKSGEAFSQVLTSVDDGQKFMPNWTVTKGDDVVSVAEDGTITAIAPGDATVEGKIPGLAARSGFLFIKALGQVGFYSDGAINWDIAILVGAFGVSLFASQLLSGMGMPANPQQATANKITPVMITGMFLFFPLPAGVLLYMVIANIFQAGQTFLLTREALPDNLQAILNDQMKQQATATAGTGAQGGSRLPFEPRGGNK

SEQ ID NO: 6077 - protein, 116 aa, Synechococcus sp. RS9916
MADPSNETYAIVEASGQQFWLQPNRYYDLDRLQAGVDETVTLENVLLVKDAKGTTLGQPYVKDATVELKVMDHRRGPKVIVYKMRPKKKTRRKNGHRQELTRVMVQSIKVGGKAIG

SEQ ID NO: 6078 - protein, 528 aa, Synechococcus sp. RS9916
MTKVLVSDPIDQAGIDILSQVAQVDQRTGLSPEELKSIIGEYDALMIRSGTQVTADVIAAADKLRIVGRAGVGVDNVDVPAATQRGVLVVNSPEGNTIAAAEHALALLLSLSRHVPQAHASMREGAWDRKKYVGNELYKKVLGVVGLGKIGSHVAKVAKAMGMEVIAYDPFVSLERAQQMQVRLTQLPDLFSSADYITLHIPRTPDTENLVNAELLRSMKSTARLVNCARGGIIDEAALAEAIENGVIAGAGVDVFASEPLAEDSPLRKVQRGLVLTPHLGASTEEAQENVATDVAEQIRDVLLGLPARSAVNIPGLSAEIMERLKPHLQLAETLGLLISQLAGGQVEELEVRLQGEFSEHPSQPLVIAALKGLLSNALGERINYVNAALEAKARGIHVLEVKDEASRDFAGGSLQLTTRGSQGGHSVTGAVFADGELRVTTIDEFPVNVPPSRHMLFTRHRDMPGIIGQLGSVLGEHNVNIASMQVGRRIVRGDAVMVLSIDDPIPPTLLANINAIDGIQEAHPVTL

SEQ ID NO: 6079 - protein, 370 aa, Synechococcus sp. RS9916
MATIGVPSEIKVDEQRVALTPDAVRELVTQGLEVRVQSEAGAGAGISDQAFAAAGARVVTREEAWAAHLVVKVKEPQEEEFGFLRDDMVLFTYLHLAAYPKVGEALLNAGTTGVAYETVQLENGSLPLLAPMSEIAGRLAAQVGAHLLEQPHGGRGVLMGGCTGVQPARVVVLGAGTVGWNAARVAAAMDAEVMLLDRSPEKLRSLEAARRGRLMSVVSSRGLLERLVPSADLLIGAVLTPGGRAPTLVDEDLVKQMKPGSVIVDVAIDQGGCVASSKETTHTDPTVNIHGVQHYAVGNMPGAVPFTSTEALVSVTLPYILGIAGRGLEEAVTERPELLSGLNTVQGAVCHPGVAKALGLPPRHPMACLR

SEQ ID NO: 6080 - protein, 588 aa, Synechococcus sp. RS9916
MTGVDWLILVLYMAGTLVLGLWLARRNRSEDDYFVAGRSLSGWLAGASMAATTFSIDTPLYVAGLVGTRGLAGNWEWWSFGLAHVAMAVVFAPLWRRSGVMTDAAFTELRYGGAPAAWLRGIKAFLLALPVNCIGIGYAFLAMRKVVEALGIVSNQPMASLAGLPDTVALLAVVALLVLIYTVAGGLWAVVVTDFVQLVLALLGAIAVAWAAVHAAGGMNAMLNQLEDLGRPELLALVPWHWNDSGFEWIGGAGISAATFLAYLSVQWWSFRRSDGGGEFIQRMLATRDERQAQLAGWVFLGVNYLLRSWLWVLVALAALVLLPAQGDWELSYPTLAVNYLPPVVLGLVVVSLVAAFMSTVSTAVNWGASYLTHDLYQRFLRPKASQTELLLVGQLTSVLLLVLGVITALISDSIGTVFRLVIAIGTGPGVVLVLRWFWWRINAAAELTAMVCGFVVGLCTSVVPLLVIPDYGMRLMVTTGITAVVWIVVMLITPPESEAVMETFVRQVQPPGPGWRRWRERFGVEMVDPLSELIRRFLLSSAVLFGGLLGSGAFLLHQSRIGWLGLVVAVLCGLPLLRSYGLRFGSN

SEQ ID NO: 6081 - protein, 332 aa, Synechococcus sp. RS9916
MQFIDQARVTVRAGRGGDGIVAFRREKYVPAGGPSGGDGGHGGNVVLEADANLQTLLDFKYKRLFPAVDGRRGGPNRCTGACGPDMVIKVPCGTEVRHLSTGILLGDLTDNGERLVVAFGGRGGLGNAHYLSNRNRAPEKCTEGRDGEEWPLQLELKLLAEVGIIGLPNAGKSTLISVLSAARPKIADYPFTTLVPNLGVVRRPTGDGTVFADIPGLIAGAAQGAGLGHDFLRHIERTRLLIHMVDGGAEDPVADLRVVEQELQAYGHGLVERPRLLVLNKLELIDEAEREEQVKRLEEASGRPVLLTSAAMGQGLDQLLQRVWAELGIDRS

SEQ ID NO: 6082 - protein, 264 aa, Synechococcus sp. RS9916
MIRPDAELLLEINDLHASVEDQPILKGVNLEVRAGEIHAVMGRNGSGKSTLSKVLAGHPAYRVTGGSVRYRGTDLLELEPEERSRLGVFLGFQYPVEIPGVSNLEFLRVSSNARRQQQGLDELDTFDFEDHVRERLNVVQMDPAFLERSVNEGFSGGEKKRNEILQMALLEPVVSILDETDSGLDIDALRIVAGGVNQLASTDNATLLITHYQRLLDEITPDYVHVMAAGRILRTGGRELALELEKTGYDWVDQELAASAQGVS

SEQ ID NO: 6083 - protein, 248 aa, Synechococcus sp. RS9916
MTVASPAKETILVVDDEASSRRILETRLSMIGYNVITACDGNEALECFRNVEPDLVVLDVMMPKLDGYGVCQELRKESDVPIVMLTALGDVADRITGLELGADDYVVKPFSPKELEARIRCVLRRVDKEQVAGIPNSGVIQVSDLRIDTNKRQVFRGDERIRLTGMEFSLLELLVSRSGEPFSRGEILKEVWGYTPERHVDTRVVDVHISRLRSKLEDDPANPELILTARGTGYLFQRIVDSVASEGN

SEQ ID NO: 6084 - protein, 394 aa, Synechococcus sp. RS9916
MLPSPSQPLTRRSSPVALDFQATTPCAPEVLEAMEPWWQQHWGNPSSRQHRLGLTAAAAVSDARERLAACLKVDPIQVVFTSGATEANNLALLGHARAMAEQTGHRGHLISVSSEHHAVLDPLQQLRREGFRLTLLEPGRDGLLKPAQLEEALQPDTLLVSVMAANNEIGVLQPLKELAAICQAHGVRLHSDAAQAFGHLPFHPTSLGVELASLSGHKLYGPKGIGALVMREGLPLQPLVFGGGQEQSLRPGTLPVPLIVGLARAAELALSDQEDRRIRLESLRNRLWQELQDQVGDVQLNGALEPRLPHNLNITVEGVNGNRLQQALRSRLLCSSGSACSAGTPSHVLQAIGRSQEQANASLRLSLGRPTQRDDIDAAIELISEVVGQMRQNA

SEQ ID NO: 6085 - protein, 301 aa, Synechococcus sp. RS9916
MPRSPLSAPTQLAVVGLGALGLPMAINLLRAGHHLRVHTRSRSAEDHPDLQGAVRCATPAEAAQGCQALLVCVSNNAAVEEVLWGAQGAGPALAEGSLVIDCSTISPAGAQAMAQRLNARGVQFLDAPVTGGTEGAKAGSLTVLCGGDAEDLERARPLLEVIGGSIHHFGPVGAGQQVKAINQVLVAGSYAAVAEAIALGQHLQLPMDQVVNALKHGAAGSWALEHRSAAMLADTYPLGFKLELHHKDLGIALAAAAAAGLELPITAAVRDQEQALMDQGLGEADVSALRRRLPQANATDA

SEQ ID NO: 6086 - protein, 305 aa, Synechococcus sp. RS9916
MTSPSIDLDTLFDREGAIYMGARRDPSGCQVGLFGVPYDGTTSFRPGTRFGPAAVRDVSNGLESYCPQLQIDLEDLAYADLGAVDIPFGAPEPVVAAVHRATRQVLDLGLKPLMLGGEHSISSGAVGAVAEQHPDLVLLQLDAHADLRDSWLGARHSHACAMRRCLEVLPSGQLLQLAIRSGTREEFQELAQTQRLIHHRPDQDSTTLAASLRQALAPHQGKPLYLTVDLDWFDPAVMPGTGTPEPGGFLWPHFAALIEVLQEHQLVAADVVELAPQLDPTGISSVLASKVTRSLLMLLSNEGNQ

SEQ ID NO: 6087 - protein, 674 aa, Synechococcus sp. RS9916
MCGIGGVFNADRQQTVDRQLLVNMAAIQAHRGPDGFGVEVLDQAGVGFCHARLSIIDLNESRARQPFLTDDGEVLMAHNGEFYDFQRIRADLTAQGVRFSSKSDSEILLRLYQRQGLEATLPLLRGEFAFALFDRAEDCLYLVRDRFGIKPQYWAMTPEGLVFGSELKVLFAHPAVERRFTSEGLFHQLMQTMVPGTTAFAGVHQVKPGHVLKVQRMNGRLQVSESTYWDVDFPRKDQRDSSRTEADHIAAVRAALLEAVELRMVADVPVGCYLSGGIDSCSILGLASAVSQAPVKAFTIGFDDARYDESPIAREMAEATGAEQDLLRLSGQELYGHMERTIWHAERTIYNTLAVAKFLMSRHVNDVDYKVVMTGEGSDELFGGYPAFRRDMFLHGLDDLPEEERASWESLLQQSNALVKGAMLAENQVDDPDLDAVVGFTPSCLQPWLACAPLVPELLAESHATALEGYSPGKAIAEQLDGDQLDGRHALDKAQYVWIKTMLEGQILTWGGDRVDMANSMEARPAFLDHHLAAVAVQVPPELRIKGKTEKYVLREAMAGLLPEVLYKREKFAFMAPPAHTEPEKWEQMKQLANDYLSDEAIDAAGLLSKAGVRALFARHDDPSTTDAERVQLDAVINHLLGVQMLHRMFVAEDVPALARREADRLGWRVLMPV

SEQ ID NO: 6088 - protein, 513 aa, Synechococcus sp. RS9916
MTSSAPSRPYLEGKKLNKIEQNKANKDGLLVGSEIDKFAEMGWEQVDETDLQLRLKWYGMFWRPKTPGKFMLRLRVPNGILNAQQLRVVGSIVERYGENGSCDITTRQNLQLRGVLLNDLPEILKRLKEAGLSTIQSGFDNPRNVTGNPLAGIDPQEIVDTRPYTQELNNFLTNNEEGNSEYSNLPRKWNTAVAGAKDNFLLHNDIIFHPVENNGELGFGVWIGGVLSSQMNAYALPLNAWVKPEEICKITDAVIRPWRDNGERDKRPKGRFRMYLDQVGLEAFRSMVEENFGPLTPDPGSVFDETPRSHYGIHAQKQEGLHYAGLHVPVGRLTAEDLQDLATASLNYGNGEVRLTEDQNVILVGLPNDKLEAFQGDALVQRFPLEPGAISAGTVSCTGSSYCHFALVNTKDQAADIATKLDAELELPEELKIHWTGCPNSCGQAYMGAIGLTGTKAKNKEGVMGEGYTLTVGGSQGADPQVGELHQKAVPAEDIHGVLKQLLIEKYGAKPRS

SEQ ID NO: 6089 - protein, 313 aa, Synechococcus sp. RS9916
MDYVLPNELVDGMIAAGGKKATVSVKNLLLRGFYSGAILGLAVILALTVGLTVKAPFVGSLLFPFGFASIVLFGMELVTGNFALLPMATWAGKSTWGATFRNWAWVWFGNWIGTAVVAVIMAISLTNGFNVEPLSAAAAAAATKAAAAAGDATVIKAGMWQQVAQKIIDLNILNVVKKYENLGAMGFFLAFLRGVVANWLVCLGVTMALVSKSVPGKILACWLPITAFQTMGMEHIVVNQFLHTMGPILGSGVSPIQVIFWNWLPVTLGNIVGGMVFIGMLFYSTHRTKVENVLPTEHDDKLERELAAELGAR

SEQ ID NO: 6090 - protein, 635 aa, Synechococcus sp. RS9916
MGKVVGIDLGTTNSCVSVMEGGKPTVIANAEGFRTTPSVVAYTKNQDQLVGQIAKRQAVMNPDNTFYSVKRFIGRRVDEVNEESKEVSYGVEKAGANVKVKCPVLEKQFAPEEVSAQVLRKLAEDAGKYLGESITQAVITVPAYFNDSQRQATKDAGKIAGLEVLRIINEPTAAALAYGLDKKSNERILVFDLGGGTFDVSVLEVGDGVFEVLSTAGDTHLGGDDFDKVIVDHLADTFKSNEGIDLRQDKQALQRLTEAAEKAKVELSNATQSEINLPFITATPEGPKHLDLTLTRAKFEELASKLIDRCATPVEQALKDAKLSSSELDEIVMVGGSTRIPAVLELVKRITGKDPNQTVNPDEVVAVGAAIQGGVLAGEVKDILLLDVTPLSLGVETLGGVMTKMINRNTTVPTKKSETYSTAVDGQTNVEIHVLQGEREMASDNKSLGTFRLDGIPPAPRGVPQIEVTFDIDANGILSVTAKDKGSGKEQSISITGASTLSENEVEKMVKDAEANASADKEKRERIDVKNQAETLVYQAEKQLGELGDKVDADAKAKVEDKRVKLKEAVEKDDFEAMKAQLEELQQELYALGASVYQQAGADAAAPGADAGAAGGNGAAGGADDVIDAEFTESK

SEQ ID NO: 6091 - protein, 401 aa, Synechococcus sp. RS9916
MGRAKKVVLAYSGGVDTSVCIPYLKQEWGVEEVITFAADLGQGDELEPIRLKALEAGASQSLVGDLIEPFIQEFAFPAIRANALYEGRYPLSTALARPLIARRLVEVAREVGADAVAHGCTGKGNDQVRFDVAIAALAPDLKVLTPAREWGMSREETIAYGERCGIPAPVSKKSPYSIDLNLLGRSIEAGPLEDPMVAPPEEVFAMTRSVADTPDASEEIEISFEGGNPVAINGQRLDPVALIREANRLAGTHGIGRLDMIENRVVGIKSREIYETPGLLLLIQAHQELESLTLAADVLRSKRQLEMQWADLVYQGLWFGPLKDALDGFMDRTQVHVNGVVRLRLHKGTATVIGRASAESSLYVPAMASYGSEDQFDHRAAEGFIYVWGLPTRLWAATHRG

SEQ ID NO: 6092 - protein, 600 aa, Synechococcus sp. RS9916
MALLVQKFGGTSVADVERIQAVARRIAASKEDGHDLVIVVSAMGHTTDELTSKARAISSNPPQREMDMLLATGEQVSIALLSMALNTLGIPAVSMTGPQVGIVTESAHGRARILEVRTDRLRSRLTEGQVVVVAGFQGTSQSSGGTAEITTLGRGGSDTSAVALAAALGADACEIYTDVPGVLTTDPRKVADAQLMPEVSCDEMLELASLGAAVLHPRAVEIARNYGVTLVVRSSWSDEPGTTLTSRSARPIGREGLELGRPVDGADLVEGQAVLALSHVPDQPGVAAQLFEALSAGGVNVDLIIQATHEGSSNDITFTVAEADLEQARSICASLLDDWGGQLVAEGGMSKLSINGAGIMGRPGIAAGLFDTLSREGINLRLIATSEVKVSCVIDADQGAKALRAVTTAFELNDQQVHLNPPASGADDPEVRGVALDRDQAQVSVRHVPDKPGTAASLCSALADAGISLDSIVQSERQHADGSRDISFTLKREDRGRADQALAPLLAQWPGAQLEDGPAIARVSAVGAGMPATAGTAARMFRTLADAGLNIELIATSEIRTSCVVAEDDGVAALQAVHAGFGLGGNTIHQAQGTESPLDA

SEQ ID NO: 6093 - protein, 328 aa, Synechococcus sp. RS9916
MSALTRCLQEEAAAIAAAADRLSVDQVEGALALLERCADRKAKLVITGVGKSGIVARKIAATFSSIGLMALYLNPLDALHGDLGVVAPDDVCLLLSNSGETSELLEVLPHLKRRGTARIALVGRAESSLALGSDVVLEASVDREVCPLNLAPTASTAVAMAIGDALAAVWMERRGISPADFAINHPAGSLGKQLTMTVADLMVPAQQLPALRPETPLPDVISQLTQGAIGSGWVEDPEHAGRLVGLITDGDLRRALRDQNPEGWASLQAKDLMTADPITVTAELMAVDAIQRMEHNRRKPISVLPVVNAAGELDGLLRLHDLVQAGLA

SEQ ID NO: 6094 - protein, 381 aa, Synechococcus sp. RS9916
MTSSSAGVQKVAIIGGGVAGLTLALALQRHGIRVSVHEKYDHYQSQSTGFLIWSYAIKILQDLDVPVQNFGAPLEVFRMHGRKGQPVVDMPIGDVSRRNGAESYEVNRRRLSQTLAAMVGNDLVLGQECVSVVNHPGHATAHFADGSCVDADVVIACDGANSALRQQMFPDVRLRMLGSGGWIAVIDAIPEGLEPGVQMDFWLPGCKAGVAQLGHGETRWYVAFNTIQPQADVAKKEQIQQQIKRVPELLQRCLELTDEEQMVFTQAGDLLALSPWYRDRVLLIGDAAHATSPYAGMGACSAIADAAVLADLIASGRPVAEIFQCFEAARKPAADAVIKESRHGLDRSTCGGLRSWMRDLMFANIPSPKLDQIVEDMVTGR

SEQ ID NO: 6095 - protein, 638 aa, Synechococcus sp. RS9916
MNQRWRQIALWVLPIGVALLLGWQLIGNGGLQSLNPSGPTVAPKNAAVGRMSYGRFLDYVEAGRITAVDIYDGGRNAVVEAVDPEIDNRVQRLRVDLPGLAPELINTLKQEGISFDIHPPRSAPPALGLLGNLLFPLLLIGSLIFLARRGSGMPGGPGQAMQFGKTKARFAMEADTGVKFDDVAGVSEAKQDLQEVVTFLKQPERFTSVGAKIPKGVLLVGPPGTGKTLLAKAIAGEAGVPFFSLSGSEFVEMFVGVGASRVRDLFKRAKENSPCLIFIDEIDAVGRQRGAGIGGGNDEREQTLNQLLTEMDGFEGNSGIIILAATNRPDVLDSALMRPGRFDRQVTVDAPDIKGRLSILEVHARNKKLDQDLTLESIARRTPGFTGADLANLLNEAAILTARRRKETIGLSEIDDAVDRIIAGMEGQPLTDGRSKRLIAYHEVGHALVGTLVKAHDPVQKVTLIPRGQAQGLTWFSPDEEQMLVSRAQLKARIMGALGGRAAEDVVFGYEEVTTGAGGDIQQVASMARQMVTRFGMSDLGPVALEGGSQEVFLGRDLMQRSDVSDSIAKQIDEQVREMVKRCYTETVELVAQHREAMDHLVERLIEIETMDGDEFRALVSEFATIPDKERTVPVLNS

SEQ ID NO: 6096 - protein, 497 aa, Synechococcus sp. RS9916
MTKEEGKSSFILLYHRTPFDEIIDEQGNRSWGDQKSPNGIIPTLRNLFRSHLNGTWIAWRQVEENDTSGDERIAMEEPAPFTLRRIPLEHYQISSFYHVTSKESIWPILHTFPNYFDVNNADWGIFEEVNRRFAEAACREAAKAATVWVHDYNLWLAPGYIRAERPDLKIAFFHHTPFPGNDVFAILPWRREILESLLCCDLVGFHIPRYTENFARAANCLLGAKKGPKRGVNARFLSTGSALTEPSETPWLTYEGRTIQLLSSPVGTSPDVIQDLVSDPEIQALGERIEEDTRKGRKLILSASRVDYTKGNEELLLAFERLLERRADLHGEVVLMLACVSAANGMKIYEDTQRSIEEMAGRINGRFSKMDWVPVRFSTRRIPYEEMVAWFTHADVCWITPLRDGLNLVAKEYAAARKDKSGVLVLSEFTGASVVLDGAVLTNPYSHRRMDEAIELALSMPENEQKRRMRTMTTAVESFTVQDWAEEQMGSLDSFLA

SEQ ID NO: 6097 - protein, 397 aa, Synechococcus sp. RS9916
MAEPRTSIYLDSCATAPPRSGVVDEIVRAHATAWGNPSSLHQPGLDAADLLERSRLRVASALNANPDDVIVTSGATESVHLALGGMALSRPPGRVVISAVEHPAVTAAAQQLKAQGWELQTWPVDGLGRIRLDCLESLLAPPTVLVSLIWGQSEVGTLQPIHTVGLACQQRGIPFHVDATQVLSQGCPDWAKLPVDLLSASSHKFGGPKGVGLLLARSALRRRLGPLLGGGGQEQGLRAGTQPVPLVAGMAAALEQSPRWTPADWSKETQDPLPAIAVLRDQWMEGLLEDPRLQLTGDPRWRLPHHISVLVSDHNGQPLSGRALVRELARRGIAVSSGSACSSGKDTGSPVLAAMQVAPSLQRSGLRLSLGSWVSPQHFPPLREALDQALAAVSEAS

SEQ ID NO: 6098 - protein, 401 aa, Synechococcus sp. RS9916
MGTRWRGAALMLRPSLLSNRAIALQPSLTLAISARAAAMKQAGRDICSMSAGEPDFGTPEFIVEAAIKALRDGVTRYGPAAGDPQLREAIANKLTRDNGIPSTAANVLVTNGGKQAIFNLFQVVLNPGDEVLIPSPFWLSYPEMARLAGAEPVTVPASAETGFRLDLEALEAAITPRTRLLVINTPGNPTGRVSDRDELLALADMVRRHPQLLVMSDEIYEYLLDEGVEHHSFAAVAPDLAERTFVVNGFAKGWAMTGWRLGYLAGDSAVIKAASALQSQSTSNVCSFAQRGALAALMESKDCVRSMATSYNSRRSQLVTGLQAIDGLTLVKPKGAFYAFPKLPEHVEGSMQFCEVALEQEGLALVPGLAFGDDRCIRLSCAVSRETIDDALSRLGRLLSA

SEQ ID NO: 6099 - protein, 624 aa, Synechococcus sp. RS9916
MALCDDAVTLTSAPTVSGASLADGKQRITGAEALMDALRRHGVDTIFGYPGGAILPIYDALHVAEEQGWVRHILVRHEQAGTHAADAYARATGKVGVCFGTSGPGATNLVTGIATAQMDSVPMVVITGQVPRPAIGTDAFQETDIFGITLPIVKHSWVVRDPADIASVVAQAFFIAASGRPGPVLIDIPKDVGQEQFDYLPAEPGSVVPAGFRLPPQADPASLDTALDLIQDAQRPLLYVGGGAISAGIHQSLAELAHRHQLPVTTTLMGKGAFDENDSLSVGMLGMHGTAYANFAVTECDLLIAVGARFDDRVTGKLDTFAPRARVIHFEIDPAEVGKTRRAEVAVLGDLAQSMAQLVERSRQRDIRPTTAAWLAKITTWKEQYPLTVPTPEGEIYPQEVLIALRDLSVGAIVTTDVGQHQMWSAQYLRNGPRQWISSAGLGTMGFGMPAAMGAQAACPDTKVVCVAGDASILMNIQELGTLAQYQLPVKVVIVNNQWQGMVRQWQESFYDERYSASNMQTGMPDFVALAQSFGVGGVRIDDRDNLVSGLRDALAAPGPMVIDVRVRRGENCYPMVPPGCSNAQMVGLPTHPELAMDATRSCGSCGAVTSHEHRFCPSCGASL

SEQ ID NO: 6100 - protein, 284 aa, Synechococcus sp. RS9916
MPTVALLGTGLLGEAIGLRLLAQGVKLHVWNRSAEKCEALLAAGAEPIDHLAGAARSCDTVITVLRDGPVSADVVAALGDLGGACCLPMGTMGISESRELATQVQAQNGCYLEAPVLGSKPEALKGSLLVMAGGDTDVFEAQLPLLQLLSGDPKLMGEVGRGAACKLALNQLIASLTHGYSLALRLVEASGLEVERFMEVLRPSALYAPTVDKKLERMLGHHYADPNFSTALLRKDLQLFLREAPLLGIDASGLNGLLTLLKRAEHTALDDGDYSALHELTSKR

SEQ ID NO: 6101 - protein, 732 aa, Synechococcus sp. RS9916
MLEFNLDGKLNNNFDAGNAYQRVAGSEATSYGLGQSNDPLTPGAINPLSEDTLISPWDEAGQTNGAERIQRHSALPQGHNAQPTQRGVNPGSNNDALTGTAEPMHDLGQRLSVQTPIDQLTGGHPDGRAISSAQHAAPTDPLNLDQTNSIGLNTAPQQLDPLTGDSEDAIGFIPMPGILDIDPEFLSHLGERAEVNNLLAEERFDRDQSAGTETLYNFTWGSGFSAHEGSGYDITDSKNNAADIGTVAYRDDKEVIGTIGYGSGRNRDSNDYFSFYAGKAGNYDLSLSNLGANVGLALYNESGSLVSWSNNSGTQDENISTFLNEGHYTSRIYSYNTSFWNNNGATAFNFNISRQADCFEQIVEAWIDDSSVKNAALNSIKYDGDFGRNDIIGILKSAGDYGSVTNTELTDLRQFHNIFSGTMRSDLAVLSEKVLFHDDSNAWYTGSDSIVTDLGDLEAGSSTQDLNLLIGKHMLGLDRPVAAGEYTQAGGSLFVDGVSADDIDQGGVGSCYFLSALAGTANDKAEMIQDMFTDNGDGTYSVRFYTNGKVDYVTVDSMMATSATDRYLYANSGGDNGVQNVVADNNELWVALAEKAYAQVNESGRISQNGRNSYAGISGGNSATAITHITGLSATSEAVNLTGINGVSNAELINYVNSDRVVTVRGFNGLATGSGSGPTNISSGVQGHAYSIVGYDAETGRFDIRNPWDNQHLSLTHLQLRQLGADIRYSLS

SEQ ID NO: 6102 - protein, 522 aa, Synechococcus sp. RS9916
MSGSPSNPRPWWKQPPLWVGAGPLLAFLVLAAIDLNLAKDFTSEGKAIIGSLLGGIWQWMVALLFVVAIVIALSPVGKVRLGGNDAKPSLKMFDWCAVLICTLLAGGGVFWSAAEPLFHFIEPSPVFEVMGVKGKTAAAVDPALAVSFLHWGFLAWALVATTTTITFSILEKKGEPLRPRTLLVNVLPHSWVDGPIGDIADGLSVVAAIAGTVGPLGFLSLQLSDAAGQLPGMTNSAGLQSLVVVLLTTVFAISTVSGIQKGIKWLSELNVWLTIALAAGLLLLGPGIWLIQHFFGGLVTYITHLPQMALLPRTKETGIWLDWWTVFYWGWFLGYAPLMGLFTAGVSRGRSIRELVLAVAILCPLVTNLWFTLVGGTGMYLDLNGADITGALETDGINAAASTLLTILGGLPLSWLLIPIGLVLVVLFMCTSADSMSYAAAMVVSSRNEPPAPLRLFWALMIGTLTLVLLRIGTSLTDPTSINALQAFIVIAAVPVTPLVLVTLWTAPRLAWKEWQRGQSTP

SEQ ID NO: 6103 - protein, 504 aa, Synechococcus sp. RS9916
MTSALHSPSRRSKPRLQEASLLEGPMLLLKSIRGFRTNRSLTWLACVPVAFAGLGLFNLAAHAQSAKLEDLTGLQLTSFLADNLWLLIATILVIFMNAGFAMVEAGMCRQKNAVNILAKNLFVFALAVTAYWFIGYSLMYGGSVVDGWLYFKGLFFDPSATEAIACAAADKADDCVQLVPAVDFLFQAAFAGTAATIVSGLVAERVKFGEFVIFALVLTAFIYPISGSWQWNGGWLDSLGFIDFAGSSIVHSVGAWAGLVGAMLLGPRIGKFVDGRPQAIPGHNMAIATLGALILWIGWYGFNPGSELAMDQYVAYVAVTTSLAAAGGAIGATVISTITSGKPDLTMIINGILAGLVSVTAGCGNLTMVGAWVAGLVGGIIVVFAVSALDSAGIDDPVGAFSVHGVCGVWGTIVIGLWGVKGMAPDEFSVGIGLFNGGGFSQLGIQALGCAAYAIWTLVTCFIAWSVIGALFGGIRVTEKEEIEGLDIGEHGMEAYPDFATTNS

SEQ ID NO: 6104 - protein, 224 aa, Synechococcus sp. RS9916
MTLVNTPEKKERTLLDVIRGLDGATSEMVERNKTIFFPGDPAERVYLIRRGAVRLSRVYESGEEITVALLRENSLFGVLSLLTGHRSDRFYHSVAFTRVEMLTAPAASVRQAIEADASVGLLLLQGLSSRILQTETMIETLTHRDMSSRLVSFLLVLCRDFGVPGDRGITIDLRLSHQAIAEAIGSTRVTITRLLGDLRNAGLVEIDRKKITVLDPIALAKKFS

SEQ ID NO: 6105 - protein, 386 aa, Synechococcus sp. RS9916
MTVSSAPNGVIAPYGGTLVDLMAPDAEKAAIKASATKTLECSDRNACDVELLVVGGFSPERGFMHQADYDAVVAGHRTTSGYLFGLPIVMDTDSDDVAVGDNVLLTYKGQDLAVLTVEDKWEPNKVVEAKGCYGTTSIEHPAVRMITMERKRFYLGGLIQGLELPKRVFPCKTPAEVRAGLPNGEDVVAFQCRNPIHRAHYELFTRALHAQNVSENAVVLVHPTCGPTQQDDIPGTVRFQTYERLAEEVNNERIRWAYLPYAMHMAGPREALQHMIIRRNYGCTHFIIGRDMAGCKSSLTGDDFYGPYDAQNFAKECAPELSMETVPSLNLVYTEEEGYVTAEHAETRGLHVKKLSGTQFRKMLRSGEEIPEWFAFKSVVDVLRAA

SEQ ID NO: 6106 - protein, 1513 aa, Synechococcus sp. RS9916
MAGEKDACGVGFLAQLQGQTSHWLLQQALRGLGCMEHRGGCGGDSDSGDGAGVLCQIPWAFLREVWPEAEAAKGLGMMFMPTDAVGREDVRRLCGEEAKALGLRSLGWRVVPVDASVLGPLARATAPVIEQWALDTDAGDADFEGLLLRLRRRIGARIRAAFGGDPAHELYVASLSSRTVVYKGMVRSEVLAQYYADLRDPRFAVSFAVYHRRFSTNTLPRWPLAQPMRLLGHNGEINTLLGNLNWAKASEASLENVWGDAADDLIPVVNPAFSDSANLDATLELMVRSGRSITDSLITLVPEAFRNQPDLDSRPDVTAMYEFNAGIQEPWDGPALLVFADGKRVGATLDRNGLRPARWCTTADGFVIMGSETGVVDLSDKTVVQKGRLGPGQMLAVDLESGQLLDNWSVKEDAASRFPYKQWLQQHRRSVAPQPWTQTRQVGELDLLRLQTAMGFTAEDFDLIIEDMAALGKEPTYCMGDDIPLAVLSDKPHLLYDYFKQRFAQVTNPPIDPLREKLVMSLEMHLGERRPALKPQPEAAAVIHLETPVLNEAELTAIAQQGLPVTTLSTQVAVEACTGGLKASLDALCQAAEQAVRGGAQVLVLSDRVDASGASAQLNATTVAMPALLAVGAVHHHLLRQKLRLQCSLVADTAQCWSTHHVACLIGYGASAVCPWLTWETTRHWLEHPKTKKRIEQGKLPALDPDQVQANVRISLENGLRKILSKIGISLLASYHGAQIFEAIGLGADVIETAFSGTTSRVAGMTLAELANETLSMHAKAFPELDRTKLEFMGFVQYRSGAEYHRNNPELSKALHKAVAQGPGYDHFSTYQGLLENRPVMALRDLLEFQLAPTPVPLDQVESVESICSRFCTGGMSLGALSREAHEVLAVAMNRIGGKSNSGEGGEDPARFQVLNDVDSEGRSASFPSIGGLRNGDTACSAIKQIASGRFGVTAEYLRSGKQLEIKVAQGAKPGEGGQLPGPKVDKYIAWLRNSKPGVALISPPPHHDIYSIEDLAQLIHDLHQVHPAAPVSVKLVAEIGIGTIAAGVAKANADVIQISGHDGGTGASPLSSIKHAGGPWELGLTEVHRALLENGLRDRVLLRADGGLKTGWDVVIAALLGAEEYGFGSIAMIAEGCVMARVCHTNNCPVGVATQKENLRKRFTGVPEHVVNFFWYVAEEVRQLMSLLGVTRLEELIGRTDLLKPRQVSLAKTQSVDLSSLLAPISGSEDRSWLRHSAEAHGNGVILEDQLLGDAELMAALENHGSVSRTIEIINTDRSVCARLAGEIAQRHGNRGFKGQLDLNFRGAAGQSFGAFLVQGQNVRLEGEANDYVGKCMNSGRITLVPADGCAAPGEQVILGNTCLYGATGGELFAHGRAGERFGVRNSGARTVVEGAGDHCCEYMTGGVVVVLGSTGRNVGAGMTGGVAFILDDSGGLNARVNHEIVEVCPLSTSEQESMLKGLLESHVEATGSEKASALLADWGAAKARFKVLVPPSERAAMGLVDRAAVAA

SEQ ID NO: 6107 - protein, 245 aa, Citrus unshiu
MAFPNELAAGREELSPKRKMGRGKIEIKRIENTTNRQVTFCKRRNGLLKKAYELSVLCDAEIALIVFSSRGRLYEYSNNSVKSTIDRYKKATADTSNTGSICEANAQFYQQEAAKLRIQISNMQNSNRNMLGESLSGLNFKELKNMETRLEKGISRIRSKKNELLFAEIEYMQKREVDLHNSNQLLRAKIAENERGQQNMNLMQGGSSYEIIQSQPFDSRSYFQVNALQPTNHYPRQDQMALQLV

SEQ ID NO: 6108 - protein, 257 aa, Citrus unshiu
MCSSSKLPATMEFPKQNPESSSQSKKIGRGKIEIKRIENTTNRQVTFCKRRNGLLKKAYELSVLCDAEVALIVFSSRGRLYEYANNSVRATIDRYKKACADSSNPGSITEANTQFYQQEATKLRRQIREIQNLNRHILGEALSTLNFKELKNLEARLEKGIGRVRSKKNEMLLAEIEFMEKREIQLQNDNMYLRARISENERAQQERQSESMMQQGGGHVYEPAASQPYDRNFLPVNLLEPNHQYARQDDQPPLQLV

SEQ ID NO: 6109 - protein, 323 aa, Solanum lycopersicum
MAPGILYGGSSNFDGVFTQKQRDVFSSSTAPKGHLGSLFAPASSSSNFLGSSSMVSFRGVNGGKRSFFDSFDQDDNEADELGEYLHQAEKKRRLTDNQVQFLEKSFGEENKLEPERKVQLAKELGLQPRQIAIWFQNRRARWKTKQLEKDYDELRNRYDTLKSNYNNLLKEKEDLRTEVFRLTGKLFIKEKGNGQLDLRDEHKHSNALAKETVVDPMSNVPALVVKHQQEDLSSAKSDVFDSESPRYTSRMHSSVVDQDDSARAFETDQSDSSQDDDENFSKNMLSTANLLGKDADDDYPATSSNLSYFGFPVEDQGFGFWTY

SEQ ID NO: 6110 - protein, 670 aa, Arabidopsis thaliana
MAAATTTTTTSSSISFSTKPSPSSSKSPLPISRFSLPFSLNPNKSSSSSRRRGIKSSSPSSISAVLNTTTNVTTTPSPTKPTKPETFISRFAPDQPRKGADILAEALERQGVETVFAYPGGASMEIHQALTRSSSIRNVLPRHEQGGVFAAEGYARSSGKSGICIATSGPGATNLVSGLADALLDSVPLVAITGQVPRRMIGTDAFQGTPIVEVTRSITKHNYLVMDVEDIPRIIEEAFFLATSGRPGPVLVDVPKDIQQQLAIPNWEQAMRLPGYMSRMPKPPEDSHLEQIVRLISESKKPVLYVGGGCLNSSDELGRFVELTGIPVASTLMGLGSYPCDDELSLHMLGMHGTVYANYAVEHSDLLLAFGVRFDDRVTGKLEAFASRAKIVHIDIDSAEIGKNKTPHVSVCGDVKLALQGMNKVLENRAEELKLDFGVWRNELNVQKQKFPLSFKTFGEAIPPQHAIKVLDELTDGKAIISTGVGQHQMWAAQFYNYKKPRQWLSSGGLGAMGFGLPAAIGASVANPDAIVVDIDGDGSFIMNVQELATIRVENLPVKVLLLNNQHLGMVMQWEDRFYKANRAHTFLGDPAQEDEIFPNMLLFAAACGIPAARVTKKADLREAIQTMLDTPGPYLLDVICPHQEHVLPMIPSGGTFNDVITEGDGRIKY

SEQ ID NO: 6111 - protein, 368 aa, Linum album
MDAATAVELLNAQPQVWHHFLGYINSMTLQCALELEIADVIHRHGQPIPLNRLAAAVKIPQAKAPFLSRLMRMLVHLGYFTQVKHQQKPEAEEDVPCYWLAPLSRLLLKENPFNARSLTFCSVHEHLVDPWRQMSAWLRTSNEDGKDTANVFAFAHEGKKVYEVCSEDANFSQLFSEGMAGDSWLFSRALVSKCRDAFEGLSSLVDVGGGTGNTSKVIAEAFPNIHCTVFDLPHVVSGPKQTHPNLDYESGNMFTDDIPHADAVLFKWVLCDWPDEPVLKMLKQCKKALTKNGVKGKVMIADHVLGHESCNDSSSMGTSLILDLLFMSFLEGSLRTEKQWAKLFSEAGFADYKITPVGGLRVLIEVYP

SEQ ID NO: 6112 - protein, 279 aa, Rhizobium leguminosarum bv. viciae 3841
MTISFRTGVMSLAVAALLSTPALAEGSKLDEVLARGHLVLGTGSTNAPWHFKSADDKLQGFDVDMGHIIAKALFGDPEKIEYVNQSSDARIPNITTDKVDITCQFMTVTGERAQQVAFTIPYYREGVGLMLKADGKYADYAALKAAGSSVTISVLQNVYAEAMVHAALPEATVDQYDSVDLIYQALESGRADAVATDQSSLAWYMTQNPGRYKDAGYGWNPQTYACAVKRGDQDWLNFVNTALHEAMTGVEFDFYAKSFKTWFGKDLAPPQIGFPVEFK

SEQ ID NO: 6113 - protein, 315 aa, Rhizobium leguminosarum bv. viciae 3841
MKPDVIVAYPLRPHQMAMLEETYTLHRLDLVKGEERDALLQQAGPISSALVCNGHVTIDEALLSKLPALKLAACSSAGYDQMDLEAMTRRGIKLTNTSEVLCDDVADMALLLMLAARRRLPEGDRYVRSGDWGQKGMMPLTTSTSGKKAGIVGLGRIGMAIAKRCEAVGLTIGYYGRTKKAGNDFAYFDAPVKLADWADILIVATPGGPSTEGLISADVLNALGPTGSFINIARGTVVDEPALIKALQERRIASAGIDVYLNEPNPDPRFAALDNVVLYPHHASGTEETRDRMAQLTVDNLAAFFAGRPLLTPVN

SEQ ID NO: 6114 - protein, 548 aa, Rhizobium leguminosarum bv. viciae 3841
MTKGSDLLVAAIENEGVDRIFGIPGEENLDVVESIRKSSIELVLTRHEQAAAFMAATYGRLTGKPGVCLTTLGPGALNLSTGAAYALLGAMPMVMITGQKGILSSRQARFQVVDVVASMKPLTKLARQIVSPQMIPTTVREAFRIAQEEKPGPVHLELPEDIAAEECQEVALIAPHQLELPTASDAALDRAADLIAAAKRPLLMFGAAASRPRSTSDIAQFVIRTRIPFFTTQMGKGTVPGGTELYMGTAALSERDYVHEAIEQADLIITIGHDTIEKPPFIMGKGGPKVVHVGYQPATVEQVYFPQSEVIGDIGPSLKALADRLEGKLPNAHALLHLRERILERIAARATEDRFTPQRLVHDIREVMPHDGILALDNGMYKIWFARNYRTRMANTLLLDNALATMGAGLPSAMVASMLYPERRVMAICGDGGFMMNSQELETAVRLKLNLVVLVIEDNAYGMIRWKQAVDEFPDFGMTFGNPDFVKYAESYGARGTRVEDISQFKQVLEEAFSGGGVHLVNVPVDYSENERVLVKELRERLPAILEA

SEQ ID NO: 6115 - protein, 402 aa, Rhizobium leguminosarum bv. viciae 3841
MSTFVPASRVSRIKVSPSTAAAARARELKAAGRDIVDLTVGEPDFDTPDNIKAAAHAAIDRGETKYTAVNGTPALRKAIIGDIKRRLGLSYADNEICVGGGAKQILFLALMASVENNAEVIIPAPYWVSYPDMVIANEGKPVIIECPQETGFKLTPEALERAITPKTLWLVLNAPSNPTGAAYDRSELEALGKVLLRHPHVFVLSDDIYDQVWFKDEPMTTLVAAVPELKERVLLTNGVSKSYAMTGWRIGYAAGPAVLIAAINKLQSQMSSCPSSVSQAAAAYALSSDQSFVTESVTVYRKRRDYACSRLNAVPGLSCLVPDGAFYLFPNCAGVIGKKTPEGKTIETDLDFVLYLLDGVGVAALQGAAYGVSPHFRLSIATSMEAITQACDRIERAVADLY

SEQ ID NO: 6116 - protein, 356 aa, Rhizobium leguminosarum bv. viciae 3841
MPAARAALDDVWNPEDDDALVCLDVQQETHDVKTFTFASREGKRFAFKAGQYFLFDLERDGDAENRCYSISSSPHRTNAFSVTVKRVPGGKISNWLHDTLVPGATVKANGPLGHFVRPETSGRKLLLLSGGSGITPVMSILRELADSCEPADVVFMHAGRTPQDLIFRDELACIARRLKGLRLHFLPETVAGEPSWPGLTGRISKDYMRLAVPDIAERTVMCCGPAPFMAAARSIAAELGVPGSNYLEESFDAAVVDEAEIPAVQEAAAKVFQVTFSKQARSIDVSGDQSVLSCAKKSGVRIPSSCANGVCGTCKSKLTSGTVDMNHNGGIRQREIDAGFFLPCCSKPLSDLVIER

SEQ ID NO: 6117 - protein, 324 aa, Rhizobium leguminosarum bv. viciae 3841
MSFIFSTHPLHPAAKSMLEAAGDLRVASAPDPETLLREGRGAGIVVVRAPIPPAFFEDAPALRAAIRHGAGLDMVPLDAATRAGVLVANVPGANASTVAEHVFLVTLALLRRFRAMDRDLRQSGWAAGRAQSDTAVDLAGRTMGIIGMGNVGKAILKIAKFGFGLEVVATSRSPESVPDGVRFLKIDELVATADIVLLCCPLTPETTGLLNAGRIGRMKPTAILVNVSRGPVIDDAALIEALRDGRIGGAALDVFATQPLPLDHPYFGFDNVIVTPHLAGLTEESMMRMGTGAASEALRVIKGDLPVNLRNPEVVEHYRRRFPA

SEQ ID NO: 6118 - protein, 67 aa, Rhizobium leguminosarum bv. viciae 3841
MPTGTVKFFNDDKGFGFITPEGGGQDVFVHVSALQSGGSLREGDKVSFEVGQDRKTGKSKAENVSTL

SEQ ID NO: 6119 - protein, 333 aa, Rhizobium leguminosarum bv. viciae 3841
MTAKKKPKVYITRKLPDAVETRMRELFDAELNIDDAPRSVPELIAAVKTADVLVPTVTDRIDAALIEQAGPQMKLIASFSNGTDHIDVEAAARKGITVTNTPNVLTEDTADMTMALILAVPRRLGEGARVLTDKPGEWAGWSPTWMLGRRIHGKRIGIVGMGRIGTAVARRAKAFGLSIHYHNRKRVNPAVEDELEATYWESLDQMLARVDIVSVNCPSTPATFHLISARRLALLQPTAYLVNTARGDVVDEAALIKCLREGRIAGAGLDVFENEPAVNPRLIKLANEGKVVLLPHMSSATIEGRIDMGDKVIINIRTFIDGHRPPNRVLPGR

SEQ ID NO: 6120 - protein, 638 aa, Rhizobium leguminosarum bv. viciae 3841
MAKVIGIDLGTTNSCVAVMDGKDAKVIENAEGARTTPSMVAFSDDGERLVGQPAKRQAVTNPTNTLFAVKRLIGRRYEDPTVEKDKHLVPFTIVKGDNGDAWVEANGKGYSPAQISAMILQKMKETAESYLGEKVEKAVITVPAYFNDAQRQATKDAGRIAGLEVLRIINEPTAAALAYGLDKKEGKTIAVYDLGGGTFDISILEIGDGVFEVKSTNGDTFLGGEDFDMRLVEYLVGEFKRDNGIDLKNDKLALQRLKEAAEKAKIELSSSQQTEINLPFITADASGPKHLTLKLTRAKLESLVDDLVQRTIAPCKAALKDAGVTAAEIDEVVLVGGMSRMPKVQEVVKQLFGKEPHKGVNPDEVVALGAAIQAGVLQGDVKDVLLLDVTPLSLGIETLGGVFTRLIERNTTIPTKKSQTFSTAEDNQQAVTIRVSQGEREMAADNKLLGQFDLVGLPPSPRGMPQIEVTFDIDANGIVQVSAKDKGTGKEQQIRIQASGGLSDADIEKMVKDAEAHATEDKKRREAVEARNQAESLIHSSEKSLKDYGDKVSEADRTAISDAIAALKTASEASEPDADDIKAKTQTLMEVSMKLGQAIYEAQQAEGGAAGDASAESGDNVVDADYEEIKDDDRKKSA

SEQ ID NO: 6121 - protein, 761 aa, Rhizobium leguminosarum bv. viciae 3841
MPDIDKKDRPVTSVTDQEALDFHAMGRPGKLEINPTKPMATQRDLSLAYSPGVAVPVKAIAADPQTAYDYTARGNMVAVISNGTAILGLGNLGALASKPVMEGKAVLFKRFADVDSIDLEIDTENVDEFINCVRFLGPSFGGINLEDIKAPDCFVIESRLRELMDIPVFHDDQHGTAIIAAAGLINALELTGRDLKTTKLVCNGAGAAAIACVELIKAMGFAPENVILCDTKGVIYQGRTEGMNQWKSAHAAKTDTRTLEEAMKGADVVFGLSQKGAFSAKMIRSMAERPIIFAMANPDPEITPEEVARIRDDAIMATGRSDYPNQVNNVLGFPYIFRGALDVRASTINDAMKIAAVNALANLAREDVPDDVVAAYQGNRPRFGSQYIIPVPFDPRLISAIPVAVAQAAIESGVARKVITDMAGYARELSARRDPIASTLASLYERVRRRPKRIVFAEAEEEQVLRAAMSYANQQLGTAILLGREDLIRATAERAGIDLNRPGLEIVNARLSTRVEAYIDYLYARLQRHGYLHRDAQRLIHNDRNHFAATMVALGDADGMVTGITRNYSTALEDVRRCIDEKPGHRVIGVSLALCRGRTVFVADTAVHDMPTAEELADIAEEAAGLARRMGYPPRVAMLAYSTFGHPSGERSERVREAVKILDKRRVDFEYDGEMAADVALNRKVMEQYPFCRLSGPANVLVMPAFHSASISTKMLQELGGSTVIGPILVGLDKPVQITSMGAKDSDIVNMAAIAAYGAGS

SEQ ID NO: 6122 - protein, 69 aa, Rhizobium leguminosarum bv. viciae 3841
MTTGTVKWFNSTKGFGFIQPDNGGADAFVHISAVERAGMRDLVEGQKIGFDLERDNKSGKMSACNLQNA

SEQ ID NO: 6123 - protein, 598 aa, Rhizobium leguminosarum bv. viciae 3841
MMENNRNYFIAIALSVLIVLGWQFLYMNPRIEAQRKAQEAQKAQQQTEQVQQPAAGGQTPAQTSGAAPSGQAAATATLEQALQKSPRVVIDTPALSGSINLAGARLDDLKLKGYHETVDDSSPIITLFSPAETKDGYFTELGYIGSDATGSVPGPSTLWTAPEGAKLTEKTPVTLSYTNDKGLTFTRTISVDERYMFTVADKIENTGQAPAALSSYGRVTRYNKPTTPSVYVLHEGFIGVIGDDGLIETKYSAVEKEAVAPAKSTGGWLGITDKYWAATIVPPQSAAYEAHFSYFADGQPRYQADYKDDAFTVAPGQSIELKNLVFAGAKEVPVIDGYEASYSIPKFDRLIDWGWFYFITKPMFKLMDFFFRYFGNFGVAILCTTIVVKALFFPLASKQYASMANMKRMQPKMEELKAKFADDRMGLQQATMQLYKEEKINPIAGCWPVALQIPIFFSLYKVIYITIEMRHAPFFGWIKDLSAPDPTTIVNLFGLLPFEGPTLLHLGVWPLIMGVTMFVQMRMNPTPPDPTQAMIFNWMPLVFMFMLASFPAGLVIYWAWNNTLSVAQQGLIMKRHGVKVELFDNLKGLFRRKEAPSK

SEQ ID NO: 6124 - protein, 468 aa, Rhizobium leguminosarum bv. viciae 3841
MSRLVVVSNRVPMPAKDGSAAAGGLAVALQAALQERGGIWMGWSGESSGDREPGPLSQLQKGNITYALTDLTDTDVEEYYRGFANRVLWPICHYRLDLAEYGRKEMAGYFRVNRFFAHRLAPMIEPDDIIWVHDYHLIPLAAELRQMGLKNRIGFFLHIPWPPADILVTMPVHEEIMRGLSHYDLVGFQTDYDLQNFAGYLRREGIGDDLGNGLFDSHGRIFKAGAYPIGIETAGFAEFAERAANNIMVQKTRRSVEGRDMIIGVDRLDYSKGIIQRLEAFETFLTSNPAYQNKVTYLQVTPKSRSEVPEYEHMQKMVAEQAGRVNGAIGTVDWVPIRYVNRSISRNVLAGIYRLATIGLVTPLRDGMNLVAKEYVAAQDPDRPGVLVLSRFAGAARELKGALLVNPYDVEGTANAIAKGLSMSLEERRDRWSMMMEHLLSHDVSLWCENFLGDLVLAPELRPEHDPG

SEQ ID NO: 6125 - protein, 69 aa, Rhizobium leguminosarum bv. viciae 3841
MSTGTVKWFNATKGFGFIQPDDGAADVFVHISAVERAGMRDLKDGQKLSYELVRDNKSGKMSADRLQAA

SEQ ID NO: 6126 - protein, 388 aa, Rhizobium leguminosarum bv. viciae 3841
MSIVSSISPRALAAPESGIVELVNYARGREGLLPLWVGEGDLPTPDFISRAAMDALAAGETFYTWQRGIPELRQALSDYYDRHFGIRLPVEHFYVTGSGMQAIQIAVQALTSPGDELVYLSPSWPNIAAALEISGARSVGVELQFAGGKWAVDLNRIEAAITPKTKGIFINTPSNPTGWTATKQDLGDILALARKHDLWIMADEIYARYSFAGGRAPSFLDVMDEGDKIIFVNSFSKNWSMTGWRVGWIVAPPEMGQVLENLIQYSTSGVAQFMQKGAVAALDQGDDFVAANIAKAARSRDILCDALVATNRVETLKPDGAIYAFLKIDGVTESRRAALDIVDKTGVGLAPGTAFGQGGELFLRACFLRDPTQVAVAAERLCDYILKL

SEQ ID NO: 6127 - protein, 69 aa, Rhizobium leguminosarum bv. viciae 3841
MNSGVVKWFNGTKGFGFIQPDDGSTDVFVHISAVERAGMRELVEGQKIRYDLVRDKKSGKNSADNLQAA

SEQ ID NO: 6128 - protein, 313 aa, Rhizobium leguminosarum bv. viciae 3841
MTQEEDIAAEAAAETNRPTHSGFVALIGPTNAGKSTLVNRLVGAKVSIVSHKVQTTRAIVRGIAIHDNAQIVFMDTPGIFKPRRRLDRAMVTSAWGGARDADLIVLLIDSERGLRGDAEAILEGLKEVRQPKILLLNKIDRVNREDLLALAAAANEKIAFDRTFMISAENGSGCDDLMDYLAKTLPEGPWYYPEDQISDLPMRQLAAEITREKLFLRLHQELPYASHVETETWEERKDGSVRIEQVIYLERDSQKKIALGKGGETIKAISTASRKELSQILEQPVHLFLFVKVRENWGDDPERFREMGLDFPK

SEQ ID NO: 6129 - protein, 330 aa, Rhizobium leguminosarum bv. viciae 3841
MILRPKKEPPLANTTIDHAFTATSLNSAASDPTFAGALSFMRRRFTKELAGVDVAVWGIPFDAATSNRPGTRFGPQAIRRASAIFDNDAQYPFNRELFAEMAVIDYGDCLFDYGNHQDTPAAIERQANVILDSGAFLLTLGGDHYVTWPLLKAHVAKHGPLALVQFDAHQDTWFDEERRIDHGSFVARAAREGIIDPDRSIQIGIRTHAPEDCGVNILYGHQVEEMSASDIASAIISHTRGAPAYLTFDIDCLDPAFAPGTGTPVSGGPSSAKILSVLQRLHQLDIRGADVVEVSPPYDHADITAIAGATVAMYMLGLHAERRAIAVSQG

SEQ ID NO: 6130 - protein, 244 aa, Rhizobium leguminosarum bv. viciae 3841
MQAVSNIHSLERPRAHGMIDFAPLFMRQTVETAQSGTTIFFEGDAARHVFRIVRGNVRICRFLPDGRRIIIGFLGAGDLVGLSFRNRYLFAGEAIDEVAFSRMNKRTLEEELQLVPDFRLQLLSQLRDEISAAQDHMLLLSHKNAEQRVCTFLLHRLERNEGRDGRTISLPMVRADIADHLGMTIETVSRTLTKLVAKGILLPADKHQFKVASRLALARTADEDPDDLFEDVDAGARCGGTRYQ

SEQ ID NO: 6131 - protein, 390 aa, Rhizobium leguminosarum bv. viciae 3841
MDRVAVSFNAGSSSLKVGVFKLKDGRALRLGGGIATLGDQPRFTFRFSGGDEAVDLPSGTAIDARLVSQVVDCIVGRGFDPVVAGHRIVHGGQVFDGPVLLEPEVVLKLEDLTHLAPVHLPPALAIVHAVWSAYPDIPQTVSFDTAFHSSQSSLAVRLAIPRALHDAGVRRYGFHGLSYKYVAGELRKHDPDLAAGRVVCAHLGSGASLCAMVDGVSIDTSMGFSPLDGIPMSTRPGSLDPGAVVHLLRNNCHDADRLEDFLYNRCGLLGVSGKSGDVRVLLEDFHPASREALDLFCFRIAGEIGRLAVSLGGVDAIVFTAGVGEHQPEIRNGVAHHLGWLGLSLSEPANKMNATVISARESEIVALVIPTDEEQVIADEAIEVIRRHKL

SEQ ID NO: 6132 - protein, 372 aa, Rhizobium leguminosarum bv. viciae 3841
MRVGCPKEIKNHEYRVGLTPASVREYVAHGHEVWVETKAGVGIGADDAAYAAAGAKIAASAKDIFEKCDMIVKVKEPQPAEWAQLRDGQLLYTYLHLAPDPEQTKGLIASGVTAIAYETVTDERGGLPLLAPMSEVAGRLSIQAGATALQKANGGLGVLLGGVPGVLPAKVAVIGGGVVGLHAARMAAGLGADVSILDKSLPRLRQLDDIFAGRIHTRYSSIQALEEEVFSADLIIGAVLIPGAAAPKLVTREMLSGMKKGSVIVDVAIDQGGCFETSHATTHSDPTYEVDGVVHYCVANMPGAVPVTSAHALNNATLVHGLALADRGLRAIAEDRHLRNGLNVHKGRITSKPVAEALGYEAFAPESVLNVA

SEQ ID NO: 6133 - protein, 192 aa, Rhizobium leguminosarum bv. viciae 3841
MADRISSNEYSDLDELSGEAVDLVEITGVVKWFDVAKGFGFIVPDNGLQDVLLHVTCLRRDGYQTILEGTRIVALIQRRERGYQAFKILSMDQSTAVHPSQLPPVRTHVQVTATSGLERALVKWFNRTKGFGFLTRGEGTEDIFVHMETLRRFGLTELRPGQVVLVRFGDGEKGLMAAEIHPDVPSPASRSH

SEQ ID NO: 6134 - protein, 384 aa, Rhizobium leguminosarum bv. viciae 3841
MPIEHAAIVGAGISGLTAALALSRRGISSEIFEQAGELTDIGAGLQVSPNASRILAELGILEGLSKVWLEPDAIRLRSGGSLRQLAAVPAGKFARERWGAPYGVLHRTTLQKALLAAVAADPLCRLHLGVRIDSTLPLFERAADVVIGADGVWSKLRQSVPGSPSPRFSGNIAYRFTIAETEAPAFLDRASVSAFLGGSAHLVCYPLRETGSFNVVAITAGNIASQAWQSEPTAEQRAELRARLSGWNAAIVSLLDRQKKLTFWPLFETTSGVWQDGRRTVLIGDAAHAMMPFAAQGAAMAIEDAYELATFLSNHPVAEALALFERHRAPRIARLRQRGAFNRFAYHAKGPIRIGRDLVLGLKPPLSLAADLDWIYGYRAVDLP

SEQ ID NO: 6135 - protein, 556 aa, Rhizobium leguminosarum bv. viciae 3841
MYRYDEFDHAFVTERVEQFRDQVERRLSGELAEDAFKPLRLMNGVYLQLHAYMLRIAIPYGTLSSRQLRMLAHIARTYDRGYGHFTTRQNLQFNWPKLCDIPDALADLASVEMHALQTSGNCIRNVTADHFAGAAADEIADPRPYAEILRQWSSVHPEFSFLPRKFKIAVTGAERDRAAIQVHDIGLHVKKNDKGEIGFAVYVGGGQGRTPMIAKLIRDFLPEEDLLSYTTAIVRVYNLHGRRDNKYKARIKILVHETGTEELTRQVEAEFAALKDTELKLPEKDVQSIAAYFAPPDLPQRAEGWENLARWKKADSGFSRWVQQNVQPHKNPDYGMVTISLKPIGGIPGDASDAQMDAIADLAEEYAFDEIRVSHEQNLILPHVALADLEAVYRGLVAINLAEANAGLITDIIACPGLDYCALANARSIPLAQEISRRFGNAERQAEIGELKIKISGCINACGHHHVGHIGLLGVEKKGAELYQITLGGSGDEHTSIGEIIGRGFEPDRVTDAIETIVDTYLGLRLDHSENFLAAYRRVGPQPFKTALYGSAAEAA

SEQ ID NO: 6136 - protein, 303 aa, Rhizobium leguminosarum bv. viciae 3841
MTASPSFLGLPDRLADGRLPRAVIFAAAHGSTYPGKDGSGYVLAAGAIRAASQDDAALVEHWDFDLGGPLFDHNPVCCIDAGDVPTILHDNAGNRARIEARTREVLSMPAVPILLGGDCSVTIPFLAGFADHEPVWILQIDAHIDWRDEVHGERHGYSSPMRRASEMPHVAGMVQVGLRSVGSARLADIESARAYGSRFVTAREIHAEGVEAALRHIPEGAWVVVTLDCDSVDPGIMPGVAARTPGGLTYTEVIDLIAGLGRRARIAGFDLVELYPPADIDGLSALTAARLLVNAVGAIVRQD

SEQ ID NO: 6137 - protein, 251 aa, Rhizobium leguminosarum bv. viciae 3841
MLEIKNLHARIAEDGTEIIRGLNLTVKAGEVAAIMGPNGSGKSTLSYVLSGRSDYEVTEGDILYNGESILELDPAERAAKGIFLAFQYPVEIPGVATMQFLKVAMNEQRKARGEDELTTPDFMRRVKDAAGKLQINTEMLKRPLNVGFSGGEKKRAEILQMALLEPKLCVLDETDSGLDIDALKIVADGVNALRSPDRAVVVITHYQRLLDYIVPDTVHVLYKGQVIKSGDKTLAHELEANGYADIIGTAA

SEQ ID NO: 6138 - protein, 388 aa, Rhizobium leguminosarum bv. viciae 3841
MAPPRLYLDWNATAPLHPAARAAIMRAIDVFGNPNSVHGEGRAARAAIEGARRKVAALAGTDAGNVVFTSGATEAANLVLTSDFRMGRTPLRLGHLYFSAIEHPAVREGGRFAKEKMTEIPVTEAGIVDLDALGRLLDAHDKAAGLPMVAIMLVNNETGIVQPVEAAARIVHAHGGLFVVDAVQAAGRIGLDIGKIGADFMIVSSHKIGGPKGAGALIARGEALMPRPLIQGGGQERGHRSGTQNSLALIGFGAAAEAAVDELEARNAAIGALRKRLEAGMRQAAADVMIHGEGGERVTNTIFFTLPGLKAETGQIAFDLEGVALSAGSACSSGRLGESHVLTAMGRDAKLGALRISLGFSTTEEDIDRAIAAFAKIACRRRSAGEAA

SEQ ID NO: 6139 - protein, 111 aa, Rhizobium leguminosarum bv. viciae 3841
MSGIHEFIDNEIKTNDVVLFMKGTPQFPQCGFSGQVVQILDYIGVDYKGVNVLADSEIRQGIKEYSNWPTIPQLYVKGEFVGGCDIVREMFQAGELQQHLQENGIAVRAAS

SEQ ID NO: 6140 - protein, 770 aa, Rhizobium leguminosarum bv. viciae 3841
MDHPEKSKTEKNLTSGDFDEQALFFHRYPRPGKLEIQATKPLGNQRDLALAYSPGVAAPCLAIRDNPEMAAEYTSRANLVAVISNGTAVLGLGNIGPLASKPVMEGKAVLFKKFAGIDVFDIEIDAPGVDQMVSTIASLEPTFGGINLEDIKAPECFEVERRLREKMKIPVFHDDQHGTAIIVAAAILNGLELAGKNIADIKIVASGAGAAALACLNLLVILGAKRENIWVHDLEGLVYEGRVELMDEWKSIYAQKSETRTLAENIGGADVFLGLSAAGVLKPELLAQMADKPLIMALANPTPEIMPDLARAARPDAMICTGRSDFANQVNNVLCFPYIFRGALDCGAETINEEMKMAAVRAIAALAREEPSDVAARAYSGETPVFGPDYLIPSPFDPRLILRIAPAVAKAAEQSGVARRPIQDFDAYLDQLNRFVFRSGFVMKPIFTAAKAAERKRVIFSEGEDERVLRAAQVLLEEGLAEPILIGRPQVIETRLKRYGLRIRPLQDFEVINPEDDPRFREYVDLYFSLVGRRGVIPEAARTIVRTNTTVIGALALRRGEADALICGLEGRYEKHLRDVRQIIGKRKNVRDFSALSLMISQRGATFFTDTYVTFNPTAEEVAEATVLAAEEIRRFGLTPRAALVSHSNFGSRESESATKMRNALQLVRDAAPDLEVDGEMHGESAITEALRKRVMPDTTLHDEANLLVFPNLDAANITLGVVKSMTDGLHVGPILLGTALPAHILAPSVTSRGVVNMAALAVVEASQPA

SEQ ID NO: 6141 - protein, 337 aa, Rhizobium leguminosarum bv. viciae 3841
MMNLVPKWLLIAVGIALLALAPIGHGNYVALILCSWLIYTIAAMGLNLTLGYAGQISLAQASFMAVGAYITALMTMNGIHWLIAMPVSVAACFVIGLLVGFPALRVKGHFLAFVTLAFNTLLVLVLRNEDWLTGGSYGKSNMPRPDFWVFDTGMKSTVLSIPLTSNQKMYYLCLVVFVIFALLMYGLVRSPWGRAFKGLRENPIRAESLGLDIRRITLLAFAIGSAAGGLAGSLVSPVVQYIEPNSFALSFSLKILLMVVVGGSGYFFGPMLGAAVVILLPEFLRFTEGYYLIIYSALVILLMVFSPSGLMGVGGRLVGAVRPRRVTRGDMKEGAQL

SEQ ID NO: 6142 - protein, 572 aa, Rhizobium leguminosarum bv. viciae 3841
MLQSFHMPIFRGLEGFRADWLRSDIPAGLSIAAVGLPSAIAYPAIAGLPPETGIYASIVAPVAYALFGPSRLLVVGPDAGTMAVLAAVIGTVIAAQPAGTSADPVAIASALALGVGAFYFAARLLRLGVLASFLSRPILVGFFAGVSISILVGQIGRFTGVRIESDGLLPPIAEIIRKSALIHWPTLLFGLAMFALLWIVKATRLPVPGPVVVVVVSVILSAIFNFEAAGIRVVGDLPTGLPSFSLDAFSQMPMDRIVLGSAAVFLISFGSSIVAARSFGARSGEEVDANRELIGLGAANIAPGLFGSFPIAVSDSRTAINLAVGGRSQAAGLVSAVTLMAALLFLNDALRILPIPALAAILAAAAISLIDVSELRKIWHISRMEFVFALIAMFGAISFGVLNGVIVAIAATLIYLLRKTMFPKDTLLGRIAGRDGFYDMQRFPEARGIPGIAICLVQGNLLFYNADYISIRLRAIADGLPAETRWFILDASAIAHIDSTGAAALDAVQANLSGRGIAFGVAHLNAEVTELLARAGVVDGIGAGKFFDDTEDALRAARLGEESDRPLAGGHQ

SEQ ID NO: 6143 - protein, 70 aa, Rhizobium leguminosarum bv. viciae 3841
MATKGTVKFFNQDKGFGFITPDGGAKDVFVHISALQASGIQSLREGQQVTFDTEPDRMGKGPKAVNISAS

SEQ ID NO: 6144 - protein, 403 aa, Rhizobium leguminosarum bv. viciae 3841
MTKIEKIVLSYSGGLDTSIILKWLQETYGCEVVTFTADLGQGEELEPARAKAEMSGVKDIRIVDLREEFVSDFVFPMLRANALYEGQYLLGSSIARPLIAKHLVGIAREVGADAVAHGATGKGNDQIRFELAVNALDPSIKVIAPWRQWNIRSRLQLSEYAEKHRIPVPSDKRGEAPFSIDANLLHTSTEGKSLENPAEVAPDHVYQRTVDPVDAPDTPEIITVGFERGDPVSVNGKAMTPAALLTELNGLGGRHGVGRLDLVENRFIGMKSRGIYETPGGTILLAAHRGIESITLDRAAAHLKDEIMPRYAELIYNGFWFAPEREMLQALIDHSQAFVSGEVTLRLYKGSASVISRASPCSLYSADLVTFEESTIAFDHHDAEGFIRLNGLRLRSWAARNGR

SEQ ID NO: 6145 - protein, 400 aa, Rhizobium leguminosarum bv. viciae 3841
MAFLADALSRVKPSATIAVSQKARELKAKGRDVIGLGAGEPDFDTPDNIKTAAIDAINRGETKYTPVSGIPELRKAIAAKFKRENGLDYSWEQTIVGTGGKQILFNAFMATLNPGDEVVIPAPYWVSYPEMVALCGGTPVFVSATQEHNFKLQAADLEKAITPKTKWFIFNSPSNPTGAAYTQDELKALTDVLMKHPQVWVLTDDMYEHLTYGDFKFVTPVEVEPKLYDRTLTMNGVSKAYAMTGWRIGYAAGPIQLIKAMDMIQGQQTSGATSIAQWAAVEALNGTQGFIPANKKIFEGRRDLVVSMLNQAKGIVCPVPEGAFYVYPSCAGLIGKTAPSGKVIETDEDFVSELLETEGVAVVHGSAFGLGPNFRISYATSEELLEEACRRIQRFCGACK

SEQ ID NO: 6146 - protein, 310 aa, Rhizobium leguminosarum bv. viciae 3841
MKVFAGNSNRQLAEAICNYLNVPLGKASVRRFADQEIFVEIQENVRGEDVFLVQPTAFPANDHLMELLIMIDAMRRSSARRITAVLPYFGYARQDRRASGRTPISAKLVANLITEAGADRVMTLDLHAGQIQGFFDIPTDNLFAMPVLTRDIKSHYDLSNVVVVSPDVGGVVRARALAKRLDCLLAIVDKRRERPGESEVMNIIGDITGKDCLLIDDIVDSGGTLCNAADAMLAKGASSVTAYITHGVLSGGAVTRVTSSKLRELVITDSIQPTTAVLSAHNIRIVTTAPLIGEAISRTAQEESVSSLFD

SEQ ID NO: 6147 - protein, 216 aa, Rhizobium leguminosarum bv. viciae 3841
MNDAITQRYPLFSAAEFRRRALNQNGGPVDHAWRDHGDHILNPDIVAEVETFKLRDAAVLVPVVDDGEEAHVIFTKRTATLRKHSGQIAFPGGSIDPADISPEMAAIRETEEEIGLAGSFVETVGRLPNYLASTGFRITPVLGVISPGFALTLNPTEVDDVFEVPLSFLMDPANHTRDRRVIDGIDRHFYRVPYETRMIWGITAGIVRTLYERLYA

SEQ ID NO: 6148 - protein, 346 aa, Rhizobium leguminosarum bv. viciae 3841
MTKYKLEYIWLDGYTPVPNLRGKTQIKEFDVFPTLEQLPLWGFDGSSTQQAEGRSSDCVLKPVAIYPDPARTNGALVMCEVMMPDGVTPHASNARATILDDEDAWFGFEQEYFFYQNGRPLGFPEQGYPAPQGPYYTGVGYSNVGDVAREIVEEHLDLCLAAGINHEGINAEVAKGQWEFQIFGKGSKKAADQIWMARYLLQRLTEKYGIDIEYHCKPLGDTDWNGSGMHCNFSTKYMREVGGKAYFEALMAQFDKNLMDHIDVYGPDNDKRLTGKHETAPWNKFSYGVADRGASIRVPHSFVKNDYKGYLEDRRPNSQGCPYQIASQVLKTISEVPTASSASAAA

SEQ ID NO: 6149 - protein, 463 aa, Rhizobium leguminosarum bv. viciae 3841
MANIENSAGKPDAGLVRKGLTEALFAAVLSFGMFVLYVGLKTDQNISNELIIVQRWGLLAIFVAVAAIGRFAMVVFIRPNIDRRKLSKAREGELDISTEKSFFHRHFLKIALIALLLYPMVVVAIKGPQGSLTYVDNFGIQILIYVMLAWGLNIVVGLAGLLDLGYVAFYAVGAYSYALLSSYFGLSFWVLLPLSGIFAALWGVILGFPVLRLRGDYLAIVTLAFGEIIRLVLINWTDVTKGTFGISSIPKATLFGIPFDATAGGFAKLFHLPISSAYYKIFLFYLILALCMLTAYVTIRLRRMPIGRAWEALREDEIACRSLGINTVTTKLTAFATGAMFAGFAGSFFAARQGFVSPESFVFLESAVILAIVVLGGMGSLTGIAIAAIVMVGGTELLREMSFLKLIFGPDFTPELYRMLIFGLAMVVVMLFKPRGFVGSREPTAFLRERKAISGSFIKEGHG

SEQ ID NO: 6150 - protein, 291 aa, Rhizobium leguminosarum bv. viciae 3841
MNIGFIGLGVMGRPMAEHLIDAGHTLHLSRVKEISQHLVDKGGKAAASARAVAHASDIVILMLPDTPDVEAVLFGEEGVAAGLSQGKLVIDMSSISPVATKAFAERIEALGCDYLDAPVSGGEVGAKAASLTIMVGGKEQIFERARPLFEKMGKNITHVGGSGDGQTAKVANQIIVGLTIEAVAEALLFARKAGADPAKVRSALMGGFAASRILEVHGERMVKETFEPGFRIRLHRKDMTLAVDAARALDLSLPNTAATQQLMNAAIANGDGERDHSALIRTLELLAGGPR

SEQ ID NO: 6151 - protein, 392 aa, Rhizobium leguminosarum bv. viciae 3841
MASTDLLLTFNAGSSTVKIGIFATEGTEATRIGKGVIDFRAEPLSLSLTKGPQIIEMPLKAEVTEDLHGVIDETLALLADHFDMTATRAAGHRVVHGGDRFTRAIALDAAATDAVDALTPLAPLHQPQALRFIRALKHLKPHLVQTASFDTAFHATQDDLIRRFAIPRALHDEGIKRYGFHGLSYKFIAGELRRKAPHAAKVVVAHLGSGASLCALDEGVSRDCSMGFSTLDGIPMATRTGWLDPGVILHLADQRKQSFEEIEDLLYHRSGLLGVSGISADTRDLLKDDRPQARQAIDLFTLRIAGEIGRMAATLNGLDTLVFTAGIGEHQSEIRAGVAKRSSWLGLAIDEKANAANDFTISTRKSRIAAHVIATDEEQVIADEALSILRGG

SEQ ID NO: 6152 - protein, 531 aa, Rhizobium leguminosarum bv. viciae 3841
MAPRVLVSDELSETAVQIFRDRGVEVDFEPQLGKDKDRLLEVIGKYDGLAIRSATKVTEKIIEGATNLKVVGRAGIGVDNVDIPAASRRGIIVMNTPFGNSITTAEHAIALMFAVARQLPAADTSTQAGKWEKSKFMGVEITGKTLGVIGAGNIGSIVCARAIGLKMHVVAYDPFLSKERAEEMGVTKVELEELFARADFITLHVPMTDKTRGILNKEALAKTKPGVRIINCARGGLVDEAALAEAIKSGHVAGAAFDVFEVEPAKESPLFGLPNVVCTPHLGASTTEAQENVALQVAEQMADYLVNGAVSNAINMPSITAEEAPILKPFIRLADVLGAFVGQVTEEPIKEIEILYDGLTANMNTRALTSAVLAGLIRPQVSDVNMVSAPIMIKEKGVVLSEVKRDKTGVFDGYIKLTVTTDSMTRSVAGTVFSDGKPRFIQIKGINLDADVGSHMIYITNTDVPGMIGFIGTTLGAAGVNIANFQLGRDKQGGDAIALLYVDGKVDDAVLAELTAHQAVRQAKPLTFNID

SEQ ID NO: 6153 - protein, 643 aa, Rhizobium leguminosarum bv. viciae 3841
MNPNLRNFALWAIIALLLIALFSMFQTAPAQTGSREIPYSQFLREVDAGRVKDVVVTGNRLSGSYVENGTTFQTYSPVIDDSLLDRLQSKNVLVSARPETDGSSGFLSYLGTLLPMLLILGVWLFFMRQMQGGSRGAMGFGKSKAKLLTEAHGRVTFEDVAGVDEAKQDLEEIVEFLRDPQKFQRLGGKIPRGVLLVGPPGTGKTLLARSVAGEANVPFFTISGSDFVEMFVGVGASRVRDMFEQAKKNAPCIIFIDEIDAVGRHRGAGLGGGNDEREQTLNQLLVEMDGFEANEGVILIAATNRPDVLDPALLRPGRFDRQVVVPNPDIVGRERILKVHARNVPLAPNVDLKILARGTPGFSGADLMNLVNEAALMAARRNKRVVTMQEFEDAKDKIMMGAERRSSAMTEAEKKLTAYHEAGHAMTALNVAVADPLHKATIIPRGRALGMVMQLPEGDRYSMSYKWMVSRLCIMMGGRVAEELTFGKENITSGASSDIEQATKLARAMVTQWGFSDQLGQVAYGENQQEVFLGHSVSQSKNVSEATAQKIDNEVRRLIDEAYTQARKILTEKHDEFVVLAEGLLEYETLTGEEIKALIRGEKPSRDLGDDSPPSRGSAVPKAGARPATKGDEPEGGLEPQPH

SEQ ID NO: 6154 - protein, 600 aa, Rhizobium leguminosarum bv. viciae 3841
MAEQARAEENKKRSLRPLGRLTPYVMRYRGLVAGALMSLALAAITSLALPLAVRRMIDHGFTQSDGRFINSYFAMLMVMAIVLAVASALRYYFVITIGERIVADLRRDVFSHVTRLSPSFFDVNQSGEIVSRLTADTTQIKSAVGATASVALRNLILCIGAMGMMIVTSPKLSSLVIGAIPLIVFPLVAFGRSVRKRSRAAQDTLADASAFANETIAATRTVQAFNGEDAAATRYGTAVESAYEAARAAIRSRALLTGIAITLIFGSVVAVLWFGAHSVLAGTLSAGTLGQFLLYAVISAGSLGALSEVWGELSQAAGAADRLTEILDEVSPITAPASPEPLPSPSRGRVEFSGVHFAYPSRPGKSALHGLSFAITPGETVAIVGPSGAGKSTVFSLLLRFYDPQQGSVKIDGVDAQLTTPDELRQRIAIVPQDVTIFAASIHDNIAFGRPGASRDEVRAAALAAQADEFIARLDQGYETEVGERGITLSGGQRQRIAIARAILKNAPVLLLDEATSALDAESETLVQKALDGLVDGRTTLVIAHRLATVLKADRILVMDQGRVVEEGTHQSLIRHGGIYARLARLQFDAANEDVLAAAK

SEQ ID NO: 6155 - protein, 331 aa, Rhizobium leguminosarum bv. viciae 3841
MNRRAINLVENSVLESAKRTIESERRGLEALEQAFDNGLAGPFTRAVEVIGDISGRVIVTGVGKSGHIGAKLAATFASTGTPAFFVHAAEANHGDLGMIARDDVVLAISKGGESAELKSIISFTRRFSIPLIAITCSEGSSLAAAADIVLLIPNEQEACPNGLAPTTSTLMQLAIGDALAVALLEARGFTATDFHVFHPGGKLGASLMHVADIMHTGERLPLVAKGTPMPEAITVLSRKHFGCVGVLDEDGRLCGIVTEGDMARNLTRNLAELSVDDIMTRTPKTVRPTVLATAALALLNQHHIGALIVIDDDRRPVGLVHFHDLLRIGVA

SEQ ID NO: 6156 - protein, 382 aa, Rhizobium leguminosarum bv. viciae 3841
MGNIVFVARENTGEETRVAASAETVKKMKSFGFDVVVEAGAGAASRIPDGEFEAAGARIGSFADAASADVVLKVRRPSGSEISGYKSGAVVIAIMDPYGNDEAIAALASAGLSAFAMELMPRITRAQSMDVLSSQANLAGYQAVIEAAAVYDRAMPMMMTAAGTVPAAKVFVMGAGVAGLQAIATARRLGAAVSATDVRPAVKEQVASLGAKFIAVEDEEFKAAETAGGYAKEMSADYQSKQAALVAEHIAKQDIVITTALIPSRAAPRLVSRAMLASMKSGSVAVDLAVERGGNIEGVVPGEIADVEGVRVIGFANMPGRVSASASALYAKNLVTFLETMVNKETRSVVVNLDDELVKATMLTYAGDVVHPAFGGAKKGDI

SEQ ID NO: 6157 - protein, 318 aa, Rhizobium leguminosarum bv. viciae 3841
MSRIAILVPGKIHERVLDRLKDRFEIIAVPREGTLALDGEIAGRIRGVAVSGSFPGAWMDQLPHAEVIANFGVGYDGVDVKHAAEKGIVVTNTPDVLNDEVADTAIGLLLSTVRELPRAEAWLRAGNWKPGTAYPLSRFSLKGRHVGLYGLGRIGLEIAKRLEPFKVKISYHTRSRHADVSYDYHPTLRGLADAVDTLIAIVPKTPQTHKTIDADILAALGPDGILVNVGRGWTVDEEALSAALASGALGAAGLDVFYEEPTVPADLLEPTNAVLLPHVASASVPTRNAMADLVADNLIAWFEKGAALTPVPETPQKA

SEQ ID NO: 6158 - protein, 424 aa, Rhizobium leguminosarum bv. viciae 3841
MARIVMKFGGTSVADLDRIKNVARHVKREVDAGHEVAVVVSAMSGKTNELVGWVQGTPKVIGANSPFYDAREYDAVVASGEQVTSGLLAIALQAMDINARSWQGWQIPIRTDNAHGAARIMEIDGSDIVKRMGEGQVAVISGFQGLGPDNRIATLGRGGSDTSAVAIAAAVKADRCDIYTDVDGVYTTDPRIVPKARRLKKIAFEEMLEMASLGAKVLQVRSVELAMVHKVRTFVRSSFEDPDAPGMGDLLNPPGTLICDEDEIVEQEVVTGIAYAKDEAQISLRRLADRPGVSAAIFGPLAESHINVDMIVQNISEDGSKTDMTFTVPSGDVEKAIKVLGDHKEKIGYDVVQNESGLVKVSVIGIGMRSHAGVAATAFRALAEKGINIKAITTSEIKISILIDGPYAELAVRTLHSCYGLDKN

SEQ ID NO: 6159 - protein, 454 aa, Rhizobium leguminosarum bv. viciae 3841
MSNSQPTLAKSLTGLHLWGLAVGLVISGEYFGWSYGWAAAGTLGFLITTILIAVMYTTFIFSFTELTTAIPHAGGPFAYALRAFGPLGGFVAGFATLVEFVFAPPAIALAIGAYLNVQFPGLDPKMAAVGAYIIFMALNIVGVTIAATFELFITVLAIAELLIFMGVVAPGFSFANFAANGWAGAPEFSVGAIGGIFAAIPFAIWFFLAIEGAAMAAEETKNPTRTVPIAYIAGILTLVFLAFGTMIFAGGVGDWRTLSNINDPLPQAMKAVVGESSGWLHMLVWIGLFGLIASFHGIIMGYSRQIFALGRAGYLPEVLAKIHPKFRTPYLAVLAGGAVGIAAIFSDSLIQIGGLPLTANIVTMSVFGAIIMYIVSMASLFKLRRAEPELARPFRAWGYPVVPAIALGLALVALAAMIYYNFLIFVIFLAMGVVAFGIWRLLSGGIAKEAAAST

SEQ ID NO: 6160 - protein, 311 aa, Rhizobium leguminosarum bv. viciae 3841
MNAQSRSVTLIGAPLEEGSGRRGAAMGPAALRIAGVDQTLIELGHDVADIGDLRIVPAMDLPNHPKAHNLRIVGAFTRALESSVHDVAASGRFPLILGGDHSLSMGSVSGMARYAAGKGRPLFVLWLDAHADFNSPATSPSGNIHGMPVAFFCGEAEFAEILPKDRPFVDPKNVFQVGIRSVDAREREEIHEHGVNVFDMRAIDEQGIGAIMREILDVVIKANGLLHVSLDLDFLDPEIAPGVGTTVPGGATFREAHLVMEMLSDSGLVSSLDLVELNPFLDDRGKSARILVELTASLFGRRIFDRPTRAA

SEQ ID NO: 6161 - protein, 323 aa, Rhizobium leguminosarum bv. viciae 3841
MAASVFKDGDSRKWPFADPATFLDARFIENGLQPEVLEALDVALIGVPMDLGVTNRAGARLGPRAVRAIERIGPYEHVLRVAPMGGLKVADVGDVPMRSRFGLAECHADIEACYRMIAATGVIPLSVGGDHSISGAILKGLAASQPVGMIHIDAHCDTAGPYEGSKFHHGAPFREAVLAGVLDPKRTIQIGIRGGGEYLWEFSFASGMTVIHAEEVAEMGLKAVITKALEVVGTGPTYLSFDVDSLDPAFAPGTGTPEVGGLQPREALTLLRGFKGINLVGGDVVEIAPQYDNTTNTAQIAAQVLFELLCLATFSPAVRTKLT

SEQ ID NO: 6162 - protein, 407 aa, Rhizobium leguminosarum bv. viciae 3841
MASYKDVKKVVLAYSGGLDTSIILKWLQTELGAEVVTFTADLGQGEELEPARKKAEMLGIKEIYIEDVREEFVRDFVFPMFRANAVYEGVYLLGTSIARPLISKHLIDIAKKTGADAIAHGATGKGNDQVRFELSAYALNPDIKIIAPWRDWAFKSRTDLLAFAEQHQIPVAKDKMGEAPFSVDANLLHSSSEGKVLEDPSQEAPEYVHMRTISPEAAPDKATTIKVGFEKGDAVSINGVRMSPATLLAALNNYGRDNGIGRLDLVENRFVGMKSRGVYETPGGTILLTAHRAIESITLDRGAAHLKDDIMPRYAELIYYGFWFSPEREMLQALIDKSQEHVEGEVTLKLYKGNVMVIGRESDKSLYSDKLVTFEDDQGAYDQKDAAGFIKLNALRLRTLAKRNLVK

SEQ ID NO: 6163 - protein, 475 aa, Rhizobium leguminosarum bv. viciae 3841
MSISKFSSTFARVCAASAALLAPAVAFAQEAAPAATAAAAPALTMDKGDNTWMLVSSALVLLMTIPGLALFYGGLVRAKNMLSVLMQVFMITAVVALIWVTYGYSLAFTDGGSLNSFVGGFSKAFLAGVNTSSLVETFSKGVAIPEYTFIVFQMTFACITPGLIVGAFAERVKFSAVMLFVVLWVTFIYFPMAHMVWFWGGPSSYTSPAGLIFSYGAIDFAGGTVVHINAGIAGLVGAIMLGKRTGYKKEIMAPHSMTLTMVGASLLWVGWFGFNAGSNLEANAYASLAFINTFVATAAAAVSWCIVESLTRGKASMLGGASGAVAGLVAITPAAGFAGPMGAIVLGLIVSPVCYFFVDVVKNKFNYDDSLDVFGVHCIGGIIGALGTGILVNPALGGAGIVDYSTADFAASYAGTATQVWNQAKGVLTTLLWSGIGSAILFKIVDVVIGLRVTVEAEREGLDLSTHGEAAYHSS

SEQ ID NO: 6164 - protein, 393 aa, Rhizobium leguminosarum bv. viciae 3841
MSNPSIVIASAGRTAVGAFNGAFATVLAHELGAAVIKGALERAGVDAGEVDEVILGQVLAAGEGQNPARQAAMKAGIPQEATAWGVNQLCGSGLRAVALGMQQIATGDAKIIVAGGQESMSMAPHAAHLRGGVKMGDMKMIDTMIKDGLTDAFHGYHMGITAENVARQWQLSRDDQDQFAVSSQNKAEAAQKAGRFTDEIIPYVIKTRKGDVTVDADEYIRHGATIEAMGKLRPAFDKDGTVTAANASGLNDGAAVAVLMSEAEAVRRGIQPLARIVSWATAGVDPQIMGTGPIPASRKALEKAGWSVNDLDLVEANEAFAAQACAVTKDLGWDPSIVNVNGGAIAIGHPIGASGARVLNTLLFELKRRGAKKGLATLCIGGGMGVAMCFEAL

SEQ ID NO: 6165 - protein, 105 aa, Rhizobium leguminosarum bv. viciae 3841
MFAVIKTGGKQYRVAANDVLTIEKLEATAGDSIEFTEVLVIGEGADAAIGAPFVTGASVKAEVVEQNRGKKVIAFKKRRRQNSKRSRGHRQHHTVVRITDIVAAK

SEQ ID NO: 6166 - protein, 364 aa, Rhizobium leguminosarum bv. viciae 3841
MKFLDEAKVYIKSGDGGGGSVSFRREKFIEFGGPDGGDGGRGGDVWVEAVNGLNTLIDFRYQQHFKATIGTHGMGRNRTGANGSDVTLKVPVGTQIFEEDQETLICDLTVEGQRYCLAHGGNGGFGNAHFKTSTNQAPDWANPGLPGEEKTIWLHLKLIADAGLVGLPNAGKSTFLASVTRARPKIANYPFTTLHPNLGVATIDEREFILADIPGLIEGAHEGVGIGDRFLGHVERTRVLLHLISAQEEKVGKAYKTVKHELEAYGNELTDKAEIVALSQIDVLDDAELKKKTKELAKACGKTPFQISAVTGKGMTEVLRALRDIIVEANTEEKPAKVPKLRHRDMVVTDEGEDKGGDEGDDQP

SEQ ID NO: 6167 - protein, 395 aa, Rhizobium leguminosarum bv. viciae 3841
MTLQDPIVIVGAARTPIGSFQGELKEATAPELGATAIRAALQRSGVEAATIEEVVFGCVLPAGQGQAPARQAAIHAGLPFATAASTVNKMCGSGMKAVMMAHDLIAAGSASVAVAGGMESMTNAPYLLDKARGGYRLGHGRVVDHMFLDGLEDAYDKGRLMGSFAEDCAEAYQFTREAQDSYAIASLARAQKAIAEGCFDSEIAAVTVKSSKVEQVASRDEQPGKAKLDKIPTLKPAFREGGTVTAANSSSISDGAAALVLMRRSEAEHRGLKPLATILGHATHSQAPNLFATAPIGALQKLSDRTGLPLSEVDLFEINEAFAVVAMAAMRDLNLPHEKVNVHGGACALGHPIGASGARILVTLLAALERYDLKRGMAALCIGGGEATAVAIERQ

SEQ ID NO: 6168 - protein, 449 aa, Rhizobium leguminosarum bv. viciae 3841
MCPNSASRGNLRMTKNLQTGIFTTGITRRSMLKTTAAAALISAVKTAFPSGAFAAGAGPEVTGVKLGFIALTDSAPLIIAKEKGFFDKHGLPETDVAKQASWGATRDNLVLGGAANGIDGAHILSPLPYLMHTGKVTQNNKPVPMAILARLNLDSQGISVAKEYAETGVQLDSSKLKAAFEKKKAEGKEIKAAMTFPGGTHDLWIRYWLAAGGIDPNKDVSTIVVPPPQMVANMKVGNMDVFCVGEPWNEQLVNQGIGFTAATTGELWKGHPEKALGLRAEWIEKNPNAAKALLMAVMEAQQWCESMDNKAEMADILGKRQWFNVPTKDVLGRLKGDINYGNGRDVKATDLYMKFWKDGASYPFKSHDSWFMTENIRWGNLPASTDIKALVNQVNREDIWREAAKDLGVAAADIPASSSRGKETFFDGKVFDPENPSAYLDSLSIKAVS

SEQ ID NO: 6169 - protein, 351 aa, Rhizobium leguminosarum bv. viciae 3841
MVWDKTRLEQLRAEFADANGGEIFDEKFRKVAEKIISKSGTRLAPYAGVPTFLSAPYMQVAAEDPDFGNLQVAITGIPMDLGVTNRPGSRFGPRALRAIERIGPYNHVLATAPVFDLRVADIGDVPFQSRYRLELSHDDIEKRIGQIVDAGVAPLSVGGDHSISHPILKAIGRQQPVGLIHIDAHCDTSGAFDQTKFHHGGPFRNAVLDGVLDPTRTIQIGIRGSAEYLWEFSYASGMTVIHAEDISGMGIPAVIAKAKSIVGDGPTYLSFDVDSLDPSFAPGTGTPEVGGLTTREVLELIRGLKGINLVGGDVVEVAPQYDATTNTAHAAAQVLFEILSLMVFSPSIGKR

SEQ ID NO: 6170 - protein, 307 aa, Rhizobium leguminosarum bv. viciae 3841
MMAGAYPEWDMVDLEANYRIHRLWEATDRQELISRVGKDIRAIATRGELGASAELMAQLPKLEIVSCYGVGTDAIDLSYARANGIRVTNTPDVLTEDVADIALGLLLATARQIPQADVLVRSGQWGSVAMPLVTRVSGKKVGIAGMGRIGKAIARRAAAFGCDISYFARHNHKDVAYAYEPDLIALADWADFLIVIVPGGEATMKIINAEVLKALGPNGILINVSRGTTVDEEALIAALQDRTIQAAGLDVFLNEPKIDARFLTLGNVVLQPHHGSGTVETRKAMGQLVRDNLAAHFAGSPLPTPVV

SEQ ID NO: 6171 - protein, 491 aa, Rhizobium leguminosarum bv. viciae 3841
MTTDINGTALAVFIFFFVLVTVMGFVASRWRKPETLAHIDEWGLGGRNFGTWITWFLVGGDFYTAYTVIAVPALVYTVGAYGFFALPYTIVVYPFVFMVMPVLWKRAKDFGYVTAGDVVHGQYGSRGLELAVAATGVIATMPYIALQLVGMTAVLKALGLHGELPLAIAFIVLALYTYSAGLRAPALIAFVKDIMIYIVVIAAVALIPSKLGGYANVFASADAAFQAKGSGNLLLGGNQYVAYATLALGSALAAFMYPHTLTGIFASNSGKTIRKNAIMLPAYTLLLGLLALLGYMGHAANLKLDSANDVVPTLFKTLFSGWFSGFAFAAIAIGALVPAAVMSIGAANLFTRNFWKAYVDPDVSDAGEAKVAKITSLVVKVGALLVIIFLPTQFALDLQLLGGIWILQTLPALVFGLYTNWFRAPGLLAGWFVGFGGGTFLVWDAGWKPLHLISLGGEPFTVYTGLLALAANIAVAVVVNALLPAKAPVRA

SEQ ID NO: 6172 - protein, 400 aa, Rhizobium leguminosarum bv. viciae 3841
MSVIADRLKNVSISASAAMTQRARELAAKGIKVVSLSSGEPDFPTPAHAIEAAHAAALAGDTKYPPMDGTPALKSAIIRKFKRDNNLDYDASQIVVSGGGKQVIFNAMLATCNPGDEVVIPTPSWVSYADIVKFAGGVPVAVPCHEQNGFKLRPEDLEAAITPRTKWLFLNFPNNPTGAACSRAEMAAIAEVMLRHPDVWIMTDDIYEHLVYDDFQFCTIAEVEPRLYERVLTMNGVSKAYAMTGWRLGFCAGPKELISAVSNVNGQNGGGIATLTQAAATAALDGPQDLLKERAAIYKERRDFVLDRLSEVEGLRCHRPEGAFYIYPNISGLIGKTSKGGRRIETDVDFVMALVEEHHVATVQGAAYGMSPFFRISYATSMEKLGEGCARIAQFCKDMR

SEQ ID NO: 6173 - protein, 524 aa, Rhizobium leguminosarum bv. viciae 3841
MRIGTPREICADEARVAMTPDSAAHLQKLGHTCLIESGAGLLAGFTDEAYRDAGVEIVESATELFRSADVIAKVRPPELIEIDSIDAGKTMISFFYPAQNDVLLARAIDRGVNVIAMDMVPRISRAQKMDALSSMANIAGYRAVIEAGSNFGRFFTGQVTAAGKVPPAKVLVIGAGVAGLAAIGTATSLGAITYAFDVRPEVAEQIESMGAEFVFLDFGDQQQDGAASGGYATPSSPEFRQKQLDTFRSLTPEIDIVITTALISGRDAPKLWLADMVAMMKPGSVVVDLAAERGGNCELTVEGTRIVSGNGVIVIGYTDFPSRMATQSSTLYATNIRHMLADLTPARDGILVHNMEDDVIRGATVAFESAVTFPPPPPKVQAIAVQKVKQKPKEPSREERRQREAAAFRAQTRSQVALLAFATLLLLVAGAYAPASFMNHLIVFALSCFIGFQVIWNVSHALHTPLMAVTNAVSGIVILGALLQIGSASIPVTILASIAVLISTINIVGGFFVTRRMLAMFQKS

SEQ ID NO: 6174 - protein, 353 aa, Rhizobium leguminosarum bv. viciae 3841
MTIYNIALIGFGGVNRALTELIAAKNQLWERDLGFRLNIVAVSDLYLGSVISPNGLDAKTLVDAKFEKGGFGQLSGGSAEADNETIIKTAPADIVVEATYTNPKDGEPAVSHCRWALETGKHVVTTNKGPVAIAAPALKAFAKTNGVRFEYEGAVMSGTPVIRMAERTLAGAELKGFEGILNGTSNFVLGRMESGLDFASAVKEAQKLGYAEADPTADVEGFDVRLKVVILANELLGANLKPEDISCKGVSGLSLSDIEEAAKANSRWKLIGAAVRNDDGSVTGSVSPKRLGLDHPLAGVNGATNAVSLDTELLGAVTITGPGAGRIETAYALLSDIVAIHSAGASSTAKEAA

SEQ ID NO: 6175 - protein, 276 aa, Rhizobium leguminosarum bv. viciae 3841
MFKSMLTRRNAMLGAAALVAAVTLAQPAAAITPDEIKARGKIIVGIQGDNPPWGFVTSGGKQDGLDADIATLFAKELGVAVEFVPLEVNNRIPALTAGRVDVLFATMAMLPDRAKAVQFSKPYVANAIVLIGPKSAEIKTNDDMAKFTVGVAKGAAQDTQVTKNAPPSTTIRRYDGDAASVQALVSGQVETLGGNIFYMDRVEKARPGEFENKLEFQKLYNGACTRLGEKEINAALNTFIDKIKANGELKAVYDKWMKVPVPEFPETLEGIPFAAN

SEQ ID NO: 6176 - protein, 401 aa, Rhizobium leguminosarum bv. viciae 3841
MTEAFICDYIRTPIGRFAGSLSQVRADDLGAIPLKALMQRNAAVDWEAVDDVIFGCANQAGEDNRNVARMSALLAGLPIAVPGTTINRLCGSGMDAVITAARAIRSGEAELMVAGGVESMSRAPFVMPKAETAFSRAAEIHDTTIGWRFVNPLMKKQYGVDSMPETGENVAEDYHVSREDQDAFAVRSQAKAAAAQANGRLAKEITPVVIPQRKGDAVIVDKDEHPRATTIETLAKLATPFKREGGTVTAGNASGVNDGAAALIVASEAAARKYGLTPIARILGGAAAAVPPRVMGVGPIPASRKLMARLGVTADQFDVIELNEAFASQGLAVLRALGIADDDARVNRNGGAIALGHPLGMSGARITGTAALELLETGGKYSLSTMCIGVGQGIAIALERV

SEQ ID NO: 6177 - protein, 578 aa, Rhizobium leguminosarum bv. viciae 3841
MGLPRDITWQGKIVNTAIWKTPVDGTRMVRRLNVDGDGQGDLAGHGGERRAVFVYQIDSYRYWQEQLRRDDFVYGQFGENFTVDGLPDTEVCIGDRFRIGGALFEVTQPRVTCYRLGIRMDEPEMAALVVKHGRPGFYFRVLEEGEVQAGDEITKVASGPEGMSVFEINALLYMPGHPRDQLERALRIPALSPGWRHSFEALLKQERKQGAPTGNDGLTATSGPPPAWRGFRPLRVSRKVRESGSVVSLVLEPADGQPVAAALPGQFVVLRLGPASAPALMRSYSLSGEPSATRYRVSVKREADGTASGYIDDELQVGDIVQASAARGSFTLRPGDTPVVLMSAGIGVTPVLAMLHVLAAEASTREVWWLYGTRNGREHPFAEEARGLLKALAHHHSHICYSSPEPMDRPDIDFDARGHLDAQALKSLNLPRDCDVYVCGPSSFMSDLSVGLAALGIAPDRIHTEMFGAGPSITPGIVASSRRPPHLPAGPPGSGPLVSFARTGLNVRWDQTFQSLLELAEACDVPVRWSCRTGVCHTCETGLVEGSVGYRPDPVDAPADGNVLICCAKPEGDIVIDL

SEQ ID NO: 6178 - protein, 69 aa, Rhizobium leguminosarum bv. viciae 3841
MTTGTVKWFNSTKGFGFIQPDDGGADAFVHISAVERAGMREIVEGQKIGYELERDNKSGKMSACNLQAA

SEQ ID NO: 6179 - protein, 321 aa, Rhizobium leguminosarum bv. viciae 3841
MSGGTEIPVRVTRITPIAERVKRFRFERLDGKPMPYFSGGAHVIVLMNDGGHMRRNAYSLMSPPHDCAAYEISVLHVEDSRGGSTFMHEKLSEGDELKVSYPVNLFQPDWRGRKHLLIAGGIGITPFIAMMEQFSREGANFELHYAIRTRDRGAYWQQLVERYGGHRIKIYCDAEGDAIPLTRLLGSQPLGTHLYVCGPSGMIDGVLKTGLDAGWPEQNLHSERFLSSLPGKPFAIELLRSGKTVKVGHHESMLEAIEAAGVDAPFLCRGGACGQCETGVVTCDGKLLHHDVYLTSEEKASGRKVMICVSRFEGNTLHLDL

SEQ ID NO: 6180 - protein, 157 aa, Oryza sativa Indica Group
MGFISFVGRVLFASIFLLSAYQEFSEFGTDGGPAAKALKPKFNLFMQQVSKSLGMAVPHIDIKTVIAATMFLKGFGGLLFIISSSFGAFLLLLYLAFITPVVYDFYNYEMESSQFVQLFVKFSQNLALFGALLFFLGMKNSIPRRHSKRRAGKTKTN

SEQ ID NO: 6181 - protein, 229 aa, Oryza sativa Indica Group
MKNKFEILHALIPNLPEKTDKATIVEATINYIKNLQDKIHKMEMLKVEREHAIALATAATATAAASADTALQAPPPSEEENEEHDSVVATATREMALADMVHAWEQQQEAAATGGSHGGHAVPPPPPAASLQTWTGPNMTASLTGDDGFITLSLPHQGSQKNLVAGAVSVLERHHIDVVTATVSASEQGDNLISLHCHMSPGSSSSQNLTPLDKFKLAMSELMLWVISV

SEQ ID NO: 6182 - protein, 663 aa, Oryza sativa Indica Group
MAAAAAAASLSVSDAAAKLPKPGGQVQRRRDRDRPRVDAAACTRDSRRPTRERCSTTVSLAATATATTATPVRAPVRTRAPMGQRKGADIVVEALERCGVRDVFEYPGGASMEIHQALTRSPVIRNHLLRHEQGEAFAASGYARSSGRPGVCVATSGPGATNLVSALADAHLDSVPLVAITGQVPRRMIGTDAFQETPIVELTRSITKHNYLILDIDDIPRVINEAFFLASTGRPGPVLVDIPKDIQQQMAVPSWDAPMRLPGYISRLPKPPAANLLDEVIRLVGDAERPVLYVGGGCSASGDELRRFVELTGIPVTTTLMGIGNFPSDDPLSLRMLGMHGTVYANYAVDNADLLLALGVRFDDRVTGKVEAFASRAKIVHVDIDPSELGKNKQPHVSICADVKLALQGMNAMLEEQSAAAARKNLDFSAWRSELEKKKVEFPLGYRTFGEEIPPQYAIQVLDEVTNGEAIVATGVGQHQMWATQHYTYRRPRQWLSSAGLGAMGFGLPAAAGAAVANPGATVVDIDGDGSLLMNIQELAMVRVEDLPVKVMVLNNQHLGMVVQWEDRFYDANRAHTYLGNPAANGGGEVYPDFVTIAGGFGIPAARVTRKGEVRAAVEEMMAAPGPYLLDVVVPHQEHVLPMIPSNGAFKDIIVDGDGRSSY

SEQ ID NO: 6183 - protein, 425 aa, Oryza sativa Indica Group
MGLHKEASSSSSRLDAAPLLPHHGHGGGGAGHHLSSQPKTFANVFIAVVGSGVLGLPYTFSRTGWVAGSVLLLAVAALTFHCMMLLVACRRRLAYDHPKIASFGDLGAAVCGPAGRHVVDAMLVLSQASFCVGYLIFISNTMAHLYPVGDSSPSSPLLTAKAIFIWVMLPFQLGLNSIKTLTLLAPLSIFADVVDLGAMGVVLGQDVSTWLANKPPVFASAGPTEILYGLGVAVYAFEGIGMVLPLEAEAADKRKFGGTLALSMAFIAVMYGLFGAMGYLAFGAATRDIITTNLGTGWLSVAVQLGLCINLFFTMPVMMNPVYEVAERLLCRKRYAWWLRWLLVMVVGLMAMLVPNFADFLSLVGSSVCVLLGFVLPAAFHLKVFGAEVGWPGLAGDVAVIVVGTALAVSGTWTSLAQIFSSSDV

SEQ ID NO: 6184 - protein, 222 aa, Oryza sativa Indica Group
MAPRNAAEAVAVAVAEGGGDGMEPRFRGVRKRPWGRYAAEIRDPARKARVWLGTFDTAEAAARAYDSAALHFRGPKAKTNFPVAFAHAHHHAPPPPLPKAAALAVVSPTSSTVESSSRDTPAAAPVAAAAKAQVPASPSLDLSLGMSAMVAAQPFLFLDPRVAVTVAVAAPVPRRPAVVSVKKEVARLDEQSDTGSSSSVVDASPAVGVGLDLNLPPPIEEA

SEQ ID NO: 6185 - protein, 508 aa, Oryza sativa Indica Group
MSSEVTSVPPPPVSAPPSQIQSPAAPASSRASPLRGMGTPNIASPVRKAVASVSGYLGEVGQMTRLADPRDAWLPITESRSGNAYYAAFHSFSSGIGFQALVLPVAFSLLGWTWAIICLTVAFAWQLYTLWLLVKLHEPVAGGTRYSRYMYLATTVFGEKWGKILALLPVMYLSAGTCTALIIVGGGSMKLLFNIACGEVCLARPLTTVEWYLVFVCVAALLSQLPNLNSIAGVSLVGATAAVAYCTMIWVVSVAKGRVAGVSYDPVRATDEEDGAIGILNGLGIIAFAFRGHNLVLEIQATMPSTLKHPSHVPMWKGVKAAYVIIALCLYPVAVGGFWAYGDQIPPNGIVSALYKFHSQDVSRVVLGTATLLVIVNCLTTYQIYAMPVFDNMETGYVHKKNRPCPWWMRAGFRALFGAINLLIAVALPFLSELAGLLGGISLPVTLAYPCFMWVAIMRPAKGTAMWYTNWGLGSLGMGLSFVLIVGNLWGLVEKGLHVKFFKPADFQ

SEQ ID NO: 6186 - protein, 317 aa, Oryza sativa Indica Group
MARSMLRNHPEASVLDTIRQHLLEEPRGGGGGEAAEASFGSLVADMWSDSLPFRDDDADDMVVFGAMRDAFSCGWLPDGVFAEVKPEPLLSPDSSSYDGSSCCFGFADVSEPVTPSDAASGAAEAAAAAAAATAEHGKEEEAAAAVARGKHYRGVRQRPWGKFAAEIRDPAKNGARVWLGTFDTAEDAALAYDRAAYRMRGSRALLNFPLRIGSEIAAAAAAAAAAAAGDKRPSPEPATSESSFSSSSSCTTTTTSSSTSSSGSPKRRKRGEAAAASMSMPLVPPPSQLNWPVQAWYPAAAPVEQVAITPRVEQLVI

SEQ ID NO: 6187 - protein, 488 aa, Oryza sativa Indica Group
MSLAADLAAVERGGHMVPSKAAGVDGDGEPRRTGTMWTASAHIITAVIGSGVLSLAWGVAQLGWVAGPAVMLLFGAVIYCCSVLLVECYRTGDPYTGQRNRTYMDAVRANLGGTKVRLCGVLQFANFFGVCVGITIASSISMLAIKRAGCFHVRGHDQREACGGSSRPYMVVYGALQVVFSQIPNLHKMWWLSTLASAMSLSYSAIGIALGVAQIVANGGIRGTITGVFVGAGAGVTSMQKVWRSFQAFGNIAFAYGFSFILLEIHDTVKPVAPPSTETKVMRKAVAVSVATTTAVYLMCGCVGYAAFGNDSPDNLLTGFGFFEPFWLLDLANAGVVVHLVGTYQVVAQPVFAFLDGRAAAGAWPGSAALGKRRRVLRVGSLAEIEVSPFRLAWRTAFVCVTTAASTLLPFFGSMVGLIGAASFWPLTVYFPVEMYIAQRRVPRGSAQWLSLQALSAGCLVVSVAASAGSIAGVVEAFKAHNPFCWTC

SEQ ID NO: 6188 - protein, 396 aa, Oryza sativa Indica Group
MELDRSLIACEEPPSEPMDLLSSAWCSSAIQVLQTGSMDCSMALVENPVMAPENDRRDLLPKNDRSLVVDSSGFSTTQWKYDDLKSWIWLQKAIHPELDYDLKKKWLPRKMAPWSGISLKKWVKERKQKRKEEARLHKAEVHAAVSVAGVAAALAAIAAESSTPAATMKETAVASAAALVAAQCAKVAEAAGATRDQVAAAVNAAVAATDASNVITLTAAAATSLRGAAALRGRRSSGGGGSQNERMDHASSALSQDDLDFDFNYARSKAALAKGDEMFVAMPDGKWKLHTVSAATSKGGKVVMRIKKMNLVMAFSNAKESVIHDVQPCAPEKPSRDEDATYPIEVTTSKGKVELRADDYGVYKRWVTALTHMLAAPTAICKAHELPPPPPPHRRN

SEQ ID NO: 6189 - protein, 450 aa, Oryza sativa Indica Group
MGEESSPAAAPAVEVPSYFMCPISLEIMRDPVTLSTGITYDRESIERWVFTDGHGECPVTKQRLAPADREPTPNHTLRRLIQGWCAVHAVERFPTPRPPVDAARVAAIVDAARPLLRRRRQREELMASLRELADIVAESDRNRRCVQGASGAVEFLLSVVKERTSVAGVDDATSAKPEETTCGGVHDPAKASSPEEAALSILHSLKLSEESFKRVLEDSGGEDFLETMACVLRRPSYLSRMQGIHLLKSALPAMAPARLTSASAALVDGVVGVVADRPSAKAVKVALHVLCRLCPWGRNRVKAVDAGAVSALVRLLLDEGCGGGGGDRRACELAAVAIDHICGCAEGRLALVAHPAGLAAVACAATRLPAAAGAESAVRALHAVARHSATSAVLQEMLAVGVVARLLFLVQVGASGERTRARAREMLKMHARVWRDSPCLASHLNASYPR

SEQ ID NO: 6190 - protein, 470 aa, Oryza sativa Indica Group
MAPQLPLEVASAPKLDDDGHPQRAGNLWTCVAHIITAVIGCGVLALSWSVAQLGWVAGPIAMVCFAFVTYISAFLLSHCYRSPGSEKMQRNYSYMDAVRVHLGRKHTWLCGLLQYLNLYGIGIAYTITTATCMRAIKRANCYHSEGRDAPCDSNGEHFYMLLFGAAQLLLSFIPNFHKMAWLSVVAAIMSFAYSTIGLGLGLAKTIGDGTVKGNIAGVAMATPMQKVWRVAQAIGDIAFAYPYTIVLLEIQDTLRSPPPESETMQKGNVIAVLATTFFYLCVGCFGYSAFGNAAPGNLLTGFGFYEPYWLIDFANACIVLHLLGGYQMFSQQIFTFADRCFAASFPNSAFVNRSYSVKILPWRRGGGGGGGAGRYEVNLQRVCFRTVYVASTTGLALVFPYFNEVLGVLGALVFWPLAIYLPVEMYCVQRRISPWTPRWAALQAFSVVCFVVGTFAFVGSVEGVIRKRLG

SEQ ID NO: 6191 - protein, 378 aa, Oryza sativa Indica Group
MKLVYRNLARNGPGSVKLVPEEEDDLWHAYNLIVPGDTLQSVTVRKVLREMASGGRDAERVRLKLEIVVESVDYDKEGSVLRVRGKNITENDHVKIGQFHTMELELKRQFTLTKELWDWLALDTIQQACDPTASADLAVILMQEGLAHLFLIGRSITVTRARIETSIPRKHGPAIAGYESALKKFFEHVLQAFLKHIDFEVVQCAVIASPGFTKDQFRDYMHLEAARRDLRLIIENKQRIVLAHAPSGYKHSLKEVLDSPSVMTLIKDTKAAQEVQALKDFFNMLTNDSARACYGPKHVEIANERLAIQTLLITDNLFRNSDIATRQNYVRLVESVKKFGGTVHIFSSMHVSGEQLAQLTGIAAILRFPLPDLEDIEM

SEQ ID NO: 6192 - protein, 213 aa, Oryza sativa Indica Group
MAITRRHPPLLLLFLAVAAAATIAGASQSTRPRPAVSPAAAADFVRRSCRATRYPQVCERSLMPQAPAVGRSPRLLAQAALTVGADRARSCSGYLGGGGSSSSSKRSGGGGRGGAVGDCADTLRDAEERLRQSAAEMSRMGRSGSPRFAWRLSNVQTWASAALTDASTCLDSLATYAAPGIDVDALRKRVVAVSQATSNALALVNNLDPHHHL

SEQ ID NO: 6193 - protein, 333 aa, Oryza sativa Indica Group
MTSAVAAPPATGGKRPVLLLRRINDRLAAELRSRFRVLNFYESGAPLLAFLAAAAAGPDPPLAAVVVAGGAIQVNAAFLDAVPSLGCVVTTGAGVDHIDLAECARRGVAVAGAGTVFSTDVADHAVGLLVDVLRRISASDRYVRRGLWPARGDYPLGSKLSGKHVGIIGLGSIGSLIAKRLQAFGCTISYNSRRPKDSVSYNYFPDVTDLAAASDVLIVACALNDETRHIVDSSVLEALGKDGVVVNIARGGIVDEAELIRALKEGRIAGAGLDVFEKEPDVPAELLSMDNVVLTAHEAVFTTESNWDLADLMIANLEAFFSGGPLLTPVLPK

SEQ ID NO: 6194 - protein, 326 aa, Oryza sativa Indica Group
MSSPPVLLLCRLFPGTFTDVAHRFRLLDFYASALPIHAFLAAVAAHADPPRVVLVFGGGPIPVGAELLDAVPSLRCIITVSAGTNHIDLRECARRGVQVANAGGIYSTDVADYAVGLLLDVLRHVSAGDRFVRRGLCPEQRGGDFLPLGSKIGGRRVGIIGLGSIGSAIARRLEAFGCVVSYHNRRRREDVAYAYFPTATDLAASSDVLVVACALTAETRRIVDRGVLDALGERGVVVNVARGASVDEAELVRALAEGRVAGAGLEVFDDEPNVPPELWAMDNVVLTPHQAIFTPESMADLSRVVLANLDAFFAGEPLLTRVEASE

SEQ ID NO: 6195 - protein, 316 aa, Oryza sativa Indica Group
MVAPSPDAGKPLVILPRPLYPEFAAALDGRFRFVLAADADEGNAAEARAVLVPALTPVSADLVARLPKLEIVVATSTGVDHIDLDACRRRGISVTNAGEVFAPDVADYAVGLVVAVLRRVAAAEAYLRRGRWAADGDYPLATKVSGKRVGIVGLGSIGGLVARRLAAFGCVIAYNSRSPKASAPYKFYPSVRELAAESDVLVLSCALTEETRRMVGREVMEALGKGGVLVNVGRGGLVDEAELVRCLREGVLGGAGLDVYENEPEVPPELWGMDNVVLSDHRAVITPESIQGVVDVVKANLDAFFSGKPLVSQVQL

SEQ ID NO: 6196 - protein, 498 aa, Oryza sativa Indica Group
MATCAADLAPLLGPVAANATDYLCNRFADTTSAVDATYLLFSAYLVFAMQLGFAMLCAGSVRAKNTMNIMLTNVLDAAAGALFYYLFGFAFAFGTPSNGFIGKQFFGLKHMPQTGFDYDFFLFQWAFAIAAAGITSGSIAERTQFVAYLIYSAFLTGFVYPVVSHWIWSADGWASASRTSGPLLFGSGVIDFAGSGVVHMVGGVAGLWGALIEGPRIGRFDHAGRSVALKGHSASLVVLGTFLLWFGWYGFNPGSFTTILKTYGPAGGINGQWSGVGRTAVTTTLAASVAALTTLFGKRLQTGHWNVVDVCNGLLGGFAAITAGCSVVDPWAAIICGFVSAWVLIGLNALAARLKFDDPLEAAQLHGGCGAWGILFTALFARQKYVEEIYGAGRPYGLFMGGGGKLLAAHVIQILVIFGWVSCTMGPLFYGLKKLGLLRISAEDETSGMDLTRHGGFAYVYHDEDEHDKSGVGGFMLRSAQTRVEPAAAAASNSNNQV

SEQ ID NO: 6197 - protein, 474 aa, Oryza sativa Indica Group
MATTTHLHLPNPIPPRLHASPPARLRASASLAHPRLLSGLRLAAARPRPRHGRRAMSVTVRSSLIDPDGGALVDLVAAPERRAALRGEAEALPRVRLAAVDVEWAHVLAEGWASPLRGFMREHEYLQSLHFNCIRLPDGAGVVNMSLPIVLAIGDREKEEIGASPDVALQGPDGAVLAILRRVEIYPHNKEERIARTWGTTAPGLPYVDEAIAQAGNWLIGGDLEVIEPIKYNDGLDHYRLSPQQLRNEFDKRGADAVFAFQLRNPVHNGHALLMNDTRRRLLEMGFKNPILLLHPLGGFTKADDVPLPVRMEQHSKVLEDGVLDPETTIVSIFPSPMHYAGPTEVQWHAKARINAGANFYIVGRDPAGMGHPTEKRDLYNPDHGKKVLSMAPGLEKLNILPFKVAAYDTVAKKMAFFDPSRSKDFLFISGTKMRAFAKSGENPPDGFMCPGGWKVLVDYYNSLQTEEAAVASV

SEQ ID NO: 6198 - protein, 394 aa, Pseudomonas alcaligenes
MHNNILIAGAGIGGLSAALGLARKGMRSIVLEKAPELGEIGAGIQLAPNAYHALDALGIGEVARQTGVHVDKLLWMDGMTDKEIASVPLANRFREFFGNPYAVIHRADFHGLLVEACHKTGLVEVRTNAEVVDYENFPDRVEAILHDGSCINGAVLVGADGLWSNVRQKVIGDGDPRVSGHTTYRSVIPAEDMPEELRWNMSTAWAGEGCHMVHYPLKGGKVFNLVLTSNSGASEPEAGVPVTTDEVFEKFKTMKRRPTSLIHKGNNWKRWVLCDRDPLPNWVDGRVTLLGDAAHPMMQYMAQGASMAIEDAVCLAFELGREMDPVSALKKYNRARFARTARVQTYSRYASDFIYHAKGGAAAMRNELMGGMTPTDFFQWINWLYGKETVEKYK

SEQ ID NO: 6199 - protein, 319 aa, Oenococcus oeni PSU-1
MKNVLITAELPQVANSILQQAGLNVEIFTGDKLITKKELLDKVKDKDFLITSLSTDVDEDVINAAPKLKLIANFGAGFNNIDINSARAKEISVTNTPFVSTTSVAEVTAGLIISLSHRLVEGDNLMHDQGFNGWSPLFFLGHELSKKTLGIIGMGQIGKALAKRMQDFDMKIVYTQRHHLKEDEEKELHAVFLEKDELIKQSDVISLHLPLTKNTHHLLGAKEFATMKKTSFLINAARGPLIDENALLQSLKEKQLAGAALDVYEHEPKVDDQFKQMKNVILTPHIGNATIEARNAMAEVVAKNVVSVLNGEKPKYIVN

SEQ ID NO: 6200 - protein, 336 aa, Oenococcus oeni PSU-1
MTANEHHMVLMSLSANRPLAEKIAKRLHQPLADVNLDRFADGEIRLNITNSVRGDNVFVIAPTSASPHGSVNDNIMELFIAVDALRRASAHAINIVMPYYGYARQDRKARSRESIAARVIADHLEQAGVTRVIAFDLHASQIQGFFDIPVDHLMGAPILADYLISHHIVDLDNAVVVSPDHGGVRRARELNQFLGLPDSYAVIDKRRPVDKKNAVEVMNLIGDVSGKTAIIIDDMIDTGHTIVEGAKLLRAKGAKKIIVVASHALLSGDASKLLQKSDFDHVIVTDSIDIPESKRFDKLQIVSADDLFAKAITAVQENGSVSPLFQNKYHRGFEND

SEQ ID NO: 6201 - protein, 734 aa, Oenococcus oeni PSU-1
MKNKNRGFFRSSLSYAFVILAVIFLIYSFFGRSDGSVKYLSTTTFLKELKNNKIKDFTIQPGDSGVYTIAGDFKKAQKSSSSSSSTTTLLSGYQSSVTKFTAYVLPNNSSLKQITTAAQKAGVAVNPKPAASNFWGSMLTMILPTLIMFALLYWMLIGSQRGQGGSGGPGGIMSFGRSKAKPADPKQNKIRFADVAGEEEEKQELVEVVEFLKDPKKFTKLGARIPKGVLLEGPPGTGKTLLAKAVAGEAKTPFFSISGSDFVEMFVGVGASRVRDLFENAKKSAPSIIFIDEIDAVGRRRGAGMGGGNDEREQTLNQILIEMDGFEGSEGVIVLASTNRSDVLDPALLRSGRFDRKILVGAPDVKGREAILRVHAKNKPLAADVDLKVIAQQTPGFVGADLENLLNEAALLAARNDEKAVTAADIDEAEDRVIAGPAKKDRKTTQDERETVAYHEAGHAIVGLVLNDAQVVRKVTIVPRGRAGGYALMMPKDERYLMSEKDAKEELAGLMGGRAAEILINHVASSGASNDFQQATQIAREMVTQYGMSDKLGMVQLEGSSNVFVGDPNNPNPPYSQKTSELIDEEVRRLTNEAYKRAVDIIKSHPKQHKAIAEALLKYETLDEAQIRSLFETGEIPSDLVKDSQRPARPLSYEESKAALKKNGSVDNKEAEDEVKEDKDDKEDENDSKSGSDSTSKKKTTKKTSTTRRKSTTSSTKKKPTTKRTKKDDDNKEN

SEQ ID NO: 6202 - protein, 289 aa, Oenococcus oeni PSU-1
MKIAFIGTGVMGTGIINNFLKNGEDVTVYNRTKAHAQGVLDHGAKWADSAAKATLGNDFVFTMVGFPKDVEENYFGEEGIFSTVKPGQTLIDMTTSTPTLAEKIAAEGKRKGVGVLDAPVSGGDVGARDGKLTTMVGGDKNAFEKALPLLKSVSKKVNYFGGAGKGQHAKMANQIMIASTMLGLAEWMTYAKAAGLDLQETLNTLSAGGADNWSMDTYAPRILKEDFKPGFYAKHILKDLRIALDEANKMGLDLPETKLAEKMYAELTDEKKLGNLGTQAIVKLWDQWS

SEQ ID NO: 6203 - protein, 404 aa, Oenococcus oeni PSU-1
MPEVKKNLDKKTNSFVQGAKPSQIISLNKEFKKIDNIVLLTVGEPDFNTPEHIKKAAIADIQANDSHYGPSSGTPELLQSVADFLKNHYHLNYDPATEIVNTLGVTEGICDTMKTILNPGDELIVPEPTFPVYAAAASAFGGKIVPVSTEESGFILTAEKLKQVLLAHPQAKAIVLTTPGNPTGVAYNEKQIQALVNVLKNHDIFVISDEIYSELTYDRPHSSFAAALPGQTILFNGVSKSHAMTGYRLGIIAGPQSIISQIAVIHQLITTALPDVVMAAATEAFSAGENDAATMRVEYKKRRDYLIDAFTKLDISFAYPDGAFYFFFKIPDYLEQDGFKLARQIAEEAKVGLTPGVAFGQAGYLRLSYAASLDQIKIAVNRLSEFFSKQKQAQAKIYEKSTTK

SEQ ID NO: 6204 - protein, 392 aa, Oenococcus oeni PSU-1
MAIVVSALKEAAGENRVALTPDVVAKLVKSNFDVVIEKGAGEKAFYSDDVYKSAGAKLSTRTDALKADIVTVVNEPSTATLNKLTKGQTIIGMLNPLGDKKAVESLAKAGVTSLAFELLPRTVSRAQNLDANSSQKSIAGYKAALLAADTYPQYFPMMMTAAGTARPAKVLVIGAAVAGLQAIGTAHRLGAVVSGYDIREDARGQVESLGATALISGVQVKDENGYARALTTDEKKAQQTELEGFIAENNVIITTAQVPGGKPPVVVSKKAVDNAKAGTVFIDLGSSALGGNVEGSKPGETVVTKSGALIVGAGDLASRLPKSSSDMYAKNVQNTINYIIKDGKILLDLDDDVLTDLVATYKGEISSNFLRSRFGLEKRVAQKKTEDKKEAE

SEQ ID NO: 6205 - protein, 483 aa, Oenococcus oeni PSU-1
MSSIFQKMFRKEDPLVYQDKDSHLIRSLTTKDFLALGVGTIVSTSIFTLPGVVAAQHAGPAVSLSFLCAAIVAGIVAFAYAEMAAAMPFAGSAYSWINVVFGEFWGWIAGWALLAEYFIAVAFVASGLSANFQGLISPLGFKLPTTLSTASTGSNGGLMDLFAIIIILLVATLLSRGASQTARVENTLVILKVIAILVFIFVGVTAIKGQNYVPFIPKYHANTDGSAFGGWQGIYAGVSEIFLAYIGFDSIAANSAEAKNPQKTMPRGILGSLFIAVFLFISVALVLVGMFRYSDYANNAEPVGWALRQSGHEIIATIVQAVAVIGMFTALIGMMLAGSRLLYSFGRDGLLPKTLGKLSNNLPSHALIVLTVIGIALGAFFPFTFLAQLISAGTLIAFMFVSIGIYALRPREGKDIPEPSFKMPFYPVLPALGFLGALAIFWGLDIQAKIYALGWFIFGMIVYFGYWIKHSTAGSSKKTEKSN

SEQ ID NO: 6206 - protein, 823 aa, Oenococcus oeni PSU-1
MDNQYTASAKNVLLLAQEQAKYFKHEIVGSEHLLSALTLEKDGLASKVLQDYNVTDDDIRNEIEQFTGYGTHTNIKAGFLAYSPKAQEILKNAALQAQSLGARQIGTEHLLLALLTDESILSSRILASLDVRLQDLTRAIFKRIGVDPNQQKPKSKQQGQANQQGTPTLDSMSRDLTALASAGQIDPVVGRDQEVHRVIQILSRRTKNNPVLIGEPGVGKTAIAEGLAHKIATGQVPFDLANKRLMALDMGALIAGTKYRGEFEDRLKKIINEIHQDGQVILFIDELHTLIGAGGAEGALDASNLLKPALARGELQTIGATTFDEYQKYIESDQALERRFASVTIDEPSQEDSVEILKGLRPRYEEHHRVNISDEAINAAVKLSSRYIADRFLPDKAIDLMDEAAAKVRIDTVQPEDKKVDLERQLNGLRDQLDDAVSSGDFDQATKIRQQEIKIRKELAVVETDNLINGTKDHKYQLTVREKDITDVVGQQTGIPVTQLQKSESERLLHLEEILHRRVIGQNEAISAVSRAIRRARSGIKDPSRPIGTFLFLGPTGVGKTELAKALAEAMFDSEDNMIRVDMSEYQESYSASRLIGSAPGYVGYDEGGQLTERVRNHPYSVVLLDEAEKAHPDIFNLLLQVFDDGYMTDSKGRKVDFRNTIIIMTSNLGATRIRDNKHVGFGAIEPQDSYKAMSSEIQTALKERFRPEFINRIDETIIFHSLSKPELHKIVELMSHGILQRVAEQGVSIKMNKAAIDLVAQVGFDPEYGARPIRRAFQNQVEDKVSDALLSKDIRPGDSVTVGSRKGKIDLMIHHQIEKSTK

SEQ ID NO: 6207 - protein, 384 aa, Oenococcus oeni PSU-1
MQKVFILSAVRTPIGKFGGVLKNKTAVELGATVIKSLLKRSEISAEEIDEIYMGNVIQAGVGQNPARQSARLAGIPFSIPSTTINDVCGSGLHSINLAAKLIAGGFDDIIVAGGMESMSNAPFLLKNHRFGHKLGNEKIDDTLLRDALIDPIGNFHMGITAENIAERYSISRQSMDRYALESHSRAVRAEKKGLFNDEIVAVDQVKQDQAPRADTSLEQLSKLKAVFKEGGKVTAGNASGINDGAAGVILASERKVGELNLNPLAEWKFGNAVGVNPEIMGIGPVFAINDLYKKNNLSDQDIDLYELNEAYASQMLVDTSELHLNLNKVNPNGGSIALGHPVGASGARILVTLLYDLIHEEKKRGIASLCVGGGMGVSTMIEKI

SEQ ID NO: 6208 - protein, 319 aa, Oenococcus oeni PSU-1
MKIVLLDGYALNKDLNWQPLNELADFEFYDRTAADNNKEILKRIGNAEIVLTHKTPLNDEVIKKSKQLKYIGIMGTGYDVIDINSANKNGIVVTNVPTYATDAVAQFTFSLLLEVTGQVGLHDQLVHKGTWSKGPDFTFWNKPLFELKGKTLGLIGYGRIAQKVAELGHAFSMNVIFYNHRPKKIAKKWIKQVTLDKLLQKSDVISLHIIQTPETIDLINKKTIEKMKKGVILLNTARGKLVDEADLASALNGENIYAYATDVVQKEPINSNNPLLKAKNCYITPHIAWAPLETRERLLDITVDNLKQFLKGHIQNKVD

SEQ ID NO: 6209 - protein, 390 aa, Oenococcus oeni PSU-1
MPELKEGVINSVRSDVRNITTNKIRAVDMEFRKIDGLLRLTLGEPDFNAPELVKKAMIKSIEDNESHYSTARGSIEFLKAAADFLKRNYDLNYDPRTEILSTVGSTEAIFSSLSTILEEGDELLAPSPAYPLYEQLAHVNHTKMVYIPTNDTNFVLTPSKLQNAIEQHPRAKAIVLTYPNNPTGVDYSVEQLKELATVIAKTNLLVVSDEIYSTLNYVGKHVSIASLLPEQTIVLNGVSKSHAMTGDRIGFVAAPRDLISQIVKIHQFAITAVSNPAMAGAVAALNQGDALTEKMRQEYMKRRNYLIPEFKKIGFDVAAPDGAFYLFLKIPADQNQDDFAFARELAHKALVGLIPGSCFGPGGEGYLRLSYAASEETLHEALRRLQNYLA

SEQ ID NO: 6210 - protein, 392 aa, Oenococcus oeni PSU-1
MNKATHPLSDRIKNIPHDPMLDFLDKVEQSDDLVDLGFGDPDFAVSKKTKEAFKTAIDADRSHYADGQGILELREAAKGFYNKKYDCRIESANDVLVTVGAAEGINLALLALANPGDGVMIVEPEYSQYSTASCLARAAKIPIDTKQTAFKLTPELIKNAYNDAISKGINPIAIVINYPNNPTGITYNRSELNALANVFRELKIWVLSDEIYAEQTYIGNHVSLYSILPEQTILITGLSKSHSMTGYRLGFVISHGQVMKAMRKIHDTLLTCVATPIQDAAAFALKNDPDAGVKTRSTYLERVTKVTNALNALGFQVKLPQGAFYVWAKIPDKFGDDADNFCLDLAQRARVQIFPGSIFSDTAKNYVRISCAGSDARLDSALRRITDYLQNC

SEQ ID NO: 6211 - protein, 393 aa, Oenococcus oeni PSU-1
MSNFILPLNKTVDNLRRDPILDFQAKIRNIDDLIQLTFGEPGFTVDDRIKAVAKVSIDHDRSHYANSQGEINLRRAAVSYFNRHFQLNLKGVNDVLVTQGVSEAINVVFMTILERGDGVIIPEPSYSPYSTSLALAGGVKVPLDTCEHNFKITPELIEKTIDNANIPVKAILINYPANPTGVTYSKEELLAIADTLKKHKIWVISDEIYAALTYSGEHTSLYKIIPEQSILLTGLSKSHAMTGYRIGFIFASSELIEKMLTVHEALAFAVSTLSQDAAFAALTVGEDVPEYALKAYRKRRDRLLKKLTELGFESVNPQGAFYVFTKIPKSFGNNGYKFAVDLANNAKVAVLPGEAFSKNAKNYIRISYASSDSDLDEALRRMTNYIEKGTKYE

SEQ ID NO: 6212 - protein, 406 aa, Oenococcus oeni PSU-1
MADKIVLAYSGGLDTSVAIPWLKDKGYEVIAVSLDVGQHGKQIENIQKKALKIGAIQSFIIDGKDEFAENYVSKVIKSNALYEGEYPLVSALSRPLIIEKLVQTAHDNNAVAIAHGSTGKGNDQVRFEAAIHALDPEMKIEAPIRDFQWSREEEIEYAHQHNVPVPINFDSPYSIDENLWGRSNEAGILENPWNQAPADAYALTSPVEDTPDEADFVDIEFKNGLPISVNDQEMKMADLIVYLNKLAGIHGIGRIDHVENRLIGIKSREIYETPAAAVIMTAHKDLEDITLEHDVAHFKPIIEQKITNLIYNAMWISPLFDALNKFIDETQKVVNGTVKMKLYKGTATAVARKSENNSLYSEKLATYTSANSFDEQAAVGFMKLYTLPATVYEQVNHIHSKEKEEI

SEQ ID NO: 6213 - protein, 305 aa, Oenococcus oeni PSU-1
MDNEYKSGFVAIIGRPNVGKSTLLNYIIGQKVAIISSKAQTTRNKIAGIYTTEEAQVVFLDTPGIHKPYNSLDEYMEKASFGALNEADAVWFVVDATEKRGGGDNFIIERLKKIKNTPIYLLVNKIDLIKKKNDLFQAISSYTVDSLDWSEVYPISAKSGEQVNALVDDVIEKLHPGPQYFSKEQITDHPERFLVAELIREKILQLTEQEVPHSIAVVIDSMKKDGVNEKLHIQASIVVERSSQKNIIIGKQGNMIKRIGQLARKDIENLLGERVYLETWVKVEARWRERPQALQELGYNSKQDL

SEQ ID NO: 6214 - protein, 436 aa, Oenococcus oeni PSU-1
MAFVDQATIEMKAGNGGDGIISFRHEKFVPLGGPFGGDGGKGGDIYFIVDEGLRTLMDFRYNRHFRAKHGEKGGTKGMTGASADDLYVKVPAGTIISNADTNQQIVDLTENGKKFLIAHGGRGGRGNMRFATPSNPAPEISENGEPGETLKVKLELRVLADVGLVGFPSAGKSTFLSVVTAARPKIAAYHFTTIDPNLGMVQLPDGRDFTIADLPGLIKGASKGVGLGFEFLRHVERTRVLLHMIDMSEESGLGIKPFEAYLQINQELKSYDPRLLDRPMIIVATKMDLPSSKANLEDFKQELANRQINMPIVEISSVTQTGTKQLLLKVADLLDKTPRMIERKEEQSTDDRLYEFKDDHQSTDFQIEHEGDDWIIVSERISKLAKMTNKTTDESLRRFARQLRSFGVDDKLREAGAKDGDMVYIDGADFAFEFEE

SEQ ID NO: 6215 - protein, 256 aa, Oenococcus oeni PSU-1
MTTLEIKNLHVQAEGQHILKGVNLTVSTGEIHAIMGPNGTGKSTLSETIMGRSGYQVTEGDILLDGKSILNWTVDERARHGLFLAMQYPQEIPGITNMEFIRAAVNAGRPKEKAIKVRDFLQQLDEKMALLKIPEEMAERYLNEGFSGGEKKRNEILQLLMLKPRFAILDEIDSGLDIDALTIVAKGVNSLRGTEFGSLIITHYQRLLKYIVPDVVHIMMGGRIVKTGGPDLAAELEKTGYEGLAKTLGLETADHD

SEQ ID NO: 6216 - protein, 478 aa, Oenococcus oeni PSU-1
MDIFRKKDVGEILKHSTPLKRTLRTWDLTFLGIGAIIGTGIFVLTGKGALTAGPAISVSFLVAAICCGFAGLCYAEFASMAPVAGSAYTYSYIAFGEIIAFIIGWDLILEYTLGAATVSVGWSGYFANLLGNLGIHIPTVLTAAAGTTAGVTSYFNLPAFLIVLLITWIISIGITQTKRANDTMVIVKLAVILLFIVCTIWFIKPHNWQPFSPYGLYSFHNGTAAGIIPAASIVFFSFIGFDSVSSSAEETINPSKTLPRGILLSLFISTVLYIIMTLIMTGVVKFTVFAKYLNAPVLAVLHSTGQTWLSIIVSIGAILGITTVILVQLYGQSRISYSMSRDGLFPKFFGDVNMKYQTPFKGTWFFGIITAIAGGLINLNILAELVNIGTLTAFILVSAGVLWMRHSHPEVHRGFKAPGVPFTPIIAIIFCLVLIAGLNWETWIRFIVWFAIGMILYFGYAKKHSKLNSFKPQDKGAD

SEQ ID NO: 6217 - protein, 397 aa, Oenococcus oeni PSU-1
MTKILSVNAGSSSLKFKLLNMPEESVIAEGLIERIGGSLDQDDNVTIKFNGEKHKSRQAFKNHEDAINLMLSQFKKFGIVDNFNEIKGIGHRVVAGGEWFNKSVLINDEVLNKIERLAAYAPLHNPANAMGIRAFSKIIPDATEVAVFDTAFHQTMPKENYLYAVPYEYYTKYGVRRYGAHGTSHKYVSEQAAKLIGKPLEELKMITLHLGAGASVTAIKNGRSFDTSMGFSPLAGLVMATRSGDVDVSLIDYIKAKEDISDQEMLNVLNQKSGLLGVSTISSDMRDLLDVYDTNDHAKLAIDMFVGRVVDYIGQYYFELKGADALVFTAGIGENSVPIRKMIIDRLAFLGIKLDEDANDKHGVETKITTDDSKMAAYVIPTNEELEIARDVQNLMK

SEQ ID NO: 6218 - protein, 617 aa, Oenococcus oeni PSU-1
MSKIIGIDLGTTNSAVAVMEGSQPKIITNPDGGRTTPSVVAFKNGEIQVGDVAKRQAIVNPETISSIKRHMGESNYRVKANGKEYRPEEISAMILQYIKKYAEDYLGETVNDAVITVPAYFNDAQRQATKDAGKIAGLNVQRIINEPTAAALAFGLDKLDKDQKILVYDLGGGTFDVSILELGDGVFEVLSTNGDTHLGGDDFDQKVIDWLVEDFKKENGVDLSTDSLALQRLKDEAEKAKKTLSSANEAQILLPFIHQNLNIDKTLTRAQFNQLTADLVERAKGPVQNAMKDAGLSFSDINEVILNGGSTRIPAVQDSVKELTGKEPNHSINPDEAVALGAAIQGAVITGDVKDVVLLDVTPLSLGIETMGGVMTKLIDRNTTIPTSKSQVFSTAANNQPAVDIHVLQGERPMAADNKTLGNFQLTDIPAAPRGVPQIEVSFDIDRNGIVSVSAKDKGTGKSQKITIQNPGNLSEDEINKMVKDAESNEEADKKKKEEVDLHNQVDQLIFSSEKTLSDVGDKLGDSDKKPVQDALDELKKAKDSNNIETLKEKKDALEKAAQALAVKLYQQAGPQSGAAGQTGKAGQAGPNSDGKTGDDGKTVDGDFKEVNPDDKK

SEQ ID NO: 6219 - protein, 317 aa, Oenococcus oeni PSU-1
MAYYEIARDIFAKESAELANVAKRLDDKFDKLVDLINDTNGRIVFIGIGKSQIIAEKISASLSSVSIHSFTVDAGTAYHGDLGRISDDDLLIFVSNSGETQEVVQTLFALQTIYPKGLKTVSLTGNLDSTLATNTGLAFDLGVSKEADTTGLAPTSSTTATLVFGDALLAAMEKSISFNRNQFALYHPGGTIGKLLLQRVKHVMHEKVPYVNEDTPINEVIYQISDYGIGMTLVKDKDSGKAIGIVTDGDIRKKFLSVQSVKKSVASDYMTKGFVSINQEKRNRTAWQLMANHGISNLVVIDNDEKVVGVVTIHDVL

SEQ ID NO: 6220 - protein, 599 aa, Oenococcus oeni PSU-1
MSERTLSMRTTSTSRKSKKAPKAKISGLWKIIKIAHPQFKWMIPGLLFSVIGVVFNLMTPKYSGKLINSFSGQSLKNIHLDSTTIALVLALFIGGAIVSAIGNFLTGVAGEQLVRNLREIVWDKLVIFKMPYFDSVKSGETTSRLTSDTSQVKTLVANTLPNFLTSMISMVGAVILMFTTDWHMAIWIFIAVPVTALLVAPVMVLGSKVGRGTQDAMADFTGGSQETLAEMRLVKSSGAEQHVLKRGVDQIQNLFKFGRREAIVDGVMGPIMTMVMMGLFALILVVGSLRVAKGESSMGTLFSFIMYLFQIMPALVSVGTFGSTFAKTQGATHRLIDLLDEPVEELNKGKSVDVEGLTLTADHVDFAYENDQPILHNVSFEAKPNTIVAFAGPSGGGKSTIFQLLERFYQPDQGTINIGNHNIENISLNSWRSQIGFVSQDSSIMAGTIRDNLTYGLKKEFSDERLWEVLQLAYADKFVDNMPKKLDTQVGERGVKVSGGQRQRLAIARAFLRNPKILMLYEATASLDSESEAMVQRALEQLMKNRTTLVIAHRLSTIVDADKIYFIEHGEVTGSGTHQELLKSHELYAEYVSEQFVTK

SEQ ID NO: 6221 - protein, 67 aa, Oenococcus oeni PSU-1
METGTVKWFNADKGYGFITRDNGGDVFVHFSAIQTDGFKSLDEGQKVTFEVEDGQRGPQAVNVNKAN

SEQ ID NO: 6222 - protein, 329 aa, Oenococcus oeni PSU-1
MTNLFTELADKIKEKKLRLVFPEGDDSRVQGAAIRLKKDGLLTPILLGDQAAVEKTAADNHFDLSGIKLIDPLKFDEKQFNQLIDKLVTRRKGKTDPQTVAMWLQEVNYFGTMLVYTGKADAMVSGAVHPTGDTVRPALQIIKTAPGVSRISGAFIMQKNDERYLFADSAINIELDAQTMAEIAVQSAHTAKIFGIDPKVAMLSFSTKGSAKHALVDKVAQATKLAQEMAPDLADNIDGELQFDAAFVESVAKLKAPGSKVAGHANVFIFPSLEAGNIGYKIAQRLGGYEAIGPILQGLAAPVSDLSRGASQEDVYKVAIITAAQALKN

SEQ ID NO: 6223 - protein, 479 aa, Oenococcus oeni PSU-1
MKIVKFGGSSLSSGVQIRKVFQIVKSDPERRIVVVSAPGKRFKGDVKITDLLLKLAEAILNEEKTAQIYEQIFLRYQAIGDFFKIPRSGIEQLKEHLYSVAQADYPSNDFFRAALSAQGENMSAHLITLIFKQLGLKARLLTPKEVGLTVSGEARKAQILPGSYAKIAKTKFTDNEVLIFPGFFGITKNGLINTFSRGGSDITGAILARGFGADLYENFTDVDSIYAVNPGLVADPAPIKEMTYNEMRELSYAGFAVFHDEAILPAIQGKIPICVKNTNRPEMPGTKIVPRDKVSHKNKITGIASSHHFQAIYLHRYLINREVGFTAKILKIMADLNISYEHMPSGIDDLTIILDKNQLTNGRKEKLTQRIKDEIQPDDLQWRNDYAIIMVVGEGLVNRVGAMADIVDPIRDAGISLTMVNQGSSEISIMLGVRPEDEQKAVKAIYNDHFENGHPKKELQIPRASFKSVSKSLIANFFV

SEQ ID NO: 6224 - protein, 427 aa, Oenococcus oeni PSU-1
MPALRWQFLFLLAAIISGISGMAYSEFASALPVAGSAYSYGSVIFGQVVVGWFLGWSLILEYFLATSAVSVGFSSYLAGLLQTDHISGFNSILAGPMEGGIINLPAVVLLLVILGIQIIGLSTTRWVENVFVAIKLAILAIFIIVGLFFIKSNNYVPFYPKEFQTGAFGLSGIWMATSGIFFAFIGFDTLAAHTAEVKNPKKQVARGIIYTVIVAAVLYTLFAIVLTGMVNYTKLNVSDPASFAFTFVGQKGLASVIGIGSMIGMFTGVLALVFASSRLIYSFGRDGLLPNFIGKISGSQHVPFNALLIAGVVEIILAGFVPLSYLASLINAGTLAAFTFVNFGIIPLRHRTDLPNENGFRVPGYPIIPIIGGLTSFFFITQLETKTLVMFGVWTLVGLLIYFTYGVRHSMVKESKFDQSIIKENNA

SEQ ID NO: 6225 - protein, 287 aa, Oenococcus oeni PSU-1
MEKAKKRKIGIISSIILTLLIIFGVVSASALAENNSKHVDTWERVKRLGKIRWGVKADTKLFGLMDTKTGQPEGFDVDIAKALTVQLSKQSGVPMQADFTIVTSNTRIQLLKNANIDGFIATATITPEREKVIDFSNSYFKAGQSILVKKGSGIKSIKDLNNSKSTIIGVVGSNSVINVKKFAPKAKVLALGDYGQAMAALKAGQGQALTTDNGILYGLATENPGYTVVGGTFTSEPYGVAFDNNQPEMVKQTNKALKAIIANGTYNKLIRKWFRGVPGLDWRSLEK

SEQ ID NO: 6226 - protein, 448 aa, Oenococcus oeni PSU-1
MSTANTTFLILSSVLVLFMTPGLAFFYGGLGSKKNVVNTMMSVFVMCGLAVVLWVICGYSLSFVGDFGGVFGSLSALLLHGVKLTALTSTKIPTSLYLIFQMMFAVITPALFVGAVVGRIRFKFLLLFTVFWSIFIYYPLVHMVWANGFLAKMGVIDFAGGTVVHIDAGVTALVLAYFLGPRIGYRKGKQEGHYSLPWALLGTTILWIGWYGFNAGSALAANQIAVQAVLTTTVATACSMITWMLIEMSLKGKATLAGICNGTLCGLVGITPATGYVTVAGSFWIGILAAVASYFFVNFLKARIGIDDALDAFGCHGVCGIVGSILTGLFASRAVNSSISINGLFYGGGFKLFAVQLFATLFSVIFTALICFLIIKFLKLFMKMRVDVKEEQKGLDFGEHGENVDYVISLTLEAYQFEDQKKEFFQDEPNNLKEVSKNSKDTLNSTIS

SEQ ID NO: 6227 - protein, 560 aa, Oenococcus oeni PSU-1
MTEKKRFGADLVLESLLNHDVKYVFGIPGAKIDRLFEVIENNSNAPKLVITKHEQNAAFMAQAVGRLTGKPGVVLVTSGPGASNLATGILTAQTENDPVVAIAGQVQRQDLYRRTHQSTPSVLLFNGITKFTTEVQDAENLSEVIANAFDIASAAPKGASFISLPQDVDDSPVSSQALEKVENISAGPASPEQIEFLAGKIRQAKLPVILVGQRGSDEKTVKALHDFLHATKLPVVETFQGAGVIDRSLVEQSFFGRVGLFANQTGDQLLKASDLVIALGYDAVEYEPRVWNKNNKLPIATIDSIHAQIDAHYNPKIQLVGDMPVTINLLAKQLNNYSLSKESNSLLNKYREQLKSEPGGPKFVAKVGLSHPLDVVHAIQKQVDDNMTVTLDVGSVYIWMSRFFRSYRPRHFLISDGMQTLGVALPWAIAAGLVRPNEKIVSVSGDGGFMFSSAELETAVRLKSNLVHIIFNDHGHYDMVKFQEEMKYGKSAGVDFGQVDFVKFAESFGAKGLRVDDPTKIDQVLTEAFNWDQGPVLVDIPVDYSHDTELYSELIEGDMD

SEQ ID NO: 6228 - protein, 547 aa, Oenococcus oeni PSU-1
MDTAHQIVKVLEDRDVKYVFGIPGEENIHLVDAINQSDKIKFILVRHEQGASFMAGVYGRLTGKPGVAAATLGPGAINLLLGVADSQTNSTPMIAITAQGGLDRIYKESHQVIDLKAMFQPITKWSTHIYEAKTTSEIIGKAYDKSVNGRPGPVYIGVPQDVEEQETGSQISTFSMPKESNEPNPKLIEKAARLIKNAKHPVVMAGMGIVRNHAEKELNAFIEKTHLPVATTFMGKGSVDDRSKYALGVIGFMAHDYGNFAFDQADLILSIGYELSEFNPVRINPKANKTIIHMSTFSEDSDEHYPVKVNIISDIDKSIRALSDCLNDFKSSETKADIREEVEAEIASGKVESKVPLTPQQIISATRESVDDKGIVLVDTGALKMWMARLYPTYAPNTCLIDNGLSTMSWSLPGAIGAKLAKPDHHILSVMGDGSFMMNSQELETAVRYHIPITILLWVDKSYGLIKWKMDMEMGHHSEVDFDNPDFVEYVESFGANAHIVSSRNDLKNKLQNYLKNDNQVNVLICPVDYRENMKLINKLGKVTVSL

SEQ ID NO: 6229 - protein, 578 aa, Oenococcus oeni PSU-1
MTSKKGSDLLVSVLTDWGIKEVYGLPGDSVDTTVDALRRQKDKIKFIQVRHEEVASLAASASAKYTGKIGVCLSIGGPGAIHLLNGLYDAKMDHVPVLALLGQVTSQSLNEGYFQEVNTPKLFDDVAVFNRTISSVDNLAEIVDQAIRSAYENKGVAVLTIPDDIPDQELKTIYHSSAKAFSLAKPSINEEQINKASELIKNSQKPIALIGLGAKESGEEVTSFLEKNNIPFVQTLPAKGTISDDHPNSLGNVGKLGTKPAYEAMKNADLLILLGSNYPYLPYLPNKGQAKCIQVDLKAENLGKRYSVTTAIQADVYDVVHALNKKGVLRDNKSFLQACQKNMDNWNKWMQEKRELDTTPISPESMVAYIDQTAPDDLVYSIDVGTSTSWAARFLHVKRNQKFAISAWLGTMGCGLPGAIAGQIVFPKRRVLSLIGDGAFSMVMQDFVTAVKYKLPIIFVIINNQKLAFIEYEQQSAGQLNYEINLADIDFGKFAQAAGGIGITVKSNDKFKEALDQAYQTKDKPVLINAYVEDNAPLPGKIVLDEAKGFAKFGQEYLENYWKIPELPPFKDILRQFF

SEQ ID NO: 6230 - protein, 286 aa, Oenococcus oeni PSU-1
MEKKKTSFIKKVGWPSIIVAIAALIAIVAFAFVPNNASTVYKGFLGSITGFFANSILGVSKLCGNSYGFGIVIFTLLIRFLILPLMVYSISSSKNMAKVAPLVKKVQAKYKGKRDRDSMTKLQEETSSIYKEAGVNPYASLLPVLIQLPVLWALFQSVSSTPALKTGSFFWLQLGSPDPYFVLPIFAALFTFISSWMSTASMGKDQPGFAKAMPYIFPFIILFSALAVSSALSLYWVATNAFQVVQTFFLQNPFKARAEEKAKELAELERKKAIKKTLRKAHKRRK

SEQ ID NO: 6231 - protein, 393 aa, Pediococcus pentosaceus ATCC 25745
MPELDSALQNQTRPALSAISRSAIRQFDQQVSDIPGILKLTLGEPDLNTPEHVKQVLINAITNNASHYAPSAGLLRLRQAVSKYLLNSTNIRYNPASEILITIGATEAIFATMQTILSVGDEVIIPTPTFPLYMAIAKAIDATVIEIDTSDTDFVLTADALKQALQAHPNAKMLVLNYPTNPTGATYSKSKLTELAQVIQNSKLFVLADEIYGELSYDNKHYSIAELLPSRTILINGISKSYAMTGYRIGFLAAPATLTSNILKLHGFMVTTAPTSIMEGAIEALLHGQDDVAKMCEQYRLRRDYLVKELNQLNFQVRSPAGTFYLFAKIPINLIQNSNQLALQIAHQAKLAVIPGKVFGAGGEGYLRFSYAASMSNLHEAVRRLTKFVQEEK

SEQ ID NO: 6232 - protein, 459 aa, Pediococcus pentosaceus ATCC 25745
MVKVVKFGGSSLANAAQYQKVIEILRADPERRIVVVSAPGKRFKDDVKVTDLLIKYANASGENVKVARQAVLDRYQEIADAYHVSDSDFEQINVHLIDLANLHHANKACRLAHFKAAGERLNAILMALVLKKFNVTARFVDPKQLGIKAHGDYNNAILDQHSYAQIEAVCSNLLDEAEYLVVPGFYAYNQNGEVCTFSRGGSDITGAILARGFQAQLYENFTDVDSIYSADPKIIAQPHPIREMTYREMRELAYAGFSVFHDEAIIPAIEAQVPIVIKNTDHPNLPGTVIEPEQNYASDLEITGVASSSRFAALYIHKYLLNREVGFTLKLLKILYRYDISYEHMPSGIDDLTIIFNQNQITDEILPSLLSDIREELHTDQLEWIDDYAILMVVGEGMRDKVGVVDRIVNALARKQIGIQMINQGASRISTMLGVHQNQVNQAVREIYREFFKNKGRAD

SEQ ID NO: 6233 - protein, 368 aa, Pediococcus pentosaceus ATCC 25745
MKIAVIKEQKEGEGRVAATPENVQKMVEAGNEVLVERDAGIGAGFSNEEFENAGGKIVSHAEAWKAKLCIKVKEPDEEEYQYFEKGKIVWGFQHLASAKATVEAMMQAGVTAIGGETIVKDGKLELLAPMSQIAGRRSVIMGAYYLEAQHQGAGILLSGIPGMISAGNVVIFGGGNAATGAADTALGLGCSVVIIELNDQRIQQLQKLYKGKKVRVVKSNEANLAQEIKDADLFISTILIPGSRPPKLVKESMVKKMKKGSVIVDIAIDQGGTVETIDHPTTIDDPIFIKDGVIHYAVPNQPGAVPRTSTMALAAGNLDYLLEIADQGIEAAGKNDPALASGINLYEGKITNQGLADSLNLPYTELKL

SEQ ID NO: 6234 - protein, 391 aa, Pediococcus pentosaceus ATCC 25745
MEFSKRANQVSPSATLAVSTEAKKMQAAGIDVVNLSTGEPDFATPKAIIKAAMESMESGKASYYTPVGGLPELRQAVATHIKTDTGYDAKMEQVAVTVGAKMGLFETFQALLNEGDEVMIVAPFWVSYEEQVKLAGGSVIAIHPQASDLKTTPSELSRFKTASTKLLILNTPQNPSGLVYSEEETRAIAQWAVDNNVILVADEIYGKLVYNGAKFSSVMSMGNEIVNNTILIDGVSKAYAMTGWRIGYVVAAPQIIRKILALQGHMTSNPTAVAQYAALEALRGDQYPVEEMRLAFEKRLNQTFDLMQVIPGFSFDYKPEGAFYLFPDVTEAMKIKGYATSTDLAMALLKEAHVAVVAGEAFGMPGHIRLSYATSQTLLSEAVRRIQNFMN

SEQ ID NO: 6235 - protein, 326 aa, Pediococcus pentosaceus ATCC 25745
MSEHYSDPKLKIFALNSNKPLAEKIAKAVGVELGKTSVDRFRDGEIRINIEESIRGDEVYIVQSTSAPVNDNLMEMLIMIDALKRASAKTINIVIPYYGYARQDRKARSREPITAKLVANMIERAGATRIIALDLHAAQIQGFFDIPLDHLMGAPLLADHFIERGLDQDTVVVSPDHGGVTRARKLAEFLKAPIAIIDKRRPRANVAEVMNIIGEVKGKRCIMIDDMIDTAGTITLGAQALMDAGATEVYASCTHPVLSGPAIERIQNSPIKELIVTDSIQLPEEKKIDKITSISVGPLIGEAIRLIHENKPVSPLFNNRFSIEKE

SEQ ID NO: 6236 - protein, 399 aa, Pediococcus pentosaceus ATCC 25745
MEKTIAINAGSSTLKFKLFEMPEEKVISSGTVDRIGIPGSNFTIKTTDGKKVEIDQPIKNHEEAVNLLLKELLKLDIIKDYSEITGVGHRVVAGGEIFQDSALIDDKVLKQIEDLKEYAPLHNPANATGIRAFKKVLPDITSVAVFDTSFHETLPEKNYLYSIPYEYYEKYGARKYGAHGTSHQYVAGRAAKMMGKPLEELKIITLHLGAGSSITAIKDGKSFDTSMGFTPLAGITMATRSGDIDASLVVYLMQKLNITNPEDILTILNKKSGLLGLSGMSPDLRDIIDAAEKGEHRAQMAIDIFVNNIVKYIGSYATEMGGLDGIVFTAGIGENSVPMREKITSKLGIFNVKLDQALNEKRGERFISAEDSAVQVMVIPTDEELAIARDVEKFKKMGD

SEQ ID NO: 6237 - protein, 323 aa, Pediococcus pentosaceus ATCC 25745
MDLFEGLKSKIKGQNRTVVFPEGEDVRVLAAAIRLADDGLVQSILLGVEADIKATAEKHGLNLENVQIIDPSQYPEADQKEMIDKLVERRKGKNTEEQVIEMLKDVNYFGTMLVYLGKADAMVSGAVHATGDTVRPALQIIKTKPGMRRISGAFIMQRENERYVFGDAAINIDPDAETLAEIAIQSAETARLFDIDPKVAMLSFSTKGSAAGPMVDKVREATKVAQERDPKTPYDGELQFDAAFVPAVGASKAPDSEIAGHANVFIFPELQSGNIGYKIAQRLGGFEAIGPILQGLNAPVSDLSRGASEEDVYKVAIITAAQV

SEQ ID NO: 6238 - protein, 287 aa, Pediococcus pentosaceus ATCC 25745
MKIGFIGTGVMGSGIIHNLLKNGHDVAVFTRTKSKADPLLEEGAQWASSPAELTQQVETVITMVGFPQDVEEVYFGDHGIFSTVTSGQILIDMTTSSPILAEKIGKKADELAVMALDAPVSGGDIGAQNATLTIMVGGNQTAFETMKPIFGQIGHATNYFGTYGAGQNAKMANQIMIAGTMTGLTEMLVYAKAARLDLKTVLETLSNGGASNWSMENYVPRILKNDYTPGFFAKHFLKDLKIALDQAKQMQVDLPATRLATQLYDNLVNQQGLGDDGTQALIKLWWK

SEQ ID NO: 6239 - protein, 462 aa, Pediococcus pentosaceus ATCC 25745
MKIIDKILRKESLDNYLKTDSKFEKTIGPKDLLALGIGAVIGTGIFILPGTVAALKAGPSITISFVIAAIVCALAGMCYAEFAASIPVAGSAYSYGTIIYGELPGWVLGWALILEYVLAVAAVSTGWSAYFGSLLGGFGIHIPTAISGSFNPSHGTYINLFAIIIVLLIGFLLNRGFQSSIRINNFMVFVKIAIILIFILVGIFYVKPTNWKPYFPFGVHGTLAGASTVFFAYLGFDTVSASAAEVKNPSKTMPIGIIGTLIIATIFYVAVSLVLTGMVPYTKLNVANPVALALQLVHQNWVAGLLSLGALAGMTTMMISMIYGSSRLVYATGRDGLLPKVLGNLVGEHHSPRNAMVVVTIFIAFLGGFVPLDQLTNLVNMGTLLAFALVSLGIIPLRHRQDIPNTGFKVPGYPFIPIISALACIYLITTLSVETWIGSAIWFGIGLIIYFSYGIHHSKLAQ

SEQ ID NO: 6240 - protein, 278 aa, Pediococcus pentosaceus ATCC 25745
MRKILKSVALIFTLMASLVLLSSCGAKGEVKNIDAWDQAQKTDSITWGVKADTKLFGLMDVKDSQIKGFDIDIAKALTKQMLGKKAKANFIQVTSQTRIPLLKNGNLDAIIATMTITKEREKVVDFSNSYFDAGQSLLVKKGSSIKSVKDLNKPGTKVIGVVGSNSVENIKKFAPKAQVIQLQDYAQALTALKSGQGAALTTDNGILFGMAVDNPNYQVVGKAFTKEPYGIAINKGQGQLKKHLNQALKELEESGEYNKLVEKWFGNIAGFDYKEVER

SEQ ID NO: 6241 - protein, 558 aa, Pediococcus pentosaceus ATCC 25745
MIQSSYTGSDSILDSLINHDVPYIFGIPGAKIDLLFEQLEHSNRAKKPKLIITRHEQNAAFMAAGVGRITGKPGVVLTTSGPGVGNLATGLLTATAEGDPVLAIGGQVPRNDLLRLTHQSMRNAALFEPITKFSVEVQEPENISEVLANAYRAAESSKQGASFVSFPQDVVNAPVSSRPIKPLKKPILGPASPIEIEELAKAIRNAQLPVLLLGMRASSPEVTKAVRELVRIANLPVVETFQGAGIISHDLEDHFYGRVGLFRNQPGDKLLKHSDLVITVGYDAIEYEPRNWNAEGDGKIIVIDDSPSEIDHNFEPEKELVGDIAQTIDLLTPHLKDYQVGVDGEQYLETLRELQNKQDLPPVPKQDSKRIHPLSIISALQYRVDDEMTVSVDVGSFYIWMARHFRSYQPRHLLFSNGMQTLGVALPWAISAALLRPNSKSVSVSGDGGFLFSAQELETAVREKLDIVHIIWNDGYYDMVKFQEEIKYGHSAGVDFGPVDFVKLAEGYGAKGLRVEKPEDLGKILDEAFQTEGPVVVDIPVDYSDNVKLGQSLLPDQL

SEQ ID NO: 6242 - protein, 253 aa, Pediococcus pentosaceus ATCC 25745
MSTLLIKDLKVVAGEEPILNGVNLEIKAGEVHALMGPNGTGKSTLSETIMGNPLYQIVEGQIFLDGQDITTMSVDERARAGMFLAMQYPTEVVGISNADFIHAALNARNGNQPVAILPFLNELKQQMDFLEIDEDYADRGLNADFSGGEKKRNEILQMMMLKPSFAILDEIDSGLDIDALQIVAKGINAMRSDEFSCLMVTHYQRLLNYVVPDVVHIMMGGKIVKTGGPELAQELEKTGYADLSGAVEGSDND

SEQ ID NO: 6243 - protein, 773 aa, Pediococcus pentosaceus ATCC 25745
MEENTSYDEGLKVSLSTKDLLVYGITFMIPVAPLAFYGSFLTPANGMVALAYFVGMVAMLFTGFSYATMSRRYPFSGSVYTYVQQGTNAGLGFIGGWGITLDYFLIPTITYLISKSFGESLFPTVPGWAWIIILVIFNTIVNILGANVVTKISWVLFALQGIVLVAFIIGTIRLLLSGAIQPQTISFYNPQHFNIQGVLQATGIVIVSYLGFDAISTLSEEAEDPHRSVGRAIILSILSIGILFVVITVLAGFVAPDYQNLNQNTAFLGILQRVGGTWLVKLADITIILSFGFASGQEGQTAVSRILYAMGRDGILPPAFAKLHKKYRTPIFAIVLVGLASLILSLTLSQDTVSNLVSFGALFGFILLNLSVIWKFYVKGDHGSVFSKERVETKYYEDDTKIYLTLLKKQDILDLDLSRERVKKRVISNISTTGNTKYAEKLISKYYRDFDYVFDMVRAEQALPSKKDNFLKSISEPKPTPRFQIHKYDLVKLIDGRLAIVFSINDANTEYEVRVEKGSESWELITIKQIDIAHVYQHLDSFLSPTKISLSIKDVFFKHDVNFLIEEFPDINVETLCTDSEWFDLENKLEGLLLKYSQISNKQSHNIGIRIQQMLDIIPEKYVDVRLSSVVPPTLEEIDQLEELDVVKLKDGKFATIVFAPPHPYSWDMHFDFDIGDSSTSWATPITEIAEIIFFHSKNLPIHLNKMLTKEAIQNLHVLVPDFDVNKTLSKEEFTKLYDLIDHKLMTQGFDTNDEPTPIGLMAENLLTEFADI

SEQ ID NO: 6244 - protein, 440 aa, Pediococcus pentosaceus ATCC 25745
MNKNEHTHLQKNIGLFAAFSTVMGTVIGAGVFFKVSSVTASTQSAGLSLLAWLAGGLLTICAGLTSAELASAIPVTGGAIKYLEVTYGKLTGFLLGWAQTLIYFPANIAALSIIFGTQFTNLFHLKAGLILSIAVICGASITGINLLGTKHGARLQSVALIAKLIPIAVIIAFGLFAPSNVHLSLIPEHFTTSQTLTGFSGGLLSTLFAYDGWLGIGAIAGEMKNPKRDLPLAIGLGLTGIMIVYLGINLVFLKTLPISDLAGNLNAASTAAGQLFGNIGGKLVTIGILISVYGALNGYTMTGMRIPYAMAKEDSLPMSNHLSKLSRTAVPYVAGIVQLVIAGLMMIVGSFDLLTDMLIFVMWIFNVLIFYAVIKLRHTQPDLVRPYKVPLYPFLPVVAILGGIFVLVTTIIDQPILATTGIVITLLGIPLYLVTKRKSS

SEQ ID NO: 6245 - protein, 626 aa, Pediococcus pentosaceus ATCC 25745
MCGFAGYINQANVNKDTIKSMADRIKHRGPDDEAFFQDENASMGFRRLSIIDLAHGRQPMMNSAETKVLTFNGEIYNYKQVREELKELGYEFRTDVDSEVLIHGYDAWGPELLKKLRGMFAFVIYDKEKQEVFGARDHFGIKPLYYYDDDKTFLWGSEIKSFLEHPNFVKEFNEELLPIHLSFEFIPSKETMFKNVYKLLPGTYFIHKNGKTETHTYFKFNYDHIDESQTIEEDSKKIRKIVSDSVDAHMIADVEVGSFLSSGIDSSYVLAEAAKLKPIQSFSLGFRNSKYSELSYSTEFAKEINQKNTPLYMDGDDYFDILPTIMYYMDEPLSNPSAMQLFYLSKGTRKNVKVALSGEGADEFFGGYNTYLEAFTFERYQKMVPSFIRKGLAKAVSGLPRFHGRRFLMRGAQPLSERYYRVNYVFNQQERDQILRNPALNVDSGAYTQHIFDEVKGKDEMTQMQYFDINTWLPFDILHKADRMSMANSLEVRTPLVDREVAKFAATMPIKTRIHKEETKVSLRRAAEAELPERVAKKEKLGFPSPIANWIKEDKYRKRIEAAFNSDIAKKFFKPEALMHILDEHVNGKSSMQKIFTIYTFILWYGVFFPEDTNTNTIDLVKRTQV

SEQ ID NO: 6246 - protein, 370 aa, Pediococcus pentosaceus ATCC 25745
MDEQNELRCIGCGAILQVTDKKAPGYTPESALKKGLESGQLYCQRCFRLRHYNEIAPVDISDDDFRKLLSQISDSNSLVVYVVDMFDFNGSLIPGLHRFIGDNPVLLVGNKEDVFPKSIKRHRMKEWLRQQAKANGILPEDVVITSAKNASSVEALFNAVEKLRKGRDVYVVGVTNVGKSTLINSLIAIRNGIKDVITTSRFPGTTLDRIEIPFDDHSNLIDTPGIIHADQMAHVLAAEDLKYVSPQKTIKPRVFQLNSQQTLFVGALARFDYEHSEGSVTAYFDNNLMVHRTKLENADNFYEKHAGELLTPPTADNLAKMPKLVAHQFSADQDSDIVFEGLGWISVPEGSTITAWAPEGISVVIRRSLI

SEQ ID NO: 6247 - protein, 102 aa, Pediococcus pentosaceus ATCC 25745
MYAIIKTGGKQLKVEEGQSVFVEKLNVAEGEKVTFDQVLFVGGESTKVGSPVVEGASVAGTVEKQGKQKKITTFKYKAKKNQHTKTGHRQPYTKVMIDSINA

SEQ ID NO: 6248 - protein, 619 aa, Pediococcus pentosaceus ATCC 25745
MASNKIIGIDLGTTNSAVAVMDGDKPKIITNPEGARTTPSVVAFKNGETQVGEVAKRQAITNPDTIASIKRHIGEAGYKVTVDGKSYTPQEVSAMILSYIKKFAEDYLGEEVDKAVITVPAYFDDSQRQATKDAGKIAGLDVKRIINEPTASSLAYGLDQNGKDEKILVYDLGGGTFDVSVLELGDGVFQVLSTNGDTHLGGDDFDQKIIDWLVDEFKKDNGVDLSQDKMALQRLKDAAEKAKKDLSGVSEAQISLPFISAGEAGPLHLEKTLTRAQFDQLTADLVERTKAPVENALKDAGLSASEIDEVILNGGSTRIPAVQEAVKNWTGKEPNHSINPDEAVALGAAVQGGVLTGDVKDVVLLDVTPLSLGIETMGGVFTKLIDRNTTIPTSKSQVFSTAADNQPAVDIHVLQGERPMAADNKTLGRFQLTDIPAAPRGIPQIEVKFDIDKNGIVNVSATDKGTGKEQKITIKSSSGLSDEEIDRMMKEAKENEEADKKRKEEVDLRNEVDQLIFTTDKTLKDLEGKVSEDEIKKAKDAKEALEKAQKDNNLDEMKAKKDDLSKIVQDLSVKLYQQAQEAQGQAADGAQANAGDAKTDDDNTVNGDFEEVDPDKDNK

SEQ ID NO: 6249 - protein, 501 aa, Pediococcus pentosaceus ATCC 25745
MEAASVAGPAAIFSWIIGFVVIGVIAYNYIELGTMFPESGGMSKFAQYSHGSLVGFIASWANWISLITLIPIEAVAAVQYMSSWPWAWANWTHSFFKNGNITTSGLLVVFCFILIFTLLNYWSVTLLTRFTSLISIFKIAVPLITIIFLTLSGFHPENYGKSLSEFMPYGSASIFAATSASGIIFSFNAFQTVINMGNEVENPKKNIGLGVGLSLSISAVLYLVLQSTFITSVPTALITQSGWHGINFESPFADLAILLGIHWLSVLLYLDAFISPFGTGVSFAASTGRALAAMSSNNHFPKILGRINAKYGIPRVAMAFNAVLSMVMVSIFRSWGTLASVISTSTLIAYLTGPITVVSLRKMASRFNRPVRLKAIKFMAPLAFILASLAIYWAMWPTTVEVILVILLGLPIFIYYEWRLHWKETMKQLRSSLWLIVYLIFLSVMSYIGSDNFNGRNLIHYPLDFIVIIIVAFIFYIWGMRSRIITVSFGNAQEVNKHVKK

SEQ ID NO: 6250 - protein, 304 aa, Pediococcus pentosaceus ATCC 25745
MEENNQAFHSGFVAIVGRPNVGKSTFLNYVIGQKVAIMSNVPQTTRNKIQGIYTTDREQIVFIDTPGIHKSHNKLGDFMVQSAMSSLNEVDAIMFMVNADEPRGAGDNYIIERLKKITDRPVYLVINKIDLVHPDELLPIVDSYKDAMDWTEVFPISALQGNNINELVTTLSQHMPEGPKYYPDDQVTDHPERFVVSELIREKVLQLTRQEVPHSVAVVIETMKSNDEGLVNIQATIIVDRSSQKGIVIGKGGKMLKEIGSRARVDIEHLLGSRVYLELWVKVSEGWRDKQGILQSFGYKKDEY

SEQ ID NO: 6251 - protein, 430 aa, Pediococcus pentosaceus ATCC 25745
MFVDQVKINVKAGNGGNGIVAFRREKYVPNGGPAGGDGGRGGNVVLKVDPGLRTLMDFRYRHKFKADSGKNGMNKQMTGRSSQDLVISVPGGTIVRDLTTGRVIGDLTDNGQELVVAKGGRGGRGNMRFASPRNPAPEISENGEPGEEIELQLELKVLADVGLLGFPSVGKSTLLSVVTSAKPKIAEYHFTTLVPNLGMVQLDDGRDFVIADIPGLIEGASQGVGLGFEFLRHVERTRVLLHLVDMSGMTEEDPFTNFRQINEELKKYNPELLERRQIIVPTKMDLPGSDEELKKFEKQVRADERYADFEIFPISSITHNGLEKLVARTADVLEEIPQHSLIATSDEETEKTYEFSSEKDFTIENIDDVWVIEGEKIEKLFKMTDTTHDESLLRFARQMRGMGIDDELRRLGARNGDSVQILDFVFEFVE

SEQ ID NO: 6252 - protein, 325 aa, Pediococcus pentosaceus ATCC 25745
MEESKTKRRMKIFSLNSNHALSEKIAAEVGMPLGKAAIKQFSDGEIQVNIEESIRGDEVYVIQSISDPINDSLMELLIMVDALRRASASQINVVIPYYGYSRQDRKARSREPITAKLIANLLEDDAITRVLTLDLHAPQIQGFFDVPVDHLAAAPLLASYFSDGSFDVENMVVVSPDHASVSRARTMAELLGTPIAIIDNRNEESVESINEIPTEIIGNVKNKIALVVDDMIDTGTRLTISAEALHNAGATEVYGAATHAIFSNNAPKILQESKLSKIIVTDSIRIDADKKFDKLVELSVGPLLGNAIKMIYDNEPLAPLFKSQK

SEQ ID NO: 6253 - protein, 386 aa, Pediococcus pentosaceus ATCC 25745
MQQVYLDNAATTPTDAAVVEVISNELLNNWGNASSLHGFGRRARATLDEARHIIAQSIHANDDEIIFTSGGTESNNTAITQVALRNQDKGKKIITTAIEHPSVLNPMRRLESMGFEVTYLGVDQNGLISLDEFKNALDDQTILVSIMTGNNEVGSHMPIHEIGEILKNHQAVLHTDAVQAYGLVDIDVKRDHIDLLSTSAHKLNGPKMMGFLYKNNEVNFDSFILGGEQEDKRRAGTENVANIAGFAKAVSLLDADQKNQLQARYAGFKQKIIQTLKENEIEFEINGSLDENNLQHVFNIWLKGVSTYVMQTNLDLAGIAISGGSACTAGSLEPSHVLTAMYGEDSPRISESIRISFGKKTTEEDIEYLCDQIVAIEQRLKQISNK

SEQ ID NO: 6254 - protein, 582 aa, Pediococcus pentosaceus ATCC 25745
MAEKIQAGIAMLKVIESWGVDHIYGYPGGSINSTMDSLQKEQDNIKYIQVRHEQVGALAAAADAKLTGKIGVAFGSAGPGAVNLLNGLYDAKEDHVPVLAIVGQVPHTRMNYDYFQEFNESPMFDDVAVYNRIVMTPESLPYVIDKAIRMAYKEKGVAVVIIPNDFGYVEIPTGNYSTEKTRNQPEIKPQPDSELVQDAWDMIKNAKYPVIHLGQGARGATKEVEALSEKLQIPIVITGLAKGVIPDEYEGNMGPFNRAASKVSNELIKKTDLLISIGANFPFAAIVYGDRPFKYIQVDNDQAIFGRHHSLDLGIWADAKLFVEKLDEISEAVQPRPFYKAAVAAQKDWRKYLKGLMNRADGPLEYEQVYQQINRIADDDAVFSMDVGDNIINSFRFLDMNPKQKILTSALFATMGCGIPGAMASKLSYPDRQVFNIAGDGAFSMVMQDMITEKRYNLPIINIVTSNRHLSFIKSEQDDVPQDEFGVDLTDADYAKIAEGMGVKGIRVDEISQLEKAFDDAVAEVKAGRPVLIDANITDKRGIPVELDLEQDDTLYTPEFLKEWDAEELKPFDEYLAQYSAE

SEQ ID NO: 6255 - protein, 384 aa, Pediococcus pentosaceus ATCC 25745
MIYFDNSATTKVDKNVLETYQKVSNKIWGNPSSLHDMGEMSFNLLEQSRKQIASLLNVKPHEIFFTSGGTEGDNWVIKGTAMEKRMYGKHLITTAVEHPAVKNSMEQLAQLGFDITYLPVDDEGRINIQDLKDAIRPDTILVSIMAINNEIGTIQPLLKAAEVLKDYPKVHFHIDAVQGIGKGIQAAIMNDRVDFVTFSGHKFHAPRGVGFIYAREGRRIAPLLTGGGQEKNLRSGTENLPAIAGMAKALRLLLDGEDQKVALQESIKEKIYNHVTKFEKVVAFSKIQANFAPHILCFAIKGVRGETIVHAFESHGIYISTTSACSSKKQQASSTLTAMKIDSTISTSAVRVSLDSANSLEEADEFNRIFDQLYQDFSKINKNS

SEQ ID NO: 6256 - protein, 473 aa, Pediococcus pentosaceus ATCC 25745
MHNFIKNFIKKENPAIYEDKDSHLTRTLVVKDFLALGVGTIVSTSIFTLPGVVAAQHAGPAVVLSFLAAAVVAGLVAFAYAEMASAMPFAGSAYSWINVILGKGFGWVAGWALLAEYFIAVAFVASGLSANFRGLLSSIGIQIPKQLANPLGTNGGIIDITALIVVIAVALLLAHGTTGAARIENALVVLKVVAILVFIIVGLSAIHIQNYLPFIPKYHTNPDGTSFGGWKGIYSGISMIFLSYIGFDSIAANAGEAKNPEKTMPRGILGSLIIAVILFIAVSLVLVGMFHYTNYANNAEPVGWALRHAGHGVIAGVIQAIAVIGMFTALIGMMMAGSRLLYSFGRDGMLPKWLGQVNPKGLPNHALSLLTIIGIIIGSMFPFAFLAQLISAGTLIAFMFVSLGIYVLRPREGKDIAIPSFKMPLYPVLPALAFLGSLAVFWGLDAQAKLYSLVWFIIGIIVYTFYGARHTTD

SEQ ID NO: 6257 - protein, 626 aa, Pediococcus pentosaceus ATCC 25745
MAKANNAARPQNGPRPGGHGGPRGVIEKPKNFWKSAGRLVKYLSPWMFGFIVVLIFAAISTILQIRAPKILGEATTEIFKGVMKGAAQMKMGVPVHKFPIDFTKIVEILTSVGLLYVLSAAFSFVQQVVMTRVSQKAVAQLRADFKNKMQKLPISYYDTHSNGDIMSRMTNDMDNISSTLQQSLTQLVTSFFQFVGVLYMMLTISWKLTLLAVATVPLSLIVVAVVAPKSQRFFKSQQKHLGLMNNQVEETYAGHTVIKTFNHEQDAIEDFEKENVKYYKSAWKAQFISGLIMPLMNFVKNIGYLMVAVIGGVQVAHGNLSLGNVQAFLQYTQQFSQPITQIANIANTLQMTMASAERVFEVLDEPEMEDLHTDVADVKTDAKMIFDDVDFRYVPDKPLIRNFNLRVEPGEMVAIVGPTGAGKTTIINLIERFYDVNSGTVYLDGKDTRNMERTELRSKIAMVLQDTWLFTGTIRENIKYGREGATDEELYNAAKAAHADSFIRQLPDGYDTILNEAASNISQGQRQLLTIARAFLADPEILILDEATSSVDTRTEVLIQKAMNNLLSNRTSFVVAHRLSTIRNAQNIVVVNNGQIVETGNHDNLMSQNGFYADLYNSQFASGEVI

SEQ ID NO: 6258 - protein, 66 aa, Pediococcus pentosaceus ATCC 25745
MEQGTVKWFNADKGFGFITREDGSDVFVHFSAIQGDGFKTLEEGQAVSFDVEESDRGPQAVNVNKN

SEQ ID NO: 6259 - protein, 335 aa, Pediococcus pentosaceus ATCC 25745
MDLIIPASYDPKLSVRQTQEAIRYIRETFQDEFGKELNLSRLSAPMFVPSATGLNDNLNGVETPVSFSMQDMPETSIEIVHSLAKWKRVALKRFDFEMHSGLYTNMNAIRKDEDLDNIHSIYVDQWDWEKVIDQSERNLTTLKETVQTIFKVIKHMEHEVWYKYPEAVYHLPDQIHFVTTQELEDRFPKLTPKEREDAICKELGCVFLMQIGGTLKSGERHDGRAPDYDDWQLNGDILFWYEPLQKALEISSMGIRVSEESMLKQLKIANAEDRIHLPYHQMLLNHQLPYTIGGGIGQSRLCMLLLGKAHVGEVQASVWPQSMIDQCEENQIHIL

SEQ ID NO: 6260 - protein, 245 aa, Pediococcus pentosaceus ATCC 25745
MAGKIHEEQHLVTHYEGDQTGTMKVPMIINAMLLTSDNQSQQLGVGNAVVDKTGLGWVITQYVLKIKRLPRVGEQIVVGTRAVNNNDYFCQRDFWVKDQKGEVIVENTSIFVLMDRTTRRMHKLLPEIIEPYEADQVKRIVRLPKLETIEGASVAKDFSVEYFDIDPNRHVNNAKYFEWIFNTVDQDTLNNYYPAMINIRYHVEIQPNQVAHSTFTMDHDTLKSDHKIFANDTLCCEANVEWNHR

SEQ ID NO: 6261 - protein, 522 aa, Pediococcus pentosaceus ATCC 25745
MVLFGVVSIILITGGPAVQQLMNALLSFVTSKYEWLYISIYVINFMFFIVLIFSKYGKIRFGKADPAKDYSGFQWGSMVFATAIDASILMLSATDPLQYLQHPAFGAKPLSTQAFAYANVVGEFNWGPMAWMMFATATIAIAYTMYVKKIPVMRLSTVIPLLKGDQLYKKVLRQLIDFLVVFGIMGGIGSSIGMEIPVIARVLSIIVGIKDTIYLKLFLFFILLILFTLTVYAGLNKGIKKLSAWHIYLAIIFLAIVLVAGPTKFLVGSEGQTLKLMAQHFTALSFNKANAGTNGFAQHQTLFYWGWWLAYMPVMGLFIARISHGKTIRQVVLGMMTYGVGGCISFYAVLGGYALWLQQSGTLNIVHILNTQGQAAVQAALITTLPMNKLMLILFCVSCFIFLATTISSSAFIVSSFTSLDLSHGRQPSRWNRMAWVIVFIIFSLGIVIVGGFEVVQAICTVAGFPLIFVCILLLYSIYQDVTGREFNRVRMPSYLPVVNLRPLQKMMVSYHLMHNISQDDF

SEQ ID NO: 6262 - protein, 592 aa, Pediococcus pentosaceus ATCC 25745
MATNARFNDTIRKDHTKFNFKQFFGLIKRTSPKYVLLFLGVFLLAISSGVQVYVPKLASTLVNNFSKGVDYALLGKVVLLFVASAIFSAIGGTVLGIFGENVIQNLRKTLWKRLTLLKVSYFDTVKAGEISSRLVNDTNQVKQLLAVTFPQTLASIITVVGTIYMMIRMDWHMTLAMVIAVPVVVILMVPVMAFGTKVGHIRQDALALFNGIVSETLSEIRLVKTSNAENQAQEHADNEINRLFKIGKKEAIFDAAMQPIMMMVFMSMIFGLLAYGIHRIAIGAMEIGTLMSFLMYLFNLIGAMPIIATLFSEMAKASGSTRRVEELLEEEPEDFNRGETLDLADKNLKVEHVDFAYADTPEETVLKDISFEAKPNQVIAFAGPSGGGKSTIFSLLERFYEPTHGEIKFDDTNIQDIQLTNYRQQIGFVSQDSAMMAGTIRDNLTYGLDDTFEDSQLWKVLELAFAKKFVEEMPKQLDTEVGERGVKISGGQRQRIAIARAFLRNPKILMLDEATASLDSESEMKVQDALANLMKGRTTLVIAHRLSTIVDSDQIYFVENGQITGSGTHQELVDSHQMYAKYVNEQFKVAAG

SEQ ID NO: 6263 - protein, 395 aa, Pediococcus pentosaceus ATCC 25745
MKKDLVISAGSSTLKWKLFSIPDETVIATGLIDRINLPNSVFMVKRPHHDPYKVVKPSITYDLAVTMLLSFLKDHGLVKHLREITGIGHRVVAGGEHFKDSVLIDDEVLAEIHNLAEYAPLHNPVQARYIEIFKQLLPDVRQVAVFDTSLYADMPKVNCLYPIPYEYYTDLGIRKYGAHGTSHRYVANRAADLLKKDLSDLKMITCHLGSGSSITAFNQGHVIDTSMGFIPLGGVMMATRSGDLDPSLVGFLAEKLGISVNEVIDILNQKSGLLGISQLSPDQRDLEDAENSNPQAKLALEMFINRVVRFIGSYVAELGGLDALIFTAGCGENGIAMRERIMEQLTYFGINADVERNNVRGKEQQINQVTDAVQVLVVPTNEELMIARDIQRILR

SEQ ID NO: 6264 - protein, 279 aa, Pediococcus pentosaceus ATCC 25745
MKHLKRNMALLSVAALSFILTACSTAPITSHSTGIWDGVIVYNFSRFIIYLSKLFGGNYGWGIIVFTIIIRIIILPLMIYQTRTTMKTAELQPKLKQLQQKYSSRDAESQQKLREEQQKLYAEAGVNPMAGCLPLIIQLPVMYALYAAVSRTQVLKEGTFLWLQLSDKDPYFILPILAALFTFMSTWLSMKSQPAGSQNGMTSAMTFGMPLVILITALNFPAAITLYWVVTNLFQVGQTLIIQNPFKIQKEREEKIQTEKAKRKAIEKAKRRAMKSKRK

SEQ ID NO: 6265 - protein, 318 aa, Pimpinella brachycarpa
MMVQQRDELGLSLSLSFPGSSHEQNKSNTTNNKHNQMPHASTPLELNLMPSQPLNLLHNNTTTWTHPASHDRKMEACRVDRRSLLTGIDVNRIPAMTVDMEEETGVSSPNSTISSLSGNKRSLVNERSELANGDEILESSRSDDEDGDNSRKKLRLTKDQSAILEESFKEHNTLNPKQKIALAKRLGLRPRQVEVWFQNRRARTKLKQTEVDCEFLKRCCQTLTEENRKLQKEVQELRALKSSPQFYMQMTPPTTLTMCPSCERVGGLQSATTTLSAGPSITQAEPLRSHPMSSNHHRLPFNPWASPQRPLDALHPRS

SEQ ID NO: 6266 - protein, 580 aa, Lycoris aurea
MSNNVTLGGPPSSSSRNRKRHLILITSVSFIFILISCVSVGFLVRTTAAKSTIQATRPRPTQAISRTCGLTLYPDLCVNSLVEFPGALSAGERDLVHITLNMTLQHFSRALYDASAIAGVAMDTYARSAYEDCIELLDSSIDQLSRSMLVVGPVQSQKPMGGPPSDDEDELTWLSAALTNQDTCSDGLSGVTDDYVRQQMTGYLKDLSELVSNSLAIFAISSKNKDFSGIPIQNKKRNLLGMENFPNWVEKSDRRLLQVPATGVQADIVVSKDGNGTYTTIADAIKHAPEGSSRRIIIYVKAGRYEENIKVGRKKINLMFIGDGKGKTVIAGSRSVFDSYTTFHTATFAATGAGFIMRDMTIENWAGPQKHQAVALRVGADRSVVYRCDIIGYQDTLYVHSQRQFFRECDVYGTVDFIFGNAAVVFQNCSLWARKPMMMQKNTITAQNRKDPNQNTGISIHACNILATPELEAAKWAYPTYLGRPWKLYSRVVYLMSYMGDHIHPLGWLEWNAAFALDTLYYGEYMNYGPGAAVGKRVTWPGYRVITMPEEASKFTVGQFIYGSSWLPSTGVAFLAGLSV

SEQ ID NO: 6267 - protein, 580 aa, Lycoris aurea
MSNNVTLGGPPSSSSRNRKRHLILITSVSFIFILISCVSVGFLVRTKAAKSTIQATRPRPTQAISRTCGLARYPDLCVSSLVEFPGALSAGERDLVHISLNMTLQHFSRALYDASAIAGVAMDAYARSAYEDCIELLDSSIDQLSRSMLVVGPVQSQKPRGGPPFDDEDVLTWLSAALTNQDTCSDGLSGVTDDYVRQQMTGYLKDLSELVSNSLAIFAISSKNKDFSGIPIQNKKRKLLGMENFPNWVKKSDRRLLQVPATGVQADIVVSKDGNGTYTTIADAIKHAPEGSSRRIIIYVKAGRYEENIKVGRKKINLMFIGDGKEKTVIAGSRSVFDSYTTFHTATFAATGAGFIMRDMTIENWAGPQKHQAVALRVGADRSVVYRCNIIGYQDTLYVHSQRQFFRECDVYGTVDFIFGNAAVVFQNCSLWARKPMTMQKNTITAQNRKDPNQNTGISIHACKILATPDLEAAKWAYPTYLGRPWKLYSRVVYMMSYMGDHIHPLGWLEWNAAFALDTLYYGEYMNYGPGAAVGKRVTWQGYRVITMPEEASKFTVGQFIYGSSWLPSTGVAFLAGLSV

SEQ ID NO: 6268 - protein, 605 aa, Lycoris aurea
METSIGSVDAAKPAPNGMVGSPPSATAHPITPCLPAAAIPSECTLGGHVARRLVQVGVRDFFGVPGDFNLTLLDHLIAEPGLNYVGCCNELNAGYAADGYARAHGVGACVVTFTVGGLSVLNAIAGAYSENLPLICIAGGPNSNDFGTSRILHHTIGLPDFSQELRCFQTITCFQAVVNNLEDAHELVDTAISTALKESKPVYISISCNLPGIPHPTFTPEPVPFSLSPRVSNKMGLEAAVEATVAFLNKAVKPVMVGGPKIRVAKAGDAFVELANASGYAVAVMPSAKGLVPETHPRFIGTYWGAVSTAFCSEIVESSDAYIFAGPIFNDYSSVGYSLLLKKEKAIIVEPDRVVVANGPAFGCVLMKDFLRELAKRLKKNTTAYENYQRIFVPEGQPLEAAPKEPIRVNILFKHIQKMLSGDTAVIAETGDSWFNCQKLKLPDGCGYEFQMQYGSIGWSVGATLGYAQAAKDKRVIACIGDGSFQVTAQDVSTMIRFGQNPIIFLINNGGYTIEVEIHDGPYNVIKNWNYTAFVEALHNGEGKCWTAKVFCEEDLKEAIETATGPKKGCLCFIEVIAHKDDTSKELLEWGSRVAAANSRPPNPQ

SEQ ID NO: 6269 - protein, 605 aa, Lycoris aurea
METSIGSVDAAKPAPNGMVGSPPSSTAHPITPCLPAAAIPSECTLGGHVARRLVQVGVRDFFGVPGDFNLTLLDHLIAEPGLNYVGCCNELNAGYAADGYARAHGVGACVVTFTVGGLSVLNAIAGAYSENLPLICIAGGPNSSDFGTSRILHHTIGLPDFSQELRCFQTVTCIQAVVNNLEDAHELVDTAISTALKESKPVYISISCNLPGIPHPTFTPEPVPFSLSPRVSNKMGLEAAVEATVAFLNKAVKPVMVGGPKIRVAKAGDAFVELANASGYAVAVMPSAKGLVPETHPRFIGTYWGAVSTAFCSEIVESSDAYIFAGPIFNDYSSVGYSLLLKKEKAIIVEPDRVVVANGPAFGCVLMKDFLRELAKRLKKNTTAYENYQRIFVPDGQPLEAAPKEPIRVNILFKHIQKMLSGDTAVIAETGDSWFNCQKLKLPDGCGYEFQMQYGSIGWSVGATLGYAQAAKDKRVIACIGDGSFQVTAQDVSTMIRFGQNPIIFPINNGGYTIEVEIHDGPYNVIKNWNYTAFVEALHNGEGKCWTAKVFCEEDLKEAIETATGPKKGCLCFIEVIAHKDDTSKELLEWGSRVAAANSRPPNPQ

SEQ ID NO: 6270 - protein, 394 aa, Leuconostoc mesenteroides subsp. mesenteroides ATCC 8293
MHFEESDLLKTLPKQFFATLVAKVNAKIAAGKDVINLGQGNPDQPTPEYIVESLQAAAENPADHKYSLFRGEERFKKAIAEFYADEYGVSIDPETEVAILAGSKIGLVELPWALMNPGETLLLPDPGYPDYLSAAALGRVNYEAVPLKQENNFLVDYEAIPNSVAEAAKFLYLNYPNNPTGAIATSEFYQQTVRFAEENQVGIVSDFAYGAIGYDGHKPLSFLQTENSKSVGIETYTFSKTFNMAGWRVGFAVGNAEMIEALNLIQDHLFVSLFPAVQDAAIEALTNRAAREKAVTDLTNLYQRRRDVFINAVREFGWEPYVPRGAFYVLMPVPKGYTSSEFADLLLEEANVAVADASGFGKGGQGYIRVGLTIVEERLAEAAKRISKLPIFSK

SEQ ID NO: 6271 - protein, 443 aa, Leuconostoc mesenteroides subsp. mesenteroides ATCC 8293
MAENKITLSRSLSTKDLVVYGIIFMIPVAPIAFYGSFLSPAHGMVALAYLIGMIAMLFTGFSYASMASEFPYSGSVYTYVQKGTNPVLGFLSGWGITLDYILIPVITYLISASFGQSLLPAVPFWVWILGIAIFNTVINLLGIKVVSKFSWLLFGLQGVVLIAFIVGTIVALANGTVSFNVSSFYNASHFDLSGVVQATGIVIVSYLGFDAISTLSEEANDPTKSIGKAIVLSIILIGSLFVIVTFFAGFVAPNYSELNPDTAFLTILGKVGGSWLVHLAEFTLVLSFGLAGGQEGQTAVSRILYSMGRDGILPKRLSYLHPRYNTPWVAIILVGIVSVALSLSLSLTTVSNLISFGALFGFLSLNIAVIWHFYIKRPDKNIESFVKYLVSPFIGFSVSLWIFLSLALEAKLTGLFWLIIGLVILVYKTSIFKKPVPQFDFSE

SEQ ID NO: 6272 - protein, 281 aa, Leuconostoc mesenteroides subsp. mesenteroides ATCC 8293
MNKKSKWTLLVAVTVVTVGAGVNYRILSAKADTNQSGRTVKEIKKSGEIKIAVFGDLKPYGWVDKNGKRQGYDIELAKKVAKDLGVKVKYVQVNANARVDALNSGKVDLALANFTVTPERKKVIDFAKPYMKVSIGVASKKSKLITKVDQLHGKKLIVNKGTTAETYFTKNYTKASLLKFDSKTQQFAALKDGRADAITDDNSYLFAWVKSHPDYKVGIKKLGEQSYISPGVQKGNKSLLKWTDKEINKLNKNQFFTKDYDKTLAPYFGKDVKSSDITINN

SEQ ID NO: 6273 - protein, 826 aa, Leuconostoc mesenteroides subsp. mesenteroides ATCC 8293
MDNNYTPSAQNVLVLAQEQAKYFKHQAVGTEHLLLALAIEKEGIASKILGQFNVMDDDIREEIEHFTGYGITSRYDKNIYLPYSPKAADILHQANEELRALAQSKVGTEHILLALLQDESILSSRILLALDVNLQDMRRAILRKLGITDVRKQMKQQEKQQASAGTPTLDGLARDLTQMARDNKIDPVIGRPKEVRRVIQILSRRTKNNPVLIGEPGVGKTAIAEGLAQKIVDGEVPENLAKKRLMALDMGSLVAGTKYRGEFEDRLKKIIEEIYNDGEVILFIDELHTLIGAGGAEGAIDASNILKPALARGELQTLGATTFDEYQKYVESDAALERRFASVTVDEPTQDDAIAILKGIRSHFEKHHQVQIDDAAIEAAVKLSARYISDRFLPDKAIDLMDEAGAKVRIDATGKATPISKAKVRFAEVQAEKEAAITSLDFEKAAQLRTEEMKLKQKLAKSEAKDTQNNQKENAERYSLHVTEEDIAEVISQQTGVPVMQMEKNEQQRLVNLESVLGRRVIGQKTAISAVARAIRRARSGLKDPSRPIGTFMFLGPTGVGKTELAKALAEAIFGSEDNLIRIDMSEYQERWSSSRLIGSAPGYVGYDEGGQLTEQVRNHPYSVVLLDEAEKAHQDIFNLMLQVFDDGYLTDSKGRKVDFKNTIIIMTSNLGATRLRDEKSVGFGAVDLKDDHEAVAAKIRETLKETFRPEFINRLDEAIVFESLTKPELHEIVKLMSRSVLQRVAEQGISVKITPAAIDVVASAGFDPEYGARPIRRALQTKVEDALSEELLRGNITTDDAVTIGAKNGEIRISTKPLKKDTTKA

SEQ ID NO: 6274 - protein, 243 aa, Leuconostoc mesenteroides subsp. mesenteroides ATCC 8293
MKKYEIKRRVEYYEADTTQKLSLPMILNYAVLASKCQSDELGVGQDFHLGRGLGWIILQYEVIIKRRPKIGEIIRIQTFATQYNPFFVRRPFVFLDENDNEIIRVDSIWTMIDMTNRRMARLPQDIIDQYDAKRVKQISRIPNPEKFSDDDQYTERDYHVRYLDIDGNKHVNNSKYFEWMQDVIAPEYLLTHEITYINLKFENEIRLGHTILSQVVQNDNKSKHRIMMENVISAEAEFKWRKI

SEQ ID NO: 6275 - protein, 419 aa, Leuconostoc mesenteroides subsp. mesenteroides ATCC 8293
MAKTMAVNAGSSSLKFQLLEMPAEQVIAQGVIERIGMDDAIVTIKYGAEINAERLVGHSEDDEHITLSKDGKGKKYENVTAIKNHQQAINFMLQKLTDLGIIKDFNEITGVGHRVVAGGEWFNHSVVVTDEVLAKIDRLADYAPLHNPANAMGIRAFQKLLPDALSVAVFDTSFHQTMPDENFLYALPYEYYTRYGARKYGAHGTSHRYVASRAAELLGKDLKSLKLITLHLGAGASITAIKDGKSLDTSMGFSPLAGVAMATRSGDVDASLVYYIQEREGLSNEEMLNILNKKSGLLGISTISSDMRDLLDVQDTNEHADMAIRIFINRVVKYVGQYVAEMGDVDAIVFTAGIGENSVPVRKMIIDKLNYFGVKLDEEKNNVRGKEVEISTNDSKVKALLIPTNEELMIARDVESLKA

SEQ ID NO: 6276 - protein, 314 aa, Leuconostoc mesenteroides subsp. mesenteroides ATCC 8293
MTKQVFLPDDIPAVGKKILEEAGLEVVVGSGRDHEKMKAEGVEASAVLIGTQKFDADIMDAMPNLKVIARNGVGYDAVDVDAATQRGIYVVNTPKALSGSVAETAVSELLAISKNLYQDSKAIHDDNWNYRKAHPGRDIEGKTVGILGFGRIGQQVAKKLSGFDVKVIAFDPFAKDVPGVELVDRETIFKTADYVMVHLPALPETQHSIGADEFKLMKNDAFLINMARGSILVESDLVLALKSGEIAGAALDVFEEEPLPVTNPLVALENVLLTPHIASNTVETKARMAVDATNDIVRVLSGKNPESAVNKIGK

SEQ ID NO: 6277 - protein, 439 aa, Leuconostoc mesenteroides subsp. mesenteroides ATCC 8293
MAFVDQAQIEVKAGKGGDGIVSFRHEKFVAMGGPFGGDGGHGGSIIFKVDEGLRTLMDFRYNRHFKAQPGGNGGTKGMTGASADNRVVKVPQGTTVSDADTGEVLADMLENGQELVVAKGGRGGRGNIHFATPANPAPELSENGEPGQIRNLKLELKVLADVGLVGFPSAGKSTLLSVVSNAKPKVAAYHFTTLSPNIGMVRLDDDRDFVMADLPGLIEGASQGIGLGFQFLRHVERTKVILHLVDMSGIEGTDPYTQYRKILDELQQYDETILNRPQIVVPTKMDMPDSEENLAKFRKEVATDSGLPIQPEIVPISSITRDGVKDLMRLTADMLATAPAPESYRPETKNDTSEKSYTFKPETHDFTVEWIADEERWLLSGAEIEKLFLMTNIQRDATIMRFARQLRHMGVDDKLREAGAKDGDDVRINNSDFVFEFSE

SEQ ID NO: 6278 - protein, 476 aa, Leuconostoc mesenteroides subsp. mesenteroides ATCC 8293
MSESKTRTGWLHKATPASFTTSDRHLRKTLGVKEMLALGIGTIVSTAIFTLPGIVAANHAGPAVAISFVIAAIVSGLAAFAYAEFASALPFAGSAYSWANVVFGEVFGWIAGWALLAEYFIAVAFVASGWSANFKLFLGSHNLVLPKALAGSFAAGNGGVIDIASLFAVLIVAVLLWRGTNTTARVENVLVVGKVLVILIFIGVGLTAIHPGNYVPFIPAHKAGTDFGGWSGIFAGASQIFLAYIGFDSIAASSAEAKDPKKTMPRGIIGSLIVATILFVTVALVLVGMFHYTEYKDNAAPAAWALLHSGHEFTSNLLSVVALIGMFTAIIGMMLAGSRLLYAFGRDGLLPSFLGKVNDKGLPNNALLVLSVIAILIGSVFSFTELAGLISAGTLIAFIIVSLGIYALRPREGKDIQEPGFKMPFYPVMPALAALGSGFIFYELDNQAKIYAFGWFVVGIIIYAVYGSKHSKLSQK

SEQ ID NO: 6279 - protein, 230 aa, Leuconostoc mesenteroides subsp. mesenteroides ATCC 8293
MTKILVVDDETAIATLLQYNLQQNGYEVTVASDGLSAYQKAKEQQFNAILLDLMLPEMDGMTVLKQLRQDKVSTPIILVTAKGDEFDRVLGLELGADDYITKPFSPREVVARLKAVLRRSQVSTDTNKTDEMVISIQDLLINDSKKTVMKENIVLSLTPREYDLLLYFAQRLGRVIDRETILTAVWGYEYTGESRMVDMHISNLRDKIESNPKAPKILKTVRGFGYTMTN

SEQ ID NO: 6280 - protein, 457 aa, Leuconostoc mesenteroides subsp. mesenteroides ATCC 8293
MSDSKGDSNLPKRGLQNRHVQLIAIGGTIGTGLFMGAGNSIHFAGPSILLVYLVIGMFMFVVMRAIGELLYADPSQHTFISFITKFLGNRAGFFARWSYWLTVVFMGMAELTAVAKYIQFWLPDLPSWLIQIVMLILLTSINLIAVALYGETEFWFAMIKIVAILSLIVTGIIMALTGFETPVGKVAFSNVWHHFELFPNGVGNFINAFQMVMFAFVGMEFIGMTTAETENPRSVLPKAINQIPWRILFFYLGALFIIMTIYPWQKIPEDQSPFVMVFQLAGVKWAAALINFVVLTSAASALNSVLFSASRNFFALSFQSKAKFLQPFRKTSKTQLPVNAVLVTSLMVAFSALISVIPSITNAFSFVTSASTDLFLMIYVLILFAYMKYRKSDSYMPDGFLVIAPKTLVPLAILFFSFVFITLFFNPESRLPAIGATIWMVVFGCISMKQPKQALNK

SEQ ID NO: 6281 - protein, 323 aa, Leuconostoc mesenteroides subsp. mesenteroides ATCC 8293
MTPAYELFNLGSNDELAGEISTILGVPLAPIDIKTFADNEIYERIENTVRGRNVYVIQGITAPVNDNFMKLMIFIDAARRASANSINVIIPYFGYARSDRKARSREPISARMIANMLESQGVKRVMTMDLHADQVQGFFDIPVDHLLAMPALGHYFYANDLLGDDLVVVAPDHSSVARARKFAKLLHADWALVDRRVDSVRPNTPYQITGNVAGKRAILIDDIIDTGTSMVLASEAAANAGAIEIYAVATHAVLSDNAVDHLEKAPIDHVVVANTVEIAEHKNMSKLKVLSVAESFAEAIRRINVFESIEDVLKSPDNLDVML

SEQ ID NO: 6282 - protein, 398 aa, Leuconostoc mesenteroides subsp. mesenteroides ATCC 8293
MNSGDLAWVLVSAALVWVMTPGLALFYGGLGERRNLLHTMFIPVMIIGIASLVWFVVGYTLSFGGSGNVIGNFKHLFLTNVSFTHSTKDLTIPDGAFALFQGMFPIITAAIITGSVIGRVRIKALLVFIALWLIFIYSPLAHMVWGGGFLAQLGAIDFAGGTVVHISSGVTGLVLALMIGHRHIDKHIPVRPSYVLIGGALLWVGWFGFNSGSALAANGTAVLALVNTWLASAAAVLTWGLVEYKYHGRATLSGITSGGVAGLVAITPAAGFVAPWAAVVMGLLAGFIGFAGITFVKNSFGYDDTLDAFGIHGIGGAVGAILTGVFADKSVGGVAGLINGNISLVGKQLVAILFTIAFAAIGTYVLAKITELIAAPLRLTADEEAEGYDAIMHDLTVE

SEQ ID NO: 6283 - protein, 303 aa, Leuconostoc mesenteroides subsp. mesenteroides ATCC 8293
MTESTFKSGFVAIIGRPNVGKSTLLNRIVGEKIAIMSDKAQTTRNKIQGIYTTDDAQVVFIDTPGVHKPQNSLGDFMVKSAFSALHEADAIWFVVDASMARGRGDDFIIDRLQEVKNTPIYLLINKVDLLAPNDLLDVIASYQNDAPEWAEVFPISATEGDNVPELLDNIVSHLDEGPQYFDADQLTDHPERFVIGELIREKVLQLTRQEVPHSVAVVIDKIARENEEKIHIQASIIVERPTQKNIIIGKQGAMIKDIGTRARKDIERLLGDKVFLETWVKVEPRWRDRPQALQTLGYRQEDY

SEQ ID NO: 6284 - protein, 451 aa, Leuconostoc mesenteroides subsp. mesenteroides ATCC 8293
MKVTKFGGSSLANGQQLQRVYDIIRADDDRKVVVVSAPGKRFKDDRKVTDLLISYAQATLADEDTTEIIETIKHRYHSIGEYFELPDYELADLDEQIEHLARKHYRSFDYLYAAFAAHGEYLNAQLIAKVFNHLGMPARFVDPKEIGLVVDDNARSATFDAASYTTIGELDLSTSERLIVPGFFGYTKNGDMATFSRGGSDITGAIMARGLRADLYENFTDVSAIYAVNPSIVEHPAAIQQMTYDEMRELSYAGFAVFHDEAIIPAIQGGIRINIKNTNDPDAPGTFIVPPTEVQQTRPVTGIANSNRFAALYLHRYLLNKQVGFTLRILEILKRHNISYEHMPSGIDDLTIIFDKTMLTQEQVDNMLSDIAAEIKPDTLKWIPSYGIIMVVGEGMRNRVGALTEIVAPLKERNISLQMVNQGASEISIMLGIQPDLSDSAVEAIYTNIFK

SEQ ID NO: 6285 - protein, 320 aa, Leuconostoc mesenteroides subsp. mesenteroides ATCC 8293
MIMKVYYEDAKKTFDVEIEALTRVKSSLGKSFDEAVDKILSTKGRVIFIGIGKSGIIADKIAASFSSVGLASFYIDAGTAYHGDLGRVSSDDVVIFISNSGETQEVLQALSALQNIHNNELATIAMTGSEDSTLAKNTDIVLSIDVAEEADITKLAPTSSTTATLVMGDALLVAIETAKEFDRESFAMYHPGGSIGKILLQNVKNSMHTKIPYVHVDTSINEVIYRISDYGIGITLVKDEQENVIGIITDGDIRKKFLNISKVKGSTAKDYMTQGFISISEDKRNREAWRKMANYNISNLVVLDKDKKVVGVVTIHDVLE

SEQ ID NO: 6286 - protein, 1506 aa, Leuconostoc mesenteroides subsp. mesenteroides ATCC 8293
MKQSKLREQMVKNAPLWDESLEHDACGMGFIAQRYGQFSHELVERAITLLTRMNHRGGTGSEPDTGDGAGLLMSIPDKFFRKVARIEGITLPQSGEYAVAMLFLPFDTVAKNKVLDKIITEISADGFEYIFDRDVPFDFDACGPTAQQAMPGFRQIFIKKPQHVALGRDFDDALYTLRRHLEDTISDEDMYIVSLSAKTITYKGMLHAYQVGQFFLDLHDEDVEAKIALTHSRFSTNTFPSWDRAQPFRFLAHNGEINTLQGDVNWMKTHGVAIYNEENSDSAMMENTMEHLYRHGRSIPQSLLMLVPEAHSKEANVSDELAAFTEYNESFMAPWDGPAAVVFTDGNIVGARLDRNGLRPSRYLVTDDGYVILSSESGVVDVPANSIIEKGVLGPANMILVDTTTGTFTRNEELKHHFATQYPYRQWLDEYQETLQDLPNQNLLEQRLNDKERLTLFKRFGYTQEVIDGAVLKMANTGQEPTVAMGYDSPLAILSDRPQGLFTFFKQQFAQVTNPPIDALREHLVIATQMYLGREVDFQRDLPENASKLKIDSPILSPADFAKIAHISNSKQKVALIKLAYNLTGLANGRLERALIGINQQADAAIASGATILILSDREVTKNQLTVPALLAVSSLKNYLAANGNATNASIVLNTAEAIETHHFATLVGYGAAAIYPRGAYRILEAYDMNDATHQENYRVAAEKGIVKIMAKMGISTIQGYYGAQLFEAIGLSKNVVDTYFTGTHSRIGGLDLNQIEEEYLKRYTTAYDESQDDPIPSGGAYSLREDGEYHLYNQMMMYKFQTAVRTGNEELFKEYVADIHEAEHEHPGTIRSMWEIVPNRQPIDIHEVERIENIVKRFKVGAMSFGALSQEAHETIAEAMNRLGAKSNSGEGGENRKRFHTIKNSKIKQVASSRFGVNAEYLMSAEEIQIKMAQGAKPGEGGQLAGNKVFPWIAETRGSTPGVRLISPPPHHDIYSIEDLKQLIFDLKAVNPYAKINVKLVSSTGVGTIATGAVKAGADTVTVSGYDGGTGAAPRNSIRDAGLPWELGLAETHQILSANKLRQRMTLETDGKLLTGRDIAIAAMLGAEEFSFATLSMVAIGCIMMRVCHLNTCPVGITSQNPLLRSRFQGKPEDIINMMTFLAQDLRELMAELGFRTLEEMVGHTELLKTRFTTNKKYKSLDFSNMIGQVIPIARKTKDPFIAKRQWPELDMAAKAAIDNTQTLTMSAPIDNVSRAVGARMGGWIAERYGNTKLSPGLLRYTYTGSAGQSFAAYTTQGMELKVIGEANDYVGKSLSGARLIVTPPKDAGYDTNNSPIIGNVACFGGFAGEAYFHGRAGERFFVRNSGVCGVVEGVGDHGCEYMTGGVAVILGKIGRNFAAGMSGGIAYIYDPDHQAAANINLEMVDLFEINQTHGDDVLYSLLQSHAAYTDSQKAKDILAHFEDEKANFIKVYPTEYHQVLNIMNKYETEGFSGLTKELKAFNELMPEYERVPETEEELETLLSK

SEQ ID NO: 6287 - protein, 401 aa, Leuconostoc mesenteroides subsp. mesenteroides ATCC 8293
MEKENVMTKPINHQVIKTEASGIRLVLDLVKKPADQMIELTVGEIDLPTPAATKEAGKQAISNNVTKYTENMGFLSLRRVISDYIKKFYEVSYSPESEILVTVGASQGIDLTVRALIDAGDEVLLIGPAYPAYIQAVVLAGAIPVVVDTRSTHFRLSPEQLGSAISSKTKLVILNYPNNPTGIVLSKEELSSLASVIQQNDLYVLTDDVYQRLTYDQDCAPSIASASLMKERTIIVNGLSKSHSMTGWRIGYLAGPKVLIQEIYKIQQANVGCASSISQMAALTALTTDIEAPKTYIRVFRKRRDYVLQRLDEMSLNYTKPDGAFYVFIDVKAFGMSSWDFVAFTINESDLVLVHGSAFTEAGEGYVRLSFANEMQVLVEAMNRLEKTVDVLTTKKSAHLS

SEQ ID NO: 6288 - protein, 390 aa, Leuconostoc mesenteroides subsp. mesenteroides ATCC 8293
MLAKRVDSLEASPTLAMGKKAKDMIADGIDVVNLSQGEPDFNTPDNIGRAARIAIKDHLTDSYTATNGLVELKNAVVAAAKRDYNVSLLTDQVVITTGAKLALYALMQILVDPGDLVITSAPFWVSYSEQVKLAGGSFKAIVSSDPQFKLTIDVLNKLEEKPKVVILNTPNNPSGAVYSKNELESIISWTKTNDVYLILDEIYGKLVYGDTVFHSGLSLESLVNSKMIIINGVSKAYAMTGWRIGWAIADVSITHAMTKILGHLTSNPTVVAQYAAIEALNGQQKSVETMRKSFESRLNFLYRDLSEIDNISIPFKPSGSFYIFFKIDSKFMKKNNFKNTNEISMALLSEEKLAIPSGEGFGMPGYLRLSYAKSEAELIEAVKRLKHFFS

SEQ ID NO: 6289 - protein, 399 aa, Leuconostoc mesenteroides subsp. mesenteroides ATCC 8293
MKGTPLMTKNINKNVHNTGLSGIRLVSNFIKKPVNEVIQLTVGEIDLPTPFATKQAGIKAIEQDHTKYTDNMGILALRRIITEYAQEFYSEPYNPVTEVLVTVGASEGIDLAIRALVNPGDEVILVSPGYTAYTQAVTLAGGVPVVVDTRSSNFRLLPNQLEEVISEKSKLVILNYPNNPSGVVLSSQELVELANVIKRHDLYVLTDDVYNRLVYDQDFAPSIASVPDMKERTLVLNGLSKSHSMTGWRIGYLLGPECLIHELYKIHQTDVGCASSISQEAAMTALTVDRDNPSEIVPIFRERRDYVLKRLDEIGISYIKPEGTFYVFANIEKFGMTSLDFVKFLIETVDLAVVHGSAFTEFGEGFIRISYAMDLSILKEALDRFQAAVAKLNNQKSLS

SEQ ID NO: 6290 - protein, 312 aa, Leuconostoc mesenteroides subsp. mesenteroides ATCC 8293
MSEKRIHIVGDLHEVAIQKFTSAGYDVSHSPNYDEKKLLSLASDAAVIIMTDMAFDKNWFDALPNLKLIARRGVGYDNIPVESATKHGVWVTNTPGANAIAVAELAVTLILTVLRKVNQATNSVQKGEALTYPASLMGHNLSGKIIGLIGYGQIAQNLEKILHGFGAHVLVYSRTKRETLYGQFVSYDTLLAQSDIISLHIPATPETSGILNHEAFSKMKTNAILINTARAALVDEEALVEAINTGKIAGAGLDTTSYETIKTASPLLNHDQIVITPHIGANTVESEYLTAEKVVASVLDFFNNQKPIYRLN

SEQ ID NO: 6291 - protein, 418 aa, Leuconostoc mesenteroides subsp. mesenteroides ATCC 8293
MSKIMAVNAGSSSLKFQLLEMPEETVITQGVIERIGMDDAIITVKYGADVEPVRLVGTEDGTISSTKSGDQKYEAELPIKDHHAAIDLMLKKLSDLGIIKDFQEITGVGHRVVAGGEWFNHSVVVDDDVLSKIDRLADYAPLHNPANAMGIRAFQKLLPHATSVAVFDTSFHQTMPEKNYLYSLPYEYYARYGARKYGAHGTSHRYVTERAADKLGIPLDEFNAISFHLGAGASVTAIKNGKSYDTSMGFTPLAGLTMATRSGDVDPSLIYYIQEREGLSNEEMLNVLNKKSGLLGISTISSDMRDLENVQETNTHAQLALDMFYDRVIRYAGQYFAELGRVDAIIFTAGIGENDAVTRAKVLKSLAFAGVDLDEEANNVRGKETIITTSGSKVTGLLIPTNEELMIARDVVTLQNTK

SEQ ID NO: 6292 - protein, 99 aa, Leuconostoc mesenteroides subsp. mesenteroides ATCC 8293
MAYAIIVTGGKQYKVAEGDTIFVEKLDAEAGEKVTFDQVVLTDSKIGTPFVEGAKVEGTVEKQGKQKKVITFKYRAKKHSHTKQGHRQPYTRVKIDSIA

SEQ ID NO: 6293 - protein, 615 aa, Leuconostoc mesenteroides subsp. mesenteroides ATCC 8293
MSKIIGIDLGTTNSAVAVLEGGEPKIITNPDGGRTTPSVVSFKNGESQVGDVAKRQAITNPDTIISIKSHMGEAGYKVNANGKDYTPQEISAMILQYIKGYAEDYLGEKVEKAVITVPAYFNDAQRQATKDAGKIAGLEVERIINEPTAAALAYGLDKLDKDEKILVYDLGGGTFDVSILELGDGVFEVLSTNGDTHLGGDDFDNKVIDYLAEQFKSENGVDLKDDKLALQRLKDAAESAKKTLSSANEAQIDLPFIASGDNGPLHLQTSLTRAKFNELTADLIKKAEQPVLSALKDAGLSFSDIDEVILNGGSTRIPAVQESVKKMTGKEPNHSINPDEAVALGAAVQGGVITGDVKDVVLLDVTPLSLGIETMGGVFTKLIERNTTIPTSKSQVFSTAADNQPAVDIHVLQGERSMAADNKTLGRFQLADIPAAPRGVPQIEVTFDIDRNGIVNVSAKDLGTQKEQKITIQAAGGLSDEEIEKMMNDAKANEEADAKKKEAVDTRNEADQLIFQTEKTLEEVGDKLGDDEKKPTQDALEALKKAKEDAAADDADLTDLKAKSEELTKVAGELAMKLYQQAAPKDGAEGDAKSADDNTVDGDFEEVDPNKDDKK

SEQ ID NO: 6294 - protein, 391 aa, Leuconostoc mesenteroides subsp. mesenteroides ATCC 8293
MTNPTQPFNSIVLDMAPDKLLDFQLKVRDIPDILRLTFGEPGFAVDERIKQATIDAITNDRSHYAESQGETDLRIAAVAYFNREYHLNYNGPENIIITQGVSEAINVIFQTLLNDNDGLLVPEPAYGPYFSSLDLAHGVRLSIDTTANDFKLTPDMVEETIKNATVPVKAILMNYPTNPTGVTYSRDEIIALAETFTKHNLWVISDEIYSVLTYDQEHVSFAEYIPERTIYINGLSKSHAMTGYRVGFILGQAETIAQLQKTHGTLVFAVPTFVQDAALVALRDVTDTPVKMRDIYRQRRDKVLSQLQALGFDVVEPEGAFYLFAKLPADLGTDGDVFALQLAKEGKVAVIPGSAFSDAAQAYIRISYAASDEDLAEGMKRMTKYIEKVRG

SEQ ID NO: 6295 - protein, 400 aa, Leuconostoc mesenteroides subsp. mesenteroides ATCC 8293
MIKSKLEQVGIFNDNLDKVKPSPIHSFDEKVSDIPNILKLTIGEPDFSVPQHIKEAALAAISADDSHYSVSAGKKTLRQAASDFLNDRYGLDFDPAEEIITTVGATEGLYTLLAAILNPDDKVLIPTPAYPVYAEMTRINGGHPVFIDVSEDEFVLTPDHLREIIATEDHIKAIIITNPSNPTGVTYTAEQLKALADVVRETDILIISDEIYSELSYDAPHVSMASILPEQTIVVNGVSKSHAMTGYRIGILAGPAALMKKINMVHGFVIMTPSNPAMAAATEAFKSAESKDDTLWMKEQYKKRRDYLVEKMTKLGFEMATPSGAFYMFAKIPVDLNQNDVEFAYDLVDRQQLAVVPGSGFGPGGAGYVRISYAASLDMLETAMNRLESYCEEKRTVKIL

SEQ ID NO: 6296 - protein, 397 aa, Leuconostoc mesenteroides subsp. mesenteroides ATCC 8293
MKTFSNRVNAITASPTLVMNGLAKQMQAEGIDVINLGVGEPDFQTPKNISDAAIEAIQAQKTSFYTPASGLPALKQAIVENVSQRYEAAITTQNVSVTTGAKLSLYVLMQVLLNPGDTVVTAAPEWVSYVEQIKLAGGELIEVHSESSSMKLTISDLDKIKETVKLVIVNSPTNPTGQVYSKQEIQDILDWSNTHGVYVILDEIYGQLVYNGAEFTSGLQLQHLENSAMIIVDGVSKAYSMTGWRIGWTLASSEIISAMNKLLGHMTSNPTVAAQYAAIEALNGEQDTVENMRQAFEQRLNTTFEAINKINGVHVDVKPQGAFYLFPQVDEKLKKLVGVSNTVELSTKILEEAHVALPAGEGFGMPGYLRLSYAKDQDTLNEAVLRLTQFFKKYTKD

SEQ ID NO: 6297 - protein, 254 aa, Leuconostoc mesenteroides subsp. mesenteroides ATCC 8293
MHTNDEMQALLVDTVRRKVGYPLRKKVTLGILGGVAISLGFLAAIRAMAPLTALQSPVVSLVGASLFPVGLIMIVFTGQELATGNMFVLGYGALNRNLGWLRYFFEVILITLLNGLGAILLAYIFGHYLGLTKVDIYGKQVATMAMSKVTPSMPMIFFSAIGANWLVAMGVYLGMVAKDTIGKIVGMWFPVMIFVLIGFNHVIANFFLLPAAYFNGTITLVQMLHNLVPAFLGNTFGGLLLAASLYFTKDKNNA

SEQ ID NO: 6298 - protein, 408 aa, Leuconostoc mesenteroides subsp. mesenteroides ATCC 8293
MTDTLVLAYSGGLDTSVAIPWLKDKGYDVIAVVLDVGQHGKNLNEIQAKALKVGAKQSIVIDAKAEFADKYVAPVIKANMMYEGEYPMVSALSRPLIIKKLVDIAHENDAVAIAHGSTGHGNDQVRFEAAIHALDPDMKIEAPIRDFQWSREEEIQYAQEHDVPVPIDLDSPYSIDENLWGRANEAGILENPWNQAPEDAFALTTAIEDAPDTPEFIDVTFEAGVPVALNGEVLSLEKLIVAVNEIAGKHGIGRIDHIENRLVGIKSREIYEAPAAAVLMTAHKDLEDLTLERDVAHFKPIVEQQLANLVYEAKWVSPLFDSLMAFIDSTQQNVNGVVKMKLFKGNATAVARQSEHNSLYDEDLATYTSSSSFDQASAVGFIKLWTLSNTVYEQVNHVHSQAKKNTVK

SEQ ID NO: 6299 - protein, 326 aa, Leuconostoc mesenteroides subsp. mesenteroides ATCC 8293
MELFEQLKNKITGQNKTIVFPEGEDPRIQGAAIRLAADNLIEPILLGDAQEISKTAQAHNFDLSNIETIDPASYDENELAKLNATLVERRKGKTDAETAAKWLQNVNYFGTMLVYTGKADGMVSGAVHPTGDTVRPALQIIKTAPGSSRISGAFIMQKGEERYVFADAAINIDIDSDTMAEIAIQSAHTAQVFDIEPKVAMLSFSTKGSAKSPLVDKVATATALAKKLAPELADSIDGELQFDAAFVESVAAAKAPDSKVAGKANTFIFPSLEAGNIGYKIAQRLGGFEAIGPILQGLAKPVSDLSRGANEEDVYKVAIITAAQAL

SEQ ID NO: 6300 - protein, 379 aa, Leuconostoc mesenteroides subsp. mesenteroides ATCC 8293
MTTEITDEYVQEQLNEGLRCIGCGALMQVEDKDKIGYLPMSALKKSISSEELFCQRCFRLRHYNEIQPVELTDDDFANLLHQISDTKALIVYVIDVFDVTGSAISGLPRFVGKDNPILVVANKVDLLPKLLNKNRLKNWLRTELKAQGIQPVDVFLTSATRPKNLDDLLDTIDNFRDGRDVFVVGVTNVGKSTLINQIIKSRTGIQNLITTSRFPGTTLDRIEIPLEDGQQLIDTPGIIKRDQMAHVLTDKDLKFALPKNEIKPRTYQLNPEQTIFIGGLARFDFISGARSAITAYFENNLNLHRTKLIGADDFYEQHAGGLLVPAPSQLQNLIKHEFSITEDSDIVFSGLGWISVPAGIKVAGWAPKGVSVLIRKAMI

SEQ ID NO: 6301 - protein, 397 aa, Leuconostoc mesenteroides subsp. mesenteroides ATCC 8293
MPEVKPSLLNNLNQHLKLVGPSAIRAFDIEVSEIPDIIKLTLGEPDFNVPDHIKQAAIRSIEANDSHYAASNGTIHLREAAAGFLADRYDIDYDPTNEIIVTIGATEAIYDTLTTILNPGDKIILPTPIFPLYIAVGLVDGAEPVFIDTSSNDFVLSPEMLKAAIAKHGDDIKAVVLNFPSNPTGVTYNDEQIKAIADVLRGTDIIVISDEIYSELSYENSHVSMAKYLPEQTILLNGVSKSHAMTGYRIGILAGPAQLVQKIAMIHQFATTTASNPAMAAAAEALGTEAGRQDTLVMKAEYLQRRDYVYDTMTQLGFKVAKPDGAFYIFAKIPAGYIQDDFAFARDLAQNNGLALIPGSSFGPGGEGYVRLSYAASIETLQKAMHRLTAYMEENGK

SEQ ID NO: 6302 - protein, 466 aa, Leuconostoc mesenteroides subsp. mesenteroides ATCC 8293
MSLLARAFKRESVDNYLSADSHMSRVLTTRDLISLGVGTVIGTGIFILPGHEAADHAGPAVAIAFLIAAIFSGLSGMAFAEFSAAMPVAGSAYSYGGAIYGEIIGWLLGWSLIVEYFLAVSAIATGFSAYLGNLLAIFGIHIPKYLSAGPMEGGIVNLFAVLIILFVAAILSRGLNTSKKVENGAVVIKIAILILFIVGGSFFIKTSNYVPFYPKEFHSGLGGLNGIWAATASIIFAFLGFDTIAAHAAEVKNPQKTMAKGIVGTVIISALLYTLFSIVLTGIVNYKKLGVDDPAAFALQVVHQTQFSIVITIGALIGMFTAVLALIYASSRLTYSFGRDGLLPRSLGKISPGSHLPVNALILAVAVEVIFAGLIPLSTLASLINAGTLTAFAFINFGILILRRRKDLAHDGFKVPGYPIVPFIAGMISLFFITQLSAETLKMFGLWLLLGVIWYFSYGIKHSKLS

SEQ ID NO: 6303 - protein, 443 aa, Leuconostoc mesenteroides subsp. mesenteroides ATCC 8293
MGNNEQKLNRGFGLTASLALVVGTIIGSGIFFKQGSVLESAGSTNAAMLAWIAGGLLTLASGISVAEIGSQMDKTGGIYIYIEKIYGKVWGFLAGWMQVVFYGPAMMGSIAAYFGILFVDLFGLSKSLAIPSAIIALSFVGLINSIPNRFSAGFQIITTTVKMLPIIALIIFGLFFGQHDAIGQTVAQVSQSGQGGFGVAVLATLFAYDGWVTLANISGEIKNPQKVLPKAIIFGILIVLVAYVGVSFGVYQSLPANTIVKLGQNTTLYMATNAFGIIGGRLLSIAVLISLLGTLNGKIVSFPRVLFAMANDGLFPFAKQFAKINMRSRTPNKSIWFMIFLGILMIVFTNPDRLTDIAIFTTFLFYILVFAGVFKLRKKDPFGEKRSFSMPLYPWIPIVAICGSLYVEISEIMHDLSGVIISIAIVAAGYPVYIFLSRRTNKE

SEQ ID NO: 6304 - protein, 66 aa, Leuconostoc mesenteroides subsp. mesenteroides ATCC 8293
MEKGTVKWFNGEKGYGFITRESGEDVFAHFSAIQGDGFKTLDEGQAVTFDVETSDRGLQATNITKG

SEQ ID NO: 6305 - protein, 288 aa, Leuconostoc mesenteroides subsp. mesenteroides ATCC 8293
MEKAKKRQFGIIATIVLAAVIVLGLLWATTAAKKNEEHQDTLQRVEKLGRIIWGVKSDTKLFGLMDTKTGVSKGFDVDIAKALTVQISKQTGVPMSAEFVPVSSSSKIQLLKNTNIDGTVSTMTITPEREKIIDFTNQYFDAGQSILVKKDSGIKSIKDMNDSKYKIIVVVGTTAAEETKKFAPKAKLLAVQDYATGMQALKAGQGQAMSTDNAILYGFATENPDYQIVGGTFTHGPYGIAFDNNQGPMVRETNKALATIKKNGTYNKLIKKWFSDVPGLDWHELEAK

SEQ ID NO: 6306 - protein, 326 aa, Leuconostoc mesenteroides subsp. mesenteroides ATCC 8293
MPEPKLKLFSLSSNEPLAQKIADSVGVPLSRISVKRFADGEVQINIEESIRGDNVFVIQSTSAPVNDNLMELLIMIDALRRASANQINVVLPYYGYARQDRKARSREPITAKLVANMLERAGATRVLALDLHAAQIQGFFDIPMDHLQGAPLLADYLIESGIADKKNAVVVSPDHGGMTRARNLNNMLELESPVAVIDKRRPKPNVAEVGSIVGDVEGKTAIMIDDMIDTAGTITQGAQLVMEHGAKEVYVVASHAVFSGPAIERLQNSVFKKVILTDSINLPEDKKFEKLEIVSVGELIGEAITRISKNEAISSLFKNRFYRRGH

SEQ ID NO: 6307 - protein, 570 aa, Leuconostoc mesenteroides subsp. mesenteroides ATCC 8293
MKNVVLTEGKNGAHILLDSLEKAGVNSLFGYPGGAVIPLYDALYESSHIKHILVRHEQAAAHAAEGYAKATGKPGVVLVTSGPGATNTVTGIADAFCDSVPLVVISGQVGSAAIGSDAFQELDILSITSSITKVSYQVRTVGELPLIVEEAFKVAVSGRPGPVLIDLPKSVMLAKDTEESQADIWLRQIDTQKPDVDAVQIHQLVAALSKARQPLIITGAGVLKSNAQDLLRILIQHYHIPTVSTLLGLGAVESENPLFLGMVGMHGSIAANQAVDQADFVLNIGSRFDDRVVTNVDDFAKHATIAHIDIDETELGKVLPTAHAIHASADDALNAILTEIKNAKMTDTSKWEESIRQAKRDSMFHYQKSETAIMPQAVIQAVGKVTKGEAVVVTDVGQHQMWVAQYYPFQNNYQMLTSGGLGTMGYGIPAAIGAKFARRDKEVVLFVGDGGFQMTSEELAILNDNDLNIKIILLNNHSLGMVRQWQTLFYNGRLSSTVFKSQPQFNQLAQAYGINYVRIEKPERMLEDLQLAFQSDKSVLIEIIIPDDVKVLPMVNAGAPYRDMITEEDA

SEQ ID NO: 6308 - protein, 266 aa, Leuconostoc mesenteroides subsp. mesenteroides ATCC 8293
MATLKVEDLHVSVEGKEILKGVNLVVNTGEIHAIMGPNGTGKSTLSQTIMGHPAYEVTEGHIYMDDQDLADMSVDQRARAGLFLAMQYPSEIQGVTNAEFMRAAINARRAEDEQISIMSFIEKLDEKREFLSMSEEMAERYLNEGFSGGEKKRNEILQMMMIEPKIAILDEIDSGLDIDALKVVSRGVNEMRSSEFGTLMITHYQRLLDYIVPDFVHVMMGGKIVKTGGADLAKKLESEGYTGLRDELGLNVHLTDEDVNSYFVED

SEQ ID NO: 6309 - protein, 278 aa, Leuconostoc mesenteroides subsp. mesenteroides ATCC 8293
MKRFENILKRIGPLPLIMAGVALVLIIVSGLSYDGHVTSHSFWSAIVAVFTRAILGASSWFGNNYGMGIILFTIFIRFLILPLMVYQVQSMMKMQVVQPALKELQAKYPGKDTESRQLMMAEQQALYKDAGVNPFASMLPLIVQMPILIALYQSIWNSPVLRSGKFLWLQLGSNDPYFILPVLAALFTFASSWLSMQSNPDQNGMTKAMPYIFPVIIFFSALAVPSALSLYWVVGNAFQTVQTFFLQNPFKIRREREAAAQLEKEKQRKIRKAKRRKR

SEQ ID NO: 6310 - protein, 287 aa, Leuconostoc mesenteroides subsp. mesenteroides ATCC 8293
MNIGFIGTGVMGTGIINNLLQAGYEVSVFNRTHSKANTVLNNGAIWRDTPAKVAQYSDITFTMVGYPKDVEEVWTSEDGVFAGAKEGSILVDMTTSTPRLAEQLAQTGADLGFKVLDAPVSGGDIGAKNGTLAIMVGGEQQVLDEIKPVLSVIGQQIVFAGSAGKGQHMKMSNNIGVAATVITMAESLVYAKAAGLDLESAYNVWRKGAAGSWSVDNYIPRIFQGDYAPGFYVKHLLKDLRIALDAAKEMDIDLPNTKLAEQLFERLSQEHGDEGVQAIVKLWASFE

SEQ ID NO: 6311 - protein, 490 aa, Solibacter usitatus Ellin6076
MKDLLVMKFGGTSVGSAERMKVAAQLAAQEQKKRPVAIVVSAMSKVTDLLLDTMRHAEAGDRAGMERNLNLLRERHEQACRELLPASEQGAVLAKLHDVIDEFERIVNGMAMLGERPPRSVDEAVAVGERLTVVLVSEHLRVSGTPSVAVNARDVVVTDAVFGNASPLMEPTRVKARATLRPQLEQGLLPVITGFNGATADGRPTTLGRGGSDFSASIVAAALDASELWIWTDVDGIMSADPRLVPDAQVLEEITYAEAAELAYNGAKVLHPRTLAPLVEKAIPVWSKNSFAPEKPGTKIVPSMAVEHGARAVASMRNVALVSLTPASPEVNGVQVLARALEAIARADVEVLVLTSSSYRQNFCVLVREDELDRSVQALESALALELAHHYVHPIEVDRNVGLLAAVGEGMQGKPGLAGRIFTAISRVQVNIIAIAQGSSELTIAVVVRREGLEKAVKAVHAECGLGMRPPVPVFPFGASEGRAQRPTKR

SEQ ID NO: 6312 - protein, 604 aa, Solibacter usitatus Ellin6076
MSRRRAPLRRLSIRELLRPHRKSLALGLIAVVVEGIAGLLEPWPLKIVLDNVVKQKALSGWLNHLVLSVAGNDRLAILKFAAMLALGIAVVGSLAAYTEKYLTTSVGQWVMHDLRRSVYFHIQRLSLDFHDRRQTGDLISRVTSDIDAIQSFIASGLLSSLVNGLTLFGMVGVMFYINWRFTLIALSVAPVLFVVVYSYTRRIKKASREVRKKEGEIVSVIQEVLTSIRVVKAFAREEYEQRRLEEESLESVEAALHARALKARLSPLVDVIVAIGTSLVLWFGARLALQGSLSAGSLVVFIFYLGKMYKPMQELSKMTDSYSKAAVGYERIKEVMDTESDVKDLPGARPAPPLQGAVQFEHVSFRYPDSGPILRDVSFRIEPGQVAALVGPTGAGKTTIASLIPRFYDPTDGVVRVDGLDVRSLQQKTLRRQISFVLQETLLFHGTVWANIAYGKPDATRTEIIRASQIANANEFVEKLPQGYDTMVGERGVTLSGGQRQRIAIARAVVRDTPILILDEASSGLDAASEKLVFEALDRLMEGKTSLVIAHRLSTIRRADIILVIKDGEIVERGTHDELLSVGGLYAELHALQFGGEEAAARQI

SEQ ID NO: 6313 - protein, 644 aa, Solibacter usitatus Ellin6076
MCGIAGFVTVQPSDSPSIIERMTDTIRHRGPDDFGFYRDPWASLGFRRLAIIDVSGGHQPMPNEDQSKFIIFNGEIFNHASLRPALEQAGHRYSNRSDTETILHSYEQYGADCVLRLRGMFAFAIWDKNTRKLFCARDRLGKKPLYYFWDGRTFAFASEIKALFEHPSISPQFEESLLPEYLAFGYVSEDRTLFRGIRKLMPGHHLTLHLGAPNPQPVIRQYWEIPDPQPEQRDDASWISECRDRMEQTVQMRLMSDVPLGMFLSGGVDSSAIAALMKRNFSGPVKTFAVGYQEAEFSELSYARHVAGAIGTDHHEVVVGMEDFFNALPRLIWHEDEPITWPSSVSLYFVSKLAREHVTVVLTGEGSDEMFGGYARYRFYAMNERWMRFYRILPRAVRTAIRSQVATTSLLSSTLRRKLQHTFVGRAEDLESLYLDNFYSAFSQSQQRDLFPALAATSPYANFRRYWDSKPGLNPLPRMLFADQKTYLIELLMKQDQMSMATSIESRVPFLDHEFVEFSTRVPEHMKLRNGEGKYIVKKAIEGLVPHEIIYRKKMGFPTPLRQWLLDPRAAHLFDMMRAKDGLLASCIDPARLDDLLLRQTSGREDVTDRIWRLLTLQLWGDMFFTGKREERWDGLMAAARPAV

SEQ ID NO: 6314 - protein, 394 aa, Solibacter usitatus Ellin6076
MKLAERMSRIGIESAFDVLVRARALEAQGRSVIHLEIGEPDFPSPPHVIEAGKKALDEGWTHYGPTQGLPDLREAIAAHISRTRGISVGPQHVSVVPGGKPIIFFPMLALLEEGDEVIYPNPGFPIYESMIRFCGATPVPLPLEESRGFSFDLDRFESLLTPRTKMVVLNSPQNPTGGVIPREDLKAIAGLLGDRDIIVLSDEIYSEICYGERPVSITEFPGMLEKTIILDGFSKTYAMTGWRMGYGVMPEWLVEAVNKLMVNSNSCTASFTQRAGIAALTGPRDAVDAMVAEFRRRRDAFVAGLNQIPGFHCALPGGAFYAFANITGTGISSRELADYLLYEAGVAGLNGGCFGEYGDGYIRFSYANSLPNLMEAVSRIQKVSARWHSAVAAR

SEQ ID NO: 6315 - protein, 182 aa, Solibacter usitatus Ellin6076
MSKAVFLDRDGVLNVPVVRDGRPYPPAGLDQLQIYPDAPGALACLKRAGYLLIVVTNQPDVARGTQSREAVNSMNAAVGAALPVDEFLVCWHDDGEDCDCRKPKPGLVMAAAERHQIDLARSFLVGDRWRDIDCGAAAGVRTVWIDRQYRERAPSSSPDHVADSLTSAASWILAVSKITPGD

SEQ ID NO: 6316 - protein, 366 aa, Solibacter usitatus Ellin6076
METLVACLGQVYGNASSIHHFGQGAKQRLEAARRQVAALINANATEIVFTSGGTEADNLAIFGVTRAAAGPRKHVITCAIEHPAVLAPAKQLGEEGVEVTCLRVGSNGIVNPHDVRRALRPETVLVSIMHANNELGTLQPVAEIAQIAHEAGVTLHVDGVQALGKTPVDVQALGADLYTMSGHKLYAPKGVGALYVRKGTRMAPISYGGHHERDRRPGTENVPGIAAFGAAAELAGRRLAEDAERLGMLRDRLESAVLDRIPGTGVNGSRWNRVANTSNLYFDGIDGEAMVIALDLRGFAVSTGAACSSGALAPSHVLKAIGLTDDRARASMRFSLGRANTVEHVDALIDAITASVAHLRRISVHA

SEQ ID NO: 6317 - protein, 435 aa, Solibacter usitatus Ellin6076
MTNRRQLGLFDATMIVMGGIVGSGIFMNPSVVARQVHTPFLILGVWLAGGALAILGAFIWAELATRLPGAGGQYLYLREAYDPAVAFVYGWVLLLVTQTGGMAAVAVTFARYYREISGVAWSDSAIAAAVLLGLTAINCMGARAGSNVQSALMLMKTGAIAVLVIAGIALGGGTIHPLPLLDRPVSLGLLGALGAGMIPVAFAYGGWQTATFVAGEMRNPGRDLSRGLVAGVTGVVVLYLAVNVVCLKVLRPEGLAATRTPASAVMRAAMGDRGAWWIALGIAISTLGFLSQGMLTAPRVYNAMARDGLFFERVGRLSPRTGAPVTAIVLQGIASTVIAFSGKYEQILNYEVSVDFIAFALAGGALFLFRREGRGDQQGGIYRAPGHPYTTALFVAACVAIVASTVITDPLNSARGWGIMLTGVPVYLYWRRKAQ

SEQ ID NO: 6318 - protein, 67 aa, Solibacter usitatus Ellin6076
MKEKGTVKWFNAAKGYGFIQRSGGDDVFVHFSAIQANGYRSLDEGAEVEFEVKQGPKGLQAENVALV

SEQ ID NO: 6319 - protein, 67 aa, Solibacter usitatus Ellin6076
MRETGTVKWFNAGKGFGFIQRENGEDVFVHFSAISASGYRSLDEGARVSFVVKKGPKGLQAEDVSPA

SEQ ID NO: 6320 - protein, 331 aa, Solibacter usitatus Ellin6076
MAAIPESAKLFMSGLIERARKLKKTIVFPEGADPRVLEAAARLAREGVVKPVLIGPRPANAPEGVEFTDPAHSPLLKKYADLYYERRRAKGTTQVEAAAVAKKPLYFASLMVGAGDADGSVGGAVNSTAETVRAALHAVGVHPRARLVSSVFIMALQDLSQGHNGLMAFADCAVVIEPNAMQMADIAIATAESTRVLIDAEPAVALLSFSTRGSGRGPMVSKVVEAMQILKARAPELNADGELQADAAVDLMVGKSKAPGSKVAGRANTLVFPSLESANIGYKLVERLGGAMAIGPFLQGLAKPANDLSRGCSAEDIFNVAVVTALQSEIH

SEQ ID NO: 6321 - protein, 579 aa, Solibacter usitatus Ellin6076
MSESVNGGSNNTAQPPKKELSMEVRLLLAFILMGAVMFLTPYIFPTPKPPAKKDAATTAAVTPSPAAADASNPAATAPSGPAVVEAGSLPADATQQKPEPAFVINTDLYRVVLSNQGATVRSWQLKRYKGNDSKPLDLVNSVSGLDFPFSLYFPGQKPASNVNWTWYKQTGDADGLGVTYEYSDGHVVVRKVVRFQKDSYLSMVSCEVTLDGKPIPHLLQWRGGFGDLTLTNAAAGQRTLYFDLTTNKLVEQNPKAAAKGPITSEGTFSFAGIADTYFAAVFLPEGNGRMQQVTFADTVRTPTSETPLPLSGVAVGDGPPIRFELFVGPKDVDMLRKINPKLEQVVDFGWLSVLAKPLFLIVNYVNDTLVHNFGWAIVLVTIAINFILFPLKLSNMKSMRKMQALKPQVDAINAKYKNVGLRDPRAADKNQETMDLYKKHGVNPMGGCLPMVLQIPFFFAFYKVFTVSVEMRGAPWLWVSDLSQPETLPIKILPLVMIASQFVMQRMTPQPAGDPAQQKMMMFMPLVFGFMFYNFPSGLVLYYLTSNLVSMGQQWFFNKTSMATLAAESIAPPKKNGRK

SEQ ID NO: 6322 - protein, 749 aa, Solibacter usitatus Ellin6076
MRRMVPFTLALLAGLALLAWAASGVVQTTARRWFERDIGARANLVLVSSEKSLANNWNGEPGELQKQLAALTRDERVMGAAACDPDLKTRAATVGFPEDFGCWAVGTRVRSIDSNGVAHFRPWSTVSDLPTGRVHVSVMPLANPAGQELGFAILLHDLSFIDRREAQARTFLFATFGILAFIALLLPVWVARLARYDWSRELSSLLRGGGKQQQSREFQPILSDVRELVSRMAYDRDDAPGQWNAERLKHSLNSNLHGERVVILSNREPYIHEFTPHGGIEVQHPASGLVTALEPVMRACSGVWVAHGSGSADRETVDRKDHVRVPPGEESYHIRRVWLTEEEQQGYYYGFSNEGLWPLCHVAYARPIFRAEDWRQYRAVNQKFADAVLSEVDSSDPIILVQDYHFALVPAMIRKRLPAATVIMFWHIPWPNAENVGICPWRNQLLEGLLGSSILGFHTQLHCNNFLDSVDRYLETRIDRENNAVVMQGHRTLIRPYPISLEWPVHWAVEAPSPEDCRAQVWRDLGLKRDALLGVGIDRLDYTKGIEERLLAVEQLLERYPEYRGRFSFAQLAAPSRTKIERYRQLSEDVERLAERINQRFGKPDYRPVILLRSHHEPPEVFRYFRASDLCYVSSLHDGMNLVAKEYVAARTDLKGVLVLSEFTGAARELSEALIVNPYDLEASSDALAAALAMPLEEQRDRMASMRSLLVQFNVYRWAGRMLVDAARLRNQERVAGRLAERTGVGSSA

SEQ ID NO: 6323 - protein, 497 aa, Solibacter usitatus Ellin6076
MSIFRTKSIDALIAASEDPEKKLRRTLGPWSLTAFGIGAVIGSGIFILTGTAAAGETLNYKSILHAPVLDLIMHGTQALSMTGRQGAGPAITLSFLLTAIACSFAALCYAELASMIPIAGSAYTYAYATLGEIIAWIIGWDLILEYAVSNMAVAVGFSAYLNDVLDNVFGWHIPAKFANPPIAEGQLTGAWFNISALLVLMILTWILVKGVKESASTNNAMVAIKIAAILIFVIGAAKAVDTSNWKPFAPHGFPGVLTGAAIVFFTYIGFDSVSTAAEECKRPQRDLPLGIILTLIICAILYILVALVLTGIARYDTLNNAAPVANALKVLGYNGIRQWVSLGALVGMLSSLLVFQYGQARIWFAMSRDGLLPKMFSKVHPVYKTPHISTWIAGLVVGIPAGIWDIGTFADLANIGTLFAFIIVSVGVIVLRRTQPDRPRGFRVPGGGFLPVISIVFCLILMMALPLETWVRFFVWLLIGFAIYFPFGRKNSALARR

SEQ ID NO: 6324 - protein, 386 aa, Solibacter usitatus Ellin6076
MTKTIYLDYHATTPVDPRVLNVMLPFFGARFGNAASTSHSYGWEAEGAVEVARKRVAALAGAAAHEIVFTSGATESNNLAIKGALMAAGVRGGHIVTVATEHKAVLDTAERLAEGGCGVTILAPRADGLIDLDELHDAILPHTVVVSVMYANNEIGVIQPVRQIGAICRGKQVLFHCDAVQAFGKIPVDVDADQIDLMSMSAHKMYGPKGVGALYVRRRNPRLHLVPQMDGGGHEGGLRSGTLNVPGIAGFGEACAIAAVEMGAECERLRGLRDRLKRRLEEGIPGLHVNGSMEHRLTGNLNVSFEGVEGDALLVALPELAVSAGSACNSHEGGASHVLKAIGLSPALIQSATRFGLGRFTTEEEIEYAAGRVVEVVSKLRADAPV

SEQ ID NO: 6325 - protein, 225 aa, Solibacter usitatus Ellin6076
MASSLTAFTPQPKTLEDPLAHLPCSTIVEYRKGQMIYNQDQPSTSIYLVIEGKVKISRLADDGHQVVVDIYQSDEFFGESAFLNLPHRSEQATALENTKLMTWTASEIEEIVMHRPLLAVALLQILVQRTIDFTHRIESFSVDNIARRLARSLIRFSERLGTADEDGSVSMAPFTHELLSQYVGTSREIVTHYMNQFRRQGYLRYSRKGIVLYREAFREWLRANA

SEQ ID NO: 6326 - protein, 270 aa, Solibacter usitatus Ellin6076
MAETSQQELTEDQQKEAEQRSSVTVHVVHEAVRREGEEELKRSSSALAWSGLAAGLSMGFSAIAEGLIRSRLPDAPWRPLLTTMGYSAGFLLVVLGRQQLFTENTLTPMLPLFSNRDGATLRNVARLWVVVLAANMVGALVIAWVLAATGALPPEVKRALSDIARESSGLGFGVVLLRGVFAGWLIAMLVWMLPFAEGARFFVVLGMTWLIGLGGFSHVVAGAVEALYLAVSGAGTWEGAILGYIVPALIGNILGGVTLVAVINHAQVVS

SEQ ID NO: 6327 - protein, 525 aa, Solibacter usitatus Ellin6076
MNILIAEPLAAAGIELFQSQPGWNVIVSSPKEYAQHLATADALLVRSVVQVNQSVLEKGPKLRVIGRAGVGVDNVDLEAATAAGVLVMNTPGGNAISVAEHTLALMLAMARHIPQATASTCGGKWEKKKFMGNELRGKTLGVVGLGSIGREVVKRARAFEMRIVAHDPYVTSAIAHDLGVELVDLAQLFRQSDYLTLHVAATPETQGMLSREAFAQMKDGVRIVNCARGELVDEAALAEALASGKVADASLDVFSVEPPPAGFPLFALNGVLATPHIGGSTEEAQEIVGVRIAEQVVEYLTHGMATNAVNMPPMSPEQFKALSPYATLADRLGNFAAHMATGHPHTVRLHYFGKIADNATSLLRNAGLAGVLSRSTSRKANLINALQIAEQRGWDVVERHDKRSVHTDSIRIDVETDLGVTTVEGAVVLDKPRLLQVDGIYCEAALCGFLIVMKNQDVPGVIGHVGTVLGKNCINIANFSLGRREGTPEAVALVSTDGLVPESVLLQLKEHAAVKFARSVEFHGC

SEQ ID NO: 6328 - protein, 464 aa, Solibacter usitatus Ellin6076
MPSPKSQDSRPGLLRQIGFFSATALVISNMVGTGIFATTGFMAGDLGSARLILACWTVGALFALAGALSYSELGINFPSSGGEYVYLTHAFGPEWGFMTGWVSFFAGFSAPIAAAALAFSDYLGYFFPLLKQANASIVIGTGTLSLRLGRGQMVASALIAAFTILNCLGVGRTAKVQNVLTSTKLIVIAGFVILGFAAGTGDWRHFSEHAVRTSTVSLPTQFMISLLWVMVGYSGWNAATYVAEEVRRPERTLPAAIAVGSLIVAVLYLGLNLVFIYATPLEQMKGVIAVGTLSASNLFGPGVAGVFSALMAVSIVSTVNAMVTIGPRVYYAMAKNRAFFSAAARVDPRWHTPVYAILSQGLCAMLMTLTPFPQLVVYIGFSLTLFTVLSVASIFIFRRRRRDWQRLRALEFAWPLIPASYILVGTCMMAYGVIWQPRASLTALATVGAGALVYRFGVHVPKVR

SEQ ID NO: 6329 - protein, 456 aa, Solibacter usitatus Ellin6076
MTQTESPHLVRGIGLLGAVSANMLEMIGVGPFITIPILLAKMNGPQAILGWLLGALVALCDGMVWAELGAAMPGTGGPYHYLSEAYGPQRMGRLMSFLFIWQTMALAPLSIGSGAVGFAQYARFLFKDITPLQEKLIAVSVCALITVLLYRDIRSVGRLSIIMWIVVVGTVLWITAAGVMHFDPRRVLDFPSGAFTPSRSFFFGLGGATLIAMYDYGGYNNVCFFAGEVRRPERVIPRSILLSIAAVATLYLTMNITIIGVVPWREAIRSTAIASDFIQRIYGAKAAAVVTVLILWTTFASVFAVLLGYSRVPYAAAVDGRFFRPFARLHSSKNFPYFSVLFIGVLSAAASLLTLDVLINGLIVIQVLIQFMAQIFAVTLIRRDRPDIVRPFKMPLYPLPSIIAFLGWLYILIASGLAYIVAGLVLMMLGVAAYVWHAHGAGEWPYASRWKAGADA

SEQ ID NO: 6330 - protein, 393 aa, Solibacter usitatus Ellin6076
MPTLASSVEIVPRSRIRELAEIAMTMDGVLRLYFGESNLPTPEYIKQAAVRALADGFTFYTENAGLPSLRRALAANYERLHGVTLDPGSEIVVTASGVQALNLGIRCVLNPGDEAIALTPAWPNGSSSIMMANAAVRQIPHPLCGERYRVDFDALEAAVTPRTRLLLYTSPSNPLGWVATGEEQQGLLDFARRHNLWLMADEVYDRLYYAGERLGDPVPSILQRATREDAVMVVHSFSKSYCMTGWRVGWLVARRDLAAKATQLNEFIISHAPTFAQKAAETALAEGEPELARMLERLKENRDLCLEALRGLPGITVPKPDGAFYLFPRVEGMTDSFGFCRGLLEETRVGLAPGVAFGEGGEGSFRICYAAERSILEPAMERLTKFLRKGAHR

SEQ ID NO: 6331 - protein, 608 aa, Solibacter usitatus Ellin6076
MIKLSDYVMGFVANSGVKHVFLVVGGGAMHLNDSLSRRKEIEFVCNLHEQASAIAAENYSKSTNHLGVALVTTGPGGTNAVTGVAGAWLDSTPCLFISGQVKRADSMFRPDGTPLGVRQVGVQEVDIVSIVRPITKYAVTVNDPQSIRYHLERALYLAQSGRPGPVWIDIPLDVQAAPIDEENLPAFEIPAPESHHETLQAQVREIIDALNRAERPMLLAGNGIRLARAEKEFLELVELLDIPLETTWLAIDLIGDDHPLFVGRPGTIAPRGANFAIQNTDFLLAIGARLDRVITGFAPEKFAPSAWKAMVDIDPAELQKMGNTVCVKVRADAGAFMREMLSQARAISPRDRSSWKQRCADWKRRYPLVLEEHRKPEGPVSCYHLADVLSDELGPDAHYVSGSSGSGIELVLLAMRVKQGQRIYHTTALGAMGYGIAASIGVCMASGRREVVCVDGDGGFQFNIQELETVARLQLPIKFFVLNNNGYSSIRASQKAFFGEATIGCDTSTGQTLPDLRKVATAYGIQTDVIMDQTNLRAEIRRVLARPGPVVCDVHVVPDEVRMPRLSSVQLPDGSFVSKPLEDLWPFLDRAEFEANMLRPTAGEPVAS

SEQ ID NO: 6332 - protein, 609 aa, Solibacter usitatus Ellin6076
MTQILRLLSYGRKFWPQILLSVFLMALAGAAQGTMPLLIQPIFDRVLIANAPGGPIALLPRPFLGHQLYLHDILPIHGRSDWFMIATCLLIAFLLKGACDYIGNYLVSYAGFASVTRLRNAVFDKVLKQGAQFFEAHSTGQLMSSIMNDVDKVQVATSQILADLLRQFFSAAFLLFVLLNNDWRLALICLVVLPAVMLPTMRMGRRIRRTSRGTQERQADLNQILQETLSGHMVVKAFTAEPYESRRFHAASARLLKNNARYVLQQGLSSPLIDFFAALTIVSLLTYARTQIKGHAFTAGTFTSFIFALLMLLEPLKRLVGIYNIFQQALGASQKVFEYLDHQETVVDTAGAPALPAFQNSIAFENVAFHYPGAPDGFRIPNLSLTVKAGEVVALVGPSGGGKTTLANFLPRFYDPTSGSVKIDGHDVREFSLSSLRSQIGLVAQDTFLFNDTVANNIAYGRDGVPPEAIRAAAETALAHEFITRLPEGYETVIGDRGVKLSGGQRQRLSIARALLKNAPILILDEATSHLDTESEMLVQKALANLMEHRTVIVIAHRLSTIRRADKIVVLEKGQIRETGTHEELVSRGGIYQRLHELQFEDAGTVVDL

SEQ ID NO: 6333 - protein, 339 aa, Solibacter usitatus Ellin6076
MPTANQQPCEHDSSMPTENEWLAAARAAMRIEAESIARAAERLDGELVRAVELILAHPGKVVVTGIGKSGHIARKIVATLCSTGTAAVFLHPAEAAHGDLGIYTPGDPTIVISKNGASSELQSLVPMLRQFRSPLVGILGNAHSPLGAEVDVLLDASVEREADPHNLAPTASAVTALALGHALAIALMCARNFTPEEFGKFHPGGQLGRNLRLSVREAMHGADEVAFVAPGAALKDVIIAMTRKPMGGACVVAEAGVLAGFITDGDLRRALTNHDDIRGLTAAEAMTARPVTIGPEATLGQALELMERRRSQISVLPVVDGDGRALGVVRIHDIYLGVK

SEQ ID NO: 6334 - protein, 391 aa, Solibacter usitatus Ellin6076
MIPTVKISAVQVLGLAALGVVMGAWLKRRVPLLDQLNIPVSILGGMIYAIAALACRDRLVNFDADVVLRDLLMIAFMTTIGLSARLELVRRGGARMLWFLGAATLGAVLQNFLGMGLAHLLGVDPRLGILTGSVSLAGGPATALAFGGTFEKMGVPGATTVAFASATFGITVAGLIGGYIGGRLIRRHKLQPAAGTAAREVRTDGSAGSLMTVVLVLGIAMGAGSLVSAGIQSLGVILPVYIGSMIVAAVLRNLNDHFRFAEIAQPEVDMVGRLALYLFIVMALITLRLWELAHLALPMFAMLAVQVVFCCAMCVTLSWWVMGRNYEAAVSSAGFCGFMLGITANAVACMEELVEKYGPAPQAFLIVPIVGAFLIDFTNSLIITAFANWLK

SEQ ID NO: 6335 - protein, 465 aa, Solibacter usitatus Ellin6076
MSSGRILIVEDDDSLRKVMHVQLEREGYETSSASTAEEAFAILDKASQSLVMTDLHLPGMSGLELLKKVRLDYPETAVIVMTAFGTIQTAVEAMKAGAYDFLTKPIHPYELKMLVRRCLEHHRLIEEVQVLRTALDEKYGFEAIVGSSSQLMRALDVAARVASTDATILIYGETGTGKELVAKAIHLRSSRRDRPFITINCGAIPKELLESELFGHVKGSFTGALTHKKGKVEMADGGTVLLDEIGEMPLELQVRILRLIQEREIEKVGATSPTKVDVRIVAATHRELAGMVKAGTFREDLYYRLLVVPINLPPLRERTGDILILVQHFLEKCRMKHSRPNLMMSTDLLPYFTNYSWPGNVRQLENAVERLVLLARDSTINASDLPDFLSAAPAPPPEPVPVALPEGGINLEDLEKDLILQALKKYAGNQTRAAQYLNMSRRAFAYRLEKYDFHPDVLKARKHDA

SEQ ID NO: 6336 - protein, 236 aa, Solibacter usitatus Ellin6076
MLENLPYYEEWVLTKLAALSEIALFAALSENELQGLAQRAVEKRFGTDEMLFWEGEACVGIFLIIQGSVKIFRTSPGGREVMLCIETAPASVAELPLFDGGPYPASVRVTEPVVSLFINKSDFQQFCRQNPDVALKVLAVVGRRLRQLVGLVEAMTFGSVTQRLAKMLLDASKEAGPEDFDLPATHQELASRLGTVREVISRNLGRFRAQGLIKIQDRQVEIVNRAGLQQEAESQA

SEQ ID NO: 6337 - protein, 414 aa, Solibacter usitatus Ellin6076
MNVLVLNAGSSSLKFQIIATDLERIQRDSDERLCHGYVERIGGEAIITVEPRGGPRKKVTAPVRNIAAALDYVLRWLASDQSGVAEIRSLSDVHAVGHRVVHGGEVFRESAVITDEVLQGIEDCIDLAPLHNPNNIKGILAARDAFGSGMPQVAVFDTAFHTSLPDHAYLYAMPYHLYARHRIRRYGFHGTSNRYVAYRYRTLRQLTREQTNIITLHLGNGCSATAIRNGRSMDTSMGMTPLEGLVMGTRSGDLDPAILSLIATKEGLSPTEVEALLNTQCGLLGISGVTNDMKVLLQELREHDDRRIRLAIEIFCYRARKYIGALLACMGGADAVIFTGGIGENAPEIRARICAGLEWAGLEIDSDQNAQTMGRPQQISKPESRLQAWVIPTDEELLIARDTVRCILGEPHPA

SEQ ID NO: 6338 - protein, 337 aa, Solibacter usitatus Ellin6076
MFIDEVRILVKAGDGGNGCLAFRREKFVPRGGPSGGDGGRGGDVTLVCSEHANTLLQFRFNPEHKAERGRHGEGSQRTGAEGRSIDVAVPVGTVVYDEATGERLYDFTVPGERFVVARGGRGGRGNQHFATPTHQAPTEHEPGRPGEEKRLRLELKLLADVGLVGFPNAGKSTLISRISAAKPKIAAYPFTTLEPNLGVVQMEGFRSFVVADIPGIIEGAHEGHGLGIQFLRHIERTRLLAHLVDVSEESGRDPVQDFEIIMQELARFSDQLVAKPMIVVATKMDVAQDPARVEALRDLAKSRDLPFFEISSATGQGIDALKHAMADRVLAPVPVPE

SEQ ID NO: 6339 - protein, 224 aa, Solibacter usitatus Ellin6076
MATTPVRVEPQKALEDPLAYLPCSNVLEYGKGEVIYSHDQPHSDLYLVLSGMVKVTRVSNQGSQLLVDLYGTDEFFGEAAFVDPLQAFERATAHQHTTLMAWKASDVEDLIQKRPKLAIALLQAFGQRSLNLLQRLESLSADRIDKRLAISLIRFAERLGRPQEDGSIHMDPLTHEVLAQYVGTSRELITCHMAKFRKDGYLQYSRRSIVLYRDALRAWVRDNA

SEQ ID NO: 6340 - protein, 363 aa, Solibacter usitatus Ellin6076
MNLLIPNLGSTSLKYQILEMPSETAIAKGRLERVTDYREAIAQISTAGAAIDGIALKAVHAGPEYRGTFVVDADLMAALRQFLPAAPAHNAIYLTAIEAFQEAMPGVPIVCAFEPEFHATMPEYARMYGVPGQWREEGVVKYGFHGASHQFIGERVTEMLGRPVKLVSCHLGGSSSMCAIDRGRSVDTTMGFSPQSGLENATRHGDLDVFAVLYMMERHGWCADEVRQQLAKGGGLAGLSGVPGGDVRDLEAAGTERAALALEVFVYQVKKTIGAYAAAMGGIDAVAFTGGIGENSARLREKCCAGLEFLGIELDAEKNAGTGDRVVSRGKVAVLAVATNEELVVARRAYRCLGKAKAEMGRG

SEQ ID NO: 6341 - protein, 389 aa, Solibacter usitatus Ellin6076
MPITVGFVGEGSPGERRVAMAPSAISVLNKTGVELLMEPGAGVQAGFPDSDYVEKGVRVAGGREEVFQSAEVILQVRGLGANPETGARDLAMMRQGQTAIGFGEPLTAIDAARQLAARGVTFLAMELMPRITRAQSMDALSSMATIAGYKAALMAADGLPRMFPMLMTAAGTVAPARVLVIGAGVAGLQAIATARRLGAVVSGYDIRAAVKEQIESLGARFVVLDLEGAGAEDKGGYAKAMGEAFYKRQRELLGNVLAEQNVVITTAAVPGRKAPILITREMAARMAPGSMIVDIAAERGGNCELTQPGVMVEAGGVRILGPVNLPSTIPYHASQMYAKNIATFLKYLVKDGKLALNREDEIVRETLVTYGGEVVHARVREAMGLPVAG

SEQ ID NO: 6342 - protein, 584 aa, Solibacter usitatus Ellin6076
MGRLLSVNVGLPRDITWRGETVHTGIWKHPVSGRQMVRRLNIAGDGQGDLAGHGGEHRAVLVYQSASYRYWESQLNRKNLTYGQFGENFTVDGLPDDEVFIGDRYRIGGALFEVTQPRVTCYRVGIRMEEPQMAALLVSHHRPGFYLRVLEEGDVGGGDEITKVAEGPERITVAAIDALLYLPGHPREQLESALRIPALPPGWKGSLQALLNRGNAESGNPGLTGLAGAPPAWSGFRSLRVSKVQQECASVFSLCFEPVDGPALPAALPGQFLVFRLHTKPGLPPILRNYSLSSAPGSSTYRVSVKQEVNGAGSSFLLNHVNAGDVLEVSAPRGDFTLLGGDGPVVLVSAGIGATPVLAMLHALASTRSPREVWWLYGARDRKEHPFAKESRELLQSLARAQSHIVYSRPQPDDRLGLDYDSPGHLDIPLLDRLGVPQNADFYLCGPPSFLGSFTADLAKRGVDSARIHTEIFGPRESITPGIAPAPRPPAHLPAGAPGTGPQVAFARSGITVPWNPTFRSLLELAEACDVPARWSCRTGVCHTCECALIGGTVEYQTLPLEPPAEGNLLVCCSQPQGDVEIDL

SEQ ID NO: 6343 - protein, 393 aa, Solibacter usitatus Ellin6076
MSTTAAAFRNRFRSQRISRFTESVIREMSRLAIRHGATNLAQGFPDFPAPEALKRAAAEAIDSDINQYAITWGAKPFRDAIAAKYQRTYGMEFDPEREITVCCGATEGMVASLLAVVDPGDEIVLFEPFYENYGPDSQLCGAVPRYVKLQAPDWNFDPDELRAAFGPRTKAIILNSPNNPTGKVFTRQELEFIAGLCQEFDVLAITDEIYEHILYDGAVHIPIMSLPGMRDRSILVNSMSKTYSVTGWRVGWVLASPDLTDSIRKVHDFLTVGAAAPLQQAGVLALSLPEDYYEHLSTEYSGRRDHIVESLEAVGFKCFVPHGAYYVMTDVSGFGFSDDTSFVRHLITNLGVAAVPGSSFYAHPATGSQQVRFCFCKKYETLELARSKFLKLQ

SEQ ID NO: 6344 - protein, 474 aa, Solibacter usitatus Ellin6076
MKTTYTAVDAAYLGERKLRRHARVFQLWAMGVGAVISGDFFGWNFGLTAGGFGGMLLAVAVMTVMYIGLCFSIAEMSPALPHAGGAYSFARTSMGPWAGYITGLAENMEYILTPAVIVVGIGGYLGAVFGTPHAWEPLWWLAAYGVFVALNIWGVEMTFHVSVVITLAAIAILAVFWVGALPHFDLHQWASPYFPAGRGKASSALVELPFALWLYLGIEQLPLAAEESHDPKRDMPRGILYGLVTLIAISFLTVVLSVGIAPGAAAIAKSNEPLFLGFQTIFGHGMQARLLALIACTGLIASFHTIIYAYGRQIYSISRAGYFPTWLSVTHGTRQTPQRALLAGSALGFLAALVIHLAPQGSPVGAVLLNMAVFGAVLAYMLQMLSFLVLRVRFPKMARPYRSPVGLAGAALALAIAGITLFTLFRNPDYNKGVIGAALWFLLGIGYHAFHGRHGLVLAPEEEAAMRLRAERAP

SEQ ID NO: 6345 - protein, 400 aa, Solibacter usitatus Ellin6076
MRILIADEFEQSGREQLNALGCEVRFAPKLKDEALVAEVDSFRPDVLVVRSTKVPEAVLAAGALKLVVRAGAGHNTIDVGAASRRGIYVSNCPGKNSVAVAELAFGLILALDRQIADNVIALREGRWNKSGFSKARGLFGRTLGLIGVGQIGREMIPRARAFGLPVVAWSRSLTPESAKALGVEYKPSPAEVAAAADIVSVHVALNPQTKGMLNAEWIAALRPGAYFINTSRAEVVDQEALSRAVTEKGIRAGLDVFAKEPAGGAGDFADEIVKLNGVYGTHHIGASTEQAQEAIAAETVRIIRTFLQTGKVPNVVNLARTTPATCALVVRHLDRPGVLAAVLDSVRAAGINVQEMENIIFEGAEAAVARIHLETVPDEDVLGRIRGSNPHILEANVIIL

SEQ ID NO: 6346 - protein, 602 aa, Solibacter usitatus Ellin6076
MPDPGQNPLTLKRLLRPHAKSLALGVLVVGGGSIADLLQPWPLKIIIDTVLKGHVGKGWLNDFVRDAAGKDPLNILRFAALAVLGIAALGASCSYAEKSLTTTIGQKVMHELRRTLYAQIQRLSLAYHDRKQTGDLISRVTGDIDSVQGFLASGLLSTLVSLLTLFGMIGVMFSISWKFTLIALSIVPVLFAVVFTYTRKIKKASRAVRKKEGEMVSIIHEVFSAVRVVRAFAREDYEQRRYEVESMESVSIALRARGLKAKLSPLVEMIVACGTCMVLWFGARMVLDGSLSTGSLIVFVLYLSKMYKPMQELSKMTDTYTKAAVAWERIQEVLQTRRDVEDLPGALSAPLFRGEIEFDHVGFSYDSKAPVLRDVNLHIAPGEMAALVGPTGSGKTTITSLVARFYDPTDGVVRIDGYDVRKLQQTSLRQQISFVLQETLLFHGTIATNIAYGKSGATMEEIVRAAEQANASEFIDRMPDGYDTVVGERGVTLSGGQKQRIAIARALIRKLPILILDEPTSGLDAESEQLVFDALDRLMEGKTSIVIAHRLATIRRADRIFVIDGGAIVETGKHADLLARGGLYAKLHEIQFRTQASVTAAS

SEQ ID NO: 6347 - protein, 639 aa, Solibacter usitatus Ellin6076
MCGIAGFTRLNKYASRGVAQRITEALSHRGPDQQGVFEGSEATLCAVRLKIIDLAGGDQPILSDDGDTAIAFNGEIYNHREVRGELEALGHRFRSNCDTETVLRAFLQWDTAAFQRLRGMFAIALWTESRKRLLLVRDRMGIKPLYYYRSGDDLYFGSELKAILEHPDVPRTLDLSALDTYLSVNYVPGPQTLIRGIRKVPPGHLLEWRHGKAWCEAWWKRPDSGTRRISLGAAKEQLDVLMKDSVREHLVSDVPLGVWASGGLDSSAILHYAAAQTAGRLKTFSVSFEGRSFDESRYFREIAQVYGTDHHEFDLNPDVELQSAIEDFAYYSDEPSADAGALPVWFLSRMSRRHVTVALSGEGADELFGGYLTYQADRLARPFRMVPAGLRRLMRGALDRYMPVSDDKISLEYKLKRWIDGSLLNADEAHFFWNGTFSPEQLRQIRPGTNGNGLQRMVEGLNGPREVVQRYLDVDQSFYLPDDILYKTDRMSMAHSLEVRPPFLDHRIVEFAASLPQRLKIRGAKQKHVLRELMRGKLPESVLTRKKSGFDIPTHDWFRGTLRGMLMDTLTPDAIAATGVFDANAIDGLIRDHMERRINVGYHLWGLLTLFLWMKRWKVEALPPEEEMRQVPARVLATR

SEQ ID NO: 6348 - protein, 454 aa, Solibacter usitatus Ellin6076
MASVVEPATSTRTKGRILIVDDELVVRDSLGKWFSSEGYSARPVGGAREALEVIQHGEFDIALLDIKMPGMDGMELQARLREADSDLTIIMMTGYSSVETAVQALKQGAYDYITKPVDPDELSHLVSNALEHKRARREVDRLRENLQEVVPGTELIGKSPAMRKVTELIEMVAPTEATVLITGETGTGKEVVARAIHSAGPRRYMPMVTVHCGALTETLLESELFGHEKGAFTGAQYRKKGKFEIADGGSVFLDEISDISLKTQTDLLRVLQEKEIVRVGGNQQLKVDFRAIAATNKNLETLVKAGTFRPDLYYRLHVFCIDLPPLRDRREDIPLLVSHFLNKFCMATSRPVPSISAEAMEILMRHDWPGNVRELENAVERALVVGRGNEVKPADFSFQFQSDEIKGGKTLDDIERVHIERILRETQHNLSRAARILDIDRTTLYNKLRRYGLR

SEQ ID NO: 6349 - protein, 453 aa, Solibacter usitatus Ellin6076
MGNILQNLPAGEKVGLAFSGGLDTSAAIHWMRAKGAIPYSYTANLGQPDEPDYDEIPRRALLYGAEKARLIDCRKQLVAEGIAALQSGAFHISTAGVHYFNTTPIGRAVTGTMLVIAMKEDDVHIWGDGSTFKGNDIERFYRYGLLANPALRIYKPWLDQTFIDELGGRKEMSEYMISHGLTYKMSVEKAYSTDSNIWGATHEAKDLEHLDKGVKIVEPIMGVASWREDVAIKPETVTIRFEEGQPVALNHVTYDDPVQLVLEANAIGGRHGLGVSDQIENRIIEAKSRGIYEAPGLALLFIAYERLVSGIHNEDTIEQYRINGLRLGRLLYQGRWFDSQSMMLRETAQRWVARAITGEVTVELRRGNDYSILDTTSPNLTYKPERLTMEKGESTFSPQDRIGQLTMRHLDITDTRDKLLLYIKTGLLGPSSGNSTTLLPEPADSGTEKPPSR

SEQ ID NO: 6350 - protein, 763 aa, Solibacter usitatus Ellin6076
MKIRPEDALEYHSSAPAGKLAVNPTKPCRTQRDLSLAYTPGVAVPCLEIERDPSLAYKYTAKGNLVGVVSNGTAVLGLGNIGPLAGKPVMEGKAVLFKRFADIDVFDIELDTANADEVIRTCQILEPTFGGINLEDIKAPECFYIEETLRNTMKIPVFHDDQHGTAIISGAGLLNALEIGGKKIEDIKVVFNGAGAAAISCAAHYVRLGVRLENIVMCDTKGVIYEGRTEHMNSYKARYASKTKARTLEEALVGADVFFGLSSGGAVTQDMVRGMAPSPVIFAMANPDPEISYDDAIAARPDAIVATGRSDYPNQVNNVLGFPFIFRGALDVRATTINDEMKLAATRALAALAKEDVPDSVLRAYSIDRIEFGREYIIPKPFDPRVLIWEASAVAQAAMETGVAQQPVDLKQYREELEKRLGRANEVMRAMINKARRQPKRIVFTEGEEGKILRACQILLDEQIAEPILLGSAEKINAKIEELHLHLNGAQIVEPAKFARLHEYTEEFYSLRQRKGITRTEAEQTLLNPTTFGSMMLRLNDADALIGGLTTHYPDTIRPALQVIDIRPELRRVAGVYVLITAKGDIYFLADATVNIEPTAEDLAEIAIMAAEKARRFSVEPRVAMLSFSNFGSTRHPLADKVRRAVDLVRQRAPGLMIDGEMQADTAVVPHIIEETYPFSTLKGGANVLVFPNLESGNIAYKLLQRIGDCELIGPLLTGLSRPVHVLQRGSEVNDIVHVAAVAVVDAQEVGKPYRTLSQEPVA

SEQ ID NO: 6351 - protein, 631 aa, Solibacter usitatus Ellin6076
MCGIAGYALIDQSAQRARVQAMCDQIRHRGPDDEGVHVDRNCAIGMRRLSIIDLSTGHQPMCNEDGSVWIVFNGEIYEYKELRAELIAHGHQFRTASDTETLLHLYEEEGVEGLRRLRGMFAFAIWDARRNRLMLARDPFGKKPLYYAVLPTGIYFGSEISCLREAGVPLEPDPEALRLYFQFNYIPDPMSAYRAVRRLPAGSWLTWENGQVRQGRYWQPPVPAAQPVAGLSHADAVVKVREKFDEAVRIRMIADVPLGAFLSGGIDSSSIVASMAMQSREPIKTFSIGFEESEFNELPYAAMVARKYGADHHEIVVRPDSIGIIRKFARHFGEPFADASAIPTYIMSEFAARYVKVALSGDGGDELFGGYTSLRQVQKLAAFDRVPQAVRLMMSWASSRMPYSAYGKNFLHMLGRRSALDRYFAFNYAPFHMRSKLLRPDWMLPAESGFLARALPDCILPEDAGALSQVMYFEGTANLTGDMLVKVDRMSMAASLEVRCPLLDHELAELAATIPHAWKVVGGQGKRILLDALGDRLPPELLNRPKTGFGVPLVDWFRTSLRELLWDTLTAERFLAHNIVAPEFLRTLLEEHDSGRRDNSQWLFTLLVLALWFEDIEQPLASPVPARVEGA

SEQ ID NO: 6352 - protein, 318 aa, Solibacter usitatus Ellin6076
MKIVVLDGYCLNPGDLSWDTLRGFGEVEIFDRTPADQVAARARGAAIALTNKTPFKADTLAGLPDLKYIGVLATGYNIVDVEAARRYGITVTNIPTYGTASVAQFVFALLLEMCHNVRLHADAVRAGEWSRNADWSFWKSPLVELAGKTMGVIGFGRIGRSVGRIADAMGMKVIANDTFQGNPPDYAEFRWATVEELLRESDVVSLHSPLFPETQGMINARSLGLMKPSAFLINTSRGPLVVDQDLADALNAGTIAGAALDVLSVEPPAESNPLLSARNCLVTPHIAWATREARARLMDLAMSNISGYLSGNPLNVIK

SEQ ID NO: 6353 - protein, 461 aa, Solibacter usitatus Ellin6076
MQKSPRTELKRDLGPWAAASIVVGTVIGSGIFLVPKTMIQKVGTVEAVFAVWVVGGLLSLAGALSYAELAAALPEAGGEYAFLREAYGPMWGFLYSWTQMWVAKSGSIATLATGFFLYLTTFFEPLKGVFYTIPLPIGPNGGPLEIQYGQIFAIFLILALGWLNYFGVRIGGNVQVAVTVIKVGLIAAIIFAGLVFGHAHETAAGPVAPITFSGFIAALVAALWAYDGWNNVSMVSSEIKDPQKNLPRALIGGTLCVIAIYMAANAAYFHVMSPAEVAGSTRVAAEMMRKIFSAPGAAAVSIAAMISIFAALNGSILSGARVPYAAARDGYFFHAIGRVHPKYHTPGVSIIVLNLWACLLVLSGKYDDLFNLVIFASWILYGMTAAAVVVLRIKQPELQRPYRTMGYPVVPVLFIIGAVILLVSTAWERPRESMMGIALILLGLPFYYYWKKRIPATIREV

SEQ ID NO: 6354 - protein, 595 aa, Solibacter usitatus Ellin6076
MPPGLTIRRLLRPHAKSLAVGIAAVVVEGMATLAEPWPLKVVLDNVLKSKGGHGWLNQLIFNAAGTDKLAILKFAALAVLVIAAVGALTSYTEKYITTNLGQWVMHDLRRTLYSHLQRLSLGFHNKKQTGDLISRLTSDIDAIQGFVTSGLLGVLINSLTLVGMVVIMFCLNWRFTLIALSVAPLLFAVVFHYTRRIKKATREVRKKEGEMVSVIQEVLSSMRVVKAFGREDFEQERMAEESRESVEIAMRVRGLKVKLAPMVDVIIAVGTCLVLWFGGRMALTGALSAGSLVLFVWYLGRMYKPMRELSKMTDAYSKAAVGYERIREVLDTDRAVDDLPGARRAPAFRGRIELSDVSFGYEPNYPVLKRVSMMVEPGQVAALVGPTGAGKTTIINLIPRFYDPDAGTVKIDGTDVKLFQQESLRQQISFVLQETLLFHGPVWYNIAYGKPGASHAEIEHAAELANAHEFIERMPQGYDTIIGERGVTLSGGQRQRIAIARAVIRQSPILILDEATTGLDAASEKLVFEALDRLMEGKTSIVIAHRLPTVRSADQIFVIDRGEIVERGNHAELLRKAGLYSALHELQFQGEEPAA

SEQ ID NO: 6355 - protein, 461 aa, Solibacter usitatus Ellin6076
MATTREGGLIKGLGLVDSTTLVMGSMIGSGVFIVAADISRQVQSPGLMMMTWFVTALLTLIAALSYGELAAAMPHAGGQYVYLREAFGPLYGFLYGWTLFMVIQTGTIAAVAVAFAKYAGVFFPWISDQNYLLGAGKVGFTTQQLVAIAIIVFLTWSNTRGIRTGAMVQNIFTIAKVAAILGLIAAGFLVGRNPEAIASNFNGFWRNSGWNFDTVRLVGVAMVGSLFSSDAWNNVTFTAGEVRNPRRNLPLSLALGVCIVSALYILSNFVYLNVLTFDAIQHAPKDRVAALAAEHMLGPVALQIMAAAIMISTFGCVNGLTLAGARVYYAMAKDRLFFRRATELDPKTNAPVFSLTVQCAWSVALTLSGSYNDLLDYVIFAVLLFYILTIAGLFVLRRTRPDMDRPYKAIGYPVLPAVYILAAGLIEVLLLAYKPNYTWPGLIIVLLGLPVYFIWRGKATI

SEQ ID NO: 6356 - protein, 479 aa, Solibacter usitatus Ellin6076
MSSQLFGTKSLSRIIAESEGGEHHLKKTLGPVNLVALGIGAIIGAGLFSLTGIAAADNAGPAVVLSFIVAAIGCAFAGMCYSEFSTMIPIAGSAYTYAYATMGELLAWIIGWDLVLEYAVGAATVSVSWSSYVVKLLQSFSIELPSSFIHCPWDEVPGIINLPAVLIVCAISILLMIGISESAKVNAVIVVVKVAIVIVVIAVGYSYIKPENYTPFIPPNTGTFGEFGFSGVMRAAAVIFFAYIGFDAVSTAAQEAKKPQRDMPIGIIGSLIVCTILYILFARVLTGMVNYKTFHGDASPVATVIHLFPSVALQTTIVIGIIAGYTSVILVMLLGQSRVFFSMSKDGLLPAVFSDIHPKFQTPWRCNMIFMVFVSLFSGFLPIAKLGHMTSIGTLLAFVIVCIGIIWMRKTNPNAPRPYRTPFVPVVPILGVLVCFAMMASLGAETWIRLFVWLAIGLVIYFTYGVKNSHLRKAPLNKR

SEQ ID NO: 6357 - protein, 568 aa, Solibacter usitatus Ellin6076
MTTANPEPAAGPSNFIRDIILDDLNTNKYQGRVHTRFPPEPNGYLHIGHAKSICLNFGLAAEFGGKTNLRFDDTNPSKEETEYVDSIIDSVRWLGFDWEDRLFYASDYFHQLYDWALQMIREGKAFVCDLTADEIRQYRGTPTEPGKESPYRNRSVEENLDLFARMKAGEFPDGSRTLRAKIDMASPNFNLRDPIMYRIVHAEHHRTGNEWCIYPMYDYAHGQSDSIERITHSICTLEFEDHRPLYDWYIEALGIYHPQQIEFDRLNITYTLLSKRKLLQLVQDGHVSGWDDPRMPTLVGIRRRGYTPEAMRNFCAAIGLSKTNGIIELGRLEYFVREDLNKRAQRVMAVLRPLKVVIDNYPEGQVEEMEAVNNPEDASAGTRKVPFSRELYIEQDDFREDPPKEFFRLAPGREVRLRYGYFIKCTGVVKNAAGEITEVHCTYDPETRGGNAPDGRKVKATIHWVSAAQAVSGEVRMYDTLFLKEDPNQVAEGQDFTANLNPKSLEIIRDAKLEPSLANAAPGTRLQFERLGYFCVDSDSTPGNPVFNRTVALKDTWAKIEKRGTPKK

SEQ ID NO: 6358 - protein, 312 aa, Solibacter usitatus Ellin6076
MTRICIPDDAPAVLAPSPVFPALQARAQLDYYDTLPGTEDLLIERLREAEVALNIRSSSRFTERVFAACPKLRMVSIWGTGTDHVDLAAAARHGVTVANTPGVAARSIAEHTLALLFAVARQIPHMDAATRRGAWERGQSMELYGKTCGVIGYGAVGRHFARLATAIGMRVMQWTLHPSAYPDVEFASLEDLYRASDVISVHLRLSPDTQDFIAAPQFALMKSEAILLNTARGAIVSEPALLDALIAGNLAAAGLDVFTTEPLPPNHPLTTLPNVVLTPHCAGITPEALHAGLQLAVDNIWAKCIRPPGQST

SEQ ID NO: 6359 - protein, 469 aa, Solibacter usitatus Ellin6076
MPRQLVECVPNFSEGRDLAKVDAIVQAILAVPEVALLDREMDADHNRSVLTFVGPPAAVADAAFRAVERAVAIIDLTQHHGAHPRIGAADVVPFIPIEGVTLEECVKLAERLGAEIWSKLKVPVYLYESAARRPDRTNLENIRRGQFEALLQEMGTVPARDPDIGDPVCHPTAGAIVTGARKFLIAYNVNLNTPDLSIAKKIAKTIRFSNGGFRYVKSMGVMLASRNLAQVSINLTDFEQTPMHLVFETVRREAERYGVSVIGSEIVGLIPKKAIELSAEYFLRYENFRPELVLENRIAEALATRSGLSEFLDALASPAATPGGGSAAAAAAAMAAALGSMVTRLAKLDASSFEDDRRFFTEAADRDAEAFNLVMAAYKRPKAERAPFVEDALHGAAEVPLQVMERAHALQSRLHALEVPAKFGSDLAVAKSLVVAAFLGALENVKINLDSIQDAAFKDLVMTRMAVLK

SEQ ID NO: 6360 - protein, 370 aa, Solibacter usitatus Ellin6076
MIIGVPKEIKDHETRVGLVPSGVTALREAGHEVLVETHAGEGSSLPDSDYLEAGAKILSTAAEVWQRADLVVKVKEPQKTEYAFFRPNLTLFTYLHLAPLPELTEKLLATKVNGVAYETIREKDGSLPLLTPMSEVAGRMSVQVGAQYLERPSGGRGILLGGVPGVAPGNVVILGGGIVGTNAAKMAIGMGAHVTIIDRSLNRLRELDDIFNGYAVTLASNAWTISENLKTADLVVGAVLIPGASAPRLVRREMISKMKPGSVVVDVAIDQGGCFETSHATTHTEPIYFVDGVLHYCVSNMPAAVPHTSTFALTNATFPYLLELANHGLEGACERHAALREGVNTYNGYITYKGVAESQGRQWRALASVG

SEQ ID NO: 6361 - protein, 351 aa, Solibacter usitatus Ellin6076
MNIGVLRERGAFDRRVALTPPVVRRLCGAGHTVWIESGAGDGAMFKDPEYQRAGAQVGYTPAEIVGRAELVVKIGRPTREELEWCKPETALMAFYHMAVADRGLIDALAERSVTAIGCEVIEQQDGSLPVLAAISEIAGQMTVPIAAHLMRTSSGGRGILLGGTPGVPPARVVVLGAGSAGFASARSAAGSGARVTAFDRDPRKLRHMMEHVPSVETCLADEDAIAEAVAAADVVIGAVLVAGRRTPHVVTRAMVERMKPGAAMIDVSIDQGGCFETSHPTSMDQPTFVHQGVTHFCVPNFTADLGRSASVAIAQALLPYVLTIAKHGVAGAFEKCSELARGVYLIEGKRP

SEQ ID NO: 6362 - protein, 548 aa, Solibacter usitatus Ellin6076
MKRTLLLFIPLILSASLALAQAPAAASPPAPAAPPVAITDADVKNVDAPKPDVRLKGDPDGALTGTVSDVAVSDAKKGLTIGDLVNQVGQNKVAINFTWTLITGFLVMFMQAGFAIVETGLCRAKNANHTMMMNFMVYGIGMLAYWLIGFSIQMGGVGGVGNLGGAPPLNTEHVITLFGKGFGLYGQHGMFLTQGGTYDVAVMVIFLFQMVFMDTALTIVTGSAAERWKFAAFLVSSFMLGAFIYPLFGNWAWGGGWLATLGTNFGLGKGYCDFAGSGVVHAVGGLTALALSIIVGPRLGKYNRNGKPNAIVGHDIVLVLTGCFILAFGWFGFNPGSTLGASGSGSLRIGSIAVNTMLAGMAGGFGAMFYMWMRYGKPDASMSGNGLLAGLVAITAPSGFVNTVGAVIIGLIAGVLVCLSVEFIDRVMRVDDPVGAISVHGVNGIWGVIAVGLFADGKSNYGGSWNGVNGSVTGLFYGDPSQLVAQLIGVSTLVGGVFVLSFVVNLAIDAVVGQRVSAKAELEGLDLPEMGQVGYPEFELKARTVGVQ

SEQ ID NO: 6363 - protein, 386 aa, Solibacter usitatus Ellin6076
MRDAVIVDCLRTPVGKAPRGALRNTRPDDLAAIAIRAVLDRYPAALDLVDDVILGCAMPEGEAGANMARQAALRAGLADSVPAMTINRFCSSGLQAIALAAERIRSGGADVIIAGGAESMSMIPSGGRKPAPNPWFVDHWPEVYMTMGLTAERVQRKYNVSREDADAFALRSHQNALRAQQDGKFDDELVPVETQNIMPGIVERAVFSRDEGPRADTSFEALAKLKPVFHANGSVTAGNSSQTSDGAAAALVMSAAKARQFGFAPKARFVSYATAGVPPEIMGIGPVVAIPKALAMAGLKLNDIGVIELNEAFAVQALAVIRKAGIDPDRVNVNGGAIALGHPLGCTGAKLTATILREMQRGQIRYGMVTMCVGGGQGAAGIFELM

SEQ ID NO: 6364 - protein, 632 aa, Solibacter usitatus Ellin6076
MCGIVAVYDAEGAGASAEVAAGLKTLRHRGPDAQHVWLSPDGAICLGHARLSIIDLAHGDQPLANEDESIHCVVNGEFYDFERIRRGLEGRGHRFRTHSDSEILLHLYEDLGVECLRELRGEFAFVLWDGRRRVLMAARDRFGIKPLFYSRTGERLLFASEVKALHAAGVPAAWDEQGFLETFSAMYASSPTLFRHVSAIPPGHYLLSRDLGCSLHKYWDFEFPAEGNLPERRDEECVAEFGAVLDEAVRLRLRADVPVGCYLSGGIDSCSVLALMAKHAPGRVRAFSLSFDHELYDEGPIAREMAQRTGAEFTMIPVSHAGMAADLSDALWHNESFFLNAGSAAKFALSRAVRDAGYKVVLTGEGSDEVLAGYAFFRQDMIRHASNNGGAAEAIERLRAANPASGGLMFTTKQVTPVAGYVDRLGYFPSFLEARKAGLEALRALLTIAYETDEVLTRLLNRVDIAGQLTGRHVLNQSLYLNNKTILPGYILSALGDRVEMAHSIEARLPFLDHHVVEYTRRIPVDLKIRGTVEKYILREAMKPMLTTTVYKRQKHPFLSPPALLKPDEPLHALLQDTLRGRALDRVPYLRRTEVAGFLDRAGGLDVAGKIAAEFPLMMMLSACLVAERFGL

SEQ ID NO: 6365 - protein, 393 aa, Solibacter usitatus Ellin6076
MRDAVIVSAVRTAVGKAPKGMLRATRPDDLAAVAIQGAMARVPGLEAREVEDVIIGCAMPEGEQGMNVARIAALRAGMPIESSAMTINRYCASGLQSIALAAERIRGAGAEAIVAGGTESMSFIPFGGNKISINPWLQQNYPDSYLSMGLTAERVAKHYGITREQADEFALASHTKALAAQAAGKFVQEIVPVPVTFSAPDAKSKIRRTEMQFNIDEGPRADTSMEALGKLKAAFHAKGTVTAGNSSQTSDGAAAAVVMSEDRARALGIAPLARFVAYAYAGCLPEEMGIGPVYAIPKALKLAGLTLDQIDLIELNEAFAAQSLAVIKALGLAMDRVNVNGGAIALGHPLGCTGAKLTASLLQEMKRRKARYGIVTMCVGGGMGAAGIFENLN

SEQ ID NO: 6366 - protein, 295 aa, Solibacter usitatus Ellin6076
MRKLIALVACMAFAAPAGQIYSLAWGPVIAVGGYKETRLRDGATLKGNAEAVRAVAFSRDGKLLAAAGGLPARKGEVLVWDMASQKVKVTISGHSDCIYAVAFSPDGATLATAGYDKLIKLWDASSGKELRTLRDHIDAIYALAFTPDGKRIVTGSADRAVKVWDAASGERLFTLSESTDAVNTLALSPDGKRVAAGGLDKTIRIWSLGEKEGTLLHTLIAHEDAILRLAWSADGQWLASASADRSIKIFRAADLTELRAITKLPDWAFGLEFAPDGNSLAAGFFNGQLEIYSRQ

SEQ ID NO: 6367 - protein, 240 aa, Solibacter usitatus Ellin6076
MTSSSGGSATQKSLVDPLAFLPCSTVAEFKKGRIIYEYDQPCENLYLILSGTIKVSRMVDVGGQLLLDLYRADDFFGDLALLNPSVTAEQAVAYATSSVMIWRTSDIEEIVMARPKLGIALLQSFGQRSLGFIQRVESLCFESIEHRLARSLIRFADHLGAAQPDGTVLMEPLTHELLSQYIGTSREVVTCHMTNLRRLGFLQYSRKMIVIHRESMKTWLDRAANNAARSQKPRKAGADA

SEQ ID NO: 6368 - protein, 594 aa, Solibacter usitatus Ellin6076
MATSTEQALSQREQLENEHLKTVREEIEIFRTKAMSVLAGEITDAEFRPFRLKHGIYGQRQPGVQMVRCKIPSGLLTADQVGQLARIADEFGGGRGHLTTRQNIQYHFVPLAQVPDLMHLLADVGLTNREACYNTVRNVTACPWAGIAQDEVFDVRPYAQRLAYAFLRKDLTGNLPRKFKFAFDGCRHEDCIQGAINDVGLRAVVRDGKRGFRMVIGGGLGPLPTEAQLLEEFVPEEQLLHKCEAIVRVFNQYGNRKNKNTARMKFVMRNRGLEWMREQIELAYQDILLNGGIAWPAIVPEGFGGYESNPQPLGNGALLPVVNHSTSGDAAYDRWLETNVREQKQTGYAAVTVTVDQGNLTGDQLRGLAKLAGTAGDGLLRTAINQNVVLGFIPLSRLPQVYQALGDLNLAGAGAGQIEDVLTCPGAYTCNLGITKTMNLGAALQETVRQFDDPEVRRLTIKASGCPNACGHHWIGDFGFYGNARKLEGREIPYYQMLLGGGYDDQGIMRFGLAIQSLPARLAPEAVRRVIQHFQANRLRGERFRDYVLRFKIETFRELTADLAKPADLFPEIYQDWGDSEAYSLKLGRGECAV

SEQ ID NO: 6369 - protein, 376 aa, Solibacter usitatus Ellin6076
MLDKKADLAGPGIGDYEELEKILPQDYSSLLSIRDTQRAIFAGKNFIEEHLCQALNLMMVTVPLVVDTESGLNDLLDRDGSRTPIQFHIANDHDKHPIDAQIVQAATKWKRLALQRFGMKAGEGLCTDMRAIRKDYFLDHDHSAYVDQWDWEKVIHFYEHDLDFLKQAVNAIWKVLVDAESYLQKEFPALKDSRYPNLPRKLTFLHAEDVLDMYPDLPRKQRETRLLQECPAVFLIGIGWTLKDGYPHEMRAADYDDWCTETRSIDGRPCHGLNGDILVWNHVTRRRHELSSMGIRVNAETLQKQLRITNQLDFLRYPYHQAVVRHELPVSIGGGIGQSRTLMLLLRKAHLGEVTVSVWPKILKEICAAKNIHVLE

SEQ ID NO: 6370 - protein, 314 aa, Solibacter usitatus Ellin6076
MTHDRLKVFAGNANPALALEICRALGIAQSQAMVRQFSDGEIYLQLKENVRGMDVFVIQPTCAPVDRNMMELLLMLDALKRSSAQRITAVLPYYGYARQDRKDKPRVPISAKLVAALLERAGADRVLTLDLHAAQIQGFFDIPVDHLFAMPVMIEYFRSQEIPALTVVSPDAGGVERARAFAKRLNSPLAIIDKRREEANVAEVMNVVGDVGGRNCLLVDDLIDTAGTLVKGTEALLEKGAASVSACATHAVLSGPAVSRIEESALKEVVFTNSIPLSEAARNSTRIKSLSIAKLMADAIRSIHEETSVSTLFV

SEQ ID NO: 6371 - protein, 298 aa, Solibacter usitatus Ellin6076
MANLGFLGLGLMGYPMARNLLRAGHNVAVWSHTSDKARKLADEEKGVFCATPRDVGAGADVVFLCVGDTAMAREVILGGQGLIQGLRAGAVVVDCSTIAVADSREIGAALKAKSVDFLDAPVTGSTPGAESGNLTFMIGGDEAVFSKIRPLLDPMGKKIYFCGGAGMGLQAKLTQNLVLSNILMAFNEGMVLATKGGMDPKLMLEILDNSAAKSGLISYKAPFVFSRNFTTNFSVKWMHKDIGLMLESGKDLGVPLYLTGLTRQLFQTAIAAGHGDEDICSTIKVLESLTGTEVISEK

SEQ ID NO: 6372 - protein, 170 aa, Solibacter usitatus Ellin6076
MRAVFFDRDGTLMEDAHYCADPADVQVFPGVPAGLRRLKRAGFGIFLITNQSGIGRGWITEQQYTAVHQEFLRQAGEASIDATYYCPDAPDVPSSCRKPEPGMVLQAAADHSIDLSASYFVGDKAADIECGRRAGTHTVLVLTGYGTAAQNSNAEFVCKDAVEAIELILR

SEQ ID NO: 6373 - protein, 471 aa, Solibacter usitatus Ellin6076
MATLEIGPTMNHYSKLTLVSVLAATAGLAQTAPDLTTKLAAMEAATKSAQSAGDNAWMLVSSALVLMMTAPGLALFYGGLVRRKNVLGTMMHSFILMAVVTVIWAVAGYSLAFGGSSPYLGNFQFAFLDGVGTAPNADYAATIPHATFMVYQLMFAIITPALISGAFAERMKFSAMLLFTVLWTLVVYFPMAHMVWGKGGLLNAFSGGKIPCLDFAGGTVVHITSGVSALVCALYLGKRVGYPSSAMKPHNLVISTIGAGMLWVGWFGFNAGSALAASGLATSAFVATHFGAAAATLAWLAVEWIDAGKPSMLGAISGCVAGLVAITPASGFVKPFPAMIIGACAGLLCYFMVTRVKRKFGYDDALDAFGVHGAGGTLGAILTGVFATNFINDGLKNAAGQPQALGLVDGNGGQVMNQILGIAISWGLAIVGTLVILKFVDAVIGVRVTKEQESDGLDLSMHNEEGYVFEN

SEQ ID NO: 6374 - protein, 150 aa, Solibacter usitatus Ellin6076
MGTVLIKKPAIDPRYAFFELAIRESKIHRRGVYALERIPARRKVIEYTGQKISRRETKRRGDGDITYLFTLDDYWTLDGAFGGSGAEIINHSCEPNLYAWNFKKHILYMSKRVIQRGEELTVDYRFSKDVERVPCLCGAKTCRGTINLLK

SEQ ID NO: 6375 - protein, 564 aa, Solibacter usitatus Ellin6076
MTAVPETPLDHWMPKLVLCLRQYTWQIFVKDLIAGLTVGLVALPLAMAFGIASGVTPQAGIYTAVVAGFIISALGGSRVQIGGPTGAFVVIVSGIVLKFGISGLLMVTAMAGVLLLVMGATGLGTAVRFIPRPVTIGFTNGIAVLIASTQIRDFLGLKIAAVPSEFLLRMEKLGAHLNTIDPVTAVVGGVSLGIILLWPLVTKRVPGSIVALLAGTALAIVLKLPVETIGSKFGGIPTGLPTFHIPQFRADLILPLLPSAMTVALLAAVESLLSAVVADGMSGDKHNSNVELIAQGIANVISPMVGGLPATGAIARTATNIRSGAKTPVSGMIHALTLLMILLVAAPLAKFIPLATLAAVLFVVAYNMGEWREIVGILRLGRAERVVWVATFGLTVVADLTVAVEVGMTLAALLYIYRVSQTTTIAPVTDAYIEKGRPHVLQGKDIPQFVTILRIHGPFLFGTTEKLADATEDLSHYGHVVILRVRNMTAIDATGLYALEKLAERLHTTGRHVLVCGARRQPRTMLERADFVSVIGQENILPHVDAALARARILHHFAENQRSA

SEQ ID NO: 6376 - protein, 67 aa, Solibacter usitatus Ellin6076
MKEKGTVKWFNAAKGYGFIQRENGEDVFVHFSAIQTEGYRTLDEGSSVEFEVTKGPKGLQATNVTAA

SEQ ID NO: 6377 - protein, 397 aa, Solibacter usitatus Ellin6076
MQAAVNPIADRISSISVSSTMKVSAEAEKLRSEGVDVVDFGAGEPDFPTPDNIKQAAVRALEQNFTKYTAAGGTAELKKAVCEAHARDFGTDYKPAECLITVGGKHVIFNLIQALVNPGDEVVIPVPYWVTYKDVVNYAGGKCVFVDTDESQGFALTAAMLEPHLTARTRLVIINSPSNPSGAVVDRAEFEKIFQLTSSRGIYLMTDECYCKFLYDSQPFSIASLPGAKETVLVAGSLSKTYAMTGWRIGFGLVPQAIVGAMTKLQSHSTSNPCSISQKAAVEALRGPQESVAIMLAEYHKRRDYVVERLRAIPGVKCAMPQGAFYAYPNVGVVLGGKSGIANTLQLSERLLAESHVAVVPGEAFGTDQHIRLSYATSMHELGRGLDRIHEFIVKNS

SEQ ID NO: 6378 - protein, 636 aa, Solibacter usitatus Ellin6076
MGKIIGIDLGTTNSCVAVMEGGQPTVIANQEGNRTTPSVVAFTKSGERLVGQVAKRQAITNPENTVFSIKRFMGRRYDEVNEEMKMVPYKVVRGENGDARVDIMGKKYSPPEISAMILTKLKEAAESYLGEKVTQAVITVPAYFNDAQRQATKDAGKIAGLDVLRIINEPTAAALAYGLDKKKNETIAVYDFGGGTFDISVLEVGEGVVEVKSTNGDTHLGGDNIDQRVIDWIVSEFKKENGIDLSKDQMALQRLKEAAEKAKMELSTLLETEINLPFITADATGPKHLQMRLSRSRFEQMVEDILQRSMGPCKQAMTDASVTPSQIDEVVLVGGQTRMPRIQTLVRELFQRDPHQGVNPDEVVAIGAAVQGGVLGGEVKDVLLLDVTPLSLGIETMGGVFTKLIERNTTIPTRKSEVFSTASDNQPSVEIKVYQGERAMARDNRLLGVFQLGNIPPAPRGVPQIEVTFDIDANGILNVTAKDRGTNNEQKITITSSSGLSKDEVEKMARDAEANAADDRKLKDTIDARNRADAMVYNVEKTLKEHRAKVGEAEAKEIEAALEETKKTLNENDAEKINAAVDRLTTASHKLAEAMYKSSSQPGAQEAPPTDGQPKPDEKGKDNVVDAEFVDVDDKK

SEQ ID NO: 6379 - protein, 422 aa, Solibacter usitatus Ellin6076
MTNFSELPLSAQLKSNLAKNNFTEPTPIQSLAIEPALAGKDIVATAQTGTGKTLAFLLPTIQLLSTEPRQPGVRALILTPTRELALQINEALLQIARGTGIRAAVAVGGLNERSQLRDIRGGANIVVATPGRLYDFMSRGLINLTTVRMLILDESDRMLDMGFLPTIKRIIAAMPAERQTLLFSATLESSVKQLVETHVRNAVRIELGSISKPSEQVDLHLYEVDQDRKFGLLEMMLREEQGSFLVFARTKHGADKLAKKLAQSGFKSAAIHGDRSQNQRIQALKGFQEGYYRVLVATDVAARGIHVEGISHVVNFDLPQVPEDFIHRVGRTGRAGAKGTASTFATRSERSEIGRIERTLSVKLKRREVSASIVAAPRKESSAVIVLPHAKRAEHSRPEQGRNKSFRSFSPKSGRRPVRRAV

SEQ ID NO: 6380 - protein, 257 aa, Solibacter usitatus Ellin6076
MALLEIKDLHAKVGEREILKGINLTVNAGEVHAIMGPNGSGKSTLAQVLAGRDMYAVTGGSVTYDGKDLLELSPEDRAREGIFLAFQYPVEIPGVSNMYFLKAALNATRKHRGIEELDAMDFLNVVREKMQIMKMDQALLNRPVNTGFSGGEKKRNEIFQMAVLEPRLAILDETDSGLDIDALRTVAGGVNAMRSPDRGMIVVTHYQRLLSEIVPDFVHVLAEGRIVKSGGKELALELEAEGYEGLGLHDEPEAVGR

SEQ ID NO: 6381 - protein, 304 aa, Solibacter usitatus Ellin6076
MNIEFRSGFVSLIGRPNAGKSTLLNALVGQKVAIVADKPQTTRTSIQGVLTLPEAQIVFADTPGIHKADTPLNKRLMDTVRGALEERDLLLFVADATRKFNEDDRRAIDIARRHKTPVVLVLNKIDLLKDKAHLLPLIEEYKAVFEFTEYVPVSSVKKIGLDQLRAVILKYLPVGPAYFPEDYVTDQPERFLAAELIREKVLLATRQEVPHAVAVTVDRWEETPKITRIYATIHLERDGQKAIVIGSGGSMLKLIGTQARHEMERLFEAKIYLDLHVHVQPGWRQNRAFLNALDWRTMTGEDDA

SEQ ID NO: 6382 - protein, 457 aa, Solibacter usitatus Ellin6076
MAHLLIVDDDANTLASLARAFRLAGHEATVCDNASRALELVKGQGFDMMLSDVVMPGKDGLTLLEEVRGLGITLPVVMISGQANIEMAVRATRLGAIDFLEKPLSTDKLLLTVDNVLKLKRLEDENRELRQRVGKHEIVHSGERMQRVMAQVDRVAASEARVCILGETGTGKELIARALHERSSRKGGPFVTLNCAAVPAELIESELFGHEKGSFTGAASRHIGKFEQANHGTLFLDEIGDMPILMQAKLLRVLEERQVERVGGDRTIPVDVRVIVATHRNLHELVKKGVFREDLYHRVYVFPLFLPPLRERDGEIAVLVAHFAAQVSEVNGWRPKVFLPEAIQELQRYSWPGNVRELRNVVERLLLLADGAIDAALVRLALPTGESEAGGQTGERGHLGTLAERTDCFEREQILSELKRNNQRMTDTAKALGLERSHLYKKCQALGIDLRAMRKAQ

SEQ ID NO: 6383 - protein, 518 aa, Lotus japonicus
MGYDQTRKLSDEYEISEILGRGGFSVVRKGTKKSGNEKTQVAIKTLRRLGSSPSGTGGGQKSTATVMGFPSLRQVSVSDALLTNEILVMRRIVENVSPHPNVIDLYDVCEDSNGVHLVLELCSGGELFDRIVAQDKYAETEAAAVVRQIAAGLEAVHKADIVHRDLKPENCLFLDSRKDSPLKIMDFGLSSVEEFTDPVVGLFGSIDYVSPEALSQGKITAKSDMWSLGVILYILLSGYPPFIAQNNRQKQQMIINGNFSFYEKTWKGITQSAKQLISSLLTVDPSKRPSAQELLSHPWVRGDKAKDEQMDPEIVSRLQSFNARRKLRAAAIASVWSSTIFLRTKKLRSLVGTYDLKEEEIESLRIHFKKICGNGDNATLSEFVEVLKAMKMPSLIPLAPRIFDLFDNNRDGTIDMREILCGFSSLKNSKGDDALRLCFQMYDTDRSGCITKEEVASMLCALPEECLPADITEPGKLDEIFDLMDANSDGKVTFEEFKAAMQRDSSLQDMLLSSLRPS

SEQ ID NO: 6384 - protein, 136 aa, Staphylococcus epidermidis
QKTDYVSPIVLGNEDNIKSLASKHALDLTQIEIIDPATSELKDELVDAFVERRKGKATKEQAVELLDNVNYFGTMLVYTGKAEGLVSGAAHSTGDTVRPALQIIKTKPGVSRTSGIFFMIKGDEQYIFGDCAINPE

SEQ ID NO: 6385 - protein, 273 aa, Solanum lycopersicum
MGRSPCCEKAHTNKGAWTKEEDERLISYIRAHGEGCWRSLPKAAGLLRCGKSCRLRWINYLRPDLKRGNFTEEEDELIIKLHSLLGNKWSLIAGRLPGRTDNEIKNYWNTHIRRKLLSRGIDPTTHRSINDPTTIPKVTTITFAAAHENIKDIDQQDEMINIKAEFVETSKESDNNEIIQEKSSSCLPDLNLELRISPPHHQQLDHHRHHQRSSSLCFTCSLGIQNSKDCSCGSESNGNGWSNNMVSMNIMAGYDFLGLKTNGLLDYRTLETK

SEQ ID NO: 6386 - protein, 115 aa, Picea sitchensis
MGGSTSKNPQIIEMAMGKAKEIVSSNSVVVFSKTYCPYCTQVKQLLSSLGAKTKVVELDTESDGKEIQTALQEWTGQRTVPSVFIGGTHIGGCDDTVAKHNSGKLVPLLTEAGGV

SEQ ID NO: 6387 - protein, 210 aa, Picea sitchensis
MSRVRIAMDPSATHFAVIVIAVILASAAATNQKANGLYSHEDIAEFIKTSCNVTLYPQVCVSSLSSYPGSLKAKQSDLVKAAVTVSLLNARNVSVWAAGLKARKATMSKSESTALKDCIGNFKDATYEISGSLAELKHLKPNTFQFQMGNVQTWMSAALTDQDSCLNGFQDLDTSGKVTGTVTGRVQNVCKLISNALALINTFAATGAGY

SEQ ID NO: 6388 - protein, 215 aa, Picea sitchensis
MGKNGSGKSTFSKVLVGHPDYEVTGGTVIFKGENLLDKEPEVRCHSGLFMSFQSPVEIPGVSNMDFLRMACNARRSTLGLTELGPLEFYGFLSPKLAMLNMDPKFLDRNVNEGFSGGEKKRNEILQLAVLEADLAILDEIDSGLDVDALQDVAKAVNGLLTTKNAVLMITHYQRLLDSIKPTYVHIMENGRIVKTGNASLAKQLEEGGYRAIADV

SEQ ID NO: 6389 - protein, 195 aa, Picea sitchensis
MVRGKTQMKRIENATSRQVTFSKRRNGLLKKAYELSVLCDAEVGLIVFSPRGKLYEFASPRKFWKSIKTGRKKVTYLLERKSKILRKMLGEGLTSCSMAELNKLESQAERGLSHIRARKTEILMDQIECLKRKELFLSEENAFLSKKYVDRQSMDGSVSTSPSIGLGSIDNIEVETQLVIRPPTAQDHFSVNNSY

SEQ ID NO: 6390 - protein, 309 aa, Picea sitchensis
MLMKQMGMDMEDCNTGLGLGMSIGLGIGLLREDLHSHRHHVNGPPVQLDLLPLAPGLPSRDLPWGKTSPGTDGERSAGESKATVPRRIDVNKLPASCYYNEDAGTINVSSPNSALSSFHVDSGGAINAESSCYAMSVKRERDATDELEADRACSRVSDEEADQEGGTRKKLRLSKEQSALLEESFKENSSLNPKQKQALAKRLNLRPRQVEVWFQNRRARTKLKQTEVDCEFLKRCCESLTDENRRLQKELQELRALKLASPLYMQMPAATLTMCPSCERVVPAENSRPPPFTLAKPQFYPYTHSSAAC

SEQ ID NO: 6391 - protein, 189 aa, Picea sitchensis
MDRDWSFLEQNSSNGKMKRVVDAAQVEQNSRVVVCLGTQQFVDYLCMTNPCVLSVMHYSLLELANIKEKHDSVKCRQGDIVGMPSSSPPLDVVFINCLPALNHSLPRIFEALVRRCAPGARLIISDTQGRDQLRVHKKYNPDVITGDLPDQVELEKVLWRYPLQLISFSDEADFYLAVLKVCEDENSKT

SEQ ID NO: 6392 - protein, 130 aa, Picea sitchensis
MEKITRLSVLFVAMSALCMSASAATRQEKFVKTTISNNKIAIFSKSYCPYCARAKNVFKELNVTPYVVELDLRDDGGEIQQALSILVGRRTVPQVFIDGKHIGGSDDTLEAYQSGQLAKLVGQTDEDELR

SEQ ID NO: 6393 - protein, 386 aa, Picea sitchensis
MAKPISIEVWNPAGKHRVVSTKSMPGTRWIRLLTDADCRLEICTEKKTILDVEDIQALIGDKCDGVIGQLTEDWGETLFSTLKRAGGTAFSNMAVGYNNVDLNAANTYGIAVGNTPGVLTETTAELAVALTVSASRRVVEADQFMRAGLYDGWLPHLFVGNLLKGQTVGIIGAGRIGSAYARMMVEGFKMNLIYYDLYQSTRLEKYMTAYGEFLKSQGEAPVTWKRASTAEDVLRDADVISLHPILDKTTYHLINKDRLSIMKKEAVLVNASRGPVIDEAALVNHLKANPMFRVGLDVFEDEPYMKPGLAEQKNAVVVPHIASASKWTREGMATLAALNVLGKVKGYPVWPDANKLEPFLDENSAPPAACPSIVNAKLLGLEVSKL

SEQ ID NO: 6394 - protein, 240 aa, Picea sitchensis
MFGLLRSARSMASRTLGNSIGNGIEKEWGSPNLRNLAQQLRFYQRPHAPWCSDNEADESGEGGGGVSSHLGVLESVAVTSNSELSVARKRAKRAAVLVCLFEGSEGDLRVILTQRSGNLSSHSGEVALPGGKMEERDKDDAETALREAKEEIGLDPSHVKVVTTLEPFLSKYLLRVVPVVGLLPDRKSFKPVINPGEVDAIFDAPLEMFLKYFGTCCFCYLPTTAIIFRGGTRLWWNRKC

SEQ ID NO: 6395 - protein, 357 aa, Picea sitchensis
MSSVLADLLNLDLSDVTEKVIAEYIWIGGSGMDMRSKARSLSGPVSSPKELPKWNYDGSSTGQASGHDSEVILYPQAIFPDPFRRGKHILVICDTYSPNGTALPSNKRAAAEKIFSTKAVSDEEPWYGLEQEYTLLQKDVKWPLGWPIGGFPGPQGPYYCGVGADKAWGRDIVDAHYKACLYAGINVSGTNGEVMPGQWEFQVGPSVGISAADELWCARYIMERITEKEGVVLSFDPKPIEGDWNGAGCHTNYSTKSTRKEGGFEVIKKAIEKLRLRHKEHISAYGEGNERRLTGRHETADIHTFSWGVANRGASVRVGRDTEKDGKGYFEDRRPASNMDPYIVTSMIAETTILWKP

SEQ ID NO: 6396 - protein, 192 aa, Picea sitchensis
MMSMATSQSLQSPFSITSTISSSQFRRTNPLLGHFSFKAAVCPSGLFAKENSSRTARRHRAGFKRRSSTALQCTASHGPTGSTGALTPELKATLDKFITSNKVVLFMKGTKDFPQCGFSNTVVQVLKSLNVPFETFNILENETLRQGLKQYSSWPTFPQLYIDGEFFGGCDITIEAYKSGELQELLERAICS

SEQ ID NO: 6397 - protein, 344 aa, Picea sitchensis
MAAVTAAVSVPTSTSSSSLGRIALERATFPCPDRSASFQKTFFGGRLNNSDAALLFARVRTVPLNYRQSVKAQVTTEAPATTKVVKISKKNEEGVVVNKYKPKTPYIGRVLLNTKITADDAPGETWHMVFSTEGELPYREGQSIGVIPTGIDKNGKPHKLRLYSIASSALGDFGDSKTVSLCVKRLVYTNDQGEVVKGVCSNFLCDLKPGEEVTITGPVGKEMLMPVDPNATIIMLATGTGIAPFRGYLWKMFFEKHPDYKFNGLAWLFLGVPTSSSLIYKEEFEKMKEKSPDKIRVDFAVSREQTNEKGIDDIITSLAAEEGIDWNEYKRQMKKSERWNVEVY

SEQ ID NO: 6398 - protein, 226 aa, Picea sitchensis
MSAEVVVGQGGSSATAAQLAPSSSSNGINEGSRELAASPAPSRYESQKRRDWNTFGQYLKNHRPPLALPRCSGAHVVEFLHYLDQFGKTKVHVPACPFFGHPHPPAPCACPLRQAWGSLDALIGRLRAAYEENGGKPESNPFGARAVRLYLREVRESQAKARGIAYEKRNASAPQFNSNNSSSNNMYSSTSTSTSTSTSTSSISSTSTSSKLRLTLCPTIPIQMSL

SEQ ID NO: 6399 - protein, 271 aa, Picea sitchensis
MKPLYCGNLEYEARQSEIERLFGRYGRVERVDMKSGYAFIYMDDERDAEDAIRGLDNREFGRQRRRLCVEWTKHPEKGFRRPEGGRRSTMYIKPAKTLFVINFDPADTGVKDLEKHFEPYGKVLNVRIRRNFAFVQFESQEEATKALHSTDKSKVLDSIISVEYAQRDDGDRRGGRSSPVRRGSYGRSAEGRDRSESPIYSRRALRDSPDYGRAPSPIYARRSERSSPDYGRAASPIYARRLQRDSPDYGRVLSPVHERYRSRSPVMRSRS

SEQ ID NO: 6400 - protein, 206 aa, Picea sitchensis
MDVAGGVSNNINMKMLNMLELIRHHLLDVEDEIDIIDLQRGNQVLASGSRLTSDGNKFAEAQDYSSSSSVCPVIRREDAFNVKPQAHDEDNGENKQISRASHYRGVRRRPWGKFAAEIRDPAKKGARVWLGTFNTAEEAAHAYDRAAFRIRGARALVNFPLAFASNSENGSAVSHMGQKRKRGNGGGGTLDLGACGWIMEKLICLS

SEQ ID NO: 6401 - protein, 157 aa, Picea sitchensis
MKSYLDHALAMSPLLHFPEELERIIIPSARSYDQHEENKGVEPAAVDIKETPKEYVFYADVPGLTKSDIQVYVEEDKLLVIKYQGGKRKREGVEDEECCKYLRMERKRNPKFARKFTLPGDANVEGISASCVDGVLTVTVPRIPPAMKSKTIQISVN

SEQ ID NO: 6402 - protein, 156 aa, Picea sitchensis
MGFISFAGRVLFSSIFILAAWQKINDFGADGGAAAKSMEPKLLLFKNHVTTLLGVQVPEVEIKHLLMVAIGLEGIGGILFIFGSTLGAYLLLIFLASVSPIMHDFYNYEMTKPEYVTEFIQFLKNLSLFGALLFFLGMKNSFTKKPKKKMSKSKTN

SEQ ID NO: 6403 - protein, 286 aa, Picea sitchensis
MFGLLRSARSMASRTLGNSIGNGIEKEWGSPNLRNLAQQLRFYQRPHAPWCSDNEADESGEGGGGVSSHLGVLESVAVTSNSELSVARKRAKRAAVLVCLFEGSEGDLRVILTQRSGNLSSHSGEVALPGGKMEERDKDDAETALREAKEEIGLDPSHVKVVTTLEPFLSKYLLRVVPVVGLLPDRKSFKPVINPGEVDAIFDAPLEMFLKDENYRSEEKQWMGFNYTVHYFDFQTENKKFLIWGLTASILVRAASVIYQRPPSFSEVVPDFGGIENANSGHDPKL

SEQ ID NO: 6404 - protein, 218 aa, Picea sitchensis
MVRGKTQMKRIENATSRQVTFSKRRNGLLKKAYELSVLCDAEVGLIVFSPRGKLYEFASPSMQEILEKYQDRSQESDISVRTKEQDTQSLRRELANMEEKIKILDSTQRKMLGEGLTSCSMAELNKLESQAERGLSHIRARKTEILMDQIECLKRKELFLSEENAFLSKKYVDRQSMDGSVSTSPSIGLGSIDNIEVETQLVIRPPTAQDHFSVNNSY

SEQ ID NO: 6405 - protein, 326 aa, Picea sitchensis
MKYSFLRFSFYTMAIRSLLCLLILVRLSAVYGQLCPRFYDISCPSAFSIVNSVVTQAVAKEKRMGASLLRLHFHDCFVNGCDGSILLDDTSTFQGEKTAVPNKNSVRGFEVIDAIKTQVEAACPGVVSCADIVAIAARDAVVQLGGPTWLVLLGRRDSTTASLSAANSNLPPPASNLSALISSFQSHGLSIRDLVALSGSHTIGQARCTNFRNRIHSESNIDLSFARARQANCPSTGGDDNLAPLDLLTPTTFDNNYYKNLERRRGLLHSDQQLFNGGSTDNLVSFYTTYPIAFSIDFAVAMVKMGSIEPLTGNNGEIRKNCRKIN

SEQ ID NO: 6406 - protein, 225 aa, Picea sitchensis
MCAEVSQSAMAVHTMQMARMEMKRDIGVCEVEASSAVKETHFRGVRKRPWGRFAAEIRDPLKKTRVWLGTFDTAEEAARAYDNAARNLRGAKAKTNFGPSPLHDSNALFNNGVARAASAQKQDCLPRPVFYSKQEPGVAVLPSPSDNLRAFTCVSIGDSLLNPPVETQTVSNKKKKPLFGTHLSVPSRNLQQQQNEEICRSPARPAPLWLDLNLPPAASDFDLHI

SEQ ID NO: 6407 - protein, 93 aa, Picea sitchensis
MYSFFGSCCSKTYCPYCTQVKQLLSSLGAKTKVVELDTESDGKEIQTALQEWTGQRTVPNVFIGGTHIGGCDDTVAKHNSGKLVPLLTEAGGV

SEQ ID NO: 6408 - protein, 152 aa, Picea sitchensis
MAMDPLLNTVQQLLGVPDDLERILHAPTRSYMRDTEATASTPVDVKEYPNSYVFIVDMPGLKSNDIKVQVEDENVLNISGERKRTEKDEEGEVKYIRMERRVAKFMRKFSLPADCNLEAISAACQDGVLTVTVPKLPPPEPKKPKTIAVKIG

SEQ ID NO: 6409 - protein, 240 aa, Picea sitchensis
MDEGSSFAASSSRNSSFSNGYDNPQNTNKNSSSGGSGDAGSFECNICLELAQDPIVTLCGHLFCWPCLYKWLHGHSKSQECPVCKALVEEDKIVPLYGRGKVGAPDPRSKAIPGINIPHRPAGRRPETAPSPGPNLFQQQPFGFMGGGPAPMGAARFGNFTFSAGFGLFPSLFGFQMHGFPDGVGYGAAPGYNYGFSNPFQGGHPHTFHQPMTREQEQQAMLSKYLLIIGIFVVVCLIFL

SEQ ID NO: 6410 - protein, 341 aa, Picea sitchensis
MAQIKHSPGLTLQFLSVLITGLALMLWIQTVDAQSCNGLSHHFYYKSCPKAQAIIKSVVEDAVRKEARMAASLLRLHFHDCFVKGCDGSILLDDTSSFTGEKTANPNKNSVRGFGVVDQIKCELEKACPGVVSCADILAVAARDSVGFSGGPFWKVLLGRRDSRSASKSGANNDIPGPNSTHQTLETKFKRQGLNVVDLVALSGAHTIGLARCSSFKARLYNQTVNGKPDPTLDTTYLKQLRAVCPQTGTDDNQTTPLDPVTPIKFDIDYYDNVVAGKGLLASDEILYSTKGSRTVGLVESYSTSTHAFFKQFAASMIKMGNINPLTGSHGEIRKNCRRMN

SEQ ID NO: 6411 - protein, 105 aa, Picea sitchensis
MSGVDNGGTPGATNQEEEKKPMDQGAHINLKVKGQDGNEVFFRIKRSTQLRKLMNAYCDRQSVDFNSIAFLFDGRRLRGEQTPEELEMEDGDEIDAMLHQTGGRR

SEQ ID NO: 6412 - protein, 159 aa, Picea sitchensis
MSDEDNHFESKADAGASKTFPQQAGTIRKNGYIVIKARPCKVVEVSTSKTGKHGHAKCHFVAIDIFNGKKLEDIVPSSHNCDVPHVTRTDFQLIDISEDGFVSLLADNGNTKDDLRLPSDEQLLTQIKDGFGEGKDLVVTVMSAMGEEQICALKDIGPK

SEQ ID NO: 6413 - protein, 293 aa, Picea sitchensis
MEVGFLGLGIMGKAMAVNLLRNGFKVTVWNRTLSRCEELVEQGASMGSTPAEVVKKCKYIIAMLSDPPAALSVVFGKDGVLEQMCTGKGYIDMSTVDTVTSTKISEAIIEKGGRFLEAPVSGSKKPAEDGQLIILAAGDKSLYDEVMPSFDVMGKKAFFLGEVGNGAKMKLVVNMIMGSMITAFSEGLALADKSGLSQTTLLDVLELGAIANPMFKLKGPAMIQEKFPTAFPLKHQQKDMRLALALGDEVEVSMPVAAAANEAFKKGISLGLSDQDFSAVYQVVKESSAASKV

SEQ ID NO: 6414 - protein, 299 aa, Picea sitchensis
MMKDQSGMMQEEMGVLEGTGDMMDSYPPRQLLDRRLKPQGDQEILKCPRCDSTNTKFCYYNNYSLTQPRHFCKTCRRYWTKGGSLRSVPVGGGCRKNSKRNNNSNNNGKRSNGEACSSTTGSDQLSPSLGGVSNDCKYYNGDGEELIGINYVNSLRQVDHEAAFAGCSINSGVYGIQANDHQSSQSFQPYHLPTALQSLQGSLIQAPNGFNQAANRGDLGLVQQQAAGAVSYDREAYHPYINMSLDHSDGHSRAPQQHKSNNIIENPPQGLVYEGGYWNGGVWPDLSAYGLSNINPNSM

SEQ ID NO: 6415 - protein, 267 aa, Picea sitchensis
MLRRAGSMASKTLGNATGNGIEEEWGSLKLRKLAQQLCSYKPPRAPWCNNDQDNESGEGGSNSELYVAGKRVKRSAVLVGLFEGSEGDLRVILTQRSGNLSLHSGDVSLPGGKMEEKDKDESETALREAKEEIGLDPSHVKVVTTLEPHLSKYLLKIVPVVGLLPDRKSFRPVLNPGEVDAIFDAPLEMFLKDENYRSEEKQWMGFNYTDHYFDFQTENMKFLIWGITARILVRAASVIYQRQPSFSEVVPNFSGIQSSNSRCKPKL

SEQ ID NO: 6416 - protein, 187 aa, Picea sitchensis
MAFAGTQQKCKACEKTVYVVDQLTADGSVFHKACFRCHHCNGTLKLSNYSSFEGVLYCKPHFDQLFKRTGSLDKSFEGTPKAVKNEKLNDGEIKTPSRVSALFSGTQEKCLACGNTVYPIEKVSVEGVGYHKQCFKCIHGGCVISPSNYIAIEGRLYCKHHHAQLFKEKGNYSQLIKTPSVKEISEN

SEQ ID NO: 6417 - protein, 205 aa, Picea sitchensis
MSEGKRSGKVKWFDSTKGYGFITPDDGSEDLFVHQTSIHSNGFRSLAEGEAVEYTVEHENGGRTKALDVTGPDGAFVQGNSGGGGGGRGGGRGGGGGGYGGGGGGYGGGGGGYGGGGYGGGGGWNGGGGGGRGGGRGGGRGGGAGGGGGGSCYKCGESGHFARDCTSGGGGGGGNGGGGGGAGGGSCYQCGDFGHFARDCPNREG

SEQ ID NO: 6418 - protein, 382 aa, Picea sitchensis
MAAVTAAVSVPTSTSSSSLGRIALERATFPCPDRSASFQKTFFGGRLNNSDAALLFARVRTVPLNYRQSVKAQVTTEAPATTKVVKISKKNEEGVVVNKYKPKTPYIGRVLLNTKITADDAPGETWHMVFSTEGELPYREGQSIGVIPTGIDKNGKPHKLRLYSIASSALGDFGDSKTVSLCVKRLVYTNDQGEVVKGVCSNFLCDLKPGEEVTITGPVGKEMLMPVDPNATIIMLATGTGIAPFRGYLWKMFFEKHPDYKFNGLAWLFLGVPTSSSLIYKEEFEKMKEKSPDKIRVDFAVSREQTNEKGEKMYIQTRMGEYAKELWGLFKKENTYVYMCGLKGMEKGIDDIITSLAAEEGIDWNEYKRQMKKSERWNVEVY

SEQ ID NO: 6419 - protein, 181 aa, Picea sitchensis
MAQSSNFSNINTRLPSPLFSSARRTLPCPLPFVSSFLNYRALPLTVPQSFVLRQVANSRSYGAVGPIRATAGSSGSQIKESIETEINENPVVVYSKTWCPYCQQAKGLFEDLGVKPYVVELDELGAAERHVQNALEGLTGQSTVPNVFIGGKHIGGCSDTMELHQNGELIPLLSAAGVKVE

SEQ ID NO: 6420 - protein, 164 aa, Picea sitchensis
MPGDRSIGIAVDYSPSSKSALKWALDNLADKGDRVVVIHINQNKEPESGQSQLWDKAGSPLIPLAEFREGNLSKHYELNPDAEVLDMLDTAARQKELEVIAKVYWGDAREKLCDAVEDLKLDSLVMGSRGLGQLKRVFLGSVSNYVISNANCPVTVVKEPGFKP

SEQ ID NO: 6421 - protein, 204 aa, Picea sitchensis
MINSRKVLELMESTRRIVLEPASEGFNSNPGQKAADTPYIGETSFNTNMLVILAALLCALICAMGLNSIVRCALRCTRARTVLFVSAQDAEAARVVNTGMKRKALRALPTAVYGAAESKLPSTDCPICLAEFVVGEEVRILPKCNHGFHMRCIDTWLAAHSSCPTCRQNLLELSRSNKKNNNDVNMSTRPDPPSTPEALENIQV

SEQ ID NO: 6422 - protein, 204 aa, Picea sitchensis
MASSATIFSVVVIAACLGSAAATKPLNPVHSNTHIVEFIKTSCNVTLYPQLCVSSLSSYAGSLKATQSNLVNVALQVSLVTARNVSVWAAGMKSRRALMSRRERAALGDCIEDFGDTADQIRQSLAELKKLRRNTFKFQMSNVETWMSAALTNEDSCLDGFQVAKGRVKAMVTGRVQKVCKMISNALALLNKFAATEGEYEIDV

SEQ ID NO: 6423 - protein, 150 aa, Picea sitchensis
MDPLLSTVQHLLVVPDDLDRLLHAPTRSYVRDTEAAASTPVDVKEYPNSYVFIVDMPGLKSNDIKVQVEDENVLNISGERKRNEKEEEGEVKYIRMERRVAKFMRKFTLPADCNLEAISAACQDGVLNVTVPKLPPPEPKKPKTIEVKIG

SEQ ID NO: 6424 - protein, 341 aa, Picea sitchensis
MAQIKHSPGLTLQFLSVLITGLALMLWIQTVDAQSCNGLSHHFYYKSCPKAQAIIKSVVEDAVRKEARMAASLLRLHFHDCFVKGCDGSILLDDTSSFTGEKTANPNKNSVRGFGVVDQIKCELEKACPGVVSCADILAVAARDSVGFSGGPFWKVLLGRRDSRSASKSGANNDIPGPNSTHQTLETKFKRLGLNVVDLVALSGAHTIGLARCSSFKARLYNQTVNGNHDPTLDTTYLKQLRAVCPQTGTDDNQTTPLDPVTPIKFDINYYDNVVAGKGLLASDEILYSTKGSRTVGLVESYSTSTHAFFKQFAASMIKMGNINPLTGSHGEIRKNCRRMN

SEQ ID NO: 6425 - protein, 152 aa, Picea sitchensis
MAMDPSLITVQQLLGVPDDLEKLLNAPTRSYMRDTKAMASTPVDVKEYPNSYVFIIDMPGLKSNDIKVQVEDENVLNISGERKRNEKEEEGEVKYIRMERRVGKFMRKFALPADCNLEAISAACQDGVLTVTVPKLPPPEPKKPRTIDVKIG

SEQ ID NO: 6426 - protein, 164 aa, Picea sitchensis
MPGDRSIGIAVDYSPSSKSALKWALDNLADEGDRVVVIHVNQNKASESGQSQLWEKSGSPLIPLAEFREGNLSKHYELTPDAEVLDMLDTATRQKELEVIAKVYWGDAREKLCDAVEDLKLDSLVMGSRGLGQLKRVFLGSVSNYVISNASCPVTVVKEPGFKP

SEQ ID NO: 6427 - protein, 199 aa, Picea sitchensis
MAPSAIILSVIVMTAILASGAATKVLNPVHSDAQMAEFIRTSCNVTLYPQVCVSSLSSYAGPLKPKQSDLVNAAVQVSLVNTHNVSVWAAGLKTRRATMSKREKAALKDCMENFGTTMDQIHQSLAELKHLRRNTFKIQMSNVETWMSAALTNEDSCLDGFQVAKGRVKAMVTGRVHYLSKLISNALALVNTFAATGGH

SEQ ID NO: 6428 - protein, 278 aa, Picea sitchensis
MSEYMEQHSVSRLIGAPPGYVGYEEGGQLTEAVRRRPYSVVLFDEVEKAHTSVFNTLLQMLDDGRLTDGQGRTVSFSNTVIIMTSNLGAEHLLAALTGHVTIKTARENVMQEVKRHFRPELLNRLDEIVVFDPLSHDELKKVARLQMKDVAIRLAERGVALGVTDAALDLVLREAYDPVYGARPLRRWLERKVVTQLSRMLISGEIDENSTVYIDAMPGQQKLSYRVDMNGGLVNQNTGAKSDILIEIPNSVYQNADASQAVKKMKIEEIDDDELMED

SEQ ID NO: 6429 - protein, 297 aa, Picea sitchensis
MEYCNRQESVTEPNLDHDQASAGCKPREPKSIDHKKSAQALKLGELGLGNSLMKSIEPEDQGIHIWTERERRKKMRSMFSNLHSLLPHLPAKADKSTIVEEAISYIKTLQQSLHVLENQRLDKARAASTLEFELSSTFHEMQQQHHVSTATMRSASEAPAFYHPLTAECSASSGFEPWISRQYSRTISTGSPAIDHCFFQTWSSPNVVLSVCGDDAHMMICSSPPKQGLLTTIFYTLEKHKVDVVTAHISSDSCRSMYMIHAQAHAMVNGGDQFLESKASEEAFRSAAGELVFYLSS

SEQ ID NO: 6430 - protein, 102 aa, Picea sitchensis
MDDRGNAAPAGQEEERKPLDQGAHINLKVKGQDGNEVFFRIKRSTQLRKLMNAYCDRQSIDFNSIAFLFDGRRLRGEQTPDELEMEEGDEIDAMLHQTGGML

SEQ ID NO: 6431 - protein, 269 aa, Picea sitchensis
MKLNLAVGLSISLLFFIDHAHQRASAFRVTWPSSRYRETEREQSQAAAMAEVAPSCKSLECPAYESIHRDKDYEIRRYNGTVWMSTVPPIKNISFVGATKTGFLSLFDYIQGQNTEQAKVPMTAPVLTGIFPSRGPFCESSFVVSFYVPEKFQEKPPEAEKSLALKAKKWDIVYAAVRRFGGYVTDSNIGEEAAKLQASLIDTPWADAISKSQQRIAEGHHDREGKDPSLFSVAQYNSPFEFKNRVNEIWMLFQMEKLTHPSHRSISHI

SEQ ID NO: 6432 - protein, 188 aa, Picea sitchensis
MARGKIQMTRIENAARRQVTFSKRKNGLLKKAYELSVLCDAEVGLMIFSPGGKLHEFANPSMEKMLEKYREGSRENSINKEQDTEYLNREIANMEARIRILKSTHRKMLGEDLETCSMEELDQLDIQFEQGLSHIRARKTEILMAEVDQLERKVLTMAEIGFGSVQKIEVDTELGITFPIYTRLHFHE

SEQ ID NO: 6433 - protein, 299 aa, Picea sitchensis
MKPLYCGNIEYAVRQIEIERLFGRYGRVDRVDMKSGYAFIYMEDERDAEDAIRGLDNTDFGRQRRRLTVEWTKHADRGFRRFEDGRRSDAGLNPTKTLFVINFDPYSTKVRDLERHFEPYGKLIYVRIRRNFAFVQYESQEDATKALESTHMSKMLDRVITVEYAQGEDSDRRGGYSSPIQSRRYGKAADVRDRDRSASPRYGRRPVRGSPDYGRARSPIYARSSERHSHDYGRAPSPIYARHPERHSHDYGRAASPVYVSRPRRDIPDYGRVASPVHERYRSRSPVRRLRSPITYKHS

SEQ ID NO: 6434 - protein, 341 aa, Picea sitchensis
MRSMGKMVIRFLNKRSLATLPLQLIEKGQNRVVEASLTLIRERAKLKAELVQALGGSIATTCLLGVPLGHNSSFLQGPAFAPPRIREAIWCGSTNSATEKGKELKDPRVLTDAGDVPIQEMRDCGIEDERLMKTISDSVKFVMEEHPLRPLVLGGDHSISYPVVRAVTEQLGGPVDILHLDAHPDIYHSFEGNKYSHASSFARIMEGGHARRLLQVGIRSITKEGREQGKRFGVEQYEMHSFSKDREFLENLKLGEGVKGVYISIDVDCLDPAFAPGVSHLEPGGLSFRDVMNIVQNLQGDIVAADVVEFNPQRDTVDGMTAMVAAKLVRELTSKMSKLAD

SEQ ID NO: 6435 - protein, 350 aa, Picea sitchensis
MAMSSGKQEVEYTEMSVLDQIRSHLLGDFEPSFFVTGNWGSDPTRNSSPEEENFIQTALTADSVDDSRRETETETLIAAVKSSRPLLSVSVTRHESFDWEKISVDWALKNSVTPSVSPCFSAAWTKLPLDENDSEDMVLYGILKEAATKGWLPRTPKEEPVTEIKKEAALPVKPDADIRQETGATPPPPPPPTVKNNAGRHYRGVRQRPWGKFAAEIRDSSRQGARVWLGTFTTAEEAALAYDRAAYKMRGSRALLNFPLEVGAEDSNTCNNNTSTIEKVESNLSKKRQREEVEVQWNRQCRVRFEDSNTMDHEMVEELLGGKLATPPLTPSGIDMSFTGFLSRGQLTVN

SEQ ID NO: 6436 - protein, 181 aa, Picea sitchensis
MAQSSNFSNINTRLPSPLISTARRTLPCPLPFVSSFLNYRALPLTVPQSFVLRQVANSRSYGAVGPIRATAGSSGSQIKESIETEINENPVVVYSKTWCPYCQQAKGLFEDLGVKPYVVELDELGAAERHVQNALEGLTGQSTVPNVFIGGKHIGGCSDTMELHQNGELIPLLSAAGVKVA

SEQ ID NO: 6437 - protein, 318 aa, Picea sitchensis
MKTLPCIIPIVLFIICSIPNIVHGQLTSTFYSESCPRALSIVQAAVEQAVAKERRMGASLLRLHFHDCFVNGCDGSILLDDNSTFTGEKTATPNNNSVRGYDVIDTIKTQVEAACSGVVSCADIVAIAARDSVVALGGPTWTVLLGRRDSTTASFNAANSSIPSPASNLSTLISSFRSHNLSPKDLVALSGAHTIGQARCTSFRARIYNESNIDTSLATAVKPKCPRTGGDNTLSPLDLATPITFDKHYYCNLRSKKGLLHSDQQLFNGGSTDSQVTTYSTNQNNFFTDFAAAMVNMGNIKPLTGTSGQIRRNCRKSN

SEQ ID NO: 6438 - protein, 148 aa, Picea sitchensis
MAMDPLLSTVQQLLGVPDDLERILHAPTRSYMRDTEATASTPVDVKEYPNSYVFIVDMPGLKSNDIKVQVEDENVLNISGERKRNEKEEGEVKYIRMERRVAKFMRKFTLPADCNLEAISAACQDGVLTVTVPKLPPPEPKTIAVKIG

SEQ ID NO: 6439 - protein, 198 aa, Picea sitchensis
MKNPELPVEMDEVEVKVDIQSTNASADEPRTAKRQGFELARIPEDPASKPTALSSPKKPKAASSSSSSPRAQPPACQVEKCAADLADAKEYYRRHRVCEQHSKARVVLVLGLQQRFCQQCSRFHVLEEFDEAKRSCRRRLAGHNERRRKTPSDSSVDRLDSNHHLNDNWLRHMTESDKMTMVLERNTTAKVCKEIKNH

SEQ ID NO: 6440 - protein, 191 aa, Picea sitchensis
MAFAGTTQKCKACEKTVYLVDQLTADNSVYHKSCFRCHHCNGTLKLSNYSSFEGVLYCKPHFDQLFKRTGSLDKSFEAIPRASRNDKTQENESKTPNRVSTMFSGTQDKCVACGKTVYPIEKVAVDGTSYHRPCFKCCHGGCVISPSNYVAHEGRLYCRHHSSQLFREKGNFSQLAKGTPTKGVTENTDDK

SEQ ID NO: 6441 - protein, 202 aa, Picea sitchensis
MNIRLLGEANDYVAKGMAGGEIVITPSEKTGFVPEDATIVGNTCLYGATGGRLFVRGKAGERFAVRNSLAEAVVEGTGDHCCEYMTGGCVVVLGKVGRNVAAGMTGGLAYLLDEDDTLVPKVNKEIVKIQRVVAPVGQLQLKQLIEAHVNKTGSTKGTAVLKEWEKYLPLFWQLVPPSEEDTPEANAEFGDRTVERITVKSA

SEQ ID NO: 6442 - protein, 333 aa, Picea sitchensis
MAHKCLEPSFLVHNPVLWDDEDALNRNYNYNYYTDLWGGLPLSSSAATTARTSAEDSRPEVVAVSEALESDYGRLNNNNNNNVSADTQLSCETAATSSSGGSMSSPSNGNKVIKSSKKKVLMGTKDIECQSQKAQEDSGENFKQCSTGTSSSKRSRAAEVHNLSEKRRRNRINEKMKALQNLIPNSNKTDKASMLDEAIEYLKKLQLQVQMLSARSGIDISSMRWLAQMPHLQIQQMPKACMTTDQHAGVSISMPVGSGLMNTNQGSEKRPLPLHDLYISGALGNTAIPINLSSARIDDHQSCKMDRPQGHFTLPQLPTTTQEVHSALSLQEK

SEQ ID NO: 6443 - protein, 355 aa, Picea sitchensis
MSLLTDLINLNLSDVTEKIIAEYIWIGGSGTDIRSKARTLSHEVSDPKDLPKWNYDGSSTGQAPGKDSEVIIYPQAIFRDPFRRGKNILVICDTYTPAGEPIPTNKRANAAKIFSHPDVVAEEPWFGIEQEYTLLQKDVQWPLGWPIGGYPGPQGPYYCGTGADKAYGRDIVDAHYKACLYAGINISGINGEVMPGQWEFQVGPTVGISSGDQVWAARYILERITEVAGVVLSFDPKPIQGDWNGAGAHTNYSTKSMREEGGIKVIKKAIEKLGLRHKEHISAYGEGNERRLTGRHETADINTFSWGVANRGASIRVGRDTEREGKGYFEDRRPASNMDPYIVTSMITETTILLK

SEQ ID NO: 6444 - protein, 218 aa, Picea sitchensis
MVSKFEPSAPLLSPGAEIDPNWTRSDQPPENQPLIQGQGHGYYTESGSSSSSYGSHVPVPYGQIQSYQQYVAPSPAYGVPVWQQQQQESTPEWSTGLCHCGADITICLLGCFCPCFLFGKVAEKLDRHVTHCLAAAAVWYILQQFTSCGCIYSCGYRRKLRAIYNLPEKPLPDCLVHYLCWHCAFCQEYRELQIRRIREEAWASRTVMASPVQQSMNY

SEQ ID NO: 6445 - protein, 219 aa, Picea sitchensis
MTTAMPSIMGTAMPSAALNLFSNGNVCVIRFIMVNSPYVSLLSTTNSPTQRLLRTPNSNGFCRKWRIMADNDAVADESTASVDEKTQEKAALPKQSSGRGFGPLPSSRRKESSGNKGSNDRGNSPIVRRAPPGRPLIAPEGDPQVQQYESAFLLLWAGLGILILVEGIVLAASGFLPEEWDKFLVKYLYPDFTPTVVLFLLGAVAYGLYKYFGDGLQKR

SEQ ID NO: 6446 - protein, 157 aa, Picea sitchensis
MKSYLDHALAMSPLLHFPEELERIIIPSARSYDQHEENKGLEPAAVDIKETPKEYVFYADVPGLTKSDIQVYVEEDKLLVIKYQGGKRKREGVEDEECCKYLRMERKRNPKFARKFTLPGDANVEGISASCVDGVLTVTVPRIPPAMKSKTIQISVN

SEQ ID NO: 6447 - protein, 162 aa, Picea sitchensis
MQDTAASTSTQHQSTSEKSSSSAAPAQFRLAKDAIESDDDIRRVPEMGGMQAGPSTCLPMRLDNPQPTTGVVAHKKRGRAPADKEHKRLKRLLRNRVSAQQARERKKAYLSDLETRVKEIEHKNSELEERLSTLQNENQMLRQILKNTTMKKKGSGNSGAET

SEQ ID NO: 6448 - protein, 289 aa, Picea sitchensis
MKPLYCGNIEYEVRQSEIERLFGKYGRVERVDMKSGYAFVYMEDERDAEDAIRALDKTEFGRQRRRLTVEWTKHAERGLRRSEDGRRSVTGLKPTKTLFVINFDPYDTRARDLERHFEPYGKVLNVRIRRNFAFIHYGTQEEATKAFDATHMSTLLDRVITVEYAQREDGNRRGGPSSPIRGGRYGRSSEDHGRDRSASPIYGRRAMRGSPDYGRAPSPTYARRPERCSPDYGRATSPIYSRRPEKHGSDYGRAASPVYASRPQKNSLDYGRDASPLLERDRSRSPVRR

SEQ ID NO: 6449 - protein, 151 aa, Picea sitchensis
MAMDPLLNTVQQLLVVPDDLERILHAPTRSYMRDTEATASTPVDVKEYPNSYVFIVDMPGLKSNDIKVQVEDENILNISGERKRNEKEEGEVKYIRMERRVAKFMRKFSLPADCNLEAISAACQDGVLTVNVPKLPPPEPKKPKTIAVKIG

SEQ ID NO: 6450 - protein, 568 aa, Picea sitchensis
MAARVAASPLASLHSNLGATTRLSGFNSTAISSRTDLSPKLSFSASFPSVDGFCGVVKVCNSGRKTAVIRSESIGVAVVEKSENVQKKSDEPEFTCVMKFGGSSVASAERMKEVADLILSFDQERPLVVLSAMGKSTNNLLQAGEKAVTCGIAMVPDIKELEFIKELHLRTVKELGIDESIISELLQECEQLLTGIALMKELTPRTKDYLVSFGERLSTRIFAGYLNNIGVKARQYDAFDIGFITTDEFTSADILEATYPAVEKRLRSDWQKDPAIPIVTGFLGKGWKTSAVTTLGRGGSDLTATAIGKALGLREIQVWKDVDGVLTCDPNIYPKAEPVPYLTFDEAAELAYFGAQVLHPQSMRPAREGDIPVRVKNSYNPQAPGTLITRTRDMSKAVLTSIVLKRNVTMLDIVSTRMLGQFGFLARVFSIFEELGISVDVVATSEVSISLTLDPSKMWERELIKQELDRMVEELEKVAVVKLLQNRSIISLIGNIQYSSLILEKVFCVFRTLGVNVQMISQGASKVNISLIVNESEAESCVKALHSTFFDEGDLLNIKSDTNGASCC

SEQ ID NO: 6451 - protein, 491 aa, Picea sitchensis
MASSAGQPQFRYTQPPSKVLHLRNLPWECTEEELIELCKPFGRIVNTKCNVGANHNQAFVEFADLNQAIAMVSYYASSSEPAQVRGKSVYLQYSNRQEIVNNKSTGDVASNVLLVTIEGVDSGDVSIDVLHLVFSAFGFVHKIATFEKTAGFQALVQFSDADTAASARSALDGRSIPRYLLPEHVASCHLRISFSAHTDLNVKFQSHRSRDYTNPNLPVNPSAIDGAGQFTVGPDGKRRELESNVLLASIENMQYAVTVDVLNTVFSAFGRVQKIAIFEKNGGFQALIQYPDIATAVLAKEALEGHCIYDGGYCKLHLSYSRHTDLNVKGNNDRSRDYTIPASGMLPAQPPSLAGAAPAAVGGWQGPPSTPIMYSGNEFMSSPCPPQPGGVPRPQHLQGWEYGQSQIASQTPGPNAFSSPAYAGQGPLITPPMPSPPGLVASNIGTNNLQSSNHSPHIGQPQMPYYGHQQMQMQMPGGLPPVSGGTPAYHM

SEQ ID NO: 6452 - protein, 467 aa, Picea sitchensis
MDPDFGVERQAFEAVPDSKSLVSLHSSLSCSFNTMDTIFCDESRYSQKCTGEFGEIASQNAFGGAPESIISNAGGAFFADPSFAAKYLQKSSFSPVMAKETSNADGSGSIGGPNVPILANSVQFHTPSVKNSVNARRWRNLEASHLGSEVSKFGIGSVPSALVQFPSDPGFVEQAAKFSPFNNIDRNSSENVVCGASNLPPIVGGVQQGGGENMSVFSEPTKCVDDGNGKKRRAKSLTSAENSKEPEEAKAKRCRLGESSEIDDDDNNDETSDSNSKKGKEKNSNVSQKDDNYIHVRARRGQATDSHSLAERVRREKINQRMKFLQDLVPTCNKVTGKAVMLDEIINYVQSLQHQVEFLSMKLATVNPKLDFNIDNFFAKEMSGSFSSKGMSPTYFHLDQLKQASLQTVPSPGSDIPSTMSSVDSAEMFDGTNFQRQEGWDSELQNMYNMGLLQSRLQQHQHQQRPL

SEQ ID NO: 6453 - protein, 555 aa, Picea sitchensis
MDTMCDFCGEIRSTVYCRADSASLCLSCDEHIHGANALSKRHLRTVLCDGCSVEPAAFSCNDHKLSFCHNCDRQSHSNSPQHRRKSISYYTGCPSAAELAELWDCELDRLGGDDQQGPSVPGIGWGNSGGENGSLETLLASGIDAGFAQNLGSWIEPSASPKVDLPLSSQRNSNVNTMLFDSEGSAGTMKAREDRQQQSKQKRAVVQQLLALQKSQHQTLTEVQNHEEVHAYVPAQVQVEVQSMESSLSRPLEDDFQIQSQHLERQQKGQQQGKQSLQQQKMQHVSLLIPESEPLKSDTNIEIAIQGDSFWRCGAASETNQLWDQNMQDLGICEDDDCCDAFHISDVDLIFENYEDIFGGPQGESALMFEDLEAACSSMDKVVSIADPSGCNNNSLLASSAPPAGYVVALSSQEPGKEGAAPHPATGRTVQGVPGPNVPNNIRHPVQPAPASLAQSLSSYSGDGNAADYHDCDVSPIFLKGEPPWGSTNTDSAFLNARGNAMIRYKEKKKARMYEKKIRYASRKARADVRKRVKGRFVKAGEAFDYDPLATTGHY

SEQ ID NO: 6454 - protein, 320 aa, Picea sitchensis
MMAQRLDISGGNDSSISELEQTNAHPDLTSKDIINLRKRKCLSNPKVKVADVHSIPPKTKETDETERNGKHYKVGESTKDKDDLKDKLEESNSAETAESCPKQTVDNAKPSSVSVKQDYIHVRARRGQATDSHSLAERVRREKISERMKLLQDLVPGCNKVTGKAVMLDEIINYVQALQCQVEFLSMKLAAVNPQLDCNVEGGYLTRDVLQPHCSSISKMFAPDTTAAASQINQLQKTPLQHGLQCRADRQELAIRGMMDTQFTCMNGYADPTFQLQMSQGWDDEFQNAVDIGLDQNRSNPLKSHGFHGVLPTGHMKVEL

SEQ ID NO: 6455 - protein, 388 aa, Picea sitchensis
MASKRAVISTFRAASRKPIFSSVSPLASSVRELHAPAGSNKIVGVFYKANEYASLNPNFLGCVENALGIREWLESKGHQYIVTDDKEGPDCELEKHIPDLHVLISTPFHPAYMTAERIKKAKNLKLLLTAGIGSDHIDLNAAAAAGVTVSEVTGSNVVSVAEDELMRILILVRNFVPGYKQIVNGDWKVAAISYRSYDLEGKTIGTIGAGRIGKELLKRLKPFNCKLLYHDRLSIGPELEKETGATLETNLDDMLPKCDVVVINMPLSDKTRGMFNKEKISKMKKGVLIVNNARGAIMDAQAVADASASGHIGGYSGDVWFPQPAPKDHPWRSMPNHAMTPHISGTTIDAQIRYAAGTKDMLDRYFRGEDFPPQHYIVKEGKLASQYL

SEQ ID NO: 6456 - protein, 479 aa, Picea sitchensis
MGKQTTHFLVFSIRVVAALMLQCLLMGSSTALDHENYHTISVDILKWKWKPPGFAKCPASFAGQEALKPGVKIRLDHIHGACSPLRPINSSSWIDMVSQSFDRDNDRLNTIWSKNNGTYSTMSNLPLQPGSKVGTGNYIVTAGFGTPAKNSLLIIDTGSDVTWIQCKPCSDCYSQVDPIFEPQQSSSYKHLSCLSSACTELTTMNHCRLGGCVYEINYGDGSRSQGDFSQETLTLGSDSFPSFAFGCGHTNTGLFKGSAGLLGLGRTALSFPSQTKSKYGGQFSYCLPDFVSSTSTGSFSVGQGSIPATATFVPLVSNSNYPSFYFVGLNGISVGGERLSIPPAVLGRGGTIVDSGTVITRLVPQAYDALKTSFRSKTRNLPSAKPFSILDTCYDLSSYSQVRIPTITFHFQNNADVAVSAVGILFTIQSDGSQVCLAFASASQSISTNIIGNFQQQRMRVAFDTGAGRIGFAPGSCAT

SEQ ID NO: 6457 - protein, 309 aa, Picea sitchensis
MACDRSALYTSSVIMNTEDNSSAHAIAAMIASSCTPPATFQGTRSISVFETGNERKRPAGNSYSALELSDDIGDEDGSDDCIHLGEKKRRLTLEQVRALEKNFEIANKLEPEKKMQLAKALGLQPRQIAVWFQNRRARWKTKQLEKDFNVLKQDYDALKQDYDNLMEENNNLQAMIERMSSKSQSCNDQKFQANSSKLQKDDQDLQLLMMSATKVDCADKENNNEGPSSIGSEGSSVLDMDSPGTIDSQQNIDSIGFSNVKARDPRLECNFRPKVEENVSQADEPCNYLFYNNLETGPLLWDYNWSSGL

SEQ ID NO: 6458 - protein, 465 aa, Picea sitchensis
MDNNEKHHRSHPLACELDDTVEISRTGTVWTEVAHLITSVIGAGVLSLSWSVAQLGWIAGPAAMIVFALVSLYTTFLLVDCYRFPDPVSGPMRNTSYRKTVRVNLGERKAWLCALVQNAFFYGICVAYTITTSVSIRAISRSNCYHKNGHDSPCHFPNITYMIIYGVIQVILSQIPSFHKIWGLSILAAIMSFTYSTLGFGLGLAKVIENGKIYGTLGGISTTVSLTRAQKFWRILPALGDIAFAFPFTPLVIEIQDTLKSPPPENKTMRKASLVSMMITASFYMLCGFLGYAAFGENAPGNLLTGFGFYEPYWLIDFANACLAVHLVAAYQVFCQPIFSLVEGWISRKWPSNTLISKRIGIRVPLFGFYKVNLLTLCWRTAFVVSTTGIAILFPLFNDVLGVLGALSFWPLVVYFPVEMYIVQKKVQRWTLKWSLLQTLSFIALLISLVTAAGSIEGLVKDKES

SEQ ID NO: 6459 - protein, 169 aa, Picea sitchensis
MSRVYVGNLDPRVTERELEDEFRVYGVLRSVWVARKPPGFAFIEFEDRRDAGDAVRALNGKNDWRVELSRNSGGGGRGGRGRGGDDMSCYKCGESGHFARECNLRGGRGEYGGRARSRSPRYRRSPSYGRSGRSPVPKSYSPRRYPSPYRGRSPHRDYAGPRAANGLVD

SEQ ID NO: 6460 - protein, 358 aa, Picea sitchensis
MDLGLGLGGEDIVVRPAESWIQFQNMTSATKADLVQNTELFLRLGLELGSQRQNTANPNPPIQLDLLPAAPVPRGFSWHPNTKTYRAASENGNCEGDYGETRSCGQGGGAASASSPRGFDVNRVPSSADNDNEDDDDAAVSSPNSTISSFQMDFAICHATSAVKRERDGERDNNANDNELDRDCSRGSDEEEGGGTRKKLRLSKEQSAYLEESFKEHNTLNPKQKLALAKQLNLRPRQVEVWFQNRRARTKLKQTEVDCEYLKRCYETLTEENRRLQKDIQELRALKVAHPSFYMHLPATTLTMCPSCERIASASAPPDSNAKGLHGHGHGYGHGPTPWPTLASAHLRPIRPPPRLEQ

SEQ ID NO: 6461 - protein, 514 aa, Picea sitchensis
MDLLSIFALPYLPVLAIVSVYLIYMRLRPSVKLPPGPRAWPIIGNLNLMGKLPHRSLDRLSKTYGPLMYIRLGSIPCVVASSAEMAREFLQTHDLTFSSRPQVASGKYTTYNYSDITWSPYGDYFRLARKVCLMELFSAKRLESFEYIRVEEVARMLGSVFETCQRGLPVEIRKETYGVSNNIISRMALGRRYFDKEAGNMMRLEELKEMLEEFFLLNGVFNIVDFIPWLGWLDLQGYVGRMKKLSERLDVFLEEVVEEHDRRRKGVENYVAKDMMDVLLKQADDPQLNLSRIKVKAFTLDIIAGGTETSATLVEWGLSELLKKPEMLERATKELDRVVGRERWVEEKDMGGLEYVQWIVKETMRLHPVAPLLVPHLSTQRCRIAGYDIPANTRVFVNVWSIGRDDQSWENPNEFRPERFKGSTVDVMGRDYELLPFGSGRRMCPGNSLGLKVVQIALANLIHGFQWKLPDGQSPKDLDMGEIFGLSTSKTCPLVAMARPRLPSHLYNFNSSHG

SEQ ID NO: 6462 - protein, 324 aa, Picea sitchensis
MASAADAEQVLNSPGQGVETVPEELPAPAGWKKKLLPKKGGTPKKYEVVFVAPTGEEFKGKKPLERHLKANPGGPSISEFDWSTGEITPTRRSSRISEKVKESPVKTPESESKKKPKRSRKSKGDSEDAEKQESQVEASKEEEIHGTRHGEDMAETGEDVVHKKEEEEEKGEDGSDKKKEEEEEEESDDKREMENKEKIYGSKTEEINDMDEQAEEKVAQGAEGAIKEDLVLENEEKHRDLESKGEPQEPKQDSIDITKENGFDGTGPLENCAQGKHAEPAREVHESREKILEGQAGQMAEEIGSLSNHTAVKQTPEPPLNASS

SEQ ID NO: 6463 - protein, 259 aa, Picea sitchensis
MFEVITGSLRDLKMAKTMKECELCELSARLYCESDEASLCWDCDAKVHSANFLVARHCRSLLCQICQSVTAWRASGAKPGLTVSVCERCAGGSRAKSDGDDDEGNNDENQVVPLASGYSGPPLSCSSADQEESSGDERHCAESPLSIAPPDAASHKRPHESLALNTYEGDCGCSSSGVNNSNNNISGCEDDATSSRIRVLKKTKADQGLKDDLVKTLEVIRREDHDNSTVLAICKLCRDSHTRELVSVDCPSNSSRYAG

SEQ ID NO: 6464 - protein, 557 aa, Picea sitchensis
MEGESESRKRAIAVHAASLVLVAIIVCSALWLPLIHAEDVSSIELQDPVESVEAVCSKTLYPEICYYSLSPHLGSSPAQPKKLLHVALMIALEEANKAFALVLRFVKQTSALQDCMELMDITRDQLDSSIALLKRHDLKALMREQASDLQTWLSASITNQDTCLDGISDYSKSIARALVENSVQNVRKLISNSLAIAKAAYESRPYPSPALRLPSDSIKDDFPSWLSPGDRRLLRTSANDVVPNVIVAQDGSGNFKTITQAIAAAPEKSPKRYVIKVKKGTYKENVQVGKTKTNIMLIGEGMEATIVTGSRNVIDGSTTFNSATFAAVGNGFMAQDMAFVNTAGPQKHQAVALRVGSDQSVLYRCKIAAYQDTLYAHSLRQFYRECKISGTVDFIFGNAAVVFQSCILVPRKPGANQKNAITAQGRTDPNQNTGISIHNCKITPGTDLVPVKSSFPTYLGRPWKEYSRTVFMQSYIDGFIQPAGWLEWDGDFALKTLYYGEYMNTGPGSGTGNRVKWPGYRVIKSPQEASKFTVGEFIQGDSWLQSTGVHYVDGLTN

SEQ ID NO: 6465 - protein, 609 aa, Picea sitchensis
MRIKLRIMEIFRSEFIILSTVLLIFFVDINLACVPPPSVECDSNSNSGCQIFNYQGIWEDLNICKAGSAVFPKKETELVHAVADAVKRGKKIKVVSSFSHSLPKLVCVGDDEGVIISTRDYDSTIHVDKIAMTISVDAGVMMRNVIDAAAEEGLALPALTYWDGVTAAGVISTGAHGSGIMGRGSAVHEYVVGLRMVVPAPATEGYAKLITITEEEEKEKFRGAILSLGVLGAISQVTFRLEPMFKRSVSFSLVDDHGLENMIQDFVRKHEFGDAWWYPAHHKVLLAKVDRVCVGVDGDGVNKMSQLGQPTTVDDAQQLGMILEMIDSTRDSELLCNLSETGMNARAPSGAGFLNHIVKGFTGYPVIGFNHLMQATGGCQDYSHKQEPNPNLCSPDRILDTNQSICSWDRRVAGLKGYDDEIYVPLSRVEEAIIDIKRIRDLNPQALCELEVVEGITMRSVKKSEAYLGHSEDVITFEFEYLRARDSETPKWNMDVYEEIQQMLVEKYGGTLHWGKSGGYLFQGTSKRAVNLKKFLQVKQEMDAGGLFSNDWTDGLLGIDGKGVEVLRDGCAMEKLCKCREDKHCAPHKGYFCRPGRIWKEARVCRQDH

SEQ ID NO: 6466 - protein, 571 aa, Picea sitchensis
MNFVRLHKGLFDSVRASSYLMKNSLVFTVLVAAAACVALATSTHSNVNEHGVVMNRRELEGTAVFESVCSVTLYPDVCVSSLLAHPESRKAASSKELATIVVKVTLYELKNLSASLGSEMSRQRITDQRSQSAVDDCLELFGYSLRQLNDSLGSLQSSEWRRQEADDVQTWLSASLTNQDTCIEGVNGHNYGNPMLPDGALRKVWKLLSNSLAMVKNISPAGIDRRLLIDPIASLDNELFSVADGFPSWLSPADRRLLQVLPSGIRANAVVAKDGSGHYKTITEAINAAPSKSKGRYIIYVRAGIYAERVKVSKDGIMLVGDGKDVTIVTGKLSGVSLKSISNFIATGNGFIARDMGFENTAGPRNHQAIALLVGSDHSALYRCSIKGYQDTLYAYTQRQFYRECDIYGSVDFIFGNAVAVFQSCNILARKGLGGRSFITAQGRIDPNQNTGFSIHMCRVIAADKNSDPTYLGRPWKPYSRTVYMQSYFDKIIAPAGWYPWSGNFALKTLYYGEYMNTGPGAGTASRVNWPGYHRITSTAEASKYTVAEFISGNSWLPSTGVAFQAGLTTS

SEQ ID NO: 6467 - protein, 167 aa, Picea sitchensis
MAGAMAHQILQRALRLQSASSASGVRVLYGLSGQKRFSTIGEDPDTHSDFQAVNKAPKDVPSARELVEKDIKNNHIMLYMKGVPAAPRCGFSALAVKVLQEYDVPFSARNILEDQELKESIKSFSNWPTFPQIFIKGEFVGGSDIILNMHQSGELKETLKDLLPLNK

SEQ ID NO: 6468 - protein, 589 aa, Picea sitchensis
MGQCYGKNIAVEDAIDGSRDQSRVASNHNGVSSTSVKNTPTHPSSSPWPSPYPHAPSPLPSISSPLPPGVSPSPARSTPRRFFRRPFPPPSPAKHIKASLAKRQGAPKPKDGPIPEDGVENERPLDKSFGYSKNFASKYELGHEVGRGHFGHTCFAKARKGDLKGQPVAVKIISKAKMTTAIAIEDVRREVKILKALSGHHNLVKFHDACEDANNVYIIMELCEGGELLDRILSRGGKYPEEDAKVIVRQILSIVAFCHIQGVVHRDLKPENFLFTTKDEHAPMKAIDFGLSDFIRPDERLNDIVGSAYYVAPEVLHRSYSMEADVWSVGVITYILLCGSRPFWARTESGIFRAVLRADPNFDDAPWPSVSPEAKDFVKRLLNKDLRKRMTAAQALTHPWLRGQHAIPLDILIFRLVKAYIRASPLKRAALKALSKSLTENELFYLRSQFKLLEPNKDGKISLENFRLALMRNATEAMKESKVPDILNTMEHLASRRMDFEEFCAAAISIYQLEAVDRWEQIASTAYEFFEQEGNKVISVEELAREMNLAPTAHTVLHDWIRSTDGKLSFHGFTKFLHGVTVRSSTRPQ

SEQ ID NO: 6469 - protein, 450 aa, Picea sitchensis
MRSRKTVMNKVGKYEIGRTIGEGTFAKVKFAQNTETGESVAMKVLDKGAILRHKMVDQIKREICVMKLVRHPNIVHLHEVLASRTKIYIILEFVTGGELFDKIVHQQRLSENESRKYFQQLIDAVDYCHSKGVYHRDLKPENLLLDSQGNLKISDFGLSALPQQLREDGLLHTTCGTPNYVAPEVLSHKGYDGALADVWSCGVILYVLMAGFLPFDEDDLTSLYRKINEADFSCPTWFSPGAKSLISRILDPDPQTRIKVSGIREDDWFRKNYVPVRLYEDDDVNLDDVQAVFDDSEDQYVSEQREAKELGPSMMNAFELITLSQGLNLSALFETQQDHVKRQTRFISRKPAKVIISKIESAVESMGFKIQVSNYKMRIEGLTLNKTGHISVALEVFEVAPSLYMVDVRKAAGDTLEYHRFYKALCAQLEDIVWKPINDSAIGIPDQNAG

SEQ ID NO: 6470 - protein, 419 aa, Picea sitchensis
MCGGAIISDFIIPPANRGRRVTARDIWPDFDKFSEFINGGAPVETFDVSVNVDDDDEDFDDDDFLDFDESYQNKSAGRKRKNLYRGIRQRPWGKWAAEIRDPRKGARVWLGTFNTAEEAARAYDAAARKIRGKKAKVNFVDEPPPIKKETNNGKGSRKESSKKIKSCTTPKADHFQGFKMANPSNTHLNFNQKSPNPSFDDLGFLNSESQLHSICNRNFATKQSSCALPAYSTDFSDFDESEVENLVPQPASFEPMKNIHKRKGFDYFDSDTSSVSVDRSHFSWIPEVKTPEISSVPKAEAESNQCNFADISTPVATSVSVGSPEVVLSPFNNGLNKSPSVEDVASEKSPKLEESSQLEISEDLPSLESYPWLFQLPYFEGNLDQSLQGVGIGEASFPDGENALQLWNFDAVPISDSAY

SEQ ID NO: 6471 - protein, 152 aa, Picea sitchensis
MAMDPSLITVQQLLGVPDDLEKLLNAPTRSYMRDTKAMASTPVDVKEYPNSYVFIIDMPGLKSNDIKVQVEDENVLNISGERKRNEKEEEGEVKYIRMERRVGKFMRKFTLPADCNLEAISAACQDGVLTVTVPKLPPPEPKKPKTIEVKIG

SEQ ID NO: 6472 - protein, 317 aa, Picea sitchensis
MEETKNKQRGLERLKTSANDDTTGLALGVGLSIAMPATAAAQEEDQKNPPLPLELLPFRPIASRVGTPPAPSPPFLWFMTNNCREEVTVAETNLSGVVRGGIDMNQVPSTNEYEESSVLQVDALRVVDNGPMAVKRERERAFDLEAERDRTCDVSSRTSDEEEIGSTRKKLRLSKEQSALLEESFREHSTLNPKQKNALAKQLNLRPRQVEVWFQNRRARTKLKQTEVDCEVLKRCCENLTEENRRLQKELQELRALKAAPQPCVIGQDNYYMPLPATTLTMCPSCERVATMENSHSRSLQFSKSQISRFAQQSAAC

SEQ ID NO: 6473 - protein, 622 aa, Picea sitchensis
MAMEMGSLGTLRCTNPHRIQSLSPFKSVPYTPKSPLQLPPRFSSAFLGQTLQNKSLIPFKNVSRFRSLSPRAVASDVQAKPTVLVAEKLGEGGLELLRSEANVDCSYNLSQEELCTKISLCDALIVRSGTKVTREVFESSRGRLKVVGRAGVGIDNVDLQAATEFGCLVVNAPTANTVAAAEHGIALIASMARNVPQASASMKAGKWQRNKFVGVSLVGKTLAVMGFGKVGTEVARRAKGLGMHVIAHDPYAPADRARAIGVDLVSFEEAITVADFISLHMPLTPSTEKIFNDETFAKMKKGARIVNVARGGVIDEDALVKALDAGIVAQAALDVFTVEPPEKDSKLVNHEKVIVTPHLGASTMEAQEGVAVEIAEAVVGALKGELAATAVNAPMVPAEVLSELAPFITLAEKLGRLAVQLVAGGSGVKSVKVTYSSARAGDDLDTRVLRAMITKGIIEPISSAFVNLVNADFIARQRGLRLSEERILLDGSPQEPLESIQVQIADVESKFASAISESGDIKVEGKVKGGIPHLSKVGAFSVDVSLEGSVILCRQTDQPGMIGTVGNILGEENVNVNFMSVGRIAPRKKAVMAIGVDEEPSKGALKKIGDVPAIEEFVYLKL

SEQ ID NO: 6474 - protein, 427 aa, Picea sitchensis
MSRLHPFTTRASTLIPADPPQRKTQIISVNIKPDRYHDFNVCVAPPFLHLYSQPIKPKSVTAPLNEAVRARLCEYLPTTDMATHCSTAGSDNGIDSESLADMIYGYGIVDQDGSREYPPSNFTKDSQVDAKSSNIRDFTMIFREELCEMLEGVSSSSGTAFEMRLLLDAEKAVAIAKGRASFNARENAEQKNPSRRVVMNSLRFAGYNSAVCNSRWEKTIGHPAGYYEFIDVVLERSNLKSERFFVDIDFRAQFEIARPTDEYNNMLMQLPNLFVGRADKLCGIIKIMCDAARISLKERGMCIPPWRKYRYVQAKWLGSYKRATKPAASRSALGALPRFPFSGIVLKGTGCDANVVWQMEKTSSSDRNLRARSKCTKLCNVLFESQDCLLTRGQQEWEQDRHVNNISGLAIALSKAGLTSSSPSRKT

SEQ ID NO: 6475 - protein, 417 aa, Picea sitchensis
MDPKENTAVAEIPSYFICPISMQIMRDPITVCTSITYDRESMEKWIYSCGKNTCPATMQVMPNYNMTPNYTLRRLIQGWCLANSSKGVQPIPTPKPPIDSNQVNKLLQDFESCSPFQLINGLKKLRSLADESEANRRCIAVCGGDSALISVIEMNTVEMESGCYQCPMACDEALGILYKLPMADETAETLSRSKTLKPISWILKKGSCNGRFYSAMLLKTVSSSGQKILQQLVVNADDDLIEGLLQLLTEEVCLQATTSSLEILMAICSPSRKNRIKAIEAGAIYILIELLPESQRMNCEKMLCLLDILCECAEGRATTIDHAMGIASISKKIFRVSQVATEKAIRILWSLCKFSPTPRLLNEMVQIGAVYKLCVLLQLECTSKTKQKAREMLRAHGKYWTISPCVPSYSLGIYGQY

SEQ ID NO: 6476 - protein, 480 aa, Picea sitchensis
MAPRPLDYECINENVKKVAYAVRGELYLRASELQKEGKKIIFTNVGNPQALGQRPLTFPRQVMALCQAPMLMDDPNVSILFPADVIARAKHYLAMTTGGLGAYSDSRGLPGIRKEVAEFIERRDGYPSDPDLIFLTDGASKGVMQILNTIIRDEKDGILVPVPQYPLYSAAISLFGGTLVPYYLDESANWGLDVGDLRKSVLEARYKGITVRAMVIINPGNPTGQCLSRDNIKELLEFCYAENLVLLADEVYQQNIYQDERPFVSAKKVLMDMGLPFSKELQLVSYHTVSKGYWGECGQRGGYFEMTNIPPKTVDEIYKVASISLSPNVPGQIFLGLMVNPPKPADISYQRFVAESKAILESLRRRAHLMTDGFNNCRNVICNFTEGAMYSFPQIKLPPKAIAAAKEAGKAPDVFYCLKLLEATGMSTVPGSGFGQKEGVFHLRTTILPPEEEMPEIMNVFKIFNDDFMAKYENYSWSRL

SEQ ID NO: 6477 - protein, 512 aa, Picea sitchensis
MAQLSATSICCWDKVPVSGPAKSSRWYTQGIHFSPANAAPYTRGFRHDFSLYENSTISKLGFSSSKLLGAAISHHARWSSEVSQVQAIQMVLATEDDTKKTNARSGGGKRGKLNKVVLAYSGGLDTSVIVPWLRENYDCEVVCFTADVGQGVGEMEGLEAKAKASGASQLVIKDLKEEFVKEYVFPCLRAGAVYERKYLLGTSMARPVIAKAMVDVAREVGADAVSHGCTGKGNDQVRFELTFFALNPKLNVVAPWREWDIKGREDAIEYAKKHNVPVPVTKKSIYSRDRNLWHLSHEGDILEDPANEPKKDMYVMTVDPEEAPEEPEYVEIGIVSGVPVSINGKELSPANLLAILNELGGRHGIGRVDMVENRLVGMKSRGVYETPGGTILTTAVRELESLTLDRESMQVKDTIALKYAELVYAGRWFDPLRQSMDAFMEKITETTTGAVTLKLYKGSLSVASRRSQYSLYRQDISSFEEGSGIYNQADAAGFIRLYGLPIRVRAMLENGL

SEQ ID NO: 6478 - protein, 460 aa, Picea sitchensis
MAGQSARSFGACKWLLITMTLLLSVFSLIQCRHVSNFPVHEVVGVRLQEEPLIGLRIDLVRTDSPLSPFSPGNISSTERFKRAIKRSQDRLEKLQMSVDEVKAVEAPVYAGNGEFLMKMAIGTPSLSFSAILDTGSDLTWTQCKPCTDCYPQPTPIYDPSQSSTYSKVPCSSSMCQALPMYSCSGANCEYLYSYGDQSSTQGILSYESFTLTSQSLPHIAFGCGQENEGGGFSQGGGLVGFGRGPLSLISQLGQSLGNKFSYCLVSITDSPSKTSPLFIGKTASLNAKTVSSTPLVQSRSRPTFYYLSLEGISVGGQLLDIADGTFDLQLDGTGGVIIDSGTTVTYLEQSGYDVVKKAVISSINLPQVDGSNIGLDLCFEPQSGSSTSHFPTITFHFEGADFNLPKENYIYTDSSGIACLAMLPSNGMSIFGNIQQQNYQILYDNERNVLSFAPTVCDTL

SEQ ID NO: 6479 - protein, 115 aa, Picea sitchensis
MGGSTSKNPQIIEMAMGKAKEIVSSNSVVVFSKTYCPYCTQVKQLLSSLGAKTKVVELDTESDGKEIQTALQEWTGQRTVPNVFIGGTHIGGCDDTVAKHNSGKLVPLLTEAGGV

SEQ ID NO: 6480 - protein, 172 aa, Picea sitchensis
MSRFVEPLVVGRVIGDVLDMFVPSVDLAVTYASRQVNNGCELKPSALALLPRVDIGGEDLRNFYTLVMTDPDAPSPSDPTLREYLQWIVTDIPATTSASFGRELVSYESPRPTIGIHRFIFVLFKQMGRQTVYPPGSRLNFNTRNFALSNSLGLPVAAVYFNAQKEAAGRRR

SEQ ID NO: 6481 - protein, 222 aa, Picea sitchensis
MVTLNHSRKFLEWTETTRRLLLEPASPSSEGLDASPRQKPAEGSSRGPYMGESSFDTNMVVILAALLCALICALGLNSIVRCALRCSRARAVLFESAEDVEARLANTGMKRKALRALPTAVYGAAGSKLPCTDCPICLAEFLEGDEVRILPKCNHGFHMRCIDTWLASHSSCPTCRQNLLELSRSNKKNNNEGNVNMNTNMSDRPAPPSTQEGLQHIQVEGC

SEQ ID NO: 6482 - protein, 318 aa, Picea sitchensis
MSGRRNPRLNIPIPARQQTQLYRLPLPPQNTAVSKDVSDLSDLERIQILGHGSGGNVYKVRHRKTSALYALKVIHGNHDEAVRRQIIREMEILKKTESPYIVKCHGIFEKGEEIHFALEFMDGGSLEQRRSDMMSERFLAQVARQVLEGLKYLHRHKIVHRDIKPSNLLINKKQEVKIADFGVSRILSQTLDPCNTYVGTCAYMSPERFDPETYGGRYDGYAGDIWSLGLSLLECYIGHFPFLAAGQKADWPALMCAICYGDPPSPPPTASAHFRSFITCCLHKDARNRWTAAQLLAHPFLLSNSPQAPTIPMQRLTI

SEQ ID NO: 6483 - protein, 323 aa, Picea sitchensis
MAAVMKSSGCIAVMVFIICSIANLSHGQLSSTFYDKSCPAALSVVKAAVKQAVAKEQRMGASLLRLHFHDCFVNGCDGSVLLDDSSKITGEKTAVPNANSARGFDVIDTIKSQVEKSCSGVVSCADILAIAARDSVVELGGPSWTVLLGRRDSTTASKSGANNNIPPPTSSLSKIISLFQAQGLSAKEMVALAGAHTIGQARCFNFRAHIYNDTNILSTYSTSLRSKCPPTNGSGDNNLSPLDYVSPTAFDKNYYCNLKIKKGLLHSDQELFNGGSTDSQVTTYASNQNIFFSDFAAAMVKMGNIKPLTGTSGQIRKNCRKPN

SEQ ID NO: 6484 - protein, 150 aa, Picea sitchensis
MQGLRYSSSADSDVTVGDDAACKLRPAKQLELMGCNLLMKTVVESPVDKIRRLTTENAVLVFSMTSCCMCHVVKRLLCSLGVHPTVCELDEEEEGVEMEKILRALVGAQKSSVPAVFIGGNLIGGLDRVMAMHIEGDLVPKLKEAKALWL

SEQ ID NO: 6485 - protein, 163 aa, Picea sitchensis
MQATAPDFSGSATGDKLITSSSGDPHEEAMNECVNESDDDIRRVPEMGVQTGFVVHSDLAVKTESERASASGGSQRRRGRTPADKEHKRLKRLLRNRVSAQQARERKKAYLNELETKANELQQKNSELEERVSTLQNENFMLRQVLKNMTAKNKGGGFVEAEG

SEQ ID NO: 6486 - protein, 156 aa, Picea sitchensis
MGFISFAGRVLFSSIFILAAWQKINDFGADGGAAAKSMEPKLVLFKNHVTTLLGVQVPEVEIKHLLMVAIGLEGIGGILFIFGSTLGAYLLLIFLASVSPIMHDFYNYEMTKPEYVTEFIQFLKNLSLFGALLFFLGMKNSFTKKPKKKMSKSKTN

SEQ ID NO: 6487 - protein, 155 aa, Picea sitchensis
MCGILAALGCIDVSQAKRARILELSRRLRHRGPDWSGISHHGNCFLAHQRLAIVDPTSGNQPLYNEDRTIVVTVNGEIYNHEELRKKLGSHKFRTRSDCEVIAHLYEAYGEDFVNMLDGMFSFVLVDTRDNSFIAARDAIGLQHCQSFRMGCCMV

SEQ ID NO: 6488 - protein, 173 aa, Picea sitchensis
MKLYTETTDGSTIEAKESALVWHHQDADPDFGSCQAKELLDHLESVLANEPVVVKSGHHIVEVKPQGISKGLVAEQLLSTMVQRGKRPDFVLCIGDDRSDEDMFEGITRAVSGPTLSPIAEVFACTVGQKPSKAKYYLDDTVDVVRMLQGLATASDQAVKNLSAQVAELTLTT

SEQ ID NO: 6489 - protein, 332 aa, Picea sitchensis
MALENLRAYKVCYLLPMPILQPSSSVSSLPRISCVVTRKWRCWRMGQSQPTHTRKKNSMQLPRAAAAAVDIEPQNASTSNSNVLLEVKGLTAVVTESRQEILKGIDLIIHQGEVHAIMGKNGSGKSTFSKVLVGHPDYEVTGGTVIFKGENLLDKEPEVRCHSGLFMSFQSPVEIPGVSNMDFLRMACNARRSTLGLTELGPLEFYGFLSPKLAMLNMDPKFLDRNVNEGFSGGEKKRNEILQLAVLEADLAILDEIDSGLDVDALQDVAKAVNGLLTTKNAVLMITHYQRLLDSIKPTYVHIMENGRIVKTGNASLAKQLEEGGYRAIADV

SEQ ID NO: 6490 - protein, 180 aa, Picea sitchensis
MEVGFLGLGIMGKAMAVNLLRNGFKVTVWNRTLSRCEELVEQGASMGSTPAEVVKKCKYIIAMLSDPPAALSVVFGKDGVLEQMCTGKGYIDMSTVDTVTSTKISEAIIEKGGRFLEAPVSGSKKPAEDGQLIILAAGDKSLYDEVMPSFDVMGKKAFFLGEVGNGAKMKLVVNMIMGRC

SEQ ID NO: 6491 - protein, 341 aa, Picea sitchensis
MGSMGKMVMRFLHKRSLATLPSQLIEKGQNRVVEASLTLIRERAKLKAELVQALGGSIATTCLLGVPLGHNSSFLQGPAFAPPRIREAIWCGSTNSATEKGKELKDPRVLTDAGDVPIQEMRDCGIEDERLMRTISDSVKFVMEEHPLRPLVLGGDHSISYPVVRAVTEQLGGPVDILHLDAHPDIYHSFEGNKYSHASSFARIMEGGHARRLLQVGIRSITKEGREQGKRFGVEQYEMHSFSKDREFLENLKLGEGVKGVYISIDVDCLDPAFAPGVSHLEPGGLSFRDVMNIVQNLQGDIVAADVVEFNPQRDTVDGMTAMVAAKLVRELTSKMSKLAD

SEQ ID NO: 6492 - protein, 145 aa, Picea sitchensis
MYQQHPSARTTGLCDCTQDCRSCCLTCFCPCVAFGQIAEIADSGNTSCLLGGLVYYLLMHLSYVSPCYACFYRKRLRAKFNLAEEPCRDCLVHCFCGCCALCQEYRELKNRGFDPALGWAVNMEKRQSAQAGIAMAPPMGQAMGK

SEQ ID NO: 6493 - protein, 201 aa, Picea sitchensis
MVRGKTQMKRIENASRRQVTFSKRRNGLLKKAYELSVLCDAEVGLMIFSSSGKLHEFASPSMQKMVERHHSTHNTTNEQDNKGLNRKITNMEEKIRILELTQRKMSGEDLRTCSMKELNQLEVQIERGLRHIRARKTEILLGQVEELKRKECLLLEENTFLRKQVLAMNAIGFGSVQYFEVEVETQLDIRPPVCTRSPSCK

SEQ ID NO: 6494 - protein, 298 aa, Picea sitchensis
MAVRTIFRAMSRLSYSNPRPAVAPCNYLRETAHSVPGLILGTRMIHSETFTHRCSPSCAEKCAAGSLEPLNLSNEAAYICRTCFFSTVRTSDSKPEQEDGSAEKPEEDDSVSESEEEEETALDNQQDAVKGVERTERNEADATRRVYRRPLSPEEVQEADEIGYRVIGSAKNSDGKSWRQEPIFAVVQIGSHQFKVSGGDWIYVEKLKYADVKQKIILNKVLMLGTKSETVIGRPILPNAAVHAVVEEQALGAETIIFKKKRRKNYRRTNYHRQELTRLKIIGVEGLKEPLVAKAVTA

SEQ ID NO: 6495 - protein, 439 aa, Picea sitchensis
MYSNFKEQAIEYVRQAVQEDNAGNYAKAFPLYMNALEYFRTHLKYEKNPKIKEAITQKFTEYLRRAEEIRVVLDEGVGSRPSANGDAAVATKPKSKPGAKGDGDGDGEDPEQAKLRSGLNSAIIREKPNVKWTDVAGLESAKQALQEAVILPVKFPQFFTGKRKPWRAFLLYGPPGTGKSYLAKAVATEADSTFYSISSSDLVSKWMGESEKLVSNLFQMARDCAPSIIFIDEIDSLCGQRGEGNESEASRRIKTELLVQMQGVGNNDQKVLVLAATNTPYALDQAIRRRFDKRIYIPLPDLKARQHMFKVHLGDTPNNLTEGDFEDLARRTDGFSGSDISVCVKDVLFEPVRKTQDAMFFSKVSTKDGEMWMPCGPRQPGAVQTTMQELAVKGLASQILPPPISKADFDKVLARQRPTVSKHDLEVQERFTKEFGEEG

SEQ ID NO: 6496 - protein, 177 aa, Lactobacillus paracasei
GQSIDTSMGFTPLAGVTMGTRSGDIDPSLVAYLMKKLDVPDVGQMIHILNNDSGLLGISGISNDMRDLEADEDTKPRAKLALDIFVNRVVKYVGSYAALMDGVDVNVFTAGIGENGDEIRDKIMRSLDYLGAKIDNDINNKSHGVEADLSTPDSTVKTLLVPTNEELMIVRDVMALS

SEQ ID NO: 6497 - protein, 354 aa, Lactobacillus paracasei
MSHSCCATCCEGLNIAGGKKGLIVVKVGVVKEQKAGEGRVAVTPENVKKLVDAGATVLVEKSAGVGAGFPDADYAAAGGTIVSHAQSWDSDLVVKVKEPDEEEYQYFKPGQVVWGFQHLASSPATVKAMQAAGTTAIGGETIVENGELALLKPMSAIAGRRSVIMGAYYLEAQHGGEGILLPGTPEVASGTVVIFGGGNAAFNAASLALAMGCRVTIIELKKDRRDWLAKQFTGEALTLLPSTPENLAAAIKTADVFISTILIPGAKPPKLVTTAMVQSMKPGSVLVDVAIDQGGTVETIDAPTSIDDPVFTKYDVIHYAVPNQPGAVPRTATMALAVGNIKYLLAIAKSGIAA

SEQ ID NO: 6498 - protein, 284 aa, Arabidopsis thaliana
  misc_feature (22)..(22): Xaa can be any naturally occurring amino acid
  unsure (1)..(284): unsure at all Xaa locations
MSNITKKKCNGNEEGAEQRKGXWTLEEDTLLTNYISHNGEGRWNLLAKSSGLKRAGKSCRLRWLNYLKPDIKRGNLTPQEQLLILELHSKWGNRWSKISKYLPGRTDNDIKNYWRTRVQKQARQLNIDSNSHKFIEVVRSFWFPRLINEIKDNSYTNNIKANAPDLLGPILRDSKDLGFNNMDCSTSMSEDLKKTSQFMDFSDLETTMSLEGSRGGSSQCVSEVYSSFPCLEEEYMVAVMGSSDISALHDCHVADSKYEDDVTQDLMWNMDDIWQFNEYAHFNG

SEQ ID NO: 6499 - protein, 201 aa, Arabidopsis thaliana
MVTMMRPTLLILLFSTFLPQILTVDPPLLPSNGSDFIRLACNTTLYPDLCFSTLSSFANSIQNDSNRLARVAISLTLHNTLHLLSYLQNAYNRDHPTPVLRDCFENLKDAVDGMRGSMKQMKELVSASGSIESFRFQMSNVKTWLSAALTDEYTCTDGFKDVHEDDSIKDDVCSRVDDVKKLTSNALALVNRYADESIING

SEQ ID NO: 6500 - protein, 156 aa, Arabidopsis thaliana
METLQCRHQHVFILLLVLFHSSLFGLASKIDVSDDARGIRIDGGQKRFLTNSPQHGKEHAACTNEEPDLGPLTRISCNEPGYVITKINFADYGNPTGTCGHFRRGNCGARATMRIVKKNCLGKEKCHLLVTDEMFGPSKCKGAPMLAVETTCTIAG

SEQ ID NO: 6501 - protein, 224 aa, Arabidopsis thaliana
MDSSMSTKKKTKLSVRNQTCFKKSSLSSSSTAKKTTNLSMREETMFKKALELSTLCDIEVCVIYYGRDGELIKTWPEDQSKVRDMAERFSKLHERERRKKRTNLSLFLRKKILDDNKLSEKVLEMKDSLESGLRVLQDKLLLLQPENQTELGQSRAVSSTTNPLSSPEDHHHQQWTEPLVTGVSNTEQDLSTSPLSNHQSKYSVFVYNHDSGSFYQVPDSICFG

SEQ ID NO: 6502 - protein, 335 aa, Arabidopsis thaliana
MVKKGGTKRKIAIETIQKRDSLRVTCTKRREGLYSKASQLCLLSDAQIAILATPPSSESNVSFYSFGHSSVDAVVSAFLSGQRPVPKDNKETREDVGICLTRNNLGLGFWWNDESLARSENPQEISEAIDSMRTLLRNLKELRADEALACNQAFVNDREDLKNNDKCDFVSDHETHDQTLILQSASPICCIPENLNEITQEPNQTLNIQSSTSAICCVPDNSPENFNEITEEQDQIRSICETFCVMDNNAALPEMNLDYDQDIGFDTPFESALNDWFSDNTTHQEISASILNAVVDDQVSVDLTPFSYFQRCLDGDNLRFSDCFKDFANTISALG

SEQ ID NO: 6503 - protein, 203 aa, Arabidopsis thaliana
MVRGKIEIKKIENVTSRQVTFSKRRSGLFKKAHELSVLCDAQVAAMIFSQKGRLYEFASSDIRNTIKRYAEYKREYFVAETHPIEQYVQGLKKEMVTMVKKIEVLEVHNRKMMGQSLDSCSVKELSEIATQIEKSLHMVRLRKAKLYEDELQKLKAKERELKDERVRLSLKVGERPMGMPSGSKEKEDVETDLFIGFLKNRPG

SEQ ID NO: 6504 - protein, 265 aa, Solanum tuberosum
MTSHAMIMSTPMMCTFLGVIRKGSWTEEEDILLRKCIDKYGEGKWHLVPTRAGLNRCRKSCRLRWLNYLRPHIKRGDFEPDEVDLILRLHKLLGNRWSLIAGRLPGRTANDVKNYWNTNLLRKLNTSTKFAPQPQEGINTSTIAPQPQEGIKYGQANAIIRPQPQKFTSSMKINVSWCNNNSMVNNEEASKDNNDMQWWANILENCNDIGEGEAERTLPSCKEINCNEIDKAPSLLHEGGNSMQQGQGDGGWDEFALDDIWNLLN

SEQ ID NO: 6505 - protein, 421 aa, Corynebacterium flavescens
MALVVQKYGGSSLESAERIRNVAERIVATKKAGNDVVVVCSAMGDTTDELLELAAAVNPVPPAREMDMLLTAGERISNALVAMAIESLGAEAQSFTGSQAGVLTTERHGNARIVDVTPGRVREALDEGKICIVAGFQGVNKETRDVTTLGRGGSDTTAVALAAALNADVCEIYSDVDGVYTADPRIVPNAQKLEKLSFEEMLELAAVGSKILVLRSVEYARAFNVPLRVRSSYSNDPGTLIAGSMEDIPVEEAVLTGVATDKSEAKVTVLGISDKPGEAAKVFRALADAEINIDMVLQNVSSVEDGTTDITFTCPRADGRRAMEILKKLQVQGNWTNVLYDDQVDKVSLVGAGMKSHPGVTAEFMEALRDVNVNIELISTSEIRISVLIREDDLDAAARALHEQFQLGGEDEAVVYAGTGR

SEQ ID NO: 6506 - protein, 369 aa, Iris x hollandica
MPGLNAAAKREESGELLQAHATVMHEVLAHAGSMALKCAVELDIPGIISSHGGSITLSDLVSHLDVPRSSSSSIRRIMRPLVLKGYFIHDKKLDSYRLTPLSSVLVHDSPTSLATFVMGMLDINIAAPWHSLSTFCRMGHHKGSSVYELEFGRSVWELGQEDPEFSRLFNETMDGDSRSTMKALVAECAESFEGLRTLVDVGGGDGTATRVIAEAFPHVKCTVYDLPHVVAEAKPKGSLVQAVGGSMFDHIPRADAVFMKVVLHDWVDEDCVKILKLCKEAIPSREEGGKVMIVDIVMDAAGAGAGAGQREVGDEMKTETQLFFDLTMMVYMGGKEREEDEWKKIFRDAGFTDYKITPLGLRSLIELFP

SEQ ID NO: 6507 - protein, 874 aa, Brassica napus
VAVGNNVLDTLGRSRQSFGGKVRQAMNVPKGKGSRGVVKAMFERFTEKAIKVIMLAQEEARRLGHNFVGTEQILLGLIGEGTGIAAKVLKSMGINLKDARVEVEKIIGRGSGFVAVEIPFTPRAKRVLELSLEEARQLGHNYIGSEHLLLGLLREGEGVAARVLENLGADPSNIRTQVIRMVGENNEVTANVGGGSGTNKMPTLEEYGTNLTKLAEEGKLDPVVGRHPQIERVVQILGRRTKNNPCLIGEPGVGKTAIAEGLAQRIASGVVRETSEGKKVITLDMGLLAAGTKYRGEFEERVKKLMEEIKQSDEIILFIDEVHTLIGAGAAEGAIDAANILKPALARGELQCIGATTLDEYRKHIEKDPALERRFQPVKVPEPTVDETIQILKGLRERYEIHHKLRYTDESLVAAAQLSYQYISDRFLPDRAIDLMDEAGSRVRLRHAQVPEEARELEKELRQITKENEAVRGQDFEKAGTLRDREIELRAEVSAIQAKGKEMSKAESETGDEGPMVTESDIQHIVSSWTGILVEKVSTDESDLLLKMEETLHKRVIGQDEAVKAISRAIRRARVGLKNPNRPIASFIFFGPTGVGKSELAKALAAYYFGCEEAMIRLDMSEFMERHTVSKLIGSPPGYVGYTEPPQLTEAVRRRPYTVVLFDEIEKAHPDVFNMMLQILEDGRLTNSKGRTVDFKNTLLIMTSNVGSSVIEKGGRRIGFDLDYEKDSSYNRIKSLVTQELKQYFRPEFLNRLDEMILFRQLTKLEVKEIADILLQELFERLKKKEVELQVTERFKERVVDEGYNPSYGARPLRRAIMRLLEDSMEEKMLAREIKEGDSVIVDVDSEGKVTVLNGGSGTPTTSLEEQEDSLPVA

SEQ ID NO: 6508 - protein, 366 aa, Eucalyptus gunnii
MGSTGSETQMTPTQVSDEEANLFAMQLASASVLPMVLKAAIELDLLEIMAKAGPGAFLSPGEVAAQLPTQNPEAPVMLDRIFRLLASYSVLTCTLRNLPDGKVERLYGLAPVCKFLVKNEDGVSIAALNLMNQDKILMESWYYLKDAVLEGGIPFNKAYGMTAFEYHGTDPRFNKIFNRGMSDHSTITMKKILETYKGFEGLETVVDVGGGTGAVLSMIVAKYPSMKGINFDLPHVIEDAPPLPGVKHVGGDMFVSVPKGDAIFMKWICHDWSDDHCAKFLKNCYDALPNIGKVIVAECVLPVYPDTSLATKNVIHIDCIMLAHNPGGKERTQKEFETLAKGAGFQGFQVMCCAFGTHVMEFLKTA

SEQ ID NO: 6509 - protein, 66 aa, Geobacillus stearothermophilus
MQRGKVKWFNNEKGYGFIEVEGGSDVFVHFTAIQGEGFKSLEEGQEVSFEIVQGNRGPQAANVVKL

SEQ ID NO: 6510 - protein, 607 aa, Nicotiana sylvestris
MAVVTASSAGPSYAPEDPTLPKPWKGLVDGTTGFIYFWNPETNDTQYERPVPSSHAVSAPAHKSSVFVSSSVEKPSQGQRYDADGGHNRGSNNKIARSSSDRFHDGTSVHEGYGSLGVGSDISQESYCRRNEISVTGGDVPAPLTSFEATGFPSEIVREMHQAGFSAPTPIQAQSWPIALQGRDIVAIAKTGSGKTLGYLMPAFIHLQQRRKNPQLGPTILVLSPTRELATQIQAEAVKFGKSSRISCTCLYGGAPKGPQLRELSRGVDIVVATPGRLNDILEMRRVSLGQVSYLVLDEADRMLDMGFEPQIRKIVKEVPVQRQTLMYTATWPKGVRKIAADLLVNSVQVNIGNVDELVANKSITQHIEVVLPMEKQRRVEQILRSKEPGSKIIIFCSTKKMCDQLSRNLTRNFGAAAIHGDKSQGERDYVLSQFRAGRSPVLVATDVAARGLDIKDIRVVINYDFPTGIEDYVHRIGRTGRAGASGLAYTFFSDQDSKHALDLVKVLEGANQCVPTELRDMASRGGGMGRARNHWGSGPGGRGGRGGPYNSSYVGRNGGHGYDRGSRDSDRYGHGTYNADAPRKRSRSRSPNIGSGWSGKKSRFTD

SEQ ID NO: 6511 - protein, 270 aa, Serratia marcescens
MKKNRAFLKWAGGKYPLVDEIRRHLPAGDCLIEPFVGAGSVFLNTDYDAYILADINSDLINLYNIVKLRTDDFVRDARTLFADEFNNSDQFYLLREEFNTSTEPYRRALLFLYLNRHCYNGLCRYNLRGEFNVPFGRYKKPYFPEEELYWFAEKSRNATFVCEHYRDTMAKAAAGAVVYCDPPYAPLSATANFTAYHTNSFSIADQQSLAHLAHQLSVESRVPVLISNHDTELTRDWYQHAALYVVKARRTISRNILGRSKVNELLALYR

SEQ ID NO: 6512 - protein, 650 aa, Burkholderia cepacia
MGKIIGIDLGTTNSCVAIMEGNQVKVIENSEGTRTTPSIIAYMDDNEVLVGAPAKRQSVTNPKNTLFAVKRLIGRRFEEKEVQKDIGLMPYSIIKADNGDAWVEGHGEKLMAPPQVSAEAVRKMKKTAEDYLGEPVTEAVITVPAYFNDSQRQATKDAGRIAGLEVKRIINEPTAAALAFGLDKAEKGDRKIAVYDLGGGTFDVSIIEIADVDGEMQFEVLSTNGDTFLGGEDFDQRIIDYIIGEFKKEQGVDLSKDVLALQRLKEAAEKAKIELSSSQQTEINLPYITADASGPKHLNLKITRAKLEALVEDLVERTIEPCRIAIKDAGVKVSDIDDVILVGGQTRMPKVMEKVKEFFGKDPRRDVNPDEAVAVGAAIQGQVLSGDRKDVLLLDVTLSLGIETVGGVMTKMISKNTTIPTKHAQVYSTADDNQGAVTIKVFQGEREMAAGNKLLGEFNLEGIPPAPRGVPQIEVTFDIDANGILHVGAKDKATGKENKITIKANSGLSEAEIDQMIKDAEANAAEDHNVRELADSRNQGDALVHSTKKALTEYGDKLDAGEKEALEASLKSLEEVLKDTSADKAAIDAKVEELGKVSQKLGEKMYADMQAQQAGAAGAAGAAEGAAHAGGAQQAADDVVDAEFKEVKKD

SEQ ID NO: 6513 - protein, 600 aa, Erysipelothrix rhusiopathiae
MSKVIGIDLGTTNSAVSVMDGGEAKVITNPEGNRTTPSVVSFKNGERIVGDAAKRQVVTNPNSAVSVKRLIGTGEKVTLEGKDYTPEEISAMILGYMKSYAEDYLGEKVTKAVITVPAYFNDAQRQATKDAGKIAGLEVERIINEPTAAALAFGIDKTDKEEKVLVFDLGGGTFDVSILELADGTFEVLSTAGDNKLGGDDFDNIVVDYLVDIFKKENGIDLSSDKMAMQRLKEAAEKAKKDLSSTVNASISLPFISAGENGPLHLETTLSRAKFEEMTKSLVERTMVPVRQALKDAGLTKNDIHQVLLVGGSTRIPAVVEAVKNDLGKEPNKSVNPDEVVAMGAAIQGGVISGDGKDVLLLDVTPLSLGIETMGGVMTVLIERNTTIPTSKSQVFSTAADNQPAVDINVLQGERPMAKDNKSLGLFKLDGIAPAKRGIPQIEVTFDIDVNGIVNVSAMDKGTNKKQSITISNSSGLSDEEIERMVREAEENASEDLRLKEEAELKNRAEQFIHQIDESLASEDSPVDDAQKEEVTKLRDELQAAMDNNDFETLKEKLDQLEQAAQAMSQAMYEQQAGQAEVDASSSDETVVDAEFEEKN

SEQ ID NO: 6514 - protein, 610 aa, Staphylococcus aureus
MSKIIGIDLGTTNSCVTVLEGDEPKVIQNPEGSRTTPSVVAFKNGETQVGEVAKRQAITNPNTVQSIKRHMGTDYKVDIEGKSYTPQEISAMILQNLKNTAESYLGEKVDKAVITVPAYFNDAERQATKDAGKIAGLEVERIINEPTAAALAYGLDKTDKDEKVLVFDLGGGTFDVSILELGDGVFEVLSTAGDNKLGGDDFDQVIIDYLVAEFKKENGVDLSQDKMALQRLKDAAEKAKKDLSGVSQTQISLPFISAGENGPLHLEVNLTRSKFEELSDSLIRRTMEPTRQAMKDAGLTNSDIDEVILVGGSTRIPAVQEAVKKEIGKEPNKGVNPDEVVAMGAAIQGGVITGDVKDVVLLDVTPLSLGIEILGGRMNTLIERNTTIPTSKSQIYSTAVDNQPSVDVHVLQGERPMAADNKTLGRFQLTDIPPAERGKPQIEVTFDIDKNGIVNVTAKDLGTNKEQRITIQSSSSLSDEEIDRMVKDAEVNAEADKKRREEVDLRNEADSLVFQVEKTLTDLGENIGEEDKKSAEEKKDALKTALEGQDIEDIKSKKEELEKVIQELSAKVYEQAAQQQQQAQGANAGQNNDSTVEDAEFNEVKDDDKK

SEQ ID NO: 6515 - protein, 365 aa, Citrobacter freundii
MLKVIQSPAKYLQGPDASTLFGQYAKNLADSFFVIADDFVMKLAGEKVLNGLHSHDISCHAERFNGECSHIEINRLIAILKQHGCRGVVGIGGGKTLDTAKAIGYYQKLPVVVIPTIASTDAPTSALSVIYTEAGEFEEYLIYPKNPDMVVMDTAIIAKAPVRLLVAGMGDALSTWFEAKACYDARATSMAGGQSTVAALSLARLCYDTLLAEGEKARFAAQAGVVTDALERIVEANTYLSGIGFESSGLAGAHAIHNGFTILEECHHLYHGEKVAFGTLAQLVLQNSPMEEIETVLNFCQKVGLPVTLAEMGVKDDIDGKIMAVAKATCAEGETIHNMPFSVTPESVHAAILTADLLGQQWLAR

SEQ ID NO: 6516 - protein, 329 aa, Sinorhizobium meliloti
MTKYKLEYIWLDATRPYQTLRGKTQIKEFDAFPTLEQLPLWGFDGSSTLQAEGRTSDCVLKPVTVYPDPVRTNGALVMCEVMMPDAETPHASNTRATVLDDEGAWFGFEQEYFFYKNGRPLGFPEQGYPAPQGPYYTGVGYKNVGDVARQIVEEHLDICLAAGINHEGINAEVAKGQWEFQIFGKGSKKAADEVCVARYLLVRLTEKYGIDVEFHCKPLGDTDWNGSGMHANFSTAYLREVGGQDYFEALMAAFEKNLHDHINVYGPDNHLRLTGKHETAPWDKFSYGVADRGASIRVPHSFVNNAYPGYLEDRRANSQGDPYQMLLSS

SEQ ID NO: 6517 - protein, 357 aa, Zea mays
MASLTDLVNLDLSDCTDKIIAEYIWVGGSGIDLRSKARTVKGPITDPSQLPKWNYDGSSTGQAPGEDSEVILYPQAIFKDPFRKGNNILVMCDCYTPQGEPIPSNKRYKAATVFSHPDVAAEVPWYGIEQEYTLLQKDLSWPLGWPVGGYPGPQGPYYCAAGADKAFGRDVVDAHYKACLYAGINISGINGEVMPGQWEFQVGPSVGISAGDEIWVARYILERITEMAGIVLSLDPKPIKGDWNGAGAHTNYSTKSMREAGGYEVIKEAIEKLGRRHREHIAAYGEGNERRLTGRHETADINTFKWGVANRGASIRVGRDTEKEGKGYFEDRRPASNMDPYVVTGMIADTTILWKGN

SEQ ID NO: 6518 - protein, 358 aa, Lactuca sativa
MALLSDLVNLDLSSITDKIIAEYIWIGGSGMDLRSKARTLSGPVSDPSELPKWNYDGSSTGQAPGEDSEVIIYPQAIFKDPFRRGNHILVMCDAYTPAGEPIPTNKRAAAAKIFSNPEVEKEVTWYGIEQEYTLLQKDTNWPLGWPLGGFPGPQGPYYCGIGADKAFGRDIVDAHYKACLYAGVNISGINGEVMPGQWEFQVGPSVGIAAADQIWVARYILERITEIYGVVVSFDPKPIPGDWNGAGAHTNYSTKTMREEGGYEVIKKAIEKLGLRHKEHIAAYGEGNERRLTGRHETADINTFLWGVANRGASIRVGRDTEKEGKGYFEDRRPASNMDPYVVTSMIAETTILWDNKS

SEQ ID NO: 6519 - protein, 149 aa, Canavalia lineata
MGAFSEKQESLVKSSWEAFKQNVPHHSAVFYTLILEKAPAAQNMFSFLSNGVDPNNPKLKAHAEKVFKMTVDSAVQLRAKGEVVLADPTLGSVHVQKGVLDPHFLVVKEALLKTFKEAVGDKWNDELGNAWEVAYDELAAAIKKAMGSA

SEQ ID NO: 6520 - protein, 160 aa, Helianthus annuus
MDIDSLMGFDPLLRNLHYILEATDDNTTGNKSNNSGPSRAYVRDARAMAATPADVKECPNSYVFIVDMPGLKSGDIKVQVERDNVLVISGKRNREEEKEGVKYVRMERRMGKFMKKFALPEDANTDKISAICQDGVLTVTVEKLPPPEPKKPKTIQVQVA

SEQ ID NO: 6521 - protein, 652 aa, Achlya klebsiana
MSGVQGASVGIDLGTTYSCVGVWQNDRVEIIANDQGNRTTPSYVAFTDSERLIGDAAKNQVAMNPANTVFDAKRLIGRKFNDPATQADIKHWPFKVTPGAGDKPQITVEFKGETKTFQPEEISSMVLIKMKEVAEAFIGTAVNNAVITVPAYFNDSQRQATKDAGAIAGLNVLRIINEPTRAAIAYGLDKKGGERNVLIFDLGGGTFDVSLLTIEEGIFEVKATAGDTHLGGEDFDNRLVDHFTAEFKRKHRKDMTQNQRALRRLRTACERAKRTLSSSAQAYIEIDSLFDGIDFNSTITRARFEDMCGDYFRKTMEPVEKVLRDSKLSKSQVHEVVLVGGSTRIPKVQQLLSDFFNGKEPCKSINPDEAVAFGATVQAAILSGNDSSEKLQDLLLLDVTPLSLGLETAGGVMTTLIQRNTTVPTKKSQTFSTYADNQPGVLIQVFEGERSMTRDNNLLGKFSLDGIPPMPRGVPQIDVTFDIDANGILNVSAVEKSTGKENKITITNDKGRLTKDDIERMVQEAEKYKSEDEANNVRIEAKNGLENYAYNLRNTLNDEKLQGKIDESDKKVIDDKVTDIINWLDHNQSAEKEEFEAKQKELEGIANPIMQKMYAAAGGAPGGMPGGMPDMGGAGAPPPASHAQGPKIEEVD

SEQ ID NO: 6522 - protein, 613 aa, Kluyveromyces marxianus
MAEGVFPGAIGIDLGTTYSCVATYENSVEIIANEQGNRVTPSFVAFTPEERLIGDAAKNQAALNPKNTVFDAKRLIGRRFDEESVQSDMKTWPFKVIDSNGAPLIEVEYLGETKTFSPQEISSMVLTKMKEIAEAKIGKKVEKAVVTVPAYFNDAQRQATKDAGAIAGLNVLRIINEPTAAAIAYGVGAGNSEKERHVLIFDLGGGTFDVSLLHIAGGVYTVKSTSGNTHLGGQDFDTNLLEHFKTEFKKKTGADISGDARALRRLRTAAERAKRTLSSVAQTTVEVDSLFDGEDFEATITRARFEDINAALFKSTLEPVEQVLKDAKISKSQIDEVVLVGGSTRIPKVQKLLSDFFDGKQLEKSINPDEAVAYGAAVQGAILTGQSTSDETKDLLLLDVAPLSLGVGMAGDVFGVVVPRNTTVPTIKRRTFTTVADHQTTVTFPVYQGERVNCKENTLLGEFDLKGVPPMPAGEPVLEAIFEVDANGILKVTAVEKSTGKSANITISNAIGRLSSEEIEQMVNQAEEFKAADEAFAKKHEARQRLESYISSVQQTVTDPVLSAKIKRNAKAKVEAALADAFSTLQIEDASADDLRKAEVGLKRAVTKAMSTR

SEQ ID NO: 6523 - protein, 1097 aa, Candida albicans
MSTSQPSQQQNPEQVVNDIRQKIEKERKIIQGFNDVKRNTNNPEVIQKWKSKIIESQSMIDYYQETMNKLTRQMQRLNTNSSSRTASRSSVISEYKPSYSNFDLIKYECPSLGNKIQFMLQYLEFKLQVENKYSEANKKLSHLYLMDGDKSSSNAAEGGRAESDQRIQLLEKALKKYQKFSINDHEFDRDYEIMDSTKHSRKLLTGRLTVSITCIRDVDHIATALAKKRETVVVIKVDDLEKARTKPSKNDNWNEEMVIDVDKSHEIELAVMDKQNGIYVPVAVNWFSLFDLAEEIRKKKVAKDQGSSGWLPAANLPQTGGSGAGTGSSMTGGASYGATSPLPAHNDLRPSVSPSSDAKENKVSVSTWLSLEPGGQMLINLNFEKSITNGKQFRGPLGRHGAIRQKKEEVFEKHGHQFVQKQFYNIMSCALCGEFLRYTGYQCQDCKFLCHKKCYQKVVTKCISKSGSDYDAAQLNHRIPHRFEPITNHGTKWCCHCGYILPWGKKNVRKCTECGVMCHAQCTHLVPDFCGMSLQMANEILATIESTKVSPKKAQHQQSHAKPLPPKPPIESKPSMDSEETLHNEPSYKSLRPASVVHQDTNFVSKLPTTVQNKYQEPVELPPQQQNQVVPSTRRRGHGSTDLSFETGYGQQQHQHHRDVPQIVVEDHQHYNSNDNRDVEMEESKDEFDNFDYNNKYTENEILTDVQQDQVRSPFADQIQGVPETSHAKQQNQQVQQVQQQEELGHQRTHSSGKSGKSKRRKRKVGLDDFQFLAVLGKGNFGKVMLAESRHTSKLCAIKVLKKDFIVENDEAESVKSEKRVFLTANKEMHPFLLNLHCCFQTENRIYFVMEYISGGDLMWHIQKNRFTAKRAKFYACEVLLGLKYFHDNGIVYRDLKLDNILLTTKGHIKIGDYGLCKEDMWHKSTTSTFCGTPEFMAPEIVAGKAYDRSVDWWAFGVLLFQMLLCQSPFKGDDEDDIFNAIENDEVKYPINLSRQTVLVLQALLTKDPSQRLGSGPKDAEEIMEHPYFHDVNFDDVLNCRIPAPYIPEVQSEHDYSNFDKEFTSETPRLTPVETVLTSEMQEQFRGFSHISDNATI

SEQ ID NO: 6524 - protein, 321 aa, Candida albicans
MSTNSIKLLASDVHRGLAELVSKRLGLRLTPSELKRESTGEVQFSIGESVRDEDIFIICQIGSGEVNDRVFELMIMINACKTASARRITVILPNFPYARQDRKDKSRAPITAKLMADMLTTAGCDHVITMDLHASQIQGFFDVPVDNLYAEPSVVRYIKETIDYSEAIIISSDAGGAKRAAGLADRLDLNFELIHKERARANEVSRMVLVVDVTDKICVIVDDMADTCGTLAKAAEVLLDNNAKDVIAIVTHGILSGNAIKNINNSKLKKVVCTNTVPFEDKLKLCLKLDTIDISAVIAESIRRLHNGESISYLFKNAPCK

SEQ ID NO: 6525 - protein, 315 aa, Bacillus caldolyticus
MSDCQHQLKLFALNSNMKLAKEIAEVMGIELGKCSVSRFSDGEIQINIEESIRGDDVFVIQSTSVPVNEHLMELLIMIDALKRASARTINIVMPYYGYARQDRKARSRNPITAKLVANLLETAGASRVITLDLHAPQIQGFFDIPIDHLMGVPILADYFKSKQLEDIVVVSPDHGGVTRARKLADRLKAPIAIIDKRRPKPNVAEVMNIVGQVAGKTAILIDDIIDTAGTITLAANALAESGAKEVYACCTHPVLSGPAIERIQSSKIKELVVTNSIALPEEKKIDKIVKLSVRPLIAEAITRVYEMKSVSVLFD

SEQ ID NO: 6526 - protein, 317 aa, Escherichia coli
MSERHLPDDQSSTIDPYLITSVRQTLAEEGARLQNLSKQLDSGQYQRVLNLIMNCKGHVILSGMGKSGHVGRKMSATLASTGTPSFFIHPAEAFHGDLGMITPYDLLILISASGETDEILKLVPSLKNFGNRIIAITNNGNSTLAKNADAVLELHMANETCPNNLAPTTSTTLTMAIGDALAIAMIRQRKFMPNDFARYHPGGSLGRRLLTRVADVMQHDVPAVQLDASFKTVIQRITSGCQGMVMVEDAEGGLAGIITDGDLRRFMEKEDSLTSATAAQMMTREPLTLPEDTMIIEAEEKMQKDKCLNVIGDQQGK

SEQ ID NO: 6527 - protein, 509 aa, Nicotiana tabacum
MEGTNLTTYAAVFLGTLFLLFLSKLLRQRKLNLPPGPKPWPIIGNLNLIGNLPYRSIHELSLKYGPVMQLQFGSFPVVVGSSVEMAKIFLKSMDINFVGRPKTAAGKYTTYNYSDITWSPYGPYWRQARRMCLTELFSTKCLDSYEYIRAEELHSLLHNLNKISGKPIVLKDYLTTLSLNVISRMVLGKRYLDESENSFVNPEEFKKMLDELFLLNGVLNIGDSIPWIDFMDLQGYVKRMKVVSKKFDKFLEHVIDEHNIRRNGVENYVAKDMEDVLLQLADDPKLEVKLERHGVKAFTQDMLAGGTESSAVTVEWAISELSKKPEIFKKATEELDRVIGQNRWVQEKDIPNLPYIEAIVKETMRLHPVAPMKATECRENSKVAGYDVQKGTRVLVSVWTIGRDPTLWDEPEVFKPERFHEKASIDVKGHDYELLPFGVGRRMCPGYSLGLKVIQASLANLLHGFNWSLPDNMTPEDLNMDEIFGLSTPKKFPLATVIEPRLSPKLYSV

SEQ ID NO: 6528 - protein, 207 aa, Pseudomonas sp. 14-3
MLDVRLTTTSADFCTPIGHYNILCAWMRMNMTLMLHHCFNLLLLNSGITLPSFVRCLMAGIVLPNLLGADIRCLLITRCNGPGRGMALISNIGLGLFLVMALMGLQLSTLGGVLVFLGTPLTLQITLTILYTGLLGFPCMGRNYEASVIAAGFGGIALGSTATAIVNMTAVTQRYGAAHQAFIIVPLVCGFFIDIVNALIISLMSGI

SEQ ID NO: 6529 - protein, 461 aa, Sorangium cellulosum
MSGRVLIVDDERGVCELLDAGLKKRGFQAAWRTSAAEALELLGAEDFDVVVTDMTMRGMSGLELCERIAQNRPDLPVIVITAFGSLDTATSAIRAGAYDFVTKPFELDALRLTVERALRHRALREEVRRLRRAVDDSHRYEQILGGSPAMKGVFDLLDRVADSDTSILITGESGTGKELVARAVHQRSRRGQGAFVAVNCAAVPDALLESELFGHARGAFTDAKGPRSGLFARAHGGTLFLDEIGELPVGLQPKLLRALQERVVRPVGADEEVPVDVRLIAATNRDLETAIEERRFREDLYYRINVVHVDLPPLRSRGADVLLLAQRFLEHFATVKERPIKGLSAPAAEKLVAYAWPGNVRELQNCVERAVALARYDQITVDDLPEKIRSYRSSHVLVSSDDPTELVPMEEVERRYILRVLEVVGGNKSQAAQILGFDRATLYRKLERYGLRAGRASDPKP

SEQ ID NO: 6530 - protein, 461 aa, Sorangium cellulosum
MTGRVLIVDDERGVCELLDAGLKKRGFQAAWRTSAAEALELLGAEDFDVVVTDMTMRGMNGLELCERIAQNRPDLPVIVITAFGSLDTATSAIRAGAYDFVTKPFELDALRLTVERALRHRALREEVRRLRRAVDDSHRYEQILGGSPAMKGVFDLLDRVADSDTSILITGESGTGKELVARAVHQRSRRGQGAFIAVNCAAVPDALLETELFGHARGAFTDAKGARSGLFARAHGGTLFLDEIGELPVGLQPKLLRALQERVVRPVGADEEVPVDVRLIAATNRDLETAIEERRFREDLYYRINVVHVDLPPLRSRGADVLLLAQRFLEHFATVKERPIKGLSAPAAEKLVAYAWPGNVRELQNCIERAVALARYDQITVDDLPEKIRSYRRSHVLVSSDDPTELVPMEEVERRYILRVLEVVGGNKSQAAQVLGFDRATLYRKLERYGLRAGRAGDPRP

SEQ ID NO: 6531 - protein, 154 aa, Rosa chinensis
MSLIPNFRRNSVFDLDLWDPFRDFQFPSSSLSTFPEFPGENSAFINTRIDWKETPEAHVFKADLPGLKKEEVKVEIENDRVLQISGERKIEKEDKNDKWHRVERSSGKFSRRFRLPENAKLDEIKAAMENGVLRVTVPKAKVKRPDVKAIEISG

SEQ ID NO: 6532 - protein, 1156 aa, Glycine max
MLQQAERRIPPFRRRKSTPHEQRLSHHSSNNNNNIDSMSKAIAQYTEDGVHAVFEQSGESGRSFNYSESIRIASESVPEQQITAYLVKIQRGGFIQPFGSMIAVDEPSFRILGYSDNARDMLGITPQSVPSLDDKNDAAFALGPQSVPSLDDKNDAAFALGTDVRALFTHSSALLLEKAFSAREISLMNPIWIHSRTSGKPFYGILHRIDVGIVIDLEPARTEDPALSIAGAVQSQEALVRAISQLQSLPSADVKLLCDTVVESVRELTGYDRVMVYKFHEDEHGEVVSESKRPDLEPYIGLHYPATDIPQASRFLFKQNRVRMIVDCHASAVRVVQDEALVQPLCLVGSTLGAPHGCHAQYMANMGSIASLVMAVIINGNDEEGVGGRSSMRLWGLVVCHHTSARCIPFPLRYACEFLMQAFGLQLNMELQLAAQSLEKRVLRTQTLLCDMLLRDSPTGIVTQSPSIMDLVKCDGAALYFQGNYYPLGVTPTEAQIRDIIEWLLAFHGDSTGLSTDSLGDAGYPGLPRLGMQFVGWQVAYITEKDFLFWFRSHTAKEIKWGGAKLILRTRMMGQRMHPLSSFKAFLEVVKSRSLPWENAEMDAIHSLQLILRDSFKDAEHRNSKAVVDPHVSEQELQGVDELSSVAREMVRLIETATAPIFAVDVDGHVNGWNAKVSELTGLPVEEAMGKSLVHDLVFKESEETVNKLLSREEDKNVETKMRTFGKEHQNKAAFLVVNACSSKHFTNNVVGVCFVGQNVTGQKIVMHKFINIQGDYKAIVHSPNPLIPPIFASDDNTCCLEWNTAMEKLDPSNENVTVGGVDVIGKMLVGEVFGSCCQLKGSDSITKFMIVLHNALGGQDTDKFPFSFLDRHGKYVQTFLTANKRVNMEGQIIGAFCFLQIMSPELQQALKAQRQQEKEFLGRMKELAYICQGVKKPLSGIRFTNSLLEATSLTNEQKQFLETSVACEKQMLKIIRDVDLESIEDGSLELEKGEFLLGNVINAVVSQVILLLRERNLQLIRDIPEEIKTLAVYGDQLRIQQVLSDFLLNIVRYAPSPDGWVEIHVRPRIKQISDGLTLLHAEFRMVCPGEGLPPELIQDMFNNSRWGTQEGLGLSMSRKILKLMNGEVQYIREAERCYFYVLLELPVTRRSSKKC

SEQ ID NO: 6533 - protein, 1049 aa, Bacillus megaterium [sequence omitted]

SEQ ID NO: 6534 - protein, 390 aa, Triticum aestivum
MASEMSKDVKFSEEEVSSHPRVLEGEELTVAPARQSSIFALTLDELQYSVCEAGRNFGSMNMDEFMSNIWNAEEFQAATGGGLVGMEVAPVVGAGAGGGGADAGGSNLARQESFSLPPPLCRKTVEEVWAEINREPRQVHAQPQGARASQQPPVQPPVAANDRQGTLGEMTLEQFLVKAGVVRGSGAGGQAPVPVGMVHAQMNPVQQGQQPGPMMYPMAPANGMFQVMGDGMGFVPNGYAGMAVVPPPPPPQGGMGIVSPGSSDGRSAMTQADMMNCMGDGAMMENGGARKRGAPEDQSCERSIERRHRRMIKNRESAARSRARKQAYTVELEAELNHLKEENARLKAEEKTILLTKKQMLVEKMIEQSKENVNVKKGGTLSRRCGSCIW

SEQ ID NO: 6535 - protein, 314 aa, Brassica napus
MISLTVTTPSLRETEDMHSKSESGNQIVSEAHHHTSSTSINSLNPWLRAAASCNANSSVEEAGDKSIALENQTNLESSNGSKSPSNRDENGNKESQVTASPQQSAADYSEKSQELVHPGSTPPPHPQLVSHTVGWASSNPYQDSYYAGMMGAYPLTYVPHGGMPHSRMQLPPEMAQEPVYVNAKQYQAIMRRRQARAKAELEKKLIKSRKRYLHESRHQHAMRRPRGTGGRFAKKTNTEASQQKDGEKRNACATQSPTSSHSDQHEGCSDEYRTNQSDEMQSSAYKIREEADCSGQQWNNISSNHPSQPLLAIK

SEQ ID NO: 6536 - protein, 349 aa, Streptomyces lavendulae
MTVEQTPENPGTAARAAAEETVNDILQGAWKARAIHVAVELGVPELLQEGPRTATALAEATGAHEQTLRRLLRLLATVGVFDDLGHDDLFAQNALSAVLLPDPASPVATDARFQAAPWHWRAWEQLTHSVRTGEASFDVANGTSFWQLTHEDPKARELFNRAMGSVSLTEAGQVAAAYDFSGAATAVDIGGGRGSLMAAVLDAFPGLRGTLLERPPVAEEARELLTGRGLADRCEILPGDFFETIPDGADVYLIKHVLHDWDDDDVVRILRRIATAMKPDSRLLVIDNLIDERPAASTLFVDLLLLVLVGGAERSESEFAALLEKSGLRVERSLPCGAGPVRIVEIRRA

SEQ ID NO: 6537 - protein, 394 aa, Allochromatium vinosum
MSENIVIVDAGRSAIGTFGGSLSSLSATEIGTAVLKGLLARTGLAPEQIDEVILGQVLTAGVGQNPARQTTLHAGLPHSVPAMTINKVCGSGLKAVHLAMQAIACGDADIVIAGGQESMSQSSHVLPRSRDGQRMGDWSMKDTMIVDGLWDAFNNYHMGTTAENIAQKYGFTREQQDAFAAASQQKTEAAQKAGRFQDEIIPIEIPQRKGDPKVFDADEFPRHGTTAESLGKLRPAFSKDGSVTAGNASGINDGAAMVVVMKESKAKELGLKPMARLVAFASAGVDPAIMGTGPIPASTKCLEKAGWTPADLDLIEANEAFAAQAMSVNQDMGWDLSKVNVNGGAIAIGHPIGASGARVLVTLLYEMQKRDAKKGLATLCIGGGQGVALAVERM

SEQ ID NO: 6538 - protein, 394 aa, Thiocystis violacea
MSDTIVIVDAGRTAIGTFGGALSALQATDIGTTVLKALIERTGIAPEQVSEVILGQVLTAGCGQNPARQTTLMAGLPHTVPAMTINKVCGSGLKAVHLAMQAVACGDAEIVIAGGQESMSQSSHVLPRSREGQRMGDWPMKDTMIVDGLWDAFNQCHMGVTAENIAKKYAFTREAQDAFAAASQQKAEAAIQSGRFADEIIPVSIPQRKGDPLVFDTDEFPRPGTTAETLGRLRPAFDKQGTVTAGNASGINDGAAMVVVMKESKAKELGLTPMARLVAFSSAGVDPAIMGTGPIPASTDCLKKAGWAPADLDLVEANEAFAAQAMSVNQEMGWDLSKVNVNGGAIAIGHPIGASGARVLVTLLYEMQKRDAKKGLATLCIGGGQGVALAVERL

SEQ ID NO: 6539 - protein, 749 aa, Agrobacterium rhizogenes
MAGSSFTLPSTGSAPLDMMLIDDSDLLQLGLQQVFSKRYTETPQSRYKLTRRASPDVSSGEGNVHALAFIYVNAETLQMIKNARSLTEANGVKDLVAIDVPPFRNDFSRALLLQVINLLGNNRNADDDLSHFIAVALPNSARSKILTTAPFEGSLSENFRGFPITREGNVACEVLAYGNNLMPKACSDSFPTVDLLYDYGKFFESCAADGRIGYFPEGVTKPKVAIIGAGFSGLVAASELLHAGVDDVTVYEASDRLGGKLWSHGFKSAPNVIAEMGAMRFPRSESCLFFYLKKHGLDSVGLFPNPGSVDTALFYRGRQYIWKAGEEPPELFRRVHHGWRAFLQDGYLHDGVMLASPLAIVDALNLGHLQQAHGFWQSWLTYFERESFSSGIEKMFLGNHPPGGEQWNSLDDLDLFKALGIGSGGFGPVFESGFIEILRLVVNGYEDNVRLSYEGISELPHRIASQVINGRSIRERTIHVQVEQIDREEDKINIKIKGGKVEVYDRVLVTSGFANIEMRHLLTSSNAFFHADVSHAIGNSHMTGASKLFLLTNEKFWLQHHLPSCILTTGVAKAVYCLDYDPRDPSGKGLVLISYTWEDDSHKLLAVPDKRERFASLQRDIGRAFPDFAKHLTPADGNYDDNIVQHDWLTDPHAGGAFKLNRRGNDVYSERLFFQPFDVMHPADDKGLYLAGCSCSFTGGWVHGAIQTACNATCAIIYGSGHLQELIHWRHLKEGNPLAHAWKRYRYQA

SEQ ID NO: 6540 - protein, 197 aa, Mesorhizobium ciceri subsp. biserrulae
FAEFPELEQLPLWGFDGSSTQQAEGHSSDCVLKPVAVYPDPPRTNGVLVMCEVMMPDGVTPHASNKRATILDDEGAWFGFEQEYFFYKDGRPLGFPESGYPAPQGPYYTGVGYSNVGSVARQIVEEHLDLCLAAGINHEGINAEVAKGQWEFQIFGKGSKKAADQMWMARYLLQRLTEKYGIDIEYHCKPLGDTDWN

SEQ ID NO: 6541 - protein, 196 aa, Mesorhizobium ciceri subsp. biserrulae
FAEFPELEQLPLWGFDGSSTQQAEGHSSDCVLKPVAVYPDPARTNGVLVMCEVMMPDGVTPHASNKRATILDDEGAWFGFEQEYFFYKDGRPLGFPESGYPAPQGPYYTGVGYSNVGSVARQIVEEHLDLCLAAGINHEGINAEVAKGQWEFQIFGKGSKKAADQMWMARYLLQRLTEKYGIDIEYHCKPLGDTDW

SEQ ID NO: 6542 - protein, 466 aa, Gibberella fujikuroi
MTTPYNGTTDHADYGYSTHVHDLNIFYDTGNLTFLAVSAVLVLLMIPGVGFFYSGLARRKSALTLILLSMISVAVISFQWFFWGYSLTFSRTGNSFLGDLTQFGLMDTLAQPNGSSALPDILFCLYQGMFAAITPALAIGCVADRGRILPAIVFMFLWSTIVYDPIAYWTWNANGWLFNLPSYDFAGGGPVHVSSGTCALAYSLMLGKRTGYSNNNGLPYRPHNVTHVVLGTVFLWVGWFGFNGGSALAMNIRAVMACYVTNLAASCGAIAWILLDYRLEKKWSTIGFCSGAISGLVAITPAAGFVKPWAAVIIGICGGIFCNFATKVKFLINVDDSLDIFAIHGIGGMVGNILTGIFGTKTIAALDGGEYDPIGWVDGHFVQLGYQIAGTLAVFAWSFTLTCILLFLLNLIPGLSLRVSPEEEELGTDDGQLGEFAYDYVEMTRHMADSTHPHSDASARTSQEKV

SEQ ID NO: 6543 - protein, 317 aa, Populus tremula x Populus alba
MERKEAVKVENFVGSPTFSSTTDHVQTSYPFMQGFDFVDDKSSLGFMELLGVQDFSPSLLDMIQVQIPSVQTPSAQVATEVVDSPPEVLNQPATPNSSSISSASSEGLNDEPANKGVDNEVEEQGKTKKELKPKKTNQKRQREPRFAFMTKSEVDHLEDGYRWRKYGQKAVKNSPFPRSYYRCTTASCNVKKRVERSFSDPSVVVTTYEGQHTHPSPVMPRPNFSGSTSDSGFSSTAAFAMPMQRRLSLYQQHQSQQQPPFPLVSLSPLGFGYNGNSTNAASYLQYEKRFYTSPGSALLKDHGLLQDLVPSHMLKEE

SEQ ID NO: 6544 - protein, 120 aa, Klebsiella aerogenes
MADSALELDDFLSRFQLLRPQPHAPPLNQRQAAVLVPIVRRPQPGLLLTQRSPLMRKHAGQVAFPGGAVDNSDATLIAAALREAQEEVAIPPESVEVIGVLPPVDSVTGFQVTPVVGIIP

SEQ ID NO: 6545 - protein, 339 aa, Cymbidium hybrid cultivar
MSTSSVHLPPGFRFHPTDEELILHYLRNRAASSPCPASIIAEVDIYKFDPWDLPEKAAFGDREWYFFTPRDRKYPNGNRPNRAAGSGYWKATGTDKPISSGSENIGVKKALVFYKGRPPKGLKTNWIMHEFRLADANKSNSYKPIRLRDHSMRLDDWVLCRIYRKSNHLSPTEMDQEQEDPCGEETCFPAMQNQMMPMNHGMKLQKVSSISEFLQEYSPLLNLFDNQQEIPRFDSNSLLGHPLLSQSMINQNQDSGGNGYFLPQLSQAESPVSIGAKRQRMDDCTNEESNGTSHSSKKQNDLNMFPNFSSQFDGSQYGLLSQPFFSQQLLMNSNTGSLH

SEQ ID NO: 6546 - protein, 669 aa, Haemophilus influenzae
MTKRTSFNPLVIGVTLFFILLLMAMIFIAPEQTQALLNQAKSGIFANFSWFYVLTFSVFLGFLLILSVSSLGNIKLGQDEEEPEFSFLSWLAMLFAAGMGVGLMFFGVAEPLTHYLSDITAGSAEHKQQEALLHTLFHWGIHAWAVYGTIALALAYFGFRYKLPLALRSCFYPLLKDRINGKIGDAIDVMALLATLFGIITTLGFGSSQLGAGLEQIGWISQNSFALQVGVIVVVMCLAVFSAISGVGKGVKILSEINLTLAFCLLLFVLISGPTLYLLSAFSDNIGNYFSNLVQLSFKTYAYEQEHTSWFSGWTVLYWAWWCSWAPFVGLFIARISKGRTIREFIFGVLVIPSLFGILWFTVFGNTAVWLNDGIAAGGLGEFISSPEILLFKFLNYLPLPTITGFVSLLVILLFFITSADSGIYVLNNIASRDKSLASPAWQAIMWGTLMSVVAIVLMQSGGLANLQTMTLIVALPFALLMLVMCFSLWKGLIADKKYFSTKVNPTSIFWSGDKWKSHLEQMMNQTQEKDILRFLKNTALPAMRELRQELTGKYNLSVEINTLFEQEEPALELVIHKESMRDFMYGIKSVGREVSEQLINDENLPHIQHSATYEPYTYFFDGRVGYDVQYMDQDELIADMLKQYERYLSLLDDVGQELMAHEQTELAE

SEQ ID NO: 6547 - protein, 786 aa, Arabidopsis thaliana
MVLKDDNSEKSIELFISIGLDEKTARNTINNNKVTANLTAVIHEAAVTDGCDRNTGNLLYSVATKFPTNALVHRPTLLKYIVNSKIKTPAQLEAAFAFFASTGPEDFKLNEFEEACGVGIEVSPEDIEKAVKGIFEENKKTILEQRYRTNVGELFGHVRKSLPWADPKIVKKLIDEKMYELLGEKTAADNEKPTKKKEKKEKPAKVEEKKAVVETTAEPSEEELNPYTIFPQPEQNFMVHTEVFFSDGSILRCSNTKEVLDKHLKVTGGKVYTRFPPEPNGYLHIGHAKAMFVDFGLAKERGGCCYLRYDDTNPEAEKEEYINHIEEIVKWMGWEPFKELYDLAVELIRRGHAYVDHQTADEIKEYREKKMNSPWRDRPIEESLKLFDEMRRGIIEEGKATLRMKQDMQSDNFNMYDLIAYRIKFAPHPKAGDKWCIYPSYDYAHCTVDSLENITHSLCTLEFETRRASYYWLLHSLSLYMPYVWEYSRLNVTNTVMSKRKLNYIVTNKYVDGWDDPRLLTLSGLRRRGVTSTAINAFVRGIGITRSDGSMIHVSRLEHHIREELNKTAPRTMVVLNPLKVVITNLESDKLIELDAKRWPDAQNDDPSAFYKVPFSRVVYIDQSDFRMKDSKDYYGLAPGKSVLLRYAFPIKCTNVVFADDNETVREIHAEYDPEKKSKPKGVLHWVAESSPGEEPIKVEVRLFEKLFNSENPAELNDAWLTDINPNSKMVISGAYAVSTLKDAAVGDRFQFERLGYYAVDKDSEPGKLVFNRTVTLRDSYGKGGK

SEQ ID NO: 6548 - protein, 567 aa, Solanum ptychanthum
PRKGCDVLVEALEREGVTDVFAYPGGASMEIHQALTRSNIIRNVLPRHEQGGVFAAEGYARATGFPGVCIATSGPGATNLVSGLADALLDSIPIVAITGQVPRRMIGTDAFQETPIVEVTRSITKHNYLVMDVEDIPRIVREAFFLAKSGRPGPVLIDVPKDIQQQLVIPNWDQPMRLPGYMSRLPKLPNEMLLEQIVRLISESKKPVLYVGGGCSQSSEELRRFVELTGIPVASTLMGLGAFPTGDELSLQMLGMHGTVYANYAVDSSDLLLAFGVRFDDRVTGKLEAFASRAKIVHIDIDSAEIGKNKLPHASICADIKLALQGLNSILEGKEGKLKLDFSAWRQELNEQKVKYPLNFKTFGEAIPPQYAIQVLDELTNGNAIISTGVGQHQMWAAQFYKYKKPRQWLTSGGLGAMGFGLPAAMGAAVGRPGEIVVDIDGDGSFMMNVQELATIKVENLPVKIMLLNNQHLGMVVQWEDRFYKANRAHTYLGDPANEEEIFPNMLKFAEACGVPAARVTHRDELRAAIQKMLDTPGPYLLDVIVPHQEHVLPMIPSGGAFKDVIT

SEQ ID NO: 6549 - protein, 567 aa, Solanum ptychanthum
PRKGCDVLVEALEREGVTDVFAYPGGTSMEIHQALTRSNIIRNVLPRHEQGGVFAAEGYARATGFPGVCIATSGPGATNLVSGLADALLDSIPIVAITGQVPRRMIGTDAFQETPIVEVTRSITKHNYLVMDVEDIPRIVREAFFLAKSGRPGPVLIDVPKDIQQQLVIPNWDQPMRLPGYMSRLPKLPNEMLLEQIVRLISESKKPVLYVGGGCSQSSEELRRFVELTGIPVASTLMGLGAFPTGDELSLQMLGMHGTVYANYAVDSSDLLLAFGVRFDDRVTGKLEAFASRAKIVHIDIDSAEIGKNKLPHASICADIKLALQGLNSILEGKEGKLKLDFSAWRQELNEQKVKYPLNFKTFGEAIPPQYAIQVLDELTNGNAIISTGVGQHQMWAAQFYKYKKPRQWLTSGGLGAMGFGLPAAMGAAVGRPGEIVVDIDGDGSFMMNVQELATIKVENLPVKIMLLNNQHLGMVVQWEDRFYKANRAHTYLGDPANEEEIFPNMLKFAEACGVPAARVTHRDELRAAIQKMLDTPGPYLLDVIVPHQEHVLPMIPSGGAFKDVIT

SEQ ID NO: 6550 - protein, 356 aa, Camellia sinensis
MSLLSDLINMNLSDSTEKIIAEYIWIGGTGLDLRSKARTLSGPVNDPKKLPKWNYDGSSTGQAPGEDSEVIIYPQAIFKDPFRKGNNILVMCDAYTPAGEPIPTNKRYNAEKIFSHTDVVAEEPWYGIEQEYTLLQKDVKWPIGWPKGGYPGPQGPYYCGAGADKAFGRDIVDSHYKACLYAGINISGINGEVMPGQWEFQVGPAVGISAGDELWVARYILERITEIAGVVVSFDPKPIEGDWNGAGAHTNYSTKSMRKDGGYQVIKKAIEKLGLKHKEHIAAYGEGNERRLTGRHETADINTFLWGVANRGASVRVGRDTEKAGKGYFEDRRPASNMDPYVVTSMIAATTILWKP

SEQ ID NO: 6551 - protein, 187 aa, Cucumis sativus
VAHGCTGKGNDQVRFELTFFALNPKLRVIAPWREWDITGREDAIEYAKRHNVPVPVTKKSIYSRDRNIWHLSHEGDVLEDPANEPKKDMYMLSVDPEDAPNQPEYVEIEIVSGLPVAVNGKKLSPASLLDELNDIGGKHGTGRVDMVENRLVGMKSRGVYETPGGTILFTAALELESLTLDRETIQV

SEQ ID NO: 6552 - protein, 196 aa, Brassica rapa
MARLLFRLLGESNSPSPVQDPSTAAVTSDLVVTLAALLCAMVCVLGLIAVSRCVWLRRLAAGNRTHAGSQGGSVQSPPPPVAAANKGLKKKVLQSLPKLTFSPDSPSSEKFTECAICLTEFSNGDELRVLPQCGHGFHVSCIDTWLGSHSSCPSCRQILVVARCHKCGGLPGSSSSEPEIEIRIKQGADVPNSYLP

SEQ ID NO: 6553 - protein, 206 aa, Listeria monocytogenes
GEIQINIEESIRGCHVYVIQSTSNPVNQNLMELLIMIDALKRASAATINIVMPYYGYARQDRKARSREPITAKLVANLIETAGATRMITLDMHAPQIQGFFDIPIDHLNAVRLLSDYFSERHLGDDLVVVSPDHGGVTRARKMADRLKAPIAIIDKRRPRPNVAEVMNIVGNVEGKVCIIIDDIIDTAGTITLAAKALREAGATKV

SEQ ID NO: 6554 - protein, 541 aa, Shewanella sp. ANA-3
MESQRNILLIGLLFVSFLLWQQWQADKAPKPVATESSVVANATTNHSADVPEADTSVPAALTATQNLITVKTDQLDVQINPVGGDIVFAALVSHKLEQGKDQPFVLLEQTKDFTYIAQSGLIGRDGIDSSAKGRAAFAANKTEFTLADGQDTLEVPLTYVADNGVTYTKVFVFHRGKFNVDIDYKINNTSAAPLQVQMYGQIKQTIKPSESSMMMPTYRGAAFSTQDVRYEKYKFEDMSKSNLNQPTLGGWAAMLQHYFVSAWIPPATDSNTIFSSVSAGGLANIGFRGAVYDIAPGATQEISSQFYVGPKDQKALSALSDTLNLVVDYGFLWWLAVPIHWLLMFYQSFVGNWGVAIILITLTVRGLLFPLTKAQYTSMAKMRNLQPKLQDLKERFGDDRQKMGQAMMELYKKEKVNPMGGCLPILLQMPIFIALYWVLLESFELRHAPFMLWIHDLSVQDPYYILPLLMGASMFVMQKMQPIAPTMDPMQVKMMQWMPMIFTVFFLWFPSGLVLYWLVGNIVAIIQQKIIYAGLEKKGLK

SEQ ID NO: 6555 - protein, 387 aa, Shewanella sp. ANA-3
MKQAVIVDCIRTPMGRSKAGVFRNVRAETLSAELMKGLLLRNPQLDPNTIEDVIWGCVQQTLEQGFNIARNASLLAGIPKTAGAVTVNRLCGSSMEAIHQAARAIMTGMGDTFIIGGVEHMGHVPMNHGVDFHPGLANNVAKASGMMGLTAEMLGKLHGITREQQDAFAVRSHQRAHAATVEGRFAKEIYGIEGHDANGALIKVLHDEVIRPETSMESLAALRPVFDPANGTVTAGTSSALSDGASAMLVMEESKARALGLPIRARIRSMAVAGCDAAIMGYGPVPATQKALARAGITVNDLDVIELNEAFAAQSLPCVKDLGLLDVVEDKINLNGGAIALGHPLGCSGARISTTLINLMEHKDATLGLATMCIGLGQGIATVFERV

SEQ ID NO: 6556 - protein, 557 aa, Shewanella sp. ANA-3
MEPGQMIRGADAVIKVLAAHGVTTVFGYPGGAIMPIYDALYGSPVEHLLSRHEQGAAFAAVGYARASGKTGVCFATSGPGATNLITSLADALLDSVPVVAITGQVSTAVIGTDAFQEIDVLGMSLSCTKHSFMVTDVNDLIPTLYQAFEIAASGRPGPVLVDIPKDIQIAQLEYRTPLLAVTNEPQASASEIDAARALLAEAKQPMLYVGGGVGMAGAVDQLREFIKATGMPSVATLKGLGSIAHGTPGYLGMLGMHGGKAANLAVQDCDLLVVAGARFDDRVTGRLATFANKAKVIHLDIDAAELGKLRQPDVAIAGDLRQIFPALAMALNITPWQAEVEHLARKHQWDYQHPGSLIYAPAMLRRLANKLPEDSVVCCDVGQHQMWVAQHMWFRRPEDHLSSAGLGTMGFGLPAAIGAQVARPDATVVTVSGDGSFMMNVQELTTIKRRKLPVKILLIDNQKLGMVKQWQQLFFEERYSETDLSDNPDFVQLASAFDIPGRTIFSSDEVEEALTEMLAAKGPYLLHVAIDDAFNVWPLVPPGASNSDMMDEMEKQT

SEQ ID NO: 6557 - protein, 325 aa, Shewanella sp. ANA-3
MVDQSQLRQWGCKVIDIEKSALDNLYQYVDSVEFAQACELILNCTGKVIVMGMGKSGHIGNKISATLASTGTPAFFVHPGEASHGDLGVLSDNDVILAISNSGESSEILALMPVIQRKAIPVIAMTGKPESTMARLSKIHLCIEVPEEACPLGLAPTSSTTATLVMGDAIAIALLQAKGFTREDFAMSHPGGALGRKLLLKVSNVMHSGDDLPLVKHDICITDALYEISKKGLGMTAVIDEQNKLVGIFTDGDLRRVIDAQVNLRTTPIADVMTRNCVTITENVLAAQALQVMDSKNINGLIVIDKEHHPVGALNMLDMVKAGVI

SEQ ID NO: 6558 - protein, 508 aa, Shewanella sp. ANA-3
MQIGIPRESLAGETRVAATPATVEQLKKLGFEVVVEANAGLLSSFDDAAFEAAGAKITAEVWQADLIFKVNAPTDAEIAQIKEGATLISFIWPAQNAELVEKLSKRNINVMAMDMVPRISRAQSLDALSSMANIGGYRAVVEAAHHFGRFFTGQITAAGKVPPAKVLVIGAGVAGLAAIGTAGSLGAIVRAFDTRLEVAEQIESMGGQFLKLDFTNEDGSSSDGYAKTMSDEFIAAEMALFAEQAKEVDIIITTALIPGRPAPKLITKAMVDSMKPGSVIVDMAAQAGGNCEYTQPSELFVTENGVKVIGFTDLPGRLPAQSSQLYGTNLVNLMKLMCKEKNGVASINFDDVVMRNMTVVKAGEVTFPPPAISVSAAPAKPAAKVEAKAAEAKKPSKLKYILAALGAAGFAAVASVAPAEFLSHFTVFVLSCVVGYYVVWNVSHSLHTPLMSVTNAISGIIVVGALLQIGQGSTLVTVLAFIAVLIASINIFGGFTVTQRMLKMFRKD

SEQ ID NO: 6559 - protein, 639 aa, Shewanella sp. ANA-3
MGKIIGIDLGTTNSCVAVLDGGKARVLENAEGDRTTPSIIAYTDDETIVGQPAKRQAVTNPNNTFFAIKRLIGRRFKDDEVQRDVNIMPFKIIAADNGDAWVESRGNKMAPPQVSAEILKKMKKTAEDFLGEEVTEAVITVPAYFNDSQRQATKDAGRIAGLEVKRIINEPTAAALAYGIDKKQGDNIVAVYDLGGGTFDISIIEIDSNDGDQTFEVLATNGDTHLGGEDFDNRLINYLADEFKKEQGLDLRKDPLAMQRLKEAAEKAKIELSSTNQTEVNLPYITADATGPKHLVVKITRAKLESLVEDLIIRTLEPLKVALADADLSVSDINEVILVGGQTRMPKVQEAVSNFFGKEPRKDVNPDEAVAVGAAIQAGVLSGDVKDVLLLDVTPLSLGIETMGSVMTKLIEKNTTIPTKAQQVFSTADDNQSAVTIHVLQGERKQASANKSLGQFNLDGIEPAPRGMPQIEVMFDIDADGILHVSATDKKTGKKQNITIKASSGLSEEEVAQMVRDAEAHAEEDKKFEELVQSRNQADGLVHATKKQVEEAGDALPADDKAKIEAAMSAVEVATKGNDKEAIEKATQELIEASAKLMEIAQAKAQTQGGAQEGAAKQSNATADDVVDAEFEEVKDDKK

SEQ ID NO: 6560 - protein, 657 aa, Shewanella sp. ANA-3
MRSSNLSDMAKNLILWVVIAVVLMSVFQGYSPSSSSSQKMDYSTFLDNVRDGQVASVEVKSDQRTIEGSKRTGEKFTTIMPLYDQDLINDLDRKGITMKGQEAEESGFLTQIFISWFPMLLLIGVWIFFMRQMQGGGGKGAMSFGKSKAKLMSEDQIKTTFADVAGCDEAKEEVKELVDYLRDPTKFQKLGGRIPTGVLMVGPPGTGKTLLAKAIAGESKVPFFTISGSDFVEMFVGVGASRVRDMFEQAKKSAPCIIFIDEIDAVGRQRGAGLGGGHDEREQTLNQMLVEMDGFEGNEGIIVIAATNRPDVLDSALLRPGRFDRQVVVGLPDVRGREQILKVHMRKVPLSEDVKASVIARGTPGFSGADLANLVNEAALFAARGNRRVVGMEEFERAKDKIMMGAERRSMVMSEAEKEMTAYHEAGHAIVGCLVPEHDPVHKVTIIPRGRALGVTFFLPEADAISQSRRKLESQISVAYGGRLAEELIYGSEKVSTGASQDIKYATSIARNMVTQWGFSEKLGPLLYAEEEGEVFLGRSMGKAKAMSDETATVIDAEVKAFIDKNYGRAKQILLDNIDILHSMKDALMKYETIDSLQIDDLMNRREVRQPADWQADDNGSNDKGNGKGEPAVKVDEVVKTAPVEAELKDADESPVK

SEQ ID NO: 6561 - protein, 446 aa, Shewanella sp. ANA-3
MSEAKLLLVEDDASLREALLDTLMLAQYDCIDVASGEEAIIVLKQHQFDLVISDVQMQGIGGLGLLNYLQQHHPKLPVLLMTAYATIGSAVSAIKLGAVDYLAKPFAPEVLLNQVSRYLPLKQNSDQPVVADEKSLALLSLAQRVAASDASVMILGPSGSGKEVLARYIHQHSSRADEAFVAINCAAIPENMLEATLFGYEKGAFTGAYQACPGKFEQAQGGTLLLDEISEMDLGLQAKLLRVLQEREVERLGGRKTIKLDVRVLATSNRDLKAVVAAGQFREDLYYRINVFPLTWPALNQRPADILPLARHLLTKHAKALSIIDVPEFDEAACRRLLGHRWPGNVRELDNVVQRALILRSGTVITANDIIIDAQDVPLSSDDAEYCSEPEGLGEELKAQEHVIILETLAQCQGSRKLVAEKLGISARTLRYKMARMRDMGIQLPN

SEQ ID NO: 6562 - protein, 407 aa, Shewanella sp. ANA-3
MHTTYTIGELESFLIAIFVLFIGHSINRHVRVFRQYNIPEPIVGGLVVAAVVAFLHFQDITLAFSLPMQNTLMLMFFSTIGLSANYKLLLSGGKKVFIFLGVASVYIVIQNAVGVSLASLLGLDPILGLIAGSITLSGGHGTGVAWSQTFAENYGINTLELAMAAATFGLVMGGIIGGPVAQRLIGKHNLVSSYGMGRKHHATHPQLVTYDQLEEDQVTAKTIIETLFVLLICVAGAKWFTVLVSEYQLNWLKMPDFVYALFLGVIIANITEVTRGYKPHTESIDVIGTVALSLFLSMALMNLKLWEILDLAIPLLIILLVQTAVLAVFAYFVTFKIMGSNYDAAVITGGHCGFGMGATPTAVMNMGALVSRTGPSPQAFMVVPIVGAFFIDIVNLIVLQGYLSFLM

SEQ ID NO: 6563 - protein, 717 aa, Shewanella sp. ANA-3
MSRNIMLIPIGTGVGLTSLSLGMVRALERHGVKVQFFKPISQLRPNDNGPERSTTILSKSPTVNPLEPFDMAHAEALIRADQTDVLMEQIIARAAECASNTETLIVEGLVPTRNHPFADDVNYAIAKAMDADVIFIATPGSDTPTGLMNRLEIAYNSWGGKNNKRLIGAVINKIGAPVDDEGRARPDLSEVFDHQGVQRSDASIMFQMPGKSPLRILGSVPYNLDLVAPRASDLAKHLRARILNAGEMNTRRLRKVTFCARSLPNMVNHIKTDSLLVTSGDRSDVIVSACLAAMNGVKIGALLLTGSYEPEPEILKLCEQAFETGLPVFLIDTNTWQTSLNIQRFDHEVPVDDAVRIDLVQEYVASHIDQSWIESVTKNSPREHRLSPPAFRYKLTELARAAHKTVVLPEGDEPRTIKAAAICAERGIARCVLLGKKDEIQRIAAQQDVVLGEGVVIVDPDEVRDRYVEPMLDLRRNKGLTEVVAKEQLEDNMVLGTMMLAQNEVDGIVSGAVNTTANTIRPPLQLIKTAPGSSLVSSIFFMLMPDQVLVYGDCAINPDPNAEQLADIAIQSAESAKAFGIEPRVAMISYSTGNSGTGSDVDKVREATRIAKEKRPDLVIDGPLQYDAAVMPNVARSKAPNSPVAGQATVFVFPDLNTGNTTYKAVQRSADLISIGPMLQGMRKPVNDLSRGALVDDIVYTIALTAIQASQNDASKA

SEQ ID NO: 6564 - protein, 399 aa, Shewanella sp. ANA-3
MSNKLVLVLNCGSSSLKFAVIDAQTGDDQISGLAECFGLEDSRIKWKINGEKHESSLGAFTAHREAVEFIVNKILAGQPELAAQIQAVGHRIVHGGEKFTRSVIIDEHVIKGIEECSSLAPLHNPAHLIGIRAAIASFPKLPQVAVFDTAFHQSMPERAYIYALPYKLYREHGIRRYGMHGTSHLFVSREAAKVLNKPLEETNVICAHLGNGASVTAVKGGKSVDTSMGLTPLEGLVMGTRCGDLDPSIIYHLVHQLGYTLEEVNNLMNKQSGLLGISELTNDCRGIEEGYADGHKGATLALEIFCYRLAKYIASYTVPLGRLDAVVFTGGIGENSDIIREKVLNMLQIFNFHVDSERNKAARFGKKGIITTDNSTVAMVIPTNEEWVIAEDSIKLITK

SEQ ID NO: 6565 - protein, 324 aa, Shewanella sp. ANA-3
MKDSHANAPQTSSTGHEPIQVSSHFSCYHQAEIYGKSKVVKAPWQSFGLAVFAGAFIALAFVFYLTVTTGAGDSAWGLVRLVGGIAFSLGLILVVICGGELFTSSVLSSVAWAQKQVTTSELLKCWSRVYIGNFVGAMLMVGLIMAAGLYELDGGNWGLNALKVSQHKLHHTWVQAFSLGILCNMLVCLGIWMTFASRESLTKAILLILPVAMFVSSGFEHSIANLFMVPLGITIQSVASPEFFASLGVTQEQFADLTVANFVFNNLIPVTLGNIVGGGVIVGLGYWWIEQGQIALPDPQKSHQPHFFASPLHTEKAKNSQESK

SEQ ID NO: 6566 - protein, 183 aa, Shewanella sp. ANA-3
MGTVNRAVFLDRDGVINKDHGYVHQVDDFEYIEGVFEACLALKQMGYKLVVVTNQSGIARGMYTEDQFHSLTEWMDWNFADKGVDLDGIYYCPHHNEKGLGEYKVDCDCRKPKPGMLLDAAKFLKIDLSQSVMVGDKADDMLAAKAAGVPTRILVRTGKAIADDSEASVVLDSIVDVPGFLKK

SEQ ID NO: 6567 - protein, 363 aa, Shewanella sp. ANA-3
MNPVFTPNVAQKILFIDRDGTLIEEPITDKQVDSLAKLVFEPQVIPALLRLQKAGFRLVMVSNQDGLGTPSFPQEDFDAPHNMMMQILSSQGVKFEDVLICPHFNDENCSCRKPKLGLVKDFLTQGTIDFTQSAVIGDRHTDVELGNAMGIKSFQYQRGSLGWDAIADALLNKGRTATVVRTTKETDIRVTVDLDNPSKGAINTGIGFFDHMLDQIATHGNFKMEVNVDGDLEIDDHHSVEDTALAIGDALRQALGDKRGIARFGFSLPMDEAKGECLLDLSGRPFIKFAAQFEREKVGEMATEMVPHFFRSFADGLRCTLHVAAEGDNDHHKVEALFKVLGRALRQAVKVEGDVLPSSKGVL

SEQ ID NO: 6568 - protein, 371 aa, Shewanella sp. ANA-3
MIIGVPKEIKNHEYRVGMVPSSVRELTIKGHEVFVETNAGTGIGFSDQDYVDAGAEILATAAEVFAKAEMIVKVKEPQAVERAMLRHDQILFTYLHLAPDLPQTEDLIKSGAVCIAYETVTDDRGGLPLLAPMSEVAGRMSIQAGAMALEKSSGGRGMLLGGVPGVEPAKVVIIGGGMVGTNAAQMAVGMGADVVVLDRSIDALRRLNVQFGSAVKAVYSTADAIERHVLEADLVIGGVLIPGAAAPKLVTRSMIARMKPGSAIVDVAIDQGGCVETSHATTHQDPTYIVDDVVHYCVANMPGAVARTSTFALNNATLPYILKLANLGYKAALLQDKHLLNGLNVMHGKLVCKEVAQALNLEYTAPASLLA

SEQ ID NO: 6569 - protein, 499 aa, Shewanella sp. ANA-3
MSLILELKQISKHYPGVKALEDVSLRLFAGEVHALLGENGAGKSTLVKVMTGAQSKDMGDILFLGEPQHFNTPMDAQKAGISTVYQEVNLVPNLTVAQNLFLGYEPRRLGLIHFKKMYADARAVLTQFKLDIDVSAPLSDYSIAVQQLIAIARGVAMSAKVLVLDEPTASLDAKEVQVLFGILNQLKAKGVAIVFITHFLDQVYQISDRITVLRNGQFIGEYLTAELPQPKLIEAMLGRSLQEQLVDKQEKERTVTRAEAVLLSLEDVSVKGSIQSMNLTVPKGQAVGLAGLLGSGRSEVCNAVFGLDLVDSGSIHLAGQKLNLSQPVDAISAGIALCPEDRKIDGIIGPLSIRENIILALQARIGWWRYLSNTRQQEIAQFFIDKLQIATPDADKPIEQLSGGNQQKVILARWLAIEPILLVLDEPTRGIDIGAHAEIVKLIRTLCDEGMSLLVASSELDELVAFSNKVVVLRDRYAVRELSGAELTSQHVMQAIAEG

SEQ ID NO: 6570 - protein, 404 aa, Shewanella sp. ANA-3
MRPIIKSNKLDTVCYDIRGPVHKEARRLEDEGHRILKLNIGNPAPFGFEAPEEIVRDVILNLPSAQGYCESKGLFSARKAIVQHYQAQGIKGVDIEDVYIGNGVSELIMMAMQGLLNTDDEVLLPSPDYPLWTAAANLAGGKAVHYRCDEEADWFPDLDDIKSKISSRTRGIVLINPNNPTGAVYSKELLLQVIELCREHNLILFADEIYDKILYDEAKHIPAASLSDDILTVTFNGLSKAYRAAGFRVGWMMLSGNLKAAKSYIEGLEMLSSMRLCANVPNQHAIQTALGGYQSINELILPSGRLTVQRDTCYELLNQIPGVSVKKPKGALYAFPKLDMKKFNLRDDERLVLDLLRDKKILLVHGSAFNWPEPDHLRVVFLPYKEDLTKALTEFGNFLETYKQ

SEQ ID NO: 6571 - protein, 585 aa, Shewanella sp. ANA-3
MKFPSLVSLMPGLAQMLQYEKQWLRDDVRAGLSVAAVALPVAIAYAQLTGVNAAVGLYSCVLPMLVYALFGTSRQLIVGPDAATCAVIAAVVTPLAAGDSMKHWQLVMTMTAMTGFWCLIASRFRLGVLADFLSKPILMGLLNGVAITIIVGQFSKIFGFTFDERYLIERLSGAPSYLTRTHWPTLLMGVVTLATYALVKRYRPQWPASMCAMAMAAFLVWAFNLTSLDINVVGEVSAGLPSFQAPVFDIGIARELVVPALNLAMVSFVSMMLTARSFAAKNGYDIDADKEFRALGIANIASALSQGFAVSGADSRTAVNDANGGKSQLVSIIAAVLIALVALFFTAPLKYIPSSALGVVLVIASISLIDLKALWNLRVRDRSAFLLACTTLFSVLFIGVIPGITLAVLLGLFQFLATVMRPTDQVLGLDQKGVIRSVDDSGKAKSVPGVFIYRFNSPLTYFNATYFKRRLLEKFIREPEPVDCIIIDAVPCFTHLDLSVMAMLADLHQLLKKRGIRLVLAGRKRQMLGWFEQAGMQSGEGGILIRPDLYLALKMNQSYKQALAEGQAPVIKKDPEDDVLLHSHL

SEQ ID NO: 6572 - protein, 572 aa, Shewanella sp. ANA-3
MEKLSGASMIVRSLIDEGVKHIFGYPGGSVLDIYDALHLIPGIEHILVRHEQAAVHMADGYARATGKVGVVLVTSGPGATNAITGIATAYMDSIPLVVLSGQVPSNLIGNDAFQECDMIGISRPVVKHSFLVQDPTQIPEIIKKAFYIASTGRPGPVVVDLPKDCLNPALLHDYIYPESIKMRSYNPTTSGHKGQIRRGLQALLAAKKPVLYVGGGAIISSCEKQILALAEKLNIPVVSTLMGLGAFPGTHKNSLGMLGMHGRYEANMTMHNCDLIFGIGVRFDDRTTNNIEKYCPNATILHIDIDPSSISKTVRVDIPIVGSADIVLDSMLALLEESKESNDSEAINQWWQEITVWRNRNCLAYDKESNRIKPQQVIETLYKLTNGEAYVASDVGQHQMFAALYYPFDKPRHWINSGGLGTMGFGLPAAMGVKMAMPDETVVCVTGDGSIQMNIQELSTALQYDTPVKIINLNNRFLGMVKQWQDMIYSGRHSHSYMDSVPNFAKIAEAYGHVGMTISDPAELESKMAEALAMKDRLVFIDIMVDETEHVYPMLIRGGAMNEMWLSKTEKC

SEQ ID NO: 6573 - protein, 195 aa, Shewanella sp. ANA-3
MDQAEFRLRFNLHPLATQDPAAIPHLGLRKAAVLIPLQEIQGELSLILTQRPMHLRAHPGQISFPGGKIEPSDSSAITAALREAEEEIGLCRENVEVIGTFPAHNTFTGFEITPVVGMIKQDFALRLDPGEVADCFTVPLSFFIEPQNRHRKQFLRQGRYYSVHFIPYQQRFIWGATAAIIDHLCRHLSLPEEML

SEQ ID NO: 6574 - protein, 554 aa, Shewanella sp. ANA-3
MCSIFSILDIQSDAKELRQVALEMSKLMRHRGPDWSGIYASDKAILAHERLAIVDIEHGAQPLLTEDGSLILAVNGEIYNHKELKAQLGDKYSYQTNSDCEVILALYQEYGTEFLDKLNGIFAFVLYDKAKDAYLIGRDHMGIIPLYTGRDAAGNFYVASEMKALMPVCKTVAEFQPGQYLYSSIGEPVQYYTRDWQSFDAVKDNGASQEELRDALEAAVKRQLMSDVPYGVLLSGGLDSSVISAITQTFAKRRIEDDDQSGAWWPQLHSFAVGLKGAPDLAAAKKVADAIGTIHHEINFTFQEGLDAIKEVIYHLETYDVTTIRAATPMYLMARKIKAMGIKMVLSGEGADELFGGYLYFHKAPNAQAFHEELVRKLDKLHLFDCLRANKAMAAWGLEARVPFLDKEFMDVAMRINPEAKMSKDGRIEKHILRQAFEHKLPKEVAWRQKEQFSDGVGYSWIDGLKAHAAEQVDDLQLANAKFRFPYNTPETKEAYFYRCFFEEHYPLPSAAETVPGGKSVACSTPEALAWDESLRGIIDPSGRAVRSVHAASY

SEQ ID NO: 6575 - protein, 291 aa, Shewanella sp. ANA-3
MAKVAFIGLGVMGYPMARHLLNKGHEVTVYNRTFAKAQTWVENYGGRCCPTPKEAAIGQDIVFTCVGNDNDLREVVLGNDGVVHGMAPGTVLVDHTTASADVARELHKVLAEKGVDFLDAPVSGGQAGAENGVLTVMVGGDQAVFERVKPVIEAFARCAERLGEVGAGQLTKMVNQICIAGVVQGLAEALQFARKAGLDGEKVVEVISKGAAQSWQMENRYKTMWGQSYDFGFAVDWMRKDLGIALEEARRNGSHLPLTALVDQFYSEVQAMGGNRWDTSSLLARFEKSTK

SEQ ID NO: 6576 - protein, 600 aa, Shewanella sp. ANA-3
MTASPKDEMWKVFKRLLGYLKPMKGMFLLSVVGLIVYGLVDAAFISFIGPFIDKGFSSAPAISNGIALPTSQGFHADNQVLLMAPIVVILMFSLRGFANFVSTYGISYMSARLIMDMRQQVFEHYLSLPVSYMDKENTGNLISKVTFDTEQIARASGSALISIVRDGVTVIGMLALMFYNSWKLSLCILVIGPIMGLVITIVSRRFRKVSKQIQTAMGDVSAATEQMIKGHKNVLAFGGQETETARFAKVNDRNRHQNMKLAVAQAISQPLIMVIGSFALAFVLYAASLDSMKADLTAGTFATILGAMMAMLQPIKNLTRVNAEFQRGIAACTTVFELLDTLPESDTGTYTVKRAKGNLRFDNVSFSYDGQERRALDNIDFEVTQGQTLALVGRSGSGKSTIASLVTRFYTGLESGDILLDDVSIYDYSLKSLRNQVALVSQQVTLFNDTIANNIAYAYPGEATREQIIQAATLAHAMEFIEQLPEGLDTQVGENGVLLSGGQRQRIAIARAMLRDAPVLILDEATSALDTESEKAIQQGLDNLRQNRTSVVIAHRLSTIESADQILVVDQGRIVERGTHKSLLELGGMYAKLYQMQFGS

SEQ ID NO: 6577 - protein, 556 aa, Shewanella sp. ANA-3
MSHVDTEVRPSNFIRNIIDEDLKSGKHTSVQTRFPPEPNGYLHIGHAKSICLNFGIARDYQGLCNLRFDDTNPEKEDIDYVNSIQADVRWLGFQWDGEVRYSSNYFDQLHQYAVELINKGLAYVCFLNADETREYRGTLKEPGKNSPYRDTSVEENLQLFEKMRKGEFKEGECALRAKIDMASPFMCMRDPVIYRIRFAHHHQTGDKWCIYPMYDFTHCISDALEHITHSLCTLEFQDNRRLYDWVLDNLDDFQAPNRTRQYEFSRLNLEYTLMSKRKLNDLVTRKLVSGWDDPRMPTIAGLRRRGYTPASIREFCQRIGITKQENMIEAAMLDACIREELNEHAPRAMAVLRPLKVVIENYPEGQIETIQAASHPSDESMGTRELAFGRELYIDVADFREEANKQYKRLVMGKEVRLRNAYVIKAERCDKDSEGNITTVYCSYDADTLGKNPADGRKVKGVIHWVEATTAKPAEFRLYQRLFTDPNPAAAETVDEVLNPNSLEVVNGLVEASLVNAPAEKAYQFEREGYFCADNKDSSAEHLVFNLTVALRDSFE

SEQ ID NO: 6578 - protein, 658 aa, Shewanella sp. ANA-3
MSIKSSINPPVFYSSVFFITLMVMICAIWPTEANHFFKSMQSWLEAKAGWLYILGVAIFLIFIIFVMVSRFGDIKLGPDHAVPDYSYKSWIAMLFSAGMGIGLMFFGVAEPVMHYLAPPDATPESLAAAKEAMKITFFHWGIHAWAIYGVVALSLAYFAYRHKLPLLPRSALYPLIGERIHGPIGHCVDTFAVLGTMFGVATSLGFGVLQVNSGLSYLFEQLPNNTTVQVSLIIGITLLATLSVFSGLDKGVKRLSELNLGLALILLLIVLILGPTVMLLQAFVQNTGSYLSDIVNKTFNLYAYQHKEDWLGGWTLLYWGWWISWSPFVGTFIARVSRGRTIREFLVGILFVPSALTFLWMTVFGNSAIDAIMNQGATYLSEAVNTNVPVALFVFFEHMPFPHLLSGIGICLVVTFFVTSSDSGSLVIDNLTSGGDNNAPVWQRVFWALLQGVVASVLLLAGGLQALQTAAIASAMPFLCVMLLMCLGLYKALKDDWLKINSVQLHTTSVQYAKTNISWEERIEVLVSHPTEDEARIFLNNVATPALSKVCQQFMSKGLTADLEYLDGKVRLVISNEAYQPFVYGVRMRCFEIVNPVGEELEQGNNWYYRAEVYLEQGGQHYDVMGYTEEQLLADVVTQYEKYLHYLHLSNADQGHVA

SEQ ID NO: 6579 - protein, 396 aa, Shewanella sp. ANA-3
MSTEQFNQEIVIVAAKRTPMGGFQGSLSGVMSPSLAATAIKALLADTQVAPDKVDEVLMGCVLPAGLGQAPARQATLGAGLPLSVGATTVNKVCGSGMKTVMLAHDLLKAGSAKLVVAGGMESMSQAPYLLDKARAGMRMGHGKVLDHMFLDGLEDAYTGGAMGTFAQKTADEYGLTREQMDAFALSSLEKANAAINSGAFKAEIVPVTVSDRRGDVTVDTDEQPGNARPEKIPALRPAFAKDGTITAANSSSISDGAAALMLTTRANAEQLGLTVLATIKGHTTHAQEPSLFTTAPVGAMAKLLSNVGWSKDEVDLFEINEAFAMVTMLAVSELGLDMAKVNVNGGACALGHPIGCSGARLLVTLIHALKARGLKRGVASLCIGGGEATAMAIEV

SEQ ID NO: 6580 - protein, 380 aa, Shewanella sp. ANA-3
MDTKTMNISTMQNIMPSPALSSAPASVVGFSQLVCVERWNETADVVSFRFQAGEPMKFDYKPGQFMTLVLEINGEQACRSYTLSSTPSRPYSLMLTIKRVDGGLVSNYLIDHLQPGQTVRVLPPTGQFNLFDIPAKKYLFLSAGCGITPMYSMSRYLTDSQMNADIAFVHSARTQADIIFKTSLETMATRHRDFKLRYIVEDVTADTAWHPEAVLHNVGRLRPDNLRDLVPDFAERTVFLCGPEPYMQAVKTILAELNFDMTQLYHESFATAVKEAQSRVKQAEMQTEAPESGSNSFMLSIGDKKRALTAEQTLLEGIEAEGLPIIAACRSGVCGACKCQVLEGETESTSSMTLTPSEIEAGYVLACSTKLKSDVTLSLT

SEQ ID NO: 6581 - protein, 1482 aa, Shewanella sp. ANA-3
MSLYHPSFERDNCGFGLIAQMDGEASHRIVRTAIHGLDRMKHRGGIASDGRTGDGCGLLMQLPLQFFEAIAAENDWHLSRKFAVGMLFLSQDEELADQAKFILERELERETLSIAGWRKVPVNPEVLGEIGKSSLPQIYQVLINAPIGWREKDLERRLYMARRRLEQQITDDKDFYVASLSGQVIVYKGLMMPADLPAFYPDLADIRLKSSICLFHQRFSTNTSPKWPLAQPFRYLAHNGEINTITGNRQWARARAYKFNSPLLPDLQQAAPFVNETGSDSSSLDNMLEMLLSGGMDLYRAMRLLIPPAWQSNPEMDDELKAFYDFNSMHMEPWDGPAGIVMTNGRHAACAVDRNGLRPSRYVITKDRILTLASEVGIWDYAADEVIEKGRVGPGELLVLDTLNGRLYQSFEIDNDLKRRHPYKEWMAKNSRTLVPAEQLATEQHGASELSPEQLLQYQKQFGYTREELEQVIWVLAKQGEEATGSMGDDTPMAVLSKKSRSLYDYFRQKFAQVTNPPIDPLREKHVMSLATCIGREQNLFNETTGHAYRVMFNSPILLFSDFNQLLGLDSTYYRANIVDLNYDPKEGLEHAIRRITSEAERLARSGTTLLILSDRAIDKSAQVIPAAMAVGAVQQMLVSKSLRCDTNIIVETASARDPHHFAVLLGFGATAIYPYLVYESISDLAKRHQLTDTTALMLNFRYGIEKGLRKIMSKMGISTVGSYRCSQQFEAIGIASDVIELCFKGVVSRIEGASFEDIAQDQALLHKAAYRAHVPLPQGGLLKYVDGGEYHCFNPDVVNTLQASLIDKNFATYKKFAELVDNRPVATLRDLIGIKADQAAIELDKVEAASQLFPRFDSAAMSIGALSPEAHEALAIAMNRLGGRSNSGEGGEDARRFNTERNSAIKQIASARFGVTAHYLVNADVLQIKVAQGAKPGEGGQLPGHKVSVEIAGLRHARPGVTLISPPPHHDIYSIEDLAQLIFDLKQINTKALISVKLVSEPGVGTIATGVAKAYADMITISGYDGGTGASPITSVKYAGSPWELGLAEVHQSLVENGLRHKIRLQVDGGLKTGTDVIKAALLGAESFGFGTVPMIALGCKYLRICHLNNCATGVATQDKKLRDNHYHGLPERVMTYFEFVAEEVREWMATLGVSKFEDLVGRSEWLHTLEGQTDKQRGLDLAPILYQPKVRASTSRTWQETNPPADLGLLNQHLLNECQSAVDKGECFDAAYSINNTDRSVGARLSGYIATTLGVKGTKAPIKLSFNGSAGQSFGVWNSPGLELKLCGDANDYVGKGMSGGKIVIYPPLGSPFQSERSAIVGNTCLYGATGGRFFAAGQAGERFAVRNSGAIAVVEGLGDNGCEYMTSGIVVVLGKTGVNFGAGMTGGFAYIFDQFGRFNRRVNNELVDTQKLESPIHQQHLKGLIEEHVAETGSEHAKMILSDFANWLDCFVLVKPKNIAVADLLKLEQSSPELAVKAG

SEQ ID NO: 6582 - protein, 397 aa, Shewanella sp. ANA-3
MLDSRTIQVIKSTIPLLESAGPVLTQHFYERMFKHNPELKDVFNLAHQHSGGQPVALFNAVAAYAKNIDNLGALGSAVERIAHKHTGFLIQPEQYAIVGSHLLATLKELGGKAVTEEVLTAWADAYGFLANIFINREAQIYQESAQQDGGWSGVREFIISEKKAESLEIASFVLTPVDGKAVKDFIPGQYLSIKAQHPKLAFDEIRQYSLSDAPNGQSYRITVKRELNGQVSNLLHDVLQVGDTLSVMPPAGDFTLAVQAETPVVLISAGVGQTPMKSMLNQLLKLRHPSTVTWLHACEHGGVHGFKSAIKNKLGQHANLASHVWYREPTKADMLGQDYDFEGTMNLTSVADKIVANAHYYFCGPIGFMASIKQQLLAFGVPSEQMHYEVFGPHAEL

SEQ ID NO: 6583 - protein, 317 aa, Shewanella sp. ANA-3
MKIVVLDGETLNPGDLTWQAVSALGEFSCFARTPSAEIIPRAQHAEIVLTNKTPLDANTLAQLPKLKYIGVLATGTNVVDLAAAKELGIVVTNVPAYGPDAVAQMVFAHILHHTQAVAAHHQAVAAGQWSNCSDFCFTLMPLQSLKGKTLGLIGYGDIGQQVAKLALAFGMKVLVNTRTQPRDLPQGVSWTSRDTVFKESDILSLHCPLTPETTELINAQTLELMKPQALLINTARGGLIDEAALATALRQGKVFAGVDVLSTEPPSADNPLLTAPNISISPHNAWATKEARQNLLNIATANLSAYLAGERVNWVNP

SEQ ID NO: 6584 - protein, 618 aa, Shewanella sp. ANA-3
MNKQVTETTESSTLPPRSLSESTMSHNAANSSIRQRAVLPWIWQFLKPYRLRVVAAIVFLLIGSLAWLSLGQGVRLMVDEGFIKDNAQRLNEIILLVLLITAVSGTAVFCRFYLMTWLGERVSADIRLTVYNQLLKLSPAFYAKVRTGEVISRFTADSTLLQTVVGSSLSMALRSGVTVIGGLAMMGITSVKMTLLVLLAVPLVLGPVGFFGRKVRTLARESQDRVADLGAYVDETLHEIHTVQAYGHEDKDRSLFNGRVEDVMIAASGRIRYRAMLISSVMFLSIAAIASVTWVGAHDVMSGKMTGGELSAFMFYAVMVAGAVATISEVVGEIQRASGAAERLIELAETEVDIPAPLEPKTLPAKVRGELQLQQLNFHYPEQTQLVLRDLELTITAGERVALVGPSGAGKSTLFQLLQRFYVPSSGSIHLDGIDIAELSPKDLRAQFALVPQDSVIFATSVLENVRYGRVDASEQEVIDACIAARAHEFISEFSEGYQTYLGERGVRLSGGQKQRIAIARVILADRPILLLDEATSALDALSEQKVKLALDELMKGKTTLIIAHRLATVINADRIIVFDKGRIVASGKHQTLIQTNALYREFASLQLLTDEVSALSE

SEQ ID NO: 6585 - protein, 405 aa, Shewanella sp. ANA-3
MEMAIGIGMFTLVVCLLVIVILIAKKKLVTTGEITIGINDDAEKSIKVAAGDKLLGALASKNIFIPSACGGGGTCGQCRVKVKSGGGDILPTEQGHITKKEAKEGCRLACQVAVKTDMELELEEEIFGVKKWQCEVISNDNKATFIKELLLKLPEGEDVHFKAGGYIQIEAPAHVVKYADFDIPAKYRDDWEKYGLFDLVSTVNEDVLRAYSMANYPDEKGRIMLNVRIATPPSANVPPGKMSSYIFNLKAGDKVTISGPFGEFFVKDTDAEMVFIGGGAGMAPMRSHIFDQLKSKKTKRKMSFWYGARSTREVFYQQDFDALAAENDNFVWHVALSEPLPEDNWTGYTGFIHNVIYENYLKHHKAPEDCEYYMCGPPIMNSSVIRMLESLGVEPENILLDDFGD

SEQ ID NO: 6586 - protein, 416 aa, Shewanella sp. ANA-3
MEELTKLGVTVSELRFALDTFYFLISGALVMWMAAGFAMLEAGLVRSKNTTEILTKNVVLYAIACVMYLLIGYNIMYVDNAEGGWLPSLGTLIGSQADDANHALESDFFFQVVFVATAMSIVSGAVAERMKLWAFLFFSVVMTGIIYPVEGYWTWGKGFISSLGFVDFAGSGIVHMTGAAAAIAGVLLLGARKGKYGPNGQVNPIPGSNLPMATLGMFILWMGWFGFNGGSQLMVSDAANASSVAKVFVNTNTAAAFGAISALVVCKMIWGKADLTMILNGILAGLVAITADPLSPSLLMAGVIGVVAGGLVVFSIVGLDRIKIDDPVGAISVHGVAGFLGLMCVPLSNADATITAQLTGAAIIFAWVFSASFAVWFVLKMTMGIRVTEEEEYNGMDASDCGIDAYPEFVTVKSAG

SEQ ID NO: 6587 - protein, 619 aa, Shewanella sp. ANA-3
MSSSERTFRELGLSENLLRALDELGYENPTPIQSASIDPLMAGKDILGQAQTGTGKTGAFALPLLNKVTSQAVPQILVLAPTRELAVQVAEAFSSYAKFMKGFHVLPIYGGQSMHQQLNALKRGPQVIVGTPGRVMDHMRRGTLKLETLQALVLDEADEMLKMGFIDDIEWILEHTPEQRQLALFSATMPEQIKRVANKHLKDATNISIAASHTTVDSIEQRFVQVSQHNKLEALVRVLEVENTEGIIIFVRTRNSCVELAEKLEARGYASSPLHGDMNQQARERAVEQLKSGKLDILIATDVAARGLDVERIGHVVNYDIPYDTEAYVHRIGRTGRAGRTGMAILFVTSREMRMLRTIERATNSRISPMKVPSPETVAERRLSRLGEQLAQTMTQDLDFMREAVAQLCQQLEVDTDLLAAALLHQVQQERPLQLPAIQERTRDERSERGAERGERGERRSRESRPMPASLGSAEALKDNPDLKMCRYVIDVGRDNGVGVGNIVGAIANEANIDSRYIGAIQLYDAVTTVDLPDGMPKEVLQHLKKVRVCGKPLNIREAGDQVFVDSGRGARSDRRPRGDRPMGERKPRSASGDKPFADRKPRSDKPAGERRPRKPREE

SEQ ID NO: 6588 - protein, 797 aa, Shewanella sp. ANA-3
MARCHLHKFGGSSLADADCYRRVAHILLTHGHSDDLVVVSAAGKTTNFLYKLLSLRDSNQLWQEELQVLISYQQGLIEQLLSNEQARDLRERLTTDKAQLISLLSLDSRNDYQISHVVSFGERWSARLMAALLRESGVAASHVDACSILVADEAAVPQIRVQESRTKVQTLLAAHPNERLVITGFICANERGDTLLLGRNGSDFSASLIASLADIERVTIWTDVEGVFNADPNKINDAKLLKSMSLAEADRLARLGSPVLHSRTLQPLFNTEVSLAVRSSYASHTDFTLIAPHSSSASAPVVTNLNAVVLFGFKIAGDVASLLEQLVEAGLTPLAHWLSAHQRLELAYTAENQKQVQKLLDAQAEALGIKDLQINTELGLVALVSADAEHYRRSFARLLSRDAKPLFSGDLSLVTLVPQSQVNLLTQKVHRRCAGPRKRIGVLLLGVGNIGEAWVKLFKSVSPSLNQELEARVELVGLVSSSKALIKSTAVDLENWQQEFDAEATPWQYEHLFEQLEQLNCDELIALDISASASLTLQYPEFFERGIHMVSANKLAGSGPLPFYRELKEQLGYRRLFWRYNASCGAGLPIQHALNDLRNSGDSVEAVGGIFSGTLCWLFEKYDTSKPFSELVIEARGLGITEPDPRDDLSGRDMQRKLLILAREIGLEIELEDIELRSLVPAHLADIPLEQFLARIGELDDELQQQYGAAAEQNKVLRYVASLDNSGATLKAEVGLQWIDANHPYANLTPGDNVFVIRSAFYQGNPLIIRGPGAGREVTAAAVQSDLTQICRDLLQE

SEQ ID NO: 6589 - protein, 443 aa, Shewanella sp. ANA-3
MSQQNPGLKQSLSLWQVVVMGLAYLTPMAVFDTFGIVSEITSGHVATSYLLALAGILFTAFSYGHLVRKYPYAGSAYTYAQKTFSPNVGFMVGWSSLLDYMFMPMINMLLAKIYLTAMFPNVEPWIFIFGLVAVMTVLNLRGIDLVANFNGVIVFAQIAIILVFIGLMAHSLSLGEGEGVIASVRPFYSEEISLAPLFTGATILCFSFLGFDGLSSLSEETKDAKRVIPRAIVLTALIGGVIFVSVSYFLQLFFPDISRFQQLDAVLPEIALYVGGNLFQSVVLVATTIAVLASGMAAHAGVARILYVMGRDNMLPNKGFGYIHPKWRTPAFNVILVGLLALSAVSFDLEMALALVNFGALVAFTFVNLSVIVQFYIKEKRNQSLKDHFQYFVLPLCGAATIGVLWINLEPQSLELGLIWAAVGILYLALRSLRLRKAVELQN

SEQ ID NO: 6590 - protein, 279 aa, Shewanella sp. ANA-3
MIKKHRAFLKWAGGKFKLVDELANYLPTGERLVEPFVGAGSVFLNTDYPSYLLCDINQDLINLYNIVKERPAEYIAAAKKLFVDEMNQKDAYYRVRTDFNKSRDPFLRSVYFLYLNRHGFNGLCRYNRKGGFNVPFGSYKKPYFPEKEILAFSKKAQRAEFKCIGYEKAFEQIRTGDVIYCDPPYAPLSTTASFTTYVGAGFSLDDQALLARYSRHMALEQRIPVVISNHDIPLTRELYRGAHLAKIQVQRNISQNGSGRNKVDELIALYDENYDPQDD

SEQ ID NO: 6591 - protein, 241 aa, Shewanella sp. ANA-3
MGQETSKILVVDDDMRLRALLERYLMEQGYQVRSAANAEQMDRLLERENFHLIVLDLMLPGEDGLSICRRLRQQGSTIPIVMLTAKGDEVDRIIGLELGADDYLPKPFNPRELLARIKAVMRRQIQDVPGAPAQQEAEISFGEFSLDLATREMYHGNEAIALTSGEFAVLKVLVTHPREPLSRDKLMNLARGRDYSALERSIDVQVSRLRRLIEKDPANPRYIQTVWGLGYVFVPDGAARR

SEQ ID NO: 6592 - protein, 373 aa, Magnetococcus sp. MC-1
MIVGVVKEIRNQENRVALTPDGVETLIQHGHAVWVEQQAGLGSGFADHHYTERGAQLCPTAAQVWQSAQLMLKVKEPQIQEYPLLQPEQMLFTYFHFAASQSLTQAVIDAKCVAIAYETVENRAGHLPLLTPMSEVAGRMAIQESAKYLERAQGGRGILLGGVPGVAPATVVVIGAGVVGTEAARMAAGLGAHVKVLDINLERLRAIADMLPANVTTLAATPGTIREALQTADVVVGAVLLKGARAPKLISRALLKQMQPGAVIVDTAIDQGGIFETSRATTHENPVFIEEGIIHYCVTNMPGAVPITATRALTNATLPYVVKLADMGWQAACRDDAGLAMGLNIVQGQVVCQAVAQTFNLPHTPRATQLGVA

SEQ ID NO: 6593 - protein, 861 aa, Magnetococcus sp. MC-1
MKQEQLTSKSAEALNSAVGLAAERNHQFVEPEHLLLAMLEQKDGVIPALLIKMNTPLPALQQATSVAVENLPRVHGGGAAQTLPSRRLQSLWQDAEREAATLRDDYTSTEHFLLAMTEHKEGALPSLLRPFTITRTRVLEALKTVRSGQRVTSKEPEGTFQALEKYARDLTALAKSGKLDPVIGRDEEIRRTIQVLSRRTKNNPVLIGEPGVGKTAIVEGLALRMERGDVPESLKGVRVVALDMGALVAGAKYRGEFEERLKAVIKEVQEAQGKIILFIDEMHTIVGAGQSEGAMDAGNLLKPALARGDLHCVGATTLDEYRKHVEKDPALERRFQPVQVREPSVEATISILRGIKDKYELHHGVRITDAAIVAAATLAHRYISDRFLPDKAIDLVDEAAARIRMEITSKPQVLDSLDRQILQLQIEQSALSKEKDSASRERLTKLEAELADLKENAHAMTIRWEQERLNIKQVGILKETLESTRLQLEQAERSGNLEKAGELRYGTLPKLEQELQKAQELAAQSRENPLLKELVDEEEIATVVARWTGIPVARMLEGEKDKLLKMEERLGHQVVGQERALQAIARAVRRARAGLQDNNRPIGSFFFLGPTGVGKTELSKALAQFLFNDESAMVRLDMSEYMEKHTVARLIGAPPGYVGYEEGGQLTEQVRRRPYSVVLLDEVEKAHPDLFNTLLQVLDEGRLTDGHGRTVDFRNTVLIMTSNIGSHLMAEGGPTAQVEHRVMELLKQTFRPEFLNRLDEIIPFHALQREHMGAIVDIQLKRLHKLLDKLNIRLELEPAARAALAEEGYDPIYGARPLKRVMQRLVQDPLAEAMLSGHLHEGDRVVIHFDGEQFVINPVHR

SEQ ID NO: 6594 - protein, 598 aa, Magnetococcus sp. MC-1
MCGICGVMYFQPQTPQPAMLEKMVEKLHQRGPDGGGIEIDGQLGLGHRRLKVIDLSENGHQPMQDDALGLTIVFNGCIYNYQALRQSLLELGYSFFSTSDTEVILKAYHAWGWQCVQRFNGMFAFAIYERQSGRVVLARDRLGIKPLYIHQDKSHLRFASSIPSLLAGGGITTTLDPIALHHFLSFHSVVPAPRTLLQQVQKLPPATVRIVEKNGSETNHTYWNLQMGPQAGDAERTEAEWQQLLDQALRAAVSRRLVADVPVGLLLSGGLDSSLMAGLLVESGQLSRGGLSTFSIGFEQAGGEEGDEFQYSDIVAAHFGTDHHKIFIETNNLPELLRETVRAMSEPMVSHDAVGFYLLSREVAKHVKVVQSGQGADEVFAGYHWYPKVDAGQDAFQDYRKAFFDRSHEECCEMVHRDIAAAWQQDYSSAFVESWFAHPHSGTAAVDKALHLDQNIMLVDDPVKRVDNMTMAWGLEARVPFLDHELVELAARIPGHLKLQQGGKGILKEVARPIIPHAVIDRAKGYFPVPALKHMDGPVLKLAKEVLTSPRATQRGLIQPSYINRLLDHPTQHITPLHGSKLWQLTLLELWLQTHDIH

SEQ ID NO: 6595 - protein, 109 aa, Magnetococcus sp. MC-1
MSDIQATIQEHVNSHAVVLYMKGNPSFPQCGFSGAAAKMLAACDLSNDDFLAVDVLMNPDIREGIKAFANWPTIPQLYIKGQFVGGADIMREMYQSGDLKTQLDAALGR

SEQ ID NO: 6596 - protein, 673 aa, Magnetococcus sp. MC-1
MNGFFKNLSLWLVIGLLMVMLFNLFNSPQGPGQSITFSDFSEMVAQGKVTAVTLEGRTVRGLSTDGSPFSSRVPDNYDLTKDLLAHGVDIDVREPEGTPMLMQILISWFPMLLLIAVWIYFMRQMQSGGGRGAMSFGKSKAKLMSDKAAKVTFQDVAGIEEAKEELQEVVQFLKDPHKFQRLGGKIPKGVLLVGPPGTGKTLLARAIAGEANVPFFNLSGSDFVEMFVGVGAARVRDMFEQGKKNAPCIIFIDEIDAVGRHRGAGLGGGHDEREQTLNQLLVEMDGFESTEGVIMVAATNRPDVLDPALLRPGRFDRQVTVPNPDILGRTQILKVHMNKVPLSDSVDAEVIARATPGFSGADLANLVNEAALIAAQLDKRVVEMEDFENAKDKVMMGKPRRSAVISEKERKTTAYHEAGHAVVAMALDGADPVHKVTIIPRGRALGLTMQLPLEDRYTYSKVQLEQNIAILMGGRLAEELVLNQLTTGAGNDIQRATDLARKMICSYGMSDTLGPLTYGENEQEIFLGREITQHKSVSEETARRIDAEVFDIVDRNYKRAKQILTDKMEVLHTMAQALLERETIDADEVIKLMAGEPAETALKPLKKKDERANKPTPTVADDGEQGDQTAKDAVAGSVTQAEDDVEGSTRTATEASTQEVVSKDTPEGDDKDR

SEQ ID NO: 6597 - protein, 232 aa, Magnetococcus sp. MC-1
MNHHPLKDADLDQTRKSHLFTPLSEPAWLPLAAQLSRRTLASGEILFQQGDPFEAFFLVLRGGIKLYRLSADGAEKVIEVIMPGQTFGEAVMFAQGNRYPVTAEALEATVLVAVPSSAYMAMLQRYPEASVGLLKDMSQRLHHLVMEVDRVTLQRARERLLSYLGQQVACGNGSSCTLKMPRKVLASRLSMQPETLSRLFRGLKDQGIIAEQGQIITVLDPHAVQEGYLDEL

SEQ ID NO: 6598 - protein, 424 aa, Magnetococcus sp. MC-1
MQKVIKHAAMDALKVGLLGLLLFGPMTGMLLDGYGIHYAPSRAFWLVGLLLLGRFMVVVVMNSPALSGVADLFKRKDRVEVVVSPMGQQHHKILVVLTLMVAMALPFLLSKYWLNVAILALIYILLGLGLNIVVGLAGLLDLGFVAFYAVGAYSYALGAEYLGLSFWQAIPFAALLAASFGAVLGFPVLRMHGDYLAIVTLGFGEIIRLVLNNWISLTGGPNGLRTPLPTLFGMEFTKRATQGGTPYHEVLGQWMEIDYSRAARYVFIYVTLLVVVTLLVYMVQRLKRMPIGRAWEALREDEIACRSLGINHVMVKLSAFSMGAMVGGVGGVFFAASQGFVNPASFTFFESALILAIVVLGGLGSVVGVIVAAVVLTVLPELLRDFTEYRVLIFGCAMVVMMVWRPRGLLRIHRPEFVVEKRVP

SEQ ID NO: 6599 - protein, 653 aa, Magnetococcus sp. MC-1
MGKVVGIDLGTTNSCVSIMEGGEPKVIENSEGVRTTPSMVAFTNQGERLVGQAAKRQAVTNPTNTLYAIKRLIGRRFSDPLTAKDQGLVPYKIVKADNGDAWVEADGKKMSPSECSAMILQKMKQTAEDYLGESVSEAVITVPAYFNDAQRQATKDAGRIAGLEVLRIINEPTAAALAYGLDKKDGQTIAVFDLGGGTFDISILEIGDGVFEVKSTNGDTFLGGEDFDMAIIDYLADQFKKENSIDLRKDSMALQRLKEAAEKAKIELSSSNQTDINLPFITADASGPKHLNLSLTRAKLESLVDELVQRTLAPCRTALKDAGMTAADIDEVILVGGMTRMPKVQAVVGQFFGKEPHKGVNPDEVVAIGAAIQGGVLKGEVQDVLLLDVTPLSLGIETLGGVFTKLIEKNTTVPTRKSQVFSTAADNQSAVTIRVAQGEREMFSDNKTLGQFDLVGIAPAPRGMPQIEVTFDIDANGMVHVSAKDKGTGKEQSIHIEASGGLTSEEIDRMVHEAESHAEEDAKKRALIEARNNADSLVYSSEKSLKEHSDKLDDALKNQITAAIEDLKAVMPKEDPEAISSKTQALMELSMKMGEQIYKENPEAAGMDPEAAAHAAGMHGGAATGGGDGANKHGKGAEDVVEAEFEEVNDDKK

SEQ ID NO: 6600 - protein, 609 aa, Magnetococcus sp. MC-1
MCGILAEVGQQSPAAARQRALDRLRHRGPDHGGQWSAQQPVPVWLGHRRLAIVDTSSAGNQPLHLHAADLHLVGNGEIYNAPALQKTLEALGHVFHSHSDNEAILHAYREWGSDCLAHLEGMFAFVLWDARQQTLLAARDRMGIKPLFYAATPAGGLVLASEASALVGLDGVAQQGYEPQALSHVLAYGHIPDPYAIWRGVNKLSPGQFLRWTPQQGLRLHTYWSPPSQSDAPSDDQAWGQRFEQVLQEHLLSDVPLSLFLSGGLDSTSVAVGVKRLGHQLKAFSLGFPGHPRDESALAQATAERLGHPFEAVVMDGRDLLQQVDAALLQQDEPHLFGSYLTMLNICSAVAKEYKVVLSGDGGDELFAGYNWYRDIPTALPTLAPWKAALAKPLLRHSPLPAALLERARLAFACCSPLHRHAWRTSQRFLPAEVEALLRPAAIRYDDEAFLAPLQRWFTPELPLVRALQRIDLMSFCSNHVCAKVDRASMAHALEVRVPYLDRRLVEWAISRPADPREAQGSKPLIRDYIAPHVPAQVLEQRKQGFSLRTTPPANLESTFVAWIEQSPLISQSILRRDWPRFLRADDRLRAQKLWHLALLARWMHHHPA

SEQ ID NO: 6601 - protein, 630 aa, Magnetococcus sp. MC-1
MCGLSAILDLTGQRLPEAEQLTAMTRALAHRGPDGEGMHREPGVGLGHRRLSIIDLAGGAQPLWNEDRSVAVVFNGEIYNFPDLMQRLQGLGHQFHSRSDTEVIVHAWEQWGEQCVEALQGMFAFALWDRCQGVLFVARDRLGIKPLYYGFSEDGWLLVGSELKALTAHPGLSRSLDPKGVMDYFAYGYIPDPHSIYRQVKKLEPGYCARFTLGSGDWRLRCYWDLSFAAQPLTEAAALQQLQELLGQTVQSHTLADVPLGAFLSGGVDSSLITALLAKQSQTPLQALTVAFTGSREDEAPHARAVAQHLGVQQQLLTVDPLDFERLERLPGLYDEPFADSSAWPTFLLCEAAASRMKVVLSGDGGDELCAGYSRYRLFMAEQQVRQRVPSWLRRGLFGPMGMLYPKLDNAPRWLRAKSTLQALGEGPLEGLFRGASMMDPAMGQGLLAPDLMLLDYHPIEHFYRLNARLPEQVAFHDRMLYLDFKTFLAGRVLTKVDRASMAVGLEVRVPLLDHRLVEWAGRLPWCLKMQGGQGKYLLKKLAAQQVPATAVYRSKQGFIPPLAAWLRGPLQERLQDRLSSRVITESGLFHPRWIHWMLEQHRKKKQDLSMPLWSLLMFEGMLRKAQNKG

SEQ ID NO: 6602 - protein, 401 aa, Magnetococcus sp. MC-1
MGILSNRVAKVKPSATLAVTAKAKELKAAGRDVIGLGSGEPDFDTPDHIKQAAIDALNAGYTKYVAVAGTPELRQAIADKYKRETGLDYSAEQTVVTVGGKQAFFNLAQATLNSGDEVIIPAPYWVSYPDMTLLADGTPVIVDTQESHGFKITPAELEAAITPRTKFVVLNSPSNPTGNAYSIAELHALAEVLRKHPHVWVISDDIYEKIIYDGFEFATMVKVAPDLQDRTVILNGVAKAYSMTGWRIGYAVGPLDVIKAMTKIQGQSTSNATSFAMKGALEAITGPQDCVEPMVKAFKERRDYVVARLNAMPGISCLTPEGAFYVYPNVAGLVGKKAPDGSDLKDSVDLASYMLEAEGVAVVPGVAFGLDPYLRLSYATSMEDLIKAMDRIEKIAQQLAG

SEQ ID NO: 6603 - protein, 315 aa, Magnetococcus sp. MC-1
MSLHQKMRIFSGTANPELAERISDYLGTTLGEVTVRRFSDGEIFVQIDENVRGRDVFIIQPTSAPTNANLMELLIMVDALRRASAGHITAVIPYYGYARQDRKEAGRTPITAKLVADLLHAAGVQRTLTLDLHAGQIQGFFNMPVDNLYASPVLLEAIRAKGLDNVVVVSPDVGGVVRARGYAKRLNVDLAIIDKRRPAPNQAEIHHIIGEIAGKNCLIVDDMVDTAGTMCAAANALLEQGANSVYAACTHGVLSGPAIERIEKSAISHFMITDTIRLSERGLACEKIEVYTVANLLGEAIRRISDAESVSSLFV

SEQ ID NO: 6604 - protein, 564 aa, Magnetococcus sp. MC-1
MRLTGAEIIVQCLLEQGVKTVFGYPGGAVLNIYDEIYKCKDLQHVLGRHEQGLLHAADGYARVTGEVGVALVTSGPGATNAVTGLATAYMDSIPMVCITGQVPVALIGNDAFQEADTVGITRSCTKHNYLVKDVKDLARVLREAFYIARTGRPGPVLVDIPKDITIAATEYSPAKGEVSIRSYKPSISGHTGQIRKAAGLMAKAKRPLFYTGGGVILSNAAEELTQLVRKLGAPITNTLMGLGGFPCTDKQFVGMLGMHGTYEANMAVSRCDLLVAIGARFDDRVTGKISQFAPEAKIIHLDVDPTSISKNVEVDVPIVGDIKTVLGKMLAMMEDGKYQSELPDLGDWWAEIEQWRRKECLKFTQGDEVIEAQYVIQKLYELTKGNAIVATDVGQHQMWAAQFYGFEKPRRWLTSGGLGTMGYGLPAAIGAQMAFPHETVVLITGESSIQMNIQELATLKQYNLPVKIAILNNSFLGMVRQWQELFYERRYSESDMTVHPDFVQLAQAYGATGMMTARPAEVSGIIEKALAIDGPVLMDFRVNREANVYPMVPAGAALNEMILL

SEQ ID NO: 6605 - protein, 303 aa, Magnetococcus sp. MC-1
MTDTFRSGFVAIVGRPNMGKSTFLNRVMGQKLAIVSPKPQTTRTRVLGALNRDNCQIVFLDTPGIHKAGKNLLNRAMVQTAMQSCQEVDAVLYFVDAQRGVTEGDLEIVQRLPRGEAPIYLIINKVDQIPQESLLPLLAKAGESGLPFDEVIPISALEGSNVDYLVGLLDAKMVEGPRYFPEGMVTDQPERFIAGEIVREKLFLNLQQELPYALAVQVEHYEERESGALEFHALIIVHRDSHKAMVIGKQGAMLKKIGSAARYELERLLGCKVILKCWVKVKKDWMDNRQLLQEFGYPDDLRE

SEQ ID NO: 6606 - protein, 418 aa, Magnetococcus sp. MC-1
MKRVDVALIVLKFGGTSVGSIERIRNVARMAMAEQQAGNQVVVAVSAMSGETNRLVGLVEDLTQFYNKREYDVVVSAGEQISIGLLATAIESMGQKAKSYLGWQVRFITDGSHSKARIKEVEAFRIQADLDAGAIVIVAGFQGVDSHNNITTLGRGGSDTSAVALAAALKADRCDIYTDVDGVYTTDPRIVTKARKMDRISYDEMLELASLGAKVLQTRSVELAKKYSVPVRVLSSLEPGSGTMLTKEEDTMESVVVSGLAYDKNEAKITILGVPDKPGVAANLLGRLGDANINIDMIVQNVSPAGDATDMTFTVPKADFPQAMKVMEDAVKDVGARQLQGNSDIAKISAVGVGMRSHSGIAQKMFKALADEGINILMISTSEIKISVVIEEKYTELAVRALHDAFELEKDPSDRINA

SEQ ID NO: 6607 - protein, 412 aa, Magnetococcus sp. MC-1
MQISQTVQNAHQALSIFINQMIYDLKHLGEDVTVLSLGESFFEMEMDDFSQLDLEKINHYSDSQGIPALRKKLAHYYQSRYRVTVNPDQELIISVGAKSLIYMAMLATLEPGDDVLIWEPAWLSYPEQAKLVHAKPRFIPYDLPVEQLDTLFTDKTRMVVLCNPNNPSGRVYNRAELQRIHTTCAQAGAWLLVDEVYSDFVLDEPFVSLGELVPDFNHLIIINSLSKNLGISGWRIGYAIGPEPLIAALLRINQHVITCTGTPLLHYCNHYFDKLVNRALPQVEAVMHRRKRIKGMLQELGLDEMAGSATFYHFVHLGDYPGNAFAFAAQLLLDHHISVVPGYAYGENVDRFIRISIGWESEERIWLALQSIKNVITGPAPDPRQLRQRLLALPSVLSNVGFKEVVDEGLQR

SEQ ID NO: 6608 - protein, 393 aa, Magnetococcus sp. MC-1
MEDVVIVAAGRTAIGKFLGSLSGQEATVLGSAVIKGVLARAGVAAELVDEVILGQVLTAGVGQNPARQAALGAGLSIETPAMTINKVCGSGLKAVALAAQAIKCGDAQVILAGGQENMSASTHVLPNSRHGQSMGDWKAVDTMIKDGLWDAFNDYHMGNTAENIAEQYGFSREAQDAFAAASQQKTEAAQKDNRFAEEIIPISIPQRKKEPIIFDTDEFPRHGTTAESLAGLRPAFKKDGTVTAGNASGINDGAAAVLVMSASKAKALGLSPMAKVVAYASAGVDPKVMGTGPIPAVSKCLEKAGWKVSDLDLIEANEAFAAQAMSVNKDLGFDLSKVNVNGGAIALGHPIGASGARVLVTLLHEMKRRGAQKGLATLCIGGGMGVALAVESL

SEQ ID NO: 6609 - protein, 71 aa, Magnetococcus sp. MC-1
MADRITGTVKWFNNDKGFGFIAPDNGSKDVFAHFSEISSGSGFKSLEEGQKVEFSVEPGDKGPKAVKITSL

SEQ ID NO: 6610 - protein, 288 aa, Magnetococcus sp. MC-1
MRPQKSNQTLINMHPKPFIKWAGGKQALAQKLIDYFPEKFNVYYEPFLGGGSVFFYIRPKSALLSDYNEWLVNTFQAIQKNWVTVYQNLVEIENTKETFLHVRSIDPFSVDLFTRAAYFIYLNKTCFRGLFRVNKKGGFNVPYGSYQRRYADPDNLHAVANSIQGVDIQAVDFEMALGNTKKGDFVYLDPPYYKFGGYSDFNRYTDQQFNEGDHYRLASVCYELSRKGVYWAQSNSNTPFIRSLYAEDSIIEIPARREINLNSGARNITELLITNYEVANKMQISLSE

SEQ ID NO: 6611 - protein, 527 aa, Magnetococcus sp. MC-1
MAKVLIADKMSPMAEEVFRARGLEVDVKVGMSPDELLACIDQYDGIAIRSATRLPAQAIAAASRLKVIGRAGIGVDNVDTPAASQKGIIVMNTPFGNAITTAELGVTLAMAAARHIPAATASTKAGKWEKSRFMGRELAGKTAGVIGLGNVGRLVAQRLAGLDMKVVAYDPFINKDRAISLGLEMVDKLEDLWPRVDLLTVHTPLNDHTRNLVDAKVVAQMKEGVILVNCARGGIYNEDALYDGLVSGKIYAAGLDVYVQEPAYSHKLFELDNVVATPHLGGSTKEAQTRVAIQIAEQISDYLVSGVVKNALNIPSVTEAELPTLRPYLALVEKLGTTLGQIVETGVLKLEVIYQGEVARIKRAPITTALLKSFLSPMMDGVVNMVNANLVAEQRGIQVVESSTSGTGSFTSLVRVVVTTERRSRCVTGTLFNGTEPRLISMDEIPIEAQPEGLLLFVANDDTPGLIGRVGTLLGEAGVNISSFHLGREQAGGRAIAFINVDSEVPAPLMQQLHETANVREVKLIRY

SEQ ID NO: 6612 - protein, 183 aa, Magnetococcus sp. MC-1
MHTICLDRDGVINDDTDLYYVLQPDQLKLLPGAAQAIAALNQAQIKVVVITNQRCVGRGLLTEPLLQQIHQRLEQRLAQQGAHIDAIFYCPHDKQENCTCRKPKPGMLLQAQAQFGFDPAQTWMVGDSVTDMQAAEAAGQPCALVGTGHGQASQQQRPDLPAYADLAAFVDAYLHRRPSRPIG

SEQ ID NO: 6613 - protein, 1135 aa, Magnetococcus sp. MC-1
MSQSPLQTSSSQSRDGMCGICPAGCWVRVHYAGETMVAVEPRPDHPLGMICRIGRKSPNIVYDPQRLQTPLKRVGPKGSYAFEPISWDEAMATIASRLQQTKAQHGAEATAIYTGRGSFDMAMCDLFQPADVAVSSASSVLFPFGSPNTLGVGALCYVSFAMIAPHVTFGEMLISLETDLPQSELIVLWGANPATDSPPMAHGQILAAKQRGAEVLVIDPRRSESCVEADAQWYPIRPGTDGALALGMIHVLIEEELYDENFVKNWTLGFEELAQYVQHFHPDVVAEITGVPAEQVRNIARKIANAAGACPVMYTGLEYSDSGVQAIRAVFTLWALAGQLDVPGGLLIRMKENQFPQNRTHLIKNPGADKALGRDRFPVYSAYRGESHAIALPQSVLQGTPYKVRDLIVLGGSLITSWPDPELWKRTLNALEFLVVIDRYHTADSAYADIVLPATTLYECRSFMRYGPMFAIREKLVPPVGEARNDFLILAELAQRLGYGHLYPQTEAAILERALEGSGFTLEQVQAAGGVVQLESQMMQYKKWEKGRLREDGKPGFATPSGKFEIASSLLVEHGYDALPVYTEPQEGPLARPDLARHFPLVLNTGARTYYDFRSQHHGVKGLAEQQPDPRVTMNHEDAAQRGIQNGDWVWVSSPRGEVKYRARVTDAIVKGSVDANMGGGGPVGPAPWQACNVNALTDPEHYDPISGFPIYKTLLCQIRKAADADAQFMEIEEPDRGPTLADTPGVQQVIYLDHNATTPMDETVIAAMRPYLESAFGNPSSIHGLGVKARHGVEAARRQVAQLLGSTARRIIFTGGGSEADNLALRGVVARYPGQSCHIITSAVEHPAILACCAALARQGHRITYLPVDAQGVVNQDAYVDALTPQTTLVSIMAANNETGTLQPIQAMAAQARAMGVLFHSDGVQALGKIPLNVDDLGVDLLSLSAHKIHGPKGVGALYLRKGVEIEPLIAGGSQEWGLRAGTENVAGIVGFGKACERADHALRHGEAQRLAQLRDRLEDGLLALVPGAKRNGPPHNRLPNTLNLTLPGIRGESLVLVMERQGVYFSSGSACKSGNPDPSHALLAMGISPADAHCSVRFSLGSGTTLAQLERLLALFKETLADTMGSIRFVSCR

SEQ ID NO: 6614 - protein, 1116 aa, Magnetococcus sp. MC-1
MAEEDTTESKNQLEEISSILFEAVLDAELIKKLKEKNNANILIDELKNEFGGPRLLWRPIYWWILVPGFEKGGKALQSSLKGFNNRMLKHLISYLYSHKEKIKGSLKQKLSDLTESNAQLVDEDPKADLEEFKQFLGDAFKDLSSAVEKALAQGQSPLPLSLKIPVIAGDELTIYWELRARTSPFRLHGRESNLDSLDAFLCERAIFSWWVIKGGGGLGKTRLVLDFIKDRALGWHAGFLDSLAFDWAGWCPTMPTLIVVDYASTHGQDLFKTFLLILAGMQNWSSPLDFPVRVLLIERSFPDDLKNLKIDPLWQDMGSQSDFDFLTQSFHSKQAMSLELLPLKESCWVIQDVSHRADVPVFVTERLEEDEQLRRPLFLTLIGQALRKGNGPTNEAENINLDIDDLIESSLASWERCPWLKKNFNDGLYASILVLWMTITRSENYSKAVGHLFKHEIFNENVDMEASKAIAANLVGASSRGNFSLPPLEPDILGEFFSLLFLEHVRSRNMMLANKLREALLDLADLDQNEQEINQVVSFFTRLAQDTFRPIINKRSQTLLDIIDWLFGETVSQKNGSSRLDFKKYIVENCFLVACIQGCEAIVEKFISLFNHESASEAITKGLNVAIFSGRDDILKYLLEEGADATLAGAKGYAPLHIAAALNKLACAEALLGSGKVELDARGSHSSTALHLAVMQGHVEMVKLLLAVGADATLADEIGNTPLHVAAFKNELACAEALLGSGKVDVDARAEHILTALNMAVMQGHVEMVKLLLAVGADATLADEAGQAPLNVAAGNNELACAAALLIYGKVNVDARAEHSGTALNMAVIQGHVEMVKLLLAVGADATLADEIGNTPLHNAAINNELACAEALLGSGKGDVDARAEHILTALNMAVIQGHVEMVKLLLAVGADATLADEFGNTPLHNAAINNELACAEALLGSGKGDVDARAEHILTALNMAVIQGHVEMVKLLLEKGADATLADEDGNTPLHVAAIKNELVCAEALLASGKVDVDARGNHSRTALNMAVRKGHVEMVKLLLEKGADPNSEIFSGSCLHLAIFRGHEEVVSALLCDPRTDIHKRDEDNMTPLTLSQQSGNQKIAQLLLDASRGMAGA

SEQ ID NO: 6615 - protein, 626 aa, Magnetococcus sp. MC-1
MSAPQAATTQSEAEPQTVFTSKRMKLLKYLPKPELPKWLRTTTRASLRQDLFAGLTGAVVVLPQGVAFAAIAGLPPQYGLYTAMVPAVIAALFGSSHHLISGPTTAISIVVFATLAPLAEPGSAPYIAMALTLAFLAGLIQFGLGVSKLGGLINFVSHSAVVGFTSGAALLIATSQMKHLFGVHLSDSSTFISTWESLADQLPHINPYVLSVGLVTLVVSVAIKKIRPQWPDMLLAMIVGSLFAAGLGVEAHHITLVGAIPSHLPPLSHPQWDLQIVRELASGALAIALLGLIEAVSIARSVALRSGQTLDGNQEFVGQGLSNVVGSFFSAYPASGSFTRSGVNYRAGAKTPMSAIFASLALMLIVLLVAPLAAHLPIAAMAGIILKVAYNLIDFQHIHKIFTATRGGLAVMLVTFLATLLLELEFAIYIGVMLSLLFYLNRTSHPRVVSRVPNPHSPWRMFVTDPDLPECPQLKILRIDGSLYYGSVPHVESKLKDLLEQKAHQKNLLVIGSGINFTDLSGAELLLRESVRRREQGGHLFLYDIKEQVRGMFKRSGCIQTIREDHLFQSKTEAISTIVSHYLDGAICEKCPAQVFMECPYASKPKNDADGTSEPQPVKAVPLSDP

SEQ ID NO: 6616 - protein, 439 aa, Magnetococcus sp. MC-1
MSDFASLNLVKPLLNALTQAGYTTPTPIQAQAIPHLLAGRDLLGIAQTGTGKTAAFALPILNKLSQIKGRPAPNAPRALILTPTRELASQIGNSIAVYGKHVPTTHTVVFGGVGKQPQIRALSRGVDILVATPGRLLDLMGERHVRLDQIQVFVLDEADRMLDMGFIHDIRRIIKVIPAKRHTLLFSATMPKDIAELAEGLLTNPAKVEVTPESTTVERITQKVLFVDKQNKRSLLKNVLEHESIEQVLVFTRTKHGANRVAEYLDKHRIASAAIHGNKSQSAREKALDGFRKGKLKVLVATDIAARGIDVAGISHVINFDLPNESESYVHRIGRTARAGRDGNAISFCDAEERGYLLDIEKTIRQTVPVDIDHEFHCEVVANAAPIKPSRKRSSGHGAGGGNPHGGGHRRGNPSTASKPRQHSGRRTPSSKGRSGSVA

SEQ ID NO: 6617 - protein, 581 aa, Magnetococcus sp. MC-1
MTTTKRAFSAQIEPTFSELFTPKLFTTLREGYSLADLRADALAGLTVAIVALPLSMAIAIASGASPAQGLYTAIVGGFLVSALGGSRFQIGGPAGAFIVLVAATVQAHGMDGLILATLLSGLILAILGFFRLGTYIKFIPYPVTVGFTAGIAAIIFASQIKELLGLTLTTSEPGPLLEKLPVLWTSLPSYDSATVTLAVATIGSILILKHYRPHWPGMLLAVVAASLVTLLLDLPIATIGSKFGGIPSSLPTPVLPEFTLAKLQDVLPSALSFALLGSIESLLSAVVADGMTGRRHRSNCELVAQGVANMASALFGGICVTGTIARTATNVRAGAHGPFAGMLHALFLLAFILIAAPLARYIPLASLAGVLAVVAWNMVEKHAFATLIWASRGDAAVLLTTFLLTLFRDLTEAIVVGFALGSVLFIHRMSKTTAIETQTPFVAEDRADNIGNRAPYDQARINDPDVVIYRISGVFFFGAAASIGSVLDRIADTHRALIIDFSSVPFLDSTAANTIEGLAHKAKRRNVKVCLIGTTHELRRDLFALGIKPPMVHYARELSCALRVLKAKKTEPTEVVSTPLD

SEQ ID NO: 6618 - protein, 70 aa, Magnetococcus sp. MC-1
MSQRETGTVKWFNDDKGFGFVARDNDKGDVFVHHSAISGTGFKSLKEGQRVEFAVVDGRKGPACEDVVAI

SEQ ID NO: 6619 - protein, 1264 aa, Magnetococcus sp. MC-1
MLDKSLLDLLWVTLCIGLVLLMQAGFLCLESGLTRSKNSINVAMKNLVDFSVSVTAFLALGYPLMFGTSMEGWLGWGTPFSIGSEEPLQMVFFLFQAMFCSTSVTIVSGAVAERLGFRAYLFLAAGMALLIYPIVGHWAWNGLDRGLSLGWLGQAGFVDWAGSTVVHAVGGWFSLALLLVIGPRTGRFNPDGSVNPITASNLPLTTLGALILWFGWIGFNGGSTLSLDARIGPVVLATCLGAVGGSMGALLWSWWREGRPSVLSAINGTLAGLVAVTAGAHALSPLAALGAGLLAAPVALLMENWMLRHGIDDAVGAVPVHLGAGVWGTLAVALLGDLHKLGTGLSRLEQLWAQLQGVLAAALVAFVIPWLVLRVINRRFPMRVTPEQEWQGLNISEHGTQTELSSFLGVLRAQAEGGDLSLRAEVDPFSEVGLIADRYNHVMDAMEAAVAKTRAVFQTAGDAILIIDPHSGQITAHNPMAEAVFGRSSAAFAHLTLSDLVVGVTPQRFWLGLHEEGEGRLPDGHTFPLELAITRASHGDGEMLIGTFRDIRARKQAELAIKASEARFRTLFASAALGMALIDAKQRVVDANPALMQMLELSHHRDALPPLAQLAHPQDQQEVAARLDAVIEGRSPQENCEVRCLCEARHLTIWTRMVISPIVLESNLTPMVVVIVEDVTQRRRSEEALRLAATVYESTNESVVIFNGEGRVEQVNQAFCRLSGYTAREVRGLELRHLLSARYEKSQFDEMAQALALTGHWSGEVMGQRKQGALASERLSLSLVRRPDGSTQNTIAVFTDLTEQKAQEELIWRQANFDPLTSLPNRRLFQDRLHQALAQADRSAGRVALFFLDLDRFKPINDTMGHQAGDELLQKCAERINAAVRSSDTVARLGGDEFTVILPNIQNGQDLSRIAEGIIKTLTEPFYLKAGEANISTSVGVAVYPDDSQDDEGLMRAADAALYQAKDHGRNNVQFFTESLNQQILERIALEKGLRRGLGAGELFLVYQPQVEVSSGRLSGAEALVRWRLPTGEVVMPDRFIPMAEESGLIVQVGEVVVSLAVQQIRAWLDAGFEPPRISINASPKQFHLDGGGLTSILMSTCDAYQISPSRLAVEIVESGLMANPERSGEILAGLAKLGVEVELDDFGTGYSSLARLSRLQIQALKLDRRFLVGIPEDPQNRILVTAMVQMARGMGIEVIAEGVEDLRQMGFLQDLGCHRAQGFGIARPMEPEAFVVFCQTPKLEHPPYGNCIVGWAAPEPVRT

SEQ ID NO: 6620 - protein, 520 aa, Magnetococcus sp. MC-1
MKIGIPKEIHPGERRVAASPDSIERLRKLGYDVQVETGAGTEATFLDDAYREAGAEIVADAKTLWASSDLILKVRAPEAHTALGTHEVDMMRQGSHLMSFIWPGQNEDLMQRFQARKVTVHAMDAVPRISRAQKLDALSSMANIAGYRAVIEAANNFGRFFTGQITAAGKVPPAKVMVIGAGVAGLAAIGAAVSLGAIVRAFDTRPEVKDQVKSMGAEFLELDFEEDGTGEGGYAKVMSEEFIKAEMALFAQQAMEVDIIITTALIPGRPAPKLITEGMVESMREGSVIVDLAAETGGNCVLTVPHEKVVKHGVTIIGYADLPSRMSTQSSQLYATNLRHLITDMTPEKDGQLVVDMDDDVVRGCTIVKDGEITWPPPPPKVAAQAAPKQSKNVEPVVVDHAAVARARNRSRLTTFGVAALALIGVGYGAPADFLQHFIVFVLSCFVGYMVIWNVSPALHTPLMSVTNAISGIIVIGAVLQLSGSSLAVTLLSSIAVLIATINIAGGFLVTQRMLKMFQK

SEQ ID NO: 6621 - protein, 608 aa, Magnetococcus sp. MC-1
MQSSRASFLTLLFPFLSWMKEMNRSTINADLQAGLIGAIVTLPQAVAFAAIAGLPPQYGLYTCMVPAIIAALFGSSKHLVSGPTTAASIVIFAGLSSFATPESEQYVALAITLTFMVGIIQLAMGFARLGALVNFISHSVVVGFTAGAALLIASHQLKHFLGIHLEHGGHFFDLLKEIFSRLDETNLYVLVVGLSTLVVSILTKKFFPRVPYMIVAILFGSVLAYFFNSNIENAKIILAGDVPGNFPIFAMPQLSLDTLKQLAPLALATTLFALTEAVSIGRSLAIKSGQHVHSNQEFIGQGLSNLVGSFFSAYVATGSFNRSGLNYQIGAKTQLSAIVGGLVLLATIPLTAPLASFMPKAVMAAILFLVAWGLIDFHHIRNIFQTSHSDSVVLVTTFGGTLFLELEFAILLGVLLSLVIFLFKTSQPRVLERVPDPRLPKRRFNTDPNLPTCPQMKIIRIDGELFFGAVSHIQETFIRLRTESPEQKHLMLVASGINFLDVAGAELLAQEAHTRRKMGGGLYLLRIKPGVCEPISKGPYLDEISAMNIFESKGEAIHEVYQLLDKDICSQCSSHIFLECGGKPSKHSTDSLNSLDDLYREKPVTNPQ

SEQ ID NO: 6622 - protein, 583 aa, Magnetococcus sp. MC-1
MVQDTQLIRRLLRLIWPFRWYVITALLCMGVMAATNGAIAFMVKPLVDDVFMQKDASLVTLIPIVVMGIFIVRAVVFFLQSYLMQSLGFKIVRLLQVRLYKKILHLDMERFNTESTGSFISRMIFDIDQLKRVVSTALADITRELLTVTFLFGVVVYRAAELAWVSVVGVPLAVYLIYLFGRKMRTISRRQQELMEDVTSHLEETIAGVKVVKAYCMEGYEHGVFRRISQRVLKNNLRSAFINAISKPSIDLVAGIAISLVVLTSAHAILDGKTTPGTLFSFLTALMMAYSPLKRITMLYNGLQAGLAAAQRVFERLDQYPAIQNVPEAGKLQPLTKALRFENIGFRYQSSEGPVLRGINLHIGVGEKVALVGQSGCGKSTLANLVPRFYEPQQGAILFDGVDIRSVTMRSLRQQIAMVTQENVLFNDTIRNNVAYGKLRASDEEIWAALEAANAKSFVEQLPEGLDAMIGNKGAKLSGGQRQRIAIARALLKSASVLILDEATSALDSESEQLVQEALDRLMDRYTTLVIAHRLSTIRNADRIVVMHEGAVAEMGTHDSLLAQGGLYAKLCEIQFDTQTAKE

SEQ ID NO: 6623 - protein, 288 aa, Magnetococcus sp. MC-1
MGPVTDGKGLCAATLADGHITRLFHRKQLCLATNRSLLSITQRVLQAVATVANSILARLQPDHDRMHVVHDTTPDHSATLRAGTMPLPDRLSSRDIATALQQNHPPMDWSWEDPQRTTAAVLVTLTRHQGAWSTLLIQRPNTLTHHPGQIGLPGGKKEPADSTPLATALRECHEELGLSADILHPLGAMQPYDTRTSGFRVIPLFARLQQPFTLNPCAREVDEVLTVPLRPLWLQQQQGLPTHFQGGYHYLWQGRIIWGVTAVILYRFLERLQEQTSCASSSSCLAQS

SEQ ID NO: 6624 - protein, 71 aa, Magnetococcus sp. MC-1
MADRITGTVKWFNNDKGFGFIAPDNGSKDVFAHFSEISSGSGFKSLEEGQKVEFNVEPGDKGPKAVKITSL

SEQ ID NO: 6625 - protein, 69 aa, Magnetococcus sp. MC-1
MSKREVGTVKFFNEQKGYGFISREDGSDVFVHFSAIQGSGFRTLTQGQKVEFDTVQGKKGLQAENVTGV

SEQ ID NO: 6626 - protein, 317 aa, Magnetococcus sp. MC-1
MISPPRLPFLPISIFATVMGLAGLSIAWTKAEPLLKLATLSPLLMGLTGTLFVVLLLLYVVKVVRHPEAVRAELHHPIKLSFFPTISISLLLLSIVTLHLMPHLSKGLWLLGAGLHLGLTLYVLSAWLNHDHFEIKHMNPSWFIPVVGNIVIPLAGVEHGYLEPSWFFFSIGLLFWLVLMVIVFYRLFFHPPLPDKLMPTLFILIAPPAVGFLAYLKLTGELDAFARILYYAGLFLTLMLFTQIRRFTRLKFFLSWWAYSFPLAAITVATLVMQQRLNTLFYLWLSMLLMGILCLVILGLAVRTGLAVYRREICVEE

SEQ ID NO: 6627 - protein, 403 aa, Magnetococcus sp. MC-1
MSMPIYMDYQATTPMDPRVFEAMTPWFVEKFGNPASRSHPYGWEADTAVENARQQVASSIGADPREIIFTSGATESDNLAIAGVAKFYKDKGNHIITPVTEHKAVLDTCRYLEQEGFEVTYLPVQKDGLVNMAELEAAITDKTVLVSIMAVNNEIGVIQPLAQIGALCRRKKVFFHCDAAQGVGKMPIDVNEMNIDLMSISGHKIYGPKGIGALYVRRRPRVRVNAIIHGGGHERGMRSGTLSTPLIVGLGEACRLATEEMVVEEARVLRLREKLRTALESQMTHVQTNGSLEHRIAGNLNISFEYVEGESMMMAIKDVAVSSGSACTSASLEPSYVLRSLGLNDEMAHTSIRFGLGRFTTEEEVDAVIKIVTGAVDKLREMSPLWEMVQEGIDLSSIKWAEH

SEQ ID NO: 6628 - protein, 383 aa, Magnetococcus sp. MC-1
MSIYLDHNATTPTRPEVVEAMLPYFSDKAGNPSSVHSAGRAAREGLDRARRQVAHLLGVHFSQVLFTSGGTEANNLALFGMAAQFGFAGHMVTTTVEHPAVGRVVDALEARGMRVTRLQPDQQGRIGTEALQAALQEETRLVSIMAANNETGVLLPVVEMAALCRARGVLLHSDAVQWVGKMPLDLAATPISLVSLSAHKFGGPKGVGALVVDSAIAPHAQLLGGGQERGRRSGTENLTGIVGLGRAAELAMAEMTEQAQRWRTLRQDMEQQLVTALPELVIYGAQAPRLPNTTMLGLPGMDGETLVMQLDLAGVAVSSGSACSSGRTEPSHVLKAMGVDTETARGAIRVSLGAESQQSDINQLVQALISSVKRLKDMAGMRV

SEQ ID NO: 6629 - protein, 70 aa, Magnetococcus sp. MC-1
MAERETGTVKWFNDTKGFGFIERDGGKGDAFVHHSAINATGFKSLAEGQKVEFTVVAGQKGAACENVVAI

SEQ ID NO: 6630 - protein, 653 aa, Magnetococcus sp. MC-1
MCGISGFYQPAASEQELAHNITRMTATLQRRGPDDGGFWLEPSCGLALGHRRLAIQDLSPLGHQPMADASGRYQIVFNGEIYNFLELKQNLERHYGPQPWRGHSDTEVLLALIGHSGLEAALAQCRGMFALALWDRQQRILTLARDRLGEKPLYYGRQGDSLLFASELKALRAHPHWQGGVDRHALTLFMRHSTVPAPYTIHPGIHKLQAGCYQRFQWHPEQGMQDLGMIHYWSMSQVVAHANAHPFDGDETAALQAVEQQLMAIIGRQMVADVPLGAFLSGGIDSSLITAMMQAQSSRPVQSFTIGFAEASHDESAYAQAIARHLGTQHTTLQVTPQDALALVPSLPLIYDEPFSDASQLPTTLLAGLTRQHVTVALSGDGGDELFGGYDRYGESMALWRLRGRVPSPLRRPLARAGRALPSGVWSALLRPVAACLPAKARDNPGDIVHKMMDLLVQPDFAHLYRHMLSHWSDPGNLVVGGHEPPTNLTRGWTQPWRQDPVAQMMYWDTLLYLPDDILVKVDRAAMWSSLECRIPLLDHRLVELVWSMPMHFKRRDGVPKWLLQRLLGKRVPEALFERPKMGFGVPLERWLRGPLKGWAQDLLAPALLQRQGYLNPEPIARIWRQHQQGSHNWHHLLWDLLMWQAWLAEHEG

SEQ ID NO: 6631 - protein, 394 aa, Magnetococcus sp. MC-1
MMAMQWAKKIAQIQPFYVMEMLAKAKALEAQGRHIVRMEAGEPDFTTPAPVLAAARLALDEDRTRYTPSLGIPELRAAIAQWYQTRYGVAVSPQRVVVTPGTSGAFQLIFGLLLDAGDRVALSDPGYPCYPNMVRFVNGEPVAIPVSPQSHYQLSAELLVEQLAPQHARGLKAAIVTSPSNPTGTLIPDAQMQTLLSAVEGQGGYVISDELYHGITYGCKARTALEFSENAIVINGFSKYFGMTGWRLGWMIVPPSAVRGIEMLSQNLFISAPTIAQYAALQAFDCAGAMDEQVARYDLNRRYLLTALPKLGFGIGVEPKGAFYIYADATQVLSKTGLANGEALCMAALEQAGCAFTPGLDFGRYRSHEHVRFCYAAELAQLKIAMERLAAWLG

SEQ ID NO: 6632 - protein, 326 aa, Magnetococcus sp. MC-1
MESDHNRDMLARARQTLELEAEAILAMRERLNGDFVQAVQQILACTGRVVVTGMGKSGIIGHKIAATLSSTGTPALYLHPGEGIHGDLGMLTAQDCVIALSNSGETAEVLALLPVIKRLGTPLIAILGRMASTLARQSDVALDASVAREACPLNLAPTSSTTAALALGDALAVALLEARGFSEDQFALFHPGGALGRKLLLKVEDLMHHGAALPQVARHTLVKDALWEMTAKRLGLTAVLEEDGRLAGIITDGDLRRQLEDHPGDLLNLRAEQIMTVNPKAIQPDALAAQAVHDMETRAITALLVVDAQQLVGVIHLHDLLRAGVV

SEQ ID NO: 6633 - protein, 387 aa, Magnetococcus sp. MC-1
MKFLDEAKIYLKSGDGGGGCISFRREKYIPFGGPDGGDGGRGGDVIFQADGHLNTLIDFRYKQHFKAKRGTHGMGSQCTGASAEALIIKVPVGTIIRDDADGTILVDMVEDGQQFLACKGGDGGRGNMHFKSSTNQAPRRADPGFPGEEMWVRLEMKLLADVGLVGMPNAGKSTLISKVSAAKPKIADYPFTTLQPNLGVVRVEMDHSFVMADIPGLIKGAHEGHGLGMFFLKHIERCAVLLHLVEIDSLEDDDPVSRFQTIEAELAGYSEQLAQKPRILVLSKADLLGEEDRQVVLSWFKERLGEAMPPVFILSSATGEGIEALVYHVGGMVKQWRLKQGKVGHALEDAPTRAGSKALRDEHAPSWQDDDDDDDDDDGVEVIWVRE

SEQ ID NO: 6634 - protein, 101 aa, Magnetococcus sp. MC-1
MYAVIRTGGKQYKVSQGDVLRVETVAGDAGGEVIFDDVLMVGGDEGLKVGEATEGAKVTGTIIRQMRDKKVIVFKKKRRKNYIRTQGHRQNLTVVRISGIS

SEQ ID NO: 6635 - protein, 292 aa, Magnetococcus sp. MC-1
MQKIGFIGLGIMGSAMANSCHHAGYQLCVYNRGHARLKPFIDRSIPTAATPQALATQSDYMVIMVSDPAALLEVLQGPVGVCSADLTGKVVINASTVSVEASQQAATLVEQVGGAFLDAPVSGSKIPAQTGKLVFLAGGHHAVIQRCEPLLLSMGSAVIPCGAVGDGTRMKLAMNLLMSGMVQALAESLLLVRNSGLEDQLFMDAIKNSVLFAPILGMKGQAFLNRDFEPHFPLHLLYKDLNLIHAQALEHHVALPAGDAIRQGYAQAMQQGLGGLDIAAILQVLEKGIDTP

SEQ ID NO: 6636 - protein, 296 aa, Magnetococcus sp. MC-1
MPNIPYPSFGETPPATLEEARVVILPLPYEGTVSYGTGTSQGPRAILEASKQLEVWDELHGREILPELPTHTLQPPSLENLNPEQVVQRIYATTLPHLQAGRMVVGLGGEHSVTEGVIKAYQTIHGNDFTVVQIDAHADLRNSYHDTPHSHACIMRRVWDMGLNAVQLGIRSISREEIRHVRYNGLNERIFWARDIVRWHRQNNTQWLDRMGALLKPKVFLTIDLDGFDPSVVPGTGTPEPGGLDWYMVGEIIDRITAQCEIIGFDITELAPIPNQQASEFLAARLVQRILGYIKP

SEQ ID NO: 6637 - protein, 407 aa, Magnetococcus sp. MC-1
MSNGIDKVVLAYSGGLDTSIILKWLQDEYQCEVVAFCADLGQAEELEPARAKAEKFGVKEIYIDDLKEEFVRDFVFPMYRANTLYEGVYHLGTSIARPLIAKRQIEIANATGAQAVSHGATGKGNDQVRFELGYYALRPDIRVIAPWREWDLTSRDKLFAYAEKHGIPVPTDKRGEVPYSMDRNLLHISFEGKALEDPWVEPDEEMFVLSVSPEKAPDQATYVELTFRQGDLVAIDDQEMSPATLLAKLNQLGGRNGIGRLDLVENRYVGMKSRGVYETPGGTILGVAHRAMESLTLDREVAHMKDELMPRYAKLIYNGYWFSPERAMLQTMIDASQTFVNGKVRVKLYKGNVVVVGRQSENSLFDPAIATFEDDKGAYNQADADGFIKLNALRMRIAAMLRNGPKV

SEQ ID NO: 6638 - protein, 556 aa, Magnetococcus sp. MC-1
MDRRTLTAIVLSFVLLTAFQFYMAWKYPPAELTGEQVQSGESSAPAPLASTAPVADALPPPVEGMAGSAPQQAMSQPLINTDAKSLLHFKNDLVEGSLSLQGGRLVGMDFLQHTDVLGGKPISFMGISQVESFYQESGFLPVAGSAIKAPDANTQWQLIGKESLQGAGEFKLVWDNGEGIVFEKLFSFAQGSYLFKVEDRLINNSAAALGVYHYSQFKRIPVINSQSMLAMSDFQGPMAYLNGERYQHSYEDLTAQDLREKGHGGWTGFSDKYFLAAMVAKPLPPEAQPRRYYFDYDRPNYRVGMVENSVIIPAGQSLAVDYDLFIGPKEISTLERSNLSLERSIDYGWFHFLAEPLVKVLNFFNSVVHNYGVAIILLTLAIKLLFFPLANKSYRSMNAMKKLQPKIEELKKLHGSDRNKMNEAMMKLYQTHKVNPLGGCLPILVQIPVFFALYKVLFLSVEMRHAPFMLWIPDLSAMDPFYVLPLLMGGSMFLQSKLNPTPSDPMQAKIMMFLPVIFTVMFLSFPSGLVLYWLVNNVLSISQQYYIMKKMEHEPS

SEQ ID NO: 6639 - protein, 243 aa, Malus x domestica
MEGYNENLSVRKGAWTREEDNLLRQCVEIHGEGKWNQVSYKAGLNRCRKSCRQRWLNYLKPNIKRGDFKEDEVDLIIRLHRLLGNRWSLIARRLPGRTANAVKNYWNTRLRIDSRMKTVKNKSQEMRKTNVIRPQPQKFNRSSYYLSSKEPILDHIQSAEDLSTPPQTSSSTKNGNDWWETLLEGEDTFERAAYPSIELEEELFTSFWFDDRLSPRSCANFPEGQSRSEFSFSTDLWNHSKEE

SEQ ID NO: 6640 - protein, 243 aa, Malus x domestica
MEGYNENLSVRKGAWTREEDNLLRQCVEIHGEGKWNQVSYKAGLNRCRKSCRQRWLNYLKPNIKRGDFKEDEVDLIIRLHRLLGNRWSLIARRLPGRTANAVKNYWNTRLRIDSRMKTVKNKSQEMRKTNVIRPQPQKFNRSSYYLSSKEPILDHIQSAEDLSTPPQTSSSTKNGNDWWETLLEGEDTFESAAYPSIELEEELFTSFWFDDRLSPRSCANFPEGQSRSEFSFSTDLWNHSKEE

SEQ ID NO: 6641 - protein, 196 aa, Populus tremula x Populus alba
MAAFAGTQQKCMACDKTVYLVDKLTADNRIYHKACFRCHHCRGTLKLSNYSSFEGVLYCRPHYDQLFKRTGSLDKSFEGTPKIAKPEKPVDNENASKVSNLFAGTREKCVGCNKTVYPIEKVTVNGTPYHRRCFKCTHGGCTVSPSNYIAHEGKLYCKHHHIQLFKEKGNYSQLENEREKNPVTVNITAVEIAAES

SEQ ID NO: 6642 - protein, 197 aa, Populus tremula x Populus alba
MAFAGTTQKCMACDKTVYLVDKLTADNRAYHKACFRCHHCKGALKLGNYNSFEGVLYCRPHFDQLFKRTGSLDKSFEGTPKIVKPEKPVDGEKPVSTKVSTMFAGTREKCFGCKNTVYPTEKVSVNGTPYHKSCFKCIHGGCTISPSNYIAHEGRLYCKHHHNQLIKEKGNLSQLEGDIEKDSMNNKTNGREVAAES

SEQ ID NO: 6643 - protein, 197 aa, Populus tremula x Populus alba
MAFAGTTQKCMACDKTVYLVDRLAADNRVYHKACFRCHHCRGTLKLGNYNSFEGVLYCRPHFDQLFKRTGSLDKSFEGTPKIVKPEKPVDGEKPISTKVSTMFAGTRDKCFGCKNTVYPTEKVSVNGTPYHKSCFKCIHGGCTISPSNYIAHEGRLYCKHHHNQLIKEKGNLSQLEGDVEKDSMNDKTNGREVSAES

SEQ ID NO: 6644 - protein, 303 aa, Azoarcus anaerobius
MKAANDTRVGWIGLGKMGTPMAANLLAAGHAITVYNRSAARADALVEKGAALAPSVAALARDCAIVISMVSDDAALQGITLDAGGVFEAATPGMVFIDMSTVSPALSERIAAAASAKGIHYLRAPVSGSTTTAAAGALTILASGPKDAYERCLPLLQAMGKKLYYLGPAEQARYLKVAINMMLGVTAGMLGEALALGERGGVEWAQMIEVINNSVVGSPLLAYKAEMLTTRNFAPMFTASQMAKDFDLALEAGRDANVPMPLAAVSRQFLGAMIASGRGELDFFAYVTMLEELAGLKPVGSHG

SEQ ID NO: 6645 - protein, 620 aa, Actinomadura hibisca
MSGFAGWVDYERDLRREGATTRTMTATMACRGPDAEEVWLSERAAFGHRRLAVLDPKGGRQPMRAEHDGRELAVLAFNGEIYNAGEVRAELAARGHRFRTRSDTEVILEAYLEWGAGCAAKLNGIFAFAVWDPRSEELLLARDQLGAKPVIYYPTPTGVLFASEPKALLAHPWVDAVVDTDGFRELLSQAGTPGAVVFKGMHEVRAGHVVRIGERGIVTEKYWGLEGREHTDDRDATIANVRRLLEESIGRQLRADVPVCSLLSGGLDSSGLTAIAAHILAERGEGPVRTFTVDYAGLAENFVPDQVRTSLDAPYVKDLVAHVGSEHTDVMLDTSDLLDPVMRAETIRARDLPSPLGDMQTGLYLLYRAAAEHSTVALTGQLADSLFGGPAWVQDPEFANADTFPWVALAQRRACPDGLGNGLLAPALRRSLDIPGYVRDRFHEALAEVPHVGEADPQERRMREITYTHLTRYPETLIRNDERLSAYVGLETRVPFCDPELLQYAFNTPWHLQTFDGREKSLLRAAVADLLPESVLKRPKSPFPVSVDPGYAKVLRTELSEILADPSAPVAPFLDPQGARELLDDPNSLAEGWRGRTNVELILQLDTWLRDYGVRLDLDV

SEQ ID NO: 6646 - protein, 321 aa, Sesbania rostrata
MASSGYLSVFFHAFVFASLATTGFSQLSPNYYDYTCPNALSTIKSVVEGAVWKERRMGASLLRLHFHDCFVNGCDGSILLDPTSSIDSEKNAGPNFQSARGFEVVDDIKKAVDAACGKPVVSCADILAVAARDSVVALGGPTWEVQLGRRDSTTASRDAANKDIPAPFFSLSQLIENFKNKGLDEKDLVVLSGGHTIGYARCATFRDHIYKDTDINSEFAQQLKYICPINGGDSNLSPLDPTAANFDVAYYSNLLQTKGLLHSDQELFNGGSTDELVKQYSYYPEAFFQDFAKSMIKMGNIQPLTGDQGEVRVDCRKVNYY

SEQ ID NO: 6647 - protein, 359 aa, Saccharomyces cerevisiae
MSTKVVNVAVIGAGVVGSAFLDQLLAMKSTITYNLVLLAEAERSLISKDFSPLSVGSDWKAALAASTTKTLPLDDLIAHLKTSPKPVILVDNTSSAYIAGFYTKFVENGISIATPNKKAFSSDLATWKALFSNKPTNGFVYHEATVGAGLPIISFLREIIQTGDEVEKIEGIFSGTLSYIFNEFSTSQANDVKFSDVVKVAKKLGYTEPDPRDDLNGLDVARKVTIVGRISGVEVESPTSFPVQSLIPKPLESVKSADEFLEKLSDYDKDLTQLKKEAATENKVLRFIGKVDVATKSVSVGIEKYDYSHPFASLKGSDNVISIKTKRYTNPVVIQGAGAGAAVTAAGVLGDVIKIAQRL

SEQ ID NO: 6648 - protein, 689 aa, Solanum lycopersicum
MVYKKKLDFGFNGFQVPVIPKAPRSVRRRRSCKKLDDDQICAFELLAAVAGKLLLESESSTSSNAAEGKNEIADGRDGIKSEQVEEGKAVKSECLDQGSCVESDYLPDTAVQDQNLKHGFDKPHHAENNYFLEHTSTVIGSDADLKLENCKEVNITDGKFHHKIEGGSSSLEDPCDSKIRTGTQKHLDDDSKQIEDVTVTNTCSVKNPIKECVNNSGLFNSDGSVQLPLYRDSVPSASFVKQRNSVKLGVRDDDENSFDCYRYSAKLRAFRTTSRLGYRRIRKMLKSRHWKVAPKLKEYERSYTNGGMESFYLSRKSVRARKRCQLEVPSKRRKLSNHGFAVAYYQEASSESVTNSPDKEIKRDISTSHAIPPRGTADPASVNNHHKKDPNVKFSIKSFKVPELYIEVPETATVGSLKRTVMEAVTAILESGLRVGVVLQGKKVRDDNRTLEQAGISQNGNLDNLGFTLEPRFTQVSPSSSPNKLPASSTYVADQELTRRRPSPIMEFGIHNASADPLETDMCKYSENNHPSELSPTNPIDSSTDVSIPDSRALVIVPSVNAEALAMVPLNHKSKRSELSQRRIRRPFSVAEVEALVEAVEHLGTGRWRDVKMRAFDNADHRTYVDLKDKWKTLVHTASIAPQQRRGEPVPQELLDRVLAAHAYWSQQQGKHHAELLKTPDAKAQKVSA

SEQ ID NO: 6649 - protein, 469 aa, Methanocaldococcus jannaschii
TTVMKFGGTSVGSGERIRHVAKIVTKRKKEDDDVVVVVSAMSEVTNALVEISQQALDVRDIAKVGDFIKFIREKHYKAIEEAIKSEEIKEEVKKIIDSRIEELEKVLIGVAYLGELTPKSRDYILSFGERLSSPILSGAIRDLGEKSIALEGGEAGIITDNNFGSARVKRLEVKERLLPLLKEGIIPVVTGFIGTTEEGYITTLGRGGSDYSAALIGYGLDADIIEIWTDVSGVYTTDPRLVPTARRIPKLSYIEAMELAYFGAKVLHPRTIEPAMEKGIPILVKNTFEPESEGTLITNDMEMSDSIVKAISTIKNVALINIFGAGMVGVSGTAARIFKALGEEEVNVILISQGSSETNISLVVSEEDVDKALKALKREFGDFGKKSFLNNNLIRDVSVDKDVCVISVVGAGMRGAKGIAGKIFTAVSESGANIKMIAQGSSEVNISFVIDEKDLLNCVRKLHEKFIEK

SEQ ID NO: 6650 - protein, 732 aa, Pleurotus sapidus
MASSSSSDVLVLAVGVALAAIYLFRDQLFAQAKPKSVPVPTSKASNGSGNPRDFIAKMKEGKKRLVIFYGSQTGTAEEYAIRLAKEAKSKFGLASLVCDPEEYDFENLDQLPEDCAVFFVMATYGEGEPTDNAVTLMQNLEDESFEFSNGEHKLEGLKYVAFSLGNKTYEHYNKIGRDVDNVLTKMGAIRIGERGEGDDDKSMEEDYLEWKDGMWDAFSAAMGVEEGQGGDTPDFAVTELESHPPEKVYLGELSARALTKTKGIHDAKNPFPAPISIARELFQSTHDRNCVHIELNTESSGISYQHGDHVGVWPSNPDVEVTRLLCALGLYDKKDNVIGIESLDPALAKVPFPVPTTYATVLRHYIDISAVAGRQILGALSKFAPNPEAEAFLKGLSANKEEYRTLIANGCLKLGEVLQLAAGNDLSAVPSPENTTAWTIPFDTIVSSIPRLQPRYYSISSSPKLHPNSIHVTAVVLKYESIPNERVNGRWIFGVGSNFLLNLKYAANGETAPLVATGAESKAASTAIPGYAIEGPRGAYKQETIYKAPIHVRRSTFRLPTNPKSPVIMIGPGTGVAPFRGFIQERVALARRSIEKNGPDALADWGRISLFYGCRKSTEDFLYKDEWPQYQEELRGKFTMHCAFSREVYRPDGSKIYVQDLLWDDREQVADAIINGKGYIYICGDAKSMSKAVEETLARILGEAKGGSADVEGNAEVKLLKERSRLMLDVWS

SEQ ID NO: 6651 - protein, 552 aa, Enterobacter cloacae
MRTPYCVADYLLDRLTDCGADHLFGVPGDYNLQFLDHVIDSPDICWVGCANELNASYAADGYARCKGFAALLTTFGVGELSAMNGIAGSYAEHVPVLHIVGAPGTAAQQRGELLHHTLGDGEFRHFYHMSEPITVAQAVLTEQNACYEIDRVLTTMLRERRPGYLMLPADVAKKAATPPVNALTHKQAHADSACLKAFRDAAENKLAMSKRTALLADFLVLRHGLKHALQKWVKEVPMAHATMLMGKGIFDERQAGFYGTYSGSASTGAVKEAIEGADTVLCVGTRFTDTLTAGFTHQLTPAQTIEVQPHAARVGDVWFTGIPMNQAIETLVELCKQHVHAGLMSSSSGAIPFPQPDGSLTQENFWRTLQTFIRPGDIILADQGTSAFGAIDLRLPADVNFIVQPLWGSIGYTLAAAFGAQTACPNRRVIVLTGDGAAQLTIQELGSMLRDKQHPIILVLNNEGYTVERAIHGAEQRYNDIALWNWTHIPQALSLDPQSECWRVSEAEQLADVLEKVAHHERLSLIEVMLPKADIPPLLGALTKALEACNNA

SEQ ID NO: 6652 - protein, 252 aa, Phaeodactylum tricornutum
MTLNSPLLEIKNLQVSINENQILKNLNLTINKGEIHAIMGPNGSGKSTFSKVLAGHPAYSILGGDILFKGSSILDLEPEERSHLGIFLAFQYPVEIPGVSNEDFLRLAYNSKQKFYNKVEVDPIEFLTIITQKLQLVNMSARFLGRNVNEGFSGGEKKRNEILQMILLDSELSILDETDSGLDIDALKIISNGINNFMGPEKSIILITHYQRLLDYVNPNYVHVMQNGKIIKTGSAELAKELEAKGYEWLET

SEQ ID NO: 6653 - protein, 105 aa, Phaeodactylum tricornutum
MKYAIVEISGRQFWIETGKYYDFNRIPTELGKQITLNRVLLLNNEGEILIGKPYLDSVKIKGKILEHLRGKKTIVYKMRPKKKTRKKQGHRQELTRVLIEDIIIN

SEQ ID NO: 6654 - protein, 926 aa, Phaeodactylum tricornutum
MFEKFTEGAIKVIMLSQEEARRMGHNFVGTEQLLLGVIGQRHGIGAKALKKLKVTLKKARKEIELYIGRGTGFVASEIPFTPRAKRVLEMAVHEGKDLGQNFVGTEHILLALIAESDGVAMRTLDKLNVDIHKLRNLILTYIEETQEEILRPLTQAEKFLLEREKKGSPTPTLDEYAENITKEAIDGNLDPVIGREKEIDDVIAVLARRTKNNPVLIGEPGVGKTAVAEGLAQLILTEKVPDFLDGSLIMALDLGSILAGTKYRGEFEERLKRIVEEAQNDSAVIIVIDEIHTLVGAGAAEGAVDAANILKPALARGKFRCIGATTNDEYRKYIERDPALERRFQPVHVEEPSVGTTIEILRGLRSKFEQHHTLSYHDKALEQAAILSDKYVADRYLPDKAIDVLDEAGARVRLENRRLPLGLRSLMHELQETIKDKEDCIKEHDFEAAKQLLDHEMEVRTHIRIMKQSALTSEARGFSRRDVDMVTETDVSDVVSNWTGIPVTKITGSESARLLKMEDTIHERIIGQKHAVVAVSRAIRRARVGLRNPNRPIASFIFAGPTGVGKTELTKALSDYMFGSEESMIRLDMSEYMEKHTVAKLIGSPPGYVGYNEGGQLTEAVRSKPYSVVLLDEVEKGHPDVFNLLLQILDDGRLTDSKGRVIDFTNTLIIMTTNLGSKIIERESGIKSKTEQGEGGFKITPDAVIGWEPAPEPIKDPEVFERVTKLVNDELKNFFRPEFLNRIDEIIVFNHLTRIDIWEICELMIKSVQNRLKDKGINLIVELSVQAFLTDEGYDPIYGARPLRRAIMKYLEDTLAEQCLSKTLYPNTKIHVRRKKVEGTLMTYTNELEVEVDFSDVDPSLLDEEANETAMSSLDKSNNEKEKVGSIVSKDNSSGINEDEPSFGLGSNDSKPTIAGRAAKFFKKKN

SEQ ID NO: 6655 - protein, 251 aa, Thalassiosira pseudonana
MNSNSPILEIKNLKASINNTEILKNLNLTINRGEIHAIMGPNGSGKSTFSKIIAGHPAYEVLSGDIFFKGSSILDLDPEKRSHLGIFLAFQYPIEIPGVSNEDFLRLAYNSKQKFYNKPEVDPIEFFSIINEKLNLVNMSSVFLSRNVNEGFSGGEKKRNEILQMILLESELSILDETDSGLDIDALKIISNGINTFMDSNKAIILITHYQRLLDYIKPDYVHVMQNGKIIKTGTADLAKELEIKGYEWLN

SEQ ID NO: 6656 - protein, 105 aa, Thalassiosira pseudonana
MKYAIVEISGRQFWIETGKYYDLNRIPTELEKEIILNRVLLANNDGEILIGKPYLDSVKVKGKILEHLRGRKTIVYKMRPKKKTRKKQGHRQDLTRVLIEEIKIN

SEQ ID NO: 6657 - protein, 586 aa, Medicago sativa
MCGILAVLGCSDDSQAKRVRILELSRRLKHRGPDWSGLHQHGDNYLAHQRLAIVDPASGDQPLFNEDKSIIVTVNGEIYNHEDLRKQLPNHKFRTQCDCDVIAHLYEEYGENFVDMLDGIFSFVLLDTRDNSFIVARDAIGVTSLYIGWGLDGSVWIASELKGLNDECEHFEVFPPGHLYSSKDREFRRWYNPPWFNEAVIPTTPYDPLVLRNAFEKAVIKRLMTDVPFGVLLSGGLDSSLVAAVTARYLAGTKAAKQWGAKLHSFCVGLKGAPDLKAGREVADFLGTVHHEFQFTIQDGIDAIEDVIYHTETYDVTTIRAATPMFLMSRKIKSSGVKWVISGEGSDEIFGGYLYFHKAPNKEEFHQETCRKIKALHRYDCLRANKSTYAWGLEARVPFLDKEFIKVAMDIDPEYKMIKHEEGRIEKWILRKAFDDEENPYLPKHILYRQKEQFSDGVGYGWIDGIKDHAAKHVTDRMMLNASHIFPFNTPLTKEAYYYRMIFERFFPQNSARLTVPGGASVACSTEKAIEWDASWSSNLDPSGRAAFGVHNSAYENQVNSVAKTVEPEKIIPKMEISNLGVAIQS

SEQ ID NO: 6658 - protein, 535 aa, Aeropyrum pernix K1
MSARKGTEKLGFWEVFSIGVGGMIGGGIFATLGLSLELAGAAAPLAFLLAGSVALITSYSYAKLSSRYPSEGGTIEFIVRAYGDNVISGGLNIMLLASYIVMISLYAHAFGSYGASMINCCPREAYIALVVFVIAGLTVVNMLGAIMSGRVELGLVIFKLLVLILVAVVSMPLVDWNRLGVREWPSILSIVAGGMIIFLAYEGFELVANTAKDVRDTTTLRKGLYASVVTVIIVYVLIAIVAAGTLDPDTVRIARDYALAVLVEPVLGKIGFTLVVAAALASTSSAINATLYGSARVSYIIAKYGEAPQLLGRHIWRGAYEGLLVISILGLLLALYASLEQISTAGSGGFLIIFAAVNLAAYKLRRETGANPLISLVGFILNLTSLAILVYQMASMNPGELAILAVLIAGSMAAEALYRRIKGRRLPQVIDPSLKVRESLISGWRNLTARAAEIIKREIMNAEVYITGSIARGEYEKSGDIDLIVSTTKPLSPHEVKFIEERLVKELNLPPSHPLHIHTVTRDKLENFKHKVKID

SEQ ID NO: 6659 - protein, 218 aa, Aeropyrum pernix K1
MGDVTARSYREVVSAVEEKVASLRGGRLFIFLGGDHSITYATLRALRSFYRGRLGLVYLDAHPDLYDEYEGDRYSHACTLRRIVEEGFVDPRDVILAGVRAATPSQLDFAEKAGITVLGVEEAEDLAAYLKEGMPYYISYDLDVLDPAYAPGVGNPEPGGLSTREMVRIIKSLPEDVLAFDVVEASPPHDPSGLTLFTAAKIIRETLARARPPGWGEV

SEQ ID NO: 6660 - protein, 352 aa, Aeropyrum pernix K1
MYTSFHRIDLPRTIVVGGGVLDKAGGYVSGVAQRGSYVLVVSGPTVSSKYFERLRASLEAEGLTVGLKIIRDATVETAEEVAREALESRIEVVAGLGGGKSIDVAKYASKRAGSVFVSIPTVASHDGITSPFSSLKGFDKPISRPAKAPEAIIIDVDVIAEAPRRYNIAGFGDLIGKYTAVLDWRLAHKLRLEYYGEYAASLALLSAKHVSQYAEEIALGTREGYRVLLEALVSSGVSMCIAGSTRPASGSEHLFAHALHIVARNKPLHGEAVGVGTIMMAYLHGKNWRRIRGLLKTVGAPTNAKELGVEDDEVVEALTIAARIRPERYTILGEKGLTREAAEALARKTGVI

SEQ ID NO: 6661 - protein, 401 aa, Aeropyrum pernix K1
MAGGYNRRVDLITGSPTRKIDAVRERLAREGRDVILLSTGQPGFLPPTFLRERLAQALLDEGFKRLYSYTPTPGYADVREAIAEDLAALGGPRMEPDDILVTAGGQEAMFATLSTILEPGDKVILMDPTYFGYRPIVEYLGGRVEWVRAPPSLGFQPDEERLKEAFTRDVKAVVLVSPDNPTGRLLSTESAKLVADLAVDTGAWIVYDEAYKTLVFEGEHVYLYKLAPDNTISINTFSKDPGFPGWRLGYLYGPGWIVGKIRLVSEELVYCPPSIAQVAAKIYLEDREGRLRHLEYAREFLKTRMEAMAGALEEMLPEAVFARPGGSMFITVDLSSYLSKASITSEDLSVKLLDEESVATVPGRYFGPSGDTMLRLSFATETPERIREGIGRLARLLERLA

SEQ ID NO: 6662 - protein, 291 aa, Aeropyrum pernix K1
MVERVAVVGAGRMGSGAARRLASRGYRVVVWSRSWEKAERLAREAGLEAARSLVDALAESEAAIAFVSDDDALLNVVSQVRRSDGLIFVNSATTTPRASVSAARYLEGLGVQYVEAPVIGGPGALERGEAIVLAAAPRSALAPAVPLLSELGELVKVGESYGMAAAMKLAFNNLLLTTLVGLGESLLILDAYGVDKTLFSSILERTVFSGLAGKYFERAVSKPKPTFTVSLAEKDARYAFQALADRGYPRLVSQAVSNVYAMLSHMGFGDEDYVGVYRLLKKAGAGGGEES

SEQ ID NO: 6663 - protein, 387 aa, Aeropyrum pernix K1
MPSVDITFLVEFIVAYVAVYYVLTSSLNLKAGVTGIPDFGQAMFFAVGGIVVGNLAARIAAALAGMDPSLVIAENTTTLEVLNSEFFPNRPLESIAILVVAIASALALGGLLGLLASYPALRLRGDYLAIMLLVTAEALRIYTTYSVWLMGSTPTVGLTLPSLLAWTGDPGLASILLTLAIAVAVYIYMERLYNSPAGRLMRAVRDDEDASKALGKDVAKVRRNAMVVGSALAALAGVLYSINPLLAGSSVAAVSIFDRMLWTFWPWALMILGGMSSNRGVAIASVVTGAAILGPIRLYKAELARLLRVDALGFDTDKFAAGLEFILIGPLILAILFLRPQGIIPEPPSRTLPEKDIEEIKARTAGQTGSETPQGEEEPPASDTEAR

SEQ ID NO: 6664 - protein, 490 aa, Aeropyrum pernix K1
MAGQAVLVSLFVLLLYLALGSLITLYARRRMARGEGEFYLAGRRLTGFLSAMTYAATTYSSFMIVGLVGLAYFTGIGSLVFELAYLVATVILLSLFSRRVWRMSRERGWVSPGEMLADLLGSPWVALTASLVFLVSLVPYASAQLKGIAETIVAIAGYSPGDNTAYMVAVGVALLILLAWSLLAGVRGVVLTDAFQGLWMLTAGSLLFLWLASRVFSKSGASEVLSAMESAGLFDMWSATLLIGFVTPWVFFAVTNPQVVQRLYMPKDEESLRRMILYFFLFGLYYTVLVVAIGFLARAGVELGILSIEPQGRDQVTPQLLSLAHPLLAALVFTSIVAASVSTADSIILALASSASRDIGLLVLRLDEKGRLRLGYAAAALFTVLMAVFAATRIGYIVQLSVLSSVMLLGLAPVTIAAWVGLRVHPALAVASIATGPVLVAANVLYSLAVGGEVSLSPAKQVLGVPISVWVLAISLALTAAGIALVRGRR

SEQ ID NO: 6665 - protein, 454 aa, Aeropyrum pernix K1
MGCAPNDLVVVKFGGSVLNGSPGFLAAGRLVLGLLESGLEPVVVVSAVKGVTDALLSSFERRDPGVGGAVGKTYLSIARELGLPPESVRDVSLASAEVSKLLWAAEVLGQWTPRVRDLVVSYGERLSAALMAGLLRRLGVEARWLGGGEAGIVTDGEFGDATPLYGYTEGVIRERLEPMLEEGVVPVVAGFTGATREGDTTLLGRGGSDLTATLLASALGAGRVVLYTDVPGILSGDPRVVGEPRRVGYMSYEEAWEVARLGLRKFHPRTFEPLIAGGLGVEVVVSDLRGRSTRIGPGRGGPPLKVVSLSRGVARLVVRGPSMAGKRGFLSRLAGLLAGRGVNILAIRQPPSETAIELVVDERDLPAAVEELGARSGAAGVRLEVERGFDVVSIVGWGAVEALPEALSAAEKTGGRLLSTGELSPSISILARGRTSPELARLLHRRVVESWVTG

SEQ ID NO: 6666 - protein, 383 aa, Aeropyrum pernix K1
MVSRPHGGRLVRRVLSGRRREIFESQYREMPRLEVPLERAIDAEDLARGVFSPLEGFMVEDDYLSVLSRMRLSNDLPWTIPIVLDANREWVLNEGVSAGDDIILTYHGLPIAVLTLEDIYSWDKGLHAEKVFKTRDPNHPGVEATYKRGDILLGGRLELIQGPPNPLERYTLWPVETRVLFKEKGWRTVAAFQTRNVPHLGHEYVQKAALTFVDGLLVHPLAGWKKRGDYRDEVIIRAYEALITHYYPRGVVVLSVLRMNMNYAGPREAVHHAIVRKNFGATHFIVGRDHAGVGSYYGPYEAWEIFREFPDLGITPLFVREAYYCRRCGGMVNEKVCPHGDEYRVRISGTRLREMLGRGERPPEYMMRPEVADAIISHPDPFI

SEQ ID NO: 6667 - protein, 312 aa, Aeropyrum pernix K1
METGSRARDLYLLRPPEPVFGIQRSREESLFSVIGVPYDSTSSFRPGQRFAPREIRRASIELESNGYYVEGDIDRVPIADEGDVAAVPGSTLLTLERVARVVEDLAREGKVPVVLGGEHLVTLGALRGLAAAGVKPCVVVLDAHFDLRNDYLGERFSHATVFRRVLEELGVKLLYIGVRAYEAGEERLAVESGLIDYVPMRRMDIVGVDGAVLAARRFTGDCEKIYISIDMDFYDPAYAPGVGNPEPGGASSREGLALASQLGDRRVCGIDVVEVSPPYDPGGATSLLAAKTLQELLISVWQRWGVGRSASS

SEQ ID NO: 6668 - protein, 356 aa, Aeropyrum pernix K1
MRVEVLDNKRRIVRLRPESEEDLWLLRITLRPGDVVRIRTSRDVPVGSGRKERVVMTLRIRLDSIEFQPFTGKLRISGIVVEGPDEFGVKGRRHSTAVSIGTWLVVERDKGWSEQELERLASGRARGTAVIAAVDYDEFALAVLAGHGMKILEDTSARLPGKDDPSREQEVEKYVDRAAKRIVEEAARHRSPIAVIAGPGQLKTSVAEKVQRAMPSLKVATVDTSMGGVAGVREALRRESVTRILRELSIVEAEGVLEEFLRRIAKSRDTVAYTPGEVLAVARMGAVDTVLLVDTLLHSPDDAVREAVDEALRLVESMGGRVIIIPGDSPAGERLVSFGGVIALLRYPVPQEARRL

SEQ ID NO: 6669 - protein, 335 aa, Aeropyrum pernix K1
MKRPRVFVTREVFPEALELLSKYYDVEVWDKYQPPPYETLLSKAREADALYTLLTDRIDCDLLSQAPRLRIVAQMAVGFDNIDVECATRLGIYVTNTPGVLTEATAEFTWALILAAARRVVEADHFVRWGEWWRLRTGWHPMMMLGVELRGKTLGILGMGRIGSRVAEIGKAFGMRIIYHSRSRKREIEKELGAEYRSLEDLLRESDILSIHLPLTDETRHLIGESELKLMKKTAILVNTGRGAIVDTGALVKALREGWIAAAALDVFEEEPLNPNHPLTAFKNVVLAPHAASATRETRLRMAMMAAENLVAFAQGKVPPNLVNREVVKVRQPGF

SEQ ID NO: 6670 - protein, 139 aa, Aeropyrum pernix K1
MSVNYATLGDLKKGSYIVIDGEPCRIVEMSRAKTGKHGSAKAHVVAICVFSGQKKSLVAPVDTRVQIPVIEKRLGQVLADMGDMVQIMDLETYDTFEVEKPGGNEEEEQLAAKLQPGVTVEYWLIMGKPKIIRIRSSSS

SEQ ID NO: 6671 - protein, 405 aa, Aeropyrum pernix K1
MPQKDPTLDIQERVVEIEGETAFAYLAVARKLIQEGRRVISFGIGQPDFPTPHHIREAAKKALDEGFTGYTETAGIPELREAIAWYLNSRYGADVSPEEVIATTGAKTAIFLGMALYLRPGDEVIIPDPSYYAYAQVAKLFGARPVYVPMKFEPGLGFRFDIEGIERAVSEKTRMIVVNNPHNPTGSVFPPDQVEAIHDIARRRGLIILADEIYDNFLYTEKPFKSTLSLPDWRENLVYVNGFSKTFSMTGWRLGYVVLRREVIPKALDLAVTIYSCPPSIAQKAGVAALRGDWGPVREMVEEFRSRARILYDILSQAEGIEPYLPEGAFYMFPRVAGLLRKTGLSVEQLAEKLLYSYGVLVLPGTSFPESVGREHVRLSFATATSDVKEGAEIIVRASRELSSG

SEQ ID NO: 6672 - protein, 574 aa, Aeropyrum pernix K1
MGSEDLERLLLGYALRDAVKHGGRASVGSVMSMLLGDHPELRSRAREIASLAARVVEQVNSMPAGEQKRLLSEQYPELARFEEQREKGDKGLPPLPGAVEGRVKLRFAPNPDFVIHMGNARPAIVNHEYARMYKGRMVLRFEDTDPRTKTPLREAYDLIRQDLKWLGVSWDEEYIQSLRMEVFYSVARRAIERGCAYVDNCGREGKELLSRGEYCPTRDLGPEDNLELFEKMLEGEFYEGEAVVRMKTDPRHPNPSLRDWVAMRIIDTEKHPHPLVGSRYLVWPTYNFAVSVDDHMMEITHVLRGKEHQLNTEKQLAVYRCMGWRPPYFIHFGRLKLEGFILSKSKIRKLLEERPGEFMGYDDPRFGTIAGLRRRGVLAEAIRQIILEVGVKPTDATISWANLAAANRKLLDERADRIMYVEDPVEMEVELAQVECRAAEIPFHPSRPQRKRRITLCTGDKVLLTREDAVEGRQLRLMGLSNFTVSQGILREVDPSLEYARRMKLPIVQWVKKGGEASVEVLEPVELELRRHQGYAEDAIRGYGVDSRLQFVRYGFVRVDSVEDGVYRVIYTHK

SEQ ID NO: 6673 - protein, 737 aa, Aeropyrum pernix K1
MSSSGFGVRRPVKEAILRVAEAKPRDSGRKRVRIDIDIMKELGVEPGDVVEIEGKKKTVAIVMPAYPEDMGLDIIRMDGILRRNADVNIGEKVIVRKTSVRTATKVKLAPVSYTMTVDEGFKRYVKKKLQGVPITEGDVVVVPVIGQAVQLQVVDARPKGAVIVSEETIVDVLEKPVAQSRVPKVTYEDIGGLKEVIEKVREMVELPLRHPEIFKRLGIEPPKGILLYGPPGTGKTLLAKAVANEADAYFISINGPEIMSKYYGESEQRLREIFEEAKKNAPSIIFIDEIDAIAPKRDEVVGEVERRVVAQLLALMDGLEARGNVIVIAATNRPNAIDPALRRPGRFDREIEVPLPDKHGRLEILQIHTRHMPLAEDMDLEKLAEMTKGFTGADLAALAREAAMYALRRYLPEIDLDQESIPVEVLEKMVVTMEDFLKALREITPSGLREIQIEVPEVRWSDIGGLEDVKQELREVVEWPLKHPEAFTRMGIRPPRGVLLFGPPGTGKTLLAKAVATESGANFIAVRGPEILSKWVGESERAIREIFAKARQHAPAVVFFDEIDAIAPVRGTDVGTRVTERIVSQLLTEIDGVSDLHDVVVIAATNRPDMVDPALMRPGRLEKMIYVPPPDFSSRLEILRIHTRKVPLAEDVDLAEIARRTEGYTGADIEALVREASLAALREDINAAEVSMRHFEVALKKVKPSVTPQMVEYYKRWLETVKQRQEEVKREAPTITL

SEQ ID NO: 6674 - protein, 333 aa, Aeropyrum pernix K1
MAFKIVSMSPLPPQFVEALFDPYKKEVGDLRVVSVAGLPRERVLEELRDADVVIGDYTFQMRIDAEMCAAMERVRLVQQPSTGYDHIDVEACARHGVPVANAGGANAVSVAEYTIMAALALLKRLLYAHRETVAGGWPQWRLMEMGTFDLQGKTWGIIGLGRIGREVAKRLRPFEVRTVYFDKVRMEDAERELGVEYRSLSRLLRESDVVSIHVPLTSETRGMIGEGELRMMKPTAVLINPSRGEIVDEEALARAVRERWIAGAAVDVYSREPPPPDHPLIRAAGEADVNLILTPHIAGANTDARSRIIQFSIENIVRVLKGGKPEAVVNMRL

SEQ ID NO: 6675 - protein, 156 aa, Nelumbo nucifera
MDLRIMDFDSPLFSTLQHMLDVSEEADKSFNAPTRTYVRDAKAMASTPADVKEYPNSYAFIVDMPGLKSGDIKVQVEDGNVLLISGERKREEEKEGVKYVRMERRVGKFMRKFVLPENANTDAISAVCQDGVLTVTVNKLPPPEPKKPKTIEVKIA

SEQ ID NO: 6676 - protein, 406 aa, Mycobacterium avium 104
MSAVREAVICEPVRTPIGRYGGMFKALTAVDLGVAALGGLLQRTGLPPEAVQDVILGHCYPSSEAPAIGRVVALDSGLPVTVPGMQVDRRCGSGLQAVIQACLQVRNGDHDLVIAGGCESMSNVAFYSTDMRWGGARSGVRVHDGLARGRTTAGGRRYPVPGGMLETAENLRRQYGISRQEQDELAVRSHQRAVAAQKDGILAQEIIAVAVPTRHGDELIDTDEHPRADTSVESLSKLKPVLLEQDPEATVTAGNASGQNDAASMCVVTTPEKADEHGLRPLVRLVSWAVAGVAPHIMGIGPVPATEVALAKAGLSLSDIDLIELNEAFAAQALAVMREWKFGAADHDRTNVHGSGISLGHPVGATGGRMLATLARELTRRQARYGLETMCIGGGQGLAAVFERVA

SEQ ID NO: 6677 - protein, 566 aa, Mycobacterium avium 104
MTLPDSSTEAASPTFADLQIHPSVLRAIADVGYETPTGIQAATIPALMAGSDVVGLAQTGTGKTAAFAIPILSKIDVASTATQALVLAPTRELALQVAEAFSRYGAHLPKINVLPIYGGSSYAVQLAGLKRGAHVVVGTPGRVIDHLERGTLDLSHVDYLVLDEADEMLTMGFAEEVDRILSETPEYKQVALFSATMPPAIRKLTAKYLHDPLEVSTKAKTTTAENISQRYIQVAGPRKMDALTRVLEVEPFEAMIVFVRTKQATEEVAERLRARGFSAAAINGDIPQGQRERTVAALKDGGIDILVATDVAARGLDVERISHVLNYDIPHDTESYVHRIGRTGRAGRSGTALLFVSPRERHLLKAIEKATRQPLTEAELPTVEDVNAQRVAKFADSITAALGAPGIDLFRKLVQDYEREHDVPMADIAAALAVQSRDGEEFLMAPEPPRERRERHTERRERTEKPRSTRPLATYRIAVGKRHKIGPGAIVGAIANEGGLHRSDFGHIAIGPDFSLVELPAKLPKSTLKRLEQTRISGVLINLQPDRAAAKARGRDGGKPRRKYGG

SEQ ID NO: 6678 - protein, 325 aa, Mycobacterium avium 104
MTKLSGVFRVGELEPAFGEELAARYDVPRLPDGAARDRFLAEHAAEVRALLTWGRPGVDAALIAALPNLEVIVNNGAGVDLIDTAAADRRGIGVSNTPDVLSDTVADTALGLILMTLRRLGAADRYVRAGRWAREGPFPYGRDVSGLQVGILGLGRIGSAIATRLRGFDCAIAYHNRRRIDGSPYRYAASAVELAELVDVLVVATTGDHQAHKLVDRAVLRALGPEGYLINIARGSVVDQEALVEMLAGGELAGAGLDVFADEPHVPAELVGLDNVVLLPHVGSATARTRRAMASLALRNLDSYLATGQLVTPVLRPRRRIPDRN

SEQ ID NO: 6679 - protein, 387 aa, Mycobacterium avium 104
MDGSDGARRVLVINSGSSSLKFQLVDPESGVAASTGIVERIGEESSPVPDHDAALRRAFDMLAGDGVDLNTAGLVAVGHRVVHGGNTFYRPTVLDDAVIARLHELSELAPLHNPPALLGIEVARRLLPGIAHVAVFDTGFFHDLPPAAATYAIDRELADRWQIRRYGFHGTSHRYVSEQAAAFLDRPLRGLKQIVLHLGNGCSASAIAGTRPLDTSMGLTPLEGLVMGTRSGDIDPSVVSYLCHTAGMGVDDVESMLNHRSGVVGLSGVRDFRRLRELIESGDGAAQLAYSVFTHRLRKYIGAYLAVLGHTDVISFTAGIGENDAAVRRDAVSGMEELGIVLDERRNLPGAKGARQISADDSPITVLVVPTNEELAIARDCVRVLGG

SEQ ID NO: 6680 - protein, 405 aa, Mycobacterium avium 104
MPEAVIVSTARSPIGRAMKGSLVSMRPDDLAVQIVRAALDKVPALNPHQIDDLILGCGQPGGESGFNLARVVAVELGFDFLPGTTVNRYCSSSLQTSRMAFHAIKAGEGDAFISAGVETVSRFPKGSADSWPDTKNPLFSEAQERSAAAAEGAEEWHDPRADGKLPDIYIAMGQTAENVALLTGISREDQDHWGVRSQNRAEEAIKSGFFEREITPVTLPDGTTVSTDDGPRPGTTYEKIRELKPVFRPNGTVTAGNACPLNDGAAAVVITSDTKAKELGLTPLARIVSTGVSGLSPEIMGLGPIEATKKALARAKMSVSDIDLFEINEAFAVQVLGSARELGIDEDKLNVSGGAIALGHPFGMTGARITTTLLNNLQTHDKTFGLETMCVGGGQGMAMVIERLS

SEQ ID NO: 6681 - protein, 1529 aa, Mycobacterium avium 104
MHMTPKRAGLYNPAFEHDACGVAMVVDMHGRRSRDIVDKAITALLNLEHRGAQGAEPRSGDGAGILIQVPDAFLREVVDFELPPEGSYATGIAFLPQSSKDAATACAAVEKIAEAEGLTVLGWRNVPTDDSSLGALSRDAMPTFRQVFMAGASGMTLERRAYLVRKRAEHELGTKGPGQDGPGRETVYFPSLSGQTFVYKGMLTTPQLKAFYLDLQDDRLTSALGIVHSRFSTNTFPSWPLAHPFRRIAHNGEINTVTGNENWMRAREALIKTDVFGTEADVEKLFPICTPGASDTARFDEVLELLHLGGRSLAHAVLMMIPEAWERHESMDPARRAFYQYHASLMEPWDGPASMTFTDGTVIGAVLDRNGLRPSRIWVTEDGLVVMASEAGVLDLDPATVVRRMRLQPGRMFLVDTAQGRIVSDEEIKAELAAEHPYQEWLDRNLVPLDDLPQGDYKRMPHDRLVKRQQTFGYTYEELNLLVAPMVRTGAEPIGSMGTDTPVAVLSQRPRMLYDYFQQLFAQVTNPPLDAIREEVVTSLQGTTGGERDLLTPTELSCHQIVLSQPILRNRELAKLVNLNPDDEVNGRPHGMRSKVIRCLYPVAEGGAGLAAALEDVRAQASAAIADGARVIILSDRESDEKMAPIPSLLAVAGVHHHLVRDRTRTHVGLVVESGDAREVHHMAALVGFGAAAINPYMVFESIEDMLDRGVIEGIDRNTALNNYVKAAGKGVLKVMSKMGISTLASYTGAQLFQAVGISEDVLDEYFTGLSCPIGGITLDDIAADVAARHALAYLDRPNERAHRELEVGGEYQWRREGEYHLFNPETVFKLQHATRTGQYKIFKDYTRLVDDQSERMASLRGLLKFRAGVRPPVPLEEVEPASEIVKRFSTGAMSYGSISAEAHETLAIAMNRLGGRSNSGEGGEDVKRFDRDPDGSWRRSAIKQVASGRFGVTSHYLTNCTDIQIKMAQGAKPGEGGQLPGHKVYPWVAEVRHSTPGVGLISPPPHHDIYSIEDLAQLIHDLKNANPAARVHVKLVSENGVGTVAAGVSKAHADVVLISGHDGGTGATPLTSMKHAGAPWELGLAETQQTLLLNGLRDRIVVQVDGQLKTGRDVMIAALLGAEEFGFATAPLVVSGCIMMRVCHLDTCPVGVATQNPVLRERFTGKPEFVENFFMFIAEEVREYMAQLGFRTLNEAVGQVKSLDTTLARAHWKAHRLDLGPVLHEPESAFMNQDLYCSSRQDHGLDKALDQQLIVMSREALDSGKPVRFSTTISNVNRTVGTMLGHEVTKAYGGQGLPDGTIDITFDGSAGNSFGAFVPRGITLRVYGDANDYVGKGLSGGRIVVRPSDNAPADYVAEDNIIGGNVILFGATSGEAYLRGVVGERFAVRNSGAHAVVEGVGDHGCEYMTGGKVVVLGRTGRNFAAGMSGGVAYIYDPPGEFPQHLNAEMVELESLDDDDIEWLHGMIQAHVDATDSAVGQRILGDWAQQQRHFVKVMPRDYKRVLQAIAEAERDGGDVDKAIMAAAHG

SEQ ID NO: 6682 - protein, 449 aa, Mycobacterium avium 104
MAGTSQLRQGLSQRQLSMIALGGVIGAGLFVGSGVVIKDTGPAAFLTYALCGLLIVLVMRMLGEMAAANPSTGSFADYAAAALGRWAGFSVAWLYWYFWVIVVGFEAVAGGKVLNYWFHAPLWVLSLGLMLLMTATNLFSVSSFGEFEFWFAGIKVATIVIFLVVGAAYVIGLVPGHHDGLTNLVSHGGFFPRGVGAVFAAIVVVIFSMVGAEIVTVAAAESRDPRRAVQKATRSVVTRIGIFFVGSVFLLVAILPWDSVELGASPYVAALKHLGLAGADQVMNAVVLTAVLSCLNSGLYTASRMLFVLAERGEAPARLVRLSGRGVPHIAILCSSAVGFLCVVMARVAPNTVFLFLLNSSGAIILFVYWLIALSQIVLRRRTPAERLSVKMWFFPVLSVLTLAGITAVLVQMAFDATARSQLWLSLLSWAVVVALYFVARSRGRVAAR

SEQ ID NO: 6683 - protein, 392 aa, Mycobacterium avium 104
MVYLDHAATTPMHPAAVEAMTAVLGTVGNASSLHTSGRAARRRIEESRELVADKLGARPSEVIFTAGGTESDNLAVKGIYWARRDAEPRQRRIVTSEVEHHAVLDSVNWLVEHEGAEVTWLPTAADGSVSPAALREVLTRHDDVALVSVMWANNEVGTVQPVAELAAVAAEFGVPMHSDAVQAVGQLPVDFTASGLSAMSVTAHKFGGPPAVGALLLRRDVACVPLAHGGGQERDIRSGTADVAGAVGMAAAARISVDGLETNSARLRALRDRLVDGVLGGIEDVTLNGARDPLRLPGNAHFTFRGCEGDALLMLLDANGIECSTGSACTAGVAQPSHVLVAMGVDPASARGSLRLSLGHTSIDADVDAVLRVLPGAVERARRAALAAAGAS

SEQ ID NO: 6684 - protein, 272 aa, Mycobacterium avium 104
MSAGGSPLRNGDPAPARGTVPLTPDACPSWLRPLVDNVDDVPDAARRRLPADVLAMITTKAASALTSVRGAAREAAVLVLFSGPESGPPGGGPPTDADLLVTVRASTLRHHAGQAAFPGGAADPTDDGPVATALREAREETGIDVSRLHPLATMEKMFIAPSQFHVVPVLAYSPDPGPVAVVNEAETALVARVPLRAFINPANRLMVYRGDLGRRWAGPAFLLNEMLVWGFTGQVISALLDVAGWAQPWDTSDQRELDAAMALVGERGDALE

SEQ ID NO: 6685 - protein, 329 aa, Mycobacterium avium 104
MPRLAILDDYARVALQVADWSRVQKRCDITVFDEHLSEQQAVDALRPFDVVCTMRERMAFPRSLIERLPHLRLLTIVGRQLPNLDMAAATEHGIAVARSEFAHPRFAALRDATPELAWGLMIATVRHLADEHRQMRAGGWQRTAGMTLSGKTLGLLGLGRVGSRMAGFAAAFGMEVIAWSQNLTDDAAAAVGARRVSKAALFESADVVSVHLVLSERTRGLVGEPELALMKPSAYLINTARGPIVDEPALIAALTAGRIAGAGLDVYDVEPLPGDHPLRSLPNVTLSPHLGYVTREMLGAFYADTVESVLAWLDGTPIRIANPEVLQRD

SEQ ID NO: 6686 - protein, 364 aa, Mycobacterium avium 104
MFTQTVQASGRVLARTVRQRVLGSELLDLLTGPHGVDRYTELVAPTWTLGEARAKVTDVRRTTPRSVTLTLDPNDTFLSSHTVTAGQYVNLTVEIDGRRHTRCYSPANREGAATLELTIGRHDGGLVSNHLYDHARRGMVVGLAGVGGDFVLPDPRPRRVLFVSGGSGITPVMAMVRTLVSQRHRGEIAFIHYAPTPAEACYRDELAALPSVRVLHGYTRSAGGDLSGRFGPDHLAAAMPAPDAVFVCGPTSLVDAVREHCDNVYTESFTPPVLEASADPSGGRVTFSDSGVDVVDDGRSLLEQAEAAGLSPQNGCRMGICHTCTRRKTAGTVRNLVTGAVSTAPDEDVQICVSVPVGDVDLSL

SEQ ID NO: 6687 - protein, 528 aa, Mycobacterium avium 104
MNLPVVLIADKLAESTVAALGDQVEVRWVDGPDREKLLAAVPEADALLVRSATTVDAEVLAAAPKLKIVARAGVGLDNVDVDAATERGVLVVNAPTSNIHSAAEHALALLLAAAREIPAADASLREHTWKRSSFSGTEIFGKTVGVVGLGRIGQLVAQRLSAFGTHLIAYDPYVSPARAAQLGIELLSLDELLARADFISVHLPKTPETAGLIDKDALAKTKPGVIIVNAARGGLVDEAALADAVRSGHVRAAGLDVFSKEPCTDSPLFELPQVVVTPHLGASTTEAQDRAGTDVAASVKLALAGEFVPDAVNVAGGTVNEEVAPWLDLVRKLGLLAATLSDGPPVSLSVQVRGELASEDVEVLKLSALRGLFSAVVEGPVTFVNAPALAEERGVTAEISTASESPNHRSVVDVRAVSHDGTVVNVAGTLSGPQLVEKIVQINGRNFDLRARGINLVINYVDQPGALGKIGTLLGSAGVNIQAAQLSEDAEGPGATILLRLDQDVPADVRSAIGAAVGANKLEVVDLS

SEQ ID NO: 6688 - protein, 455 aa, Mycobacterium avium 104
MTTPKTFADLGVPARIVDALTARGITSPFPIQAETLPDTLAGRDVLGRGKTGSGKTLAFSIPLVGRLSTGNRRPARPTGLVLAPTRELATQITATLEPLAAACGLRVSTIFGGVSQHRQVTALKAGVDIVVACPGRLEDLMRQRLITLEAVRVTVIDEADHMADLGFLPGVTRILAATPNDGQRLLFSATLDNGVDKLVTRFLRDAVLHSVDEANSPVSEMTHHVFHVDSAQAKKELVHRLASGTGRRILFLRTKHQARKLARQLTESGVPSVDLHGNLSQPARERNLAMFAAGSARVLVATDIAARGVHVDEVELVVHIDPPSEHKSYLHRSGRTARAGSAGDVVTVVLPEQREHTRALMRKAGIDVAPQRVTAGSEAVHALVGPIAPPKPPAAAGVPSHPAGPHRPAAAGQRRRRSGRSARTTAAHAAVPHRPAAPARRPDRRRASRAQGSAG

SEQ ID NO: 6689 - protein, 373 aa, Mycobacterium avium 104
MRVGVPTETKTNEFRVALTPAGVAELTRRGHEVLVQSGAGEGSSIPDSEFKAAGAQLADTAEQVWADAELLLKVKEPVPAEYDLLRRNQILFTFLHLAASRACTEALLSSGTTSIAYETVQTADGTLPLLAPMSEVAGRLSAQVGAYHLMRTHGGRGVLMGGVPGVKPADVVVVGAGTAGYNAARVAGGMGAMVTVLDVNINKLRLLDAEFDGQVRTRYSSAYDLEGTVKRADLVIGAVLLPGAKAPNLISNSLVAQMKSGAVLVDISIDQGGCFEDSRPTTHDDPTFAVHDTVFYCVANMPSAVPKTSTVALTNATMPYVLALADRGWRAACRSDHALAKGLSTHDGTLLSQQVAADLGLPCTDPAGVLQQD

SEQ ID NO: 6690 - protein, 383 aa, Mycobacterium avium 104
MTEAYIVDAVRTAVGKRGGGLAGVHPADMAAHVIKTLVGRHDIDPAAIDDVILGCLDNIGSQAGDIARTAALAAGLPESVPGVTVDRQCGSAQQAVHFAAQAVMSGTCDLIVAGGVQKMSQFPILCAFEAGEPFGSSDPWTGCEGWQARYGDQEISQFRGAEMIASQWNLSREDNERFALASHQRAVTAISEGRFTREIIPFAGVSVDEGPRANTSLEKMAGLPTLVEGGVLTAAVASQISDGAAALLIASQDAVDRFGLNPRARVHHMSVRGSDPVMMLTAPIPATQHALKRTGLSIDDIDTVEINEAFAPVVLAWLAELGADPVKVNPNGGAIALGHPIGCTGARLMTSMLHELERTGGRFGLQTMCEGGGQANVTIIERL

SEQ ID NO: 6691 - protein, 569 aa, Mycobacterium avium 104
MLAALAIFFRGERPMTTARPAKARNEGQWALGNREPLNPNEEMKQAGAPLAVRERIETIYAKNGFDSIDKSDLRGRFRWWGLYTQREQGYDGSWTGDENIEKLEARYFMMRVRCDGGAISAAALRTLGQISVDFARDTADITDRENIQYHWIEVENVPEIWRRLDAVGLRTTEACGDCPRVILGSPLAGESLEEVIDPSWAIAEIARRYIGQPEFADLPRKYKTAISGLQDVAHEVNDVAFIGVNHPEHGPGLDLWVGGGLSTNPMLAQRVGAWVPLHEVPEVWAAVTSVFRDYGYRRLRSKARLKFLVKDWGIEKFREVLETEYLKRPLIDGPAPEPVAHPIDHVGVQRLKNGLNAVGVAPIAGRVSGTILLAVADLAQQAGCDRIRFTPYQKLVLLDIPDDKLDEVVAGLEALGLQSQPSHWRRNLMACSGIEFCKLSFAETRVRAQGLVPELERRLADVNRQLDVPITINLNGCPNSCARIQVADIGLKGQMVDDGEGGSVEGFQVHLGGSLGQDSGFGRKLRQHKVTSDELGDYIERVARNFLKYRGEGERFAQWAMRADEDDLR

SEQ ID NO: 6692 - protein, 386 aa, Mycobacterium avium 104
MPEAYVIDAVRTAVGKRGGSLAGIHPVDLGALGWRGLLDRVDVDPAAVDDVIAGCVDAIGAQAGNIARLSWLAAGYPEEVPGVTVDRQCGSSQQAISFGAQAIMSGTADLIVAGGVQNMSQIPISSAMTVGEQFGFTSPTNESKQWLHRYGDQEISQFRGSELIAEKWNLSREEMERYALTSHERAFAAIRGGHFDNEIITVETESGPFRVDEGPRESSLEKMAGLKPLVEGGRLTAAMASQISDGASAVLLASERAVKDHGLQPRARIHHISARAADPVFMLTGPIPATRYALDKTGLSIDDIDTVEINEAFAPVVLAWLKEIKADPEKVNPNGGAIALGHPLGATGAKLFATMLNELERIGGRYGLQTMCEGGGTANVTIIERL

SEQ ID NO: 6693 - protein, 419 aa, Mycobacterium avium 104
MNYTGHNGKPLVERVSTENAAARIEGLPRVPISKATAHEVISLSYGFFTPLTGFMGRREVDATLDEFALPDSTLWSIPIVFDMSADDIAERDVKEGASVVLDYLGVPMAILDVTEIYEYDLERMAEKTYGTTDPRHPGVKKTLGYHNRFIGGDITLINEPVFNEPFKSFWLTPRQHQDALAAKHWHRVVAHQTRNVPHTGHEALMKQAWLAANEDQPVDSLDTGVLVNAIIGQKRVGDYIDEAILLAQNALRTSGYFRENVHMVSFTLWDMRYAGPREAIFHAILRTNLGCTHHMFGRDHAGVGDFYHPYDSQNILKQYRNQLGIKPVFLRENWYCPVCLEVTNSALCGHEAQAQSFSGSLIRSILTDEVKPTQKVMRHEVFEVVMECAAKHGQGSPFVTEEYLANRLPVFTLNQLEGS

SEQ ID NO: 6694 - protein, 314 aa, Mycobacterium avium 104
MTINASAPQRQGAVAVVDTVTALPAAVAGDGGTADPFEPLTVGAMVDRVSAMAVEKAAHPWAFLMRSLVGGAMVAFGVLLALVVSTGVKTPGVASLLMGLAFGMSFVLILVSGMSLITADMAAGFLAVLQRALSIRSYVVLVAVGLVGNIVGALVFVTVCAAAGGPYLGAFADRAATVGTQKAGQPFWTALLLAVLCTWFLQTSMCMFFKARSDVARMALAFYGPFAFVIGGTQHVIANVGFVGLPLLLNLFHPIAARGDIGWGFGDHGLLTNIGVTTVGNLIGGTVFVALPFWIIAHLQRRRLLSTGALRPDG

SEQ ID NO: 6695 - protein, 496 aa, Mycobacterium avium 104
MRHDDYTLVIPTVGRESLRRLLIALRESMGPQPPEVVVVDDRPRPGDGLPLPDDPPVRVLRSGGRGPAAARNVGWRASRSRWVCFLDDDVLPDRDWISALCLDLKAADACGAAGSQAVLEVPTPRRPSDDQRRTARLATAQWITADMAYRRDILVAAGGFDERFPRAYREDSDLALRIVSAGGTILRGERRCTHPVAPATWRSSVRAQIGNRDNALMRRKHGRRWRTRIGEGPGRMPAHAATTAAGTAALLAGLLGRRATARRAAALWLLCTIEFAARRWLSGPRNVREALGLSATSVLIPPVAVAHRLAGEWTFRRARPEPPLAVLLDRDDTLIVDRPYLNDPAGVRPTYDAAKALTRLRRRGLLLAVVTNQSGVARGLISAGQLAAVNDRVDEVLGPFDSWQVCVHGAADGCGCRKPRPGLILAAAEALGVPARRCVMIGDTGADVRAALAAGAAAVLVPTDRTLPAEVEHARAHARVAATLNDAVSLVLSECR

SEQ ID NO: 6696 - protein, 393 aa, Mycobacterium avium 104
MTVSRLRPYATTVFAEMSALAARVEAVNLGQGFPDEDGPAEMLKAAQEAIADGVNQYPPGIGIAPLRHAIAAQRHRRYGIEYDPDTEVLVTVGATEAIASAVIGLVEPGSEVLLIEPFYDSYSPVIAMASAQRVAVPLVPHGRGFALDADALRRAVTPRTRALIVNSPHNPTGTVLGATELAAIAEVAVESDLLVITDEVYEHLVFDDHRHLPLAGFDGMAERTITISSAAKMFNCTGWKIGWACGPAHLIAGVRAAKQYLSYVGGAPFQPAVALALETQDAWVADLRDRLRARRDRLAAGLIDIGFEVHDSAGTYFLCADPRPLGYDDSVAFCAALPEKVGVAAIPLSPFCDPAGAHGPADVWNHLVRFTFCKRDDTLDEAIRRLAALRGTG

SEQ ID NO: 6697 - protein, 393 aa, Mycobacterium avium 104
MTTSVIVAGARTPIGKLMGSLKDFSASDLGAIAIAGALEKANVPADLVEYVIMGQVLTAGAGQMPARQAAVAAGIGWDVPALSINKMCLSGIDAIALADQLIRAGEFDVVVAGGQESMTKAPHLLMDSRAGYKYGDVTVLDHMAYDGLHDVFTDQPMGALTEQRNDVDKFTREEQDQYAARSHQRAAAAWKDGVFTDEVVPVNIPQRKGDPLQFTEDEGIRANTTAESLAGLKPAFRKDGTITAGSASQISDGAAAVVVMSKAKAQQLGLSWLAEIGAHGVVAGPDSTLQSQPANAIKKALGREGISVDQLDVVEINEAFAAVALASTRELGVNPDIVNVNGGAIAVGHPIGMSGARITLHAALELSRRGSGYAVAALCGAGGQGDALILRAG

SEQ ID NO: 6698 - protein, 555 aa, Mycobacterium avium 104
MTAARPVKTRNEGQWALGDREPLNDTEKIKLADGPLNVRERIINVYAKQGFGSIDKSDLRGRFRWMGLYTQREQGYDGSWTGDDNTDKIEAKYFMMRVRSDGKAMSAHTMRTLGQISTEFARDTADISDRENLQLHWIRIEDVPEIWRRLESVGLQTTEACGDCPRGIHGSPLAGDSLDEVLDPSPAIEEIVRRSLNNPEYANLPRKYKTAVSGLQDVSHETHDVAFVGVDHPEHGPGLDLWVGGGLSTNPMLAQRLGVWVPLDEVPDVWEAVTQLFRDYGYRRLRAKARLKFLVKDWGIEKFREILEQEYLNRRLIDGPAPAPVKHTIDHVGVQKIKNGLNAVGVAPIAGRVSGTTLSAVADLMEQVGSDRARWTPFQKLVILDVPDDKVDELVAGLDALGLPSRPSSWRKNTMACTGIEFCKLSFAETRVRTQTLVPELERRLADVDAQLDAPISLHLNGCPNSCARIQVADIGFKGQWIDNGDGTSVEGFQVHLGGGLGEQSGFGRKLRQHKVTSEELGDYIDRVTRRYLEGRNDGETFASWALRADEEELR

SEQ ID NO: 6699 - protein, 291 aa, Mycobacterium avium 104
MVVAFLGLGNMGAPMAANLVAAQHAVRGFDPVPAALSAATASGVTGFDTATDAVTGADVVITMLPNGEVVKRCYAEILPAARPGALFIDSSTISVADAREVHAQAQSHGVAQLDAPVSGGVKGAVAGTLAFMVGGEPEALERARPVLEPMAGKIIHCGAAGAGQAAKVCNNMVLAVQQIAIGEAFILAEKLGLSAQSLFDVITGATGNCWAVHTNCPVPGPVPTSPANNDFKPGFAAALMNKDLGLAMDAVTSTGAAAPLGRHAAEIYAKFAASHGDKDFSAVIEMLRGAC

SEQ ID NO: 6700 - protein, 561 aa, Mycobacterium avium 104
MTDAATEPAYTVGDYLLDRLAELGVSEIFGVPGDYNLEFLDHIVAHPRLRWVGNANELNAGYAADGYGRLRGMSALVTTFGVGELSAANAVAGSYAEQVPVVHIVGGPSKDAQGTRRALHHSLGDGDFEHFFRVSREITCAQANLMPATARREIDRVLSEVREQKRPGYILLSTDVARFPTEPPEAALPRYTGGTSPRALAMFTEAAAALIGEHRITVLADLLVHRLQAIKELEALLAADVVPHATLMWGKSLLDESSPNFLGIYAGSASAPAVRTAIEEAPVLVTAGVVFTDMVSGFFSQRIDPARTIDVGQYQSSVAGEVFAPLEMGEALQALAAILTRRGVSSPPVASPPAEPLPPPPPREQPLTQKMVWDRVCTALTPGNVVLADQGTSFYGMADHRLPQGVTFIGQPLWGSIGYTLPAALGAAVAHPDRRTVLLIGDGAAQLTVQELGTFAREGLSPVIVVVNNDGYTVERAIHGETAPYNDIVGWKWTEVPNSLGVTDHLAFRVQTYGELDDALTAAARHQDRMVLVEVVLPRLEIPRLLVELVRPTSPDGSPRR

SEQ ID NO: 6701 - protein, 414 aa, Mycobacterium avium 104
MHSSAHHRQQRTFAQSSKLQDVLYEIRGPVHQHAARLEAEGHRILKLNIGNPAPFGFEAPDVIMRDMIQALPYAQGYSDSQGILPARRAVVTRYELVDGFPRFDVDDVYLGNGVSELITMTLQALLDNGDEVLIPSPDYPLWTASTSLAGGTPVHYLCDETQGWQPDIADLESKITERTKALVVINPNNPTGAVYSGEILSQMVDLARKHELLLLADEIYDKILYDAAKHINVASLAPDMLCLTFNGLSKAYRVAGYRAGWLAITGPKDHAGSFIEGINLLANMRLCPNVPAQHAIQVALGGHQSIEDLVLPGGRLLEQRDVAWSKLNEIPGVSCVKPAGALYAFPRLDPEVYDITDDEQLVLDLLLQEKILVTQGTGFNWPAPDHLRIVTLPWARDLAAAIERLGNFLVGYRQ

SEQ ID NO: 6702 - protein, 366 aa, Mycobacterium avium 104
MSIRRAASRAPSIWASRPADLYGRRDHDRFTAVLWGVRAVFEGFASVSRWHPARVKPVQRKLTAVVTKREFAAPDVVALTLADPDGGLLPSWTPGAHIDVLLPSGRRRQYSLCGPPGHRGEYRIAVRRIADGGGGSIEMHEAFGVGDTVEFEGPRNAFYLGTAEHDVLFVIGGIGVTPILPMIRVAAGRGIDWRAIYTGRSREYMPLLDEVVSVDPQRVTVWADDEHGRFPTAAELLAAAGPATAVYVCGPSAMLEAVWIARNEHAGAPLHYERFSPAPVVDGVPFELELARSRQVLAVPANRTALDVMLDRDATTPYSCRQGFCGTCRVKVLAGQVDHRGRTDPGQDGMLVCVSRADGGRLVIDA

SEQ ID NO: 6703 - protein, 402 aa, Mycobacterium avium 104
MRRAAIVAPRRTPVGTFGGSLRPLRAEDLAAHVIRAVVAQSAIDPPVIDDVVFAQSYANSEAPCIGRWAALHAGLPISVPGQQIDRRCGGGLQAVITAAMMVQTGAADVVLAGGVESMSNIEHYTTTARWGSRSGNQILYDRLDRGREMSQPTWRFGPISGMIETAENLAADYGIDRAAADAFAARSHQRAAAAQRSGAFDSEIVAVEAPQRRGDPVVVDRDEGVRPDCTPESLARLRPITSNGTVTAGNSSQQNDAAAACLVVAEDRLGNLGLEPIGYLESWAVVGCEPSRMGIGPVRAVEKLFYKTGVGFDDLALIEINEAFAVQVLAVLSGWGIKLDDVDDRLNVNGSGISLGHPIGATGVRILTTMLHELHRRGGGLALETMCIGGGQGLAALFRGAA

SEQ ID NO: 6704 - protein, 623 aa, Mycobacterium avium 104
MARAVGIDLGTTNSVVAVLEGGDPVVVANSEGSRTTPSIVAFARNGEVLVGQPAKNQAVTNVDRTIRSVKRHMGTDWSIEIDGKKYTAQEISARVLMKLKRDAEAYLGEDITDAVITVPAYFNDAQRQATKEAGQIAGLNVLRIVNEPTAAALAYGLDKGEKEQTILVFDLGGGTFDVSLLEIGEGVVEVRATSGDNHLGGDDWDDRIVNWLVDKFKGTSGIDLTKDKMAMQRLREAAEKAKIELSSSQSTSINLPYITVDADKNPLFLDEQLTRAEFQRITQDLLDRTRQPFKSVIADAGISVSDIDHVVLVGGSTRMPAVTDLVKELTGGKEPNKGVNPDEVVAVGAALQAGVLKGEVKDVLLLDVTPLSLGIETKGGVMTKLIERNTTIPTKRSETFTTADDNQPSVQIQVYQGEREIAAHNKLLGSFELTGIPPAPRGVPQIEVTFDIDANGIVHVTAKDKGTGKENTIKIQEGSGLSKEEIDRMIKDAEAHAEEDRKRREEADVRNQAESLVYQTEKFVKDQREAEGGSKVPEETLSKVDAAIADAKTALGGTDITAIKSAMEKLGQESQALGQAIYEATQAESAQAGGPDGAAAGGGSGSADDVVDAEVVDDDRESK

SEQ ID NO: 6705 - protein, 297 aa, Mycobacterium avium 104
MTIGFIGLGNMGFPMASRLIREQHDVVAFDSRREALERLVAAGARPASSPKEVADGAETVLASLPTPGASLEVATGTAGVIEGARVKRYVDLSTVGSRTAMRIHDLLARRNIVAIDSPVSGGVGGAEQGTLALMVSGPRGEFDVIRTTLEALGRPFYVGDKPGAAQTMKLANNILAANVLAATAEVVVMGVKAGLDPAVMIEVLNAGSGATSASRDKFPRAILPRSFDYGFATGLMVKDVRLYLDEAKALGVPAEVAETIARLWETAAREEGPEADFTTVIKPLERAAGVTVGRSAR

SEQ ID NO: 6706 - protein, 461 aa, Mycobacterium avium 104
MAPGTADHLRRGIGTFQLTMFGVGSTIGTGIFFVMSQAVPEAGPAVIVSFLLAGVAAGLAAVCYAELASAVPVSGSSYSYAYTTLGEVVAMGVAACLLLEYGVATAAVSVNWSGYLNKLLSNVVGFQLPHALSAAPWDAQPGYVNLPAVMLIGMCALLLIRGASESAKVNAIMVMVKLGVLVVFGILAFTAFDMHHLDDFAPFGVAGVGTAAGTIFFSYIGLDAVSTAGDEVTNPQKTMPRALIAALLTVTGVYVFVALAALGTQPWQDFGGQQEAGLATILDHVTHGSWASTILAAGAVISIFSVTLVTMYGITRILFAMGRDGLLPPRFARVNPRTMTPVNNTVIVAVAAATLAAFIPLQNLADMVSIGTLTAFVVVSVGVIVLRVREPDLPRGFRVPGYPVTPVLSIMACGYILASLHWYTWIAFSGWVLLALIFYFVWGRHHSALNDAAVDPSGQER

SEQ ID NO: 6707 - protein, 643 aa, Mycobacterium avium 104
MCGLLAFVAARAGAVGADDAIARASHLMRHRGPDEPGTWAGADGSVVFGFNRLSIIDIAHSHQPLRWGPPETPDRYELVFNGEIYNYLELRDELAAHHGAVFATDGDGEAIVAGFHHWGTDVLTRLRGMFAFALWDTVTRELFCARDPFGIKPLFVATGTGGTAVASEKKCLLELAELIGFDTAIDERAVQHYTVLQYVPEPETLHRGVRRLESGCYARIRPGAAPDITRYFVPRFAAVPITRDTEQARYDEITAVLEDSVAKHMRADVTVGAFLSGGIDSTAIAALAIRHNPRLITFTTGFEREGFSEIDVAVASAEAIGARHIAKVVHPDEFVAALPEIVWYLDEPVADPALVPLFFVAREARKHVKVVLSGEGADELFGGYTIYREPLSLKPFDYLPRPVRRSMGKVSKPLPDGMRGKSLLHRGSLTLEERYYGNARSFSDAQLRDVLPGFRAEWTHTDVTAALYAQSIGWDPVARMQHIDLFTWLRGDILVKADKMTMANSLELRVPFLDPEVFAVASRLPVEAKITRTTTKYALRRALEPIVPAHVLHRPKLGFPVPIRHWLRAGELLEWAYSMVASSQAGHLVDLGAVRRMLDEHRNGVSDHSRRLWTVLIFMLWHAIFVEHSVVPQIGEPVYPVQL

SEQ ID NO: 6708 - protein, 364 aa, Mycobacterium avium 104
MTEADSAQALDEPLGDHVLELQIAEVIAETDDARSLVFAVPDDDGDPDIPPERLRYAPGQFLTLRVPSERTGSVARCYSLCSSPFTDDALTVTVKRTADGYASNWLCDNARPGMRIHVLAPSGNFVPKTLGDDFLLMAAGSGITPIMSIAKSALSEGSGRVTLLYANRDERSVIFADALRELSAKYPDRLTVLHWLESLQGLPSVTALAQLAAPYTDRPVYICGPGAFMDSAREALETLKVPAAQIHIEVFKSLDSDPFAAVKIEDTAEGDEPPATAVVELDGETHTVSWPRNAKLLDVLLAKGLDAPFSCREGHCGACACTLRKGQVSMEVNDVLEQQDLDEGLILACQSHPESDSVEVTYDD

SEQ ID NO: 6709 - protein, 360 aa, Mycobacterium avium 104
MTMAQAIWESIPADLYGRRKRDRMYTALYGVGALFGGLASASRWTPARVVPVRRTTTAVVTQREELAPDVVAFTLADPHGGLLPSWTPGAHIDVRLPSGRRRQYSLCGPPGRRTDYRIAVRRIEDGGGGSIEMHDTFRVGDALEFEGPRNAFYLVTDERDVLFVIGGIGVTPILPMIQTAQQHGINWRAVYAGRSRDYMPLLDEVVAVAPERVSVWADDERGRIPTAADLLAEAGPATAVYVCGPTAMLEAVRTARDEHADAPLHYERFGPPPVVDGVPFELELARSRRVLTVPGNRSALDVMLDRDPATPYSCQQGFCGTCKVKVLAGQVDRRGRTVEGDDEMLVCVSRAKNDRLVIDA

SEQ ID NO: 6710 - protein, 334 aa, Mycobacterium avium 104
MAEAERVPMTAGLPLLRRACTALAAVLVAAGCGHTESLRVASVPTLPPPTPVGMEQLPPQPPLPPDGPDQNCDLTASLRPFPTKAEADAAVADIRARGRLIVGLDIGSNLFSFRDPITGEITGFDVDIAGEIARDIFGAPSHVEYRILSSDERVTALQRGEVDVVVKTMTITCDRRKQVNFSTVYLDANQRILAPRDSPITKVSDLSGKRVCVAKGTTSLHRIRQIDPPPIVVSVVNWADCLVAMQQREIDAVSTDDSILAGLVEEDPYLHIVGPNMATQPYGIGINLNNTGLVRFVNGTLERIRRDGTWNTLYRKWLTVLGPAPAPPTPRYLD

SEQ ID NO: 6711 - protein, 398 aa, Mycobacterium avium 104
MSERVILAYSGGLDTSVAISWIGKETGREVVAVAIDLGQGGEDMEVIRQRALDCGAVEAVVVDARDEFAEGYCLPTIRNNALYMDRYPLVSAISRPLIVKHLVAAAREHGGSIVAHGCTGKGNDQVRFEVGFASLAPDLEVLAPVRDYAWTREKAIAFAEENAIPINVTKRSPFSIDQNVWGRAVETGFLEHLWNAPTKDVYAYTEDPTLNWSTPDEVIVGFERGVPVSIDGKPVSVLGAIEELNARAGAQGVGRLDVVEDRLVGIKSREIYEAPGAMVLITAHTELEHVTLERELGRFKRHTDQRWAELVYDGLWYSPLKAALESFVDKTQEHVTGEIRMVLHGGHIAVNGRRSAESLYDFNLATYDEGDSFDQSAAKGFVYVHGLSSKIASRRDQR

SEQ ID NO: 6712 - protein, 188 aa, Mycobacterium avium 104
MPAPELRDVRTVFLDRDGTVNVKAAEGEYIRSPAELVLLPGAARALAALNAAGLRTVLVTNQRWLSEPTAAPADFAAVHDRLIRLLADRGARVDAAYHCPHPANSCDCRKPGPGMLLRAAAEHDVDLAASVMIGDSDVDMVAGRAAGTKTILIRPGARQAVAEADFVVDDLAAAVELILNAGKTPPAG

SEQ ID NO: 6713 - protein, 492 aa, Mycobacterium avium 104
MAPGGGRGSKTASYGNSDFVVVANRLPVDQERLPDGSTAWKRSPGGLVTALEPLLRRQRGAWVGWPGIVDEDVDHEDDPIVQDDLELRPVKLSADDVAEYYEGFSNATLWPLYHDVIVKPIYHREWWDRYVAVNRRFAEATSRAAARGATVWVQDYQLQLVPAMLRELRPDLTIGFFLHIPFPPVELFMQLPWRTEIVKGLLGADLVGFHLTGGAQNFLFLSRRLIGANTSRGAVGVRSRYGEVELESRVVRVGAFPISIDSTALDQTARHRDIRRRAREIRAELGNPRKVLLGVDRLDYTKGIDVRLKAFSELLAEGRAKRDDTVLVQLATPSRERVDSYQQLRNDIERQVGHINGEYGEVGHPVVHYLHRPVPRNELIAFFVAADVMLVTPLRDGMNLVAKEYVACRSDLGGALVLSEFTGAAAELRQAYLVNPHDLEGVKDTVEAALNQSVEEGRRRMRSLRRQVLAHDVDRWARSFLDALAESGPRDG

SEQ ID NO: 6714 - protein, 384 aa, Mycobacterium avium 104
MRETVIVEAVRTPVGKRNGALSGMHAADLSAIVLNELVERTGIGPELIDDVVWGCVSQVGDQSSNIGRYAVLAAGWPESIPGTTVNRACGSSQQALDFAVQAVMSGQQDVVVAGGVEVMSRVPLGAARATGTPYGPKVLARYDDFSFNQGLSAEMIAKKWGFSRTQLDEYSVRSHERAAAAQDAGAFTDQIVPVFVEDAENKVVAADEGVRRGSSVEKLAALKPAFAEDGVIHAGNSSQISDGAAALLVTTAEMAVELGLTPIVRYVAGAVTGADPVLMLTGPIPATEKVLKKAGVALSDVGVFEVNEAFAPVPLAWLAETGADAARTNPLGGAIALGHPLGASGAVLMTRMAHHMRDNGIRYGLQTMCEGGGTANATLVELVS

SEQ ID NO: 6715 - protein, 579 aa, Mycobacterium avium 104
MAAVLTPRGPDAGGAWSQGRVALGHRRLKIIDLTEAGAQPMVDSELGLSIAWNGCIYNYKELRSELSGYGYRFFSHSDTEVLIKAYHRWGDDFVSHLFGMFAFAIVERDSGRVLLGRDRLGIKPLYLTEDSHRVRFASTLPALLAGGGVDTRIDPVALHHYMSFHSVVPAPATILRGVRKVPPASLVAIEPDGKRTVTTYWAPDFTRHADRADWSERDWEDAVLSTLRLAVKRRLVADVPVGCLLSGGVDSSLIVGLLAEAGQHGLSTFSIGFESAGGVKGDEFQYSDIVAQRFETNHHQIRIDSARMLPALDGAIGAMSEPMVSHDCVAFYLLSQEVARHVKVVQSGQGADEVFAGYHWYPPMGDPAAATLDGAVAQYRRAFFDRDTAGVAQLVGPGILAPGDPSLRFVTEHFAQAGAETGIDRALRLDTTVMLIDDPVKRVDNMTMAWGLEGRVPFLDHELVELAATCPPEYKIAHEGKGVLKQAARRVIPSEVIDRPKGYFPVPALTHLEGPYLDMVRDALYAPTAKERGLFNTDAVDALLANPNGKLTPLRGNELWQIALLELWLQRHGVTGPVA

SEQ ID NO: 6716 - protein, 492 aa, Mycobacterium avium 104
MPRFVDRVVIHARAGSGGNGCASVHREKFKPLGGPDGGNGGRGGSIVFVVDPQVHTLLDFHFHPHISAPSGKQGMGNNRDGAAGADLEVKVPDGTVVLDENGRLLADLVGAGTRFEAAAGGRGGLGNAALASRARKAPGFALLGEPGETRELTLELKTVADVGLIGFPSAGKSSLVSAISAAKPKIADYPFTTLVPNLGVVSAGEHTFTVADVPGLIPGASAGRGLGLDFLRHIERCAVLVHVIDCATADPGRDPISDIDALEAELAAYTPTLQGDVTLGDLTERPRAVVLNKIDVPEARELAEFVRDEIAERGWPVFLVSTVAREGLQPLIFGLWQMISEYQSAQPEIVPRRSVIRPVPVDDSGFRVEPDPRQPGAFVVSGARPERWVRQTNFDNDEAVGYLADRLARLGVEEELLRLGARPGCAVTIGDMTFDWEPQTPAGQQVVLSGRGTDARLERTERVGAAERKAARRQRRTGDDAERGTTERGENT

SEQ ID NO: 6717 - protein, 485 aa, Mycobacterium avium 104
MDQSDAPLLNALADYRDKNRYGFAPPGHRQGRGTDDRVLAVLGREPFLDDVLASGGLDDRRTSNGYLQRAEDLMAEAVGAEIAWFSTCGSSLSVRAAMMAVAGGQGSLLVGRDSHKSIVAGLIFSGVQPRWITPRWDAERHFSHPPSPQQVEEAWDKHPDAAGALVVSPSPYGTCADIAGIAEVCHRRGKPLILDEAWGAHLPFHEDLPTWAMDAGADVCVVSVHKMGAGFEQGSVFHVQGDLIDRDRLSACADLLMTTSPNVLIYAAMDGWRRQMVQHGHQLLGAALDLARQVRDEIELIPDVEVLDDELLGVQASHDLDRMQVLIDVCGTGTSGYQAADWLREHARIDVGMSDHRRILATLSMADDKETLGRLTDALRAWRTAAQDFDPAPRIALPSPGEMQLETVELPRDAFFGRVQEVPTKTAAGRIAAEQITPYPPGIPAVVPGERLNDAVLDYLCSGVAAGTNLPDAADPSLQTIRVLA

SEQ ID NO: 6718 - protein, 421 aa, Mycobacterium avium 104
MALVVQKYGGSSVANADRIRRVAERIVATKKQGNDVVVVVSAMGDTTDDLMDLAQQVCPAPPPRELDMLLTAGERISNALVAMAIESLGAQARSFTGSQAGVITTGTHGNAKIIDVTPGRLQAALDEGRIVLVAGFQGVSQDTRDVTTLGRGGSDTTAVALAAALGADVCEIYTDVDGIFSADPRIVHNARKLDTVTFEEMLEMAACGAKVLMLRCVEYARRYNIPVHVRSSYSDKKGTVVVGSIKDKPMEDPILTGVAHDRSEAKVTVVGIPDIPGYAARVFRAVADADVNIDMVLQNVSKVEDGKTDITFTCSREAGPTAVAKLDALKDEIGFTQLLYDDHIGKVSLIGAGMRSHPGVTATFCEALAQVGVNIELISTSEIRISVLCRDTELDKAVVALHEAFGLGGAETATVYAGTGR

SEQ ID NO: 6719 - protein, 350 aa, Mycobacterium avium 104
MFDFFSLDFVYYPVSWIMWVWYKLFAAMLGPSNFFAWALSVMFLVFTLRALLYKPFVRQIRTTRQMQELQPQIKALQKKYGKDRQRMALEMQKLQREHGFNPILGCLPMLAQIPVFLGLYHVLRSFNRTTGGFGQPHLSVVQNRLTGNYVFTPTDVGHFLDANLFGAPIGAFMTQRTGLDAFTYFSRPAVIAVGLPVMILAGVATYFNSRASVARQSPEAAANPQTAMMNKLALYVFPLGVVVGGPFLPLAIILYWFANNIWTFGQQHYVFGMIEKEDEAKKQEAIQRRAANAPAPGAKPKRNLKAGAGNGVDADAAQSDAGATEGQAGGGSDAPSRTPRPGARPKKRKR

SEQ ID NO: 6720 - protein, 695 aa, Mycobacterium avium 104
MADISAIYVAAPEPETGKSTVALGLLHRLTATVAKVGVFRPITRDGQDRDYILELLLSRTTAGLSYQQCVGVTYQQLHADGDAAIATIVDAYHAMAELCDVVVIVGSDYSELGQAIRPAELSTNARIAVNLGAPILLTVSGKGRTAAEVATVVQVCLAELDAQHAHTAAVVANRCEPAELDAVAEALRGFPQRCYVLPDEPLLSAPTVTELEKAVAGSPVSGEESLREREVTGILVAGMTADHVLERLADGMAVITPGDRSDVVLAVASAHAAEGFPSLSCIVLNGGFALHPSIAALVAGLRLRLPIVATALGTYDTASAAAAARGRVTATSQRKIDTALELMDRHVDIADLLEQLAIPIPTVTTPQMFIHQLTLQARADRKHIVLPEGDDDRILRAAGRVLQRRVADLTILGDEARIRQRSGELGVDLSDVKVIDPRTSALRPEFAQQYAQLRKAKGVTIEQAREIMRDATYFGTMLVYTSQVDGMVSGAAHTTAHTVRPAFEIIKTVPDVSTVSSIFLMCLPDRVLAYGDCAIIPNPTPEQLADIAISSARTAAQFGIEPRVAMLSYSTGDSGTGADVEKVRTATQLVRQRNPDLPVEGPIQYDAAIEPSVAATKLRDSPVAGRATVLIFPDLNTGNNTYKAVQRSAGALAIGPVLQGLRKPVNDLSRGALVEDIVNTIAITAIQAQGLPGGR

SEQ ID NO: 6721 - protein, 299 aa, Mycobacterium avium 104
MTEFRSGFVCLVGRPNTGKSTLTNALVGTKVAITSMRPQTTRHTIRGIVHRDDFQIILVDTPGLHRPRTLLGKRLNDLVRDTYAEVDVIGLCIPADEAIGPGDRWIVEQIRATAPKTTLVAIVTKIDKVPKDRVAAQLVAVSELVGDSAEIVPVSAVTGAQVDIVIDVLAAALPPGPAYYPDGELTDEPEEVLMAELIREAALEGVRDELPHSLAVVIDEVNPREDRDDLIDVHALLYVERDSQKGIIIGKGGARLREVGTAARAQIEKLLGTKVYLDLRVKVAKNWQSDPKQLGRLGF

SEQ ID NO: 6722 - protein, 391 aa, Mycobacterium avium 104
MNRDAVIVGAVRTPIGKGKASGALHDVLPADLLAHSLRELVARTGVDPAQVDDVIAGAVTQVGDQAVNIARNALLGAGFPESVPGVTIDRQCGSSQQAISFAAQGVIAGAYDVVIAAGVESMGRVPMGSQVLPGSNPFGEAMNARYPEGLVPQGISAELIAAKWGFSRTQLDEFSAASHEKAARATKDGLFDNELIPIAGLATDEFIRPGTTVQTLAGLQPAFYSEATEARFPQINWEITAGNSSPLSDGSAAVLITSSETAARLGLRPLARIHTTAVVGSDPLYMLTGVIPATEKVLSKAGLTLADIDLFEVNEAFAPVVLAWAQDTGADLDKTNVNGGAIAIGHPLGASGARIITTLVNALEQRGGRYGLQTMCEGGGMANATIIERLS

SEQ ID NO: 6723 - protein, 542 aa, Mycobacterium smegmatis str. MC2 155
MTLESTARDVQLASLADLPDNTPFAANVAGVDLVLIRRGGDVKALYGRCAHRGVLLADGHIDGDTVVCDVHGWRYNVETGISPVNPAVALATFPVQIRDGAVYVDVSAISEFANANPQPYGDDGYQGRWATPANTAEEPFNTDIHELATHGLSRVGKHGPSAAMGVSRTELPSWDSIQLVTAQLARLPLLDQEPVSTETVIGPGAKRPLVLDIPLFVSDMSFGALSEEAKTALAAGAELAGTGICSGEGGMLPEEQQENSRYFYELASGRFGWSFEHLHKVQAFHFKGGQGAKTGTGGHLPGSKVVGKIADVRGLPPGTSAISPARFPDWTSLAEYRDFAAQVRDISGGIPVGYKLSAQHIERDLDAALEIGVDYVILDGRGGGTGSAPTIFPRHISVPTIPALARARRHLDRSESRITLAVTGGIRTPADMVKALALGADAIGVANSAIQAIGCVGMRACHTNACPAGIATQDPHLRARLPVRQAAERLNRYLRSAVDLMVVLARACGHHRLAEFTLDDLTTFDRDFAYLSGVPYGGVTPL

SEQ ID NO: 6724 - protein, 405 aa, Mycobacterium smegmatis str. MC2 155
MPEAVIVATARSPIGRAGKGSLVEMRPDDLAAQMVKAVLDKVPALDPRDIDDLIMGCGQPGGEAGFNIGRAVAVQLGYDFLPGTTVNRYCSSSLQTTRMAFHAIKAGEGHAFISAGVETVSRFAKGNADGWPDTKNPLYADAMKRSDEAAAGTEEWHDPREDGALPDVYIAMGQTAENVALHTGISREDQDHWGVRSQNRAEEAINSGFFEREITPVTLPDGTVVSKDDGPRAGTTYEKISQLKPVFRPNGTVTAGNACPLNDGAAALVVMSDVRAKELGLTPLARIVSTGVSGLSPEIMGLGPIEAVKKALANANMTIGDIDLYEINEAFAVQVLGSARALGMDEDKLNVSGGAIALGHPFGMTGARITATLLNNLQTHDKTFGIETMCVGGGQGMAMVVERLS

SEQ ID NO: 6725 - protein, 390 aa, Mycobacterium smegmatis str. MC2 155
MTVRRLQPFAVTIFAEMSALATRLGAVNLGQGFPDEDGPVEMLKVAQNAIADGINQYPPGLGVPELRQAIAAQRKRVHGVQYDPDTEVLVTVGATEAIAASVIGLVEPGSEVLVIEPFYDSYSPVIAMAGCERRAVPLVPSGRGFAIDVDALRAAVTPQTKALILNSPHNPTGAVASDAELRAVAALAVEHDLLVITDEVYEALVFDGHRHLTLASYPGMRDRTVTISSAAKMFNATGWKIGWACGAPELIAGVRAAKQYLTYVGGAPFQPAVAHALNHEDGWVADLRDSFQSKRDRLGSALAEIGFEVHDSRGTYFLCADPRPLGYDDSTAFCAELPTRAGVAAIPMSAFCDPDAPHADVWNHLVRFAFCKRDDTLDEAIRRLQALRRC

SEQ ID NO: 6726 - protein, 246 aa, Mycobacterium smegmatis str. MC2 155
MADGVTPRSRWRVARVVDSTPETGSARTIRLIVPGWAGHLAGQHVDVKLTAEDGYSAQRSYSLGRPTDGEQVELTVQVVADGEVSPYLVGMGPAEEVELRGPIGGWFVWRPEERSQILLIAGGSGIVPLMAMIRQRERVGSRNFRLIYSVRSPADVYYAKELEQLDRECGWLHVAVIYTREATAETVRPPGRVDVDDLEAAGWTPDDDVRIYVCGPTGFVESVTTKLIGLGHPASTIRTERFGPSG

SEQ ID NO: 6727 - protein, 479 aa, Mycobacterium smegmatis str. MC2 155
MSESLQTGPRTDTGDAGLRRGVMGGGELAAQAIANIAPSAVIAFTAAAIYTTASGGTWISFALATVVILSVGYCISQFAKRRSSAGSLYSYAATALGPFGAYLTGVSLLIGCFGIAAGSLSGAVAYTATLLNQLGLAVGGLAAQIVLAIVLGSLATLFTIRGIRLSARISLVLELVSVSIITVLLVVTLVHLGPDAFDADQFRLSDVKPSGIVVGMVLAILGFVGFSSADALAREAKDPYRAVPRAIMWSAAGVGVLYVFAAYTQVAALGPALGESAQPLDDIATLVGMPTWFNPILNFGIAASFFAVVVAPMNVIGRILYVMGKEGVVPSAIGRTHPTHLTPHRALITVAPLVIAVPVVMYLRDVAPMDVVTWVDTYGTYGYMVAYAAAALAAVVYLRSINARVPLVWPAAIVAIVSMAYVFYANVYPVPPYPLNVIPWLFILTVAAALAWYLILRRRSPHVVANIGTSDVETLEGIG

SEQ ID NO: 6728 - protein, 317 aa, Mycobacterium smegmatis str. MC2 155
MNLTVSGRRDVATGVIELVLRRDDGQALAVWAPGAHIDFIVGPGVVRQYSLCGSPADRAHYRIAVLREEAGRGGSVAIHADAHIGSSFEVAGPRNNFALEPADSYLFIAGGIGITPIIPMVSAAVASDADWRLLYGGRQRTSMAYAEELEQLGPRVSIRPQDVDGLLDLDAVLSRCVAGTLIYCCGPEPLLAAVEDRCERRQLMSSLRLERFQARQPVVGGVDTDFEVELGSTGQVLSVPADRSILDVLRDYGIDVMSSCEEGVCGSCEIPVCSGIPDHRDSILTDEEREAGDRMMVCVSRSRSARLCLDVKPGEPR

SEQ ID NO: 6729 - protein, 406 aa, Mycobacterium smegmatis str. MC2 155
MSTPGGLQRRLGTFDAVTIGLGSMIGAGIFAAIGPAAAAAGSGLLIGLALAAVVAYCNATSSARLAAIYPQSGGTYVYGRERLGEFWGYLAGWSFAVGKTASCAAMALTVGSYAWPEHANAVAVGAVVALTAVNYVGVQKSAVLTRVIVAVVLAILATVVVLLLGSGDADPARLSLGDDVSAVGVLQAAGLLFFAFAGYARIATLGEEVRDPARIIPRAIRIALGLTLVVYAVVAGAVLAVLGGTDLAGATAPLADAVAAVGAGQWQPLVRAGAAIAALGSLLALILGVSRTTLAMARDHHLPSALGAVHPRFGVPHRAEVTVGVVVAVLAAVADLRGAIGFSSFAVLLYYAIANASAATLGGRLVPAVGLVGCLVLAFTLPLSSVLAGLAVVAAGAVVYGVRRIS

SEQ ID NO: 6730 - protein, 348 aa, Mycobacterium smegmatis str. MC2 155
MADSHKINFDPVDIEMEVREDENILDAAFRQGIHLMHGCREGRCSACKSYVLDGEIQMESYSTFACNDAEVDEGYVLLCRSHAFSDCTIELLNFDEDELLGGIPIQDVRTQVQAVEPKTRDIVSLRLKPIEPGKFDFKPGQYADLHIPGTDEHRSFSMATTQSRSDEVEFLIKKYPGGKFSALLDGHIQVGDEIALTGPYGSFTLKDGHVLPVVCIGGGAGMAPILSLLRHMNETENSRPARFYYGARTPADLFYLDEILELGKGIKDFRFIACLSESADGEVPGRVTVEEGMVTDVVARHETAIAKTEVYLCGPPPMVDAALMFLDANCVPKDQVFYDSFTSPIFDQ

SEQ ID NO: 6731 - protein, 1518 aa, Mycobacterium smegmatis str. MC2 155
MLYSALPDAQGLYDPQNEADSCGVAMIADIQGRKSHRIVSDGLIALENLEHRGAAGAEASSGDGAGILIQLPVELLREVVDFELPAPTADGDNTFAAGVCFLPQDPVARSAARERIEAIAVEEGLEVLGWRKLPVDPDGAGIGATALGCMPYMAQFFVTAPETGGARPGGVDLDRLVYPVRKRAEREDVYFPTLSSRTMVYKGMLTTMQLPQYFLDLRDERCQSAIAIVHSRFSTNTFPSWPLAHPFRFVAHNGEINTVRGNRNRMHAREAKLASPLIPGDLSRLSPICSPEASDSASFDEVLELLHLGGRSLPHAVLMMIPEAWENATTMGAAERAFWQFHASLMEPWDGPACVTFTDGTVVGAVLDRNGLRPGRWWRTVDDRVILASEAGVLDVPSGEIVAKGRLQPGKMLLIDTAAGRIVPDDEIKAQLSAAEPYEEWLHAGLLDLKTLPERGVAKPNHDSVVRRQIAFGYTEEELRVLLTPMAASGNEPLGSMGTDTPTAVLSSRSRLLYDYFVELFAQVTNPPLDAIREEVVTSMARVMGPEENLLEPTAASCRQIVLRAPVIDNDDLGKIVHINDDGEHPGLRATVLRALYDVERGGEGLAEALDDLRRRASEAIADGKRILVLSDRDSDHTRAPIPSLLAVSAVHHHLVRTKERTKVALVVESGDAREVHHIALLIGFGAAAVNPYLAFESIEDLIREGELTGIEPAAAVRNYIKALCKGVVKVMSKMGISTVASYTAAQVFEAIGLDRGVIDEYFTGTTSQLGGVGLDVLADEVKMRHRRAYPENPTERVHRRLEVGGEYAFRREGELHLFTPEVVFLLQHSTRTGRRDIFAKYSEEVDRLSRKGGTLRGLFELKTGVRPPVPLEEVEPVESIVTRFNTGAMSYGSISAEAHETMAIAMNKLGGRSNSGEGGEDVDRLYDPRRRSAVKQVASGRFGVTSDYLVNATDIQIKMAQGAKPGEGGQLPGYKVYPNIAKTRHSTPGVGLISPPPHHDIYSIEDLAQLIHDLKNANSDARIHVKLVSSVGVGTVAAGVSKAHADVVLISGHDGGTGAAPLTSLKHAGAPWEIGLADTQQTLVLNGLRDRITVQCDGGLRTARDVVVAMLLGAEEYGFATAPLVVSGCIMMRVCHLDTCPVGVATQNPELRARFNGKPEFVENFFTFIAEDIRRYLAELGFRSIDEAVGHAELLDTAEGVAHWKTRGLDLDPIFAVPTDAHGAKLTQRRKLREQDHGLDQALDRTLIQLAEGALEDAHPVRLELPVRNVNRTVGTLLGSEVTRRYGAAGLPDDTIHVTLTGSAGQSIGAFLPPGITLELVGDANDYVGKGLSGGRVVVRPPDDVLFLPEDNVIAGNTLMYGATSGEVYLRGRVGERFCARNSGALAVVEGVGDHACEYMTGGRVVILGKTGRNMAAGMSGGIAFVLGLDPARVNTEMVQLQRLDPEDLEWLHHVVTDHVRYTGSTLGTSLLSDWPRRSAQFTKIMPTDYQRVLQATRMAKAEGRDVDSAIMEASRG

SEQ ID NO: 6732 - protein, 1542 aa, Mycobacterium smegmatis str. MC2 155
MGMTPSSFGGSGRSSRDNRGLYNPAYEHDACGVAMVADMHGRRSRDIVDKAITALVNLEHRGAQGAEPNTGDGAGILIQVPDAFLRAVVDFDLPEPGSYATGMAFLPQSSRDAAAACESVEKIAEAEGLEVLGWREVPTDDSSLGALARDAMPTFRQLFLGGASGMELERRAYVVRKRAEHELGTKGPGQDGPGRETVYFPSLSGQTFVYKGMLTTPQLKQFYLDLQDERLESALGIVHSRFSTNTFPSWPLAHPFRRIAHNGEINTVTGNENWMRAREALIRTDVFGSDGLDKIVPVCTPGASDTARFDEVLELLHLGGRSLPHAVLMMIPEAWERHEDMDPARRAFYEYHASLMEPWDGPASVCFTDGTVIGAVLDRNGLRPSRIWVTDDGLVVMASEAGVLPLDPAKVVKKMRLQPGRMFLVDTAQGRIVDDEEVKAELAAAEPYQEWLEQGLFHLDELPPGDYVRMPHHRVVLRQQIFGYTYEELNLLVAPMARTGAEALGSMGTDTPIAVLSARPRMLFDYFQQLFAQVTNPPLDAIREEVVTSLQGTVGPEGDLLNPGPESCRQIVLPQPILRNADLSKLICVDPDHEIRGHKHGMRAAVIRCLYPVNRGGVGLKEALDNVRAKVSEAIREGARIIVLSDRESNETMAPIPSLLSVAAVHHHLVRERTRTKVGLVVEAGDAREVHHMATLVGFGAAAINPYMAFESIEDMVDRGVITGLTSDQAKANYVKAAGKGVLKVMSKMGISTLASYTGAQLFQAIGISQQVLDEYFTGLSCPVGGIDLEDIAADVAARHSLAFLDRPDERAHRELEVGGEYQWRREGEYHLFNPDTVFKLQHSTRTGQYSIFKEYTKLVDDQSERIASLRGLLKFREGHRPPVPIEEVEPASEIVKRFSTGAMSYGSISAEAHETLAIAMNRLGGRSNSGEGGEAVHRFNPDENGDWRRSAIKQVASGRFGVTSHYLANCTDIQIKMAQGAKPGEGGQLPGHKVYPWVAEVRHSTPGVGLISPPPHHDIYSIEDLAQLIHDLKNANPAARIHVKLVSENGVGTVAAGVSKAHADVVLISGHDGGTGASPLTSLKHAGAPWELGLAETQQTLLLNGLRDRIVVQVDGQLKTGRDVVIAALLGAEEFGFATAPLVVSGCIMMRVCHLDTCPVGVATQNPLLRQRFNGKPEFVENFFMFIAEEVRELMAQLGFRTVNEMVGQVGALDTTKAAEHWKAHKLDLTPVLHEPDSAFMNQDLYCSSRQDHGLDKALDQQLIVQSREALDSGTPVRFTAKITNVNRTVGTMLGHEVTKAYGGQGLPDGTIDITFEGSAGNSFGAFVPKGITLRVYGDANDYVGKGLSGGRIVVRPADEAPESFAAEDNIIAGNVVLFGATSGEAFLRGQVGERFAVRNSGAVAVVEGVGDHGCEYMTGGRVVILGPTGRNFAAGMSGGIAYVYDPRAALPKNLNPEMVEIEALEEADTEWLRGILASHVDATDSAVGQRILADWDNELKHFAKVMPRDYKRVLAAIAEAEAKGLTGSDIDDAIMAASNG

SEQ ID NO: 6733 - protein, 515 aa, Mycobacterium smegmatis str. MC2 155
MSMIIGIPRESQPGETRVAATPQTVGQILKLGYSVVVESGAGAAASFSDAAYADAGAQIGSADQVWSADVVMKVNAPSEGEIAALGDGATLVGLISPALRPDLVEQLAARPITVLAMDAVPRISRAQSLDVLSSMANIAGYRAVVEAAHRFGRFFTGQVTAAGKVPPAKVLVVGAGVAGLAAIGAAGSLGAIVRATDPRPEVADQVASLGGEYLAVDDSGEVAEVSKTGYAKEMGADYKAREAALYAEQCKDVDIIITTALIPGRPAPRIITAEMVASMKAGSVIVDMAAANGGNVEGTVKDQAIVTDNGVTIIGYTDLAGRLPAQSSQLYGTNLVNLLKLLTPEKDGKVVLDFDDVVQRSITVVRDGEITWPPPPVQVSAAPAAQPAAAAPGVKEEKQPMSTGRRLGVAFAAAAVLFALIALSPAALQVHLVVFALAIVIGYYVIGNVHHALHTPLMSVTNAISGIIVVGALLQIGHHHTAITALAFVAILLASINVFGGFAVTRRMLAMFSRS

SEQ ID NO: 6734 - protein, 304 aa, Mycobacterium smegmatis str. MC2 155
MSTIAFIGLGIMGSPMAVNLVKAGHTVKGYNRSPHRTADLVAAGGTAADSIADAVDGAEIVAVMVPDSPDVTEVLTADGGVFASAAPGTLIIDFSSIRPDVSMDLAKQAADHDLRLIDAPVSGGEIGAKNAALSIMIGGADEDVSRAMPVLEAVGKTIVHVGPNGAGQTVKAANQLIVAGNIALLAEAIIFLEAYGVDTTAAVKVLGGGLAGSAVLDQKAQKMLDRSFDPGFRIELHHKDLGILTNAAREAGVVTPIGAAVAQLMASARINGDGALDHSGLFRTIAKLSGASTEPGSSNTKERP

SEQ ID NO: 6735 - protein, 341 aa, Mycobacterium smegmatis str. MC2 155
MATRSIPAALPDYERMMAMLTGFWVTQIVRAAAVFNLADHLASGTDTAVAIASAEATDVDATRRLLRACATLGLVTSADGEHFAGTSLLSTLRKDEPNSLRGMVLSHTAPGHWLPWGLLPDAIRSGERQIKAAHGTETYFDYLAENLEQAGHFTEAMSNLSAAAAVEVAEVLDTRGVDYALDVGGANGELVRALMRANPELRGGVFDLPHVVADAVEAAHRDGLQGRFTARGGDFFESVPPADLYTLKYILHDWDDESCVRILKTCRAALQDGGRIVVIDHLVGDLDAADTTTMMDVNMLVMTGGRERDIAEFDALFAAAGLRRTEVGRAGQFAIIETVAV

SEQ ID NO: 6736 - protein, 473 aa, Mycobacterium smegmatis str. MC2 155
MLESRSDLSSSDEPRSGLARSLKTRHMTMIAIGGAIGAGLFVGSGAVIKTAGPAAIVSYVVAGALVLCTLRMLGEMVVAKPRTGAFADYARIGIGPWAGFTLGWLYWYYYVIIIAVEAVAGAQILAVWVGLPLWLMAMLLMAALTLTNLISVRWFGEFEFWFSGIKVAAIVSFIVVGLLWVFGVWPGDTNGLTNLVAHGGFAPNGFGSIFGAVVVVIFAFGGAEIVTIAAAESAEPAKSVARATTGVIWRIILFYVGSIFLVVCILPWNDASVLSSPYVAALEKLQIPGAGLIMNIVILTAVLSVLNSSIYTSSRMLRVLASHGDAPQWLVRTNTRGVPTRAILASTVVGWVSVVLAYIAPDSLFLFLVNSCGVVAIFMYVMIGVSELRVRRAIEREDPAKLTLKMWFFPYLPIAVIACFVLVLVAMLFDADQRVQLLASVVSLAVVLLAYALRKRHGQVPATDTKQAARTDE

SEQ ID NO: 6737 - protein, 618 aa, Mycobacterium smegmatis str. MC2 155
MTDEIRKAKFDADEKSVTKTEKVLKSPVGSDVVVPQHPVLDVPVEQKAYTRREGLDRVVFGVTALIAIGFLVWGFLSTDSLASASADALAWVMNSTGWLFVLTASGFVVFVVWLAVSRYGNIPLGRDDEEPEFRTVSWVAMMFSAGMGIGLMFFGVSEPLSHFVTPPPGTGDPGDPAAAQTAMATTLFHWTLHPWAIYAVVGLAIAYGVYRKGRLQLVSAAFEPLLGERANGPAGKVIDMLAIFATLFGSAASLGLGALQIRSGLQIVSGIGQVGNTILVVIITVLTVAFVLSAVSGVARGIQWLSNINMVLAFVLALFIFLVGPTVFMLNMIPTSIGSYVEQLAMMSARTGAEGADVNEWLQSWTIFYWAWWISWTPFVGMFIARISRGRTIRQFIAGVLFVPSVVSLVWFCVFGGAAIHEQQNGVDLAGEGSVEQQLFGLLDQYPIATIASILVMLLVAIFFVSGADAASIVMGSLSERGTIKPTRPTVIFWGVATGAVAAVMLLVGGEDALNGLQTITIIAALPFVVVMVGLTVSLMRDLRRDPMIVRREYAVEAVNSAVVQGVTQHGDDFVIAVEKDPNADNGHDDRADADSAEVADEPGAETSDKTKDVPAGG

SEQ ID NO: 6738 - protein, 638 aa, Mycobacterium smegmatis str. MC2 155
MSIETVARQTLYRQTHAKGGDLHALANRRLLARIWRFAARHHRRLAVFFAVSVLSAVLAVTTPVLAGRVIDQITDGGSAAVVLLLAGTIAAIAVAEAAVSLVTRWLSSTIGEGLILDLRTAVFDHVQKMPIAFFTRTRTGALVSRLGNDVIGAQRAFSDTFSGIVTNVVTLTLTLVVMLRISWQITLLALVLVPLFVVPARRIGSRMADLSRRAAAHNATMNTQMTERFSAPGATLVKLFGSPQRESDEFAARADAVRDIGVRTAMLQSTFMNSLTLMSALALALVYGLGGVLAIGGQLQAGSIVSLALLLTRMYAPLTALANARVEIASALVSFERVFEVLDLEPLIAEEPDAMPVPDGPVTVEFDDVRFSYPSADKVSLASLEEVAELDHRGGDEVLHGISFRAEPGQMVALVGSSGAGKSTIASLVARLYDVDVGGQERSDSGIRSGAVRLGGVDVRDVTFASLKDTVGMVTQDGHLFHESIGANLRLAAPAATDDELWDALRRARLADVVAAMPDGLDTIVGERGYRLSGGQRQRLTIARLLLGRSRVVVLDEATASLDSASEAAVQQALAEALEGRTSLVIAHRLSTVRAADLILVVEDGRIVERGTHEALLARAGRYAELYYTQFDTDASAA

SEQ ID NO: 6739 - protein, 369 aa, Mycobacterium smegmatis str. MC2 155
MLSQYRQLPPSTNGRFRHDPMLAMAQIAIKTMWGVTRHIRRPSPPPALDRTIGLRVVDRRVVAHDQDVIALTLAADDGGALPRWYPGAHIDLHLPSGRIRQYSLCGDPAAGTYRIAVRRIPEGGGGSVEIHDTVHIGSRLTTHGPRNAFPLTVPGYGSPTQRFRFIAGGIGITPILPMLDLAQRLGVDWSMIYAGRHPDSLPFLSELQRYGDRIGIRTDDRDGLPGASDLLGECPGGTTVYACGPAPMLTMLRTALVGRDDVELHFERFAAPPVVDGTEFSVRIASTGQTVPVAADETLLAALNRAGVSAPYSCQQGFCGTCRVRALPRDGDGAVQHRDTLLTEPERAAGYLLTCVSRAGNGQRLTIEL

SEQ ID NO: 6740 - protein, 322 aa, Mycobacterium smegmatis str. MC2 155
MAVNPGTVRVLAHFAPSNTVLDFLAPHLDWLDVRFCGEEDDETFYRELGDADVLWHVLRPITGDDLNRAPRLRLVHKLGAGVNTIDVETATQLGILVANMPGANAPSVAEGTVLLMLAALRRLPQLDRATRAGRGWPTDPTLGDTVRDIGGCTVGLVGYGNVAKRVERIVLAMGAEQVLHTSTRDTGHPRWRNLPDLLAASDIVSLHLPLTDTSRGLLGPEAIAAMKPGAVLVNTARGPIVDEAALIEALRGGRLAAAGLDVFDTEPLPADHPLLGLDNVVLTPHVTWYTADTMRRYLSIGVENCRRIRDGEPLAHLVNEAR

SEQ ID NO: 6741 - protein, 576 aa, Mycobacterium smegmatis str. MC2 155
MATFADHIIAMLSASGVRRVYGLPGDSLNGFTDAIRRSGEISWEHVRHEETAAFAAAADAGLTGQLAVCAGSCGPGNLHLINGLFDAQRSRVPVLAIAAHIPRSEIGSQYFQETHPQELFGECSVYCELVSTPEMAPRILAMAMRAAVEDNGVAVVVIPGEIFLQRIPEQPVRPISATRSVLCPDEASLQRAADMLNAAERVTILGGAGVAGAHDALVQLAATLQAPVVHALRGKEFIEYDNPFDVGMTGLLGFASGYKAIKEADTLLMLGTDFPYQQFYPENATVIQVDVRGAHLGRRTPIDLGLRGTVGDTLAALQPLLRPKHDREHLDRALRHYRKTRASLDALAVNDRDRTPIRPEYLAGLIDRLAAADAVFTCDVGSPVVWAARYLSMNGRRRLLGSFNHGTMANALPHAIGAQSAYRGRQVIALAGDGGLTMLFGELVTLIQNRLPVKVIVFNNSSLNFVELEMKAAGIVTFGTDLQNPDFAAVATAMGIYGRRVTEPADLEDVLKEAFAHDGPAVIDVHTARQELSIPPAITIEQAKGFSLYAIRTILAGRSDELLDLITTNVARRILD

SEQ ID NO: 6742 - protein, 371 aa, Mycobacterium smegmatis str. MC2 155
MLVGIPTEIKNNEYRVAITPAGVAELTRRGHEVIIQAGAGEGSAISDRDFKAAGAEIVNTADQVWSEAELLLKVKEPIEPEYSRMRKGQTLFTYLHLAASKPCTDALLASGTTSIAYETVQTAEGALPLLAPMSEVAGRLSAQVGAYHLMRSYGGRGVLMGGVPGVAPAEVVVIGAGTAGYNAARVAAGMGAHVTVFDLNINTLRRVDGEFGGRIETRYSSSLELEEAVKKADLVIGAVLVPGAKAPKLVTNSTVAHMKPGAVLVDIAIDQGGCFEDSRPTTHDEPTFKVHDTIFYCVANMPGAVPRTSTFALTNSTMPYVLKLADKGWQAACASDSALAKGLSTHDGKLLSEAVAKDLDLPFTDAAQFLA

SEQ ID NO: 6743 - protein, 399 aa, Mycobacterium smegmatis str. MC2 155
MSERVILAYSGGLDTSVAISWIGKETGKEVVAVAIDLGQGGEDMEVVRQRALDCGAVEAVVVDARDEFAEEYCLPTIQSNALYMDRYPLVSAISRPLIVKHLVKAAREHGGGVVAHGCTGKGNDQVRFEVGFASLAPDLQVLAPVRDYAWTREKAIAFAEENAIPINVTKRSPFSIDQNVWGRAVETGFLEHLWNAPTKDVYDYTEDPTVHWNTPDEVVIGFDKGVPVSIDGRPVSVLQAIEELNRRAGAQGVGRLDVVEDRLVGIKSREIYEAPGAMVLITAHTELEHVTLERELGRFKRHTDQKWGELVYDGLWYSPLKRALESFVAHTQEHVSGEIRLVLHGGHISVNGRRSAESLYDFNLATYDEGDSFDQSAAKGFVHLHGLSSRISAKRDLGI

SEQ ID NO: 6744 - protein, 322 aa, Mycobacterium smegmatis str. MC2 155
MKRLLMLLVSTLTAMSLVGCSQAAPALNLPSLTLAPPTPAGMEEIPPQPVRLPEIDNDDCNRTASLRPFSNKEEAEAAVANIRARGRLIVGLDIGSNLFSFRDPITGQITGFDVDIAGEVSRDIFGTPSKVEYRILSSADRITALRNNQVDIVVKTMTITCERKKLVNFSTVYLMANQRILASRDSNISQASDLSGRRVCVVDGTTSLQRIQQISPSPIIVSVVTWADCLVALQQRQADAVSTDDSILAGLVAQDPYLHIVGPSLSQEPYGIGVNLENTGLVRVVNGTLERIRRDGTWYTLYRKWLTVLGPAPAPPVARYVD

SEQ ID NO: 6745 - protein, 224 aa, Mycobacterium smegmatis str. MC2 155
MDEILARAGIFQGVEPTAVAALTKQLQPVDFPRGHTVFAEGEPGDRLYIIISGKVKIGRRSPDGRENLLTIMGPSDMFGELSIFDPGPRTSSATTITEVRAVSMDRDALRAWIADRPEIAEQLLRVLARRLRRTNNNLADLIFTDVPGRVAKQLLQLAQRFGTQEGGALRVTHDLTQEEIAQLVGASRETVNKALADFAHRGWIRLEGKSVLISDSERLARRAR

SEQ ID NO: 6746 - protein, 658 aa, Mycobacterium smegmatis str. MC2 155
MCGLLALVTDPSRADQVEASPGTGSQLVSAVAEAAHLMRHRGPDEPGTWPDPDAENPHPEVVLGFNRLSIIDIAHSHQPLRWGPADAPGRYLLVFNGEIYNYLELREQLRNEFGAQFHTDGDSEAIVAAYHHWGVDALHRLRGMFAFAIWDTEKRELFCARDPFGIKPLFMATGPGGTAVGSEKKCLLSLADRLGLDLGIDQRAVQHYTVLQYVPEPETLHRGVRRLESGSYARIRPGAAPEVTRYFVPKFTAVNFAAGSEQARYDEITAALEDSVAKHMRADVTVGAFLSGGIDSTAIAALAMRHNPRLITFTTGFEREGFSEIDVAVASAEAIGARHVAKVVSQAEFVEALPEIVWYLDEPVADPALVPLFFIAREARKHVKVVLSGEGADELFGGYTIYREPLSLRPFDYLPRPLRKSLGKASKPLPEGMRGKSLLHRGSLTLEERYYGNARSFSDDQLRAVLPQFRQEWTHTDVTAPVYAASQGWDPVARMQHIDLFTWLRGDILVKADKMTMANSLELRVPFLDPEVFAVASRLPVDQKITRATTKYALRRALEPIVPAHVLNRAKLGFPVPIRHWLRSGELMDWAYALIGSSGAGEHVDLAAVRTMLDEHRNGVSDHSRRLWTVLIFMLWHAIFVEHSVTPQIKEPHYPVQL

SEQ ID NO: 6747 - protein, 360 aa, Mycobacterium smegmatis str. MC2 155
MTLIGVPRESAEGERRVALVPKVVEKLSARGLEVVVESAAGAGALFSDADYERAGATIGDPWPADVVVKVNPPTSDEISQLKPGSVLIGFLAPRTQPELASRLRIADVTAFAMESIPRISRAQTMDALSSQANVAGYKAVLLGASLSTRFVPMLTTAAGTVKPASALVLGVGVAGLQALATAKRLGAKTTGYDVRPEVAEQVRSVGAQWLDLGIDAAGEGGYARELSEAERAQQQQALEDAITKFDIVITTALVPGRPAPRLVTAAAATGMQPGSVVVDLAGETGGNCELTEPGRTIVHHGVTITSPLNLPATMPEHASELYAKNVTALLDLLLTDDGVAPDFTDEIVAASCITRTEGDI

SEQ ID NO: 6748 - protein, 495 aa, Mycobacterium smegmatis str. MC2 155
MGKPLDIAIVAVYLIAMLAFGFWGKTRTKDSADFLVAGRRLGPTLYTGTMAAVVLGGASTVGGVGLGYKWGLSGMWLVVAIAVGLLALSLLFAGRIQRLKVYTVAQMLSLRYGVDATSASGVVMVTYTLMLSVTSTIAYATVFNVLFGTGRTVSVLIGGAVVMLYSSIGGMWSITLTDMVQFILKTIGVFFLLLPFTWNRAGGLDGIRERAGDAVFSLTAIGTETIITFFVVYSFGMLIGQDIWQRVFTARSPQVAKWGGTTAALYCVAYGVAGALIGAAASTFLPDVEAKDDVYAQIAESILPVGISGLVLAAAVAAMMSTASGALIATATVARTDVRPLLLRLVGRRTETVTDDPSLEVHADRRYVVVLGIVVIVIAALLNDVVGALTIAYDILVGGLLVPILGGFVWKRATGAGALVAMGVGTVVTLGTMAIVGDVLANDPIYWGLATSLVAYVAVSLATTRTPAPVLQVWNDRLAGRDQTATAGEIPTATS

SEQ ID NO: 6749 - protein, 317 aa, Mycobacterium smegmatis str. MC2 155
MTIYVSRLLTDRAMAHLESLGVPFRVGGGDPPSRADLEAGLAGADAAVITLTERVDTALLAAAGPQLKIIANVAVGYDNIDVDAAVSAGVTVTNTPGVLDRATADHTFALILAATRRVLDGDRFLRSREPWVWGPRMLVGLDISASATLGILGYGRIGKAVAQRAKGFDMKVLATARSREPGTSEDGVQFVDTDTLLAESDVLSVLTPLTPQTRHLIDAAALAKMKPSAYLVNTARGGVVDEAALMSALHNGALRGAALDVFENEPHIDPRLLDTPNLVLTPHIASAGESTRDAMGILAIDNAAAVLAGKPALTPVR

SEQ ID NO: 6750 - protein, 323 aa, Mycobacterium smegmatis str. MC2 155
MEGQPYVRSASGKVGQVNATEVPRYAGIATFARLPQRFEVLDHDIAVVGVPFDSGVTYRPGARFGPSAIREASRLLKPYHPALDVSPFAQAQVVDAGDLGVNPFNIDEAVGQIRDGVTELLDRPDQRVVLLGGDHTIALPALQAMHAIHGPVALVHFDAHLDTWDTYFGAPCTHGTPFRRASEQGLIVKGHSAHVGIRGSLYDRADLLDDESLGFTVVHCRDIDRIGVDGVISRIHERVGEYPVYVSIDIDVLDPAFAPGTGTPEIGGMTSRELVAVLRAMRGLNIVGADIVEVAPAYDSGDVTAVAAANLAYELITLMADGF

SEQ ID NO: 6751 - protein, 651 aa, Mycobacterium smegmatis str. MC2 155
MTVEEAGQELEWHRVADHDELDEGQVSACPAGRKTVALTKLNGRYGAIDNRCPHQGGPLGQGTLENDKIRCPWHGFDFDPFTGEAAGGPDFNVTTYPVDVRDDGIYVGAPPPAPAARTVSDVLVETMTNWGVDTVFGMVGHSNLGLAEAMHRAENAGKLRYFGIRHEGAAAFAASAYGKLTGRPAACFGIAGPGSTNLLTGLYDAKADRAPVLALSGNVESAVAGKGAFQDIDLLAAFADVAVYSEMVRDGSEHAELMTMALKHAILERGVAHLVVPDEVQVIQSDRRSSGPEGRMPDLRVAPPSTPLERALDRIAAATRPAVIVGAGAKFDMAAIVALAERLHAPVLTTFKAKGQIADDHPLACGALGRSGTPVASWMMNKADLLVVFGASFSNHTGISPYKPVIQVDTDPLVLGRFNPVAVPVLGDVGVTASALTQRLRTHPDLVDQRAEIAERWSVWRTEKARRATKQPGGRIAAATVFDELGRLVPAGAVLTVDVGNHAYSFGRYFETKDEQTVLMSGYLGSIGFGFPAAMGAWAAAPDRPIVAVTGDGGFGQYLADFTTAVKYGMNITHILLNNGELGKITQEQRSSEYEVWQTSLLNPDFAAYARDCGAYGNQVISHTELGTVIAEALAHPGPALVEIITDAWSN

SEQ ID NO: 6752 - protein, 598 aa, Mycobacterium smegmatis str. MC2 155
MTRMRAVDAAVKILELEGATQAFGLPGAAINPFYAAMRAHGGIRHVLARHVEGASHMAEGYTRAKAGNIGVCIGTSGPAGTDMITGLYSAMADSIPILAITGQAPTARLHKEDFQAVDIAAIAKPVTKMAMTVLEPAQVPGAFSQAFHLMRSGRPGPVLIDLPLDVQLAEIEFDPDTYQPLPVYKPRATRAQAVKVLDMLAQADRPVIVAGGGIVNAGAEDQLVELAELLDVPVISTLMGWGTIPDDHRLAAGMAGLQTAHRYGNATMLASDFVLGIGNRWANRHTGGLETYRRGRKFVHIDIEPTQIGRVFAPDYSVVSDALAALEQMLEVARERRASGALPSRANWVEECLYRKRTMHRKTHFDDIPIKPQRVYQEMNSAFDRDVRYVSTIGLSQIAGGQFLQVFRRRGWINCGQAGPLGWTLPAALGVVAADPSATVVGLSGDYDFQFLIEELAVGAQFNLPYIHVVVNNSYLGLIRQAQRQFDMDFHVSLAFDNINAQEHETSDSMPKGYGVDHVRVAEGLGCKAIRVTEPDQIGPGLRRAQELMREHKVPVVVEVILERVTNIAMGTELDNVTEFEPLAVDLDDAPAALALFD

SEQ ID NO: 6753 - protein, 503 aa, Mycobacterium smegmatis str. MC2 155
MSPESGHETISGTSDFVVVANRLPVDLERLPDGTTRWKRSPGGLVTALEPLLRKRRGSWIGWAGVADSDEEPIVQDGLQLHPVRLSADDVAKYYEGFSNATLWPLYHDLIVKPEYHREWWDRYVEVNRRFAEATARAAAEGATVWIQDYQLQLVPKMLRMLRPDVTIGFFLHIPFPPVELFMQMPWRTEIVEGLLGADLVGFHLPGGAQNFLVLSRRLVGANTSRASIGVRSRFGEVQVGFRTVKVGAFPISIDSAELDGKARNRAIRQRARQIRAELGNPRKIMLGVDRLDYTKGIDVRLRALSELLEEKRIKRDDTVLVQLATPSRERVESYIAMREDIERQVGHINGEYGEVGHPIVHYLHRPIPRDELIAFFVAADVMLVTPLRDGMNLVAKEYVACRSDLGGALVLSEFTGAAAELRQAYLVNPHDLEGVKDKIEAAVNQNPEEGKRRMRALRRQVLAHDVDRWARSFLDALAATGETGDSGVTGESTPAPESDSGSF

SEQ ID NO: 6754 - protein, 401 aa, Mycobacterium smegmatis str. MC2 155
MRMADDAVIDELAAAVVRSPELTELRLHLAALLVERGRYAEALAHCSTVLAQDAGNSRAVDLLQTCSAALSSTPRPERFDWSAAEEQVADIVKPAFVEEPAQVVDENDFDAVRSSGVRLSDVAGMADVKRQLELSLLGPIRNPELMKAFKMSARGGLLLYGPPGCGKTYIAKAVSGELGANFYQVGIADVLSRWLGESERAVRAVFDTARRKAPCVLFFDEVDALGHRRSALGGSSGLRPVVNTLLEEMDSAASSNDGVYVLGATNAPWDVDVALRRPGRFDRMIFVPLPDPDARAAIVRLHLQDRPVEGINLATVLNRTDGFSGADLAHICDTATQLAMSHSLRTGQVRPVQMHDIDAALAQIRPSAGAWFDTARNVVEFGNRDGAFDDLANYMRRRRIR

SEQ ID NO: 6755 - protein, 410 aa, Mycobacterium smegmatis str. MC2 155
MASDSSASQVVICNPLRTPVGRMGGVLAALTAADLATSTLRELATRTGLGEGDIDDVVLGHGYPSGEAPAIGRIAALDAGLGTAVPGLQLDRRCGSGLQAVLYAAGQVATGAAGVVVAGGAESMSNVEHYALGLRTGVRQGGVALHDRLDRARETAGGTSHPIAGGMIETAENLRREYGISRAEQDELAVRSHQRAVAAHDAGRFADELVPVTVPGKRGRPGTVVDRDEHPRADIDVETLSALRPIRGKVDAEATVTAGNASGQNDGAAMCVVTTREEAEKRGLTPMLALKSWAVTGCAPEKMGIGPVAASDAALQRAGITLDEVDLIELNEAFAAQVLAVLAEWKVDPLDERLNPNGSGISLGHPIGATGARILATAAHEALRRDARYVLETMCIGGGQGLAAVFEAVR

SEQ ID NO: 6756 - protein, 447 aa, Mycobacterium smegmatis str. MC2 155
MSSTAEVAEGHLKRALGLPSLVLFGLVYMVPLTVFTTYGIVTQTSGGRVPLSYLVTLAAMVFTARSYARMSVAYPVAGSAYTYTQKSFGAPVGFLAGWSLLLDYLFLPMINYLVIGLYLSAAIPAIPAWVFILIAIAIVTVLNIVGIVSVARANFVIIAVQAIFIVAFLILATSKVFSYGTVDLAAPFTGDGTAPGFSPVLAGAAILCLSFLGFDAVSTLSEEAKDPKRTVPRAIMIATLASGLIFVVLSYVAQVVFPSNEFSDVDSGSLDVMMTAGGNFLQVFFTAAYVAGATGSAITSQASVARILYAMGRDGVLPRPFFGHVSPRFSTPVYAILAVAVISLLAIVIDLGILASVISFGALVAFSAVNLSVIKHYFVDHRERAGAQAINSLVLPLIGFALTVWLWFSLDGLALIIGLCWLAIGFVWLAGVTRGFQRPTPVLDMKE

SEQ ID NO: 6757 - protein, 502 aa, Mycobacterium smegmatis str. MC2 155
MTQLNHSFAELGVRDEIVRALAENGIEHPFAIQELTLPLALAGDDLIGQARTGMGKTYAFGVPLLHRVSSDENRPLTGAPRALVVVPTRELCLQVYNDLAGAAKHLPTNDGRKFTVTSIYGGRPYEPQIEALRKGVDVVVGTPGRLLDLAQQGHLQLGGLSVLVLDEADEMLDLGFLPDIERILQLTPDSRQAMLFSATMPDPIITLARTFMNQPTHIRAEAPHSAATHDTTAQYAYRAHALDKVELVSRILQARGRGATMVFTRTKRTAQKVSDELAERGFKVGAVHGDLGQGAREKALKSFRTGEIDVLVATDVAARGIDIDDVTHVINYQCPEDEQAYVHRIGRTGRAGKTGVAITLVDWDELARWEMIDKALNLGNPDPAETYSSSPHLYEDLDIPTDATGTVGKPAKRATKASDEDEHRISSADRPARTRTRSRRRTRGGKPLTGHPESHPEAHPESASAAPEDTEAAPAGESEAGEQTTRRRRRRRPRKTEAATAG

SEQ ID NO: 6758 - protein, 411 aa, Mycobacterium smegmatis str. MC2 155
MRQLCRLIIVNTAIWGGSNMTTSVIVAGARTPVGKLMGSLKDFSGTDLGAIAIRAALEKANVPASMVEYVIMGQVLTAGAGQMPARQAAVAAGIPWDVAALSINKMCLSGIDAIALADQLIRAGEFDVIVAGGQESMSQAPHLLPKSREGYKYGDATLVDHLAYDGLHDVFTDQPMGALTEQRNDVDKFTRAEQDEYAAQSHQKAAAAWKDGVFADEVVPVSIPQRKGDPIEFAEDEGIRANTTAESLAGLKPAFRKDGTITAGSASQISDGAAAVIVMNKAKAEELGLTWLAEIGAHGVVAGPDSTLQSQPANAIKKAITREGITVDQLDVIEINEAFAAVALASTKELGVDPAKVNVNGGAIAIGHPIGMSGARIALHAALELARRGSGYAVAALCGAGGQGDALVLRR

SEQ ID NO: 6759 - protein, 257 aa, Mycobacterium smegmatis str. MC2 155
MSTLEIKDLHVSVAATEGTEEIPILKGVDLTVNSGETHALMGPNGSGKSTLSYAVAGHPKYTVTSGSITLDGQDVLEMSIDERARAGLFLAMQYPVEVPGVSMSNFLRTAATAVRGEAPKLRHWVKEVKAAMDELEIDPAFGERSVNEGFSGGEKKRHEILQLSLLKPKIAILDETDSGLDVDALRVVSEGVNRYAAATNGGVLLITHYTRILRYIQPQFVHVFVGGRIVESGGPELADELEQNGYVRFTQAAAAGA

SEQ ID NO: 6760 - protein, 319 aa, Mycobacterium smegmatis str. MC2 155
MTNDKSRDAIVVPVDPQVQPRYAGWTTYARLPRLEDVSHADVAVVGVPFDSAVTYRPGARFGPNAIRQASRLVRGYNPELDIAPFQVCQFADAGDIACNPFDIGQAVDQVTAELTALLSKGTRAVVLGGDHSVALPSLRAAHAVHGPVALVHFDAHLDTWDSYYGADLTHGSPFRRAFEEGLLQETNMHVGVRGSIYDKQDLVEDAKFGFSVITCRDITKLGSDGVIERIRERVGDAPVYVSVDIDVLDPAHAPGTGTPEAGGMSSRELLEVVRGLDQVNLIGADVVEVSPAYDHAEITAVAAANVTWELLSVFGRKAR

SEQ ID NO: 6761 - protein, 353 aa, Mycobacterium smegmatis str. MC2 155
MTDEPLGSHVLELQVAEVVEETSDARSLVFTVPEGAEIAADRLRYSPGQFLTLRVPSDRTGSVARCYSLSSSPTTDDRLTVTVKRTADGYASNWLCDNAHAGMRIHVLAPSGTFVPKDLDTDFLLLAAGSGITPMMAICKSALAEGTGNVVLIYANRDENSVIFAGALRELAAKYPDRLTVVHWLETVQGLPTAAGLGALAKPFAGREAFICGPGPFMTAAEDALRAAGTPDDHIHIEVFKSLESDPFAAVVIPEDDGDDQGPATAVVTLDGTTHEIRWPRSAKLLDVLLDKGLDAPFSCREGHCGACAVLKKSGEVHMEINDVLEPSDLEEGLILGCQATPVSDSVEVTYDE

SEQ ID NO: 6762 - protein, 351 aa, Mycobacterium smegmatis str. MC2 155
MSDVESSTRIARLTVTEVIDESHDARSLVFAVPDEHRDHFGYRPGQFLTLRIPSERTGSVARCYSLASSPHTDDAHKVTVKRTDGGYGSNWLCDNVSVGSTIESLPPSGVFTPASLDDDFLLWAAGSGITPVMSILKSVLSAGSGRVILCYANRDERSVIFAAELRELAARHAGRLTVLHWLESVQGLPTRAQLCGFAQLFSGYESFICGPEPFMAVVRAALTEAGVPRRRIHLEVFQSLSGDPFAEDVPASGPAGPGTDAGAAEAEIELDGTVHQLRWPRDRNLVDTMLAAGVEVPYSCREGSCGSCAATVLDGEIERGDTPILDAQDIADGLFLACQARPVSDRIRIEF

SEQ ID NO: 6763 - protein, 460 aa, Mycobacterium smegmatis str. MC2 155
MSAQKTFAELGLPAELVSTLAANGVTTPFPIQAATLPDSLNGRDVLGRGRTGSGKTYAFLLPLVARLATSGTPRDAGKPRAVILAPTRELVTQIEASLAPLAAATGLRTVNIFGGVGAGPQIAALRRGVDIVIACPGRLEDHVQSRHADLSSVEVTILDEADHMADLGFLPGVKRLLDRTPKHCQRLLFSATLDAGVDVLVKRYLHDPVVHSVDSAQSPVSAMVHHVLHVDNAARINVVADLAAAPGRTIVFARTKHGAKNLTRQLNSRGISAVELHGNLSQNARTRNLTAFSDGSATVMVATDIAARGIHVDDVSLVVHADPPVEHKAYLHRSGRTARAGNEGTVVTLMLDAQVHDVRNLTRKAGVKPTITRISGLDHPVLREIAPGERVFGEPIRTEPAATPSRPRSTQPRRSRPQGSGRPGRSGHGAQSEGAAAARGGAHRGGRGRRPRRSNESSAR

SEQ ID NO: 6764 - protein, 324 aa, Mycobacterium smegmatis str. MC2 155
MQSLLVFLVGVLTLAAIYAALAMVLNLVAGWAGMWDLGVAGLVAVAAYTYIILTQTRVDTGLVFTPGWPMAVGIVGAVLVTAVAAFIVALPSIRLRGEYFLITTLAFAEVIHQLTISESRLTRGTTGFSSIDRPFRDLVPASEYRWVLLALAVAVALVIYLLTNRLAKTPYVRLLRASRDNEAVARSLGKNIVRYRLITYVLAGALIGLITPLYLWHVRSVVPSLFVSELTFVVWTALVIGGIASRKGPVIGAALLIVCTEMLTFLQGSAEYAQMLAATRPVILGVLLVLVLRFRPEGLMSERSAFQFSERDLLPGSRKKEAAK

SEQ ID NO: 6765 - protein, 337 aa, Mycobacterium smegmatis str. MC2 155
MVDVSAQEETGRGAQGVLQVGPLKPSLNQTLVSTYGAYVLPDGPGRAAFLAEHGDRVTVAVTSGRTGVDAELMSALPNLGAVVNFGVGYDTTDVDAAAARDIVVSNTPDVLSDCVADTAVGLLIDVMRKFSASDRYVRARRWVTEGNYPLAHKVSGSRVGIIGLGRIGTAIATRLGAFGCTISYHNRREIEGSGYRYVGSAADLAAQVDVLIIAAAGGAGTRHLVDRAVLDALGPDGYLVNIARGSVVDEDALVEALADGRLAGAGLDVFTDEPNVPEALLGMENVVLLPHVGSATVETRNAMEALTLANLDAYLKTGELVTPVPMPAAAPAPTPVQ

SEQ ID NO: 6766 - protein, 221 aa, Mycobacterium smegmatis str. MC2 155
MIGHSTMTHSKTKDHAAQADSDIAQRLSALGDDGRDLLFRRARTANTFSAEPVADALLEEVWDLAQWPPTSANGNPLRIVFIRSPEAKARLLPCIDEGNRPKVAAAPVTAVLATDTAFFESIPKLLPFKPEMRDLLAGRSDRDHIGEFNATLQIGYFIMAVRAVGLAAGPMAGFDRAGVDAEFLTGTTWRSLLTVNIGHPGPAAWYDRLPRHDPSDIVRFV

SEQ ID NO: 6767 - protein, 382 aa, Mycobacterium smegmatis str. MC2 155
MPEAYIIDAVRTPVGKKNGSLAQVHPIDLGVHVFRSIFDRVDVDPGAVDDVIVGCVDAIGGQAGNIGRNAWLAAGYPEEVPGVTVDRQCGSSQQAISFGAQAIMSGTADIILAGGMQNMSWVPISSAMIVGKELGFSTPTAESEYWRHRYGDQEISQFRGSELIAERWDISREEMEQFALSSHQRAFAAIRAGHFDNEIVPVGDFGVDEGPRETTLEKMAALQPLVEGGRLTAALASQISDGASAVLLASEQAVKEHNLKPRARIHHISARGADPVMMLTGPIPATEYALKKTGLSIDDIDTVEINEAFAPVVLAWIKDLKADPEKVNPNGGAIALGHPLGATGAKLFATMLNTLERTGGRYGLQTMCEGGGTANVTIIERL

SEQ ID NO: 6768 - protein, 581 aa, Mycobacterium smegmatis str. MC2 155
MTSQEPDPSPVTNSDSAPTEPTFADLQIHPAVLQAVTDVGYESPSAIQAATIPPMLAGSDVVGLAQTGTGKTAAFAIPILSKIDTSRRDTQALVLAPTRELALQVAEAFGRYGSHLPQVNVLPIYGGSSYTVQLSGLRRGAQVVVGTPGRVIDHLERGTLDLSKLDYLVLDEADEMLTMGFAEEVERILADTPEYKQVALFSATMPAAIRKITTKYLHDPVEVTVKAKTATAENISQRFIQVAGPRKMDALTRILEVEEGDAMIVFVRTKQATEEVADRLKARGFAAAAINGDINQAQRERTISALKDGTIDILIATDVAARGLDVERISHVINYDIPHDTESYVHRIGRTGRAGRSGHAVLFVTPRERHLLKSIEKATRSKLIEAELPSVEDVNAQRVAKFRDSISDSLNAPGIDLFRRLIEDYERESNVPLADIAAALAVQTRNGEEFLMTEPPPDKRRDRDRDRDDRGDRGPRKERPPREGLATYRIDVGKRHKVGPGHIVGAIANEGGLHRNEFGHITIRLDYSLVELPEKLPKKTLKALENTRISGVLINLQPDRGPRREGAGKPSGKYKPHRKVK

SEQ ID NO: 6769 - protein, 273 aa, Mycobacterium smegmatis str. MC2 155
MRSIPKRVAGAVALAIALPFAATACGGGDSGGDSDTIVIGTKYDQPGLGLKQPDGTLTGFDVDVAKYVANELGYSEDQIEWKEAPSAQRETLIQNGQVDFIAATYSITDSRKEKVDFAGPYLITGQSLLVRADNNDITGAASLENNKKLCSVSGSTPAQRIKDEYPGVQLQQYDTYSACVEALKNGAVDALTTDEVILAGYAAQSPGTFKLVGDTFSEERYGIGLKKDDTELRNKINDAIEKMESSGAWKEAFDKNLGPAGIQAPQPPAVDRD

SEQ ID NO: 6770 - protein, 385 aa, Mycobacterium smegmatis str. MC2 155
MAEAVIVEAVRSPVGKRNGALSGIHPAELSAQVLNGLVERAGVDPALVDDVIWGCVMQAGEQALDIARTAVLSAGWPETVPGVTVDRQCGSSQQSLHFAVAGVVAGHYDVVVAGGVESMSRTPMGSSLANGGNPYGESFKARYDKTPNQGVGAEMIAEQWGFSRTQLDEFSLRSHEKAAAAQDSGAFSDQIVGIKTKDADGNDTVVLEDGGIRRGGTIEAMAGIKPAFKEDGVIHAGNSSQISDGSAALLITSAEKAKELGLKPIAKVHTAVLAGADPVIMLTAPIPATQKALKKSGLSLDQIGAFEVNEAFAPVPMAWLKDIGADEKKLNPNGGAIALGHPLGGSGARILTTLLYHMRDNNIQYGLQTMCEGGGQANATILELL

SEQ ID NO: 6771 - protein, 248 aa, Mycobacterium smegmatis str. MC2 155
MTKSGETTRKVLLEVRDAVVHYGRIRALHGVSLVVHEGELVTLLGSNGAGKTTMMRAISGLRPLTSGSVWFDGQDISRMKAHRRVTEGLIQAPEGRGVFPGMTVVENLEMGCYGRKFPSRQEHAERLDWVFETFPRLAERRSQVGGTLSGGEQQMLAIGRALMARPKILLLDEPSMGLAPMVISQIFRIIADINSQGTTVLLVEQNAQQALSRSDRAYILETGNITRTGVARELLQDDSIRAAYLGVA

SEQ ID NO: 6772 - protein, 67 aa, Mycobacterium smegmatis str. MC2 155
MAQGTVKWFNGEKGFGFIAPDGGAPDVFVHYSEISGSGFRSLEENQRVEFEITQGAKGPQAVGVTAV

SEQ ID NO: 6773 - protein, 920 aa, Mycobacterium smegmatis str. MC2 155
MTVMIDRNSAQHPNTPEGDETFSVALSFEDGVTRFITCRADQTVADASYRQRINIPLDCRDGACGTCKALCESGRYDAGTYIDDALAPDEAERGYVLPCSMKPRSDLVLQIAGTSDIAKTQATRYTGTIVELTRLSATTVRFTVEIPDRADLAFLPGQYVNITVPGTDITRSYSFSNPPDEALLTFLVKLVPGGAMSEYLSRRAVVGDAVSFTGPHGSFFLREAERPILLLAGGTGLAPVLSMLGKLRSDGSTRTAHLIYGVSSDADLVELDRIDEFASQLPAFTWSHCVSDPSSTSANKVRIPELISSEHLYGGDVAVYLCGPPPMVEAVRTHLTNSGVTPTGFYFEKFGLTRAGAPDAPADRSPAEESAAGPVENLLTAPDADAICGQQIPSSIDMAPAEQTASRPGHDHADNARRIAGQLIAPAAPGTATPLDDDGGALRASGARSLAGQEVFAARAVAAPASVVEVPDDVPEPVHVQPPQPVAPDGYQIGEEHPELHESDALFEARQALELGALELTIGRLSTAQLAGYRLLAESTLPYVDGDRFVDAARYTETNAAFHDYLFTLTGNEHLLQAYQALDVKGRMSEVLRHATWCHPLCAQDHVRIVEAFEAHDRAAAKTLIMAHAECAKQTMRRALADQEQAEREKVRAARTPRFISPGRFRGKVVVVTGAAQGIGEHTARRINAEDGRVVMVDRAELVHDLADELSQTGPATLAVTADLEHPDGAETVVRQAIRKFGHIDVLINNVGGAINFKPFTQFTADEIQAEITRSLMTTLYACRAALPAMVEQGHGVIVNVSSAATRGIHRIPYSAAKGGINAITASLAMEYADAGIRVVATAPGGTDAPPRRISRGTPAPADDTERAWFQAHIDQTLASSLMHRYGTLDEQAAAICFLASDEASYITGSVLPVAGGDLG

SEQ ID NO: 6774 - protein, 299 aa, Mycobacterium smegmatis str. MC2 155
MRIGFIGLGNMGAAMAANLLAAGHDVVAYNRSPQKVAALAEQGATAAESVRDAAQADVVVTMLADDNAVETVAFGGADPAEGLVAAMPADAIHISSSTISVDLAKRLAAAHAEARNQFVSAPVFGRPDAAAAAKLFVVASGAPAAVEAATPVFDAIGQRTFVVGDEPSAASLVKISGNFLIASVIESLGEAMALVGKAGVDKQQYLELLTSTLFDAPVYRTYGGLLVDEQFTPPGFAAPLGLKDVKLALSAGEELRVPLPVGSLLRDRFLTLLATGGGELDWSALGALPAWEAGAPHPA

SEQ ID NO: 6775 - protein, 382 aa, Mycobacterium smegmatis str. MC2 155
MRETVIVEAVRTPVGKRNGGLSGMHAADLSGLVLNALVEKAGIGPDIIDDVIWGCVSQVGDQSSNIGRFAVLAAGWPEHIPGTTVNRACGSSQQALDFAVQAVMSGQQDVVVAGGVEVMSRVPLGAARATGMPYGPKVIDRYRDFSFNQGISAEMIAQKWGFTRTQLDEYSVASHERAAAAQDSGAFETQMITVFPDDGDPVVADEGVRRGTTVDKLANLKPAFKDDGVIHAGNSSQISDGAAALLVMTAENAVAMGLSPIVRYRAGAVAGADPVLMLTGPIPATEKVLHKAGVRLDEIGVFEVNEAFAPVPLAWQAETGADPAKLNPLGGAIALGHPLGASGAVLMTRMINHMRDNGIQYGLQTMCEGGGTANATIVELLG

SEQ ID NO: 6776 - protein, 326 aa, Mycobacterium smegmatis str. MC2 155
MATDWTDNRKNLMLFAGRAHPELADQVAKELDVAVTAQTARDFANGEIFVRFDESVRGCDAFVLQSHPAPLNQWLMEQLIMIDALKRGSAKRITAILPFYPYARQDKKHRGREPISARLVADLLKTAGADRIVSVDLHTDQIQGFFDGPVDHMRAQKLLTGYIGEHYADEDMVVVSPDSGRVRVAEKWADSLGGVPLAFIHKTRDPLVPNQVKSNRVVGDVKGKTCILTDDMIDTGGTIAGAVNLLREDGAKDVIIAATHGVLSDPAPQRLAECGAREVIVTNTLPITEDKRFPQLTVLSIAPLLANTIRAVFENGSVTGLFDGSA

SEQ ID NO: 6777 - protein, 555 aa, Mycobacterium smegmatis str. MC2 155
MTDDGYTVGDYLLDRLAELGVTEVFGVPGDYQLEFLDHVVAHPRITWVGGANELNAGYAADGYGRLRGMAALVTTFGVGELSAANAIAGSYAEHVPVVHIVGAPSKDSQAARRIVHHTLGDGDFEHFLRMSREITCAQANLVPATATREIDRVLSEVHEQKRPGYLLIATDVARFPTEPPTAPLPRHSGGTSPRALSLFTEAATQLIGEHRLTVLADFLVHRMGCVEALNKLLTADTVPHATLMWGKSLVDESSPNFLGIYAGAASEGSVREVIEDAPVLVTAGVLFTDMVSGFFSQRIDPARTIDIGVNQSVVAGQVFAPLDMAAALDALASILAERGIESPALPPAPAPQRPAAPPRDAVLTQEALWDRLAEALTPGNVVLADQGTSFYGLAGHRLASGVTFIGQPLWASIGYTLPAALGAGLADRDRRTVLLIGDGAAQLTVQELGAFGREGLTPVVVVVNNNGYTVERAIHGVTARYNDITAWRWTELPAALGVPDALTFRCATYGELDDALTVAAETQDRMVFVEVMLERMDIPPLLGELAQSASAANAK

SEQ ID NO: 6778 - protein, 326 aa, Mycobacterium smegmatis str. MC2 155
MAAVTRDADVQRVGFLGLGNMGRPMARRLVASGTPLTVYNRTAAKCAEFADLGCEVAESVARMGHCSVLLTMLGTDDDVAQVYLGDDGLVANARAGAVLVDCSTISPDMSARVRARCDRAGVHFLAAPVAGGPPVIESGGLAMAVSGDRQAFEHAADVLRVVAPNLIYVGPGDTSRLVKICHNLLVAATLEVLGELCVLAESHGASRQALLSFLRSTAISSRFIEYKAPLLESLDFTPAFTSSLMQKDLELGLGLAGQADVTMPVTAQVHATYRAANESGLAELDAAAVYLYLAGSNPPERAGGGDDRSGRNGGPARPDGAPDPHR

SEQ ID NO: 6779 - protein, 394 aa, Mycobacterium smegmatis str. MC2 155
MSGFAGRDAVIVGAVRTPVGKGKANGALHGVLPADLLAHSLRELISRTGVDSAQVDDVIAGAVTQVGDQAVNIARNALLGAGFPESVPGTTVDRQCGSSQQAISFAAQGVLAGAYDIVIAAGVESMSRVPMGSSVLPGSDPFGVAFAERYSEGIVPQGISAELIAAKWNLSRAQLDEFSAASHEKAARATKEGLFEAELAPIAGLSTDEIIRPGTTVETLAGLKPAFYHESYAARFPQINWEITPGNSSPLSDGSAAVMITSGETAKRLGLKPLARIHTTTVVGSDPLYMLTGVIPATEKVLRRAGLTLADIDLFEVNEAFAPVVLAWAADTGADLSKTNVNGGAIAIGHPLGASGARIMTTLVNALHQRGARYGLQTMCEGGGMANATIIERL

SEQ ID NO: 6780 - protein, 292 aa, Mycobacterium smegmatis str. MC2 155
MTSVGFVGLGIMGRPMALNLAWSGTPLVVWNRTLERCLPVEAAGARVASHVGEVFDRCETVILMLADESAIDDVLGCQTSAFDGLVRRHTIVQMGTVDPGYSRRLADRVAGAGGCYVEAPVSGSRGPAEAGELVAMLAGAPEDCTHVRAIIAPMCRAVFDCGTPPHALLTKFAVNLFMIAMVTGLAEAYHFAEGHGVDPALLDRILDASPMASTVSRAKSAKLARRDFEVQAGLADVHKNTDLITRAARSRGIASPVLDACHALYGEAVALGHPTEDMAAVIHAVRARTAAA

SEQ ID NO: 6781 - protein, 347 aa, Mycobacterium smegmatis str. MC2 155
MGDDHGHEHGPRRELPPGLAEQLDLPYAGMVSFGHRPFLTETQQLDEWRPDVAIVGAPFDIATTNRPGARFGPRAIRATAYEPGTYHLDLGLEIFDWLEVVDFGDAYCPHGQTEVSHANIRERVHAVASRGVVPVVLGGDHSITWPSATAVADVHGYGNVGIVHFDAHADTADNIEGNLASHGTPMRRLIESGAVPGSHFVQVGLRGYWPPQDTFEWMLEQKMTWHTMQEIWDRGFKAVMDDAVGEALAKAEKLYLSVDIDVLDPAHAPGTGTPEPGGITSADLLRMVRQLCHRHDVAGVDVVEVAPAYDHAELTVNAAHRVVFEALAGMAARRRDAAQAQPGPPAR

SEQ ID NO: 6782 - protein, 494 aa, Mycobacterium smegmatis str. MC2 155
MTTRWRTKSVEQSIADTDEPSTRLRKDLTWWDLTVFGVSVVIGAGIFTITASTAGNLTGPAISISFLIAAVACGLAALCYAEFASTVPVAGSAYTFSYATFGEFVAWIIGWDLILEFAVAAAVVAKGWSSYLGTVFNFGGGTMQIGGGLTLDWGALLIIAVVTFLLARGTKISAMVSLVITVIKVSVVLLVVFVGAFYINTANYTPFIPPAESGDGSGGGTGAEQSLFSLLTGAEGSHYGWYGLLAGASIVFFAFIGFDIVATTAEETRNPQRDVPRGILGSLAIVTVLYVAVSVVLSGMVSYRDLKTVDGESANLATAFAQNGVDWAAKVISIGALAGLTTVVIVLMLGQTRVLFAMSRDGLMPRQLAKTGPHGTPVRTTLIVGGAVAVAASVFPIGKLEEMVNIGTLFAFVLVSAGVLVLRRTRPDLPRGFRTPLVPVLPVAAILACVWLMLNLTGLTWIRFLIWMAIGVVIYFLYGRRRSVLATRDTTPTA

SEQ ID NO: 6783 - protein, 448 aa, Mycobacterium smegmatis str. MC2 155
MTAEATAHEHTGDTADSKLARKITGPLLFLFILGDVLGAGVYALMGVLAGKVGGALWAPLLAALMLALLTAGSYAELVTKYPKAGGAAVFAERAFKQPLVSFLVGFSMLAAGVTSAAGLSLAFAGDYLATFIDVPAVPAAIVFLALVGALNARGISESVKSNVVMTVIELSGLLIVIIAGAVMVGGGRGDLGRLGEFPESTAPAVAILAGAIIAYYSFVGFETSANVAEEIRNPSKVYPAALFGSLITAGVVYVLVGMASAAVLAPDELAASSGPLLEVVSESGLGVPDWVFSAIALIAVANGALLTMIMASRLAFGMAEHRLLPSVLSRVLTKRRTPWVAIVATTAVAMVLTAIGELSTLAETVVLLLLFVFTATNIAVLVLRRDTVEHDHFRVWTAVPVLGVASCVLLMTQQTAKVWMFAGILMAVGVVLYFVARAATNRTADETV

SEQ ID NO: 6784 - protein, 446 aa, Mycobacterium smegmatis str. MC2 155
MSYTTDDRARLGLRESATFDRTTIAAIQRAADTGIYDIRGWGAKRPLPHFDDLLFLGASMSRYPLEGYRERCGTDVVLGDRHAKHPLHLDIPVTIAGMSFGALSAGAKEALGRGASEVGTSTTTGDGGMTPEERGQSKHLVYQYLPSRYGMNPDDLRKADAIEVVLGQGAKPGGGGMLLGQKISERVAGMRTLPQGIDQRSACRHPDWTGPDDLTIKINELREITDWEKPIYVKVGATRTYYDVKLAVHSGADVVVVDGMQGGTAATQEVFIEHVGIPTLAAIPQAVQALQELGVHRKVQLIVSGGIRNGADVAKALALGADAVAIGTAALIALGDNHPRYAAEYEKIGSAAGFYDDFQDGRDPAGISTQDAELAARFDPIEGGRRLANYLRVLTMEAQTIARACGKAHVCHLEPEDLVAVTIEAAAMARVPLAGTDWIPGRGAAL

SEQ ID NO: 6785 - protein, 528 aa, Mycobacterium smegmatis str. MC2 155
MSLPVVLIADKLAESTVAALGDEVEVRWVDGPDRAKLLAAVPEADALLVRSATTVDAEVIAAAPKLKIVARAGVGLDNVDVDAATARGVLVVNAPTSNIHSAAEHAIALLLATARQIPAADATLRERSWKRSSFSGTEIFGKTVGVVGLGRIGQLVAQRLAAFGAHIVAYDPYVSQARAAQLGIELLPLDDLLARADFISVHLPKTKETAGLLGKEALAKTKKGVIIVNAARGGLIDEQALADAITSGHVRGAGLDVYATEPCTDSPLFDLPQVVVTPHLGASTAEAQDRAGTDVAASVKLALAGEFVPDAVNVGGGVVGEEVAPWLELVRKLGLLVGALADAPPVSLQVQVRGELASEDVEILKLSALRGLFSAVVDEQVTFVNAPALAADRGVTAEISTATESPNHRSVVDVRAVHADGSSINVAGTLSGPQLVEKIVQINGRNFDLRAEGHNLIVNYSDKPGALGKIGTLLGGANVNILAAQLSQDASGDHATVMLRVDTDVPDDVRAAIADAVGASTLEVVDLS

SEQ ID NO: 6786 - protein, 388 aa, Mycobacterium smegmatis str. MC2 155
MTALTRRALLAGAGGLTAAGGLFGLGGLAHSALFSAPDAGGALRVGYLPITDAAPLLIAHSAGLYPAWAVSTSRPVLFRSWAALAEAFISRQIDVAHLLMPMAVQLRYTLGAGVRVLGWNHTNGSALTVAPRVQELGDLAGSQVAIPFWWSIHNVVLQQLLRAHGLRPVVRRSASRSERTVELVVMSPSDMVPALANGTLGGYVVADPFNAAAQIKKIGRIHTFLGDVWRDHACCALVTRDDVIAGRPQAVQAVADAVVGAQLRIDADRAAAAAALTEGRYLPQPTPAVTLALTYPNPPYPLAHPDWLPQRLGFRPFPYPSFTRRLVEAMCDTVVDGDRKFLDRLDPAAVHDDLVEDRFVRRSMSAHGGPDAFGPTADLTRTEQVQFS

SEQ ID NO: 6787 - protein, 424 aa, Mycobacterium smegmatis str. MC2 155
MERVTTHQLPWQSTGEHRKPRTFTQSTKLQDVLYEIRGPVHEHASRLEAEGHRILKLNIGNPAPFGFEAPDVIMRDIIQALPTAQGYSDSKGILSARRAVFTRYELVEGFPKFDVDDVYLGNGVSELITMTLQALLDNGDQVLIPAPDYPLWTASTSLAGGTPVHYLCDETQGWNPDVADIESKITERTKAIVVINPNNPTGAVYSRETLEQIVDLARKHQLLLLADEIYDKILYDDAKHISLATLAPDLLCLTFNGLSKAYRVAGYRSGWLVITGPKEHATSFIEGISLLANMRLCPNVPAQHAIQVALGGHQSIDALVLPGGRLLEQRDVAWEKLNEIPGVSCVKPRGALYAFPRLDPEVYDIHDDEQLVLDLLLQEKILLTQGTGFNWPTPDHLRIVTLPWARDLASAIERLGNFLASYRQ

SEQ ID NO: 6788 - protein, 768 aa, Mycobacterium smegmatis str. MC2 155
MSSPRTRSGIRVSRSSAELGAKSIGTTMHATASSTAHGSPGSNHSPSSTDSASPTGIAMNSIRNAALGWAPRKPPRTSVASTNSSTARMSSAICSALSVFSVTPRWSFIVKLMAMPVSTSTIGAVSRRRCISRDSRDHTASTTEIAISDSNTRKSLQPSHRFPRWRRGYHRQMSQTVAEYVLQRLREWNVEQVFGYPGDGINGLIAAFGKDESAGPRFVQTRHEEMAALAATGYAKFSGNVGVCIATSGPGAIHLLNGLYDAKLDHTPVVAIVGQTARSAMGGSYQQEVDLQALFSDVASDYLVEVNVAGQLPNALDRAFRTARARRAPTAVVIPSDLQEQPYEPPGHAFKQVPSSAPHDAEPVLSPDPAALQDAADVLNAGSKVAILIGQGARGAADEVTQVTDLLGAGVAKALLGKDVLPDDLPFVTGSIGLLGTRPSYELMRDCDTLLIVGTNFPYSQFLPDYGQARAVQIDIDGANIGMRYPTEVNIVAVAKTALAQLVPLLERKDDRSWQQSLEKGVAQWWETVERQSMLKADPVNPMRVVWELSSRLPEYAMVAGDSGSSTNWYARCLKFTSTTRGSLSGTLATMGSAVPYAIGAKFAQPDRPVIALVGDGAMQMNGLAELLTIRRYAHLWADPRMVICVFHNNDLAHVTWELRAMGGAPKFEGSQSLPEVSYADVARVMGLRCITVDDPEQIGAAWDDALSADEPVLLDVHTDPEVPPIPPHVTYEQMKATAQAFVKDPNGWHLFAEIAKNKAAELLPNRR

SEQ ID NO: 6789 - protein, 421 aa, Mycobacterium smegmatis str. MC2 155
MALVVQKYGGSSVADAERIRRVAERIVETKKAGNDVVVVVSAMGDTTDDLLDLARQVSPAPPPREMDMLLTAGERISNALVAMAIESLGAQARSFTGSQAGVITTGTHGNAKIIDVTPGRLRDALDEGQIVLVAGFQGVSQDSKDVTTLGRGGSDTTAVAVAAALDADVCEIYTDVDGIFTADPRIVPNARHLDTVSFEEMLEMAACGAKVLMLRCVEYARRYNVPIHVRSSYSDKPGTIVKGSIEDIPMEDAILTGVAHDRSEAKVTVVGLPDVPGYAAKVFRAVAEADVNIDMVLQNISKIEDGKTDITFTCARDNGPRAVEKLSALKSEIGFSQVLYDDHIGKVSLIGAGMRSHPGVTATFCEALAEAGINIDLISTSEIRISVLIKDTELDKAVSALHEAFGLGGDDEAVVYAGTGR

SEQ ID NO: 6790 - protein, 224 aa, Mycobacterium smegmatis str. MC2 155
MDEVLARAGIFQGVQPSAVAALAQQLEPVSFSRGQVVFTEGEPGETLYIITSGKVKIGRKSVDGRESLLTLMGPSDMFGELAIFDPGPRTSTVTALSDVQAVMMHRKVLRNWIADRPEIAEQLLRVLARRLRRTNDNLSDLIFTDVPGRVAKQLLHLAQRFGTREGNSLRVDHELTQEEIAQLVGSSRETVNKALSDFAQRGWIRVQGKSILIDNTERLARRAN

SEQ ID NO: 6791 - protein, 386 aa, Mycobacterium smegmatis str. MC2 155
MVYLDYNASTPVDQRILPVVVESYGAHANAASTHHIAGRAAAELLEEARSRVAALVARSAQDVIFTSGATEAAVLGLVGAVLGASGRPNVVVGATEHKAISAAAELGARLSGGEVRTVRANTNGVVDLTHVEALVDDSVALVAVMAANNETGVLNPVGEVAEVARTAGALCFIDATQLVGKGNLDVATRSADLMVMSSHKIYGPKGAGALIANRSVQKSLVAIASGGGQERGLRGGTHNTPSLVGFGLAAELAAKEQVDDAARLGKLASELLVDLQARLTGVTVNGGGAARLSNTLNLRFEGADAEAVMTSMPSVQVSAGSACQSAVPMPSHVLLAMGMSGTAAAESLRISLGRPTTHDEIKIAGDAIVEAVTRVRELTRDEETRE

SEQ ID NO: 6792 - protein, 485 aa, Mycobacterium smegmatis str. MC2 155
MPRFVDRVVIHARAGNGGNGCASVHREKFKPLGGPDGGNGGRGGSVILVVDPQVHTLLDFHFHPHVVAPSGKPGAGSNRDGAAGIDLEVRVPDGTVVLDENGRMLADLVGAGTRFEAAAGGRGGLGNAALASRARKAPGFALLGEKGQERDLTLELKTVADVGLIGFPSAGKSSLVSTISAAKPKIADYPFTTLVPNLGVVSAGENTYTVADVPGLIPGASEGRGLGLDFLRHLERCAVLVHVVDCATMEPGRDPISDIEALEAELAAYTPTLQGDSALGDLASRPRAVVLNKIDVPDARELADFVRDEVAGRFGWPVYEISTVSRDGLRPLIFALWEMVKKYRDAQPVAAPRRPIIRPIPVDESGFTISSDGEGGFIVRGTRPERWIAQTDFNNDEAVGYLGDRLARLGVEDELLKRGAKPGCAVTIGDVTFDWEPQTPAGVDVTMTGRGTDIRLEQTDRVGAAERKAARRERRQPGESGGEDS

SEQ ID NO: 6793 - protein, 363 aa, Mycobacterium smegmatis str. MC2 155
MFTQTTAAGFGRRLLAGSRMARLADLLTGPHGVDRYTELVEPTWSRHDARARVVAVRRQTPRSVTLTLEPNGAFTGFRAGQHINLSVEINGRRRTRCYSPASAEGAEAIELTIGRHDGGLVSTYLCDHAYAGMVLGLDSVGGDFVLPDTPPERILFVSGGSGITPVLSMLRTLRAQAFTGEVGFLHYARSADEACYRDELDGIRAAIPHLRVLHGYTRDAHGTDLVGRFGPDHLAAALPGNRPDAVYVCGPTDLVAAVEEHCDNVRSECFVPPTFSASATGGTVTFTDSAVSVTDDGQPLLTQAEAAGLTPLSGCRMGICHSCTRTKTRGAVRNLITGAVSGTDNEDIQICVTAPVGDVDIDL

SEQ ID NO: 6794 - protein, 569 aa, Mycobacterium smegmatis str. MC2 155
MTSSEAPAKTAEKPAPKTRPAKRPRGEGQWALGYREPLNANEQAKKDDNPLNVRARIENIYAKNGFESIDKGDLRGRFRWWGLYTQRKPGYDGTWTGDENTDMLEDEYFMLRVRCDGGALTTAALRTLGGISTEFARDTADISDRENVQYHWIQVENMPEIWKRLDAVGLQTTEACGDCPRVVLGSPLAGESLDEVIDGTPAIDEIVRRYIGKPEYSNLPRKFKTAISGLQDVVHEVNDVAFIGVNHPEHGPGFDLWVGGGLSTNPMLAQRVGVWVPLDEVPDVWEGVVSIFRDYGYRRLRSKARLKFLIKDWGVEKFREVLETEYLKRPLIDGPAPEPVTRPIDHVGVQKLKNGLNAVGVAPIAGRVSGTILTKVADLAEAAGSDRIRFTPYQKLIILDVPDDKIDELRAGLDALGLPSTPSHWRRNLMACTGIEFCKLSFAETRKRAQVLVPELEKRLDDINAQLDVPITVNINGCPNSCARIQVADIGFKGQMVDDGNGPEEGFQVHLGGSLGLDSGFGRKLRQHKVLSSELGDYIERVVRNFVKQREDGERFAQWAVRADEADLR

SEQ ID NO: 6795 - protein, 601 aa, Mycobacterium smegmatis str. MC2 155
MCGATGEVRLDGRTPDIGAVSAMAETMSSRGPDAAGVWSQGRVALGHRRLKIIDLTEAGAQPMIDPELGLAVCWNGCIYNYKELRAELSGHGYRFFSHSDTEVLIKAYHHWGDRFVEHLKGMFAFAIAERDTGRVLLGRDRLGIKPLYLSETGDRIRFASSLPALLAGGGVDTGIDSVALHHYLTFHSVVPPPRTILRGVKKVPPASIVAIEPDGTQRTTVYWSPDFSRRAERADWSERDWEDAVLQSLREAVERRLVADVPVGCLLSGGVDSSLIVGLLAEAGQHGLKTFSIGFESVNGVAGDEFKYSDIVAQHFGTDHHQIRIDTARMLPALDGAIAAMSEPMVSHDCVAFYLLSQEVAKHVKVVQSGQGADEVFAGYHWYPPMAEPAAASLDGAVNSYRGAFFDRDSAGVASLISDAYRVDGDPSGVFVTDHFGAPGAETGVDRALRLDTTVMLVDDPVKRVDNMTMAWGLEGRVPFLDHELVELAATCPPELKTAHGGKGVLKEAARRVIPAAVIDRPKGYFPVPALTHLEGPYLNMVRDALYAPEAKERGLFRPEAVERLLADPNGRLTPLRGNELWQIGLLELWLQRHGITGSAA

SEQ ID NO: 6796 - protein, 358 aa, Mycobacterium smegmatis str. MC2 155
MAAMETSTAPLDEPAGLTDADGFTPLRVKDVIRETTDAVSLILDVPELIEDRFRYTAGQFVTVKTTIRGEEHRRCYSMSSSPHVGPDLRITVKRDRDGVVSNWINDTAAAGDRLLTAPPDGRFVLTTADRDVVTFAGGSGVTPVFSLVNTTLATTGRRVRMFYANRDADSVIFRDALTRLTDSHSDRLHVHHHLDTRDGVVSARHITEFLGASTVSTAEADFYICGPAPFMDTVERVLLDAGVPAQRVHLERFTVTPADPAVEAESAATEEVTIVLGRTTVTQPYRAGTTLLQTARLAGLKAPSSCEVGTCGTCIGQVVEGSARLLNNDALDDDEIAEGWVVTCQALPTSHTVKVVYE

SEQ ID NO: 6797 - protein, 367 aa, Mycobacterium smegmatis str. MC2 155
MFNFFSLDIIYYPVSAIMWVWYKAFSFLLGPTNFFAWALSVMFLVFTLRAILYKPFVKQIRTTRQMQELQPQIKALQKKYGKDRQRMALEMQKLQKEHGFNPILGCLPMLAQVPVFLGLYHVLMSFNRTQTGIGRLGLSVEENRSLGNYVFSATDVQHFLDANLFGAPLGATMIQQHGLEAFTEFNRLAVIIVGVPIMILAGIATHFNSRASVARQSVEAAANPQTAMMNKLALYVFPLGVVVGGPFLPLAVIMYWLANNIWTYGQQHYVFGKIEKEEEAKKAEMLERRAANAPAPGAKPNRMKKAQPGGQAGAEGEAGSATELTGESSGTSEPTTDSGATGASGTSGTTPTNRTPKPGARPKKRKR

SEQ ID NO: 6798 - protein, 540 aa, Mycobacterium smegmatis str. MC2 155
MSARNGGDVVVETLTALGVSHVFGIPGQNALGLFDAVRRSKLTFISSRVENNSAFGADGYSRATGDVGVLFLSTGPGALTALGALQEAHATGVPVLVIASQVPRAGMGLRRGMLHQLDDQKASAANVTKSTAVARDAAAIPSLIADAYELALSAPAGPVWVEIPQDVLTEPTSVPPVSTLTVHPTYRSPRPELVDAAADLLNGAQRPVILAGGGVRRSPGGPAALVEFAEALGAPVVSTVGGKGAIAFDHPLSAASWIEDRHTTALLEDADVLVAVGTAMGEVTSNYFTFAPRGQLIHIDAEARVLQANHPALAMHADAAQALNALTPRVHPRDDAEGARTAAALRKAVQDRLSAQDLGTEQKLMRDLRTAVPASTHTFWDMTIAGYWAWSAWDPQQGEFHSAQGAGGLGFAFPAALAAAIATGRRTFAVSGDGGAMYSIAELATARQHDADITWLVVDDGGYGILREYMTAEFGAATATELARPDFARLAESFGIPAHTATIDDVGDLVAASFEHDGPTVIVLPAVLQMFAPTHLPPKE

SEQ ID NO: 6799 - protein, 474 aa, Mycobacterium smegmatis str. MC2 155
MTNPEMVEEQPQLRRVMGPGLLLLFVVGDILGTGVYALTGQVAKEVGGAAWLPFLVAFLVATVTAFSYLELVTKYPQAAGAALYAHKAFGIHFVTFLVAFIVMCSGITSASTASRFFAANFFTGLHLDWGKAGVVVLALLFMALIAAVNFRGVSESVKLNVFLTFIEITGLALVILVGLWAFTGGSADIDFSRVVAFDTPSDKGVFLAVSTATSLAFFAMVGFEDSVNMAEETKDPVRIFPKMLLTGLGIAGLVYVVVSIVAVALVPVGVLAGSETPLVEVVKAGAPGLPIETILPFISMFAVSNTALINMLMASRLIYGMARQRVLPPVLGSVHPRRLTPWVAILFTTLIAFGLIFYVSAFANSSAIAVLGGTTSLLLLAVFAVVNIAVLVLRRDLREKGTHFKTPTVLPVIGFIASTYLVLPFSGRPAQQYILAGILIAIGIVLFGITTIINRRLGISSKAQIDPTHLTDAP

SEQ ID NO: 6800 - protein, 317 aa, Mycobacterium smegmatis str. MC2 155
MKVVVTRALPPATLSPLADVGEVWVSPHDRPLTDDELRHAVRGAHGIVSMLNDRIDERVLAAAGDQLRVVANTAVGYDNLDVAAIARHGATATNTPGVLVDATADLTMALLLDVTRRVSEGDRLIRSGQPWSWDIGFMLGTGLQGKQLGIVGMGHIGRAVARRATAFGVRVVYHARRAQDDGIGRRVPLDELLATSDIVSLHCPLTIETRHLIDAEALGAMKPGSYLINTARGPIVDESALADALARGGIAGAALDVYEHEPEVHPGLRELPNVVLAPHLGSATVETRTLMAELAVKNVVQTLNDSGPVTPIAVPSG

SEQ ID NO: 6801 - protein, 622 aa, Mycobacterium smegmatis str. MC2 155
MARAVGIDLGTTNSVVAVLEGGDPVVVANSEGSRTTPSVVAFARNGEVLVGQPAKNQAVTNVDRTIRSVKRHVGTDWNIEIDDKKYTPQEISARVLMKLKRDAESYLGEDITDAVITVPAYFNDAQRQATKEAGQIAGLNVLRIVNEPTAAALAYGLDKGEKEQTILVFDLGGGTFDVSLLEIGDGVVEVRATSGDNHLGGDDWDDRIVTWLVDKFKGSSGIDLTKDKMAMQRLREAAEKAKIELSSSQSTSINLPYITVDADKNPLFLDEQLTRAEFQRITQDLLDRTRQPFQQVIKDAGISVSDIDHVVLVGGSTRMPAVTDLVKELTGGKEPNKGVNPDEVVAVGAALQAGVLKGEVKDVLLLDVTPLSLGIETKGGVMTKLIERNTTIPTKRSETFTTADDNQPSVQIQVYQGEREIASHNKLLGSFELTGIPPAPRGVPQIEVTFDIDANGIVHVTAKDKGTGKENTIKIQEGSGLSKEEIDRMIKDAEAHAEEDRKRREEADVRNQAESLVYQTEKFVAEQRGAASDGGGSKVPEETLAKVDSAIADAKKALEGTDISAIKSAMEKLGVESQALGQAIYEATQAEQPAGGSDNGAPGDDNVVDAEVVDDDAGKENK

SEQ ID NO: 6802 - protein, 402 aa, Mycobacterium smegmatis str. MC2 155
MTSTAGRQVYLDHAATTPMHPAAIEAMTAVLAGVGNASSLHGSGRAARRRMEEAREALARLLGARPSEIIFTTGGTESDNLAVKGIYWARHDADPARRRIITTAVEHHAVLDAVEWLVAHEGAEVTWLPVDRDGAVSPAALREALQAGAHDVALVSVMWANNEVGTIMPIAELAAVAAEFGVPMHSDAVQAVGQIPVNFGASGLAAMSVTAHKFGGPTGVGALLLRRDTACVPLLHGGGQERDVRSGTPDVAGVVAMATAAGVAIENLADNSARVRALRDRLIDGVLSAIEDAQLNGARGDARLPGNAHFTFHGCEGDSLLMLLDAKGVECSTGSACTAGVAQASHVLIAMGADAVKARGSLRLSLGHTSTEADVDTALEVLPAAVERARQAALASAGTVSR

SEQ ID NO: 6803 - protein, 383 aa, Mycobacterium smegmatis str. MC2 155
MAKNHIKISANVADTVRPTVAGADERPGWHALRRLAARITTPLLPDDYLQLANPLWSARELRGRVLEVRRETEDSATLVIKPGWGFSFDYQPGQYIGIGVFLDGRWRWRSYSLTSSPVTAHPKGRARTITITVKAMPEGFLSTHLVGGLEPGTVVRLAAPQGNFVMPDPAPASVLFLTAGSGITPVMSMLRTLVRRDQITDIVHLHSAPTESDVLFGSELTALQGTHPGYRLRIRSTRTEGRLDLERIADEVPDWRERQVWACGPEGMLADAERVWKAAGVGENLHLERFAVKRAAPHGTGGNVTFERTGKTVHADAAKSLMEAGEEVGIRMPFGCRMGICQSCVVGLVDGHVRDLRTGVEHDAGSRIQTCVSAASGDCVLDV

SEQ ID NO: 6804 - protein, 286 aa, Mycobacterium smegmatis str. MC2 155
MSYVSPSDFVGKMIDAGEAKAHMSTRDTLIRAYMAGAILAIAAAFAVTITVQTGNALVGAILFPVGFCLLYLLGFDLLTGVFTLVPLALLDKRRGVTVRTVLRNWGWVFLGNFAGALTVAFMMAIVFTYGFSVDPNEVGQRIGEIGHSRTVGYAEHGAAGMLTLFIRGVLCNWMVSTGVVAAMMSTSVSGKVIGMWMPVMLFFYMGFEHSVVNMFLFPSGLMLGGDFSIADYFIWNEIPTAVGNLVGGLTFVGLTLFATHARTAAPRFSIPAVAEPHSAEARKISA

SEQ ID NO: 6805 - protein, 376 aa, Mycobacterium smegmatis str. MC2 155
MTVLVVNSGSSSLKYAVVRPASGEFLADGIIEEIGSGAVPDHDAALRAAFDELAAAGLHLEDLDLKAVGHRMVHGGKTFYKPSVVDDELIAKARELSPLAPLHNPPAIKGIEVARKLLPDLPHIAVFDTAFFHDLPAPASTYAIDRELAETWHIKRYGFHGTSHEYVSQQAAIFLDRPLESLNQIVLHLGNGASASAVAGGKAVDTSMGLTPMEGLVMGTRSGDIDPGVIMYLWRTAGMSVDDIESMLNRRSGVLGLGGASDFRKLRELIESGDEHAKLAYDVYIHRLRKYIGAYMAVLGRTDVISFTAGVGENVPPVRRDALAGLGGLGIEIDDALNSAKSDEPRLISTPDSRVTVLVVPTNEELAIARACVGVV

SEQ ID NO: 6806 - protein, 513 aa, Mycobacterium smegmatis str. MC2 155
MIIGIPRESQPGETRVAATPQTVGQILKLGYSVVVESGAGAAASFSDAAYADAGAQIGSADAVWSADVVMKVNAPSEGEIAALRDGATLISLISPALRPDLVEQLGTRNITVLAMDAVPRISRAQSLDVLSSMANIAGYRAVVEAAHAFSRFFTGQVTAAGKVPPAKVLVVGAGVAGLAAIGAAGSLGAIVRATDPRPEVADQVASLGGEYLAVDDSGEVAEVSKTGYAKEMGEDYKAREAALYAEQCKDVDIIITTALIPGRPAPRIITAEMVASMKAGSVIVDMAAANGGNVEGTVKDQAIVTDNGVTIIGYTDLAGRLPAQSSQLYGTNLVNLLKLLTPEKDGKVVLDFDDVVQRSITVVRDGEITWPPPPVQVSAAPAAQPAAAAPGVKEEKQPMSTGRRLAVAFAAAAVLFALIALSPAALQVHLVVFALAIVIGYYVIGNVHHALHTPLMSVTNAISGIIVVGALLQIGHHNTAITALAFVAILLASINVFGGFAVTRRMLAMFSRS

SEQ ID NO: 6807 - protein, 319 aa, Mycobacterium smegmatis str. MC2 155
MTATSTPIGPVDASKVPRFAGPATFARLPRLDQVTKADVVIAGVPFDTGVSYRPGARFGPTHVRESSRLLRPYNPGLDVSPFEVVQVADAGDIAVNPFNIHEAIETIEGAARDITADGKKLVTIGGDHTIALPLLRAAAAKHGPVALVHFDAHLDTWDTYFGAEYTHGTPFRRAVEEGILDTEALSHVGTRGPLYGKKDLEDDRRFGFGIVTSSDVYYQGVREVVDKLRQRVGNRPVYLSIDIDVLDPAHAPGTGTPEAGGMTSRELLEILRGFRGLNLVGADVVEVAPAYDHAEMTGVAAAHVAYDLVSLLALGPDEA

SEQ ID NO: 6808 - protein, 485 aa, Mycobacterium smegmatis str. MC2 155
MDQTETPLLDALNEYHASNRYGYSPPGHRQGRGVDDRVLRVLGREPFLSDVLANGGLDDRRSSNGYLQKAEDLMAEAVGADTAWFSTCGSSLSVKAAMMAVAGGDGSLLLSRDSHKSVVAGLIFSGVMPRWITPRWDADRHLSHPPSPEEVEETWRRYPDAAGALIVSPSPYGTCADLAGIADVCHARGKPLIVDEAWGAHLPFHENLPTWAMNAGADVCVVSVHKMGAGFEQGSAFHLQGDLIDQDRLSACADLLMTTSPNVLVYSAIDGWRRQMVEHGHRLFGAALDLADDTRRRIEEIDDVEVLDEELLGAQASHDLDRLQILIDVSATGTSGYQAADWLRENCQVDVGMSDHRRILATMSVADGSDTAGRLLHALSLWRKAADDFAPPPPIDLPSPAELQLTTKTSPRDAFFAEVEQIPVEHAVGRIAAEQITPYPPGIPAVVPGERLNEAVLDYLVTGVQAGMNLPDPADPQMGSIRVMA

SEQ ID NO: 6809 - protein, 262 aa, Mycobacterium smegmatis str. MC2 155
MSSTPEGLVPDAAPPWLRPLLDNVGHVPNAYRRRVPPEVLASIVEANHQAAETGSRRDAAVLVLFSGPPDAPAGVLPDDADLLVTVRASTLRHHAGQAAFPGGATDPGDTGPVATAFREATEETGVDTSRLHPLATLDKMFIPPSGFHVVPVLAYSPDPGPVTVVDEAETAAVSRVPVRAFINPENRLMVYREGNTSRFAGPAFLLNEMLVWGFTGQVISAMLDVAGWAKPWNTDDVRGLEEAMALVGRASSYGEAHRGTGI

SEQ ID NO: 6810 - protein, 618 aa, Mycobacterium smegmatis str. MC2 155
MSAPTTRPPHTAAAPANGAPASTSDQPQPKRVAPEQLTGAQAVVRSLEEIGVDTIFGIPGGAVLPVYDPLFDSKKLRHVLVRHEQGAGHAASGYAHATGKVGVMMATSGPGATNLITPLADAQMDSIPVVAITGQVGRSLIGTDAFQEADITGMTMPITKHNFLVRNGDDIPRVIAEAFHIARSGRPGAVLVDIPKDILQGQCTFSWPPKIDLPGYKPTTKPHNRQIREAAKLIAQARKPVLYVGGGVIRGEATAELLELAELTGIPVVTTLMARGAFPDSHRQNMGMPGMHGTVAAVAALQRSDLLIALGTRFDDRVTGKLDSFAPEAKVIHADIDPAEIGKNRHADVPIVGDVKAVIAELVQSLRKTGTTAEALQLDSWWEYLSGIRSTYPLSYGPQSDGSLSPEFVIEKLGQIAGPDAVYVAGVGQHQMWAAQFIKYENPKTWLNSGGLGTMGFAVPAAMGAKFARPEAEVWAIDGDGCFQMTNQELATCALEGAPIKVALINNGNLGMVRQWQTLFYDERYSQTNLSTHSRRIPDFVKLAEALGCVGLRCERAEDVEDVINQARAINDRPVVIDFIVGADAQVWPMVAAGTGNDEIMAARDIRPLFDDNEEGHA

SEQ ID NO: 6811 - protein, 501 aa, Mycobacterium smegmatis str. MC2 155
MSAPPTSMAGQMMRRRPVIGAPVAHGASDHLKRSIGTFQLTLFGVGATVGTGIFLVLQEAVPEAGPAVLVSFVLAGVAAGLSALCYAEMASAVPVSGSTYSYAYTTMGEFVAMGVAACLLLEYGVSMSATSIGWGGYLNQLLDDVFGFRIPQALTSAPWGENPGIMNLTATLLIVMCGLLLIRGASESALVNTIMVIIKLAVLALFVAVAFTAFTTDHFAGFWDKGFAGITAAAGSIFFTFIGLDAVSTAGDEVKNPQKTMPRAILGALVVVASVYILVAFAGLGTQSADEFGSEEQSEAGLAVILTNILHGQTWASTILSFGAVISIFSVTLVVMYGQTRILFAMGRDGLLPSMFARVNSHTMTPINNTIVVALVTGTLAGFVPLDYLWDLVSIGTLVAFIVVSAGVVLLRVREPDLPRSFKVPGYPVTPVLSIIACLFVLYGLPAVTWLWFSVWVGAVLLFYLLWGRRHSALNDGGDGYIPGAAAGEDDVMTGHPEDRA

SEQ ID NO: 6812 - protein, 439 aa, Mycobacterium smegmatis str. MC2 155
MSKKPIGVAVLGLGNVGSEVVRIIADSADDLAARIGAPLELRGVGVRRVADDRGVPTELLTDDIDALVSRDDVDIVVEVMGPVEPARKAILSALEQGKSVVTANKALMAMSTGELAQAAEKAHVDLYFEAAVAGAIPVIRPLTQSLAGDTVRRVAGIVNGTTNYILSEMDSTGADYTSALADASALGYAEADPTADVEGYDAAAKAAILASIAFHTRVTADDVYREGITTVSAEDFASARALGCTIKLLAICERLTSDEGKDRVSARVYPALVPLTHPLAAVNGAFNAVVVEAEAAGRLMFYGQGAGGAPTASAVMGDVVMAARNRVQGGRGPRESKYAKLPIAPIGFIPTRYYVNMNVADRPGVLSAVAAEFAKREVSISEVRQEGMVDEVGKPCGARIVVVTHSATDAALSETVEALADLDVVQNINSVLRLEGTNS

SEQ ID NO: 6813 - protein, 576 aa, Mycobacterium smegmatis str. MC2 155
MITVADHIVSVLRISGVRRVYGLPGDSLNGFTDAIRRSGEISWEHVRHEETAAFAAAADAGLTGQLAVCAGSCGPGNLHLINGLFDAQRSRVPVLAIAAHIPRSEIGSQYFQETHPQELFGECSVYCELVSTPEMAPRILAMAMRAAVEDNGVAVVVIPGEIFLQRIPEQPVRPISATRSVLCPDEASLQRAADMLNAAERVTILGGAGVAGAHDALVQLAATLQAPVVHALRGKEFIEYDNPFDVGMTGLLGFASGYKAIKEADTLLMLGTDFPYQQFYPENATVIQVDVRGAHLGRRTPIDLGLRGTVGDTLAALQPLLRPKHDREHLDRALRHYRKTRASLDALAVNDRDRTPIRPEYLAGLIDRLAAADAVFTCDVGSPVVWAARYLSMNGRRRLLGSFNHGTMANALPHAIGAQSAYPGRQVIALAGDGGLTMLFGELVTLIQNRLPVKVIVFNNSSLNFVELEMKAAGIVTFGTDLQNPDFAAVATAMGIHGRKVTEPADLEDVLKEAFAHDGPAVIDVHTARQELSIPPAITIEQAKGFSLYAIRTILAGRSDELLDLITTNVARRILD

SEQ ID NO: 6814 - protein, 411 aa, Mycobacterium smegmatis str. MC2 155
MTVTTPEPADVRVDLEPEHAEIVSATLPLIGANIDAITSEFYRRLFTNHPELLRNLFNRGNQAQGAQQRALAASIATFAKHLVDPDLPHPAALLSRIGHKHASLGVTAEQYPIVHDNLFAAIVAVLGADTVTPEVAAAWDRVFWIMADTLIALERNLYDEAGVEPGDVYRRLRVVGRVDDPSGAVLVTVRAAEPVNFLPGQYVSVGVTLPDGARQLRQYSLVSVAGATDLTFAVKPVEATAAQPAGEVSNWIRDNVCVGDLLDVTLPFGDLHTDDLSTGPVMLISAGIGITPMIGILEHLAAERPDAHVRVLHADRSDTAHPLRERQRELVDALPEASLDIWYEDGVTAGMPGVHAGLLDLDGIELPVEPQIYLCGGAGFVDAVRGQLAARGVPAERVHCELFAPNDWLLD

SEQ ID NO: 6815 - protein, 502 aa, Mycobacterium smegmatis str. MC2 155
MQPVVEMRGISIEFPGVKALDGVDFRLLPGEVHALMGENGAGKSTLIKALTGVYDIDDGTIVVAGTPCTFAGPRQAQEAGISTVYQEVNLCPNLTVGENILLGREPRRWGRIDYRTLNRRARELLAELELDIDPRSQLGSHPIAIQQLVAIARATAVRAQVLILDEPTSSLDAREVGELFRVIRRLRDSGTAILFVSHFLDQIYAISDRMTVLRNGKLVGEYLTAELPKSDLVAAMLGRQLDVLDEVAEAANVTAETAEHQSETLVRADALGRVPAVHPVTLDIGRGEILGLAGLLGSGRTELARLLFGADRATSGHVEIRGRRVALRTPRSAIAHGFAFTSENRKDEGVVGDLSVRENLVLALQARRGFARPLSTKTKDQLVAKYLDALDIRPRNPDTLLKNLSGGNQQKVLLARWLITEPDLFILDEPTRGIDVGAKTQIQKLVTELAGDGMAIVFISAELDEVTRISTRIAVMRDRHNVALAEAGTSPSKLTALIAGTS

SEQ ID NO: 6816 - protein, 692 aa, Mycobacterium smegmatis str. MC2 155
MPEGEAATAIYIASPEGDTGKSTIALGILHRLAATVPKVGVFRPITRLGEDRDYILELLLAGTTAGLPYEDCVGVSYQQVHEDPDAAIAEIVDRYHRVADQCDAVLIVGSDYTDIATPSELSMNARIAVNLGAPVVLAVKAADRTPDEVVHVVEVCLAELAGQHAHTSAVVANRCDPAQLTAVSEALRPLGPPAYVLPEEPLLVAPSVAELQKAVDGTVVAGDPALLSREALGVLVAGMTAEHVLERLTEGVAVVTPGDRSDVVLAVVSAHAAEGFPSLSTIILNGGLDLHPAIAKLVDGLGLKLPIIATPYGTFETASRVASARGRVTSTSQRKIDTALQIMERHVDIDDLLARLRLPIPEVTTPQMFTYQLLDRARADRKRIVLPEGDDDRILKAAGRLLRRGVADLTILGEENQIRSRGAELGVDLSAATVLDPRTSDLCEAFAQQYAELRKHKGITLDQAREIIVDVSYFGTMLVHNDMVDGMVSGAAHTTAHTVRPAFEIIKTLPDVSTVSSIFLMCLEDRVLAYGDCAIVPDPTAEQLADIAISSARTAAQFGIEPRVAMLSYSTGTSGTGADVEKVKAATDLVRERDKTLLVEGPIQYDAAVEPSVAKTKMPDSEVAGRATVLIFPDLNTGNNTYKAVQRSAGAIAIGPVLQGLNKPVNDLSRGALVEDIVNTVAITAIQAQGRS

SEQ ID NO: 6817 - protein, 479 aa, Mycobacterium smegmatis str. MC2 155
MSEQTLPEAEHLSRQLSNRHIQLIAIGGAIGTGLFMGSGKTVSLAGPSVIFVYMIIGFMLFFVMRAMGELLLSNLEYKSFADFAADLLGPWAGFFTGWTYWFCWIVTGVAEVVAIAGYVAFWWPDLPLWIPALVTVAVLITLNLATVRAFGETEFWFAMIKIVAILALIVVGLVMVLSHFRAPGGAVASLSNLWDDGGFFPTGPMGFVAGFQIATFAFVGIELVGTTAAEARDPERNLPRAVNSIPVRVMLFYVAALVIIIAVTPWREISPDRSPFVAMFSLAGLGIAASVVNFVVLTSAASSANSGIYSTSRMVYGLSCGGDAPASFGRLTSRRVPANALFLSGVVLLSSVVMVAAGDSIIAAFTLVTTISSLCFMFIWTIILSSYLVYRRRRPQQHSASPFKMPGGVVMCWVVLAFFVFLVWAFTQKSDTLQALLVTPAWFVVLGIAWAFLRRRLGHKAREAAFRAALEAESADSAD

SEQ ID NO: 6818 - protein, 136 aa, Mycobacterium smegmatis str. MC2 155
MQRVLLASKIHRATVTQADLHYVGSITIDAELMAAADIVEGEQVHVVDITSGARLVTYAITGTPGSGVIGINGAAAHLISPGNLVIIMSFVHLDEAERADHRANVVHVDADNHIVTIGSDPAQPVPGAADQLVGRV

SEQ ID NO: 6819 - protein, 407 aa, Mycobacterium smegmatis str. MC2 155
MSMRDAVICEPVRTPIGRYGGMFRSLTAVDLGVTALKGLLERTGIAADQVEDVILGHCYPNSEAPAIGRVVALDAGLPITVPGMQVDRRCGSGLQAVIQACLQVRSGDHDLVVAGGAESMSNVAFYSTDMRWGGARTGVQIHDGLARGRTTAGGKFHPVPGGMLETAENLRREYHISRTEQDELAVRSHQRAVAAQSEGVLAEEIIPVPVRTRDGEETISVDEHPRADTTVEALAKLKPVLLKQDPEATVTAGNSSGQNDAASMCIVTTPEKAAELGLKPLVRLVSWGSAGVAPDLMGIGPVPATEVALAKAGLTLADIDLIELNEAFAAQALAVMREWKFGEADHERTNVRGSGISLGHPVGATGGRMLATLARELHRREARYGLETMCIGGGQGLAAVFERVQEG

SEQ ID NO: 6820 - protein, 382 aa, Mycobacterium smegmatis str. MC2 155
MAASFLVVGAGITGLATAAALQRRGHDVCVAEARADTASGAGISIWPNALAALDAIGLGDPVRAAGGRVTAGALRWHDGTWLRHPAAERITRALGEPLVVIRRRVLTEILSGALAPGTVVHGLEAHTVETCASGIRVTFSDGSVREASAVVGADGVDSVVARHLNGPLRRRYAGYTAWRGIAAHPLDPELSGETMGAGVEVGHVPLGADHTYWFATERASQGQRSPDGELTHLRRLFGSWAEPIPQLLAATDPADVLRNDLYDREPARCWARGPVVLAGDAAHPMRPHLGQGGCQGLEDAATLAALVAREPDLPTAFARFATLRRRRVTRMVRTSRMIGRIVNLRPAVLSAAASRATVLVPEAVLTRQLASIAARSAFTPVD

SEQ ID NO: 6821 - protein, 301 aa, Mycobacterium smegmatis str. MC2 155
MALTEFRSGFVCFVGRPNTGKSTLTNALVGQKVAITSNRPQTTRHTIRGIVHREDFQIILVDTPGLHRPRTLLGQRLNDLVKDTYSEVDVIGMCIPADEAIGPGDRWIYQQIRAVAPRTTLIGIVTKIDKVPKDRVAAQLLAVSELMGPDAEIVPVSATSGEQLDVLTNVLVSQLPPGPAYYPDGELTDEPEEVLMAELIREAALEGVRDELPHSLAVVIDEVSQREDRDDLIDVHAILYVERDSQKGIVIGKGGARLREVGTAARKQIEKLLGTKVYLDLRVKIAKNWQRDPKQLGKLGF

SEQ ID NO: 6822 - protein, 384 aa, Populus trichocarpa
MMIGEHPHHHPNPTVQIPQWDPYDDQTTSPSPSTIPSSPFTNFNALDSLTALHRYLPSNEPDPSFEDELDLPVDAFSCDHFRMYVFKVRRCGRGRSHDWTECPYAHPGEKARRRDPQRYHYSGTACPEFRKGGCKKGDSCEFAHGVFECWLHPARYRTQPCKDGPACRRRVCFFAHTPEQLRLLPQHSPKGNGSGSWELDFGSLVMHPLDSYLTKAGSFVSSPTSILTSPPVSPPSDSPPMSPVSPQVIGGSGSGSFNSMSELLASMRGLQLGKMKIGSPVGSWGVQSGSRFGSPRGSSLRPGFCSLPSTPTRTMVTRSGLGQLDIWGDSSTCEEEPAMERVESGRDLRAKIYAKLSKENSLDPDRVESAVSGPDVGWVSELVK

SEQ ID NO: 6823 - protein, 157 aa, Populus trichocarpa
MAFVSFVGRVLFASVFILSAWQEFNEFGTNGGPAAHLLEPKFHVFSKHVSSQTGFQVPHFEMKHAVAAAISVKAFGSLLFIFGSSVGAYLLLLHQIIITPILYDFYNYDADTKEFNLLFAKFAQNLALFGALLFFIGMKNSIPRRQLKKKSPKSKTT

SEQ ID NO: 6824 - protein, 157 aa, Populus trichocarpa
MAFISFVGRVLFASVFILSAWQEFNEFGSDGGPAAHIMAPKFRSFSKHVSSHTGFQVPHFEMKHAVAAAMSVKAVGSLIFILGSSIGAYLLLLHQLIVTPILYDFYNYDADTKEFNLLFAKFAQNLALFGALLFFIGMKNSIPRRQLKKRSPKPKAL

SEQ ID NO: 6825 - protein, 165 aa, Populus trichocarpa
MSDEEHHFESKADAGASKTYPQQAGTIRKNGYIVIKNRPCKVVEVSTSKTGKHGHAKCHFVGIDIFNGKKLEDIVPSSHNCDVPHVNRTDYQLIDISEDGFVSLLTENGKTKDDLRLPTDDSLLTPIKDGFGEGKDLVVTVMSAMGEEQICALKDIGPKKLNMML

SEQ ID NO: 6826 - protein, 185 aa, Populus trichocarpa
MADTLTNLTPPLPLKSSRTLSSLRGLPICSTPLSNNSSSSLKTTSTCSRILSINGPKRYRPMSARATDSSSPSSSFGSRLEDAVKKTVAENPVVVYSKTWCSYSFEVKSLFKRLNVDPLVVELDELGAQGPQIQKVLERLTGQHTVPNVFIGGKHIGGCTDTVKLYRKGELEPLLSEANAKKSQG

SEQ ID NO: 6827 - protein, 195 aa, Populus trichocarpa
MAAFAGTQQKCMACDKTVYLVDKLTADNRVFHKACFRCHHCRGTLKLSNYCSFEGVLYCRPHYDQLFKRTGSLDKSFEGTPKIVKPEKPVDNENASKVSNLFAGTREKCVGCDKTVYPIEKVTVNGTPYHRSCFKCTHGGCTISPSNYIAHEGKLYCKHHHIQLFKEKGNYSQLENEREKNPVVSITAVEIAAES

SEQ ID NO: 6828 - protein, 240 aa, Populus trichocarpa
MESIKLFRGYGKVNPHLEDQSPHQQHSASKRRILIFSVSSILLLTLIIGIALATLIHESNSEPDESPYLSSSNPAESIKTVCDVTLYPSSCFTSISSLNTSTKPDPEVIFKLSLQVSIAELKNLSSLLSSFNDVNSQAALKDCVSQFDDSLSKLNDSLSAMEVGPGEKMLNLEKVNDIRTWISAAMTDQDTCIDGLEEMGSKFLDEIKAKIERSKEFLSISLAIIAKMQALLEKFDLKMH

SEQ ID NO: 6829 - protein, 218 aa, Populus trichocarpa
MSLLSDLINLDLSDTTDKIIAEYIWIGGSGMDLRSKARTLNGVVSDPHKLPKWNYDGSSTGQAPGEDSEVILYPQAIFKDPFRRGNNILVMCDAYTPAGEPIPTNKRYNAAKIFSHPDVVAEVPWYGIEQEYTLLQKDLKWPIGWPVGGYPGPQGPYYCGAGADKAFGRDVVDSHYKACLYAGINISGINGEVMPGQWEFQVGPSVGISAGDELWVAR

SEQ ID NO: 6830 - protein, 109 aa, Populus trichocarpa
MAMNKAKELVSTNPVVVFSKTSCPFCVKVKQLLNQLGAKYTTVELDTEKDGGEIQSALHEWTGQRTVPNVFIGGNHIGGCDKTTGMHQEGKLVPLLADAGAVASASASA

SEQ ID NO: 6831 - protein, 423 aa, Populus trichocarpa
MSFRSIVRDMRDGFGSLSRRSFEVRLPGHHRGESHSSACELHDQPVVIQNSRWAGLPPELLRDVIKRLEASESTWPARKHVVACAAVCSAWREMCKEIVRNPEFSGKITFPVSLKQPGPRDGTIQCFIKRDKSKLTYHLFLCLSPALLVENGKFLLSAKRTRRTTCTEYVISMDADNISRSSSTYIGKLRSNFLGTKFIIYDTQPPYNNAQLSPPGRSRRFYSKKVSPKVPTGSYNIAQVTYELNVLGTRGPRRMHCTMHSIPASSLEPGGSVPGQAELLPRSLEDSFRSISFSKSIDNSTEFSSSRFSDIVGPREDEEGKERPLVLRNKAPRWHEQLQCWCLNFRGRVTVASVKNFQLIAATQPAAGAPTPSQPVQSDHDKIILQFGKVGKDMFTMDYRYPLSAFQAFAICLSSFDTKLACE

SEQ ID NO: 6832 - protein, 198 aa, Populus trichocarpa
MAKSSLVLLLLSILYIAGTATSASTTSSSASATNFIKASCTATTYPALCVQSLSLYATSINQSPRQLIQTALAVSLDKAQSTKTFVYKLTKFKGVKPREKAAIKDCFEEIDDTVDRLVKSVKELKNMGSSKGSDFQWHISNVQTWISAGLTDEKTCVDGFAGKALNGRIKNSIKARFVHVERVTSNALALINKFGSKY

SEQ ID NO: 6833 - protein, 379 aa, Populus trichocarpa
MCGGAIISDFIAPTTTARSSRRLTSGFEWLELKKPFNNKHLKPVVADPEDDFEADFQEFKDESDVDEDYDVFADAKPFAFSASVSEPAQKRGLPRGSTAVKSAGFSGPAEKSAKRKRKNQFRGIRQRPWGKWAAEIRDPRKGVRVWLGTFNTAEEAARAYDSEARRIRGKKAKVNFPDEAPCASARHPIKENSQKRLTKANLSQDFSYLSNPETDYNNMGFVEEKPQVSQFGIMNSFPAIGDSGVTPLTPDNASMYFNSDKGSNSFDCDFGWGEQGPEILSVLAATPEVDESVFVDANPKKLKSYSENEVPVEEKNGKSLSEELLAFDNQLMNLQMPDLVGNWEASLDSFLNGDTTQDGTNAVDLWSFEDFPSMVGGVY

SEQ ID NO: 6834 - protein, 89 aa, Populus trichocarpa
MQHFKPRMSRLTFVHLLLAWLLLVASQQRFSSNIKVQAVEAVHFKPNPAQLTSKSHKGNVLPVWVAEKRIHKSPSGPNPVGNHNPPSKQ

SEQ ID NO: 6835 - protein, 157 aa, Populus trichocarpa
MAFTSFLGRVLFASVYILSAYQEFNEFGVDGGPAAKALKPKFGVFTSHVQSHAGIQVPEIEIKHLVSAAIFLKGIGGILFIIGSSLGAYLLIIHQLIAIPILYDFYNYDSEEKEFNQLFIKFTQNMALYGALLFFIGMKNSFPRRQHKKKVPKTKTG

SEQ ID NO: 6836 - protein, 208 aa, Populus trichocarpa
MTLTSRLESLVNSSPVMLFMKGKPTEPKCGFSGKVVEILREEKVKFETFDILTDEEVRQGLKVYSNWSSYPQLYIKGELIGGSDIVLEMQKSGELKKVLIEKGIVQKETIEDRIKSLITSSPVMLFMKGTPDAPRCGFSSKVVNALKEEGVSFESFDILSDEEVRQGLKVFSNWPTFPQLYYKGELIGGCDIIMELRDNGELKSTLSE

SEQ ID NO: 6837 - protein, 356 aa, Populus trichocarpa
MSLLSDLINLNLSDSTEKIIAEYIWVGGSGMDIRSKGRTLPGPVSDPSKLPKWNYDGSSTGQAPGEDSEVILYPQAIFKDPFRRGNNILVICDTYTPAGEPIPTNKRCKAAKIFSHPDVVAEVPWYGLEQEYTLLQKDVKWPLGWPIGGYPGPQGPYYCGAGVDKAFGRDIVDAHYKACLYAGINISGINGEVMPGQWEFQVGPSVGISSGDELWAARYILERITEVAGVVLSFDPKPIQGDWNGAGAHTNYSTKSMRNEGGYEVIKKAIEKLGLRHKEHIAAYGEGNERRLTGRHETADINTFKWGVANRGASIRVGRDTEKEGKGYFEDRRPASNMDPYVVTSMIAETTILWKP

SEQ ID NO: 6838 - protein, 591 aa, Populus trichocarpa
MAASSGSLDTSGNSHPQSSNNYFSFSTNSSNHYPFMTSSSFTDLLASNDEEPINNNTGNSKLGDRIAERTGSGVPKFKSTPPPSLPLSPPPVSPSYYFAIPPGLSPTELLDSPVLLNPSNILPSPTTGTFPGQGLNWKSSSGNIQQNVKKEDRSFSDFSFQQPARPSTTSSAMFQSSNSTVQPGQQQTWGFQEPAKQYEFVSGKSNMVKMEYNSNSMKSFSPEIAAIQANPQSNNGFQSDHGNQPQQYQSVREQKRSDDGYNWRKYGQKQVKGSENPRSYYKCTFPNCPTKKKVERSLDGQITEIVYKGSHNHPKPQSTRRSSSTGSNPAMIPAPNSNSNEIQDQSYVTHGNGQMDSSVATPDNSSISIGDDDFDSQKSKSVGGDDLDEDEPEAKRWKRERDNEGISAPGSRTVREPRVVVQTTSDIDILDDGYRWRKYGQKVVKGNPNPRSYYKCTFQGCPVRKHVERASHDLRAVITTYEGKHNHDVPAARGSGSRSLQDHSNNGNNNAAMAIRPSTVNHVSNNPIRNQRAPPTATSEGDMPFTLEMLQSPGSFGFSGFGNLMGSYMSQSSTDEVLSRAKRELEVESFW

SEQ ID NO: 6839 - protein, 161 aa, Hordeum vulgare
MEHGHATNRVDEYGNPVAGHGVGTGMGAHGGVGTGAAAGGHFQPTREEHKAGGILQRSGSSSSSSSEDDGMGGRRKKGLKDKIKEKLPGGHGDQQQTGGTYGQHGHTGMTGTGEHGATATGGTYGQQGHTGMTGTGAHGTDGTGEKKGIMDKIKEKLPGQH

SEQ ID NO: 6840 - protein, 374 aa, Populus trichocarpa
MELGLSLGDAATASKPFGFMEKSTKLTNKASLGFCMGLSIGQNHTPQEDEDKEKHGNNDHKSDNTNTTTTAEANKRKGLTVDTTDSPIQLDLLPNTPVPRNRNSSPTYVVYDNGNMSRGFDVNRFPAVMVHEDQADQDVAALSSSPPNSATSSFQMDFCMYSSKGRSESHNEADQAERASSRASDEDENGSARKKLRLSKDQSAFLEESFKEHNTLTPKQKLALAKELNLRPRQVEVWFQNRRARTKLKQTEVDCEYLKRCCETLTEENRRLHKELQELRALKTSNPFYMQLPATTLTMCPSCERVATTSTSTAAATTTTATPTATAATTTTTTNNQNNTADPTSKTTGLSLGSTRPRFYPFSHTQTHHHQHTA

SEQ ID NO: 6841 - protein, 584 aa, Populus trichocarpa
MCGILAVLGCADNSQAKRSRVIELSRRLKHRGPDWSGLHCHGDCYLAHQRLAIVDPASGDQPLYNQDKTVVVTVNGEIYNHKELRAQLKSHTFRTGSDCEVIAHLYEEHGENFVDMLDGMFSFVLLDTRDKSFIAARDAIGITPLYIGWGLDGSVWFASEMKALSDDCERFMSFLPGHIYSSKQGALRRWYNPPWFSEQIPSSPYDPLALRKAFEKAVVKRLMTDVPFGVLLSGGLDSSLVAAVASRHLADSEAAQQWGSQLHTFCIGLKGSPDLKAAREVADYLRTRHHEFYFTVQEGIDALEEVIYHIETYDVTTVRASTPMFLMSRKIKSLGVKMVISGEGSDEIFGGYLYFHKAPNKEEFHQETCRKIKALHLYDCLRANKSTSAWGVEARVPFLDKEFINIAMSIDPEWKMIRPDLGRIEKWVLRNAFDDEKNPYLPKHILYRQKEQFSDGVGYSWIDGLKDHANKQVTDAMLMNASFIYPENTPTTKEAYYYRTIFEKFFPKNSARSTVPGGPSVACSTAKAVEWDAAWSKNLDPSGRAALGVHEAAYEETVDTKAASQNNGSPQKPQGTLEKTATVA

SEQ ID NO: 6842 - protein, 191 aa, Populus trichocarpa
MYPSKQDTAHEMNQKPSPPLPPPVTGYPVGPFINQHHNEIHSHPIQHQQPQPGRWSSGLCDCFSDIPNCCITCWCPCITFGRIAEIVDKGTTPCAVSGATYGVLLWFTGCPCIYSCIYRTKMRKQLMLEDRPCNDCLVHFCCDACALCQEYRELKHRGFDMTMGWQENVERQNGRVTIIASAPPVEQGMKR

SEQ ID NO: 6843 - protein, 477 aa, Populus trichocarpa
MSLTIKLTISPRIINLNCHERNRTKFPAIRPKPIYHSNALNPILYNNKRPGMIQASVSGTVIKSSLIEPDGGVLVDVIVPESERGSKTLEAESLPKARLAKIDVEWVHVISEGWASPLKGFMRENEYLQSLHFNSLRMENRTVVNMSLPIVLAIDDETKESIGSSKDVGLVGPEGDLLAILRSIEIYKHNKEERIARTWGTTAPGLPYVEEFIAPAGNWLLGGDLEVLKPIKYNDGLDHYRLSPKQLRKEFDRRQADAVFAFQLRNPVHNGHALLMNDTRRRLLEMGYKNPILLLHPLGGFTKADDVPLDVRMEQHSKVLEDGVLDPETTIVAVFPSPMHYAGPTEVQWHAKARVNAGANFYIVGRDPAGMGHPTEKRDLYDPDHGKKVLSMAQGLEKLNILPFRVAAYDTVAKKMAFFDPSRSKEFLFISGTKMRAYARNGENPPDGFMCPGGWEVLVKYYEQLQAEEAMPVVASA

SEQ ID NO: 6844 - protein, 588 aa, Populus trichocarpa
MSSLSVRFLTPQLSPTVPSSSARPRTRLFAGPPTVAQPAETGVDAGRLEPRVEKKDGYYVLKEKFRQGINPQEKVKIEKEPMKLFMENGIEELAKLSMEEIDKEKSTKDDIDVRLKWLGLFHRRKHQYGRFMMRLKLPNGVTTSAQTRYLASVIRKYGKDGCADVTTRQNWQIRGVVLPDVPEILRGLAEVGLTSLQSGMDNVRNPVGNPLAGIDPDEIVDTRPYTNLLSQFITANSRGNPEFTNLPRKWNVCVVGSHDLYEHPHINDLAYMPAMKDGRFGFNLLVGGFFSPKRCAEAIPLDAWVSADDVLPSCKAVLEAYRDLGTRGNRQKTRMMWLIDELGIEGFRSEVVKRMPRQELERESSEDLVQKQWERRDYFGVHPQKQEGLSYAGLHIPVGRVQADDMDELARLADIYGTGELRLTVEQNIIIPNIEDSKIEALLKEPLLKDRFSPEPPLLMQGLVACTGKEFCGQAIIETKARAMKVTEEVQRLVSVSKPVRMHWTGCPNTCGQVQVADIGFMGCMARDEKGKICEGADVYVGGRVGSDSHLGELYKKSVPCKDLVPLVVDILVKQFGAVPREREEVDD

SEQ ID NO: 6845 - protein, 303 aa, Populus trichocarpa
MTPAYLNPASSSFPFVDLREEQNLQLFLSPHQAATSLSGPTNFFNTSAHDHQRETKPGESRQHDNQEVDMYNISHGGSSSSFQPEVNDHNYNSNFHNLSSSKMEDGAEESGESSVKWMPSKMRLMQKMTNSNCSETDHMPMKFMLKFHNQQYQNNEINSSSNSNSNIRVCSDCNTTSTPLWRSGPRGPKSLCNACGIRQRKARRAMAAAAAAANGTVIAIEASSSTRSTKVNNKVKKSRTNHVSQNKKLSKPPESSLQSQKKLCFKNLALSLSKNPALQQVLPHDVEEAAILLMELSCGFIHS

SEQ ID NO: 6846 - protein, 183 aa, Populus trichocarpa
MLGSQYREDSAVITDEAFAHAKTFKLAGDGKDIWVFDVDETTLSNLPYYAKHGFGAEPYNSTAFNQWVFTGKALALPESLKLYRNLLSIGIKVVFLTGRTEDQRAVTSNNLKNAGYHIWEKLILKSSSYSGKTAVFYKSSERAKLEKKGYRIIGNIGDQWSDLLGTSVGNRTFKLPDPMYYIS

SEQ ID NO: 6847 - protein, 314 aa, Populus trichocarpa
MAGGTGGSNSNLSVLLQSQRGPCAASQPLESFFLSGSSPSFLGSRSMMSFEDVHQANGSTRPFFRSFDHEDNGDDDLDEYFHQPEKKRRLTVDQVQFLEKSFELENKLEPERKIQLAKDLGLQPRQVAIWFQNRRARWKTKQLEKDYDVLQSSYNSLKADYDNLLKEKEKLKAEVNLLTDKLLLKEKEKGISELSDKDALSQEPPKRAIADSASEGEVSKISTVACKQEDISSAKSDIFDSDSPHYADGVHSSLLEAGDSSYVFEPDQSDLSQDEEDNFSKSLLPPYVFPKLEDDDYSDPPASFEDHAFWSWSY

SEQ ID NO: 6848 - protein, 442 aa, Populus trichocarpa
MSSVSSQPQFRLTQPPSKVLHLRNLPWECTEEELVELGKPFGKVVNTKCNVGPNRNQAFIEFSDLNQAIAMISYYASSSEPAQVRGKTVYLQYSNRQEIVNNKTTADVGGNVLLVTIEGADARLVSIDVLHLVFSAFGFVHKITTFEKTAGFQALVQFSDAETASSAKNALDGRNIPSYLLPEHLGPCTLRITYSAHTDLSVKFQSHRSRDYTNANLPVAPSAIDANGMFSVGLDGKKLEPESNVLLASIENMQYAVTLDVLHMVFSSFGPVQKIAMFDKNGGLQALIQYPDVQTAVVAKEALEGHCIYDGGFCKLHLSYSRHSDLSIKVNNDRSRDYTIPNTVMMNPQPSILGQQPVATHGPPAHTYPGAQHHQMMPQPSAGWATGGPPVPHSMPAQMNNNPYLPPGTMPPQMGHGMMQMPNHGGLPHAPAMPPYRPGHMQ

SEQ ID NO: 6849 - protein, 473 aa, Populus trichocarpa
MSTSGQPQFRYTQTPSKVLHLRNLPWECTEEELIELCKPFGRIVNTKCNVGANRNQAFVEFVDQNQAIQMVSYYASSSDPAQVRGKTVYIQYSNRHEIVNNKSPGDNPGNVLLVTIEGVEAGDVSIDVIHLVFSAFGYLHKIATFEKAAGFQALIQFTDSETASSARNALDGRSIPRYLLPEHVGSCHLRISYSAHTDLNIKFQSHRSRDYTNPYLPVNPTAIEGPVQPTVGADGKKKEPESNVLLASIENMQYAVTIDVLHTVFSAFGTVQKIAIFEKNGGTQALIQYPDVATAAVAKETLEGHCIYDGGYCKLHLSYSRHTDLNVKAYSDKSRDYTIPDASLIAAQAPGLHTAPTMWQNPQAGSMYTGNNYATTAAVPVQVPPGQVPAWDPTMQAGGQGYASVPGTYPGQTYPTPPASAYATAAIPAGSSPRSHSSPISHSVASMAMSHPGMQSNLRPSGASPPGQPPYYG

SEQ ID NO: 6850 - protein, 328 aa, Populus trichocarpa
MKRSLGSSDSLGALMSICPSAEEHSPRNHTHVYSREFQSMLDGLDEEGCVEEAGGHVTEKKRRLSGDQVKALEKNFEVENKLEPERKVKLAQELGLQPRQVAVWFQNRRARWKTKQLERDYGVLKANYDSLKHNFDALQHDNEALLKEIRELKAKLNEENAESNVSVKEEIILAESEDKMPEEDTPALLDSVAASETKELNYETFNNHSSINIGLGASLFPDFKDGSSDSDSSAILNEDNSPNPAISSSGILQSQLMMSPPPSSSLRFNCSASSSSPSSMNCFQFSKSYQTQFVKLEEHNFFSSEEACNFFSDEQPPSLPWYSSDQWN

SEQ ID NO: 6851 - protein, 356 aa, Populus trichocarpa
MSLLSDLINLDLSDTTDKIIAEYIWIGGSGMDLRSKARTLNGVVSDPHKLPKWNYDGSSTGQAPGEDSEVILYPQAIFKDPFRRGNNILVMGDAYTPAGEPIPTNKRYNAAKIFSHPDVVAEVPWYGIEQEYTLLQKDLKWPIGWPVGGYPGPQGPYYCGAGADKAFGRDVVDSHYKACLYAGINISGINGEVMPGQWEFQVGPSVGISAGDELWVARYILERITEIAGVVVSFDPKPIPGDWNGAGAHTNYSTKSMRNDGGFEVIKKAIGKLQLKHKEHIAAYGEGNERRLTGRHETADINTFSWGVANRGASVRVGRDTEKAGKGYFEDRRPASNMDPYVVTSMIADTTILWKP

SEQ ID NO: 6852 - protein, 509 aa, Populus trichocarpa
MELSTFAALLLATVAVITLFRHLTRPKLNLPPGPKPWPIIGNLNLLTGPLPHRNMHALVQKYGPIMQLKFGSFPVVVGSSVEMAEAVLKTNDVKLADRPKIAAGKYTTYNYSNITWSQYGPYWRQARKICLMEIFSPKRLDQFETVRVQELHALLRKLFVSAGKPINARDEFSDLSLSVISRLVLGKNYTVKTGNQKQYMSPKEFKEMIDELFLLNGVLDIGDSIPWLAFLDLQGYIKRMKAVGQLFDGFLEYTLNEHQQRRKGVKDYVPQDMMDILLQLSDDPNLEVQLDRTAVKAFTMDLIAGGTESSAVTTEWAMAELLKKPEYFKRANEELDRVIGRDRWIEEKDIVNLPFINAICKETMRLHPVSPFLVPRLAREDIQLGGYDIPKGTRVMVNVWTIGRDASIWEKPHEFCPERFIGKSIDVKGHNFELLPFGAGRRMCVGYSLGLKVIQASVANLLHGFKWKLPGDMKTEELNMQEIFGLSTPKQIALVAELEPRLPAHMYSM

SEQ ID NO: 6853 - protein, 227 aa, Populus trichocarpa x Populus deltoides
MESGYEESTSVRLESSSFSSNNGTDAGDFECNICFELAQDPIVTLCGHLFCWPCLYRWLHHHSHSHECPVCKAIIQEEKLVPLYGRGKTQADPRSKSYPGIDIPTRPSGQRPETAPPPDANNLPHFGFGMPGGFMPAAPTRIGGFTISTAFGGLSLFPSLFNIQFQGYPDATVYGTTSGFPYGFHGFHGNRTHRFPPATTRGQQADNVLKNLFFFIGFLVVLALLWW

SEQ ID NO: 6854 - protein, 194 aa, Populus trichocarpa x Populus deltoides
MADLTSKSLILIAISFFINSSSAATVTPQSSIEFIRTSCSTTTYPRLCYTSLSIHSRTIHTSPKLIANAALNVTLSSAKSTSTMMSKLSQSHGLKPKEVSAMKDCVEELSDAVYELRESIDEMGHAKQSNFEVMISDVRTWVSAAMTDESTCSDGFAGNAMNGNLKRAIRGRIMNIAQLTSNALALVNNYALIT

SEQ ID NO: 6855 - protein, 166 aa, Populus trichocarpa x Populus deltoides
MSRVYVGNLDPRVSERDLEDEFRRFGVIRSVWVARRPPGYAFIDFDDKRDAQDAIHELDGKNGWRVELSHNSRGGGGGGGGRGECRLRVGSGGGGGGGGRRRSRSPRYRRSPSYGRRSYSPRGRSPKRRSLSPRGRSYSRSPQYRGREELPYANGNGIRDRRRSRS

SEQ ID NO: 6856 - protein, 101 aa, Populus trichocarpa x Populus deltoides
MDKVLRLTSEQGVVIFIKSTCCLCYAVKILFQEIGVDPLVHEIDQDPEGREMEKALTRMGCSAPVPAVFVGGKLLGSTNEVMSLHLSGSLNQMLKPYQSQT

SEQ ID NO: 6857 - protein, 263 aa, Populus trichocarpa x Populus deltoides
MVSPGNAALLLDYDQYINMDAINIPAQDPNFSAFSWPPLVQPHHHHQQQQQQQQQQQTLNAFAHTATVSCPNFGAEIDGSFGECDVQKEPCSKKRGRSESCSASSSKACREKLRRDRLNDKFIELGSILEPGRTPKTDKAAILVDAVRMVTQLRDEAQKLRDSNSSLQEKIKELKAEKIELRDEKQRLKAEKEKLEHQLKAMSSQPSFMPAPPAIPAAFATQGQAPGNKLMPFIGYPGVAMWQFLPPAAVDTSQDHVLHPPVA

SEQ ID NO: 6858 - protein, 338 aa, Populus trichocarpa x Populus deltoides
MSIIGKRGIHYLQKLKTANIPPELLEKGQNRVIDASLTLIRERAKLKGELLRALGGVKASTTLLGVPLGHNSSFLQGPAFAPPRIREAIWCGSTNSSTEEGKELNDPRVLTDVGDVPVQEIRDCGVDDDRLMNVISESVKLVMEEDPLRPLVLGGDHSISFPVVRAVSEKLGGPVDILHLDAHPDIYHCFEGNKYSHASSFARIMEGGYARRLLQVGIRSITKEGREQGKRFGVEQYEMRTFSRDRQQLENLKLGEGVKGVYISIDVDCLDPAFAPGVSHIEPGGLSFRNVLDILHNLQADVVAADVVEFNPQRDTVDGMTAMVAAKLVRELTAKISK

SEQ ID NO: 6859 - protein, 286 aa, Populus trichocarpa x Populus deltoides
MSSSRSGGSGSRTRVGRYELGRTLGEGTFAKVKFARNVETGENVAIKILDKEKVLKHKMIGQIKREISTMKLIRHPNVVRMYEVMASKTKIYIVLEFVTGGELFDKIASKGRLKEDEARKYFQQLINAVDYCHSRGVYHRDLKPENLLLDASGFLKVSDFGLSALPQQVREDGLLHTTCGTPNYVAPEVINNKGYDGAKADLWSCGVILFVLMAGYLPFEESNLMALYKKIFKADFTCPPWFSSSAKKLIKRILDPNPSTVCSPSSLCINLLYTFPSLERMPYNIG

SEQ ID NO: 6860 - protein, 350 aa, Populus trichocarpa x Populus deltoides
MASKLCDSCKSATATLFCRADSAFLCISCDSKIHAANKLASRHARVSVCEVCEQAPAHFTCKADAAALCVTCDRDIHSANPLASRHERVPITPFFDSSSTVHGGGAAVNLLEDRYFDEVDGGRGDVSREEAEAESWLLPNPGGGTAKGVDSMDLNTGQYVFGSEMDPYLDLDPYVDPKVEVQEQNSSGTTDGVVPVQSNKLGFQAPALVNDNCCYELDFSTGSKSFGGGYGYNSLSHSVSSSSLDVGVVPDGSGSTLTDISNPYCSRSVSNGMESANQTVQLSAVDREARVLRYREKRKNRKFEKTIRYASRKAYAETRPRIKGRFAKRTDTEVEVDRSSLYGFGVVPSF

SEQ ID NO: 6861 - protein, 502 aa, Populus trichocarpa x Populus deltoides
MDKQGRELVFFHSGDFLRQNPGVSDHTNDSSSDHTKPIIKEVDFFSSDRTSELPGTDQEKKIGTIGSSSLVDSSINTGLNLLTSSSGISIIANVKNTDNNELSGLQGELERLHDENKKLRSLLDQITKSYRDLQAQLIMATQKQTQGNRIEQKGELNDTPGSIMSAQHLMDPRPRPSVTLDVNDPSVSDDKTQEVLVSSTNTVGTKSQMLGKRASIEDGLDQTSQSWGSPKSPKLEHEKPDEQTPEVPFRKARVSVRARSDAPLISDGCQWRKYGQKMAKGNPCPRAYYRCTMAVGCPVRKQVQRCAEDKTILITTYEGNHNHPLPPAATAMASTTSAAAAMLLSGSTTSKEGLSSSSSFYPSFPYASTMATLSASAPFPTITLDLTQGPNTTMPFHRTSPSPATFPLPLHGFPQLLGHPMYASPKLPAIPSVQLGQRHASMVETVTAAIASDPNFTAALAAAISTFMGTPRSSDGTNNHNAPSGIPGSPQLPQSCTTFSTN

SEQ ID NO: 6862 - protein, 386 aa, Populus trichocarpa x Populus deltoides
MAKPISIEVYNPNGKYRVVSTKSMPGTRWINLLIEQDCRVEICTQKKTILSVEDIIALIGDKCDGVIGQLTEDWGETLFAALSRAGGKAFSNMAVGYNNVDVNAANKHGVAVGNTPGVLTETTAELAASLSLAAARRIVEADQFMRAGLYDGWLPHLFVGNLLKGQTVGVIGAGRIGSAYARMMVEGFKMNLIYYDLYQSTRLEKFVTAYGEFLKANGEQPVTWKRAASMDEVLREADVISLHPILDKTTYHLINKESLATMKKEAILVNCSRGPVVDEVALVEHLKQNPMFRVGLDVFEDEPYMKPGLADMKNAVVVPHIASASKWTREGMATLAALNVLGKIKGYPVWGDPNQVAPFLNENAPPPAASPSIVNAKALGLPVSKL

SEQ ID NO: 6863 - protein, 525 aa, Populus trichocarpa x Populus deltoides
MVGSGSSPATAALSGLQDHLKLAREYALEGLYDTSIIFFDGAIAQINKHLTTLDDPLIRTKWMNLKKSLSEETEIVKQLDAERRAFKEAPAARRVASPPIHAKSSFVFQPLDEYPTSSAAPIDDPDVWRPPSRDTTSRRPTRASQVGLRKSPQDGAWARGASTRTGTTGRGAKTAASSRVNSGVRASTTGKKGTGKSGRGDTANGDAEDGKRRPQYEGPDPDLAEMLERDVLETTPGVRWDDVAGLSEAKRLLEEAVVLPLWMPEYFQGIRRPWKGVLMFGPPGTGKTLLAKAVATECGTTFFNVSSATLASKWRGESERMVRCLFDLARAYAPSTIFIDEIDSLCNARGASGEHESSRRVKSELLVQVDGVNNSSTGEDGSRKIVMVLAATNFPWDIDEALRRRLEKRIYIPLPNFESRKELIRINLKTVEVSTDVNIDEVARRTDGYSGDDLTNVCRDASLNGMRRKIAGKTRDEIKNMPKDEISNDPVAMCDFEEALRKVQRSVSPSDIEKHEKWFSEFGSA

SEQ ID NO: 6864 - protein, 180 aa, Populus trichocarpa x Populus deltoides
MGISFVAVKMPKCFGLQFLLEFLTFIKLLFLLTLSNLLMSRPRRQPYNTDQDQHPTEDYVLVMGELSPSPIPVPVSVLTRLIKKKLPVMAFSSLLERLVKLEDDQESMCPVCLDCIQERDEVRELCNCSHVFHMKCLDSWVDQGQVTCPTCRSMLFPKKMEAAEMFIFAHDDSAMVEQVS

SEQ ID NO: 6865 - protein, 321 aa, Populus trichocarpa x Populus deltoides
MALVRERRQVNLRLPELSDRRPRFPLPLPPTSTINNNNNNTSTISCNDIEKIHVLGHGNGGTVYKVRHKRNSQIYALKVVHGDSDPLVRRQIYREIEILRRTDSPNIVKCHGVYEKPSGDIAITMEYMDLGTLDSLLKKHGTFNESKLSHVASQVLNGLSYLHAQKIIHRDIKPSNLLVNKDMEVKIADFGVSKIMHRTLDACNSYVGTCAYMSPERFDPDTYGGNYNGYAADIWSLGLILLELYMGHFPFLPPGQRPDWATLMCAICFGDPPSLPEGASEEFRDFIQCCLQKESGKRWTAAQLLAHPFVCKVPRSDLVDL

SEQ ID NO: 6866 - protein, 96 aa, Populus trichocarpa x Populus deltoides
MASGSSNWTSKQNKLFENALAICDQESPDRWHNLARAVGKTVEEVKKHYQMLVEDVQQIEAGEIPLPNYTRRSGASNKSYHCIDDQAPRVKNLNLN

SEQ ID NO: 6867 - protein, 481 aa, Populus trichocarpa x Populus deltoides
MLSFGFEEDVEVILENLPSKRQSMLFSATMPTWVKKLARKYLDNPLQIDLVGDQEEKLAEGIKLYALSATAASKRTILSDLVTVYAKGGKTIIFTQTKRDADEVSMALTNTIASEALHGDISQHQRERTLNGFRQGKFTVLVATDVASRGLDIPNVDLIIHYELPNDAETFVHRSGRTGRAGKEGTAILMFTSSQRRTVRSLERDAGCKFEFVSPPAIEEVLESSAEQVVATLSGVHPESVEFFTPTAQKLIEEQGTNALAAALAHLSGFSQPPSSRSLISHEQGWATLQLTRDPTYSRGFLSARSVTGFLSDVYPAAADEVGKIHVIADERVQGAVFDLPEEIAKELLNKQIPPGNTIAKITKLPALQDDGPPGDFYGRFSSRDRPARGGPRGQRGGFRSSRGRGSGRDSDDGGTYRRGGRSNSNENSWSQMSRSSGDDWLIGGRRSSRPPSRDRSFGGSCFNCGRSGHRASECPNKKDF

SEQ ID NO: 6868 - protein, 220 aa, Populus trichocarpa x Populus deltoides
MKGCELCGGSARMFCESDQASLCWDCDEKVHSANFLVAKHCRTLLCQVCQSPTPWKSSGSKLAPIVSVCESCFAVHKNKKKQLQDLNVMASDQESREAGNDYDESENDREFDDDDTDDDSDEYDEEEDEEEDGDNQVVPWSGLTASSSPSIAPPVASSSSSEEEISCAGGNGFLKRMRDSNVDLDSDVSLFFLFFHFFAIFFILFFRGHILIIEFVDLRK

SEQ ID NO: 6869 - protein, 92 aa, Populus trichocarpa x Populus deltoides
MTSKDFSPPYVDASRPSLGFPLGAALLLISIVSLSGVFSCCYHWDKLREFCRRRSSSEHPDPGAYIETSPSTSKLFQMVSEFCLFLTNCLSY

SEQ ID NO: 6870 - protein, 179 aa, Populus trichocarpa x Populus deltoides
MEGVSVDDKHKIVVAVDESEESMHALSWCLSNLISHNSTTTLVLLYVKPRPTIYSSFDIAEHIFSADVIVAMEKYGTDLVNSVMKRAETVFRNFNSNVNVEKVIGSGEAQDVICDTVEKLRPDTLVMGSHGYGFLKRAILGSVSEHCAKRVKCPVVIVKHPHDKTTLPSTSSLKHDDGF

SEQ ID NO: 6871 - protein, 223 aa, Solanum tuberosum
MAPKEKIGAVTAAAVMAVGKLNGISKEVHYRGVRKRPWGRYAAEIRDPGKKSRVWLGTFDTAEEAAKAYDNAAREFRGAKAKTNFPQLLKEEDLKFPVKNEINRSPSQTSTVESSSPVMVDSSSPLDLRLCGSIGGFNHNTVRFPISGGGFTGAVPAVNHMYYLDALERAGVINLETNRKKTVDFLGGGDSDTSTVIDFMRVDVKPTIAGLNLDLNFPPPENM

SEQ ID NO: 6872 - protein, 262 aa, Solanum tuberosum
MGSGKLGDSGMIAITAKVMMAVVVFLFFAVVLVFFLHIYSKFFTREDANPNDSTRRRRRRRRFDFAGGYQEVNALRGGLDRSILKTIPVIPFDTKDFKDGLECSVCLSEVCEGEKARLLPKCNHGFHVDCIDMWFQSHSTCPLCRNPVSEMSSTKSIIVESNSGAIRAPVEQGSVASTETRNLPTNVLFWGDETTTSSASTSTSRPDGVLMIDIPRQNSEEAEEEQKTPTPTRLRSLTRLFSSLNPCSPRNVDVEQGSRGQS

SEQ ID NO: 6873 - protein, 724 aa, Solanum tuberosum
MASAAIFSSLRRQRSPTLEAFLAPVDLTDVGLLQTLTALSSELISAYSGKKLPFYQRKNCKSLLRKIQVFSVLLECLLENNLNRSRGSSDLPFTAFLCFKELYLLLYRSKILLDYCSHSSKLWLLLPNHSISGHFHDLNQEISTLLDVFPLKDLKSLPEDVREQVELLKKQARKSPLFVDKHDEMLRLKLFSFLNEFENGGVPDYAQLYSFFVEKLGISNPRSCRVEIEFLEEQIVNHEGDIEPTTSVLNGFVALMRYCRFLLFGFEEDDMGLRLGKHKKPKRGLISQEIADTFISVPKDFCCPISLDLMRDPVIVATGQTYDRASISRWMEEGHCTCPKTGQLLDHTRLVPNRALRNLIMHWCAARKIPYDPLESGDPCIECFPSASPSRAALEANKATAALLIKQLENGTQIAKTIAAREIRLLAKTGKENRAYIAEAGAIPHLKNLLSSPDAVAQENSVTAMLNLSIFDKNKGRIIDEVGCLALIVGVLRFGHTTEARENAAATLFSLSAVHDYKRQIAKEDGAVEALAGLLREGSPRGKKDAVTALFNLSTHTDNCARMIECGAVTALVGALGSEGVAEEAAGALALIVRQQVGATAVGNEETAVAGLIAMMRCGTPRGKENAVAALLELRRGGGAAATERVLKAPSLASLLQTLLFTGTKRARRKAASLARVFQRCEHASVHYSGFGVGYAFSGNSAAARDSTFPGDVSVSRSISVPVL

SEQ ID NO: 6874 - protein, 372 aa, Lysinibacillus sphaericus
MKIGIPKEIKNNENRVAMTPAGVVSLTHAGHERLAIETGGGIGSSFTDAEYVAAGAAYRCIGKEAWAQEMILKVKEPVASEYDYFYEGQILFTYLHLAPRAELTQALIDKKVVGIAYETVQLANGSLPLLTPMSEVAGKMATQIGAQYLEKNHGGKGILLGGVSGVHARKVTVIGGGIAGTNAAKIAVGMGADVTVIDLSPERLRQLEDMFGRDVQTLMSNPYNIAESVKHSDLVVGAVLIPGAKAPKLVSEEMIQSMQPGSVVVDIAIDQGGIFATSDRVTTHDDPTYVKHGVVHYAVANMPGAVPRTSTIALTNNTIPYALQIANKGYKQACIDNPALKKGVNALEGHITYKAVAEAQGLPYVNVDELIQ

SEQ ID NO: 6875 - protein, 372 aa, Geobacillus stearothermophilus
MKIGIPKEIKNNENRVAITPAGVMTLVKAGHEVYVETEGGAGSGFSDSEYEKAGAADRCRTWRDAWTAEMVLKVKEPLAREFRYFRPGLILFTYLHLAAAERVTKAVVEQKVVGIAYETVQLANGSLPLLTPMSEVAGRMSVQVGAQFLEKPHGGKGILLGGVPGVRRGKVTIIGGGTAGTNAAKIGVGLGADVTILDINAERLRELDDLFGDHVTTLMSNSYHIAECVRESDLVVGAVLIPGAKAKLVTEEMVRSMTPGSVLVDIAIDQGGIFETTDRVTTHDDPTYVKHGVVHYAVANMPGAVPRTSTFALTNVTIPYALQIANKGYRAGCLDNPALLKGINTLDGHIVYEAVAAAHNMPYTDVHSLLHG

SEQ ID NO: 6876 - protein, 382 aa, Cucumis sativus
MAKPVQIEVWNPNGKYRVVSTKPMPGTRWINLLIEQDCRVEICTEKKTILSVEDILALIGDKCDGVIGQLTEDWGEVLFSALSRAGGKAFSNMAVGYNNVDVNAANKYGVAVGNTPGVLTETTAELAASLSLAAARRIVEADEFMRAGRYDGWLPNLFVGNLLKGQTVGVIGAGRIGSAYARMMVEGFKMNLIYFDLYQSTRLEKFVTAYGEFLKANGEAPVTWRRASSMDEVLREADVISLHPVLDKTTFHLVNKESLKAMKKDAILINCSRGPVIDEAALVDHLRDNPMFRVGLDVFEDEPYMKPGLADMKNAIIVPHIASASKWTREGMATLAALNVLGKIKGYPVWSDPNRVEPFLDENVSPPAASPSIVNAKALGNA

SEQ ID NO: 6877 - protein, 520 aa, Isatis tinctoria
MESSISQTLSQVLDPTTAILTVVSLFIFIGLIVRRRRPPYPPGQRGWPIIGNMLMMDQLTHRGLANLAKKYGGLCHLRMGFLHMYAVSSPDVAKQVLQVQDSVFSNRPATIAISYLTYDRADMAFAHYGPFWRQMRKVCVMKVFSRKRAESWASVRDEVDKMIRSVSSNIGKPINVGEQIFALTRNITYRAAFGSACEKGQDEFIRILQEFSKLFGAFNVADFIPYFGWIDPQGINKRLVKARNDLDGFIDDIIDEHMKKKESQNTVDDGDVVDTDMVDDLLAFYSEEAKLVSDATDLQSSIKLTRDNIKAIIMDVMFGGTETVASAIEWALTELLRSPEDLKRVQQELAEVVGLDRRVEESDIEKLTFLKCTLKETLRLHPPIPLLLHETAEDTEIDGYFVPKKSRVMVNAFAIGRDPDSWVDPETFRPSRFLEPGVPDFKGSNFEFIPFGSGRRSCPGMQLGLYALELAVAHILHCFTWKLPDGMKPSELDMSDVFGLTAPKATRLFAVPSTRLICAV

SEQ ID NO: 6878 - protein, 463 aa, Zinnia violacea
MWTVGEPGSSSEPSSSLLSLGDRGSSSSSFSDPFGPSSDPFELEARQVTRKRKAVELTIGQSSSGVGSSTMFQGSEGGPPADPTIPRLGLSIGEHPVVENTRRNVGLRINSARQQVDALPANNANRESDVSVLRLNTPAESSLTHQGQPVLRVPALRRNFQSTSRWRASRSANVAMSGARNEVDSISDHPLFTPPSNATTPSQTELNWSSNSGGNGPSSGSSTSHHSRRLSAFLRRSLLPVADPEDGVGQNGNIFPRVPPALSGSSSSSQDVGVPPGQHNQPLSRSSLLLGRQLEGVFAFPHHSRTATPNSEGRGRLVSEIRQIRNVLDLMRRGEPLRFEDLMILDQSVFYGVADIHDRHRDMRLDIDNMSYEELLALEERIGNVNTGLTEETILKHIRQKQYVVGNGSARCRPCCICQEEYKDGDDLGTLDCTHDFHYGCIKQWLQQKNLCPTCKSTGFAST

SEQ ID NO: 6879 - protein, 328 aa, Lactobacillus sanfranciscensis
MDLFESLKSKIKDRKIKLVFPEGEDERIISAASRLANDDLAIPVLLGNEAEIKKTADALNVSLDGIEIVDIENVPGEVRQQMVQAIVERRKGKTTADQAAQWLKDPNYFGTTMVYMDDVDGMVSGAAHPTGDTVRPALQIIKTKPGVNLISGSFVMQKGDQRYLFADCAININPNETQLAEIAVESGKTARLFDIDPRVALLSFSTNGSAKSPEVEKVHNATKLAQEMDPAMPIDGEMQFDAAFVPAVAKAKYSDSKVAGHATVFVFPELQSGNIGYKIAQRMGGFEAIGPILQGLNKPVSDLSRGCNAEDVYKVSIITATQALADKD

SEQ ID NO: 6880 - protein, 160 aa, Guillardia theta
MHAVLGGLPLLLPCTSAFLPSTPSSLLSSRSLTLKSAAARHASPLPRPSLAARPSPRFAAALRMAHGKCRAEYIWIGGRGGCGDDYRSKTRVLDKRPTSVSELPLWNYDGSSTGQAPGGDSEIYLQPAFMCADPMRGGDNILVLCEMIDPKNNPFPTGAL

SEQ ID NO: 6881 - protein, 400 aa, Brasenia schreberi
DLEPVNPADVPVTAAGALKSYKLAAKAISRLQVLPSGNICLLCDVLVREVFELTGYDRVMAYKFHEDEHGEVIAECKRPDLEPYLGLHYPATDIPQASRFLFMKNKVRMICDCTAAPVKVIQDEKIEEPLSLCGSTLRFPHGCHAQYMANMGSIASLVMSVVISESDEAAANDQPEAAASEQPQKGRKLWGLVVCHHTKPRFIPYPLRYACEFLIQVFSVQLNKEVELAAQIREKHILRTQTMLCDMLLRDAPVGIVTQSPNVMDLVKCDGAALYYKRQFWLLGTTPTEARIRDIIAWLHECHGSSTGLSTDSLMEAGYPGAAVLGNAVCGMAAVKITSGDFLFWFRSHTAKEIKWSGAKHVRVDKDNGKKMHPRSSFKAFLEVIKWRSLPWDDIEMDAI

SEQ ID NO: 6882 - protein, 381 aa, Schisandra plena
PADVPVTAAGALKSYKLAAKAIARLQSLPSGNIGLLCDVLVREVSELTGYDRVMAYKFHEDEHGEVIAEYRRSDLEPYLGLHYPATDIPQASRFLFMKNKVRMICDCYAPPVEVIQDKKLAQPLSLGGSTLRAPHGCHAQYMANMGSIASLVMSVTINEDYDEPSSKQQNQQKGRKLWGLVVCHHTSPRFVPFPLRYACEFLLQVCGVQLNKEIELAAQMKEKHILKTQTLLCDMLLRDAPIGIVTQSPNVMDLVKCDGAALYYRKQIWLLGTTPTEAQIQDIAGWLLDCHDSTTGLSTDSLMEAGYLGATSLGDAVCGMAAVKITSKDFLFWFRSHTAKEIKWGGAKHIPVDKDDGKKMHPRSSFKAFLEVVTRRSLPWE

SEQ ID NO: 6883 - protein, 380 aa, Trithuria submersa
PVTAAGALKSYKLAAKAISRLQTVPSGNINLLCDVLVHEVRHLTGYDRVMVYKFHEDEHGEVIAENKRMGLEPYIGLHYPATDIPQVSRFLFLKNKVRMICDCNAKPVKVIQDERLEKLLSLCGSTLRSPHGCHAQYMANMGSIASLVMSVTINENEEEIVNGQKRKGRKLWGLVVCHRTSPSFVPFPLRHACEFLIQVFSVQLNKEVELAAQLREKHILRTQAVLCEMLLRDAPAGIVTQSPNIMDLIKCDGAGVYYGKQFWSVGIAPTEVQVADIIEWLLECHSSSTGLSTDSLFEAGYPGAAALGDPVCGMAAVKITTRDFLFWFRSNSAKEIKWGGAKHNPVDDSKKMHPRSSFSSFLEVVKHRSLPWDDVEMDAI

SEQ ID NO: 6884 - protein, 574 aa, Pseudomonas aeruginosa
MELLSGAEMVVRSLRDEGVKYIYGYPGGVLLHIYDALFKEHDVTHILVRHEQAATHMADGYARATGKPGVVLVTSGPGATNAITGIATAYMDSIPMVILSGQVPSNMVGTDAFQETDMVGISRPIVKHSFIIKHPSEIPEVIKKAFYLAQSGRPGPVVVDIPKDMGDPTQKFEYSYPKKVKLRSYSPAVRGHSGQIRKAAEMLLAAKRPVVYSGGGVIMGNAAAPLTELAQMLNLPVTNTLMGLGGYPGADRQFLGMLGMHGSFTANLAMHHSDVILAVGARFDDRVINGAAKFCPNAKIIHIDIDPASISKTIKADIPIVGPVDSVLTEMVAIVREIGETPNQDAQAAWWKQIDEWRGNRGLFPYDKGDGSIIKPQTVIETLYEVTHGDAFITSDVGQHQMFASQYYKFNKPNRWINSGGLGTMGFGFPAAMGIKLNFPDDDVACVTGEGSIQMNIQELSTCLQYDLPVKIVNLNNGALGMVRQWQDMQYNSRYSHSYMESLPDFVKLAEAYGHVGMRITDLKDLKPKMEEAFAMKNRLVFLDIQVDASEHVYPMQIRDGAMRDMWLSKTERT

SEQ ID NO: 6885 - protein, 285 aa, Escherichia coli
MSTILKWAGNKTAIMSELKKHLPAGPRLVEPFAGSCAVMMATDYPSYLVADINPDLINLYKKIAADCEAFISRARVLFEIANREVAYYNIRQEFNYSTEITDFMKAVYFLYLNRHGYRGLCRYNKSGHFNIPYGNYKNPYFPEKEIRKFAEKAQRATFICASFDETLAMLQVGDVVYCDPPYDGTFSGYHTDGFTEDDQYHLASVLEYRSSEGHPVIVSNSDTSLIRSLYRNFTHHYIKAKRSIGVSAGESKSATEIIAVSGARCWVGFDPSRGVDSSAVYEVRV

SEQ ID NO: 6886 - protein, 605 aa, Bacillus megaterium
MSKIIGIDLGTTNSCVAVLEGGEPKVIPNPEGNRTTPSVVAFKNGERQVGEVAKRQAITNPNTIISVKRHMGTDHKVEAEGKQYTPQEMSAIILQHLKGYAEEYLGEPVTKAVITVPAYFNDAERQATKDAGKIAGLEVERIINEPTAAALAYGLEKTDEDQTVLVYDLGGGTFDVSILELGDGVFEVRATAGDNRLGGDDFDQVIIDYLVAEFKKENGVDLSKDKMALQRLKDAAEKAKKDLSGVTSTQISLPFITAGEAGPLHLEVSLSRAKFDELSAGLVERTMAPVRQALKDAGLSASELDKVILVGGSTRIPAVQDAIKKETGQDPHKGVNPDEVVALGAAIQGGVLTGDVKDVVLLDVTPLSLGIETMGGVFTKLIERNTTIPTSKSQVFSTAADSQTAVDIHVLQGERPMSADNKTLGRFQLTDIPPAPRGVPQIEVSFDIDKNGIVNVRAKDLGTNKEQAITIKSSTGLSDDEIDRMVKEAEENADADKQRKEEVELRNEADQLVFTTEKTLKDLEGKVEEAEVTKANEAKDALKAAIEKNDLEEIKAKKDELQEIVQALTVKLYEQAQQAQQAGEQGAQNDDVVDAEFEEVNDDKK

SEQ ID NO: 6887 - protein, 227 aa, Nicotiana tabacum
SIIWGFTLEPKLTQVCPLSPNDVAASSTYVADQDLTRRRSSPISELGITNASSDPPETMLDKHNENNHPAELFPANPVDSSSDIAVPDSRALVIVPPVNLDALAMVPLNQKSKRSELSQRRIRRPFSVAEVEALVEAVEHLGTGRWRDVKMRAFDNADHRTYVDLKDKWKTLVHTASIAPQQRRGEPVPQDLLDRVLAAHAYWSQQQRKQHVEPLKILDTKARKVGA

SEQ ID NO: 6888 - protein, 157 aa, Ageratina adenophora
MSIIPSFFTGRRSNVFDPFSIEIWDPFQGFSSAISNLPESSRETAAIANARIDWKETPEAHVFKADLPGLKKEEVKVEVEEGRVLQISGERSKENEEKNEKWHRVERSSGKFVRRFRLPENAKLEGVKAAMENGVLTVTVPKAEEKKPEVKSIDISG

SEQ ID NO: 6889 - protein, 386 aa, Solenostemon scutellarioides
MAKPLQVEVYNPNGKYRVVSTKSMPGTRWINLLVDQDCRLEICTEKKTILSVEDIISLIGNKCDGVIGQLTEDWGEKLFSALSRAGGTAFSNMAVGYNNVDVDAANKHGVAVGNTPGVLTETTAELAASLSLAAARRIVEADEFMRAGLYDGWLPHLFVGNLLKGQTVGVIGAGRIGSAYARMMVEGFKMNLIYYDLYQSTRLEKFVTAYGQFLQANGEQPVTWKRASSMDEVLREADVISLHPVLDKTTYHLVNKERLAKMKKEAILVNCSRGPVIDEVALVEHLKQNPMFRVGLDVFEDEPYMKPGLEKMKNAIIVPHIASASKWTREGMATLAALNVLGKIKGYPIWGDPNNVAPFLNENSPPPAACPSIVNSKALGLPVSKL

SEQ ID NO: 6890 - protein, 495 aa, Saccharomyces cerevisiae
MTTDNAKAQLTSSSGGNIIVVSNRLPVTITKNSSTGQYEYAMSSGGLVTALEGLKKTYTFKWFGWPGLEIPDDEKDQVRKDLLEKFNAVPIFLSDEIADLHYNGFSNSILWPLFHYHPGEINFDENAWLAYNEANQTFTNEIAKTMNHNDLIWVHDYHLMLVPEMLRVKIHEKQLQNVKVGWFLHTPFPSSEIYRILPVRQEILKGVLSCDLVGFHTYDYARHFLSSVQRVLNVNTLPNGVEYQGRFVNVGAFPIGIDVDKFTDGLKKESVQKRIQQLKETFKGCKIIVGVDRLDYIKGVPQKLHAMEVFLNEHPEWRGKVVLVQVAVPSRGDVEEYQYLRSVVNELVGRINGQFDTVEFVPIHFMHKSIPFEELISLYAVSDVCLVSSTRDGMNLVSYEYIACQEEKKGSLILSEFTGAAQSLNGAIIVNPWNTDDLSDAINEALTLPDVKKEVNWEKLYKYISKYTSAFWGENFVHELYSTSSSSTSSSATKN

SEQ ID NO: 6891 - protein, 250 aa, Vitis vinifera
MESLGVRKGAWIQEEDVLLRKCIEKYGEGKWHLVPLRAGLNRCRKSCRLRWLNYLKPDIKRGEFALDEVDLMIRLHNLLGNRWSLIAGRLPGRTANDVKNYWHSHHFKKEVQFQEEGRDKPQTHSKTKAIKPHPHKFSKALPRFELKTTAVDTFDTQVSTSSKPSSTSPQPNDDIIWWESLLAEHAPMDQETDFSASGEMLIASLRTEETATQKKGPMDGMIEQIQGGEGDFPFDVGFWDTPNTQVNHLI

SEQ ID NO: 6892 - protein, 265 aa, Vitis vinifera
MESLGVRKGAWTQEEDVLLRKCIEKYGEGKWHLVPLRAGLNRCLKSCRLRWLNYLKPDIKRGEFALDEVDLMIRLHNLLGNRWSLIAGRLPGRTANDVKNYWHGHHLKKKVQFQEEGRKKPQTHSKTKAIKPHPHKFSKALPRFELKTTAVDTFDTQVSTSSKPSSTSPQPNDDIIWWESLLAEHAQMDQETDFSASGEMLIASLWTEETATQKKGTHSKTKAIKPHPHKFSKALPRFELKTTAVDTFDTQVSTSSKLIHVTTTE

SEQ ID NO: 6893 - protein, 354 aa, Burkholderia cepacia
MCNQLTIEPLGATLDVAEGQTLLDAALRSGVYIPHACGHGLCGTCKVQVTSGEVDHGAANPFALMDIEREEGKTLACCATALSDVCIEADVDDEPDARVIPVRDFVATVTRIDTLTPTIKGLRLKLDQPMDFQAGQYVMVEIPGLGQRRAFSIANAPSEVDRCGEIELQVRRVPGGAGTGVLHEQLAVGDTLNVTGPYGRFFVRQSAAKPMLFVAGGSGLSSPRSMILDLLEQGCTLPITFVNGQRSREELYGHAEFVALADRHPNFSYVPVLSNEPEGSAWDGARGFAHDAAKAHFNGQFAGHKAYLCGPPPMVEAAIGALMQGRLFEDDIYTEKFLSAADANAQRSPLFKRV

SEQ ID NO: 6894 - protein, 408 aa, uncultured bacterium
MKTVYVDNNATTAIAPEVLAVMQTYLTSDYFNPSSMYDAARSSAEAIESARRTVASCLGGIDPDQIIFTGSATESNNAALFGTVQANPERRHVITTTIEHPSVLEIGKELERRGQEVTFLSVDHNGELMLDDYIRALRSDTLVVSIMMANNETGVCYPVDVLARIAKETDPEIVVHTDATQALGKLPVDLQDDLQHVDLLSFSGHKIHAPKGVGCLFVRRGTRWRPFILGGHQEKGRRAGTENVPYIVGLAKACELAIAGVSDEQGRVRNLRDRLQKALIERIPAVEVNGKEAAVRLPNTLNLAFHGIEGEAILFELSRNGICASSGSACTSGTLDPSHVLKAMQVPFTAIHGSVRISLSRYNNEEDVERIIEVLPDIIARLARNSRLTGMMSATAWRYNQGESEEAI

SEQ ID NO: 6895 - protein, 271 aa, uncultured bacterium
MNVVLLKSDPQGQVDLGAARTVVSGADAQLLSIIYANNETGVIQPVETLAALVDRDTCLVHSDATQAIGKIPIDLSQIGIDAVSFSGHKLRGPQGVGALVVNRKPRQALISGGDQENRRRGGTENVAGIVGLGRAVKLARLEMDHRQHYLRQLRDAFEARLAVMPGSVVFGREAPRLPNTTFFALPYYHGETLLMELDRTGFALSSGSACHSTVTEPSHVLRAMGVDDNLALNAIRVSFGMGNSLQDVERLAAKLEELVHRLPAVIRQAAV

SEQ ID NO: 6896 - protein, 657 aa, Solanum tuberosum
MSHRVIDNPENMATDISRVASSRRHSENGLPYVHKVGVPPKTNLLKEITETVKETFFHDDPLRNFKDQSKSKKLLLAIQAVFPILEWGRSYNLSKFKGDLISGLTIATLCIPQDIGYAKLANLDAQFGLYSSFVPPLIYAFMGSSRDIAIGPVAVVSLLLGSMLQPELDPVKQKHEYQRLAFTATFFAGITQFVLGFFRLGFLIDFLSHAAIVGFMGGAAITTSLQQLKGLLGIKKFTKKTDIVSVMKSVFAAAHHGWNWQTIVIGLSFLAFLLVAKFIGKKHKKFFWVPAIAPLISVILSTFFVFIFHAEKHDVQIVRHIDQGINPPSLNEIYFSGEYLTKGFRIGVIAGLIALTEAVAIGRTFAAMKDYSLDGNKEIVALGTMNIVGSMTSCYVATGSFSRSAVNYMAGCHTAVSNIVMSCVVLLTLELITPLFKYTPNAILASIIISAVIGLIDIDAMTLLYKIDKFDFVACMGAFLGVVFQSVEIGLLIAVAISFAKILLQVTRPRIVVLGKVPRTRVYRNIQQYPESTKVPGILIVRVDSAIYFSNSNYMKDRILRWLTDEDEILKETNQQKIQYLIVEMSPVTDIDTSGIHSLEDLYKSLQKRNVELVLANPGTMVIDKLHASGLADMIGEDKIFLTVADAVMTFAPKMEP

SEQ ID NO: 6897 - protein, 357 aa, Coccidioides immitis RS
MAPKTHISNAENLKKYMELDQRGKIMAEYIWIDACGGVRSKTKTVNKVVKSADELPEWNFDGSSTGQAPGDNSDVYLRPVAIFPDPFRRGENILVLCETWDSDGSPNKYNYRHEAARLMRANAHEHFWFGLEQEYTLLGPDGWPYGWPKGGFPGAQGPYYCGVGTGKVHCRDIVEAHYKACLYAGINISGINAEVMPAQWEYQVGPCEGIDLGDQLWMSRFLLNRVAEEFGAIISFAPKPIPGDWNGAGLHTNVSTEAMRNEGGMKVIEAAMKKLETRHFEHIAVYGEGNEDRLTGRHETGSIDKFSWGVADRGGSIRIPRQVAKDGKGYFEDRRPASNADPYQITGIIVETLCGAS

SEQ ID NO: 6898 - protein, 675 aa, Coccidioides immitis RS
MTQLFNSSSGSSGVGSEKRPFPGLSLPSRKHSGDPSHFPTRLKNFFRINSSSSSNTPTVSNSGGGSGSGGAHHTSSGHAHLSTKPESKSTFRQSRFLPTIGRNRSTTVASEGNPLDEIASPTADANPYFHHQGYPALRHRNDDSAPSSPPDTPELQVEGVPASDQATAAGKEELARKLRRVASAPNAQGLFSGDGSGDRPKTAELGKEPLVASGGASPKLSFVDQPGSQAASISDERASTLSVPRSFVNCRRTYSSNSIKVRNVEVGPGSFDKIKLIGKGDVGKVYLVREKKSNRLYAMKVLSKKEMIKRNKIKRALAEQEILATSNHPFIVTLYHSFQSEEHLYLCMEYCSGGEFFRALQTRPGKCIPEDDARFYAAEVTAALEYLHLMGFIYRDLKPERHIMLSDFDLSKQSGPGGAPTMIVGRNGTSSSSLPTIDTKSCIANFRTNSFVGTEEYIAPEVIKGDGHTSAVDWWTLGILIYEMLYGITPFKGKNRNATFANILRNDVPFPDHAGAQQISNLCKSLIRKLLIKDETKRLGARAGASDVKTHPFFRTTQWALIRHMKPPMIPHQGRAIDTVNFRNMKESASVDIGGTSKLKGVPMDSGLATPGEQIPDPFEDFNSVTLHHDGDYHGQLADDSFNGYYSRLVCIQPPSIKVLAEISKMQTEPLGMKI

SEQ ID NO: 6899 - protein, 327 aa, Coccidioides immitis RS
MAFKTVPYQRGRHIRRTAWAMVDNAQETELDATIDQVLKSTDRAGAIPEIAQLAASCGPFDAVMVRIGIIPFKPFDAELFGPLLPHLKIVAAAPAGFNAFDVDWMTKNNIWFCNTRNAISEATADMAMFLILATLKNTTVAERSAREGRWRDLVVNPSTDPRGLTLGIVGMGSIGKIRYYSRKRLSLDIEEQYNASYCPTLDDLLSTSDIVSINCPLNDATTGLIGRKEFAKMKDGAYFVNTARGEVVDEGALIEALEAGKVKMAGLDVFEGEPTIKTSEKCIIQPHLGGNTTGAWMLSELECLENIKACLTTGVPVAPVNWVERRS

SEQ ID NO: 6900 - protein, 357 aa, Coccidioides immitis RS
MSNLHLQPVNERQGRRYSYLNTPAEYQAPTFPPRNPEKPDNAVGPPIQSDRVSSPGPQNPYAFSYTVTGAISPPPQTTAHTVPYIQPQMNPTPPPLSEHPARFAPYADSPTSPTRQTQQPEQPQRLQYYSPSPASPGPIPPKQMLQPDMQQQRPPQKEYSVAPDSNPLAPPDPALTPKPSSISAAGSQLGTRTTARDLNHAPGQVLHPRQEVRGGTWSYALCDCRDIGVCCTGLFCPCILYGRTQYRLSRKSDQKDPTNLLGYETCNAQCTAMGLLCGCQWLLATIQHIRVRRAYGISSDIATDCVRASCCTCCTLIQDEREIKYREEAARLTGGVPGSTVPAYTTPGQMIFSPPPR

SEQ ID NO: 6901 - protein, 738 aa, Coccidioides immitis RS
MSDADEREPQQDSVPIAAPSASPGLPSESPASTSLPRHVATARLASPIPNNAELQDASSRRAATPLQAVAEREPDFKGKAVASSPNKPGDSILTSGLRNVSSSPAPEEPPSRSGSPPSAETGPKFNLTGEENSPRNTPAPTENPQIIRRHLVQPQGNTSEVNNENSSESEDSTVKNPADVDEFSSLQLQGGDITRPVYRWTEEAEAQEASRRRRSFDVPRPEPESATLDIGSIKIPGGFRRDYLRRAAGGAESNGLHSSTGRDGPQLPTRSFLEFLTLYGHFAGEELEEDDEALGPDEYFVPELWREGEEEIGEETALLPPGAPGKHPRRHRDRAPKATNSATGAMLLLLKSFVGTGILFLPRAFLNGGMLFSSVVLVTVSLLSYYCFILLISTRSKIEGSFGDIGGALYGKHMRRIILGSIALSQFGFVSAYTVFVSTNLQAFVLAVSKCKTFISIQFLILMQLIIFLPLSLIRDISKLAFTALIADAFILLGIVYLYGVDIKTIIDQGGVADIKAFNPQSWQLLIGTAIFTYEGVGLIIPIQESMKRPQQFPRVLALCMIVITVIFLSSGVLGYATFGSATETVVLLNLPQDDKFVNGVQFLYSIAILLSTPLQLFPAIRIMENGLFTRSGKYNPGIKWKKNIFRFFLVVICAVVAWGGAADLDKFVALVGSFACVPLVYVYPPLLHWKAVATTRFRRWSDIALAVFGTLIRKSTSILLRRFATFNQPFSRLPSQF

SEQ ID NO: 6902 - protein, 840 aa, Coccidioides immitis RS
MTIFIVSLDPHAPLWGATGVFNQPRPRPSQSPSSSILQHNSIAGPAPKLVKRASTPVKLEERPESSPPEKAFSDAAWTIEPSEQGNGGLFNAIRSANLEAPQDKLWVGTLGMPTDALEDHVKDTIAEKLDVDYACLTVFANDSDFDGHYLHFCKTILWPVFHYQIPDNPKSKAYEDHSWVYYKAVNQAFADRIVRNWKRGDIIWVHDYHLLLVPSMIRKQLPDAKIGFFLHTAFPSSEVFRCLSVRKELLYGILGANLVGFQTQEYCHHFLQTCSRILTVEATNEGVQLEDRFVNVGTFPIGIDPPSLDLRRKGTDVENWMRTIRDRYQGKRLVVARDKLDNIRGVRQKLLAYELFLNKYPKWRDSVVLIQVASSSAEHSELDATISDIATRVNSLHSSLAHQPLVFLNQDLLFPQYLALISVADVFMVTSLREGMNLTSHEYIHCQDGKYTNNKHGPLILSEFTGSASVFEGHPLLVNPWNYQQCADALNTALEMPPEEREQQWTRLNDQVNAHTTDKWVKNYIEALDRAFSEQACRDNVSIPRLSVNNLMKLYRASSRRLFIVDYEGTLASWGSPTSIVLTTPKRAIDTLNDLLEDPKNTIYVMSSRMPEEMERLFRQVPGLGLIAENGCFVREAHREEWIKLIDDEETREWKDSLADMINYFHVRTEGSWVEERHSSLVFHYDNAEDPQTAGRHASDCANHINDTCQQHRIRAVAVDGAVITEPISPNKATAADLVLRHILARAEKDKDSAAKPDFLFVAGDGREDEVVFRWANKLEEKKLIENIETVTLGSANTEAKATLAQGVTGVLSCLGKLAAISHDVEPNEYLAEREIPYKI

SEQ ID NO: 6903 - protein, 598 aa, Coccidioides immitis RS
MVASHSGNARKPARSFPRTVHPTPSFPEVSLDYDDDPPQKNAWQRLLDSFKRNPHAQVSKLGQIDTNGKLFDLEEAVANIALSPLKRKLKGRHLQMIAIGGSVGTGLFVSSGRSLAIGGPASLVIAFSLVGIMVYSTIHALGEMAVLFPVAGSFSSFSTRFLDPAWGFAMGWNYALQWLVVLPLEIVAASLTVSYWPSHISPAAWVAIFYTMVITINLFGVQGYGEAEFIFSIIKVVAIVGFIILGIVINIGGGDNGSYIGFRYWRDPGAFNHGFKGLCSCFVNAAFAFTGTELVGLAAAEASNPVKALPSAVRQVFWRITLFYIVALIIVGLLVPYTEARLLNPASQADTKASPFVIAIRDAGIQGLDSVMNVVIMLAVLSVGNSAIYGSSRTLAALAEQHQAPRFLAYIDRRGRPLFAIIVASAIGLLSFLAASSKQEEVFIWMMAISGLSSILNWASICLAHIRFRRGWALQGHSLDELAFTSQPGVVGSWIGFIFNILVLMAQFWVGVAPIIQEMDGDPTVAGVKNWFSVYLAAPIVILFYVPYKIRFKTKIVRAKDMDLKTGRRDLHLAHLIAEERAERAEWPLWKKVYRFFC

SEQ ID NO: 6904 - protein, 808 aa, Coccidioides immitis RS
MAEDLARSRAISAGDSSDDDDFPEPIKFSASVKALLGEDASGLDTSPRRGTRDGSENQPYQRADGRRQHVKQVRIASPDQRASASPPLRIVRLGSESRRSPSSLGGEASILSGRGEREYHVPEGNRDDFITPAPRTRSVRIATGSRSTTRSPSASLPSANGGSSSDASRVEERSFLEDGMKSGQDDRSYARAGMGTVPRTRAEVETGIQGSLRVKRVGKLSGSFLNGPARRGVLRRQSEEEPRAEHQEESFLDSGSRNRYEESQEPSPLEDSMLRNKRSFESRRESPRFSDNNVGASLSRTPQSIPIRQRSLRNSGSGSVSALESGSPRSHHLNSSSGSRQRRSPNVDINPVYRVPSPPELPAKHDQENGPPPTFKRSKPEGFGLLNKIEKFSVLHEEDKGAIKAAPETVSPRKPLGKVSNNTPRRPAPPPPPKMSVLETATAVAGAASSSQSKRKRAQVSINRKVYTRLDCIGRGGSSRVYRVMAENCKIFALKRVHLEDVDPHALAGYKGEIDLLKKLRNVGRVVQLFDWEINEEKHALSVLMEMGESDLHRILTRKLNTEDAVFDPVFARFYWKEMLECVQAVHDFDIVHSDLKPANFLLVHGRLKLIDFGIANTIQDHTVNVHREQQIGTPNYMAPEALIDCNAALGLPATAGKMMKLGKPSDVWSLGCILYQMVYGKAPFAHIAKPLERIMAIPNPRVPINYPPVGVGNVSVPSNVLRTLKECLQRDQALRPTIKQLLSPNDPFLYPETHLEGTVPITEEMLGRILTNVVNHCRARGPPTAQELAGWPAGFFTKIKAAMEEDR

SEQ ID NO: 6905 - protein, 313 aa, Coccidioides immitis RS
MAPLSSASQKAIERLREYVPPPTNYYSVPLTRQASVLLLLFADKRGDLRVILTIRANTLKSYPGQAALPGGKADSTSETPFETARREAHEEIGLPNIDQSFPPPFRVEHLCELPANLARTELVVRPCVALLHSYDEVTGEDADPEEAFMPQLDAKEVAAVFTAPFHNFLKMHDEPRGEEGEQLPGSPEDWYEGSWTNWNTTWWRMHHFFVPITNQTVTKPRRKSQEQDAAIAQLEEDEISMGLERYRVFGMTARILVDAARVAYGEDPEFEHNSHFGDEDMIGRLKRLGRFSSVKNPDDPLTQEVFEKASKLS

SEQ ID NO: 6906 - protein, 359 aa, Coccidioides immitis RS
MSAEKRPAQDSFGSTQLVKRQRSDADLGNNNALAVSSSTSQNGALMKAIPRTSGLEAPIMELTGHTGEVFATRFDPTGQHIASGGMDRSILLWRTYGQCENYGVMTGHKGAVLDLHWSRDSRIIFSASADMTLASWDLESGERIRRHVGHEEVINCLDLSKRGQELLISGSDDGCIGIWDPRKKDAIDFLETEMPITAVALAEAGNEIYSGGIDNDIHVWDIRKRSIVYSMIGHTDTVTSLQISPDSQSLLSNSHDSTVRTWDIRPFAPADRHIKTYDGATTGLEKNLIRASWSPNGEKIAAGSGDRSVVIWDTKSAKILYKLPGHKGVVNDVRFAPNDEPIIVSGSSDRCIFLGEISK

SEQ ID NO: 6907 - protein, 296 aa, Coccidioides immitis RS
MDSTFSTTFDSISFASGADVPQLTISPAETTLKLDDLAPEPKEQPPKPEEKKPVKKRKSWGQELPIPKTNLPPRKRAKTEDEKEQRRIERVLRNRAAAQISRERKRLEIEKLETEKAKMEQQNRFLLQRLAQMEAENNRLSQQVAKLSTEIRSSRGASPHDVVRPAVSIGGIEESDGLSQSVFDSASDLCSDAPGHHAAPLSDDDFRRLFDGDSSTKPDLSFLEEGFSFDLFPGGDLSTLAFDSMVDFDPDPVKVEHLDPAIGLPDPASHPTPSVQPSFGASTKRCDEQGIAAGSA

SEQ ID NO: 6908 - protein, 580 aa, Coccidioides immitis RS
MAPRKAAATRSSTRIKSAPTTTTAIVPKKAGVKKATAVPTATKNQKASAAALKSTKAASTKATAAKDTTTKAPRKAKADEAPVSKKRKVVSEDETEPRPKKARAAKEEVPKPKRTRVTASPALKPPKPKVVINEAPTEKLNIYVFGEGSSGELGLGTAKNAVDVKRPRLNPLLLADTIGVVQIATGGMHCVALTHDNKIYTWGVNDQGALGRDTTWEGKLKDIDDAGSDSDSDDGSDSGMNPKEATPTPIPADYFPEGTIFVEVAAGDSSSFALTDDGFVYGWGTFRGNEGILGFDATTRVQTTPKLIPSLKKIKHIACGDNHALALDTKGAVFAWGSGQQNQLGRRIVERTKLNGLHPREFGLPKNITYIGCGSFHSFAIHQTGKVYSWGLNTYGETGIPQGAGSDEAVILHPEVVKSLKDKNVIQLCGGSHHSLAVTKDGECLVWGRVDGFQTGLDIKSLPDDAVIKDDRDRARILSVPTAVPGIDAKFVAAGADHSIAIAKDGRAWTWGFSANYQTGQGTDDDIEVATVVDNTAVRGKMLNWAGAGGQYSVLAGPAVTINGVAANADAPNGNVQGAN

SEQ ID NO: 6909 - protein, 1252 aa, Coccidioides immitis RS
MEKDTIKDRSQTKRQPFRDASNRLNIVHNSSRQTRYDHVALSSEKQMTSSDPPDALNGHDFPPATAENKRISAVLDYHSDPRRNSAISTTSTNSGRSRRKTHIGPWQLGKTLGKGSTGRVRLAKHSVTGQAAAIKIVSKQSAALAQSQSIAAMDKNIDVAPGSRTIPSGIEREVVIMKLIEHPNVISLYDVWENRGELYLVLEYVEGGELFDYVSERGPLPEIEAVRLFRQIIAALSCCHQYNICHRDLKPENILLDFRKNIKLADFGMAALQPAGHWLNTSCGSPHYASPEIINGQRYHGDKADIWSCGIILFAMLAGFLPFDGGDLANTLKLVKRGEYIIPPWFSPEAIDLIQRILQKRPENRISIDQMWLHPLLMKYQAHPIFANSPMDSIGPPPPLPSKDFKKIVTHRRDIDLEVLRSLQTLWHEKRKEDLIENLLNDKPNHEKLFYKALLKFREEQLENYEGPPLGYSSSDYHHISRPLFRLQRRMPSNHGESNVWRRSKFSIATNSSGMREGSSRGPTSAPTIASYDPYRSSRTAIAEPKVEYANVTIHRHQSNDSSAALNSKSSPPTGKLSMDRASVNMRSSPNGGPGTSSRRSSLASYQSRSSVGSHCQRAKSRHSYKRNVSFRHLRGHNPNRDDKRIGMPPGHSQYSLCQERNKMGKRESERVKRLSSERFSSPSLPSPPTCVRPATNKVGELEVGAKPRQSYQYWKEEARKVSQELEQICEEAFNSSSLSSSYTIETGSKYPESPVTSISTPGNLNRYYGQTNTKPVRGQTFESSSSYATRELAETRRRLIEHSKKARADGLPSHLSEVISHLDRLIEGKPSHSVAKNAALAAEAARPPHNVTRNLPSILEERHSVKDFLSGETTSSYIPPPLDLDVWEKKTIRVVPDSTNNLDNIRPLTIRKKRTTLELPTPSNESTSFSQPQRSLSQSLTRNRSTGRRSNTGRFFSGLEPIEENPKSSKKNEFRNSGDTRKWSRFKYRSQSYSDVGPPTPPKDDVPLSRQSSISHMTSGASQGTEEYPVVEDDNLNWIKKNKPVETGKKLLKLFGMKKREKAVHEFGQESNCFNISVTSLDNKDESDIFGTKNHFLSNTQNEAGSPTHPASSQNWFMKFFRIKAASKVIALNAPKARARKEVIKILREWKKYGMEGIRVDKQNSVIRGRVGELNFLRLRPVEFSAELFTVLEYGRHVSLSLIRLKQERGAASSFRKVVETLIAVLKQRKLLVEDTVKAKKMAKVLSLTGQ

SEQ ID NO: 6910 - protein, 364 aa, Coccidioides immitis RS
MGREKPATMADSDEEYIAEFDSDERDDDLGDDDEDDELDSRNVSRGRTRRSRGKRKKQRDGHEFEVSRTWESLVEGADGTISSTVEGLLEAGKRKRDTTPLQRGIIRHLILVLDLSIAMSEKDVRPTRYLLTLRYAQEFVLEYFEQNPISQLGIIGMRDGLAVRISDMSGNPSEHILAIQALRTRDPTGLPSLQNALEMARGALFHTPSHGTREVLIIFGALLSSDPGDIHKTITSLVTDKIRVGVVGLAAEVAICREICSKTNAGDDSGYGVALNEQHFRELMMEITTPPVTRSQKQAGMSVSSRYECTVCHNHFCIDCDVFAHEIVHNCPGCQSGNTRPNSSKAGHANAPDNLAGVDEMDTG

SEQ ID NO: 6911 - protein, 532 aa, Coccidioides immitis RS
MSEHPQTNGHIDDGQITRLTNGVPGSPPSDWIVQKFGGTSVGKFALEIVDKVIKPNIEDHRVAVVCSARSSSSKADGTTNRLLRAAREAENPKSSNYLSLIEAVKQEHIDVAREYVQNPDLKAELIAQVEAECLRILKILDAAQTLGETSSRCVDMVISAGEKLSCRFMTILLKDRGVDAQYVDLSDIIDFAAGIQALDQDFYDRLAELFGCKVQECTAKVPVVTGYFGVVPGGLLDKIGRGYTDLCAALVAVGVHAEELQVWKEVDGIFTADPRKVPTARLLSMITPAEAAELTFYGSEVIHPFTMEQVIRAKIPIRIKNVMKPKGRGTVIFPDSTSELEKTAPGHDPKLFRTRGPQFWSQQPGPKRPTAVTAKHKILVINVHSNKRSLSHGFFAGIFSVLDKWRLSIDLISTSEVHVSLALHSEIPLLNGVGHDEYQIIDEDLRGAIQDLRKYGTVDIIPEMAILSLVGKQMKNMVGVAGRMFTVLGEHNVNIEMISQGASEINISCVIEERDADRAINILHTNLFTFLD

SEQ ID NO: 6912 - protein, 354 aa, Coccidioides immitis RS
MSSANNTKKPTLLYVGEPIRGPNRERWARFRENFNILTYTRTTKEDLLASLKPGGRYSQIDGIIRPCHTGNNNLPRFNKEFISHLPLSLKIISSSNHGYEREDTEELGRRGIWYCNGAGAANDSTGDIALLLIIAAFRYTSFCENNLRTTRKGDYFAVEDAVAPTSVNPRDKILGIVGMGEVGRAVSVRAKALGMKIHYFSRTRKSPKVEREAGVAEYHATLESLLKVADCVLLACPHSPETHHLLNKDTFKLMKRGVRVVNVARGKCIDEEALADAIDEGIVVGAGLDVYHDEPTVNPRLLDNWKITLLPHIGGACLDTHLNFERIAMDNIEAFFRGDGKLLTPVNNVTGPRL

SEQ ID NO: 6913 - protein, 420 aa, Coccidioides immitis RS
MALERLNAVLQQLKPGTGGSSVVDKLCEKNPDDVVITVAVRSAMTKGFKGGFKDTDLDMLVYALIKEVLARSKIDPSLIEDVCLGNALNGKASYLTRTAALAAGIPHTAGAAAVSRFCSSGLKAIQDVAYQISQGSIDVGIALGGESMSLSPDRGFQPVDNEVMKCQEAQDCTQPMGQTSENVGDDFNITREMQDRYSVESFRRAEVAQKSGWFDDEIVPITTTVKDPKTGEVKQIVVSRDEGPRYGTTYEGLSKIRPAFPQFGNKTTGGNASQISDGVAAVLLMKRSKAIELGQPILAKFVGATVAGVPPRIMGIGPTAAIPKLLSKFNLRKDDVDIFEINEAFASMAVYCVDTLGLDHAKVNPRGGAIALGHPLGCTGARQVVTILSEAKRTKAKVLVTSMCIGTGQGMAGLFINEQN

SEQ ID NO: 6914 - protein, 475 aa, Coccidioides immitis RS
MSELPDLSTLNYTVLVPYNGSIATGGNSMEVDLNVFYNVRDITWIITCAALVLLMIPGVGFFYSGLARRKSALSLIWLSVMSLGVVSFQWFFWGYSLAFSHSAGAYIGNLENFGFKGVLAQPSVESSKIPDILFALYQGMFAAITVALAVGAVAERGRMAPCIVFMFIWTTIIYDPLACWTWNSSGWIYKMGALDFAGGTPVHIASGAAALAYSLMLGKRRGQGTSDFNHRPHNVTHVVIGTVFLWFGWFGFNCGSALSANLRAVMAGIVTNLAAAVGGVTWCLLDYRLDGKFSAVGFSSGVISGLVAITPGSGYVPPWAAVIFGLVGATACNYATKLKYLMRIDDSLDIFAVHGVGGIVGNLLTGLFAADYIARLDGATYIDGGWLNKHYIQLAYQLADSVTGAAYSFIGSCIILFLINLIPGLHLRASEKDEIMGVDDAEIGEFAVSFINKDDMAVRHTDNLFSMTTWRLHET

SEQ ID NO: 6915 - protein, 1055 aa, Coccidioides immitis RS
MSTAASQASPVVVRNPATQHPHPSYRPPAADTPQRTRTSGGGAAQYSHSQSRSGSRSYGHDRSASNKGPPSGHPRRDYESLKAATAPRSASRDRTQEPNLPYRTDSRAHRRQSSKPTYSRNSTDMTGPSSGVADGYGSVHASHHPPNGSGITNQTRRRTTITASSGQWALGKTIGAGSMGKVKLAKNVETGEQVAVKIIPRHSTEEHRSTRESERADRSKEIRTAREAAIVTLLNHPYVCGMRDVVRTNHHWYMFFEYVNGGQMLDYIISHGKLKEKQARKFARQIASALDYCHKNNIVHRDLKIENILISKTGDIKIIDFGLSNLFSPKGQLKTFCGSLYFAAPELLQARQYTGPEVDVWSFGIVLYVLVCGKVPFDDQSMPQLHAKIKRGVVEYPQGLSSEDDCRNIISRMLVTDPKQRASLTEIMNHPWMTKGFSGPPENYLPHRDPLQLPLDSEVIRRMTGFDFGPPEFISAQLTKVIESEDYQSAVRAFVKEHHTPNPVNDKKRGVFDFYKRRNSTSKDTLSNTSLEAMPHGLDPANGYHPLIAVYNLVKEKLNREKQEVHPGGLAIPHSPGEAPVKFPDISAPEAAHTNQRSYEIPGERDTGGRSRPRARTHGDDEISEGIKNLKLAKPSGPASPAIVTPQIEQPPRKENAAVGLLRRLSTRRTRDKGREEKTTAHHAQTLNVQSPDSLPPPRKSFSMRRTRRGEASPATIHHGGSQPQQQEVSRGELSSRAINLLGRSTSVNSADFRSRKNPSRGGTDTLSPATAHDPPLTSGSDRSSLNVQRSKASDNANSDSRSGYKPQTLRTKSLGHARRESIQARRARREEAREANVPEETDAELAQASTNIENGTTAEESLKPVYLKGLFSVSTTSNKPLPFIRSDIIRVLRQLGVEYVEIRGGFSCRHAPSIDLKRVIDARPPSPEQQGMVAGHRRKISFGGLRGHEREENKDDAKSQQRSSRRHADQSFISNSDGSEDYAANREHNAGERVLGETTTRVQSDTGENLVLRFEILIVKVPLFSLHGIQFKKVSGGMWQYREMAKKILDALRL

SEQ ID NO: 6916 - protein, 1095 aa, Coccidioides immitis RS
MSATMRPINTLRPCRTGTRAGFQRRLVLALSAFQSRTFSCTAQRRDDKLKTTPSNLITSVPYSALTVGVPLETYLNERRVALTPQNTALLLKKGFSRVLVERGSGSEAKFPDEAYQSAGATVVGRDELWADSDILLKVRGPRIEGDISEVHQMREGSTLLSLLYPAQSKSVVEALAARRVTSFAMDMIPRISRAQVFDVLSSMANIAGYKAILEASNHFGRFLPGQVTAAGKIPPGKVLVIGAGVAGLSAISAARRMGAIVRGFDTRSAVREQVQSLGAEFIEVDIQEDGSGAGGYAKEMSKEFIEAEMKLFLEQAREVDIIVTTALIPGKPAPKLITDEMVAAMKPGSVIVDLAAEAGGNCTLTVPGQLVTRNGVTIIGYTDLPSRLPTQSSTLYSNNITKFLLSMNPEEKHFGVDPTDEVVRGSIVTHGGEILPPAPRPAPPPTPQPKAASTEVSKESAELALTPFQKVSREVATVTAGMGSALALGKFTGPLFMSNVFTAGLAGLIGYRVVWGVTPALHSPLMSVTNAISGMVGVGGLFIMGGGYLPGTIPQALGALSVLLAFVNVSGGFVITKRMLDMFKRPTDPPEYPWLYAIPGLLFGGGYIAAVSTGMAGLVQAGYLVSSILCISSISGLASQATARQGNMLGILGVSSGILASLAAVGFPVEVLAQFVGVAGIGSILGEQELSSTYGPELKANAGIGAIIGRRITPTELPQMVAALHSVVGLAAVLTSIGSVLADIGSISTLHLVTAYLGVLIGGVTFTGSIVAFLKLAGKMASRPLNLPGRHLVNSSLLGSNMALMGAFVTMAPGSPAIAAACLGTSTVLSFLKGYTTTAAIGGADMPVVITVLNAYSGFALVAEGFMLDNPLLTTVGSLIGVSGSILSYIMCVAMNRSLTNVLFGGISAPTQAEHKIEGQITKTSVDDTADALLNAESVIIVVGYGMAVAKAQYAISEITRMLRAKGVKVRFAIHPVAGRMPGQCNVLLAEAAVPYDIVLEMDEINDDFGETDVTLVIGANDTVNPIALEPGSAIAGMPVLHVWKSKEVIVMKRGMSSGYADVPNPMFYMPGTRMLFGDAKNSCDAIQHALESRK

SEQ ID NO: 6917 - protein, 482 aa, Coccidioides immitis RS
MSDTATREGPLDIAIVGSGIVGVVLAVGLIRQKIKVKVYEQAQGFREIGAGMAFTANARQCMDLIDPTITVALRASGSVATSSGDEQDPDPNDYLRWIDGHNQRRKDDPSYQKMLFKIDAGYKGFEGCRRDRFLEELVKILPADVIQCRKRLDTLEEKEGGGKIRLIFCDGTTAEADAGKLVTGIVSQTLQVIGCDGIKSRVREIILGEGNPASYAHYTHKIAYRGLIPMAKAIEVLGEYKARNQHIHVGPNAHLIHYPVANQTMINATAFVSDPEEWPDDKRTVAPAIRKDVEDAFEGWSPCVRGLVSQLPEKLDKWAVFDLWDYPAPFYNRGKICLAGDAAHASSPHHGAGACMGIEDVLCLCTLMGEARVLIQKAPTIRDQALISVFDTFNSVRRTRSQWLVNSSRRVCDLYHQPEWADPAKWVKAETCFEEIKDRSHKIWHFDYNVMLQEATQGYKQSLEALIGAASQEVATDFTCEN

SEQ ID NO: 6918 - protein, 448 aa, Coccidioides immitis RS
MAMHEDPVASSTGIKVIIVGFGIAGASAAIECHRKGHNVVVYERLPELTKVGGDGISLGSNGCSVLSKWDNGEFNETIKPLKFRTDNMNIFDYTGFDLGKHKFHGYNAGRGYTLNRGSLVFSMYDYAQKLGIKVFMGSTVTEYWETEDEAGIVVNGEKVAADCVICAEGIHSKGRAAITGQEMQCKETGFVSTRGYLEGKAAIQGPSLTRIVSGMEDGNCMYGWMGPRMHISMGIKIDGGELFWYACHEAASVPPKNNSEAIDHILECMSDWTMRDELESVVRNVSEGRFISQKLVVTTALKSWLSPRRRMIVIGDAAHAALPTSGQGGTQAIEDAAVLAIALELAGKQDIPLALSVTEKIRFKRAQLIQQGGLAVLKFGMNRSDFELFRKDPNLARPPHPAWIFDHDCQEYTYREFAAAAEAVRSGKDYVPTNIPADGEYRIAYDSK

SEQ ID NO: 6919 - protein, 586 aa, Coccidioides immitis RS
MGVEHKQGSGMIADAEAMRVASWDEGLQKQPEGSFAQRIINSFKRDPNAYISQPISSNTEGFDAEGAAAATAASPLKRRLKSRHLQMIAIGGSIGTGLFVGSGRSLATGGPASVVIAFCLIGIMLYATIHALGELAVMYPVAGAFAHYSTRFLDPAWGFAMGWNYAILWLTLLPLEIVAAAITVGYWEADVSPAAWVAMFYVLIVVINLFGVLGYGEAEFVFSIIKVIAVIGFIILGIVLNCGGGPNGDYIGGRFWHNPGAFNNGFKGLCSVFVTAAFTFGGGELVGLAAAETANPRKSIPTAVKQVFWRIVLFYIVSMVIVGLLVPYTDERLLNGSSTDVKASPFVIAISDAGIKGLDSVMNAVILISVLSVGNAAIYGSSRTLTALAEQHQAPALLAYIDRKGRPLMSILVASCFGLLGFLAATPKQQEAFTWMLAISGLSSVFTWASICLAHIRFRRGWKIQGHSLDELPFRAQGGVITSWIGFIINCIVLVAQFWTGFAPIGYGELSHSERVKTWFSTYLAAPIVLTFYITYKLWYRTSIVHAKDMDLTTGRRDLNLQHLIAEEKAERESWPKWKRVYKAFC

SEQ ID NO: 6920 - protein, 358 aa, Coccidioides immitis RS
MGITLLSCDIEGTSGDDDDRYDPPNALRRNPACFSARAIRSSLWYRHIRAFFGPHVPVPAVIQNSESEEREYPSGTREEFMRNCKNGAYDDVVAIYRSNVSTKVTGPFDEEMLSVLPNSLKFICHNGAGYDNIDVDACTEKGQWFGKTTLGHDPRGRTLGILGMGGIGREVARRARVFGMNIIYHNRRRLPRELEGDATYVSFDDLLCKSDVLSLNLSLNASTRHIISGPEFEKMKDGVVIINTARGALINEKALVDALNSGKVFSAGLDVFENEPSVEPGLLNNPRVMLLPHIGTTTLETQREMELLVLENLRSCLEKGTLVTLVPEQRDALHQVNGLENGHVERNGHLNGWNGVHV

SEQ ID NO: 6921 - protein, 920 aa, Coccidioides immitis RS
MNTSQFTDRANEAIQQAGELADQFAHPEIAPIHLAVALLNPILAETEDGGKSAPIPLFKQVVERAHGDTQQLDRSLQRALVRLPSQDPPPAQLAISPALAKVIRSAKELAKTQKDSYVAIDHLIIALAGDSTVKRALADSNVPDVKMIDSAVQQIRGTKRVDSKTADSEVDSEYLKKFTIDMTALAREGKVDPVIGREEEIRRVIRILSRRTKNNPVLIGEPGVGKTTIVEGLARRIVNADVPANLAHCKLLSLDVGALVAGTKYRGEFEERMKGVLKEIEESKETIVLFVDEMHLLMGAGNSGGGGMDAANLLKPMLARGQLHCIGATTLGEYRKYIEKDQAFERRFQQVLVKEPSVSETISILRGLKERYEVHHGVNILDAAIVSAATLAARYLTARRLPDSAVDLIDEAAAAVRVARESQPEAIDTMERRLRQLQIEIHALEREKDAASKTRLEVAKQEAANVNEELRPLREKYEREKQRSRDIQDAKMKLDQLKVKAEEATRSGDMQTASDLVYYAIPDVEKRIERLEAARARQDAEAVAQAGAEGEALLADAVGPEQINEIVARWTGIPVTRLKTSEKDRLLHMESHLGKIVIGQKEAVQSVSNAIRLQRSGLANPNQPPSFLFCGPSGTGKTLLTKALAEFLFDDPKAMIRFDMSEYQERHSLSRMIGAPPGYVGHDAGGQLTEALRRRPFSILLFDEVEKAAKEVLTVLLQLMDDGRITDGQGRIVDASNCIVVMTSNLGAEYLSRPNTADGTIDATTKELVMGALRNYFLPEFLNRISSIIIFNRLSKREIRRIVDIRLGEIQRRLEQNDRNVKISCTDEVKDYLGKAGYSPAYGARPLSRLIEKEILNRLAVLILRGAIKDDEVARVAMQGGHITVLPNHVGSEDEDEEMIDEDEAIAELEDDMGDKDLYE

SEQ ID NO: 6922 - protein, 287 aa, Coccidioides immitis RS
MANSKYEYVKSFERDDVLLPNTFSARYQFGRPNDVRALNLMNAAAKEVMRDFSDLIVAYGVSDEFRYLLDYPAPMSFFTNHAPPKKFRLPSELPALRETNKLVSTIVSTFTAYYVHKWPEFFPSMPLEPCCLPTFDGRAVQYPSVRNLRDYMSWRQVDCHINNLYNTTFWNMVLKGGMSNTDAEQELKGTVSSDKNEILFSRFGINYNNEPEMFKKAHQQLSKPREDEGYTEDGEEPSQVSKTQREKQKKLQRKADIAIAYVDIIKDEFWEQRPWILSNRAGKLRGS

SEQ ID NO: 6923 - protein, 583 aa, Coccidioides immitis RS
MDSLDPQVSYELSKLDPDVPFRATKAHLHHTWAKTFYSQPELYIQPESVAEIQKVVNLARKCRRRLVTVGSGHSPSDLTCTSSWIVNLDNFRRILSFSRETGVVTVESGIRLWQLGDELEKCGLMLPNLGSIDSQSIAGVISTGTHGSSLRFGLLSDSVQALSIALANGQVVRCSKTNNPSLFRAALLSLGALGIITEITIQAVPTFNIAWKQTLKSLPQVLEEWDSGLWTSSEYVRVWWLPYLKRAVVWRADKTDLPLRKPRSTFYGGRLGNAIYHNLLYLSNYFPRILPWIEWFIFGMQYGFKPGKYVAEAVEPGRTGLLMNCLYSQFVNEWAIPLEKGPQAISRLSAWLNGDAKAANIPFSHKGLWVHCPIEVRVSDTSKSETPRPYLEQTNKTGPTLYLNATLYRPHLRDPPCTARYYEAFEWLMRDLGGRPHWAKNFGENLGPADFQEMYGADLNEWLRVRNEADPHGMFLGEWHRRTLLPAQHAVSNSSEFPLAEREKSRRKIGKWGSGDGVEWVGDKSWSHPNAQLDKPGEGEKFEAASPSPLATATSEESFDYLAHGEASIMGSSNPSGQDSSNF

SEQ ID NO: 6924 - protein, 555 aa, Coccidioides immitis RS
MASTTLMPFLYPCLFHGPSKNTAAAVLKARKAFSPLLKQKQFTRSSSFSPDSHIHENPIASDRLNPSPSDYGRFIFQDRCTLRLHTGSGGNGCVSFLREKYISEGPANGGDGGTGGSVYIQAIDGHTSLHKLARRGVIRAGRGRNGKGKLQGGQRGNDVLLQVPVGTVVREIGRHDPMAEKEFELRLLKGRMREEDALRVASSKREQWVLYPGAKASDYLTMEFPILPPPRRPSIAAMEPPAPINLDLSQHMDKPMLLVAGAVGGRGNPHFVSKENPRPAFATKGEGGMAVELELELKLLADVGLVGLPNAGKSTLLRSITNSRARIGNWAFTTLSPNIGTVVLDDLTGRPLTHSKPGGKQRSRFTIADIPGLVENAHLDKGLGLGFLRHIERAGIIAFVVDLSAGDAVKALKGLWRELDEYQLLREKQLNMHTGNRYRNLGNEPRVIDAYSDDFEIDFPSSLQIHRRDLPELEFQPVYTKPWFVVGTKADLPKTQENFSALRTYLSDVEKGVADHPSRRQNAWRKRIYSIPVSAINAGGVTAIPHTVVRLLDEN

SEQ ID NO: 6925 - protein, 757 aa, Coccidioides immitis RS
MKFFIDDLPVLFPYPRIYPEQYAYICDLKKTLDVGGHCVLEMPSGTGKTVSLLSLIIAYQQHYPSHRKLIYCSRTMSEIEKALTELRELMKYREQQLGYTEDFRALGLTSRKNLCLHPSVRREKSEPSNLVPPGVFTLDGLIRYGEQHKQCPYFSARRMMPFCNVIIYSYHYLLDPKIAERVSKELSKDCIVVFDEAHNIDNVCIESLSIDITEDSLRKAGRGANNLGHKIDEMKRSDAAKLQKEYEKLVEGLREADQAREEDQLMANPALPDDLLKEAVPGNIRRAEHFVAFLKRFIEYLKTRMKVLHAISETPLSFLSHLKDLTYIERKPLRFCAERLTSLVRTLELMNIEEYRPLQEIATFATLVSTYEKGFLLILEPFESDTATVPNPVLHFTCLDAAIAIKPVFERFGSVIITSGTLSPLEMYPKMLGFQTVLQESYSMTLARRSFLPMIVTRGSDQAQISSAFKIRNDPGVVRNYGNLLLEFSRITPDGIVVFFPSYLYMESIISMWQGMGILDSIWNYKLILVETPDSQESSLALETYRTACCNGRGAILLCVARGKVSEGIDFDHHYGRAVLCIGVPFQYTESPILKARLRFMLENYRIREDDFLSFDAMRHAAQCLGRVLRGKDDYGIMVLADRRFQKKRNQLPKWISQNILESETNLSTDMAVATAKSFLRTMAQPFKAKDQEGISTWSLADLERHLEKQKGEAEKKYQEANQRDAALPAANGANNNGDLEMYDDGIDEDLMMLDAE

SEQ ID NO: 6926 - protein, 620 aa, Coccidioides immitis RS
MICSRAEGRSRRLKASEWEWEKREPPNTKPLKPSLGICHWPGDSQGLEHLPITETSFGSGYWTQTDNAGQSAVMTKESQIPVGEYLFRRLHQLGLRHILGVPGDFNLNLLDHIYNVPDMRWVGTCNELNAAYAADGYARTRGIPGAVITTYGVGELSAINGIAGAYSEYVPVIHIVGNTSRDMQRNHVKIHHTLWMDGWDHTTYQKMSEPVRKDSAFLMDPATAPEQIDRVIETCVKTRLPVYLFVPIDVPDLMTDSSRLSIPLDLEVRNDGREAHEDEVVSEIVRAIDQASSPGVLIDVLVQRHGLVGDAKELIEQINAPFYITPMGKSIVNESDPRFAGLYGGDKVIKLHPSYCSVGSKVWDGLDFRPVVKKLVQRLNKQPLTRKASSVPKSQPYKETAHVDDSCVDGLDHKRFWDRLSRYIQPNDFVIAEVGTSQFGSLDLKLPDNCQYFSQLYYSCIGFTVPALLGVLLARKETGAEGRVILLVGDGSLQMTVQEFGTIIREGLKPTIFVVNNAGYSIERLIHGPMQQYNDISTQWDYQKMLSFFGAPNAPTYVAKTYAELGKVLNDEAFKKGDRIQLLEVFFDMLDSPWNLTALLDLKEKRLRAAAAAAAAANGN

SEQ ID NO: 6927 - protein, 750 aa, Coccidioides immitis RS
MPRSTDRSPSPRREERRRSRSRSPRRRRYDDDRDRDRGRKKQSGFRWKEKPRRDDDISGREPERGLERGYRERDRARSPFRDRDRDYGRGRERYRDGDRDRRPSDRDRDRAPDRDTERNRSKEDRDRKERKPKEKKEKKPAAPAEPMIVVHVNDRLGTKAAIPCLASDPIRLFKAQVAARIGREPHEILLKRQGERPFKDQLTLEDYGVSNGVQLDLRLAGCVLSVSSVQMTVMTMAGVRFLRFDDHYILVCRTHVLLLQLFKNGYHGLLAALQLPRPFAIIPDVIEDMTRPSAGLMVRNIVVLGGTAHPHLNKTICDQLGIPPANILLSKFSVGETRVEIYESVRGKDVYIIQSGGGKVNDHLMELLITISACKTASAKRVTAVLPLFPYSRQSDIPYNKTGAPLVKSPTNRNDTSPAYTFESTPPTPHPAKADSLGLVNGIDGLQKGLATAQLEDREGSGNTSPQKARISHYVNGVPKRSDTMDSIRYEAATKGDRNAAPVNGVHSHDDSASVTSTSSKLTTFQPRPGYRQWVAQAGTLVADLLTCAGADHVITMDLHDPQYQGFFDIPVDNLYGRPLLKKYIQENIPNYKSCIIVSPDAGGAKRATAIADSMGMEFALIHKERRPTKIADRQNATMMLVGDVKDRTCILIDDLADTANTITRAAKLLKKEGASMVYALVTHGILSGDAIDRINASGLDKVIVTNTVDQDDHLKRCPKLEVLEVGQVFAEAIRRVHHGESISVLFQYD

SEQ ID NO: 6928 - protein, 372 aa, Coccidioides immitis RS
MSNKVYLGVIGVGGVGTHFLSQLSRLPNAPSLALLARSSQTITSPTPSYSPAIPAADWQSAGSSASLIKSGAWTPEEIATYLSQAPGRAILVDNTSDPTLASAYPLFLSKGISIVTPNKKAFSSSLQLWKDIFSAASTGNAFVYHESTVGAGLPVISTLRDLVATGDQVTRIEGVFSGTLSFLFNQFAPVSPSLSSPPQKWSQVVAQAKELGYTEPDPRDDLNGMDVARKLAILARIAGLDVESPEAFPVESLIPTELASLPSGNEGAAQFMSKLSGFDDKMEEIKNSAEAEGKVVRYVGSIDVLGKKVKVGLEKFDKGSPIAGLKGSDNIISFYTERYGEQPLIVQGAGAGGAVTAMGVSADLIKVLERLR

SEQ ID NO: 6929 - protein, 102 aa, Coccidioides immitis RS
MPKEKSTRQTKGRRAEKKKKDPNAPKRGLSAYMFFANEQRENVREENPGISFGQVGKLLGERWKALSDKQRAPYEEKAAADKKRYEDEKANYNAHEDDEESA

SEQ ID NO: 6930 - protein, 322 aa, Coccidioides immitis RS
MTSPSTIKQKFIAKGHQLGVVAVGFSDGQPNQGVDPSGLIEAGLLDQLRDDLEYDIRHDGKVHTYAEFVPEHDPNHRGMKKPRTVSAATQQLSRQVYEHAREGRLVLTLGGDHSIAIGTISGTAKAIRERLGREMAVIWVDAHADINRPEDSDSGNIHGMPLAFLTGLAKDDNEDMFGWLQPDNLISPRKLVYIGLRDVDRAEKRLLKEHGIKAFSMHDIDKYGIGRVVEMALAHIGQDTPIHLSFDVDALDPQWAPSTGTPVRGGLTLREGDFIAESIHETGSLVAMDLVEVNPTLETLGASETIRAGCSLVRSALGDTLL

SEQ ID NO: 6931 - protein, 104 aa, Coccidioides immitis RS
MSAAKQKAQTIIADNAVVVFSKSYCPYCKATKSLLSSEGAKYFTMELDQVDDGAAIQAALEEITNQRTVPNIFIDHKHIGGNSDLQARKSELPALLKAAGALQA

SEQ ID NO: 6932 - protein, 432 aa, Coccidioides immitis RS
MTGTGTGSDVRRQGERRVYLNDGKEADFPMRIIKAISSMGELILAINAGTSSVGLTIFDRHRPPRKIATAKVAGITAPPRTFKYSHGHTKQRREVDEKIDTPQEAFTYLLTHFLNDPKLTIISSKDDFAYICHRVVHGGDFTREAVINTDTFSYLEALQDLAPLHNTASLDITRTCLNEIPGAKSVAYFDTTFHQSLPDYIKAYPIHQEVARSNWLRKYGFHGISYSFILRSVAEFLKKPVELTNIIALHLGSGASVCAIRGGKSIDTSLVFHYTSEACKLSSSSTKDMHITQAEEILNKQAGWGAIAGTTDFSKIATDSPETDMHKLAFDIFVDRIVGFIGSYFVKLDSEVDAVVFAGGIGERSAMLRAAIVQKCRCLGLSICQRKNSKGFYDNALTVIDISEKSSQSPAILVCQTNEEYEMAHQCVNNPP

SEQ ID NO: 6933 - protein, 569 aa, Coccidioides immitis RS
MTDLATKELKNPVDVAEYLFTRLHQLGIRSIHGVPGDYNLVALDYIPKCGLRWVGNCNELNAGYAADGYARINGISALMTTFGVGELSALNAVAGAFSEFVPIVHIIGQPSTISQKDGMLLHHTLGNGDYNAFANMSANISCAVAKLNDPHQAATYIDSALRECWIRSRPVYIALPTDLVQKKVDGERLKTPIDLSPPANEEEKEEYVVDVVLKYLHAAKNPVILVDACAIRHRVLDEVHDFVKKSGLPTFVAPMGKGAVDETLPNYGGVYAGDGSNAGVKDRVESSDLILSIGAIKSDFNTTGFTYRIGRMNTIDFHSNYVAVRYSEYPGVGMKGVLRKVVQRMGKVNVAPGPKVINEPHEDPSASNPAITHEWFWPIVGKWLQENDIVITETGTANFGIWETRFPKGVTAVSQVLWGSIGYSLGACQGAALATQEGLKRRTILFIGDGSFQMTGQELSTMIRRKLTPIIFVICNEGYTIERYIHGWESSYNDIQEWKFKDLVPAFGAKPENYRTYQIRTKQEVLDLFANKEFAAAEVLQLVELYMPLEDAPAALRLTAEASARRNAE

SEQ ID NO: 6934 - protein, 319 aa, Coccidioides immitis RS
MAAKDVTQKDKSVLGMPGFVVDFMMGGVSAAVSKTAAAPIERIKLLIQNQDEMLKTGRLDRKYNGIVDCFRRTAQAEGVVSLWRGNTANVIRYFPTQALNFAFRDTYKSMFAFKKDRDGYAKWMMGNLASGGAAGATSLLFVYSLDYARTRLANDAKSAKKGGERQFNGLVDVYKKTLASDGVVGLYRGFGPSVLGIVVYRGLYFGMYDSIKPVLLVGPLEGSFLASFLLGWTVTTGAGIASYPLDTIRRRMMMTSGEAVKYSSSLDAARQIAAKEGVRSFFKGAGANILRGVAGAGVLSIYDQVQLLLFGKAYKGGSG

SEQ ID NO: 6935 - protein, 553 aa, Coccidioides immitis RS
MFFRNFSLAFISTLVASGAWYAYKGNSNQQELAPTAALNATPSLFQQNTNGVYSGTAGHHTSAVAGDNPTFQSDSSLVVEDQQYTATSVSEQPVSKQTSETGNRVVGMLTPEQATEKLRRNEESYLVGRGKGVVRYDVVQLPSNDPIEDDHAEKIVVSSTADGSSSDWMFWGVFDGHSGWTTSAKLRQALISFVTRELNSTYKAASSKSGFPYPSPEAIDAAIKRGFVNLDNEIVHKSVDRVLKANSKRVAAELLAPALSGSCALLAFYDSSSKLLHVACTGDSRAVLGRRTPNGKWTATPLSEDQTGSTVSEAQRLRREHPGEDNVVRNGRVLGNLEPTRAFGDAFYKWKRDTQDKIKRHFFGRTPHQYLKTPPYVTAEPVVTSTKIEPQKGDFLVLASDGLWEMLSNEEVIGLVGQWIEQQRASAQGKDGVKSWLQSWWSSVDQLPIEKPSRDDATGQRAPFRQMQYNIPQNENRFVVEDKNAATHLVRNALGGKDKDTVCALLTLPSPYSRRYRDDLTVEVIFFGESEDTGAVTINTEASSSTHEIPAKL

SEQ ID NO: 6936 - protein, 472 aa, Coccidioides immitis RS
MNPGPVTIREVDEIGALKAIYTISSPAASIGTKPVTISAPTSRRTWSSYFTAILDAFLPVGYPHSVSGDYLEYQVYVRPIFLKLHWSFTDVANNRLFVQDSLQAFSSSIAGLLSSRAVLQGVGVGDATASPTSALLLSILQDSMGRIATILFAHQLGTSLEPECKMYRLAADIFNDSSMIMDCLSPMFPKSIRVGLLSLSSVLRALCGVAAGSSKASLSAHFAKWGNLAELNAVGSLVVSYITSPLATWVALISLLIVHITTNYLAVRAVSMTSLNRQRANIVFSTLFDENRVLTAKQASKQERVFERDGVLRWKASSDTLGFCQIGVPFKDVIDHVSSSSPAERTEATIVAILRVFEQEEYILWFDPARKRGVIGLKTNASPTSQLKAWSHALLAANSLKIKESNTRGPLVREQVGTDSVLMLGILQDTLAEHSKDFDARIESLRDAGWDIDTPSLQTKPGRKFDVIRKQE

SEQ ID NO: 6937 - protein, 555 aa, Coccidioides immitis RS
MWLREYGESVRHRGPDWSGNFVSNNTILAHERLSIVGVESGAQPLVNDDETLALAVNGEIYNHRILRKGLKTQYKFKTHSDCEVIIPLYMEHDIDAPKFLDGMFSWVLFDKKQNRVIAARDPIGITSFYQGWSSQTPGAVYFASELKSLHPVCDKIISFPPGHVYDSKTDTMTRYFQPKWWDPTNVPSTPIDYKLIRESLVRSVRKRLMAEVPYGVLLSGGLDSSLVASIAQRETQRMMVAQNGTVTNGESGAGLVGIDDSNELSTVTSFPQLHSFSIGLPGAPDTKAALEVANFLGTKHYAFTFTVDDGLNALSDVIYHLETYDVTTIRASTPMYLLSRKIKAMGVKMVLSGEGSDEIFGGYLYFHAAPDKKAFHEETVRRVKNLHLADCLRANKSTSAWGLEARVPFLDKQFLEVSMGVDPQEKMITKERIEKYVLRKAFDTSDEPETKPFLPDNILWRQKEQFSDGVGYSWIDALRDNAELQVTDEMMKNPKPEWGDDIPDTKEAYWYRMMFDEHFPPCCASTVMRWTPTWSKQTDPSGRAISTHVAKYDHA

SEQ ID NO: 6938 - protein, 152 aa, Coccidioides immitis RS
MAALPFFCRAVRPASHSLRPLFASTLSPLQIRLLSTEMKAAIDKAVASAPVVLFMKGTPETPQCGYSRASIQILGLQGVDPDKFTAFNVLEDLELRQGIKEYSDWPTIPQLFIDKEFIGGCDILMSMHQNGDLAKLLEEKGVLVPRESEAAK

SEQ ID NO: 6939 - protein, 393 aa, Coccidioides immitis RS
MRLIKQNIEQDGSGSVTLFPEEPEDMWHAYNLIRPHDLLKASAIRRVTTTATTGTTSSSRVHLTLQIRVKSLDFDPQSSQLHVSGQIASENPYTKIGQHHTLDLELQRNFTLEKRTESGEVGGWDSVAIEMLKDAVDEGYKRRAEAVAVVMQEGLANICFIGQFQTVLKQKALAKFFQVTLETLLRLLDTSAGSITSSTTSNGTSTRPILLASPGFTAVSFQKHIQSVSLGKPELKPLLESMIVVHSSSGHVHSLAEVLKSPSVQARLSNTKYARETAIMDTFFNHLRMDTNKATYGAKEVESAVEQGAVGRGGGILLISNRLFRAQDVHERKRWVSLVDRVRDVEGGEVRVLSSDHESGKRLDGLGGVAALLTFPVLDDENEEDDGDDNADG

SEQ ID NO: 6940 - protein, 403 aa, Coccidioides immitis RS
MSFTTMLNKLQGQPESYEKKAQYKFGRTLGAGTYGIVREAEGPNGKAAVKIILKKNVKGNEQMVYDELDMLQRLHHPHIVRFHDWFESRDKYYIVTQLATGGELFDRICDYGKFTEKDASQTILQVLDAVNYLHERNIVHRDLKPENLLYLTRAQDSQLVLADFGIAKMLHSPSEVLTNMAGSFGYAAPEVMLKQGHGKAVDMWSLGVITYTLLCGYSPFRSENLQDLIDECRSGHIVFHERYWRDVSKDAKDFILALLQTDPTKRATSAEALQHRWLKGETATDHNLLPELKAYMAKARLKRGIEIVKLANRIEALKMQGEDDDDIPSAIPDNTTPSSNSGPADQTSPVTAPTNKKRSLSRAAKSAIFREVVLAKVREMRQEEQKEKVEKEALERAEKEKHK

SEQ ID NO: 6941 - protein, 862 aa, Coccidioides immitis RS
MTRLREFKSKALQAERDVSTSTTHTEALEAAIRAAENYMHALRLASDPREKKALDAKCKEYITQAEHLKHLKEGGGVQSNASASARAEVRQRREPVSTRTLSNREQIILLENSKLNGFVFPPWSAQPGPEEFELDEEDELFTDCSELGLSASQQQMFDGWKRPSEIFTEARKEDRDILMMSKNPMDLVQDVTTDCSVVASLCAGVSQDVRGYPQLAQTIKMYPCDKDTSIPQLSPSGKYIFRMHFNGCYRKVVIDDRLPSSKTSRSLFVVDRNSPTVIWPALVEKAYLKVRGGYDFPGSNSGTDMWILTGWIPEQIFLHHDEVTCDQIWDRLFNSFLAADVLLTIGTGKLTSREEREVGLISSHDYAILDMRESNGKRQFLIKNPWAGGAKWKGVSGASAVSALQEIEFEFSSPQRSPLSPGTFWMDCDEVFQNFENLYLNWNPRLFRYRQDIHFRWNLSSAPPVPGCFTENPQFAITSKSGGKLWLLLNKHFKSGETSDAVNQLLDPEVDEPGFISIYVFNKRGQRVYLSDGAIHRSPYVDSPNTLVRLDMPPNTTFTAVVAEQSLHRSIQSFSLSGFSTGPLSVCPATEKYAHVRKVQAAWTLSTAGGNAESERYPLNPQFKLKVSEKCDVAVLLETDNGDLATHVKIFWSKGERVAEVRLRDIVCDSGDYRRGFALAEADAMTKGTYTIVCSTFAPDQLGKFTLRVSSTHPCEVKPLPREGAGRLLMSSGLGVLSPGTDRILAPITVSRLSRLKLVARRKGSWIGHRTVAPSPILMTLELGQGPYKEILAASGDGDFSDLVTGARIESVDLQPELGLRGGVWLVVERVGGPGGQVEDHIEVEILSEERVEIGRWGVGDG

SEQ ID NO: 6942 - protein, 825 aa, Coccidioides immitis RS
MASQPSTNAQKVGHGLAKVLGIKLEKPDADPVTRGESTFSTGSGDTFVEHEPSSIDWLAECVPSGRQVLMFIVNIFPFLRWLTRYNVQWFLGDLVAGVTVGAVVVPQGMAYAKLAELPVEFGLYSSFMGVLVYWFFATSKDITIGPVAVVSTLVGHIIVRVRMEHPEFEPHVIASAFGVICGAVVTFVGLIRCGWLVDFIPLTAISAFMTGSALSISSGQVPSMLGITTFNTRDSTYKLIINTLKHLGDTKIDAAMGLSALFILYAVRSGCTYCARKYPSRAKLWFFLATLRTVIVILFYTGVSAGVNIHRRDNPRFRILGTVPRGFQHAAVPDLNPGLLSAFSGDIPAGVIVLLIEHIAISKSFGRINNYTIDPSQELIGIGVTNLLGPFLGGYPATGSFSRTAIQSKAGVRTPFGGVITAMVVLLAIYALPPVFFYIPNSSLSAVIIHAVGDLITPPNTVYQFWRVSPLEVVVFFAGVFVMVFTNIENGIYTTVCMSLAILLFRLVKAQGQFLGRVKVHTVVGDHLADSDGKYNGWGAETGPRSSAFRNIFLPISHADGSNPEIEVGQPYPGVFIYRFSEGFNYPSVNHYLDHLVSTIYKNTRRTNPNSYSRPGDRPWNMPGPRRGQSEEDRSHLPTLKAVILDFSTVNNVDVTSVQNLIDVRNQLDLYASPQPVHWHFAHLNNRWTKRALASAGFGFHTPTANSGATRWKPIFSVANLEGNASAAAHAEFLDNERENGHAVSSKHDIESPATDSATSTIQRAGGVIGAKNSSSVSVIEKELVTATEYAKHRMTVVNGVNRPLFHADLTSALQSAIANAASMT

SEQ ID NO: 6943 - protein, 160 aa, Coccidioides immitis RS
MADDAQHEHTFESADAGASATYPMQCSALRKNGFVVIKNRPCKIVEMSTSKTGKHGHAKVHLVAIDIFTGKKLEDLSPSTHNMEVPHVSRKEYQLIDISEDGFLSLMADDGSTKDDVKLPDGEVGDKINKLFRVEDKDINVVVLTAMGEEVAMDAKEAPK

SEQ ID NO: 6944 - protein, 509 aa, Coccidioides immitis RS
MRGVQIFSGTSHPALTEAICERLGTVPAKCELRKFSNGETCVNIGVSVRNQDVFIVQSGSSKINDSVMELLIMISACKGGSAKSITAVLPYFPYSRQSKKKSHRGAITARMLANLLSIAGVDHVITVDLHASQMQGFFGKPVDNLFAESLIARWIRINVPRWHEAVVVTKNAGGSKRVTSLADALKLNFGIVTTDRRRQKYNQNSMTDSAIFFDSVDHNLANVRNAEFQPRNVSHRASLPTRPRPQDINLNSSSLPDPFIDAQPNTLATLPEESRTPQSGFGEASHDDDDTTNEYTDERAREVVTARLVQGHLVDDDYPSPNLSSTAASVSGLNVTVERTEIYDGASLDPTSESAVSTLSSFQPEHALGGSFDAAASSDEEDGKAQNSNHERTITLVGDVRDKTVFIVDDMIDRAGSWIAAAETVVKKGGANKVYCIATHGLFGENSLEQMERCDCIDYVVITNTFPIDPQRARRMKKLVVLDVSALLSESIRRHHYGESISSLFELRD

SEQ ID NO: 6945 - protein, 810 aa, Coccidioides immitis RS
MTWKSRLFSRSAASGHGDGEVITTHSDEVKGEGKPESQEREIAAKDLEKVAKSHQWDPNLPSEQIDAIEEARRTGDVEIVTQVDKAFLEDSPYPEVRAAVRNTDEGEVANTVRAWILGLVFVTVGSGLNMFLSMRSPAITFPSIVVQLLVYPVGCLWAKVVPRRVFNVFGLRWTFNTGPFTIKEHAVITVSRLFFPTPKTMLNVLIHFCRSCQTFFNINLGWGFALLFTLSSQMIGMALSGIFRRFLIWPAAMIWPAVFSNTSLFYALHDKTRSDPSMTNGWRISRYRWFLYLMMAAFAYYWLPGVLWQGLSVFCFVTWIRPKSPVINQLFGGFTGLSLIPLTFDWTYISSYLQNPLLSPTHSHLNTLIGLGLFVIITTVGISYSGAMYSDYLPINTSSTFDNTQNFYNVSRILGPNFSFDIEKYKSYSPLFLAPTFALNYGLSFAALTAVLVHIALYHGKEIIYRAKAARNQEPDIHMKLMSKYEECPEWWYAVLLAVSVALGLATSEAYSSQLPWWAFFVATIMGLVFVVPTCMLLAIANIPLALNVLSPFIGGFMLPGKAIGVMVFKVYATNTLGRAQTYSRDLKLGHYMKVPPKTTFTCQVGATIWAVFVQIAVMNWTLGNIENVCTPDQPAHFTCPNGKTFFSSSIVWGVIGPQRMFGPGSIYSSIQWYWLIGAALPVVFYVLIRLFPRSPARFLNAPVMLGAMNWLPPATPLSFSSWAIVGLIFNYWIRRKWSGWWHQYNYVTAAALDSGLVIATIVIFFAITFPGVSLPNWWGNNIPYETIDYTYEAVRRTVSPGETFGPREW

SEQ ID NO: 6946 - protein, 444 aa, Coccidioides immitis RS
MPHSNVPPTSVPRAGKAPSVAIVGGGLIGVMLGLGLSHRGIPFTIYERASDWHEIGAGVALTSVARSSMQRLHPHVLGALGRVARASHFSFWDGFHPRTSEAAHSAEALHFLLDAPGTDYWCCMRSHFLRELVALLPAGSTRFNKELESYVDDPSRQQVLLRFTDGTTAEADALLGCDGIHSRTRQLLLGDDNPAAHASFTHQVGYRAVLPISEAMEVLGDAKGGSDFCIHIGPNAYVPSYPMLNGTETVLNMTTVIYTPEPWPHGQKMVAPATHDEVAKIFKDWSPPIRDLIAKFPEKLMKWGIFDMADRPAPTYASGRVAIVGDAAHASTPFLGAGGAMGIEDALAMASAMQLVSETSTGVASIPAALQAFSAVRLERSQWLVQSSREMGVIFQWRAPSAGNDGQRFKVEAEQRTSKVWDFDVDGMVDQIRLEFEQRTAGAV

SEQ ID NO: 6947 - protein, 539 aa, Coccidioides immitis RS
MAAPVLPLPQVKLPSIPSTRLTAEQLHWRSFKTPLLISSPSNTPINHISQPPAPALSSPASLHPPDIFTVTTGARVQIYSIRTRKLLKSITRFDDTARCSEIRPDGRILVAGDETGTIQVFDVNSRSILKTWRDHKQPVWVTRFSPTDPTSLLSASDDKTVRLWDLPSENSAQVFVGHSDYVRSGCFMPGAQSANLVLSGSYDQTVRLWDSRVAGRQVMTFKMAAPVEGVLAMPSGTTVLAAADNQIAVLDVVAGKPLHLIKSHQKTVTCLSLASKGSRIVSGALDGHMKVFETTGWNVVGGSKYPSPILSLGVITSGPQREDKHIAVGMQSGVLSLRTRLSGEQKIRERQRQREMQALLEGKLDEHDRTVSKEQKKRGRGWEKRLRGMDFIGEGVDIVIDAQDTKKRKKEKSWENDLRKGRYAASLDQVLAAGDNITVVTLLTALRHRAALRTALSGRDEVTLQPILKWVHKSITDPRLVDICVEISMNVLDLYSAHLGQSAQIDRLIEKLHRRVREEVDRAQHAWQTKGMLDMLRRS

SEQ ID NO: 6948 - protein, 780 aa, Coccidioides immitis RS
MAAAFDDEDLSISLPSFDRDGKDDRTPHSRPSMPPPSRPFTVPPEQSPATARDMQRLEQYKTVRILGEGSFGKVKLAIHQATGREVALKIISRRKLLSRDMVGRVEREIQYLQLLRHPHIIKLYTVITTKTDIVMVLEYAERELFDYLVSRGKCNDDEARTFFQQIICAVEYCHRHKIVHRDLKPENLLMDREKNVKIADFGLSNIMTDGNFLRTSCGSPNYAAPEVISGKLYAGPEVDVWSCGVILYVLLVGKLPFDDEYIPNLFRKISAGNFYMPSYISTGAANLIRRMLQVHPVHRITIPEIRRDSWFKKDLPQYLQHPAEEFVATGADPNKAIDLRSIAPGKPAAVRERIRENAVSKLERRMGYGKEDIQEALRKPEPSAIKDAFFIVVENEMMQTNSPTELDGCPSSPQPREGQDASSQGPGTAARPGFSTPRDTPITPLTPYRVTPINTPESRVSHVRILPTSLPYVHDQIMDQRTKDMTARAASPPQDYSQHIEVADLSGTPRERSPEEQAATARALKPHSRSVVDLEKLQYEPPEMLTQVPSQPKRSRKWQFGIRSRNLPYEAMLCLYKAIQAEGGVWEIQPAEPDNHDDDRVPEMTSEIPGPLQRKYRDVPSEYYIPKDLWFIRARLLKQGVLAPGPASSAHSSRSDLEELRRRVSLKGGVLHQEDRSVSGSAGFGAGLSAASSLSSHSATLSYGVWVFIDIQLYQLERDNYMVDFKCDGYQNVVRIEGDGSATEWRPISKRFRNKEKEITSPYPFLDVASDLVAQLAAAT

SEQ ID NO: 6949 - protein, 338 aa, Coccidioides immitis RS
MAIAPLAVPVRRLLFPLRSSARSFSTTLSRDATWGFIGLGQMGYPMAKNLRAKIPESDTLLICDSNPDATKRFTAEQSGKRIEVASSPRELAGRSETIITSLPEPQHVKGVFHTILKDGLPKLATERLFIDCSTIDPISSREVAAAVHSTGSGRFVDAPMSGGVVGATAGTLTFMVGASSQIPGLVQEAEKVLLLMGKKVWHLGEQGAGLSGKLANNYLLAITNIATAEAMNLGVRWGLDPKVLGQMINSSTGRSWSSEVNNPAPGVVETAPASRGYSGGFGVSLMKKDLRLAVEAANEAGTRLELASKAQEVYDSTEAAHKGKDFSVVYQYLKDHSR

SEQ ID NO: 6950 - protein, 723 aa, Coccidioides immitis RS
MSRAPGHSDANSGNVEDETSRLLELERNDIAAGGSRHGTFSPDTHQYPNRGTSASPSLRHGCTLPGSSSQSIRGDGISSAPFYVATGKSATRQLADAHGVKNRRIMYLAYYVPFFNWISQYQWRYLRGDFISAVTVASVYIPLGLSLASNVAHIPALNGLYSFVFHPLMYALLGSSPQVIVGPEAPGSLLVATVVRNAVDDGKSIDDDLLANAQIAGIVTGMAGAMILIAGLTRLGFLDNILSRPFLRGFISAIGFVIFVDQLVPEMGLSDRAKHDGLVTHGSSWDKLVFLFLNVRYSHALTCAVSFGSFAIIMMFRTLKKFLEPRFPSVVFFPDQLLVVIFSAIFTWKFGWAEQGLHILGDIKGAGNQTFGFRWPFQWSQLDHIRTAMSTSFIISLLGFFESSIAAKGLRSTVQDGIEGMTYSPNRELVALGTANILGGCFMALPSFGGYGRSKLSAATGGKTPMSSIFLCLITVICIVYLLPYFYYLPMGVLSAVISVVSWSLIEECPDDIRFFIRIRGWSELILMLLIFVSTVFYSLYLGIALGMGLSILQVIRHATKPRIQILGKVSGTDNRFENAELHPERVEFIEGCLIVKIPEPLTFANTGDLKNRLRRLEFYGTNAAHPALPRLRSPEHNRNMIFDIHGVTSIDGSGVQVLSEIVQEYIDQDVRVFFCRIPRPESEVFRLMVKSGIVDICGGMTHFVESVDEALKLTETPHIHME

SEQ ID NO: 6951 - protein, 644 aa, Coccidioides immitis RS
MSAPTGTTELPERPKEAKPPKKKPAKQPKDNSAKNANKGPKKQAGGAAGIDVTQDPEFMFKVGFLADVYQERPISDKIPKVTTRFPPEPNGFLHIGHSKAIAVNFGFARYHGGSCILRFDDTNPEGEEEKYYKAIEDIIHWLGFKPIRVTAASDNFEKLYQLAEDLIRRDGAYVCHCTKAEIKVQRGEGTGGERFPCSHRSRPIEESLTEFRAMRDGKYKPGEAALRMKQDLENPNPQMWDLFAWRILDHEHKAHFRTGSNWKVYPTYDFAHPLCDSIEDISHSLCTTEFELSRESYEWLCDKLDVYKPMQREYGRLNITGTVLSKRKIIELVKKGYVRDWDDPRLYTLIALRRRGFPPGAILSFVNQLGVTKAKINVQVVKLEQTVRQYLETTVPRLMVVLEPLKVIIDDLPDDFVEMVEVPFSKDPSFGSRKVPFTKVVYIEKSDFREVDSPDYFRLAPGKTVGLMKAPHPITATSFEKDLETGEIICVHAKYEKPVEGLPVKKAKTYIHWVGESPAHSSPKRAEVRAFNQLFKSDDPSAHPDGFLADINPDSEQIFTNSFIETGFDEVCRSAPWPKEQNKESGEGEGETKAKEDGDASIVEPYSIRFQGMRMGYFTVDTDSKPDAIVLNRIVTLKDSAGKS

SEQ ID NO: 6952 - protein, 511 aa, Coccidioides immitis RS
MSNLAPQALRQASRACSRRLSSSTGLLRPLCGPGTNAALHHSSWRSYVSESKAQTTADAAIKAEQRLFTEQTTLKPNSVQVPGATVTGDTPTSPNAGILKQATVMDQGTRPIYLDMQATTPTDPRVLDAMLPFLTGLYGNPHSRTHAYGWETEKATEQAREYVANLIGADAKEIIFTSGATESNNMSIKGVARFFGRSGKKKHIITTQTEHKCVLDSCRHLQDEGFEVTYLPVQSNGLIRLEDLEAAIRPDTALVSIMTVNNEIGVIQPMKEIGALCRSKKVFFHTDAAQAVGKIPVDVNAWNVDLMSISSHKIYGPKGIGACYVRRRPRVRIDPIISGGGQERGLRSGTLAPHLVVGFGEACRVAKEDMKYDAKHIERLSKKLVDGLLAMEHTTLNGDPERHYPGCVNVSFAYVEGESLLMALKDIALSSGSACTSASLEPSYVLRALGNSDESAHSSIRFGIGRFTTDDEIDYVLNAVQQRVKFLRDLSPLWELVQEGIDLNTIEWSQH

SEQ ID NO: 6953 - protein, 383 aa, Coccidioides immitis RS
MRFFPGLPLLLFSTGSVARNIVFPPIHEVTGQASLSNDGVADDIDIVTGSQFSGLSTFAHVPYVNCFIDGEAEKEKYDIAILGAPFDTAVTARPGARYGPGGIRRGSARMRAGSAWSVYSGVNNLRSWAKIVDCGDAPLTFLDNTIALKQLDKAHKVVSSRIANTTDVSSVPRIITLGGDHTTTLSALRSTYEKWGPVSVVHFDSHIDTWDPEVLGGGVSSYAGVNHGTFLHIAHEEGLVQNNSIHVGIRAPLVREKGDLRNDVRCGFDIVTARDIDMIGASGIIEKIKNRVGSDNVYISVDIDVLDPAFAPATGTAEPGGFSTRELLTILDGLSGLRVIGGDVVEVAPVYDTTGETTVLAAAEVANSLLGLMIAKPVPNERK

SEQ ID NO: 6954 - protein, 410 aa, Coccidioides immitis RS
MMRFSYWQGLLLGLLICWKPVAGHQDHQHGEQAPINEKDLLKKWGQEWAFSGISTFAHLKHVKCLLEPDELYDIAIIGAPFDTAVTYRPGARFGPRAIRAASSRQVPGLAYNTRAGINPYLSWARILDCGDIPVVPFDNAIAESQMYEAFLELGSRPTPKNGKPKLITLGGDHSIALPALRALYKIYNKPITVVHFDAHLDTWNTLRYSEVWTSEQSRFTHGSFFYTASLEGLISNTSSVHAGLRTRLTGTDDGDYTNQGPEQGFMRIHADDIDDIGVKGVIDAIISRVGLLPDEPVYLSLDIDVLDPSIAPGTGTPEPGGWTTRELIRILRGIEKLNLVGADIVEVSPTYDGHGEGTALAAAQMVYELLASMVKLELKEEAEVQTTVRDKEQHFMFPQQQSDEGLEIIA

SEQ ID NO: 6955 - protein, 389 aa, Coccidioides immitis RS
MAKTLEARFEQLSVNDENTPPSGHTGSEKPKPGLPKALPISGLSTASQASLNAGRANLLKFALQNNEGRLHLNTASPPYKKENGSSRPPEESSAASNLYGQPAVAKNWHLGMFEIGKPLGKGKFGRVYLARERSSGFVCALKVLHKHELVKGGVEKQLRREIEIQSNLRHPNILRLFGHFHDSKRVFLILEFAGNGELYRHLRKENRFPEWKAAQYIAQMAAALKYLHKKHVMHRDIKPENILVGIHGEIKISDFGWSVHAPNNRRKTMCGTLDYLPPEMLIPGSQDNYYDEKVDLWSLGVLTYEFLVGEAPFEDTPFLTRRRIARGDMTIPSFVSSEARDLIKRLLVLDPSKRIPLDEVQKHPWIIKHCIKGERASQRSSRKEAKGDN

SEQ ID NO: 6956 - protein, 634 aa, Coccidioides immitis RS
MSAPYAPDYASYNWTGAPSNFSLATDPVLGGDSRFENLNKWFQSGDQAYIIIASAMVMVMIPGLAFLYSGLARRKSALSLIWACMGSMSVVFFQWYFWGYSLAFSPTATNGFIGNLRNFGLMKTLADPSPGSALIPGLLFAFYQMQFCAVTAAIIMGAVAERGRLLPAMVFVFFWATIVYCPVTCWVWNSNGWAAKYGVMDYAGGGPVEIVSGMSGLAYSMVLGRRHEHMMLNFRPHNVSLIVLGTVLLWFGWLGFNGGSAFGANLRAVIACWNSNLTAAFASITWVLLDSRLSGKWTMVGWCSGTISGLVAATPASGFIPLWASVILGVVTGLVSNYCTKIKFWLKIDDSMDIFAEHGVAGIIGLIFNALFGDDAIVGLDGVNVGAINPETHTHVGGWIIHNYRQLYIQLAYIVACMGYAFVVSALLAYAINYIPGLHLRASEEAELLGMDDDQLGEFAYDYVEVRRDHLAWTPQTMQPCDHTHQVPRSDLYGSQAHSAMAARPVQNGKISPDRSTDNIPGESPSGTQATSGPTIRNPSPERKRRLARVFGMKRVPAPSMPLHHVPITPTAPPAHTLETSTHSAPAHELPLPPMTQITPSHSVTPHATTIIPSPPPSTHSHHTEQDDLNEKSR

SEQ ID NO: 6957 - protein, 675 aa, Coccidioides immitis RS
MSRQSRRDVASSPFAWTTIFYLLFVFIAPLALLGTAHAAEEQAPLQENYGTVIGIDLGTTYSCVGVMQNGKVEILVNDQGNRITPSYVAFTDEERLVGDAAKNQYASNPKRTIFDIKRLIGRKFEDKDAQNDIKHFPFKVVNKDGKPQVRVDVNGKPKNFTPEEVSAMVLGKMKEIAEGYLGKPVTNAVVTVPAYFNDNQRQATKDAGTIAGLNVLRVVNEPTAAAIAYGLDKTGDERQIIVYDLGGGTFDVSVLSIDNGAFEVLATAGDTHLGGEDFDQRVITYLAKQYNKKNNVDITKDLKSMGKLKREVEKAKRALSSQMSTRIEIEAFHEGNDFSETLTRAKFEELNMDLFKKTLRTVEQVLKDAKVKKSEIHDIVLVGGSTRIPKVQQLLEEFFGGKKASKGINPDEAVAFGAAVQGGVLSGDEGAKEVVLMDVNPLTLGIETTGGVMTKLIPRNTVIPTRKSQIFSTAADNQPVVLIQVYEGERSMTKDNNLLGKFELTGIPPAPRGVPQIEVSFELDANGILKVTAGDKGTGKAESITITNDKGRLSQEEIDRMVEEAAKFADEDKAMKAKIEARNSLENYAFSLKNQVNDKEGLGGKIEDDDKETILEAVKEATDWLEEHAATATTEDFEEQKEKLSNVAYPITSKLYGAGEAPSGEEDEPSGHDEL

SEQ ID NO: 6958 - protein, 585 aa, Coccidioides immitis RS
MPLLSSEGPRPKVLVPEKLSPDGLALLRASTDVHEKMGLAPEELLTIISDYDALVVRSETKVTDEVLQTAKKLKVVARAGVGVDNVDVDTATKLGIVVVNSPAGNVGAAAEHTIALMMGTARKISHACSSLKGDKWERSKFVGVEVKGKTLGIIGLGKVGMIVARLAKGLGMNVNAMDPYASEAVASSASITLVSSLSELLPTVDFLTIHTPLIASTKGMISTAELANMKPGARILNVARGGTIDEIALLDALESGHIAGAGIDVFTSEPPKPGSSASRLIAHPNVVATPHLGASTVEAQENVSIDVCEQVLQILGGALPRSAVNAPLILPEEYKKLQPFVRLVEKMGSLYTQHYSSSTSFDANRSTFDLIYEGDIAGINNTKPLFAAFIKGLMATISSTNVSIVNAELVARERGIVVNEQRSRDPSTHSYSSLVTLVARPPSRAPSRAPGVAETQRPLQNPHQQIISGTCSGSQIIISRLGRFATSFVPEGRLLICHNYDSPGKIGVVGSILGKEDVNINFMSVAPISKQLLEENAAKGQNGGNGNGIHTEALMLLGVDGPVSQDVVTALVDSGGVLSASLVSL

SEQ ID NO: 6959 - protein, 548 aa, Coccidioides immitis RS
MPPLPRYTRSFALSFPPRERVLSGARLVPLTRFAAGSASPVLDIARSSSLGPWISSRSYSGNKMGSLPVGRLHKGNINPNVLAAKYAVRGELAVKAEEYRVKLEQELDTLPFDKVIFANIGNPQQLDQKPITFFRQVLSLMEYPPLLENEETLKSVFGYKQDVIDRAKYLLKDVQSVGAYSQSHGSPLVRKSVANFMEKRDGFPADPAHIYLSAGASSGVNTLLNILCAGHDSGVLVPIPQYPLYTATLAVLNARCVPYYLDEESNWGTDVDGIKASVAKAKEEGTDVRAIVVINPGNPTGACLSPEAVKKVIDLAVDEHLVIIADEVYQTNIFKGEFTSFKKRLRQLQQESPGKYDHVELASLHSVSKGMVGECGHRGGYFELVGFHADVEEQVYKFISVMLCPPVIGQCLVELMVNPPREGDPSYELYQKEYSAISTGLYQRAAALYEAFKQMEGVECQEPTGAMYLFPSITLPQKAIAAAEAAGRHPDEFYSLRLLDATGVCIVPGSGFGQKPGTYHFRTTFLAPGTDWVNRIVAFHKKFMDEFR

SEQ ID NO: 6960 - protein, 803 aa, Coccidioides immitis RS
MATNRAGRFLAGILGINVDYRQEPEDTFRSAAKSISSVDTFVENEPTVAEWVSDRRPSVNDTKRYIKSLFPFSSWIFHYNLQWMLGDIIAGVTVGFVVVPQGMAYALLARLPAEYGLYTSFVGFLFYWIFATSKDITIGAVAVMSTIVGNVVIKVQDVNPDIPAEQIARGLSVICGAFLLFVGLIRCGWIVEFIPLVTITSFMTGAAISITVGQVPAMMGIRGVNTREAAYKVIINTLKNLPNSQLDAALGLSALFLLYGVRWFCRFMSNRQPNRRKMWFFISTLRMAFIILLYTMISWLVNRNIPDEKEAKFRILGTVPKGFRHAGVPHMDQRLVKSFASDIPASIIVLIIEHIAISKSFGRINNYVINPSQELVAIGFTNLFGPFLGGYPATGSFSRTAIKAKAGVRTPLAGVFTALIVLLALYALTSVFFYIPMSTLAGLIIHAVGDLITPPNVVYQFWEISPLEAIIFFSGVLVTVFTQIENGIYATIAASAAVLLFRTAKAKGNFLGRVSVYRVTPDNFPRRGDGHACKEDPGWSVRDAFIPMEHQDGSNPLIDAQSPYPGIFVYRFNEGFNYPNQARYLDTLTAHIFKETRRTQLERYDKIGDRPWNDPGPRNGEQININDNRPILRAVILDFSAVNNVDVTSIQGLIDIRNQLDRYAAPEIVEWHFSSINNRWTKRALSAAGFGYPSSGSIESLGHWKPIFSVAALSGAEADSITTHKASESSEIDGIDEIEPYGNRGAGRKELIRIPRRIANVHGINRPFFHMDVQAAVENAILNAEHKNATLVSTLEDKDPAKE

SEQ ID NO: 6961 - protein, 467 aa, Coccidioides immitis RS
MTFSVLARKRRRQLSPPSPHIVSRKSSVVMVPALPMTPPDPDVDPIPSINPTASALDTVVHVISTERAALANLERMYATDPFSRESMERAVEQIAKTINVGGKLVICGVGKSGKIGEKLVATMNSFGIQSCFLHPTEALHGDLGMIKQNDTLLFITFSGKTSELSMVLPHIPPMLPVIAITAHMQPSSCALLSDSDIRYTILLPAPVHEREEISFGLPAPTTSTTVALAVGDALALAVARSLHTIPGRGPAEVFKEFHPGGAIGAAFASSSSSASETPSRSSASSATSSPTLVGLNGALDQPNGINTALQQSHQKLISDIATPLSYIPIISQLEPSSSNTRIADVLAAAVRCPKANFWVLMTTDCIISPTRLRFLAGDRDPGTRLCDVDDKSHVVVKQNWIRVPKSSSLATVRQILNDIDSSSKYEGAVGKTGKLPGKDRVVAITGEKFEDDVYGFVEEQEVWRGDM

SEQ ID NO: 6962 - protein, 269 aa, Coccidioides immitis RS
MSTLHEITSEADFTTQLSSLPSTSLAVLSFHTPWAAPCTQMRNVLSTLASTYPATTPPSIHFLSINAEDLPDISEQYDVSAVPYLVLLRDNKIVETVSGSDPVRVREAIEKHVGQDGQTDRPSIPPPLVAVPRATAAQDTSDDATASDAQLEPPVPTKEELFARLSELVKAAPVMLFMKGTPSAPQCGFSRQIVSILRENGVKYGFFNILADEDVRQGLKEFADWPTFPQLWVKGELVGGLDIVKEEISANPDFFCDYSVSKPTSAPSA

SEQ ID NO: 6963 - protein, 812 aa, Coccidioides immitis RS
MTYLQRVKDWISYDAFPLALRQRRKGSEKIGLAPSGEDDSHVEANRKLHLYHRVHRWDPNLEDEYLDEVKDAANSYDGSPTNKRMVRRVLENSPYPEVRAAVRNTDEDLPVDTIRAWTIGLFLTTVGAGLNSLFSLRAPSIVVSSMVALLLAHPLGLGWTKVMPNKKIKIFGSEWDLNPGPFNLKEHALIVIMANASIGNGVAYFTDTVQVQIAFYNADFGWLWNICLAISTQMVGFGIAGLLRRILVEPASGSMIWPQTLVTTSFLYTLHDDTPPNPATTNGWQISRYRYFLYIFTGAFVWYWFPGFIAPFLSVFAFATWIKPNDPLVNQLFGGWTGISLFPITFDWSQIAGYVGSPLIPPWHAIGNTLIGTTVTYLIVAPIIHYTNYWYGRHIPIHDSSIYDNRGHLYNVSMVLSANNTFDVQKYKEYSPIFLPTTMALTYGLHFAAIAALIVHTALFHGQQIWIRARDARGDLDDVHTRMMRKYEQVPTWWYLALLGGCLALCFITCLAWPTHLPWWALMIALLIAIIWTVPIGIVQGSTNIQIGLNVFTEYIIGYMLPGRPLGMMLFKTYGYITMAQALSFIQDLKIGHYLKIRPRSLFWAQVIATFWSCFVQLAVIIWGLGNIEGVCERDQPNRFICPGGRVFFASSVLWGLIGPARIFSGEAMYAGLQYFWVAGALAPIFFYILARMFPRSKVRFVNTPILFGGTLMLPPATPLNYLAWGIVGFGFQKYIRYRFTGWWMRFNYITSAALDTGLAICTIVIITTLQLPNISFPSWWGNTAALKTMDQMGTAIIDPVPPGETFGPRSW

SEQ ID NO: 6964 - protein, 320 aa, Coccidioides immitis RS
MATNSIKLLTGNSHPELAQLVADRLGIELTRVMVSQYSNQETSVTIGESVRDEDVFILQSTRPNDINDGLMELLIMINACKTASARRITAVIPNFPYARQDKKDKSRAPITAKLMANMLQTAGCNHVITMDLHASQIQGFFNVPVDNLYAEPSMLRWIRQNLDVSNCVIVSPDAGGAKRATAIADRLDLQFALIHKERPRPNEVSRMVLVGSVKDKIAIIVDDMADTCGTLVKAASTLIDNGAKEVLAIVTHGILSGKAIETLNTGRLSRIVVTNTVPHEEKKLLCDKIETIDISPVLAEACRRTHNGESVSFLFSHAVS

SEQ ID NO: 6965 - protein, 337 aa, Coccidioides immitis RS
MGSDMRPKVLLLGKIDHAHTEWNALSDLADLIEPRSTNREDFIEECRSGCLDGVLVAYRTFGSVSITGLIDEELVNALPKSMRFLAHCGAGYDQIDVHACSARSPPLLVSNVPTAVDDSTADVNMFLIIGTLRNFNTGMQALREGKWKGKPLPALGHDPQGKTLGILGMGGIGRNLKKKAEAFGMKIIYHNRRKLSEELSDGGEYVSFDELLAQSDVLSLNLPLNKNTQHIIGAPEFAKMKDGIIVVNTARGAVMDEEALVQALDSGKVLSAGLDVFEDEPNVHPGLLRNPNVMLVPHMGTWSVETQTAMEEWAMDNIRRVLETGKLKSPVPEQADM

SEQ ID NO: 6966 - protein, 508 aa, Coccidioides immitis RS
MPSLESPHKEDPRLLLVSNRLPITIKRSDDGKYDSSMSSGGLVSGLSGLSKTTRFQWYGWPGLEVPEDEIEIVTKRLKDEYNAVPVFIDDELADRHYNGFSNSILWPLFHYHPGEITFDESAWNAYRDANRLFAKAIAKDVRDGDLVWVHDYHLMLLPSMLREEIGETKSNVKIGFFLHTPFPSSEIYRILPVRNELLLGVLHCDLIGFHTYDYARHFLSSCSRILGLSTTPNGVEFQGKMVSVGAFPIGIDPDKFSEGLKKEKVQKRIAQLEQKFQGVKLMVGVDRLDYIKGVPQKLHALEVFLTDHPEWIGKVVLVQVAVPSRQDVEEYQNLRAVVNELVGRINGKFGTVEFMPIHFMHKSVNFDELIALYAVSDACIVSSTRDGMNLVSYEYIATQHKRHGVLVLSEFAGAAQSLNGSIIVNPWNTEELAAAYQEAVTMSDEQRALNYSKLEKYVHKFTSAFWGQSFVSELTRISAHGEKKLLLRRSSVAPNAAADVINNDIDGH

SEQ ID NO: 6967 - protein, 433 aa, Coccidioides immitis RS
MSNTDFLGRAIDTVRKAIEHDNAGEYEKAYQTYYSALELFMLALKWEKNPKSKEMIRAKTGEYMERAEKLKNHLAGTDNRKKPSAVGANGKVAHGSGKGGKDDDDDDADTKKLRGALAGAILSEKPNVKWEDVAGLDAAKEALKEAVILPIKFPNLFTGRRQPWKGILLYGPPGTGKSYLAKAVATEANSTFFSVSSSDLVSKWMGESERLVKQLFNMARENKPAIIFIDEIDALCGPRGEGESEASRRIKTELLVQMDGVGNDTKGVLILGATNIPWQLDMAIRRRFQRRVHISLPDTAARMKMFMLNVGSTPCKLTQADYRALAEMTEGYSGSDISIAVQDALMQPVRKIQSATHYKKVLLDDQEKLTPCSPGDHGAIEMSWVDVDADKLLEPPLLLRDFVKAVKSSRPTVSEEDLEKNEEWTKKFGSEGA

SEQ ID NO: 6968 - protein, 401 aa, Coccidioides immitis RS
MASQPQNGQRPQVQPCRYKTGKTLGAGSYSVVKECVHIDTGRYYAAKVINKRLMAGREHMVRNEIAVLKKVSMGHRNILTLVDYFETMNNLYLVTDLALGGELFDRICRKGSYYESDAADLIRATLSAVAYLHDHGIVHRDLKPENLLFRTPEDNADLLIADFGLSRIMDEEQFHVLTTTCGTPGYMAPEIFKKTGHGKPVDIWAIGVITYFLLCGYTPFDRDSNLEEMQAILEADYSFTPVAYWRNVSQSAREFIKRCLTIDPHARITAHEALQHPWISPPADPLNPNVPVRMGSGEDLLPVVKKNFNARRTLHKAIDTVRAINKLREGGGLMMEGAMSVDPKPERVIGDRVLQEDDEDRMEIDSRGNARGQTEEQIREQERKVKEVVTGLWSQTAARRR

SEQ ID NO: 6969 - protein, 928 aa, Coccidioides immitis RS
MAHSSAESPPMLSNSTILPTRSQTSDGVCFGEQMNSSSRPADTKGHEPSNSAAAMSGVEHGTLGTSPGTPSEAAKGAKSGIELLRRLSLMEGRPTLSAMARPEEHADLRLTGRIISASFCIPYKLRFRSGLNWELHHRPGTSALFDSFQYLASSENPWSHTLVGWTGEVENSTLQDSYFQSRPHTGSGLESLSLETPMTSLSKASAPIPVDGSHKPQPPADGIHVKKEDRDRLEKQLHSSKYGMILPVWLSDDSESPEETLHLKDQTRWRRYAEREIYPLFHYKQHGPTDGRAERRWWQDYQRMNQLFADRILEIYRPGDIVWIHDYHLFLLPSMLRQRIPEIYIGFFLHVPFPSSEFFRCLTRRKEVLTGVLGSNMIGFQSFTYSRHFSSCCTRILRFDSNSAGIDAYGAHVAVDVFPIGIDVDAVRKMAYGEPNIEKTIAEIKKLYAGKKIIIGRDRLDSARGVTQKLIAFEMFLERYPEWRDKVVLIQVTSPTSVEEEKEESEAKLSSQMSHLVSTINGRYGSLSFSPVQHYPQYLSRHEYFALLRAADVGLITSVRDGMNTTSLEYVVCQHENHGPLILSEFSGTAGSLHNAIHINPWDSGGVAAAINEALTMSYEQREEQHEALYKYVTTHTVSIWSDLYIGRLLNNLSSFNQSIATPVLDKAKLLYQYRKARRRLFMFDYDGTLTPIVKDPQAAIPSDRVVRTLKSLAADPKNSVWIISGRDQNFLEEWMGHISELGLSAEHGCFIRKPHNEVWENLTEKSNMGWQKEVLDIFQHYTERTQGSFIERKRVALTWHYRRVDPEYGAYQAKECRKHLENTVARKWDVEIMAGKANLEVRPTFVNKGEIASRLVNECQGRPEFVLCLGDDFTDEDMFRALRHSNLPKDRVFAVTVGASSKQTEASWHLLEPADVIATISLLNSCN

SEQ ID NO: 6970 - protein, 400 aa, Coccidioides immitis RS
MSSRPPVYIVSAARTPLGSFLGALSSLTAPQLGSHAIKAALERVPEIKAEDVEEVFFGNVLSANVGQNPSRQCALGAGLRESTVCTTVNKVCASGLKAIILGAQTIMTGNADIIVAGGTESMSNTPHYLPNMRTGAKYGHQTFVDGIMKDGLSDAYGKKELMGLQAEECAEDHGFTRQQQDDYAIRTYERAQAAQKSGGFDFEIAPIEIPGVRGKPSTVVDKDEEPKNLHPEKLRAIKPAFIPNGGTVTAPNSSPLNDGAAAVVLVSESKLKELNIKPLAKILGWGDAAKAPSKFTTAPSLAIPKALKHAGVEQSAIDAFEVNEAFSVVALANMKLLGLSEDKVNLHGGAVALGHPLGASGARILTTLLGVLREKKGKLGCVGICNGGGGASAMVIEYLQ

SEQ ID NO: 6971 - protein, 241 aa, Coccidioides immitis RS
MRPSLRRWVVLSVVNYAAKPRSVVCSALSAHSTVVPQLLCQQRSHSTKVFESKMAASTREALRSNGIIPDVLDDFEPKYTLKVTYPSTKTEINLGDHISTKQAHDPPVYEFHPVSPTEGTEPNKAYSLVLTDPDAKSRQEPIWSEFCHWVVGNASNPRTSGGKSGGTSLEKYMPPSPPPGTGDHRYVFVLLKGDASNVGKLKAPKERKQWGYGKQRHGVRQWASEHGLEVVGANFFFAQHD

SEQ ID NO: 6972 - protein, 180 aa, Coccidioides immitis RS
MSRPSGQPSMPPPPPAHQPVQQSQPSPEMVTGPAEESPLYVNAKQFHRILKRRVARQKLEEQLRLTSKGRKPYLHESRHNHAMRRPRGPGGRFLTAEEVAAMEKQQAANATGVENIPNHAASKDHTSGSTGVASSTTIGQKRKAAGAMNSNQSKKVKPGLQQSRISMAEGGLENDVDADG

SEQ ID NO: 6973 - protein, 350 aa, Coccidioides immitis RS
MPRPPSPPEQSKDMAVSYSSGHSPGHTPKLPSFRELLPDYLHDEIDSASYHLQTGSHQQQHPHHQHSSRLPPVSRQEPPSRRGSGTRHHPGSVGRGQDYDSSLMRQNAYLEGQSRYHSHHLPQERQYYDDRAPLTPSSRSSSRHLDPSDPRNFLPPLRNYEALPGQIPSPVGRHDDRGYERAYDAERASYASSRSSTLSSMTHGTAGPYPSAYNSPIHGSYQGYYGGDLESTAHSAYMDTKPTKYDPLGDTADSKSKKRRGNLPKPTTDILRAWFYEHLDHPYPSEQDKQMFMTRTGLTISQISNWFINARRRHLPALRNQGRIPDPDRMRPSSSMSEDDPDYDTSPSRR

SEQ ID NO: 6974 - protein, 819 aa, Coccidioides immitis RS
MRSPNVLTTFTSRIPSRHVAHQSNTRFTVGSQRLFTRRAIEASRKYRNAHQTLDLRGIERQGLSTPGSPLLAIKNAVDPSAFAPARLEHVRFLSTSRSIQEPARPATSANKSKVAEEPTQVVLTEQDDLQKGFELSEKASQAAHINLSAKLAKDGLAHGKKAGIREIWRLVKIARPEAKVLSVAFMFLLASSSVSMSIPFSIGKILDIATNPSSEALELFGLSLPWFYGALAGVLSLGAAANYGRIIILRIVGERIVARLRSRLFRRTYVQDAEFFDANRVGDLISRLSSDTIIVGKSITQNLSDGLRSAVSGIAGFGMMAYVSLKLSGILALLFPPVAIAAFFYGRAIRNLSRKIQKNLGTLTKIAEERLGNVRTSQSFAGERLEVSRYNHQVKRIFELGKKESFISATFFSATGFTGNMTILALLYVGGGMVQSGGITIGELTSFLMYTVYAGSSMFGLSSFYSELMKGVGAASRLFELQDRAPTISPTVGTKVKSAQGPIRFENVKFSYPTRPAVTIFKDLDFEIPQGANVAIVGPSGGGKSTIAALLLRFYSPNTGKIFIDGKDITTMNAKSLRRKIGVVSQEPVLFSGTIAENISYGKPEATRAEIIVAARKANCQFISDFPDGLDTHVGARGAQLSGGQKQRIAIARALIKDPDILILDEATSALDAESETLVNSALAALFRGSNTTISIAHRLSTIKRSDTIIVLDSDGRVAEQGSYKDLSSRPDGAFTKLMEWQMNGGESGMTPVAHYEGSAIRGPPSEAEELQQMLQEGEDEEYDESGEVEEEEQDQAKQLESAKSDGEVGERASAAPKL

SEQ ID NO: 6975 - protein, 320 aa, Coccidioides immitis RS
MSIVRSRSLGFIGIGAMGRPMVENLASKLPPTSIINIYDVSEKAMDELSMRNDGKIVKCSSAKDVAEKSDIIITMVPEGLHVRQVYLDSTAGICTADISNKLIIDCSTIDTATSLSIKENISAKFPTASFYDAPVSGGVIGAKKGTIAFFLGCANDDPNLPQLAELASMMGKQVIPCGGPSLGLAAKLSNNYLSGLIAIACSEAMNMGMRSGLDPRVLANVYAAGTAQNTICDRFNPVPGVYPDSPSSNGYKEGFKVQLMKKDIGLAVEMAQRVGARLALGEAGLKAYADASEDPRCRDLDSRVVYRFLGGIEDWEGREQ

SEQ ID NO: 6976 - protein, 585 aa, Coccidioides immitis RS
MYNRAMVPAPNPRLTELFDQLRQEYENQSRSHGECEHQLTGQLQEMEMIRQRVTQLEQAHIDMKQKYEAEIRGLRMELESRGIHLPPSHVGGPPTHGGLSQAPPPALGHGPSNLFGGIIANQGGGPPALAPPPPQDQQQPPQHSLQPPASGAQGPPQPQQGAFGGYQPNSAVNGYGPPPPAPTSSPGPGKGRANRAPPGPATPQQNQPVAYADPRESPQIPQPTPGQPIPYRVGNALGELEPDKLPPTQKKEGTDWYAVFNPEIPRVLDVELVHTLSHNSVVCCVKFSSDGKYVATGCNRSAQIFDVASGQLVTTLQDDTANKEGDLYIRSVCFSPDGKFLATGAEDRQIRVWDIANRKIRHIFAGHENDIYSLDYSRNGRYIASGSGDKTVRMWDVYDGKQELILSIEDGVTTVAISPDGRYVAAGSLDRSVRVWDTTTGYLVERLESPDGHRDSVYSVAFAPNGRDLVSGSLDKTIKMWELTPPRGIMAGSGPKGGKCVRTFEGHKDFVLSVCFTPDGHWVLSGSKDRGVQFWDVMTGHAQMMLQGHRNSVISVAPSPTGQLFATGSGDCRAKIWSYGPWGRR

SEQ ID NO: 6977 - protein, 613 aa, Coccidioides immitis RS
MAPITFSDPVRPGAGAARDSLELASLASSESRNQTSRSSSPSGISSSRRVSLENQDPLSDSPYDITRQRHARSYSVSSAFDFGSNLFPLSQTVGGYAPLGAPSASSLEHHVGLVDGSLEKRKTLTYLNGLSLIIGLIIGSGIFSSPGRVSTNTGSPGASLIIWAVAGVLAWTGAASYAELGGAIPLNGGAQVYLAKIFGELAGFLFAWCAVFVLKPGSAAIIAIIFGEYVVRAIVGADADMISPWINKGVALLGIVFVTFMNCISTRLGTRIGDLFMFFKFVALLGVTITGIIVACTGLSYDGKPNMDWKTTGWFEGTNKDISSWAVALYAGLWAFDGWDNTNYVTGEFKHANRDLPRVIHTAMPLVILCYILANVAYFFVLPSSTIAATNTVAVQFGGKVFGPIGALIIALVVSGSCIGALNATTFTSGRLVYAAGREGYLPSIFSKIGIGGSASPTGGRLRTRSWFHKLLIRLLGDDIGIGYTPIYAMIFNSTLCVCYVAVGEFGTLVTFYGVAGYTFYFLTVLGLIVLRIREPHLERPYKTWIATPIIFCCLLSLQPVFRYISGEYPSEMGKANWQGGGGSSGGDGGGSEGGKPPFASIYHRSNVFKQVG

SEQ ID NO: 6978 - protein, 309 aa, Coccidioides immitis RS
MADQLAWIGLGNMGRGMVRNLIAKGSLSQPLILYNRTQSRATSFSETLTAGSTTVASSVAEAVLPASIIFTCLGDDKAVEATIDAALQSTDVKGKLFVDCSTVHPDTSRKLEKLLESRGASFIACPVFGAPPAADAGQLVCVMAGKRHLIERVKPYFAGVVGRANIDLSETSEDPGRAAMLKVLGNSMIFQMVSAVSEGMVVAEKSGLGVGEVHKFLEAVFPGPYVGYSKRMISGDYFTREEPLFAVDWARKDVAHVLDLAKSVGAEMKGTERVDEYLKEVKAHSGEKGDIAAIYGVAREHAGLKFENK

SEQ ID NO: 6979 - protein, 434 aa, Coccidioides immitis RS
MHPSLRAAVRLGSMPKPTQRLAQVQRQFTSSAARRKEIQDAYILSAARTPTAKFNGSFVSVSAPQLGAVAIKSAIEKSKVPAEKITDVYMGCVLQGSIGQSPARQASMFAGLSPIVEALTINKVCASGMKAVVLAAQNVQLGLAEAQVAGGMENMSRVPYYFPRASQQAPFGNATMEDGLIKDGLWDVYNKFHMGVCAENTAKKYNITRQDQDEYAIRSYQRAQAAWKENKFADEIAPVTVKNKKGEVVISRDEGFEDLRADKMAALKPAFVRDGTGTVTAGNASTLNDGASALVITNEALAREYGSGSRVLARIVSSADAAIDPIDFPVAPAKAVPIALERAGLTKDQISIWEFNEAFAAVIKANEKILGLENATVNPLGGAISLGHALGSSGSRILTTLLHQLKPGEYGCAAICNGGGAATAIIVQRVEKVQ

SEQ ID NO: 6980 - protein, 67 aa, Streptomyces nodosus
MAQGTVKWFNAEKGYGFIAVDGGADVFVHYSAIQMDGYRTLEEGQRVEFEISQGQKGPQADMVRVAG

SEQ ID NO: 6981 - protein, 282 aa, Catharanthus roseus
MVNFSEAEGENSRKREKSFFPQEEENSGNENFDGYFHHPEKKRRLTADQVQFLEKSFEVENKLEPERKVQLAKELGLQPRQVAIWFQNRRARYKTKQLEKEYDSLKSSFDKLNADYDSLFKENEKLKNEVKLLTEKLLMREKEKGKSKTCDSLCGFDIEPDEKQLASNSAVCLPGIKQEDAASSAKSDVFDSDSPHCTDGNHSSNVFEAELSDFSQDEDDNLSISLLQPSYVFQNLKMNAMMNCSRIRVIWGFPLKIKLVGSGVTDDHDSLCCRISRDYFLM

SEQ ID NO: 6982 - protein, 263 aa, Catharanthus roseus
ASFLGKRSMSFSGVDICDQDGVGGGGGHGGEDDLSDDGSQLGEKKRRLNMEQVKTLEKNFELGNKLEPERKMQLARALGLQPRQIAIWFQNRRARWKTKQLEKDYDILKRQFEAIKAENDALQAQNQKLHAEIMALKNREPTESINLNKETEGSCSNRSENSSDNIKLDISRTTPAIDSHPQTSRPFFPSSLIRPNTAQQLFQTTSSSSRPPPADHHHLIQCQNNNNNNPTATVKEESSLCNMFCTIDDQTGFWPWLEQHHFN

SEQ ID NO: 6983 - protein, 249 aa, Beta vulgaris
MEFPTQTMEGSPSSQRKMGRGKIEIKRIENTTNRQVTFCKRRNGLLKKAYELSVLCDAEVALIVFSSRGRLYEYANHSCSVKGTIDRYKKACSDQSGAGSVAEANAQYYQQEAAKLRNQIRTATENNRLLSRHMMGEGLSSLSMKELKNLETKLERGISRIRSKKNELLFAEIEFMQKREIELHNNNQFLRARISENERAQQSMSLMPGGSDYDLVPSQSFDSRNYFQVNALQPSSQYARQDQTPLQLV

SEQ ID NO: 6984 - protein, 484 aa, Ostreococcus tauri
MVRASARCVSKSRKIAPRASKNREDEPRHLKLHIVVAGGGLGGLFLAICLTKKGFDVTVLERTQQYRAYGGPIQLASNGTGVLKAVSQRLYDIVRQNSRSFWETTSGIKDGSNGAWLFKFDAITEIPKKLQLPFAVCVDRSDLQSCLLNEISAINEDDSYGCTELRMGTKVQSYTQDKVSGKVRAQLVGAGYVEGDILVGADGIWSDVRAQMLCEPLRGRGSQSTASHTGFKLFSDLPIYETGDFFDIGYCAYIGPNHYFVTCPDRRGRIQWYAFIKGEPDGELVGSPKGFLLHQFRDWSSEVKSLISVSDDANITQRDLWDRPPCLKGWSDGNVVLLGDSCHATMPNIGQGCGLAFEDAFVLADILSNVQDLGEIERSLKTYCAKRLGRTAAIQGLGRMNSEAIKILTPLLPIKPVIDFVVSPFLPFIFELQFGYCYSFCPSKENLEDSLSNASRMRNRHELECKDTWRDMPSTMHKESEHSV

SEQ ID NO: 6985 - protein, 271 aa, Ostreococcus tauri
MFTTRSRACVPSSARERASERAKRSQATTTTRRGLADDDAYNAAMRAYSASPYEYKHDIGLYYHRIKPFLIVGTQPQTPADVDRLRETEGVTCVFNTQQEKDWKYWNVDYDSVRARAIETGMRHVRYPFEDFSADSLREGLPSAAAMLDAEIERGETVYLHCTAGMGRSPGLAIAYMYWFLDAYNTLDGAYEGLTSIRPCGPKKESIRGATCDLLAAIESDGKVEPLKRELEENEGVVLSIVSKERIQRAVRAMLLSTSDETVAKPWWKVW

SEQ ID NO: 6986 - protein, 408 aa, Mesorhizobium sp. BNC1
MATHKDVKKVVLAYSGGLDTSIILKWLQTELGAEVVTFTADLGQGEELEPARRKAEMLGIKEIHIEDLREEFVRDFVFPMFRANALYEGTYLLGTSIARPLIAKRLVEIAAETGADAIAHGATGKGNDQVRFELTAYALNPDIKVIAPWRDWTFKSRTDLLNFARDHQIPVPSDKQGEAPFSVDANLLHSSSEGKVLEDPWSEPPEYVHQRTVSPFDAPDRATEITIGFKRGDAVSLNGEAVSPATLLAKLNDLGRDNGIGRIDLVENRFVGMKSRGVYETPGGTILLAAHRAIESITLDRGAAHLKDELMPRYAELIYNGFWYSPEREMLQALIDKSQEDVEGEVRLKLYKGNVIVTGRRSDKSLYSDALVTFEDDRGAYDQKDAAGFIRLNALRLRTLAARKRLQG

SEQ ID NO: 6987 - protein, 404 aa, Rhodospirillum rubrum ATCC 11170
MKKGDVKKVVLAYSGGLDTSIILRWLQDEYDCEVVTFTADIGQGEELEPARQKAEMMGIKEIYIEDLREEFVRDYVFPMFRANTLYEGVYLLGTSIARPLIGKRLVEIAEATGADAVSHGATGKGNDQVRFELTAYALKPDIKIIAPWRTWDLHSRTKLIEYAMRHQIPVPKDKHGEAPYSMDANLLHISYEGKALENPWTEPSEDMFRLTVSPEAAPDKAQYIEVDFERGDAVAIDGEKLTPAALLAKLNEIGGRHGVGRLDLVENRYVGMKSRGVYETPGGTILQVAHRAVESLTLDREVMHLRDELMPRYAKLIYNGFWFAPERLMLQAAIDQTQQTVTGTARLKLYKGNVSVVGRKAAKSLYRMDYVTFEEDTVYDQHDAEGFIKLNALRLRLGKMARDS

SEQ ID NO: 6988 - protein, 436 aa, Hordeum vulgare
CGVGFVANLSNEPSFNVVRDALTALGCMEHRGGCGADNDSGDGAGLMSGIPWDLFDDWASKEGLVPFERTHTGVGMVFLPQNENSMEEAKAAVEKVFTDEGLEVLGWRPVPFNLSVAGRNAKETMPNILQIFVRIAKEDDADDIERELYICRKLIERATKSASWADELYFCSLSSRTIIYKGMLRSEVLGQFYLDLQNELYKSPFAIYHRRFSTNTSPRWPLAQPMRLLGHNGEINTIQGNLNWMRSREATIQSPVWRGRENELRPFGDPKASDSANLDNAAELLLRSGRSPAEAMMMLVPEAYKNHPTLSVKYPEVIDFYEYYKGQMEAWDGPALLLFSDGRTVGACLDRNGLRPARYWKTSDGFVYVASEVGVIPMDESKVVMKGRLGPGMMITVDLETGQVLENTEVKKNVASAKPYGTWLQESTRSIKPVNF

SEQ ID NO: 6989 - protein, 102 aa, Desulfovibrio desulfuricans subsp. desulfuricans str. G20
MYAIIETGGKQFRVEEGCKIFVEKLAADAGSEIAIDKVLMLGGDKFAVGAPYVENAKVTAEVIEHGRGEKVITFRKWRRNDSRKKQGHRQDYTALKIKTITA

SEQ ID NO: 6990 - protein, 107 aa, Citrus hybrid cultivar
MALPKAQETVSSNSVVVFSKTFCPFCVSVKELFQQLGVTFKAIELNKESDGSDIQSALAEWTGQKTVPNVFIGGKHIGGCDSTTALHREGKLVPLLTEAGAVAKTAA

SEQ ID NO: 6991 - protein, 402 aa, Thermoplasma acidophilum
MDKALLLYSGGLDTSVMIKWIQENLSMDVATLTLNVGNSDLVAIEEKARMLGADPVFVHDAKDEFAEKFIAKSIMANGSYEGYPLSTALARPLMAEKAVKYAQKIGAKYIVHGSTGRGNDQVRFEVSIRALDPSMQVLVPVREWNMMRKDEVEYAKTHGIPVKLDGKYSIDENIWGRSVEGPDLEDIGKGVPEDVYEWVVPPWKANAEHTLKIAFDGGIPSEIDGEKMKLADLIVFLNTLAGSSGIGLIDHMENRVVGLKSHEVYECPAATVITHAHRYLESLILNRNEAEVKMNMDWQFAKFVYGGLWHDPVMNAVNAAEAEFNRDISGEIKIRMSHGIMYIEGAWGNSFLYSKDLINYSSMAFDQRASKGFIDIYGNATVHSHNRNPKMVKEVQGSSVEF

SEQ ID NO: 6992 - protein, 278 aa, Escherichia coli
MKKNRAFLKWAGGKYPLLDDIKRHLPKGECLVEPFVGAGSVFLNTDFSRYILADINSDLISLYNIVKMRTDEYVQAARELFVPETNCAEVYYQFREEFNKSQDPFRRAVLFLYLNRYGYNGLCRYNLRGEFNVPFGRYKKPYFPEAELYHFAEKAQNAFFYCESYADSMARADDSSVVYCDPPYAPLSATANFTAYHTNSFTLEQQAHLAEIAEGLVERHIPVLISNHDTMLTREWYQRAKLHVVKVRRSISSNGGTRKKVDELLALYKPGVVSPAKK

SEQ ID NO: 6993 - protein, 628 aa, Streptoalloteichus hindustanus
MCGIVAIHAPDGGLAEADALPGMAALRARGPDGSGVWCSPTGRAVLGHTRLAVIDPDGGRQPIADEEGHRHLVANGEFYDYRRIRRELADAGHVFRTRGDSEIALHLHAREGHHALDRLRGEFAFVIWDERTGELFAARDRFGVKPLYYARHQGRLLIASEIKALLACGVPARWDTAAFAAHLQVAPPPDRTLFAGISQLPPGCYLVAGSQGVAVRRYWDLDYPLAADLEQGDEHWESHVEEVRAAIEEAVRVRMIADVPVAYHLSGGLDSTSVVATAARHDTVTAFTVRFDDPAYDESEVAERTARRLGVRHHQIDSHRADFAHHLRETVWAGESVQENAHGIARYLHSRAIRGHGFKVVLGGEGGDEIFAGYPQFQKDLALGLSPDLFAETRRGYRKLVAAGAPQHLRTLLDELGFVPSWVLDRYLSVTSPVMPLLRPEFAAEVSVTDACAPLLAATGDQLAGRATLHQSTYLFAKSWLPHYILASERLDAAQAVEARLPFFDHHLFAVARRTPLHWYTRAGATKYPLRAAMADRLPAEVSAGRKRGFFAPPVVGDDGMVAAVRDLARGSALRDNPFFRPEAVVRLVDRLADRPPAQRATAERLVQLVGSVGALAEEFGLTGGGTP

SEQ ID NO: 6994 - protein, 578 aa, Solanum tuberosum
LHHHYRRCRQNPQFPIFNPRLFSSSPGPPSSDAELRKYIGYTLLVLGSAAATYYSFPFSENARDKKAQLFRYAPLPDDLHTVSNWSGTHEVRTRTFLQPESIEELEGIVKEANVRKHKIRPVRSGLSPNGIGLTRAGMVNLALMDKVLSVDKEKKRVTVQAGIRVQQLVDEIKEFGITLQNFASIREQQIGGIVQVGAHGTGARLPPIDEQVISMKLVTPAKGTIEISKEKDLELFYLARCGLGGLGVVAEVTLQCVERQELVEHTFLSNMKDIKKNHKKFLSENKHVKYLYIPYTDAVVVVTCNPMSKRKGPPKDKPKYTTEEALQHVRDLYLESLTKYRGQVTDSGSPDEPEIVELSFTELRDKLLAMDPLNKEHVIKVNKAEAEYWRKSEGYRVGWSDEILGFDCGGHQWVSETCFPAGTLSKPSMKDLEYIEELMQLIEKESVPAPAPIEQRWTASGKSRMSPAYSLADDDIFSWVGIIMYLPTMDTRQRRQITEEFFHYRHMTQAQLWGHYSAFEHWAKIEVPKDKEELAALQARLKKKFPVDSYNQARKELDPNRILSNNMLEKLFPSSEAV

SEQ ID NO: 6995 - protein, 407 aa, Alteromonadales bacterium TW-7
MDIFLGVGVFIAIVVILVLIIIGAKSKLVASGDIIIGINGDADKAIKTSAGSKLLGALSESGIFVSSACGGGGSCGQCRVHIKEGGGDILPTELDHISKGEAREGCRLACQVNVKNDMEIELEESIFGVKKWDCEVISNDNKATFIKELKLQIPDGESVPFRAGGYIQIEAPAHHVKYADFDVPEEYRGDWNHFGFFDLESKVDEETIRAYSMANYPEEEGIIMLNVRIATPPPRNLSLPCGKMSSYIWSLKEGDKVTISGPFGEFFAKETEAEMVFVGGGAGMAPMRSHIFDQLKRLNSKRKMSFWYGARSKREMFYVEDFDGLAAENDNFVWHTALSDPQPEDNWEGYTGFIHNVLFENYLKDHEAPEDCEFYMCGPPMMNAAVITMLKDLGVEDENILLDDFGG

SEQ ID NO: 6996 - protein, 409 aa, Alteromonadales bacterium TW-7
MENTIVELKFSLDTFYFLISGILVMWMAAGFAMLEAGLVRSKNTTEILTKNIALYSIACTMFLLVGYNIMYVDNAEGGIMPSLGALIGTQAADADHSLESDFFFQVVFVATAMSIVSGAVAERMKLWAFLAFTVVLTGFIYPMEGYWTWGGGFLSEMGFVDFAGSAIVHGAGAAAALAGVILLGARKGKYGKNGEVYPIPGSNLPLATLGTFILWMGWFGFNGGSQLLLSDKENATAVGQILLNTNAAAAMGAIAALFVCKVLWGKADLTMVLNGALAGLVVITADPLSPSPLMACLLGLLGGSLVVFSIIALDKIKIDDPVGAISVHGVCGALGIMLVPLSNGDASVINQLIGLVTILAFVFVASLIVWAILKYTMGIRVTEEEELNGMDQHDCGVEAYPEFVSVRNN

SEQ ID NO: 6997 - protein, 400 aa, Alteromonadales bacterium TW-7
MSSIKKVVLAYSGGLDTSAIVPWLKENYGCEVIAFVADVGQGAEELEGVEEKAIASGASECYVVDLKDEMVSEYIYPTLKTGSIYEGTYLLGTSMARPIIAKAQVEIARKVGADALSHGCTGKGNDQVRFESCFAALAPDLKVIAPWREWDLSSRESLLDYLAERDIPCSASATKIYSRDANAWHISHEGGELEDPWCEPSDQVWTWTNSPEQAPDKAELVTLKVFEGEVVAVNGEELKPYDCLVKLNDIASPHGVGRVDIVENRLVGMKSRGCYETPGGTVIMAALQAIDELVLDKSSRKWKEVLGGEFSHLVYDGRWFTPLKDSILAGAEALSTLATGEVVLKLYKGQVTAVQKKSPNSLYSEDFATFGEDDVYDQSHAEGFIRLFSLSSRISALSKK

SEQ ID NO: 6998 - protein, 186 aa, Alteromonadales bacterium TW-7
MSIKLHKALFLDRDGVVNVDHGYVYQSEKFEFIKGIFSTCKKFYDAGYKIIVVTNQSGIGRGYYTEADFLALTQWMKTQFSHHNIEIADVYFCPHHPKKALPEYLKQCDCRKPAPGMLLQGIKEHNVDPEQSIMVGDKLSDMQAAQKAGIATRVLVRSGQSFDESAKQNADLVIDSIDDLTKRLPL

SEQ ID NO: 6999 - protein, 369 aa, Alteromonadales bacterium TW-7
MSQEIQAFNSKVEHCLCAPGDGVFTVNTAKERKAALRNKLYGQTENVDTLWRESLNELPHSPHKAVMLGISSDCGGGILRGANWGPLFVRSALIDQHPECHSFDLGDVRVIPHLLHDKYLNDATISNCQKALYGNENNDYYVSPLSITEDVCDSFYATFKDKGIFGIGGDHSISYPLTKAYLKAKREQGKRTAIIHFDAHTDLLVERLGIDLCFGSWCTHILEFLPAPHHLIQFGIRSSGKPKSHWENTFGVKQHWAHEIIERGAVAVAAETIAQLKADNVDEVYVSFDIDALDAEFASATGTPEDNGLTPKHALDILSAIADEFPITGADMMEIAPFTDSSLVGQASSETTLKEGAKISAFLINAMNK

SEQ ID NO: 7000 - protein, 638 aa, Alteromonadales bacterium TW-7
MGKIIGIDLGTTNSCVAVLDGDKARVIENAEGDRTTPSIIAYTQDGETLVGQSAKRQAVTNPTNTLFAIKRLIGRRFEDEEVQRDIGIMPFKIIKADNGDAWVEAGGEKRAAPQISAEVLKKMKKTAEDFLGEEVTEAVITVPAYFNDSQRQATKDAGRIAGLEVKRIINEPTAAALAYGMDKNKGENIVAVYDLGGGTFDLSIIEIDEVEGEHTFEVLATNGDTHLGGEDFDNRVINYLVAEFKKDQGLDLKTDPLAMQRVKEAAEKAKIELSSAQSTEVNLPYVTADATGPKHMNVKLTRAKLESLVEDLVTKSLEPLKRALADSDLSVGDINDIILVGGQTRMPLVQKTVADFFGKEPRKDVNPDEAVAVGAAIQGGVLAGDVKDVLLLDVSPLSLGIETMGSVMTALIEKNTTIPTKKSQTFSTAEDNQSAVTIHVLQGERKRSSDNKSLGQFNLEGIRPAQRGTPQIEVTFDVDADGILHVSAKDKDTGKEQKITIQASSGLSDEEVEKMVRDAEAHAEEDKKFEELVAVRNQADAMVHGTRKQVEEAGDALPSEDKEAIEAAVVDLEAAIKSDNKDEIEAKTQALAKKSQKLMEIAQAKAQQGQADAGEQQQSAKQDDDVVDAEFEEVKDDK

SEQ ID NO: 7001 - protein, 357 aa, Alteromonadales bacterium TW-7
MSSLTMRPCGDFRTSYKQDNTIYETKTIRNVAIIAIALLCCAPFLVDAYFLTLFIQISYLGIAALGLNILVGYTGQISLGHGAFFGFGAFASAWLNMSFGIPVLLCIPIAGFLTMLVGMLFGLPASRIKGLYLAIATLAAQFILEDFFARAQWFTGGSAGSSADPVSIFGFVFNTDQSFFYIALFALVFMYIWGCNLMRSREGRAFIAVRDHYLSAEIMGIKLNKYRLLSFGVSSFYAGIGGALYAHYLGYVSAEGFTLFMSIQFLAMIIIGGLGSIKGTLMGVVFMVFLPEMLESGVGLMKMTDWGNIPMVVDGLAYIKEMAIGLVIILFLIFEPEGMAHRWAQIKNYWKFYPFSY

SEQ ID NO: 7002 - protein, 409 aa, Alteromonadales bacterium TW-7
MSKVSLAKDKIKILLLEGVHQSAVETLKRNGYSNIDYVKTSLPEDELKERIKDAHFVGLRSRTHINEAVLDAAEKLIAIGCFCIGTNQVDLSNARQRGIAVFNAPFSNTRSVAELVLGEILLLLRGIPERNAAAHRGEWLKTATGSFEARGKTLGIIGYGHIGTQLGIMAENIGMNVEFYDIEDKLTLGNAKQVHNLTQLLQRSDVISLHVPETPQTKNLIGSAELAVMKQGAILINASRGTVVDIDALAESLSEKKLSGAAIDVFPVEPKSNDEEFVSPLRDFDNVILTPHIGGSTQEAQENIGIEVAGKLAKYSDNGSTITAVNFPEVSLPELANRSRLLHVHHNRPGVLTQINQAFAQHGINIAAQYLQTDEAIGYVVIDVDTDHSEVALKELSAVEGTIRARILH

SEQ ID NO: 7003 - protein, 405 aa, Alteromonadales bacterium TW-7
MKLPIYLDYAATTPVDERVAKEMMQCLTMDGKFGNPASRSHRFGWQAEEAVDQARTDIADLVNADPREIVFTSGATESNNLAIKGAAQFYKKKGKHVITAKTEHKAVIDTCRELERQGFEVTYMDVEENGLLDLQKLADTMRDDTVLVSIMHVNNELGVIQDIATIGEMCRERKIMFHVDAAQSAGKVLIDVQQLKVDFMSFSAHKAYGPKGVGALYVRRKPRARLEAQMHGGGHERGMRSGTLATHQLVGMGTAFRIAKEDFEKDFAHISALRKRLIDGIMADMDEVYFNGTQDQSVPGIVNISFNFVEGESLLMAVKDIAVSSGSACTSASLEPSYVLRALGRNDELAHSSIRFSIGRFTTEEEIDYTVELMKNSIGRLREMSPLWEMHQEGIDLDSVEWAHH

SEQ ID NO: 7004 - protein, 323 aa, Alteromonadales bacterium TW-7
MATLNFIEQGLRVLDIERQALSDIAQYVDENFHQACQLIYDCQGRTIVIGMGKSGHIGNKIAATLASTGSPAFFVHPGEASHGDLGMITKNDVVMLISNSGETSEVLNIIPVLKRLGAKMIAMTGNASSTMATLANVHICIKVQKEACSLGLAPTASTTATLAMGDAMAVALLEARGFTADDFALSHPGGSLGKRLLLTLKDVMHSGKNTPIINVTQTIKDALIEMSAKGLGMTAIVDSQQQLVGLFTDGDLRRILEQRIDIHTTQIDVVMTKSCTTATQDILAAEALNIMEQKRINGLIIVNEQNHPIGALNMQDLLKAGVL

SEQ ID NO: 7005 - protein, 404 aa, Alteromonadales bacterium TW-7
MPTPAPKSQHVLVLNCGSSSLKFAIIDANTGHEIISGLAERLGAATPSVKYKYKGDKTLIDLASEQAHAEAINTLVTLIKDHKLDEQLIAVGHRVVHGGEHFTKSVLINDKVIESITQAATLAPLHGHANLLGISSAQDSFKGLPQIAVFDTAFHQTMDKVAYLYALPYNLYTEFGVRRYGFHGTSHFYVAGQTAKLLNQPIEKSNFISAHLGNGCSVCAIKNGDSVDTSMGLTPLEGLVMGTRSGDIDPGLFNFLTTQLDYSAQQIDDLLNQKSGLLGISELSNDCRTIEEAAMAGNQQAALALEMFCYRLSKQIASYMVPLQRLDALIFTGGIGENSDIIRKKVITQLGFLGMECDTQANLDARFGQQGVISTEQSRIKAVVMPTNEEWVIALDSANIVKEL

SEQ ID NO: 7006 - protein, 717 aa, Alteromonadales bacterium TW-7
MAHRIMLIPISTGVGLTSVSVGLVRALEQKAVKVNFFKPIAQPRSGETGPEKSTQIIKQGSPIDPPTPFALDYAEQMIGDAKGDDLLEEIVERFESKINDDEVAIIEGMVPTRKQPYAGRVNREIAQTLGADIVFVLTPGNDNITQLEDRLEIAAGNYGGIDHPRVLGCIFNKVNAPLDEEGRARADLVDSYKPDEVDNELNRLASLPIFRKNPFMLLGAIPWDFDLVAPRVKDLSAYLKATIINEGDMLHRRLRRITFCARTVSNILNHFTPGALLVTPGDRSDILVAACLSAMNGTKIGAILLTGGFMPEQRIMALCEQAMQTGLPILATEADTWRTSLLLHNFNMEVPSDDDQRIEKVKSHNAEYIDSDWLNSLAKNVGKTRKLSPPAFRYLLTDKARKAGKTVVLPEGNEPRTIKAAAICGQRGIAKTILLGDREEIMRIAEQQGIELNENVSIVEPSSIINDYVEPMVEIRKSKGLTAVVAQEQLLDNVVLGTMMLEQGKVDGLVSGAVNTTANTIRPPLQLIKTAPGSSLVSSVFFMLLPDQVLVYGDCAINPDPNAEQLADIAIQSADSAAAFGIEPRVAMISYSTGTSGTGADVEKVREATKIAQQKRPDLIIDGPLQYDAAIMENVALKKAPNSPVAGKATVFIFPDLNTGNTTYKAVQRSADLISIGPMLQGMRKPVNDLSRGALVDDIVYTIALTAIQAAQVEALN

SEQ ID NO: 7007 - protein, 405 aa, Alteromonadales bacterium TW-7
MSDIKKSHKLEGVCYDIRGPVLAQAKKMEDDGQKVLKLNIGNPAAFGFDMPEDMHRDIIRNLYSAQGYCDSKGLYSARVAVYQHYQQRGLNNLDVDNIYIGNGVSELIQMITQALLNNDDEVLIPAPDYPLWTASVKLAGGNPVHYLCDEEQDWFPDIDDIKSKITSKTKALVLINPNNPTGAVYSDDLLKQLIDIAREHKLLLLSDEIYEKILYDGVSHTSIASLCDDVPMITFNGLAKTYRAAGLRMGWMVLSGKTSAMDDLSKGLDILSSMRLCANVPAQYAIQQALGGVQSIDNLINPGGRLYEQRDIAWRGLNAIEGISCKKPKGALYAFAKVDTAHFNVKNDEQMMFDLLKAEKILLVHGRAFNWPEPDHFRLVFLPNKDDLTDAMQKMQRFFKDYRQL

SEQ ID NO: 7008 - protein, 347 aa, Alteromonadales bacterium TW-7
MFTQALNQFSTWFLHHQTFAGYIEPIMQVFKPAWRAGQFRAQLMSSESLNGEFLSLQLKPSKQWPAHTAGQHVSLTIEMNGRLLTRVFTVASSVKYFNETGFIRLLIKTSEQGRFTGLLNNKAKAGTWCNISAATGEFVFKNTHTPATLIAGGSGITPMIAMLDDYLAQTTKAINLVYYAKSGEHQCVDELRELATQFSNFSFLLLTREQSSDITSNIKHWENPDIYCCGPLGFMQRVQAFAQKHDLNYYQEAFGLALPKVNNEDQFTVKVNSQAHIVEGNDVLLSQFEVKKLPVKRGCGIGICHQCQCIKKSGIVRNLKTGEMSDNGEQLIQLCISQPVSDLELQL

SEQ ID NO: 7009 - protein, 748 aa, Alteromonadales bacterium TW-7
MSDSLLSSEQVYLDANATTPVLPCIAQVVSHTMQICFGNPSSPHITGIQAKHLLEQTRENARTVIGAKEGNILFTSGATEGIQTAVVSTLINAKTHKIDNPVLLYGATEHKAVPNTLKHWNDVLGINAKILAIPVDSNGILDLTFIAEHIPNALMICTMAVNNETGVYQDLDAIEQTIRFLNPDVSWMVDCVQALGKKQLNLSATTIDYAPFSGHKLYAPKGIGFLYIRAGSAYTPFIAGGGQESGMRSGTENLPGIAGLNKLFSLLLDRSDTTFKPIDVLNSYRAQIRCAIEDAFGEVTFNHSFEHSVPTTLNFAVNELTSKEVIDLFDAAGIRVSGGSACSTGSSTSFVLDAMGVKQWQSENAIRLSFGPAATAEEIANACESIRALKAILQANCLIVSDSATPHQDVCALGLTQFRHHGACCWLYVSENKQAIIIDPIVELIPRLEKIANTQNLTIKAVLNTHAHQERHCGVTLLRSVLGSRCDDIEIDKLGWPIHAAYIDLNNHRLEKIATPGHSEDSVSYVLKNEDNHINYCFCGDLILPAGLGNTSLAGGNAKAMAHSILALAEQLDETSVICSGHDYLQCFAMNWEAEQQQTPLLNGLINGQMSIDDFVIKKQLDDQAKEKSRSQLCGYVTALPESSIQQLNFDSAKAMLTKNDAYLIDTREPYEHGANNVSQLFCTKKIKTLNIPLSRMANALMEGQLSKSGKYILLCRSGNRSKLAAANLTQLGYQTVYNLEGGLALSL

SEQ ID NO: 7010 - protein, 191 aa, Alteromonadales bacterium TW-7
MNSDFIKTRFQLSPTAAPNQIKDSRNKRASAVMLPIIDVAGHAHILLCKRPTYLHHHPGEICLPGGKFEASDKTLRTTALRELKEELNIAHKDVNILGNLPEYSTLTGFSIRPYVCVLNKNTQWENDHNEVQASFLLSLDELSTEANWQPLPFQRFGKEITLQGFVTPHGLLWGATASIIKNFTKQLALPV

SEQ ID NO: 7011 - protein, 67 aa, Alteromonadales bacterium TW-7
MSVSGKVKFFNEAKGFGFIEQENGPDVFVHFSAISGSGFRTLSEGQAVTFSIKQGQKGPEAENVEAA

SEQ ID NO: 7012 - protein, 112 aa, Alteromonadales bacterium TW-7
METIDKIKQQISENPIILFMKGSPKLPNCGFSSQASQALMSCGEPFAYVDILLNPDIRAELPAYANWPTFPQLWVEGELIGGCDIIIEMFQRGELQPLITETAAKYKEADAE

SEQ ID NO: 7013 - protein, 1485 aa, Alteromonadales bacterium TW-7
MLYDSKLEKENCGFGLIAQVNGQASHRLIRTAITGLDRMQHRGGISADGKTGDGCGLLLQKPDSFFRAIASEHNWHLGKNYAVGMIFLNSDPVLAQAAKEILSEELEKETLNILGWREVPTDPSMLGPIAVQQLPGFEQIFVSAPEGWRSKDLERRLYVARRRAEKRLADDESFYIASLSGLVTIYKGLMMPADLPNFYLDLADIRMTSAICVFHQRFSTNTQPRWPLAQPFRYLAHNGEINTIEGNRQWARARSYKFSSPLIPDLQSAAPFVNETGSDSSSLDNMLELFLAGGMDLFRAMRMLVPPAWQKNRAMDDDLRAFYDFNSMHMEPWDGPAGIVMSDGRFAACNLDRNGLRPARYVITQDGFITLASEVGIWDYTADEVVEKGRVGPGELLVIDTKLGKIWHSDEIDQDLKSRHPYKSWLEENVKRLTPFEELKEQDAGNRSFDDETLAKYQKMFGYTNEELDSVIRVMGENGQEATGSMGDDTPFAVLSEGHRSLYDYFRQKFAQVTNPPIDPLRENHVMSLATCIGSEQNVFNETTGHAKRLQFDTPILMYADMQQLLNADEAHYSYCKIDITYTVEEGLENAVKRICDKAKEKAAAGSIMLILTDRNFDDVNLPIPAAMAVGAVQKCLVDNNLRCESNIIIETGSVRDPHQFAVLLGFGATAIYPYLAYESLVAMSDSKIIDKSYCEVTLAYRKAVNKGLYKIMSKMGISTVASYRCSMLFEAVGLSDTVVDMCFKGVASRIKGACFTDFDDDQQSLHKLALSKRKLLSHGGLFKYVHGGEYHAYNPDVIQTLQVAVRSGEYRDYNEYAKLVNNRPISTLRDMLALKLPENGISIDDVEPAEALYKRFDSAAMSIGALSPEAHEALAIAMNRLGGCSNSGEGGEDKLRYGTEKNSRIKQVASGRFGVTPHYLRSADVIQIKVAQGAKPGEGGQLPGEKVTPYIAKLRYSVPGVTLISPPPHHDIYSIEDLAQLIFDLKQVNPKALVSVKLVSEPGVGTIATGVAKAYADLITISGYDGGTGASPLTSVKYAGSPWELGLAETQQALVENGLRHRIRLQTDGGLKTGLDIIKAAILGAESFGFGTGPMVALGCKYLRICHLNNCATGVATQDETLRQKHYHGLPEMAMNYFKFIAQEAREIMASLGVANLTDLIGRLDLLEAIEGKTAKQKKIDLSSVIAQPNNPTGETLFCSAPNSSHYLGKLNESLLGKAQEAIDASSGISLVSRICNTDRSVGAMLSGYIADKHGNQGMAADPVAIELHGTAGQSFGVWNAGGLEMTLVGDANDYVGKGMAGGKLVIRPPVGSSFESHKATIIGNTCLYGATGGKLFAAGCAGERFAVRNSGVQAVVEGVGDNGCEYMTGGVVCVLGNVGVNFGAGMTGGFAYVLDERNDFEKRINPELVEVVTLEALTSHQEHLRGLIAEHLELTGSCRAESILANFELYLPMFKLVKPKSSDVKSLLGHRARSSAELRVQAQ

SEQ ID NO: 7014 - protein, 466 aa, Alteromonadales bacterium TW-7
MEFTVTSTAFSSLALPAGLVDNLSTLGYAHMTPVQAQSLPPVLEGKDIIAQAKTGSGKTAAFSLGVLAKLNVKRFRIQSLVLCPTRELAEQVAVEMRKLARGIHNIKILTLCGGVSIGPQIGSLEHGAHIIVGTPGRVDDHIRKGTLRLDDVETLVLDEADQMLDMGFQDTLDAIIECIPQNRQTLLFSATFPRAIEAIAKRVLSNPEMIKVEEEQEKSTIKQYFYKMDNNKQRYPTLKLLLLKFTPQSCVVFCNTKVETQQVCDDLADEGFSAVALHGDLEQRDRERTLIHFANKSASILVATDVAARGLDIDDMDMVINYHLAHDPQTHVHRVGRTGRAGKKGIACSIYGDAEQFKVAQIGDHYERDFEPEPMPSYNLLDKPPYKPEMVTLMIDSGKKQKVRAGDILGALTGKDGIAGRQVGKINVLDNVAFVAVERNASKPALRKLTEGNIKGRKIRARRLTR

SEQ ID NO: 7015 - protein, 69 aa, Alteromonadales bacterium TW-7
MSNTTTGTVKFFNEAKGFGFIEQESGPDVFAHFSAISGDGFKTLAEGQRVQFTVTQGQKGPQAENIVSI

SEQ ID NO: 7016 - protein, 69 aa, Alteromonadales bacterium TW-7
MSTTTTGSVKWFNEAKGFGFIEQESGPDVFAHFSAISGDGFKTLAEGQRVQFTVTQGQKGPQAENIVSI

SEQ ID NO: 7017 - protein, 910 aa, Alteromonadales bacterium TW-7
MDAKGIKQLIDKLNGHTATALESAAGFASSRSHFEVLPEHLLIKLMEEGSNGDLEHIFHFFNVNQDAVWHELLDFLNRQPAGNQSKPTFSRRLYEWLERAWLSANVQHKSDFITGAALVDSLTELLPYSPVLQLPALLDKIDSRFLAENLDKICQQSSERLNPAAKSQSANKSENSNDSAALDEYCEDLTAKAEQGKIDPVLGRNDEIRMMVDVLCRRRKNNPILVGDPGVGKTAVVEGFAQRIVDGQVPQDLQGVRLLVLDMGLLQAGAGVKGEFERRLKAVIDEVKNSSTPIIMFIDEAHTLIGAGGDAGMSDAANLLKPALARGELRTVAATTWSEYKKYFERDAALERRFQLIKVDEPTEQAAQLMLAGLKDKYQQHHNIQITDDAIEAAVVLSSRYITGRYLPDKAIDVLDTAAARVRMSFATDPAAIEAEREHINYLETRINSLNIELGQGLAVDQDKLTHLVEELVNAQSKLAELTHSRESQISTLSQINEIKQASDKDLDSESLLMLRQSLKEQNTQDNGLFSEVDADAVAQIISQWTGVPVGAMVKDQISNLINLEATIGQEVIGQQAGIAKIAQTLRVSKAGVSNDEGPLGVFLLAGPSGVGKTETARCLAKQLFGGDKFLTTINMSEYQESHTVSQLKGSPPGYVGYGEGGVLTEAVRQRPYSVILLDEVEKAHKDVMNMFYQVFERGSMRDGEGREIDFKNTVIIMTSNLGSAELIDACTPPTVIDLSPKEDDEESQQTEHEAAINEALNPAQAPINEDGTPWSVPTIGALTDLIKPQLLAFFAPALLARMQVIPYLALDSDALQSIVSLKLEAIANRLHENHKMQLRVDASVLEKLTTQCTLSDSGARMVNAVIEQQILPGIAKSILEFMAEEDMPDILTLAVDEQDEITATFADNA

SEQ ID NO: 7018 - protein, 858 aa, Alteromonadales bacterium TW-7
MRLDRFTSKFQSALSDAQSLALGRDHQFIEPVHLMYALLQQSGSSVRALFAQTGVSADELNTKLSQEIEKLFKVEGVGGDVQLSNNMATLINLCDKYAQKRKDKFISSELFVLAACDDKGPLGDILRSLNITATKIESAIKAIRGGQKVDDPNAEETRQALEKYTIDLTERAEQGKLDPVIGRDDEIRRTIQVLQRRTKNNPVLIGEPGVGKTAIAEGLAQRIINGEVPEGLKNKRVLSLDLGALVAGAKFRGEFEERLKSVLNELAKEEGQVILFIDEIHTIVGAGKSDGAMDAGNMLKPALARGELHCVGATTLDEYRKYIEKDAALERRFQKVLIEEPSVEDTIAILRGLKERYELHHSVEITDPAIVAAAQLSHRYISDRQLPDKAIDLIDEAGSSIRLQIDSKPESLDKLERRIIQLKLEDNALAKEKDEASQKRRSEMQELITDLDGQYRELDEIWNAEKASLQGTQVIKAELEQARLDLDVARRASDLQRMSELQYGRIPELERKLDLASQAEMQDMTLLKNQVGEDEIAEILSRWTGIPVSRMLQGEREKLLQMEDRLHSKVIGQDEAVVAVSNAIRRSRAGLADPNRPIGSFLFLGPTGVGKTELTKALAGFMFDTEDAMVRIDMSEFMEKHSVARLVGAPPGYVGYEEGGYLTEAVRRKPYSVILLDEIEKAHPDVFNILLQVLDDGRLTDGQGRTVDFKNTVIIMTSNLGSDIIQEQAGNNDYATLKSKVMDVLISEFRPEFINRIDETVVFHPLANQHIKEIADIQLMKLRERLTEMGYLLEISDAALDTIAASGFDPVYGARPLKRAIQQTIENPLAQKLLNGDYIPGCVIVIDAGSDGLVFTSR

SEQ ID NO: 7019 - protein, 373 aa, Alteromonadales bacterium TW-7
MIIGVPKEIKNHEYRVGMVPASVRELVNHGHQVVVETNAGMGIGFTDEDYTQAGADILATAADVFANADMIVKVKEPQAVERAMLREDQILFTYLHLAPDLPQTEDLVKSKAICIAYETVTDSRGGLPLLAPMSEVAGRMSIQAGAQALEKSNHGRGMLLGGVPGVEPAKVVVIGGGMVGRSAAQMAVGLGADVVVLDRNIDVLRALDAQFGNKVKAIYSTADALEKHVLEADLVIGGVLIPGAAAPKLVTAEHIKAMKPGAAIVDVAIDQGGCIATSKATTHADPTFIVDEVVHYCVANMPGAVPRTSTFALNNATLPFIINLANKGYKKALLDDANFLKGLNVIKGQVTYKEVAEAFNMDYVDPRTAVENA

SEQ ID NO: 7020 - protein, 72 aa, Alteromonadales bacterium TW-7
MACGKVKWFNNAKGFGFIVEDGCENDIFAHYSTIVMDGYKTLKAGQDVTFELEQGPKGLHAKNIALDGDILE

SEQ ID NO: 7021 - protein, 396 aa, Alteromonadales bacterium TW-7
MTKSNTGVVVLSAVRTAIGSFGGTLKNFTPAELGTLCAKEAIKRAHIPLNQIGSSVIGKVIHNGPQDAYLSRVIGLNAGLPISSHAVTINRLCGSGLEAIIQAAQQIQLGDVDAALAGGSESMSTSAYTLQSNRWGQKMGNSVMLDELTTTLQDPWDNNPMGITAENVAEKYKISREEQDNYAAQSHDKAAKAIEKGLFKSQIVPIEIKSRKGSQIFDTDEHVRADTSTEKLATLKPYFKENGTVTAASSSGINDGAAMLVLMSEQKAHEQGLQPIGRLIGYSCAGVEPSLMGTGPIPAVQQVLEKTGLTIDDIDIIESNEAFAAQALCVANELNFPAHKVNPNGGAIALGHPVGATGAILSTKCLYELKRIDGKYGLVTMCIGGGQGIAAIFEAL

SEQ ID NO: 7022 - protein, 781 aa, Alteromonadales bacterium TW-7
MTQTVHKFGGSSLSSAQRYERVASIILEHTQPGDCVVVSAAGKTTDTLVKLWQSYQQQDTHVVADILLQLNNHQTDLITQLLHADLKRTALRLLHSELTAISELIKNQGLKEAPLLAHGEVWSARLLALYLTQLNINACDLDARTLFTLNNGQLLHTQNAQQCAKFITPDYINVVTGFIASNTLGDTVTLGRNGSDYSATLLANYCHAKQVCIWTDTQGVYSTDPRKVSKAVKYNKVCRGQANLLARLGNPVLHAKTLSPLRNSDIKLSVRSSFDVQATPTDIVKEGNVKQKRFITTLNNIDLLTVEKLAEGEVADVSQLIQHSIHHFSQNGETYLVVPSASTYKVVSYFEGRANISESSLNGCAVVAPVNDISKLNVLAIDTLNAHAIEPRFTHQDSGYILLLTDQVIDSDILSVLHDKLINKGQEVALIIAGLGNVGEVFIEQLSAQFERFSDDFTIKLVGLIRSETLLFNPSGINIADWKKHFLSQSKVYNNQTLLNIISELDYEHKVVVDITASEAFSQLYPEFVALDCHLISANKYAGTADTAWYKALRTSISERNLHWRYNTSVGAGLPVNFALADLQNSGDKITRIEGVFSGTLSWLCSKFDGTIPFSDLVLEAQKMGFTEPDPREDLSGRDMQRKLLILARELGLELDLDAISLSALMPETLAIGGWDDFLANESTLNDFIDAHAANAKAQSSVLRYTGLLEITENKVTAQVGITYTPIGDALANLTPGDNIFVINSKWYSANALVIQGPGAGKEVTAAGIHSDLYWLVQNIK

SEQ ID NO: 7023 - protein, 289 aa, Alteromonadales bacterium TW-7
MQQKSRAFLKWAGGKYSLVDDINARLNQASSHADTLVEPFVGAGSVFLNSDFKHYILNDINADLINLYKELRNSPDEFISDAKKLFVDLNNHPDAYYEYRVQFNQSRDVYERSMLFLYMNRFGYNGLCRYNLKGIFNVPFGKYKKPYFPEKEMYFFAEKAQQATFTCLGYDDVFKLVPNNAVIYCDPPYVPLSKTASFTSYAKGGFNLDDQANLANLAEKAAFENNTPVLISNHDTVWTRKIYSQASLDQIQVKRTISPKGGTRNKVGELMAMYLPLKQPQHKLKAQKR

SEQ ID NO: 7024 - protein, 575 aa, Alteromonadales bacterium TW-7
MSKQEYNGSELVVQALKELKVKYIFGYPGGSVLDLYDALFQQNDIEHILVRHEQAATHMADGYARATGEVGVVLATSGPGATNCITGIATAYMDSIPMVVLSGQVPTSLIGDDAFQETDIVGCSRPIVKHSFNCRSAQEIPAILAKAFYIASTGRPGPVVVELPKDMLNPAVKFEYDFPATTELRTYSPNTKGHSKQIRKAVAAILEAKKLVIYSGGGIIISNTSEQLTRLVESLNAPITNTLMGLGGISGVHPNFIGMLGMHGTLEANKAMANADVILALGARFDDRVTNNVKKFCPNATIVHVDVDPTSISKTIKAHIPVVGCLDTVLKQLQDGIDKSTIQIDRSAQEDWWRQIISWREQKCLGYKQSPSEKIKPQAVIEALYKATDGEAYISSDVGQHQMFAAQYYPFKYPRQWINSGGLGTMGFGLPAAMGVKLAFPDKESVCVTGDGSIQMNIQELSTCLQYNLAVKVVSLNNRSLGMVRQWQDMVYGGRHSSSYMDSLPDFIKLVESYGHVGIQVNTLDELQPAIDKAMSITDRLVFLDILVDEKEHVYPMQIKLGGIDELWLRKGVKA

SEQ ID NO: 7025 - protein, 353 aa, Alteromonadales bacterium TW-7
MSNPYLFIDRDGTIIEEPITDKQVDSLEKLAFLPGVIPALLQLQAAGYRLVMVSNQDGLGTDSFPTADFDIAQDKMMDIMQSQGISFDEVLICPHFDEQNCDCRKPKTGLLTELMRSGKVDLARSYVIGDRQTDIGLAQNLCCEGILYDGSWPAIVTKLTTANREGRVTRNTKETQIDVAINLDQTKNGSIETGLGFFDHMLDQIRTHANIGLNIKAKGDLHIDEHHLVEDIGIALGVALKQALGTKSQIARYGFALPMDECKAEAQIDLSGRASFVLNANFSREKAGDLDVQMVEHFFKSLSDNAAISLILSVSDGNCHHQVEGLFKAFSRALRMAVAQDTTQQTASSKGCL

SEQ ID NO: 7026 - protein, 239 aa, Alteromonadales bacterium TW-7
MGHETTKVLVVDDDMRLRSLLERYLVEQGFIVRTAANSEQMDRLLERENFHLMVLDLMLPGEDGLSICRRLRQKENEIPIVMLTAKGDEVDRIIGLELGADDYIPKPFNPRELLARIKAILRRRAKEVPGAPAAEENLIAFGKFTLNLATREMSEGDKTISLTSGEFAVLKALVSHPREPLSRDKLMNLARGRDYSALERSIDVQVSRLRRMIEIDAANPRYIQTVWGLGYVFVPDGEK

SEQ ID NO: 7027 - protein, 493 aa, Alteromonadales bacterium TW-7
MNNFIMFSIDVFASLFIVFLGLLVLIVAVFYIRDVTQTKHAIRRNYPVIGRFRYFFERQGEFFRQYFFALDREEMPFNRAERSWVYRAAKNVDRTAAFGSTQSLEVTGTVMFMNCAFPTLDEEALAPSEVTLGPYCQTPYSTNSLFNVSGMSFGALSKPAVRALSKGAKLAGCWMNTGEGGLSPYHLEGGADLVFQIGTAKYGVRDENGQLSIEKLKQIAAHEQVKMFELKMSQGAKPGKGGMLPGRKVNAEIAKIRGIPEGEDSISPNGHPEIKNPSDILDMIATVRNTTGKPTGFKAVIGAYGWLETLFAEINHRGIESAPDFITIDSADGGTGAAPQPLMDSVGLPLRESLPLVVNMLEKHGLRDRVKIIVSGKLIVPSKVAWALALGADFVVSARGHMFALGCIQAMQCNKDSCPTGITTHNERLQRGLNVADKAQRVANYNKYIHYGAGLIAHSCGVTSARELKREHVRIVQESGLSEPLDKIYENYK

SEQ ID NO: 7028 - protein, 380 aa, Alteromonadales bacterium TW-7
MFNSKLPDVGVSIFSQMSELANQFSAINLSQGFPEFDTPNFLKSQITHYVQHGVNQYSPSSGVPKLQQQIASLIQKKYATELNAAKQITITSGATEALFVAIQTIVRPNDEVIVFDPAYDAYKPAIELAGGRSVHIALKAPDYTINWRTVEQKITKHTRAIVINSPHNPTAKVITQQDITELKRLVGTYKLYIVSDEVYEHIAFDGQPHLSVLRDKELLAQSFVVSSFGKTFHCTGWKMGYCIAPEHLASEFRKIHQYVTFSSFTPAQHALADMLEQQSEHVDSLSDFYQQKRDLLIRHLLGSRFTVLPSQGTYFLLLDYSDVSDLNDVEFCHWLVEQAGVAAIPLSVFYQTSPGDKVIRLCFAKNDETLKEAAHILCQL

SEQ ID NO: 7029 - protein, 650 aa, Alteromonadales bacterium TW-7
MSDMAKNLILWLVIAVVLMSVFQSFNGGEQIDRQTSYSQFVKDARNGSIQEVAIESTSGTITGTKNNGERFQTIMPIYDKDILNDLLKSDVNVKGVKPEEQSFLASIFISWFPMILLIGVWIFFMRQMQGGGGKGAMSFGKSKARLMSEDQIKTTFADVAGCDEAKEDVTELVDFLRDPSKFQKLGGSIPKGVLMVGPPGTGKTLLAKAVAGEAKVPFFTISGSDFVEMFVGVGASRVRDMFEQAKKAAPCIIFIDEIDAVGRKRGAGMGGGNDEREQTLNQMLVEMDGFGGNEGIIVIAATNRPDVLDPALLRPGRFDRQVEVGLPDIRGREQIIKVHMRKVPLGDNVDAAVIARGTPGFSGADLANLVNEAALYAARGNKRVVNMAEFDAAKDKIMMGAERKTMVMSEQEKEMTAYHEAGHAIVGRMVPEHDPVYKVSIIPRGRALGVTMYLPEQDRVSHSKELLESMISSLYGGRIAEALIYGADKVTTGASNDIERATDIARKMVTHWGLSEKLGPLLYAEDQNEMYMGGGGSRASNMSDDTAKVIDAEVRLFSDRNYERAEKILKENIDILHSMKDALMKYETIDAKQIDDLMARQPVREPRDAHDRHEPKAPQTDSVKESVSDESQSTTESSKKDETNVDDKAE

SEQ ID NO: 7030 - protein, 544 aa, Alteromonadales bacterium TW-7
MESQRTFLFIGLMLVSFLLFQEWNNDYNQPKVDPSATTQTQQANSTESDDFIPSSSESGLPASTTLAKRSVIEITTDVFKVKIDTKGGDIVESDLLQYEEVKGEETPFMLLGEFDGNQYFSQSGLIGLNGPDASANGRPTYHSEQTSYTLTGDELRVPLQFTDSNGVSFTKTYVFKKGQYDVGLEYTVNNTTSAPIQVQLYTQVKRTVQEKGSLVDQNYLGAAYGTDEEPYEKYSFSDMADKNLNESTQGGYIAFIQHYFVSAWVPKQDQTNTLYSLITSSNAAIIGTKAEPVNVQAGSEQTITSIYYMGPKESDVLEALHPDLDLTVDYGWLWFISQPLFVLLKWLYSILGNWGLAIIAITIIVKSLMYPLTKAQYTSMAKMRALQPKMAALKEKYGDDRQKFGQATMEMYKKEKVNPMGGCFPILLQMPIFLALFYVFLESTELRHAEFMLWLTDLSAQDPYYVLPILFGASMFITQKLQPMTVTDPMQQKMMTFMPVIFSVFFLWFPSGLVLYWLVSNLISIAQMLYIYRGMEKKGIKVRG

SEQ ID NO: 7031 - protein, 310 aa, Alteromonadales bacterium TW-7
MNLDTLIQPHEGDIDTFCGMIAIVGRPNVGKSTLLNEIIEQKVSITSRKPQTTRHRIMGIHTEGKHQAVYVDTPGLHIEEKRAINRLMNRAASSSIGDVELIIFVVEGTHWTADDEMVLNKVSQSGKPVMLVINKIDQVKDRDLVLPHMKLLGDKFDFVSIMPVSAKQGKNIDLIKDEVTKRLPPCEFYFPDDYVTDRSMRFMAAEVIREKLMRFMGEELPYSVTVEIEQFKWQENGVWHINGLILVERETQKRMVIGNKGEKLKVIGREARKDLEEMLDNKVFLELWVKVKSGWADDERALRSLGYGED

SEQ ID NO: 7032 - protein, 526 aa, Alteromonadales bacterium TW-7
MKENHDKYSIDNTDYTVGQDNVQKWGFDIHNPVFGISAGLIILFLVALLVTEPQTAKTALDTIKFDIINNFDALFMWAANFFVVFCLALIVSPYGNIRLGGSEAKPSHTRLSWLAMLFAAGMGIGLMFWGVAEPVAYYTGWYETPLNVAANTPEAAKLAMGATMFHWGLHPWAIYAVVSLSLAFFAYNKGLPLSIRSIFYPILGDKAWGWPGHIIDILAVLATLFGLATSLGLGAQQASAGINHVFGLEGGIGSQILVIVGVTLLAVISVVRGIDGGVKLLSNINMLIAFVLLLFVCLVGFAVAMGNVPNTVMGYVENIIPLSNPHGREDETWMHGWTVFYWAWWISWSPFVGMFIARVSRGRTIREFLIAVLLIPTLVTVLWMSIYGGIAIDQIINGVGALGLNGLTEVPLAMFHMLDELPLSNILSFIAIVLVLVFFITSSDSGSLVIDSITAGGKIDAPVPQRIFWATVEGAIAAALLWIGGTQAIEALQAGAVSTGLPFTFVLLLMCVSLVLGLRTEPRPVK

SEQ ID NO: 7033 - protein, 557 aa, Alteromonadales bacterium TW-7
MCSIFGVLDIKSDPAQLRTQAIEMSKLLRHRGPDWSGVYASEKAILVHERLAIVGVSSGAQPLYNPEKTHILAVNGEIYNHKELAANLDTDFTFQTQSDCEVILALYKQKGPEFLDDLNGIFAFCLYDEENDAYLIGRDHIGIIPLYTGHDEHGNFYVASELKALSPICKHIEEFPPGHYLYSKDGKLKPYYKRDWQTFDAVEDNSAESSDVKDALEAAVKRQLMCDVPYGVLLSGGLDSSVISAITQRFAAKRIEDNDESDAWWPKLHSFSVGLEGSPDLAAAQKVADMIGTVHHPIIFTIQEGIDALREVIYHIETYDVTTIRASTPMYLMARQIKAMGIKMVLSGEGADELFGGYLYFHKAPNAQEFHEELNRKVSKLHMFDCLRANKSMAAWGVEARVPFLDKEFVDVAMRINPEAKMCKDGKIEKHILREGFGGYLPDEVLWRQKEQFSDGVGYSWIDTLKEYVEEQVSDQDLANAKFKYPINTPDSKEAYYYRAIFESHFPGDASAKCVPHGKSVACSTPEALAWDESFQNNADPSGRSAGVHNDAYTGKK

SEQ ID NO: 7034 - protein, 393 aa, Alteromonadales bacterium TW-7
MSLESVVIVAAKRTPMGGFMGGLSDAQSTELGATAIKSALAQTGLKTDAIDEVIMGCVLPAGLGQAPARQAMLKAGLALSTGATTINKVCGSGLKAAMLANDLIKAGSIETAIAGGMESMTNAPYFIPKARGGMRMGHGEIKDHMMSDGLEDAYDNKAMGCFAQDTADEYGIGREQMDNFALGSLSKANAAIANGSFENEIAPHTIQTRKGDVTVSVDEQPGNARPEKIPSLRAAFKKDGTITAANSSSISDGGAALVLMTESKAKAHGLTPLCKIVAHSTHSQKPSEFTVAPVGAMNNVLEKAGWTTTDVDLWEINEAFAMVTMLAINELKLDESKVNVNGGACALGHPIGASGARILVTLIHALKNRGLKKGVASLCIGGGEAVAMAVEAY

SEQ ID NO: 7035 - protein, 592 aa, Alteromonadales bacterium TW-7
MPNSTPATEKAAFSSLLPIFAFIKPYKWMVIAALGALLVTAGVNLSLGQGVKFVIDHGFIAGSQAQLQQAVLVLIGLISLLAVGTFSRFYLMSWIGERVSNDIRKAVFNRIVTLHPSYFEENRSGELMSRLTTDTTLLQSIIGSSFSMALRSALMLVGGLVMLLITNLKLTLVVVACVPLVLVPMMVFGKKVRKLASSSQDAIADISTYAGEIIQNIKVVQSYSHETQEQHAFALETEKAFNVAKSRIKQRSFLIAAVIFLTFSAISAMLWVGGSDVLAGTMTGGELGAFVFYAIMVAMSVATVAEVYGELQRAAGAAARLLELLAVKSEIENPENPQDAQLQNNASLPAISLENISFNYPSRPDVSALNKISLSISQGQTVAIVGPSGAGKTTLFELLQRFYDPASGAIKFHDIDIKSLSLNTLRDKMGMVAQNPILFSSDVMHNIRYGNPNATDEQVYAAAKHAHADEFIKQLPQGYNSFLGEQGVRLSGGQKQRIVLARAILKDPEILLLDEATSALDAQSEHHVQAALEHLMQNRTTLIIAHRLATVIHADMIVVMENGEIIATGTHQELVASNPLYQKLCELQFNKD

SEQ ID NO: 7036 - protein, 309 aa, Alteromonadales bacterium TW-7
MSSLFGHVDHSLYSNGMTFLRRPMVQNINAIDADVVVLGLPFDLATSGRPGARLGPDAIRRASVHLAWEDTKYPWTFPLFERLTVADAGDFTYPVGDPEYFTAQLEMAAEQILRQGATLLGLGGDHFVTLPLLRAHAKIHGKMALVHFDAHTDTYSNGSRFDHGTMFYHAPMEGLIDVEHSIQIGIRTDFDQSKHEFAVIDAMQANDLHANEIAAQIRERVGDLPVYLTFDIDCLDPAFAPGTGTPVCGGLTSDKVLKILRALKGINMVGMDVVEVSPSYDQSELTAIAAATIASELLHLWTHKNKYSL

SEQ ID NO: 7037 - protein, 383 aa, Alteromonadales bacterium TW-7
MKFVDEVEIRAEAGDGGSGIVSFRREKYVPDGGPDGGDGGDGGSVYLQADENLNTLIDYQFERFHRAERGTNGRSRNCTGKKADDLFVMVPVGTRITDVDTQEGLGDLTQHGQRILVAKGGFHGLGNARFKSSTNRAPRQKTLGTPGEVRNLKLELLLLADVGLLGLPNAGKSTFIRSVSAARPKVADYPFTTLIPNLGVVRPEANKSFVIADIPGLIEGASDGAGLGIRFLKHLERCRVLLHIIDVMPVDGSNPVDNAFAIINELHQYSPKLAEKPRWLVFNKIDLLPEDEAQALCDAIAQELGESENIYQISAINKLHTQPLIHDIMTLLDSMPKEKFEQVEDEEIEFKWDTYHQKATKGDDDDWDDWDEDDYDVEVVYER

SEQ ID NO: 7038 - protein, 299 aa, Alteromonadales bacterium TW-7
MTTQSVPQAVSDVKSDYIVAKFGGTSVANFDAMSRCSEIIVADKSVRIVAVSASAGVTNHLVALCKSSITPQQRQEHINGVLAIQQAILDELSLDADLAVGFNETLKAFQTLALETLTTDQQHDELLSFGERLSSYLFAQVLRLKGLNADRFDVRQVLKTDSQFGKATPNVSATAQAAKEYLIPLLDDQVIVTQGFVGSDEFGQTTTLGRGGSDYSAALLAEAINAKSVHIWTDVVGIFSTDPRLCVKASPIARLSFDEAAEMATFGAKVLHPATILPASRSHINVFVGSAASLNVVVR

SEQ ID NO: 7039 - protein, 331 aa, Alteromonadales bacterium TW-7
MSSHYVQQQLQISSVKQFFSRQLEKQLGLVEVQAPILAKVGDGTQDNLSGHENAVAVNVKAIADSQYEVVHSLAKWKRKTLGEYGFSKGEGLYTQMKALRPDEESLSPIHSVYVDQWDWEKVICESTERSLTTLKRTVESIYKGIKETEQFVSEHFSLDPFLPSDIQFVHSEELRKIYPDLTAKNREKAIAKKYGAVFLIGIGGQLGDGQIHDVRAPDYDDWSTPTSEQYIGLNGDILVWNPILEDSFEISSMGIRVSPEVLKTQLRITGDDDRLQLDWHKALLKSQFPQTIGGGIGQSRLAMLLLQKGHIGQVQVGVWSTQTHASVDGIL

SEQ ID NO: 7040 - protein, 304 aa, Alteromonadales bacterium TW-7
MPDMKLFAGNATPELAQKVAKRLYIELGDAVVGRFSDGEISVQINENVRGSDVFILQSTCAPTNDNLMELIVMVDALRRASAGRITAVIPYFGYARQDRRVRSARVPITAKVVADFLSSVGVDRVLTVDLHAEQIQGFFDVPVDNVFGSPVLLEDMKERHFDDVVIVSPDIGGVVRARAIAKLLDDTDLAIIDKRRPQANVSQVMHIIGDVEGRDCIIVDDMIDTGGTLCKAAEALKEHGAKRVFAYATHPILSGKAAENLRDSVIDEVIVTDSIPLSDELKALDKVKVLTLADMLAETIRRIS

SEQ ID NO: 7041 - protein, 298 aa, Alteromonadales bacterium TW-7
MAEIENRPSNFIRTRIDEDLASKKHAATHTRFPPEPNGFLHIGHAKSICLNFGIAKDYNGLCNLRFDDTNPEKEDINYVNSIKEDVQWLGFNWDGDIKYSSNYFDILYGYAVELINKGLAYVCFLTADQAREYRGTLTEPGKNSPYRDTSPEENLALFEKMRAGDFKEGECVLRAKIDMASSFMVLRDPIIYRVRFAHHHQTADKWCIYPMYDFTHCISDAIEGITHSLCTLEFQDNRRLYDWVLDNISIECHPQQIEFSRLNLEYTIMSKRKLNDLVVNNYVEGWDDPRMPTIAGLR

SEQ ID NO: 7042 - protein, 315 aa, Alteromonadales bacterium TW-7
MGHIIDILAVLSTLFGLATSLGLGAQQATSGINYLLGTDYGTAFQISVIGLVTCIAIFSVIRGIEGGVKVLSNVNLICAFFLLLVVIVLTFSDSIPAVWFTLGAYVEHFVPLSNPFNRSDEDWMHSWTVFYWAWWISWSPFVGMFIARVSKGRTVREFLLVVIGLPTLLSLVWMSVFGNMAITQVIDKVGPLGQNGLTDISVTLFHVYEQLPFSSFISIISIALVLVFFITSSDSGSLVIDGITAGGKIDAPVPQRIFWATVEGMIAAVLLWVGGSQALQALQSGVVTTALPFSIILILMCVALYTRLAKRIPYL

SEQ ID NO: 7043 - protein, 415 aa, marine gamma proteobacterium HTCC2143
MTCFTTGGRIYSQQNRHITDWREIMAEAYIVGAVRTPGGKKNGSLSKIHPADLGAKIIDELIKRTGIPGDKVDDVIFGCVGQNGAQAGNVARNAILSSSLPESVPGTTVDRQCGSSQQAIHFAAQAVMSGTQDIVIAGGVEVMSLVPIGTNIIDSYKAGRGQPSNSEGMEQRYPGIKFSQFTGAEMIAKQWGMKKEAIDAFAYNSHKKAAEATNAGRFSNEIMPVDFVDEDGNAQTLSIDEGIRFDADLAAMSSLKTIAEGGVITAANASQITDGAAAIMIVNEKALKELGLTPRARIHTLSVVGDDPIKMLTGPIPATKKALERSGLSIEDIDLYEVNEAFAPVPMAWAQEVGADLNKLNVNGGACALGHPLGGTGAKLMTTLLHELERTGGKYGLQAICEGGGTANATIIERM

SEQ ID NO: 7044 - protein, 574 aa, marine gamma proteobacterium HTCC2143
MLRKFFPGLGWLQGYNRGIFKSDLLSGITIAAMLIPQSMGYALVAGLPAEYGLYACIVPPVLYALLGTSNKISMGPVALDSILILTGLSVLAEPGSDNYLELAIALTLLVGVIQFAFGLIKFGFIANFLSYPVILGYTCAAAIIIMGSQFENMLGITVDSGNIFSQIFYFVQRIGSWHWLTAGIGLIGLVFMIYPKRFFPSMPSGLILLVIGMICSGVWNAQAYGIDVIANIPRGLPTPRMPGITSDQLMALIPTAMTVALMGYVGSMSICKAQEKPTDKFNVKPNQELVAMGVANFVGSFFKAFPVSASFSRSAAFIEAGALTQVSAVVSSVVIVIVMMFLTPVFISYPLPKVLLAAIIIVSVAGLFKYGQMKALFKQNRHEFLLMLVTFVVTLVLGVQQGLLAGVVLSIARVIYTSATPHMTELGSIQGGRLFRNVNRFDDVVIRDDILIFRFDAPLYFANKDYFVDNLYRWIKQRPDNLLTSIIFDAEAVNSVDTTAILMLQKIIDNLQQQGIKLYITNAIGPVRDALHNSPLSNYMNEESMFSTIQSAIDFIDYGTSDTDRVALQTDASP

SEQ ID NO: 7045 - protein, 398 aa, marine gamma proteobacterium HTCC2143
MRRAAIVRPLRTPVGKYLGSLQSLQAEDLGAIVIKELVSRSGVDPDRIEEVVFAQGYPSGEAPCIGRWAGLAAGLPLHVSGTQIDRRCGSGLQAIANAAMMVQTGVADVVIAGGAESMSNVEYYTTSMRGGARSGSVTMHDRLQRGRVRSQPEARFGKISGMIETAENLATEYNISREAADEYAVLSQQRATAAWAAGKFDDELVPVSVPQRKGDPIIVDIDEGFRSDATMESMARLKPLTEGGIVTAGNASQQNDAAAACLVVAEDKLAELNLEPMGYLVGWAAAGCHPATMGIGPVPAVEKLMQRTGITWKDIDLVELNEAFACQVLSVLKGWDWHDSDKLNVNGSGISLGHPIGATGGRILATMLHELHRRQGKYALETMCIGGGQGIAALFERA

SEQ ID NO: 7046 - protein, 302 aa, marine gamma proteobacterium HTCC2143
MAKRVAFVGLGNMGGGMAANLVKGGFEVNAFDLSETATAQAKENGCNVVSSAIAAVAEVDFVVTMLPNGSIVESVYIGDGKTPGLLDAIPNTALILDCSTIAPTNARAVGVAASEKSLRFVDAPVSGGVAAAAAGTLAFMVGGAEDDFEEAKLVLTAMGSNIFRAGDVGAGQAAKICNNMLLAVHMAGTAEALQLGVDNGLDPAVLSEIMLKSSGCNWSLEKYNPMPGVMEGVPSSNNYEGGFLVNLMLKDLGLAMEASLNSQSSVPMGAAARNLFNLHKHSSGEDKGDKDFSSIQQFYSKT

SEQ ID NO: 7047 - protein, 569 aa, marine gamma proteobacterium HTCC2143
MDFQRYLLIGSIAALSFMLLTEWVQFKEQNSGNNVVAAYQLQQGPVTGDNASRSSEMPNAQTPNGTQIDSNVDIPTFEQESSGNEIAASNTISRIKVKTDMLEIDINTLGGDIIFAAFPKHYAKLDTPEIPFTLLEQSNRLTYIAQSGLIGVNGIDTAKGRARFTSAKTEYVLSDSEDEMAVDLVFQSNDPVSITKRFHFTRGEYLIGVEYIVKNNSEMPWSGGMFGQLKRDNSPDPSADTSGMGLAPYLGAAINLPDEPYKKVSFDDIEENSFPKQNIEGGWVAIIQHYFTSAWVPNAKQTHAYSMRKTKDGANIVGFTSPQITVAAGATGDVKSELYIGPKDQYRLEEISPGLELTVDYGILWWIAQPLFWLLTKLHGYLGNWGFAIIAVTILVKAAFFQLNAKAYTSMANMRKVQPKLTALRERYADDKQKQSQEMMALYKREKINPLGGCLPILVQMPVFMALYWVLMESVELRHAPFIGYIKDLSVMDPYFILPLIMGVSMFIQQRFNPPPPDPMQAKIMQWMPVMFTFFFLFFPAGLVLYWVVNNTLSIAQQYLITKRIEASD

SEQ ID NO: 7048 - protein, 184 aa, marine gamma proteobacterium HTCC2143
MHLIILDRDGVINEDSDSYIKSVDEWVPIPGSIEAIGILYKAGFTIVVATNQSGIGRQLFSLDDLNAMHDKLNMLVKNAGGKIANIYYCPHHPDDGCACRKPKAGLIDIMEKELGISAQGAFFIGDSLRDLEAGLAKGCTPVLVETGKGKKTLAAIDANKKSTLPGLVIYGNLAEAAGALVKSL

SEQ ID NO: 7049 - protein, 415 aa, marine gamma proteobacterium HTCC2143
MENEIFQLQYALDTFYFLICGALVMWMAAGFSMLEAGLVRSKNTTEILTKNVALYSISCIMYMVVGYSIMYGGGDLTFFLDGIVGDGVTGAEEPATYAPSADFFFQVVFVATAMSIVSGAVAERMKLWAFLAFAVVMTGVIYPMEGAWTWGGEAVFGMYTLGDLGFSDFAGSGIVHLAGASAALAGVIMLGARKGKYGPQGQTNAIPGANLPLATLGTFILWMGWFGFNGGSVLATASVESANSVAVVFMNTNAAAAGGLVAALIVARVLFGKADLTMALNGALAGLVAITAEPSTPTALQATLFGAFGGVLVVFSILSLDKLKIDDPVGAISVHGVVGLLGLLLVPITNGENSSFSGQLIGAATIFVWVFGTSLIVWGVIKALVGIRVTEEEEYEGVDLSECGMEAYPEFITSK

SEQ ID NO: 7050 - protein, 583 aa, marine gamma proteobacterium HTCC2143
MNEHLHQPAGNTGWLIYRRLMVFTARYWVFFAISIAGFAVYALTQAAIAHVMKYFVDGLQSKDTTLMTIVPVAVVIISLVRGCGFFCGNYFMALVSLNLVNDLRKQMFDHMLALPSVFHDQRNSGELVSMITYNVNQVTNAATGAVRVLFREGLTVIALMAYLLYQNWLLTLVFLLVTPILAGVILYTSKLFRRMSERMQASMGQVTHISNEAIQGYRIVRSYGGEHYERGRFRGASDKNTRQGLKFSLISSVQAPVFTFLVSVAIAGLMFLVLYMASDATAGDMVAYVVAAGTLAKPVRQLSEVNSTIQRGIAAAESIFSLLDEDAEVDSGSTVVDRVSGRIDLRDVCFEYETGKPVLHNINLTIEPGETIALVGRSGSGKSTLANLLLRFYDVSSGEILFDDIELRDIDINCLRRQIALVNQQVVLFNDTVANNIAYGQLADVDGSSIIQAAQRANAMGFIEKLPEGLQTIVGEDGTRLSGGQRQRLSIARALLKDAPILVLDEATSALDTESERNIQQALDAVMIGRTTLVIAHRLSTIEKADRIIVMDHGHIVEQGNHQRLIQLGGHYANLHALQFEDG

SEQ ID NO: 7051 - protein, 268 aa, marine gamma proteobacterium HTCC2143
MQVIIRAILVVCTVLVSLSVIASEEQARNFDDIVASGELRIGVSIFPPWVMRAKDGQLIGSEIDMAKRLAADMGLKPELALYEWKALITALNAKEIDIIISGMGINPARAMQVNFSRPYGDAGVGLAANTALTSTFKSMDELKQPNINIGVIANTVSADVATRLFSRTNIKAFATEDEAQDALINGKLHAFIGANPLPAFLALKYPGKVDVPLEKPLLSFKEGLAVRKGDSDFLNYLNAWVVSRSADAWIPSTRQYWLETLEWQEQVQ

SEQ ID NO: 7052 - protein, 326 aa, marine gamma proteobacterium HTCC2143
MNKVFVTYNMPAEQLSRLSEYCDVDAWQGKGSIPRDELMARVEGVDGIICLLTERIDGELINSSKNLKAVSCVSVGVDHVDVGTLTARGIPLGHTPGVLVDATADLAFGLLLAAARRIPQGDRHVRTGGWQGASWSPKAFLGCSVAGKTLGIIGLGDIGQALARRAAGFDMPVIAWSRSGREVAGVRTLSLEQVLDQSDFVSINVALTEETRGLIDAAALSKMKPGAILVNTARGGIVDERALAQALKEGRIAGAGFDVFEKEPVSPGNALFDQPNFIATPHIGSATPETRLAMMDLAVANMCAAMWSEKMPCCFNPEVYADHHDN

SEQ ID NO: 7053 - protein, 588 aa, marine gamma proteobacterium HTCC2143
MNILVINCGSSTVKYQLLDVATESIISTGIIETDTMAHGPAVQLILEENSNFQIDAVGHRVVHGGDSFHDAVEIDDSVITRIEEWIPMAPLHNPANLAGISAARRFLPRIPHVAVFDTAFHTTLPRRAYTYAIDPIIARKHHIRRYGFHGTSHQYVAQQAAIFLGQPLNELKIITLHLGNGASACAIEYGHSTETSMGMTPLEGLVMGSRSGDIDAGIAIELLRHEVENVDALDDLLNRKSGLKGLSGVSNDLREIETKAAEGDDRSRLAIAVFTHRVKKYIGAYAATMGGVDAIVITGGIGENSNTMRQRILQRLDFLGVQLDEDRNQDADLSINMKTVCISTDNSRVQALVVKTNEELMIAQKTAFLVEQSSVKKAPAISLNNIPIAISARHLHLTMETFSELFGPNIEPTHLADLSQPGQFACEQKVNLIGPRNRIDGVRLLGPLRSKNQVEISRTDEFLLGVDAPVRDSGQVKASAPITIEGPFGTVHLKEGLICARRHIHMHPDDAERFGVTNRDEVEVAISGGPRDLIFCDVLVRVSHGYKLEMHIDTDEANAAELSKIDSGGLVYTHISDTKATVTGKSTR

SEQ ID NO: 7054 - protein, 462 aa, marine gamma proteobacterium HTCC2143
MKKVSRRQFLATSAVAAMYGYSGYALANNGKTRTEPSSSLPWSNWSGNVVGYPQGRISPNSDDELAKYLKSTSGSIRPVGSGHSFAPLVPTTGNIIVADQFNGLIGHDSEKMTATFGAGTRLSDMGAALQQVGQAFFNLPDIDRQTLAGATATATHGTGINFQCLSGYITHVRLISPQGEQIDIDETSDPALFNAARVSLGALGVITQITLKNRSPYRLKQRSWVENTNHVLDNFDQHAASHRHFEILPLTHSDYSFVVSTDETDEPINNPPPSLEEEAAMGAAMRSWMEIPPEDRPPLINGLAEQIQPSEKIDESYKVLTNIRNNRFNEMEYAVPLEAGADCLREILNTIRDKKIDVVFPLEYRYVSRDDTLLSMSSGHEDHAAISVHRVASEDYRPYFDLIEPIFWKYGGRPHWGKIHTLGAPELAKLYPRFNDFKSIRKQLDPRGRMLNDHLRTLFGES

SEQ ID NO: 7055 - protein, 68 aa, marine gamma proteobacterium HTCC2143
MSTVTGTVKWFNESKGFGFIEQESGPDVFAHFSAIVSSGFKTLAEGQRVEFTVTAGQKGPQAENIVAI

SEQ ID NO: 7056 - protein, 126 aa, marine gamma proteobacterium HTCC2143
MLTKMLKAKLHMACITQAELWYDGSCAIDRDLVELAGMREFEQIDIYNVSNGERFSTYIILAEPGSGTISMNGAAARKVQVGDRIIIATYGHLDDDELAAFKPKLVYLNDDNSVERSTNTIAMQTA

SEQ ID NO: 7057 - protein, 403 aa, marine gamma proteobacterium HTCC2143
MKPIKQSEKLANVCYDIRGPVLAEANRLEEEGHRILKLNIGNPAAFGFDAPDEIIQDVIRLLPTSQGYCESKGLYSARKAVMQHYQQRGVLDVDIDDIYLGNGVSELITMSMQALLNNDDEVLIPAPDYPLWTASVSLSGGTPVHYICDEEADWFPDIADIRSKISSKTRAIVVINPNNPTGAVYSKELLQEIVKLAEEHSLVIFADEIYDKILYDEAQHIPLATLADNVLCVTFNGLSKAYRLAGFRSGWMMLTGAKSHAQGYIEGLTILASMRLCANVPAQHAIQTCLGGYQSINDLVLPGGRLLKQRNAAIELLNQIPGVSCVKPKGAIYMFPKLDVKKFAIQNDEKLVLDFLRHEKILLVQGTAFNWKQPDHLRVVFLPQVDDLTRAMERFAAYLSRIG

SEQ ID NO: 7058 - protein, 552 aa, marine gamma proteobacterium HTCC2143
MYIYNQYDQQLVDERVAQYRGQTERYLAGEISDDQFLPLRLQNGLYIQRLAPMLRVAIPYGTFNSQQMRKLAHISRHYDKGYGHFSTRQNIQLNWPQLEEVPDILAELAEVQMHAIQTSGNCIRNTTTDQFAGAAADELEDPRPYCEIVRKWSTFHPEFAFLPRKFKIAFCASKADRAAIQMHDIGIEVVHNASGETGFRILVGGGLGRTPVIGTEIIEFLPKQHLITYLEAILRVYNQLGRRDNKYKARIKILVRAMGIDAFRDKVEQQWALLKDGPSTLTEEEFERSKSYFHSPEYIEVDDSDADLKLQQQALQDPGFGNWLKRNVDAHQAPGYAIVTLSLKTTGYAPGDISDVQMEAVADMAEQFSFGEIRASHQQNLVLAHVRKEQLFALWEQAKTFGFATPNINYLTDMICCPGGDFCALANAKSLPVADAIQRKFDDIDYMYDLGEIDLNISGCMNACGHHHIGHIGILGVDKKGKEFYQISLGGSQDRDASLGKILGPSFSQAEVPDVIEKILNTYISLRIDGESFLDTYRRAGLAPYKESVYAK

SEQ ID NO: 7059 - protein, 69 aa, marine gamma proteobacterium HTCC2143
MSDQTTGTVKWFNESKGFGFIEQESGPDVFVHFSAINSSGFKTLAEGQKVEFTVTQGQKGPQAENVVPL

SEQ ID NO: 7060 - protein, 398 aa, marine gamma proteobacterium HTCC2143
MQEKVMSEDSVVIVSGARTPMGSLQGSLSAATAVELGTAAIRAAVERAGIAPADIEEVIMGCVLPAGLKQGPARQAAIYAGIPNTTGAVTINKLCGSGMQATIFAHDQIKAGTAKIALAGGMESMSNAPHLLPNARGGIGTGDKEIKDHMFIDGLTDAYAGGTMGSFAQGTANDNNISREAMDQFAIQSTVRAQKAIADGSLTAEMAPVTITTRKGETVVNDDEQPGKARLDKIGGLRPAFAKDGTITAANSSSISDGASALILTSETEAKARNLQAIARIVGHSRNSHQPELFTTAPIGAIEKLLAKTGWSKDDVDLWEINEAFAMVTMLAIQGLDLDPEKVNIHGGACAQGHPIGSTGSRIIISLMHALKGHGKQKGIAALCIGGGEALAVAIEII

SEQ ID NO: 7061 - protein, 419 aa, marine gamma proteobacterium HTCC2143
MLFAAGMGIGLMFWGVAEPMAYFSGWGGTPLGVEAWTPEAASLAMAATVYHWGLHAWAIYAVVALSLAFFCYNKGMPLTIRSVFYPLLGERCWGWMGHTIDILAVLATIFGLATSLGLGAAQAASGLHFLFGVSSGLDTQIAVVIGVTSVAIVSVVRGLDGGVKILSNTNMALALFLLIFVIVMGPTLAIFKGMLSTSVDYLSNIVSLSVWTDRQDSEWMHGWTVFYWAWWISWSPFVGMFIARISRGRTVREFMIAVLLVPTLVTIVWMSSFGISAIEQAQNGIGGLASGIDTLTASLATFQMLENLPFNQITTGLGILLVMMFFVTSSDSGSLVIDSITAGGKLDAPVPQRIFWAVMEGSIAGALIFGGGKEALNALQAGAIATGLPFTVVLLFMCFCLYRGLSEDRRSLSIQPLKS

SEQ ID NO: 7062 - protein, 324 aa, marine gamma proteobacterium HTCC2143
MKIGFIGLGNVGAKLAGSILRNGYDLTVRDLDRELAQPFLDQGAKWADSPRQMAESCDMIITCLPSPAACAAVMEQDDGILAGLSDGKIWAEMSTTDETEVRRISQLVLAKGAQPIDCPVSGGCHRAATGNIAIFVGCTRATFEQTLPVFKALGRRILHTGEVGTASVLKVVTNYLATANLVALSEALATSKAAGMDLNTTYEAIKISSGNSFVHETEGQVILNGSRDINFTMDLVIKDISLFQGIADRANVPLEVSPLLINIFKDGENRYGARELSPNIIRRLEDATGLDVRAPGFPPEMTDDEPEEPGYEVVATGILNTANR

SEQ ID NO: 7063 - protein, 91 aa, marine gamma proteobacterium HTCC2143
MQTGTVKWFNNAKGFGFILPEGGGADVFAHYSTISMDGYKTLKAGQPVSFDTVNGPKGLHATNIQAAQDSADNSNPRAVDDIREVSSSQLD

SEQ ID NO: 7064 - protein, 259 aa, marine gamma proteobacterium HTCC2143
MSMLSIKNLHASVEDKTILNGLDLDIKPGEVHAIMGPNGAGKSTLGYVVSGREGYNVEQGTAVLDGVELLELDAEERARAGLFLAFQYPVEIPGVSNMEFMKASVDAQREARGEAALSSRDFLTMAKEACSKVQLPLAFLKRGVNEGFSGGEKKRNEIMQMLLLEPKLCILDESDSGLDIDALQVVADGVNSLRSDDRSFIVITHYQRLLDYIKPDFVHVLSEGKIIKTGGAELAHELEAQGYAWLTGDSAENTAETSA

SEQ ID NO: 7065 - protein, 385 aa, marine gamma proteobacterium HTCC2143
MQLPIYLDYASTTPVDPRVAEKMADCLTMGGVFANPASRSHVYGWQAEEQVELARRHVASLLACDPREIVWTSGATESNNLALKGIFESAEFAGGLVTSTSEHKAIIDPAKWLSEKGVTVHWLEPGRDGVIDVEKVRLAISDQVRLVSIMLVNNETGVINPIAEIGKLCREKGVLLHVDASQAVGRVDIDVSRLSVDLMSVSAHKFYGPKGVGALYVRRSIQSQLKPLILGGGHERGMRSGTLATHQLAGMGEAARLIKELEDVEADELAAKRDCLWAGIEDLPGVRRNGGSQNISPSHLNVCFSGVDGETLLLALRELAVSSGSACTSASLDPSYVLTAMGISDEDARRSIRISIGRFTSDDDVNNAVDHIRKIYTELNQTQSI

SEQ ID NO: 7066 - protein, 69 aa, marine gamma proteobacterium HTCC2143
MTDRTTGTIKWFNNAKGFGFIAQTEGADIFVHFRSIRGEGYKTLDEGQEVEFTVVEGAKGLQAEDVCKL

SEQ ID NO: 7067 - protein, 144 aa, marine gamma proteobacterium HTCC2143
MSTLYRIILSATLAAIAAASIEFISNPDSNAIINPVSFVIIFIATALGAFISPSIKPSVSTPSSKSSGKSSGRKGREIGTVKWFNVSKGYGFVTRASGEEIFVHFRSISGNGRKVLREGQKIEFSVVDGDKGPQAEDVDIVVDK

SEQ ID NO: 7068 - protein, 301 aa, marine gamma proteobacterium HTCC2143
MTEQTHCGYVAIIGRPNVGKSTLLNHILGQKISITSRKPQTTRHRVLGIKTENNTQAIFVDTPGIHKGTESDKAINRYMNRAASSTITDVDVVVFVVERGKWTDGDEWVLEQVKRAECPVILVINKVDQMQDKSQLLPFLEACQHKMNFVDIIPLSALNGTNLTNLELSIQTKLPMGGYLFPEDQITDRSSRFMAAELVREKVMRQLGEEVPYAMTVEIEDFKDSGKSLHIHALILVEREGQKRIVIGNKGSRLRSIGQDARLEMEKMFERKVMLKLWVKVKSGWSDDDRALRSLGYNDFD

SEQ ID NO: 7069 - protein, 377 aa, marine gamma proteobacterium HTCC2143
MIIGIPRELEAGETRVPVIPASVKRFTDQGAEVHIESGMGLSIRIQDSDYEQAGAKIISDRTALLNNADIILRLRKPALEEVSQLKKGAIHISFLDPFNDNDLVDAFAAAGITSISMEMIPRTTRAQKMDALSSQASLAGYAMVVLAADRLDKILPMMMTPAGTISPSRVFIIGAGVAGLQAIATAKRMGARVEAFDTRPVVKEQVESLGGKFVEIDLGETGQTAGGYANALTEEQVKLQLEGQKKICSQSDIVITTAQLFGRPAPIVVTKDMLAAMKPGSVVVDLAVESGGNVEGSVAGEEIEINGVKVIGLANMPGRVAGDASQMYSANLHNLVLEYWNKETQQFDLDMDDEIIKGCVITHDGELTNEMIQKARG

SEQ ID NO: 7070 - protein, 444 aa, marine gamma proteobacterium HTCC2143
MKDVHLQKTMGPFTATMLGVGAMVGAGIFVLSGIAAGYAGPAVILAFFLNALIALAIGSCYAELGSAMPRAGGSYFWVKTALGRSAGFAVGWIGVYANTIVSALYALGFGAFFVALLQRLGVGISDDYVLVFAALITVAITYLQYRGIRDLGVVENSVTVIKVLLLCALVVGGLIIISSSNGGVGKLTPFAPHGMTGVLMAMAVIFVAFEGFEVITRTGEEMHQPEKNIPLAIYASIGISVSLYLLIAVILIVAVTGPDDQPSWQYLGDLGELGMATTARQLLPYGDVIFYIAGIASTASAMIAATYSAVRVTFALGRAGDLPALLGYIHPLHNSPSNAAIASGAIVLAIVMILPISEVAGAASQMFALLFAVVCFAAWRLRFTQPRMIRPFRARLLPLCASVGMLAGSVVMITLLNISPLAWWISFVWLAIGGVIFVIRSPAR

SEQ ID NO: 7071 - protein, 465 aa, marine gamma proteobacterium HTCC2143
MNHLIGVGHNSKQSMVCFFTKSLSALAVVFSAFTVQAELGPPEKDELKFGFIKLTDMAPIAVAYENGYFEDEGLYVTVEAQANWKVLLDGVIDGKLDGAHMLAGQPIAATIGYGTKAHIVTPFSMDLNGNAITVSNDVWGEMKKNIPHLDGKPVHPIKADALKPVVDSFRDAGKPFKMGMVFPVSTHNYELRYWLAAGNIHPGFYAPHKGDTSGTINAQALLSVTPPPQMPSTLEAGTINGYCVGEPWNQQAVFKGIGVPVVTDYEIWKNNPEKVFGMTKEFTEKYPNTTARIVKALIRAANWLDENNNANRPAAVEILSRGEYVGADYEVIANSMTGTFEYEKGDKREVPDFNVFFRYFATFPYYSDAVWYLTQMRRWGQISEAKSDDWYFDVARSVYRPDIYQLAAKELIEEKLLKASDFPEFATESGFRDPQKHFIDDIVYDGSKPNAYLKKFSIGLKDEVL

SEQ ID NO: 7072 - protein, 505 aa, marine gamma proteobacterium HTCC2143
MFTFPSFRDVVAGLSVALILVPQAIAYADLAGLPPAQGLFAATLPLIIAAIFGSSPWLQTGPVAMTSILTLGALSAISAPFTAEYIGMAALLAFIVGLTRVLIGLVKAGHLVYLMSQPVLNGFTTAAALVILTTQAPAFFGVEAVSGNFFSRLLDVLLQPRLWSVPGMIFGSGALLVIIAGKRFHVLFPGILIAVVAGILLQSVYDCECKTVGSFPTDLPSFSWLLPWHRFGELLIPGIMIALVGFAEPAAIARTLAASSRRPWSASKEFIGQGAANIAAGVIGAFPVGGSFSRTMISHSAGATSRWSGALTGIMVLAFLPVANLMSTLPQPVLAAIIISAVYPLIKFGPLIQLTRTSRAQAMVAWATFLLTLILSPRIDLALLLGMGLGVVVHLWREMRINVSPSYTEHTLLLEPAGVLFFGSAQGLDETLVDELSKHPEAKELILDLRGLGRIDYTGALVIHRIALEAEQAGLAVKVIPGQPPQGERLLKRVFGNDSRRMLSV

SEQ ID NO: 7073 - protein, 584 aa, marine gamma proteobacterium HTCC2143
MEMLSGGQMVARALEDEGVEFIFGYPGGAVLHIYDALFQSCKVPHILVRHEQAATHAADGYARATGKPGVVLVTSGPGATNAITGIATAYMDSIPMVVLSGQVPSHLIGSDAFQETDMVGISRPIVKHSYLVKRTEDIPAIIKEAFYLAATGRPGPVVVDLPKDLTNPIDKYEYVYPETVKMRSYTPALRGHSGQIKKAIQLLLGAKRPVIYSGGGVILGNGSELLTELARELNYPVTNTLMGLGAYPATDRQFLGMLGMHGFYEANHAMHNSDVILAIGARFDDRVTNTISKFCPSAKIIHVDIDPASISKTVTADIPIVGPVNAVLKEMLTQIRATRTSQGADAGPDEEAIGRWWTQIDAWRASHGLWTAPRYDTETGLIKPQQVIESLYRATKGDAYVTSDVGQHQMFAAQFYKFDKPRRWINSGGLGTMGFGLPAAMGVKLAFPDDDVACVTGEGSIQMNIQELSTCSQYSVPIKIINLNNGYLGMVKQWQDMNYSSRYSESVYEDSLPDFVKLAEAYGHVGIKVDRLEDLDAAMDEAFRLKDKLVFLDVYVDRHEHVYPMQIAPDGSMRDMWLSKTERT

SEQ ID NO: 7074 - protein, 577 aa, marine gamma proteobacterium HTCC2143
MIGFLMPYRWRVLGALIALIFTASVTLSMGQGLRLLIDQGFGEAAATGLDEAIGIFMAMVVLLAIGTFARFYLVSWIGERVSADLRRAVYSHVIELHPGFFETNLSGEIQSRITTDTTLLQTVIGSSVSMALRNVLIFIGGIVLLFITNPKLTGIVLLSVPLVIMPIIFFGRHVRTLSRTSQDKVAVFGGFVGESLKNIKIVQAFNHQQRDRETFTDQVEVAFEIAVKRITYRAWLTAIVITLVFAAMGYMVWVGGHDVIAGRISAGELAAFIFYAMMVALSVGVISEVYSDLQRAAGAAERLLELMTAENLIQAPALPQTLPARVIGNVEFDDISFFYPSRPDSAAIDHFSLKLPAGSSLALVGSSGAGKSTIVDLLLRFYDVQKGQIRLDGVDICELAPQELRRHIAIVPQQPTLFSGTIIENIRFGRPDASDDDVRAAAGAAYADEFIQKLPHGYDSFVGESGVRLSGGQRQRIAIARAVLKNPSILLLDEATSALDAESEYKVQQALEHLMKDRTSIVVAHRLATVVNVDKIAVLDHGQLVDTGSHQQLLASSSLYARWASLQFGDKEIEKAG

SEQ ID NO: 7075 - protein, 464 aa, marine gamma proteobacterium HTCC2143
MTSSAGEPTTDYQRQASMEKQIETMAMSPVPATSASSELSPSFDNSDDMLDRVIENAIVRSVFDQNDASRRRFIKLVGGGTLAAALGTMLPMDKVKAAMKESMGPLEKKKLKVGFVPITCATPIIMAQPMGFYAKYGLDVDVIKTAGWAVARDKSLNGEYDASHMLTPMPLAMSMGAGSIASPYIMPAVENINGQAIVLANKHKDKRNPKDWKGFKFGVPFEYSMHNFLLRYYVAEFGLDPDTDIQIRVVPPPEMVANLRAGNLDGYLSPDPFNQRAVYEKIGFLHMLTKDIWDGHPCCAFACSKEFATEMPNTYGALFRSIVDATHYSQKQENRAEIAKAISPKNYLNQPEIVVNQVLTGRFVDGVGNTIQDVPDRIDFDPFPWHSMGIWILTQMKRWGYVEGDIDYKGIAEQVYVASDTAAVMKELGYEPPETTYKNHTIMGKVFDYRKPEEYINSFAIKRS

SEQ ID NO: 7076 - protein, 476 aa, marine gamma proteobacterium HTCC2143
MSEQHSSVDYEQVPEDYLQQRQLKSGAAGWILLAGLGVSYVISGEFAGWNFGLEHGGFGGMLLATIAMAIMYGAKVLSLAELSAALPTAGGGYSFARRALGPWGGYLTGSAILLEYVIAPAAIAVFIGAYVGELVGVDGPLVYAVFYAVFVGIHLLGTGEALRFMMVVTVIAVAGILVFVVAAIPHFSVANLFDIAVNESASGASTFLPQGYLGVWAAIPFAMWLFLAVEGVPLAAEEARDPARDLPRGIITAMLILLVFGGCVLVLVPGIAGADAMKAHGAPLVGALQSVYGEDSGAAMFVNVVGLAGLVASFFSIIYAYSRQVFALSRAGYLPRFLSVTGRRKVPTLSLIVPGFIGFGLSLSGEGDLMITIAVFGATISYALMTLSHIVLRQKEPNLLRPYKTPGGVFTSGIALVLSVVAFASTFVVNQEAALWSGLIYLLMIAYFGLYSRHHLVASAPEEEFEAIARAEQELI

SEQ ID NO: 7077 - protein, 638 aa, marine gamma proteobacterium HTCC2143
MCGIFAAMTRNGIASSCVDRALSSLNHRGPDGHGTWTSSDKRWILGHTRLSIIGLSNGEQPMTSPDGKVHTVVNGEFYDYREIRERLRHDGCQFASDSDSEIALHLYQRDGMQVAPQLRGEFAVIIADERENTMIAIRDRFGIKPLYYSVVNGDVFFASEIKALLALGVPAAWDLQGALGGMARPHEQTEFAGINAVPQGCYAVAKDGTVRIYSYWDWEIPTADDMKRDNRTEAEVIAEFRSVLMDAVQQRLVADVEVASYLSGGIDSCAVLGLAQQAMARPIRAFTLTFDNPLYDEAAIAEKQAKFVGASYHPIPVTGRDIADSYSDAIWHSETQMFNGHGVAKYLLSKAVRDAGIKVVFTGEGADEMLGGYPFFRVDAVKHNPALSEAQKSALFAEILGTNEASRAIMLPNEVNSPATDAVRRRLGWVPTVVHTMESMSNGLAPFFSNDYAAYIHGHSPIVAALDRLPIGQRMTGRDHLNQSLYLYSKTALPNFILSYLGDRMEMAHSVEGRVPFLDHRVAEAAARIPVDMKVKGIREKHVLREATRDVLIPEVYNRQKHPFTTPPTRDKNDPMLAFYRDTFASQAAKDQPIYDMQKVNKALDKLLDCPDDERIAVEGGLQRIASVVVMQKKFGMS

SEQ ID NO: 7078 - protein, 68 aa, marine gamma proteobacterium HTCC2143
MSKGTVKWFNPDKGFGFITPEDGGKDLFVHHSEIQSGGGFATLNDGQDVEFEVGQGQKGPCANKVVPL

SEQ ID NO: 7079 - protein, 312 aa, marine gamma proteobacterium HTCC2143
MTASAPVLAMHPLMQTLFPESPARWNWIQPSENIDATIERHGSDVEILLSASIEKLDKAMLARFPNLRMIASISAGFSNIDLEECRSRGIAVTNAPGMNSGDVADLAVTLLTSLLLRIPQSQSYIMNDQWIGKTPPLRHSLRNMPVGIVGLGSIGRDVVTRLTPFGLNLKWWGPRPKPDVDLPYVDTVKALAEECRGLIVCCRPDDSNRHLINQDILNCLGPAGVLVNVSRGSVVDESALIDALKSNRLGGAGLDVFDPEPTSSARWSGVPNVILTPHQGGSTYETLFAQAQLAQSNIENFLDGKAVHSSVL

SEQ ID NO: 7080 - protein, 510 aa, marine gamma proteobacterium HTCC2143
MYMTSNSIEKIAVVDKAVFTIACSVVLGVCLPLIFFPETSAEVTQVIYAWIANYLGLAYQWAVIGAIIFLSWVAFGRYGHVRLGPENEKPEFSTFSWIAMIFAAGIGAGLMFWAGIEWGYYYDTPPFGAEPRSLEAVEWAGAYGLFHWGISAWAVYALPAVAIAYPYYVKKVPYLRLSTSCHALLGHKGENSWEGRLLDLVFMLGIIGGSATSLGLATPMVSALIGRLVGIEVSFGLDVAVVVTCVVIFGISAYLGLDKGIKRLSNINIVVALLLLLFILVTGPTLFILRVGADSIGVMLDNMARMMTWSDPIERTGFVEDWTIFYWAWWIAYGPFTGLFVARISKGRTLKEMILSMTLLGSLGCWLFFIVIGNYAMFLELEGTLSVTDYLKNNDAAAGIAAIVATLPFSQVALAAFTFVCVVFVATTYDSASYIIASAATSELKIGHNPARWHRLFWAGMLGLLPVALLVVGGLKVVQSAVLVASLPVLVVLVLMTVSLYMSLRERDLE

SEQ ID NO: 7081 - protein, 414 aa, marine gamma proteobacterium HTCC2143
MTQQYSLQRTLGFSTVTFYGVGAILGAGIYVLIGEVAGLAGYAAPLSFIVAAVIAIFSAFSYAELSARFPKSAGEAVYIEQAFGCKWLTITVGLLVILTGIVSAATMTTGIVGYAQVFVTLPSFALITVFVIAISSIAIWGIKQSAWLVTAITVLEVAGLLYVVYVASDNLTSLSIPPLPAGADMDSSVATGILLGSFLAFYAYIGFEDMVNIAEEIKQPEKVLPVAIVLALVIATLLYMLVAYTALSVLSPAQLSASKAPLADVVISKGYSGSWISLISLVAVINGAIIQIIMASRVIYGMASRELFPVWLASVNRVTSTPIPATLLCAAAVLILALLFPLSTLAQLTSLIVLSVFVLVNVALIRLNRRFLAGAKESKDTGHKTVNFPRWIPYIGALLCVGMLLVKAIFWWSL

SEQ ID NO: 7082 - protein, 325 aa, marine gamma proteobacterium HTCC2143
MPMSKLSLKDSALRTITMERDAITELLDRIDANFEHACELILACSGRVVVTGMGKSGHIGTKIAATLASTGTPAMFVHPGEASHGDLGMITPDDVVIALSNSGNTTEVLTILPLLKRMGTPLISMTGNPASTLSSAADANIDVTVSQEACSLDLAPTSSTTATLVMGDALAISLMEAKGFSAEDFAFSHPGGALGRRLLLKVEDVMHSGPLLPVVFVGTKLSEALMEITRKGLGMTTIVDNNNTLVGVFTDGDLRRALDQNIDIHQTAISDIMTRDCKTVNADMLAAEALGIMDHGKISALAVVDEANKPVGAVHLHDLLNAGVA

SEQ ID NO: 7083 - protein, 310 aa, marine gamma proteobacterium HTCC2143
MIFTGNANPTLAKSVAAQLHLPLGDADVGQFSDGEVAIEINENVRGADVFIIQSTCQPTNDNLMELIVMIDAMRRSSAGRITAVVPYFGYARQDRRVRSSRVPISAKVVADMMTGVGVDRVLTVDLHAEQIQGFFAVPVDNVYGSPVLLDDINVQNYSNMVVVSPDIGGVVRARAVAKQLDDCDLAIIDKRRPQANEAQVMHIIGEVKGRTCVLVDDMVDTAGTLCKAAAALKENGAEKVVAYCTHPVLSGKALENINNSELDELVVTDTIPLSKEAEACGKIRVLTMANLLAESVRRVSNEESISALFR

SEQ ID NO: 7084 - protein, 406 aa, marine gamma proteobacterium HTCC2143
MKFVDEASIKVQAGRGGNGSLSFRREKYIAKGGPDGGDGGDGGSVWLQADYAVNTMVDYRFQRHYEAESGKQGRGRDCTGRGGDDLTLNVPVGTTIIDEDTQEVLGDLAKHGQRIKVAQGGFHGLGNARFKSSTNRAPRQTSPGSDGEFRSLQLELKVLADVGLLGLPNAGKSTFIRAVSSAKPKVAGYPFTTLVPNLGVVKVQAHRSFVIADIPGLIEGASEGAGLGVRFLKHLTRTRLLLHIVDMAPFDGTDPATAVKSIVNELERFSPTLHQRDRWLVLNKMDLLPEEERKERCKQVVEALNWTGPVYAIAAISRQGVEPICGDIMNYLEERREREVDDPELAAVESDIQSRMQEESRLRIQELAAARKAARLLAAERGEEFDGDSDDDWEDDDDDVEVVYEP

SEQ ID NO: 7085 - protein, 233 aa, marine gamma proteobacterium HTCC2143
MQPLPSQFLHQSIDISEDLLAEHFLTDYARTRSPLRNPHLENPVSDAMKASSSASAVLIAFVKENDELKVLVTKRSANIRFAGHICFPGGKVDDSDHDPVATALREAHEEIDLNPNSVTVLGSMGDYFTQTGYRITPVVGIVQQPFSLTTDLTACESEVEAIYTLPASMLFTSSTYRLHQFNVKPQQTRGYYSLSHDARDLSIRVSGPTVSIMMGLYEEVLKSRGLLPADEQK

SEQ ID NO: 7086 - protein, 397 aa, marine gamma proteobacterium HTCC2143
MINPHGADQLNPLFVYEEEQRLALVAEAETLPSLLVSSAAAANAVMLGAGYFTPLTGYMNLADSLAVAENLQTESGLFWPVPIVNLANDIASIGNAKRIALRDPNVEGNPVLAIMDIEAIEVVSDAQIDFMAENIFGNLDPEHPGVATFKSQGNTLLSGPIQVLNFSYFEADFPDTFRTAVEIRNEIAERGWNKVVAFQTRNPMHRAHEELCRMAMNDLGTDGVLIHMLLGKLKPGDIPAQVRDDCIRKMVDIYFPANSVMITGYGFDMLYAGPREAVLHAVFRQNCGCSHFIVGRDHAGVGDYYGGFDAQTIFDEKVPAGALDIEIYRADHTAYSKKLDKVVMMKDAPDHGKDDFILLSGTKVREMLGQGIAPPPEFSRPECAKILMDYYQQLDAS

SEQ ID NO: 7087 - protein, 506 aa, marine gamma proteobacterium HTCC2143
MQDPALISLTAYFILMMAIGYYGYRNATGDVAEYMLGGRKLHPAVGALSAGASDMSGWMLLGLPGAVYLTGLSSAWIAVGLVVGAYFNYLLVAPRLRIYTEVADDALTIPDFFEKRFNDTSRSLRIFSSIVIIIFFTLYTSSGVVAGGKLFEISFGLDYETGLFLTAGVVVAYTLFGGFLAVSITDFVQGCIMFVALILVPTVAYIELGGYREVTQQIVTVNTNLLGWFSGVTALGLISSVSWGLGYFGQPHIIVRFMAIRTLSDIKTARYIGMSWMMVTIVGAVATGLVGLAYTTATGSPLTDPETIFIYLSQVLFHPLITGFLLAAILAAIMSTISSQLLVSSSSLTQDVYKTFVRRSASQRELVFISRLSVLAVSLAAIALAFDRSSSILTLVSNAWAGFGAAFGPVILLSLYWRNMTRNGALAGMITGAVTVLLWIYAPIDIDGQPLTAYLYEIVPGFGLAFATTVIVSLMDRHPSDSITERHDSVVALITGDTTLTTSFTR

SEQ ID NO: 7088 - protein, 439 aa, marine gamma proteobacterium HTCC2143
MLTFWDVFFIAIGQIIGAGVVALTGIAIGMTGPSVFIAYFFAAVLVLIVSLLIIIAGTTLPVTGAYYTWVSRLRSGWLGSVVLSLILLASISLSLYGSSFGLYLNPLFPMLSVNGWGIVVIVLLFLANLFGLKIASKLQIVLVILLISALAIYAGFAMPKIQIELLTPMFPKGIVGFITAVFLLKFATGGAHMIVGLSGEMHNPKRTIPLVMISATLIVAVIYGFVALASVGVVPWTEMINQPLTLAGKQFLPAWAMTYFLIAGAGLAICTTLNSQYIQLPRTFIVASWDKLLPPWVGRLNRYGAPYYILFVMLVVGIVPLLTGLDVSDIARAATIAASLPAFIVYWAIIRIPKDYPDQYGQAVFKPNQFWMWVLFVVAELSTAIGVVFLARDLPVPVIGTLIVWIVISIGYYPLRKRYLARQGVDLDELTSNPAIFEH

SEQ ID NO: 7089 - protein, 562 aa, marine gamma proteobacterium HTCC2143
MSNKPAVTDTTPENFIEAIISKDLSEGNVPKVITRFPPEPNGYLHIGHAKAICLNFGLAESFNGECNLRFDDTNPAKENQDYIDAIQEDVRWLGFTWAGNVRYASDYFDQFYAWALHLINNGDAYVCHLSPSESSEYRGWATTPGKDSPYRSRSVAENLELIESMRAGEFDEGACVLRAKIDMASSNMNLRDPILYRIRKEIHHQTGDKWCIYPSYDFAHGQEDAIEGVTHSICTLEFADHRPLYNWFIEHLPVPATPHQYEFGRLHLNYTITSKRKLKLLVDEEHVVGWDDPRMPTIAGMRRRGYSAKALRNFCQSLAVAKTDGIVDVAQLEFFIREDLNENAPRAMCVLDPVKIVINNFEQYISESVQSMTAACHPNNAAMGDRTLPFTRELYIDRADFSEDTSLSRKKFKRLVMGEYVRLRSAYVIKAEAVTKNSDGSIDFISASLVPNTVGDNPPEGIKPRGVIHWVSASEGEQAEIRLYKRLFDHESPDGGDGEVTDHLTPDSMTVLNDCWIEPGLAYASPETAFQFEREGYFVADRWEHSSTRPVFNLTIGLRDSK

SEQ ID NO: 7090 - protein, 406 aa, marine gamma proteobacterium HTCC2143
MSDIKKVVLAYSGGLDTSVIVRWLQDTYQCEVVTFTADIGQGEEVEPARKKAEALGVKEIYIDDLKEEFVRDFVFPMFRANTIYEGEYLLGTSIARPLIAKRLIEITNETGADAISHGATGKGNDQVRFELGAYALKPGIQVIAPWREWDLTSRETLMAYCETHNIPVDYASNKKKSPYSMDANLLHISYEGGILEDPWAEAEEDMWRWSVSPENAPDQPTYMELTYRGGDIVAIDGKIMSPATVLAYLNKVGGDNGIGRLDIVENRYVGMKSRGCYETPGGTIMMRAHRAIESITLDREVAHLKDSLMPKYAELVYNGYWWAPERHMLQTAINESQQYVNGEVQLKLYKGNVIVVGRKSEQSLFDESIATFEDDAGAYNQQDAEGFIKLNALRMRIAADKGRSSL

SEQ ID NO: 7091 - protein, 115 aa, marine gamma proteobacterium HTCC2143
MDIMDTIKSQLESNPIILYMKGSPNQPQCGFSARTVQSVMSCGERFAFVDILSNPDVRSNLPIYANWPTFPQLWVGGELIGGCDIVCEMFEKGELQTLLTETAALSADSKEDVSE

SEQ ID NO: 7092 - protein, 641 aa, marine gamma proteobacterium HTCC2143
MGKIIGIDLGTTNSCVAVLDGDGPRVIENGEGDRTTPSIVGYAEDGEILVGQSAKRQAVTNPTNTIFAVKRLIGRKYKDDVVQKDISMVPYTIAAADNGDAWVSARGKTMAPPQVSAEILMKMKRTAEEFLGESVTEAVVTVPAYFNDSQRQATKDAGKIAGLEIKRIINEPTAAALAYGMDKAKGDHTIAVYDLGGGTFDISIIEIAEVDGEHQFEVLSTNGDTFLGGEDFDMRLIEYLSDEFKKESGMDLKGDPLAMQRLKEAAEKAKIELSSSQQTEVNLPYITADASGPKHLVVKLSRAKLESLVEELVVNSLAPVKQALQDADLSTGDIDDVILVGGQTRMPMVQTKVAEFFGKEPRKDVNPDEAVAMGAAIQGGVLSGDVTDVLLLDVTPLTLGIETMGGVATALIEKNTTIPTKKSQIFSTAEDNQSAVTIHVVQGERKQASGNKSLGRFDLTDIPPSQRGMPQIEVTFDLDANGILHVGAKDKATGKEQSIRITASSGLSDEEIEKMVQDAEVNAEADQKFEELVTSRNTLEGLINATKKTVEEAGDKATDDEKAAIEGAVKEAEEALAGEDIAAMEAATQKLTETSGPLAQKMYAEQAEQAEGGGGADSAEQTEAGDDVVDAEFEEVKEDNK

SEQ ID NO: 7093 - protein, 411 aa, marine gamma proteobacterium HTCC2143
MSLIVQKFGGTSVGTIERIEAVADKVTEFRRQGHDIVVAVSAMSGETNRLIGLAHELQSQPTPRELDVLISTGEQVTIALLSMALNKRGCPARSFTGSQVKILTDSAHNKARIKEIDGSNIRAELKRGRVVVVAGFQGSDEDGNITTLGRGGSDTTAVALAAALKADECQIYTDVDGVYTTDPRVVERARRLEHITFEEMLEMASLGSKVLQIRAVEFAGKYNVPLRVLHSFQDGPGTLISLEESLEMESPAISGIAFTRDEAKLSILGVPDTPGIAYRILGPISDANIEVDVIVQNAAADKTNDITFTVSRGDMVKAEAILHETAKELGAREVVTDAKIAKVSIVGVGMRSHAGVASKMFKTLADISTNIQLITTSEIKISVVIDENFLELAVRALHTAFDLDDTSSESA

SEQ ID NO: 7094 - protein, 905 aa, marine gamma proteobacterium HTCC2080
MSEISRSALFGKLNKIAYQSVESATVFCKMRGNPYVEVVHWIQQVLQLADSDLHRIVKSFEIDPSILVRDITSALDSLPRGATSISDFSPHLEESVERGWVYGSLMLNDTRVRTGHMILGMLKTRSLKSVLLGISSEFGKISEETLGDQFDALTGDSPETGSSAQGASEPGTENSAMAPPAMGKGEALAQFTVDMTEEARSGDMDPIVGRDDEVRQLVDILMRRRQNNPILTGEAGVGKTAVVEGFAQRIARGDVPPSLRDVKLLSLDIGLLQAGASMKGEFEERLRQVIEEVQSSETPIILFIDEAHTLIGAGGAAGTGDAANLLKPALARGNLRTVAATTWAEYKKHIEKDPALTRRFQVVQVLEPSEEKAIKMMRGIAKSMQKHHAVEVLDEALEASVRLSHRYIPARQLPDKSVSLLDTACARVAISQHAVPAQIDDCRRQIESLETEMAIIARESAVGVDTAERKQNVDASLVVERDRLTVLEERWAAEGELVARIVDLQNQLREASEPAADDSSAAEDNTAAEGQDQEPEAALSAEERKALLDELAVKRAALTELQGEEALILPVVGDQAVASVVQDWTGIPVGKMVSNEISTVLHLADNLEQRIIGQRHALDMIAKRIQTSRAKLDNPNKPIGVFMLAGTSGVGKTETALALAESLYGGEQNLITINMSEYQEAHTVSSLKGAPPGYVGYGEGGVLTEAVRRRPYSVVLLDEVEKAHPDVHELFFQVFDKGWMEDGEGRAIDFKNTLILLTTNAGTDLISSLCDDPELMPEPDAIAKALREPLLKEFPPALLGRLVVIPYFPLSDDMILAITRLQLARIQKRIEAAYGIPLTVDDAAVELIRQRCIEVESGGRMIDAILTNTVLPEISREFLTRMMEDKPITAVCVSETDGQFSYQFE

SEQ ID NO: 7095 - protein, 103 aa, marine gamma proteobacterium HTCC2080
MYAVIESGGKQHRVEEGEVLKLEKLEVATGDTIEFDRVFMVGAGADVKIGAPTVEGSKVTAEVVSHGRHAKIRIVKFNRRKHYRNETGHRQWFTEVKITGITG

SEQ ID NO: 7096 - protein, 399 aa, marine gamma proteobacterium HTCC2080
MKFVDEATIEVFAGNGGGGCVSFRREKYIPFGGPDGGDGGDGGSVILLGDASLNTMIDYRYTRKFRAEAGSSGKGRNCTGKAGEDLTLPVPIGTTILDEDTGEVLGDIREAGQELLVAQGGFHGLGNTRFKSSVNRSPRQSSPGSAGENRRLKLELKVLADVGLLGLPNAGKSTLIRAVSAATPKVADYPFTTLIPSLGVVKVDSYRSFVVADIPGLIEGASEGAGLGIRFLKHLTRNRILLHLVDIAPLDESDPSEAAVSIVRELERFSPTLASRPRWLILNKVDLIDETLLAERKAAVLSALNWTGPVYEISALSREGTRRLSGDLMTYIEDLNEMLAEDEAAMQAEREAQTAMQQEARERIEALRSAKRNESRGQSSEQVEDDDDGDAGVTVEYRL

SEQ ID NO: 7097 - protein, 544 aa, marine gamma proteobacterium HTCC2080
MYKYNPIDQAIVDARVSQFSEQMTRYLAGELPEEQFMPLRLQNGLYIQRHAPMLRVAIPYGTLAGYQLRHLAQIARKYDRGYGHFTTRQNIQFNWLALEQVPEVLGELATVQMHAIQTSGACVRNTTTDPLAGTVADEAIDPRVVCELIRQWSTFHPEFAYLPRKFKIAVVATEEDRAAIEVHDVGIRIKKHVIHGLAFDLWVGGGLGRTPLLGHRLLADLPLDELRNWLTAVLRVYNLAGRRDNKYKARIKILVNAMGVEAFREAVTHRYLTDHDSDLKISAETLEDLGDSFSCKLEPQPIEGHQGSLDFQRWYRQNTKPHRIMGYRSVFLSLKRPGTAPGDVTALQMDVIADLADRFSQSEIRTTHDQNLILPHVAESDLKELLQCLSAHDLAHPNLGLISDSIACPGLDFCSLANAPSLSLAEALHETFDDLDEQVDIGPLEVKISGCMNACGHHHIAHIGILGVEKKGQPWYQITLGGRDQQGAALGKRLGPAVPHDDVLPLIKRLVDTYLEERQPGEYFVGFVDRLGVDYLKEISYATH

SEQ ID NO: 7098 - protein, 645 aa, marine gamma proteobacterium HTCC2080
MGKIIGIDLGTTNSCVSVLEGGKARVIENAEGGRTTPSIVAYADDDEILVGQAAKRQAVTNPTNTLYAVKRLIGRRFEDKVVQKDIKMVPYNIVKADNGDAWVEAKGNSMAPPQVSAEVLRKMKKTAEEFLGETVSEAVITVPAYFNDSQRQATKDAGKIAGLEVKRIINEPTAAALAYGMDKSQGDRTIAVYDLGGGTFDISVIEIAEVDGEHQFEVLATNGDTFLGGEDFDLRLIEYLADEFKRENGIDLHGDPLALQRLKEAAEKAKIELSSAQQTEVNLPYITADATGPKHLVVKLSRSKLESLVEDLVTRSLDPVKTALADAGLSPSEIQDVILVGGQTRMPLVQTTVTDFFGKEPRKDVNPDEAVAMGASIQGAVLAGDVKDVLLLDVTPLTLGIETMGSVATPLIEKNTTIPTKKSQVFSTAEDNQTAVTIHVVQGERKQAAQNKSLGRFDLADIPPAPRGVPQVEVTFDLDANGILNVSAKDKATGKEQSIRITASGGLSEDEIEQMVQDAEANAEADKKFEEMITVRNSCDGMVHAARKTLEEAGEHSTVDERAAIEAAIAEAEEAMQGDDKEAIEAATTKITEATGPVAQKMYAAQEAEGAAEAAGAEAGASTGSADDGDVVDAEFEEVKEDDKP

SEQ ID NO: 7099 - protein, 396 aa, marine gamma proteobacterium HTCC2080
MMIKPHGSDVLHPLYVSDDVARAHLLKEAETLPSLLLNSAAAANAVMLGAGYFNPLQGYMNLADALSVAENMHTTDGLFWPVPVVNLTQDTGIAAGARLALRDPNVEGHPILAVMDVTNIEVVTDAQIATMANQIFGTDDAGHPGVSTFTQLGNQLLSGPIQVLNFSYFSDEFAGTFQTAVEIRADIEKRGWQKVVAFQTRNPMHLAHEELCRMAMERLEADGCIVHMLLGKLKAGDIPADVRDACIRKMVDVYFPPNSVMVSGYGFDMLYAGPREAVLHAVFRQNMGATHLIVGRDHAGVGDYYGPFEAQTIFSESVPAGALEIEIFSADHTAWSKKLNKVVMMREAPDHDKDDFVLLSGTKVREMLSEGVAPPPEFSRPEVAEILMAYYQSEIA

SEQ ID NO: 7100 - protein, 567 aa, marine gamma proteobacterium HTCC2080
MTKLPCWNWLRLYNRQTLGSDLVAAMIVTIMLIPQSLAYALLAGLPPEMGLYASILPLIAYAIFGTSRTLSVGPVAVVSLMTATAVGNVAQQGTVDYATAAITLALLSGLILLFLGFIRFGFVTNFLSHPVVSGFITASGVLIALSQLSHILGVAASGKTLPELAFSLATVIGATNPYTLSVGLCCLLILHWSRGHLAKRLERLGLTPLLAGALAKCVPVAVIVMSTLIAYALELDARGVELVGAIPQGMPAFSQPHIEWTVIRELILPALLVALIGFVESVSVGRTLGAKRRERIDANQELIGLGAANLASAFSGGFPVTGGFSRSVVNFDAGAKTQGASALTAVGIALTALFLTPALYYLPKVTLAATIVIAVSTLIDWKIIKTAWDYDQADFMAIVITIVLTLTLGVEIGVMSGVGASISLHLYRTMRPHFAIVGTVPGTEHYRNIDRHKVLTHHNILSIRIDESLYFANAAFLEEIVDTELSQRDGIEHVILMCPAVNMIDLSAVEALQEVNSRLLERGVKLHLSEVKGPVMDALKRSALLLQLSGNVYLSHHAAVLELTQKS

SEQ ID NO: 7101 - protein, 70 aa, marine gamma proteobacterium HTCC2080
MSERQTGVVKWFNNAKGFGFITMTDREEDIFVHFRAIQGDGYRSLNEGDAVEFTLAEGDKGLQAEEVTKP

SEQ ID NO: 7102 - protein, 138 aa, marine gamma proteobacterium HTCC2080
MSSHPQKFSLVGRLVINDLFAAVIYLVSAQFYPAHWAHLAGLIVLAVVCAVVGDISMPARQPAKKKAAAQESTHEGNIKWFNATKGFGFIVGDDGAEVFVHYRNVEGLTKRSIKQGQRVAYSVRASDRGPQAEGVKAV

SEQ ID NO: 7103 - protein, 191 aa, marine gamma proteobacterium HTCC2080
MAGSKNHKAVFLDRDGVINSDRGYVSQWSQFEFLPGVVTAMAQLQALGYRLIIVTNQSGIGRGYYTEGEFAALSTQLIDFLADHNIALTAIYHCPHHPTEALGGYKRDCDCRKPRPGMIIRGINDWQLEPEVCALVGDRLSDIEAGQGAGIGHLFRVDKTAEHDGVTAVTGLPEVVEYLTAINDAQIVKEH

SEQ ID NO: 7104 - protein, 657 aa, marine gamma proteobacterium HTCC2080
MSDSENRRFTVDPAVFYPALILLFGAVFLVLSLPGEGADLFSGFQSAIVATASWFYVLVIALIGVMVIVLAASRYGDIKLGPDHSEPEYGFLSWFSMLFAAGIGIGLMFYGIAEPVMHYLAPPIGEGGTTAAAAEAIQLAYFHWGFNAWATYAAVAMVLAYFAYRHDLPLTLRSAFYPLIGERIYGPMGAAVDVFAVICTTYGISVSLGLGVLQINTGFNYLFDLPINVWVQVSLIFGTMALATVSVVMGLDAGIKRLSEINTVLAVLLLALILIAGPTSLLLSGTLQNFGGYVASLIPKTLDLYVYAPSDWLGGWTIFYWGWWISWTPFVGVFVARISRGRTIREFLVGVTVVPTLFICLWMGVLGGSAIELISNQGVTELGTAVQENQAVGLFMFLEYLPGTELLSLICLAMIVIFFVTSADSGAMVLNMLSARGNDNTPVLQRTVWTLVIALIASILLVGGGLQALQTATIASALPFSVALLGAFWGFGKALLVDGAKRQVVPIHPPVEAGDPEWRQRLANLLAYPADASVQSFERDVVFPAMQSFAEELNGHGIRTQIGDHIAEEGILRLEVAHGEEIDFVYQVNLRGHPLPDQSLSGKSLEDMKQDQIFYRAEVHLIEGGQDYDIMGWSQEQVVLDMLNQYETHLQFLHTVR

SEQ ID NO: 7105 - protein, 299 aa, marine gamma proteobacterium HTCC2080
MTNIAFIGLGNMGGPMAKNLLAAGHTLHIFDLSEVALNDVASAGATIAGSAVEACKTAEVVITMLPAGKHVRQVYIGDNGLLDHLSPGTLCLDASTIDSDTARDVGLAVAQQGIEFMDTPVSGGVAAAQAGTLAFMCGGTSDAFDRAKVILEAMGNGEKIFHAGPAGAGQVAKAANNMLLAVHMIGTCEALAMGAKAGLEPGVLSEIMKASSGNNWSLQVYNPWPDVMPGAPAGNAYQPGFMVDLMVKDLGLAKEVADGTGVDNKLGRLALEMYQAHQSGGNGSLDFSSILNSVLESSN

SEQ ID NO: 7106 - protein, 333 aa, marine gamma proteobacterium HTCC2080
MVGALYRWQFPVMKSRVLITLPLPTTVLEALKQQFELQVWDEGPMPTAQIAQWAKTTDAILCSLGTPISADLIRSNPQLSTISSISVGVDHIDMAAATAASLPVGHTPDVLVDSTADLALALMLAATRRVVEADRFVRGGHWSADWATDFFLGTDLSRATVGIVGLGPTGLAVVKRVRAFGADVIGWNRTEREVLGVRNVALDDLFAEADIVSVHTAAAPETHHLVSADRLALMKPGAVIINTARGSVVDESALIKTLSEGKIRAGLDVYEEEPLAKNSPLLAMDNVVLMPHLGSATAATRQAMMERALANLVAGLSGKPLPWCANPVVYTGP

SEQ ID NO: 7107 - protein, 68 aa, marine gamma proteobacterium HTCC2080
MSQVTGTVKWFNETKGYGFIEQEGGPDVFVHFSAIQGDGFKTLTDGQKVQFTVATGQKGPQAENVVPA

SEQ ID NO: 7108 - protein, 571 aa, marine gamma proteobacterium HTCC2080
MDIQRYLLIAAAAVLSFMLLTEWNVFKDQRVAATQDTSPRIANSFSSPAASPQEQPTGIANRSDIYDTAANSDDVPTILPALAPQTNTPLASSEPKNIIVIKNDVLEFVVDLRGGDIIETSLTKYPERIEDPDTPLVLLERSSERTYIMQSGLVGPDGIDTNGRAIYDAAKNRYDATSGSKTIVLSARDTPPGVAVEKHFTVAPNTYTIEVSYHIVNNGTEIWQSIPFAQLKRDSSPAPSADTSGFGMQPFLGAATTTPENRYEKFTFADIADDPWKTQQTGGWIAMLQHYFTAALVPDAEATHTYSTRRTRDGFNIAGFTSEPLRIAPGQTGSWNTQFYAGPKDQYTLAELAPHLELVVDYGWLWWIGKPLFWLLTQIQSVVINWGVAIILLTLLIKTAFFKLSAASYRSMAKMRKAQPKMVAIKEQHANDKQKQSQAMMELYKKEKINPMGGCLPILVQMPVFIALYWVLMESVELRQAPFALWIKDLAVMDPYFVLPLMMGASMFFMQKLNPPPPDPMQAKLMQWLPVVFTFFFLWFPAGLVLYWVVNNLLSMAQQYYITRQIERDMS

SEQ ID NO: 7109 - protein, 411 aa, marine gamma proteobacterium HTCC2080
MENEIFQLQYALDTFYFLVCGALVMWMAAGFAMLEAGLVRGKNTVEILTKNVALFAVACTMYMVCGYAVMYGGDYLLSGISGNGVTGAEEPAAYAPSADFFFQVVFVATAMSIVSGAVAERMKLFSFLAFAVVMTGIIYPMEGSWTWGGNAVFGAYTLGDLGFLDFAGSGIVHMAGAAAALAGVVLVGPRKGKYGPNGEVNAFPGANLPLATLGTFILWLGWFGFNGGSVLATASVDAANSVAVVFMNTNAAAAGGCIAALITAKLMFGKADLTMALNGCLAGLVAITAGPDTPSALQATLFGGLGGVLVVFSIITLDKLKIDDPVGAISVHGVVGLLGLLLVPVTNDGAAFSGQIIGALTIFGWVFIASLITFGLIRATMGLRVSEEEEYEGSDIAECGMEAYPEFTSAR

SEQ ID NO: 7110 - protein, 314 aa, marine gamma proteobacterium HTCC2080
MSLETDFAMTRESLKGVQDESTYGGITSFMRRRYTRDLTGVDVAVLGVPFDLATTNRSGTRLGPRGIRTASASLAWENQVQGWDFSPLEELAIVDYGDCPFDAGTPEKVPEQIYQQAKAILATDTALLSMGGDHFVSYPLLRAHAEKYGPLALIHFDAHSDTWEDDGERIDHGTMFYHATKQGLVVPEHSAQIGLRTYNESTMGFNIFDGPTVHEQGAAAIAQRVKSIVGDRPCYLTFDIDCLDPSFAPGTGTPVVGGLSTHQALQLLQNLRGINLVGMDVVEVAPPYDVSEITALAGATVALQQLCLWAYCRR

SEQ ID NO: 7111 - protein, 510 aa, marine gamma proteobacterium HTCC2080
MAMTPRVDRFNFSLTIAVLLGISLPLLFFPEASAQLLKTAYAWIGQTFGWFYILTGATALGVSLYLAFGPHSQIRLGEGPPEFSFTSWASMLFAAGIGAGLMYWSGIEWAHYAAAPPFGAEPKSPEAYQWAASYGMHHWGIVAWALYCLPTLAIAYPFYVRRVPYLKYSTAADYWLKGRQNSWVAKLMDGMFMVALIGGAGSSLGFSTPLIAALISRLTGIPESFGLEMAVVILCVAIFSTSVAMGLGRGIRRLSDLNMIVALVLLVTILFAGDTLFLLRMAINSVGHMLQNTIAMTFWTDPIGRSGFVEDWTIFYWAWWVSYGPFVGLFVSRISRGRTIREVVLGMLILGSLGCWLFYMLLGNHSLGLQVQGKLDVMAVMESSGGNAAIIAGLDTLPLAGLIIGLLCFVSVIFCATTYDSASYTLATSATEQLHPSEDPPRWHRLFWAIAVAILPIALMYAGGIREAQTAVLVVSLPLVLTLWPAGYGLLKSLQADRQRQNAADLSSEA

SEQ ID NO: 7112 - protein, 300 aa, marine gamma proteobacterium HTCC2080
MTDGEQRCGYAAIIGRPNVGKSTLLNYALGQKISITSRKPQTTRHQVMGIYTDSGDQVVFVDTPGMHLEQGKAINRYMNRAASSALADVDLVLFVVDRNRWTSEDDLVLEALQHTETPVALVINKIDRLEDQGVLLPWTESIRAKYGFDAIFPISALRQANLPALMTYIRNKMPSGVHFFPEDQVTDRSERFLAAELIREKIVRQLGDEMPYTTAVEIESFKLDGKLLRIDALIYVERQGQKKIVIGEGGSRLRSIGTEARKDMEMAFSGKVMLKLWVKVKSGWSDDERALRSLGFEDGI

SEQ ID NO: 7113 - protein, 107 aa, marine gamma proteobacterium HTCC2080
MDIMETIKEQVTSNRVILYMKGSPNQPQCGFSARAVQALASVGERFAYVDILSNPEIRANLPIYANWPTFPQLWVDGELIGGCDIIAEMETSGELAEAIKAGASDQA

SEQ ID NO: 7114 - protein, 392 aa, marine gamma proteobacterium HTCC2080
MREAVIVSTARTPIGKAYRGSFNNLAGPSLGGNAIRAAVARAGIEGDRVDDVTMGSALTQGTQGMNIGRLAALRGGLPVTVSGQTIDRQCSSGLMAVSMAAKQIIVDGMDVTIGGGQDSISLVQNEHMNSHRLADEELMGMHKNIYMPMLQTAEVVANRYGISRDAMDEYGLQSQLRVAAAYEAGKYDNEIVPVTATRIVWNKETGEQSEAEVTVSADEGVRASTLEGVKGLRTVIEGGTITAGNASQLSDGASAQVLMEAKLAEQLGLQPLGAYRGMAVAGCEPDEMGIGPVFAVPKLLKQHGLSVDDIGLWELNEAFAVQVLYCRDQLGIDNDKLNVDGGAIAVGHPYGMSGSRMIGHALLEGKRRGVKYVVVTMCVGGGMGAAGLFEVY

SEQ ID NO: 7115 - protein, 636 aa, marine gamma proteobacterium HTCC2080
MAKNLLLWLVIAAVLLSVFNNFSMQGTTEQVGYSSFIEEINNDRIRKVVVDGLTISAERYDGSSFETIRPMVEDPKLMDDLLTHSVEVEGRKPEQQSVWTQLLVASFPILIIIAVFMFFMRQMQGGGGGRGGPMSFGKSKAKLLGEDQITTTFADVAGVDEAKEDVQELVEYLRDPSRFQKLGGRIPRGILMVGQPGTGKTLLAKAIAGEAKVPFFSISGSDFVEMFVGVGASRVRDMFEQAKKQSPCIIFIDEIDAVGRHRGAGLGGGHDEREQTLNQLLVEMDGFEGSDGVIVIAATNRPDVLDPALLRPGRFDRQVVVGLPDIRGREHILKVHMRKVPLGEDVEPSKIARGTPGFSGADLANLVNEAALFAARSGVRMVGMQQFELAKDKIMMGAERRSMVMSEKEKLNTAYHEAGHAIVGRLMPEHDPVYKVSIIPRGRALGVTMFLPEEDRYSHSRRHIVSQITSLFGGRVAEEMTLGPEGITTGASNDIQRATEIARNMVTKWGLSPKLGPLMYDEGGEEVFLGRSAGQPAKAMSDETARAIDAEVRNIIDECYQGAHQILEDNRKKLDVMAEALMQYETIDADQIDDIMNERVPRPPADWGDSGDSQSDDGPSSSTDSVGPIGDPAGEH

SEQ ID NO: 7116 - protein, 405 aa, marine gamma proteobacterium HTCC2080
MSVNKVVLAYSGGLDTSVIVRWLQETYDCEVVTFTADIGQGEEVEPARAKAQALGIEEIYIDDLREEFVRDFVYPMFRANTIYEGEYLLGTSIARPLIAKRLVEIANETGADAISHGATGKGNDQIRFELGAYALKPGIKIIAPWREWDLGSRESLMAYCEQRAIPVDFSGASKKSPYSMDANLLHISYEGGVLEDPWADAEESMWRWTVSPESAPDQGEEIILSFSCGDITAIDGVAHTPAEVLEILNQRGGAHGIGRADIVENRYVGMKSRGCYETPGGTIMLRAHRAMESITLDREAMHLKDELMPRYAKLIYNGYWWSPERLMLQSAINDSQRWVNGEVRLRLYKGNVTVLGRRSDDSLFDESIATFEDDAGAYNQQDAEGFIKLNALRMRIAAQRGRSQH

SEQ ID NO: 7117 - protein, 387 aa, marine gamma proteobacterium HTCC2080
MVNGARTPMGGLLGDLAEVTAVDLGASAVKATLEKTGIEAGAVDEVFMGCVLPAGLKQCPARQAMIGAGIPSSTGAVTVNKACGSGMQATIYAIDSIAAGTNQLVISGGLESMSNAPQLLMTGRKGIRLGHGQTFDHMFLDGLEDAYTGGAMGSFAQATADAHGLTREAMDQYAITSLERAKSATESGVLQGEITPVTIKTRRGEHTVEHDEQPLKGRPDKIPSLRPAFTKDGTITAANSSSISDGASALLVASAAAVEAHNLQPMAKIVAHARFSRPPEEFTLAPVGAIEKLLERTGWNAADVDLWEINEAFAMVTMLAMNAFNLDHDRVNVHGGACAQGHPIGSTGSRILVTLAHAMQHYGKQRGIAALCIGGGEATAVAIERVV

SEQ ID NO: 7118 - protein, 407 aa, marine gamma proteobacterium HTCC2080
MEAVHSVWQVDTFLAVTIGIVVLFLGKRINRLVPVFGRYSIPEPVTGGLFIAVILFAIHSFADISIEFELGARDALLVYFFTTIGINASFKDLAAGGKPLALLLLVTVIYMIIQNLTGIGIATLLGLEPAVGLLGGTVSLIGGHGTAIAWAPRFAENYGITNAMEIGVACATFGLVLASLIGGPVAKFLVTRHQLVAGSDDNLDVGIDDEADPVSLNYMELLDAVLALHICIIIGYFLNEGLNQVGVHLPLFVSCLFAGIIMTNLRPHALPRITGTQWPTRTPAMALIADISLGTFLAMSLMSMQLWEVIDLAGALFSILGAQVVVAALFMIFVVFPIMGKSYEAAVIASGFGGFSMGATPTAMANMSAVTQRYGPCHQAFIVVPLVGAFFIDVTNVILIQLMFSWL

SEQ ID NO: 7119 - protein, 508 aa, marine gamma proteobacterium HTCC2080
MPTDHSSSTTAPRRVTAFSALFVCGFLALFFIDSALFSRWIDQSFSWSAQYFGLFWQLLMIANFAVAIFLATRPYATFKLGGCETPEFPGFQWVAMVLCTLLAGGGVFWAAAEPVAHFVTVPPVFSNIAPETAEAVPLALSQSFLHWGFLAWSILGSLTALVLMRLHYDMGLPLAPRTLLYPLLGEKGVRGPIGDAADVVSILAVFAGTVGPIGFLGLQISYGLSSLYDTPDSTTIQLLTIAALMVIYLTSAVSGMHRGIQILSRLNIVLGVALLLFLLLAGPTAFIFQAFFEGLLSHLRWLPEQALYRGDAGWFDNPGWLSYWTIFFWGWFIGYGPMMAIFIARISRGRSAREIIILMSVIAPLLTMAWFSILGGTGLGLEMANAGTITEPFEGFNLPAVLLAITQSMPFNAIVSFLFLILTALFVATTGDSMTYSLSVVSAGHDNPPRSLRLFWGLALGVTAMILVGGPDGGVGKLQNFIVVTAVPVSLLLLPSLWGALPLLKRRQ

SEQ ID NO: 7120 - protein, 430 aa, marine gamma proteobacterium HTCC2080
MKLYAPKVAFAVVVANMVGTGVFTSLGFQLLGLSDTRVILLLWLIGGICALCGALCYAELGVRHPESGGEYHFLTELVHPYAGFISGFVSATVGFAAPIALAALTFGSYLQAGFLPVDPQWSATALIIGLVVVHTRTRRESSAGQVYLTVLKLLLITGFIGLALLNSPGFVGQLFNFTPLSTADMLSNEAAVALVYVTYAYSGWNAATYVLGEMEDPRRHLPRVLLAGCGFVTLLYLALNAVFLISAPVETMRGEVEIGYVVAGYLLGDTGATIVAVILAGVLISTVSAMVLAGPRALMRLGGDYPRFKWLGTLSDDGLPKNAVIFMGGIALLFLWSSTFEQILIFAGLLMAANTFVTVIALFISRRKFRRPPDDSLYQMPLYPLPALIFLGITGWTLAYSAFSFPTQVAVFAAALIAGWPLYRWARHEA

SEQ ID NO: 7121 - protein, 304 aa, marine gamma proteobacterium HTCC2080
MNKDMPQNGAAEQKRSAAFIGLGAMGFPMAGHLQRAGYPTTVYNRSPTKASHWHETYQGKTAPTPAEAALNADLVFVCVGNDDDVREVTFGNQGVLATLKPGSILIDHTTASADLARELQAACQKKNIGFLDAPVSGGQAGAESGQLTIMAGGETSTFDSAQPMMSIYGKSVRLMGPCGTGQLTKMANQICIAGVLQGLSEALHFSDRAGLDTAAVIEAISQGAAQSWQMDNRSQTMIQGQFDFGFAVDWMRKDLGLVLDAASRAGASLPLTALVDQFYGDVQNLGGGRWDTSSLIERLRKLNA

SEQ ID NO: 7122 - protein, 538 aa, marine gamma proteobacterium HTCC2080
MSEPVTQVEVAGFYRGYNRGIAISVKLIIVLLVLWTATTPNAADMLLVVQAATVEYFGGWYIGATALFTILCLVLAVLPGTGSQRLGMPDTRPEFSRFAWFSMMFGAGIGVGMLTYSTAEPLYHFGNNPDVIMGHAEAYTASNVGPAYKWTLLHYGLTPWACYAVVGLSLAYFSYRRGMPLTIRSPFSAMLGQRSSTVVGAFVDTAAILATLIGIAVTIGYGVTQLAFGAHHITHWAWLIEENQPTKLALAAAVGIIVLAAMMSALSGLGRGIKWLSNLNMVLSWVLLLIFLVFGATLFAGEVFVQGILDYLAALPAMSSTIWSDSSTQKDLALAQWQSNWTIFYWAWWIAFTPFVGLFLARVSRGRTLREYAVGAIIMPSLMCFAWLCIIGGTALDLELSGVAQGAIINADLSAQLFATVDVLFQSAWVFPVACLCVVLLLTYLITSADSAVLVVNTIVSGGVEQEHASPHIVLWSLLLGLIIITLLLAGGLDALRSVMIIGALPFSGVMFLMMLSLLTAMWRDRHGVSPSRKIQEV

SEQ ID NO: 7123 - protein, 376 aa, marine gamma proteobacterium HTCC2080
MIVGIPKEIKNHEYRIGMTPAGVRELVNRGHQVLVETEGGVGVGFDNASYGAVGAQIVASPEDILAAADMIIKVKEPQANECRMLRSGQVLFTYLHLAPDPDQAQLLLDSGVSAIAYETVTNAKGGLPLLAPMSEVAGRMSIQAGAHHLEKAQGGNGMLLGGVPGVEPARVVVLGGGVVGTQAAKMAAGLGAQVTIFDRSIERLQQLDDLFQGRAVGLYSTQNAVEQYVRAADLVIGAVLIPGASAPKLVTRDDVAAMRPGAVLVDVAIDQGGCFETSQATTHQSPTYVVDDVVHYCVANMPGGVARTATMALTNATLPFALKLADKGLAALQDDDHLRQGLNVHAGHITHEAVAAALNADYLPADKALNPLMLSA

SEQ ID NO: 7124 - protein, 323 aa, marine gamma proteobacterium HTCC2080
MLNDEALLTSGRRTLTLEGQAVTKLAESLSPSFAAACQLILKTQGRVIVTGMGKSGHIAHKIAATLASTGTPAFFVHPGEASHGDMGMITQRDTVLALSNSGTTPEILTLLPLLKRLGVKLVSLTGHAESALACASDVHVDAGVDTEACPLDLAPTSSTTAALAMGDALAIALLESRGFTEEDFAFSHPGGALGKRLLLRVEDLMIKGTDIPLVEPTATLAEALMEITAKGLGMTIVGENGQLKGIFTDGDLRRALEEQPDINSVAITALMSASVKTLPAGHLAAEAMHIMEKNRISSLVVTDAQEQIAGVIHLMALLKAGIN

SEQ ID NO: 7125 - protein, 588 aa, marine gamma proteobacterium HTCC2080
MNILVINCGSSSVKYQLIDCLHEVTVTEGVTELSANVDAAVAVKQLLQKFRNEIIDAVGHRVVHGGDTFRDAVLIDAAVLAKIQEWVPLAPLHNPPALAGIEASQTVLADVPHVAVFDTAFHATLPRRASHYAIDTTLAEKHRIRRYGFHGTSHQFVALEAARYLGRPLNELRLITLHLGNGASACAVEMGSSTETSMGMTPLEGLVMGSRSGDIDAGVIFKLLRDEVKNVDELDKLLNLRSGIKGLSGLSHDIREIEAAAASGHDGARLSIAVFAHRVKKYIGAYAAAMGGVDAVILTGGIGENSASLRQRILQRLEFLGIQVDEDNNQHAEVDHQNKVALITTDNSRVPALVVKTNEELMIARQAACLIGQQASLKTDLSIPIAVSARHLHLDKHTFALLFGDDAEPTHHADLSQPGQFSCKEKVTLVGTRNTIEGVRLLGPLRSKNQIEVSRTDEYLLGIDAPVRDSGRVKDSAPITLKGPKGIVKLKEGLICARRHIHMHPDDAERFGVKNKDEVEVAITGGPRDLIFCDVLVRVSHGYRLEMHIDTDEANAAELDRQSIGELVYSGVNDRLASIRCAKTTNQN

SEQ ID NO: 7126 - protein, 408 aa, marine gamma proteobacterium HTCC2080
MNAHVNTPIYLDYLSTTPVDPRVADAMSECLSMEGTFGNPASRSHVFGWKAEEAVENARAQIADLINADPREIVWTSGATESDNLAIKGAAHFYRKKGQHIVTSKIEHKAVLDTCRQLEREGFEVTYLEPNTAGLTTPEAVQAALRPDTVVVSVMHANNEIGVVNDIEGIGEVCRAAGVIYHVDAAQSTGKVPLDMEAMKVDLLSMSAHKMYGPKGVGALYVRRKPRVRLEAQMHGGGHERGMRSGTLATHQAVGFGEAARIAKEEMADETLRLMSLRARFWKGLEDMQEVHINGDVDRRLPGALNVSFAFVEGESLLMSLKDLALSSGSACTSASLEPSYVLRALGLNDELAHSSLRFSFGRFTSEADIDHAITQVRGAVEKLRELSPLWDMYQDGVDLNSIEWSAH

SEQ ID NO: 7127 - protein, 411 aa, marine gamma proteobacterium HTCC2080
MALIVQKYGGTSVGSADRIEHVADKVAGFHRDGHDVVVVVSAMSGETNRLIELAHSIEEYPQPRELDMLVSTGEQVTTALLSMALHKRKVPARSYNGSQVRILTDTAHTKARIQHIDGHRLRADLDQRRVVVVAGFQGVDPDGNITTLGRGGSDTTAVALAAALSADECQIYTDVDGVYTTDPRVESSARRLEKITFEEMLELASMGSKVLQIRAVEFAGKYAVPLRVLSSFKEGPGTLITMEEDADMEAPTIAGIAFNRDEAKLTVLGVPDTPGVAYKILGPVGEANIEVDVILQNTGEEGHTDFTFTVARNDLENARKILEDLVVQLDAKELRADAKIAKVSIVGVGMRSHANVAARMFKALSEVGVNIQMISTSEIKISVIIEENYLELAVRSLHSAFGLEHNPEGNG

SEQ ID NO: 7128 - protein, 380 aa, marine gamma proteobacterium HTCC2080
MRLAIPRETHPGENRASVTPETVKKLVRLGADLAIETGAGAGAGFSDEAYAAEGASVVTDRDALLGSADMVLRLRKPELQEVAKLKSGCIHVSYLDPFNEHELIREFAAKSITAVSMEMIPRSTRSQKMDALSSQANLAGYMAVMLAATRLPRIFPMMMTPAGTLKPSKVFIIGAGVAGLQAIATAKRLGARVTAFDTRPVVAEQVQSLGGKFLEIDLGDTGQTADGYARELTPEQVEIQRQAQKAVIADSDVVITTAQVFGRKPPVLVTADMVAGMASGSVVVDMAAETGGNVEGSVPDEVVNVGGVTIVGTGNLANLVARDATQMYASNMFNLVEDTWDEEAKAFVLDMENDILPGCVITHGGAVVHPTIKDILEGAS

SEQ ID NO: 7129 - protein, 595 aa, marine gamma proteobacterium HTCC2080
MSDDPSKPQEASEGVSTAGFTPLRGLLGLLWRHKLRLVAASLALILTSMLQLSLGYGLQLLIDDGFAGGDPEGLRKAVIFIVAVGAAMAIGAMVRFYLVSWLGERVSADLRSAVFSNLVGLHPSYFESNQSGEIMSRLTTDTTLLQTLIGSSVSLAARNSLSLVGALVLMLITNLKLSLIILVGVPLTLLPILFFGRRVRNLSNKSQQTIAEVGSHAGEILQSIKIVQSYNREAMEQTAFDRDVTVAFDVARARIRQRALLTGFAILLLVAAMAGMMWSGGQDVISGRMSGGEMGAFVFYAVMLGAAFATLSEVWGDLQRAAGAAERLMELLNETSVIVDSGTEHPKIRSSITFKQVTFSYPSRPDQPALTDFELSIPPGKSLALVGQSGAGKSTLFELLQRFYDPQQGSISYGAHDLRQIPLAAWRERAALVPQSPVLFSGSVRYNIAYGKPDATDAEIQSAAQTAYAHDFISQLPEGYNSPLGAQGVRLSGGQRQRIAIARAVLKNPEILLLDEATSALDTESEYYVQQALSEIMHDRTTIIIAHRLSTIINADKIAVIDQGRVVATGTHNELLSTSALYARLASLQFDQESS

SEQ ID NO: 7130 - protein, 1494 aa, marine gamma proteobacterium HTCC2080
MTPKDIAGVASVSTDLQGLYRPEEFRDNCGFGLIAHIQGQPSHRLLETAIESLTCMTHRGGIAADGKTGDGCGLLLQMPDSFMRAEAKAHFAKDLGQHYAVGMIFMGAEPTAQDASKAALESALAGNELAVIGWREVPLNPEVCGEIALDQLPHIEQVFIDAEKLDHAQVTARLFMARRQAEIAMVDDPDFYICSLSDQVVSYKGLVMPADLARFYPDLNDDRLETAICVFHQRFSTNTLPRWPLAQPFRMLAHNGEINTIEGNRSWSRARTSKLASPLLPELQSVIPLVNTAGSDSSSLDNMLELLTTGGVELPRALRMLIPPAWQNIEGMDPDLKAFYQYQAMHMEPWDGPAGIVLTDGRYACCLLDRNGLRPARWVTTTDGFITLASEVGTHGYSTADVIAKGRVGPGQMLVVDTHEGKVLHTDDIDNMLKSRHPYKRWLRDNARYIEGSFDGESAPGIPESELDTYQKMFQVSFEERDQVLRPLAESGNEAVGSMGDDTPLAVLSARDRSIYDYFRQKFAQVTNPPIDPLRESIVMSLEVDLGREGNIFDEIEGHAYRVSLTSPVLSQGKFNTLLNIEDEKLKIADIDATYDPENGDLRSAVEGLCLTAETAVRGGATLLILSDRQIGDSRIPIHSLLATGAVHHHLIRSGLRADANLIVESGSARDSHHFACLLGFGATAVYPYLAYSILEGQLRSGELLGDPTRCYKNYRKGINKGLLKIMSKMGISAVNSYRGAQLFEAVGLDKEVVDACFTGVASRIAGAGFGELERDLWQVAAKARSRRKTLDQGGLLKYVHGGEYHAFNPDVVMTLQQAVATGDYADYQRYAQYCTDRPVAALRDLLDLDLSGEPVAIDEVEPIEAILKRFDSAGMSLGALSPEAHESLAMGMNHVGARSNSGEGGEDPARFGTNRVSKIKQIASGRFGVTPHYLVNAEVLQIKVAQGAKPGEGGQLPGGKVNDLIARLRYSVPGVTLISPPPHHDIYSIEDLAQLIFDLKQVNPTALVSVKLVSEPGVGTIAAGVAKAYADLITISGYDGGTAASPLTSIRHAGSPWELGLAEVHQTLRGNRLRGKIRVQADGGMKTGLDVIKAAILGAESFGFGTAPMVAMGCKYLRICHLNNCATGVATQNAVLREEHFNGDAERVINFFNFVARETREWLAKLGVCRLEDLIGRTDLLKRLPGKTDKQARLDLGPIVWVDPDAADQPQFCEVTSNDPFDRAEMAERMVADMLSAIESKTGGEFHYSITNCDRSIGARISGEIARRYGNTDFDSTPLEIRLTGTAGQSFGVWNAGGVHMYLEGDCNDYVGKGMAAGKLVVYPPRDSIFASQDTSIIGNTCLYGATGGKLFAAGVAGERFGVRNSGAFAVIEGAGDHCCEYMTGGCITVLGPTGVNFGAGMTGGFAYVLDQDRSFIDRINSELVEVHRVSSEAMEAYRHYLRDNIREFVAETQSDWGQHILDNFEDYVGKFWLVTPKAADFEKLLSRLRDTD

SEQ ID NO: 7131 - protein, 859 aa, marine gamma proteobacterium HTCC2080
MRMDKLTNPLQNVLADAQSLAVGGDQQFIEPIHILKSLLNQTGGSAVPLLQKAGANGSQLASAVSDALAKLPTVNGGSGDVHLSQESSRLLNRADKLAQKRNDSYLSSELVLLAMIDASSPVAKLLTKSGASRSSLEQAIEDVRGGDGVNSPEAEASRQSLEKYTVDLTELAKVGKLDPVIGRDDEIRRTIQVLQRRTKNNPVLIGEPGVGKTAIIEGLAQRVINGEVPEGLKNKRILSLDLGALLAGAKFRGDFEERLKSVLNELSKEEGRIILFVDELHTMVGAGKSEGSMDAGNMLKPALARGELHCVGATTLNEYRQFVEKDAALERRFQKVLVDEPSEEDTIAILRGLKERYEVHHGVAVTDSAIIAAAKLSQRYITDRQLPDKAIDLIDEAASRIRMEIDSKPESMDRLERRLIQLKIEREAVNKDQTEAAQKQVALLDVQVAELDQELSDLDEILTAEKAAVQGAAKIKAAIEQAKLDLEMAQRAGDLTRMSEIQYGELPELDKQLGIAEQVEQGPTQLLRNRVTEEEVAEVVSRWTGIPISKMLEGDREKLLRMESVLHERVVGQDEAVIAVANAVRRSRAGLSDPNRPNGSFLFLGPTGVGKTELCKALASFVFDSDQAMVRLDMSEFMEKHSVARLIGAPPGYVGYEAGGYLTEAVRRRPYSLLLLDEVEKAHPDVFNILLQVLEDGRLTDGQGRTVDFKNTVIVMTSNLGSDLIQEMAGDERYDAMKAAVMGVVGRHFRPEFINRVDETVVFHPLAEEQIRGIANIQVESLRHRLAERDLALQLSDEVLDHLAEAGFDPVFGARPLKRAIQQLLENPLAQQILQGDYAPGDTIQALVEGQKIILSRQH

SEQ ID NO: 7132 - protein, 582 aa, marine gamma proteobacterium HTCC2080
MEQLSGGEMIVRALEDEGVEYVFGYPGGAALHIYDAIFKLDAVPHILVRHEQAATHAADGYARATGKPGVVLVTSGPGATNAITGIATAYMDSIPMVVLAGQVQTHLIGEDAFQETDMVGVSRPIVKHSFMVKRTEDIPSIIKKAFYIATTGRPGPVVIDIPKDLTHPEHKFDYHYPESVTLRSYQPSSRGHTGQIRKAARLLLSAKRPIIYAGGGVIQGEGCELLTTLAQKLNYPVTNTLMGLGAYPGSDRQFLGMLGMHGFYEANMAMHHSDVILAVGARFDDRVTNTVGKFCPGAKIIHIDVDPASIAKIVPVDIPIVGPVQTVLTELLAQIDAHLQGSDREMPEPAALAQWWQQIESWREAHGLWHGRRYGESELAMPQDVIKCLYEVTEGDAYVTSDVGQHQMFAAQYYKFDKPRRWINSGGLGTMGFGLPAAMGIKLALPDAEVACVTGEGSIQMNIQELSTCAQYGTPIKIVSLRNNYLGMVKQWQDMQYEGRYSESHYAASLPDFVKLAESFGHVGIKVEKRDDLEAAMREAFALKDRLVFLDVFVEPHEHVYPMHVAPSGAMKDMWLSKTERT

SEQ ID NO: 7133 - protein, 552 aa, marine gamma proteobacterium HTCC2080
MSTEARSNFLKTQIQSDLDTGGARRLVTRFPPEPNGFLHLGHAKSITVNFELAKQFGGECHLRFDDTNPEKESQIFIDAIQEDVRWLGYQWHGEVRYASSYFQQLYVWALHLIDQGHAYVCDLSADEAREYRGSLTEAGRNSPHRSRSIEANRDLFERMRAGEYPDGSRVLRAKIDMASPNINLRDPILYRIRKAHHHQTGDAWPIYPTYDFAHGQEDAIEGVTHSICTLEFEDHRPLYDWFIEHLPVPSRPRQIEFARLNTSYTMTSKRKLKQLVDSKAVEGWDDPRMPTLAGLRRRGYPPAAIRHFCEEVGTSRSDSVVDVAMLESAVRNQLNAESPRVMAVLNPLPLTITNRERPEVLAVANHPGDEAMGTRSVPFTSEIYIDAADFREEANKKYKRLVIGKRVRLRGGYVIEADRCDHDSAGEVSHVYAHVVEGTLGEDPPDGIKAKGVIHWVSATEGLSAEIRCYDRLFTDPNPGKAEDMMALLNPKSLVRLEHAVIEPSAALAAREGAYQFEREGYFVADRYDHTPEKPVFNMTIGLRDTWSDSHG

SEQ ID NO: 7134 - protein, 367 aa, marine gamma proteobacterium HTCC2080
MSSSIFHPLKVASVVPETAHAVCLSFDVPAHLQDVFAFQPGQYLTLRTTIDDVPVSRAYSICAPPSSQQLTVAIKRVDNGVFSNFANDHLQCGMTLEVMAPQGSFGLPTAEAIDTNYLFIAAGSGITPIMSMLTAALEADPKATATLLYGNQRSSSIMFRQQLSFLKNQYLARFNWINILSRETQDAPVLNGRIDNHKGAELSRRVLNLKGFDGFFLCGPESMISEVSRGLRDSGIPEDKIQYELFGSSAEDAAERVAKHHARAEAFSGKMCDVTLVNDGRASLVRIAADGENLLDAGLNLGLDLPFACKGGVCSTCKALLVEGEVEMDIQRGLTADEIARGMILTCQAHPISERVHIDFDKRWSGA

SEQ ID NO: 7135 - protein, 401 aa, marine gamma proteobacterium HTCC2080
MTEAYICDAVRTPIGRYGGGLSAVRTDDLGAIPIAALMKRNPNTDWLAVDDIWMGCANQAGEDNRNVGRMSALLAGMPEQVPAVTLNRLCGSGLDAVGSAARAIKSGEVSLAIAGGVESMSRAPYVTSKANSAFDRNVQTYDTTIGWRFVNPVFKKRWGTDSMPETAENLAIQFEISRADQDAFALRSQQKAVAAQDEGRLGEEITLVSIPQRKGDSLKVTLDESPRKDTSLERLASLPAPFREGGTVTAGNASSVNDGACALLLASEAAASAQGLEPLARVVAMATSGLEPRIMGHGPYEATLKVLAQAGLKLADMDVIELNEAFAAQALAVTRSLGLADDAEHVNPNGGAIALGHPLGMSGARLVTTAAYQLQRSNGRFALCTMCIGVGQGIALIIERV

SEQ ID NO: 7136 - protein, 407 aa, marine gamma proteobacterium HTCC2080
MDMTIVYGVGMFTAIVLALVMVILAARSRLVSSGNVSIEINGGKTIEVPAGGKLLQTLADANLFLASACGGGGTCAQCKCQVSDGGGSMLPTEESHFTRRQANDGWRLSCQTPVKQDMRIQIPEEVFGVKQWECTVESNDNVATFIKELVLRLPEGESVDFRAGGYVQLECPPHNVNFDNFEIGEEYKGDWERFGFFKYGSASEDTTIRAYSMANYPEEKGIVKFNIRIATPPPGSEGIPPGIMSSWVFDLKPGDKITVYGPFGEFFAKETDAEMVFIGGGAGMAPMRSHLFDQLKRLNSKRKITFWYGARSLKEMFYVEDYDGLQAENENFTWHTALSDPQPEDNWDGLTGFIHNVLFEEYLKNHPAPEDCEYYMCGPPMMNAAVIKMLVDLGVERDNIFLDDFGG

SEQ ID NO: 7137 - protein, 310 aa, marine gamma proteobacterium HTCC2080
MVFTGNANPELARQVADRLYLTLGAAQVSKFSDGEITVELNENVRGKDVFVIQSTCQPTNDNLIELVLMIDALRRASAGRITAVVPYFGYARQDRRVRSARVPISAKVIADMMASVGVDRVLTVDLHAEQIQGFFTCAVDNVYASSVLNHDITRCNYENLVVVSPDIGGVVRARAIAKQLDDADLAIIDKRRPRANEAQVMNLIGDVDGRTCIMVDDMVDTAGTLCSAAKALKERGATKVVAYCTHAVLSGKALENIRNSELDELVVTDSIPLSDEAKALNIRQLTISDLLAESIRRVSNEESISALFDE

SEQ ID NO: 7138 - protein, 617 aa, Pyrus communis
MEYGRLQPSEPGGSSKHHVAENPSLPQTATSSTSSTSRSRKNKLILISLLSVALILASAVSAVVLFAGRSKASNSAASSALHRKPTKAISDACATTRFPSLCVDSLLDFPGSTTASEQDLVHISFNMTLQRLSKALYLSSSLSYRQMDPYSRSAYDDCLELLDDSVDALSRALTSVIPGAASTSTSTSTQDVLTWLSAALTNQDTCGEGFEQINGGDVKNEMDQRLKDLSELVSNCLAIYSAIGGGDFSGVPIQNRRRRLLGNSDMERDIMGDNANVSRDFPRWLGRRERRLLAVPGSQIQADIIVSKDGSGTFKTIAEAIKKAPESSSRRTIIYVKAGRYEESNLKVARKKTNLMFIGDGKGKTIITGGKNVAQKVTTFHTATFAAQGAGFIARDLTFENYAGPDKHQAVALRIGADHAVVYHCSIIGYQDTFYVHSNRQFVRETDIYGTVDFIFGNAAVVFQKCSLYARKPMANQKNTITAQNRKDPNQNTGISIHDCRILATPELEGSKGSFPTYLGRPWKLYSRTVYMLSFIGDHVHPRGWLEWNGNFALDTLYYGEYMNSGPGAAVGQRVTWPGYRVITSPVEAGKFTVAQFIYGSSWLPSTGVAFLAGLSV

SEQ ID NO: 7139 - protein, 342 aa, Cyanidium caldarium
MFAFLPSVASYRLQGVHAHGTCSVLGGKELRLLPSRVGCRRGSATLHMVAAEKKVPVNLFKPSSPLVGTCIYNKKIVGDDAPGDTCHVIIHHDGKLPYLEGQSVGIIPEGTDDKGRPHKLRLYSIASTAAGDFGDYKTLSLVVKRLVYTNEKGEEVRGVCSNFLNDIKPGEPIKMTGPVGKEMLMPDDPNATIIMLATGTGIAPFRAFMRKAFVEKHADYQFKGKMILYLGVPTSSSLLYRDELEEMKANFPDQVELHYAISREMKNKQGGRYYLQDSMAERGEEIWQLLRKDNTYVYMCGLKGMDSGIDSFMTDLAAKDGVNWADFKKQLKQQHRYNVEVY

SEQ ID NO: 7140 - protein, 208 aa, Listeria monocytogenes
IGLVFWGAAEPLSHYAVQAPGGEVGTQAAMKDALRYSFFHWGISAWSIYAIVALALAYFKFRKNAPGLISATLYPILGKHAKGPIGQLIDIIAVFATVIGVATTLGLGAQQINGGLTYLFGVPNNFTVQFTIIIIVTILFMLSAMSGLDKGIQLLSNVNIYVAGVLLVLTLILGPTLFIMNNFTNSFGDYLQNIIQMSFQTAPDAPDA

SEQ ID NO: 7141 - protein, 208 aa, Listeria monocytogenes
IGLVFWGAAEPLSHYAVQAPGGEVGTQAAMKDALRYSFFHWGISAWSIYAIVALALAYFKFRKNAPGLISATLYPILGKHAKGPIGQLIDIIAVFATVIGVATTLGLGAQQINGGLTYLFGVPNNFTVQFTIIVIVTILFMLSAMSGLDKGIQLLSNVNIYVAGVLLVLTLILGPTLFIMNNFTNSFGDYLQNIIQMSFQTAPDAPDA

SEQ ID NO: 7142 - protein, 208 aa, Listeria monocytogenes
IGLVFWGAAEPLSHYAVQAPGGEVGTQAAMKDALRYSFFHWGISAWSIYAIVALALAYFKFRKNAPGLISATLYPILGKHAKGPIGQLIDIIAVFATVIGVATTLGLGAQQINGGLTYLFGVPNNFTVQFTIIIIVTILFMLSAMSGLDKGIQLLSNVNIYVAGVLLILTLILGPTLFIMNNFTNSFGDYLQNIIQMSFQTAPDAPDA

SEQ ID NO: 7143 - protein, 585 aa, Populus tremula x Populus alba
KTVISFLHAIFPIFCWCRSYKATNFKNDLLAGLTLASLCIPQSIGYATLAKLDPQYGLYTSVIPPLIYAVMGTSRDIAIGPVAVVSLLLSSMISKLVDPVANPIPYRNLVLTTTFFAGIFQAAFGLFRLGFLVDFLSHAAIVGFVAGAAVVIGLQQMKGLLGITHFTNKTDVISVMEAIWRAVHHSWNPHNFILGCSFLTFILITRFGRRNRKLFWLPAIAPLISVVLSTLLVYLTRADKHGIMIIKHIKRGLNPSSVHQLQFNSPHIGEVAKIGLIVAVVALTEAIAVGRSFASIKGYHINGNQEMVAMGFMNILGSFTSCYVATGSFSRSAVNFSAGCETAMSNIVMAITVIISLELFTRLLYYTPIAILAAIILSALPGLVDLHEAYNIWKIDKLDFLACAGAFVGVLFASVEIGLLAAVTISFVKILIISIRPGAEVLGRLPETDIFCDVDQYPMAAKNPQVLVIRVKSGLLCFANANFVKEKIMKLATEEEEGRKGKRTVQVVILDMSNLMNIDVSGITSLVELHKNLASSGMELAITNPKWQVIHKLRVANFVTKIGGRVFLTIGEAMDACLGAKMAAV

SEQ ID NO: 7144 - protein, 585 aa, Populus tremula x Populus alba
KTVISFLHAIFPIFCWCRSYKATNFKNDLLAGLTLASLCIPQSIGYATLAKLDPQYGLYTSVIPPLIYAVMGTSRDIAIGPVAAVTLLLTSMISKLVDPVANPIPYRNLVLTTTFFAGIFQAAFGLFRLGFLVDFLSHAAIVGFVAGAAVVIGLQQMKGLLGITHFTNKTDVISVMEAIWRAVHHSRNPHNFILGCSFLTFILITRFGRRNRKLFWLPAIAPLISVVLSTLLVYLTRADKHGIMIIKHIKRGLNRSSVHQLQFNSPHIGEVAKIGLIVAVVALTEAIAVGRSFASIKGYHINGNQEMVAMGFMNILGSFTSCYVATGSFSRSAVNFSAGCETAMSNIVMAITVIISLELFTRLLYYTPIAILAAIILSALPGLVDLHEAYNIWKIDKLDFLACAGAFVGVLFASVEIGLLAAVTISFVKILIISIRPGAEVLGRLPETDIFCDVDQYPMAAKNPQVLVIRVKSGLLCFANANFVKEKIMKLATEEEEGRKGKRTVQVVILDMSNLMNIDVSGITSLVELHKNLASSGMELAITNPKWQVIHKLRVANFVTKIGGRVFLTIGEAVDACLGAKMAAV

SEQ ID NO: 7145 - protein, 550 aa, Pseudomonas mosselii
MYVYDEYDQRIIEDRVKQFRDQTRRYLAGELSEEEFRPLRLQNGLYIQRFAPMLRVAVPYGQLNARQTRMLAKIARDYDKGYAHISTRQNVQYNWPALEDIPEILAELATVQMHAIQTSGNCLRNVTTDQFAGVAADELVDPRPWCEIVRQWTTFHPEFAYLPRKFKIAVNGSSDDRAAIEVHDIGLEPVRNAAGELGFRVLVGGGLGRTPVIGSFINEFLPWQDLLSYLDAILRVYNRYGRRDNKYKARIKILVKALTPEVFAEKVEAEMAHLRGGSTTLTEDEVQRVARHFVDPEYLALDNVDYAPLDAEHPGFARWRSRNTRAHKKPGYVAVTLSLKPTGVAPGDLTDKQLDAVADFAERYSFGYLRTSHEQNIILADVEQRQLHALWLELREQGFATPNIGLLTDIICCPGGDFCSLANAKSIPTAESIQRRFDDLDYLFDIGELDLNISGCMNACGHHHVGHIGILGVDKKGEEFYQVSLGGNAARDASLGKILGPSFAQDDMADVIEKLINVYVEQRTEDERFIDTYQRIGIDPFKERVYAANH

SEQ ID NO: 7146 - protein, 309 aa, Brachypodium sylvaticum
MMARGGGGSLDLGLGLGLGLASQGSLTSSTTTASSSPGSHQQGQHWHAALSSVVAADAGAAARSEFPSSYQQQRYNQQRHQEGRTSTSPESGAALSGVSGGGGGIKRALERTGSGVSRGAAISDEDEDGDGAGAGGRKKLRLSKDQAAVLEECFKTHSTLNPKQKTALANRLGLRPRQVEVWFQNRRARTKLKQTEVDCEYMKRWCEQLADQNKRLEKEVAELRALKAASAPAAQQQSAATLTMCPSCRRVATTQQQQCHPKPNAQAAAGNVVPSHCQFFPSTAAAGDRSTRQATWNSAPPPLVTRELF

SEQ ID NO: 7147 - protein, 122 aa, Brassica rapa subsp. chinensis
MGKRKELDKKVKGSTKMKSKSSEENGKLPYVHVRARRGQATDSHSLAERARREKINARMKLLRELVPGCDKIQGTALVLDEIINHVQSLQRQVEMLSMRLAAVNPRIDFNLDTLLASEVSIF

SEQ ID NO: 7148 - protein, 209 aa, Brassica rapa subsp. chinensis
MRWTPELHESFLKSVNKLEGPEKATPKAVLKLMNVEGLTIYHVKSHLQKYRLAKYMPEKKEEKKNVNSEEKKLAMSNSEADEKRKGAIQLTEALRMQMEVQKQLHEQLEVQRVLQLRIEEHAKYLEKMLEEQRKAGRLFSSSSSSQTLLSPSDDETRPDSQNMSKIEASLPQPSSSAKNIASETEDDQCESPQKRRRLENNTEPQDSER

SEQ ID NO: 7149 - protein, 87 aa, Lithachne pauciflora
KPSMVVHQPRVDIGGDDMRTFYTLVMVDPDAPSPSDPTLREYLHWLVTDIPGTTGAAFGQEVMCYEPPRPSMGIHRFVLVLFQQLGR

SEQ ID NO: 7150 - protein, 172 aa, Populus tremula x Populus alba
PLGWPVGGFPGPQGPYYCGVGADKSFGRDIVDSHYKACLYAGINISGINGEVMPGQWEFQVGPAIGISAGDEVWVARYILERIAEVAGVVVSFDPKPIPGDWNGAGAHTNYSTKSMRNDGGFAVIKKAIEKLGLRHKEHIAAYGEGNERRLTGRHETADINTFSWGVANRGA

SEQ ID NO: 7151 - protein, 159 aa, Populus tremula x Populus alba
NTSPRWPLAQPMRFLGHNGEINTIQGNLNWMQSRETSLKSSVWHGRENEIRPYGNPKASDSANLDSAAELLIRSGRTPEQALMVLVPEAYKNHPTLTINYPEVVDFYDYYKGQMEAWDGPALLLFSDGKTVGACLDRNGLRPARYWRTVDNFVYVASEV

SEQ ID NO: 7152 - protein, 230 aa, Populus tremula x Populus alba
IPEAWQNDKNMDPQRRALYEYSSALMEPWDGPALISFTDGHYLGATLDRNGLRPGRFYVTRSGRVIMASEVGVVDIPPEDVLRKGRLNPGMMLLVDFEKHTVVDDEALKQQYSLARPYGEWLKRQKIELSDIVNSVQESERVAPAISGVVAASDGDDSMVNMGIHGLLAPLKSFGYTVEALEMLMLPMAKDGTEPLGSMGNDAPLAVMSNREKLTFEYFKQMFAQVTNPP

SEQ ID NO: 7153 - protein, 764 aa, Saccharomyces cerevisiae
MSTNSFHDYVDLKSRTNTRQFSDDEEFTTPPKLSNFGSALLSHTEKTSASEILSSHNNDKIANRLEEMDRSSSRSHPPPSMGNLTSGHTSTSSHSTLFGRYLRNNHQTSMTTMNTSDIEINVGNSLDKSFERIRNLRQNMKEDITSKYAERRSKRFLISNRTTKLGPAKRAMTLTNIFDEDVPNSPNQPINARETVELPLEDSHQTNFKETKRNTDYDSIDFGDLNPIQYIKKHNLPTSDLPLISQIYFDKQREENRQAALRKHSSRELLYKSRSSSSSLSSNNLLANKDNSITSNNGSQPRRKVSTGSSSSKSSIEIRRALKENIDTSNNSNFNSPIHKIYKGISRNKDSDSEKREVLRNISINANHADNLLQQENKRLKRSLDDAITNENINSKNLEVFYHRPAPKPPVTKKVEIVEPAKSASLSNNRNIITVNDSQYEKIELLGRGGSSRVYKVKGSGNRVYALKRVSFDAFDDSSIDGFKGEIELLEKLKDQKRVIQLLDYEMGDGLLYLIMECGDHDLSQILNQRSGMPLDFNFVRFYTKEMLLCIKVVHDAGIVHSDLKPANFVLVKGILKIIDFGIANAVPEHTVNIYRETQIGTPNYMAPEALVAMNYTQNSENQHEGNKWKVGRPSDMWSCGCIIYQMIYGKPPYGSFQGQNRLLAIMNPDVKIPFPEHTSNNEKIPKSAIELMKACLYRNPDKRWTVDKVLSSTFLQPFMISGSIMEDLIRNAVRYGSEKPHISQDDLNDVVDTVLRKFADYKI

SEQ ID NO: 7154 - protein, 346 aa, Nocardioides sp. JS614
MENKVTILPFDETLDVEPEESILQAVLRQGRYVKYGCKHGGCSTCRAEVVDGDYRLGDSTSFALSDADRNAGVVLLCSTFAESGHLVVDVSETMDDLTEEQYQAGQHIQEFAATVDRIDALTHDIRWLGLRLNEPETMPFVAGQYVEVGVPGMPDQWRSFSMANSPTESDRVDLIVKVLPGGCFSSVLDQRLSLGDQVQLRGPLGQFGVQLSHRPMIMIAGGSGMAPILGILRELVATGNRREVTFFYGARTAGDLFLVEELGQLARQHDWFTFIPALSDAGADGAAWEGETGLITEVLARHLPSTVGREAYLCGPPPMIDAAVEVLESSGCKPRHIHFDRFVPSG

SEQ ID NO: 7155 - protein, 543 aa, Nocardioides sp. JS614
MPHVGDAMIDAIASAGVRRLYTVPGESFLEVLDAADRHPALRQFSTRHESGASFMADADAKTSGVPAVAMATRGPGAANLSIGVHTAHQDGTPMLVLIGDVETPRIFRGAFQEVDLPAFYRPITKAAMTARRGDRLPEMVTDALRIAVSGRPGPVMISLPADLLAEEFTGPAPAPLAPVAPAGCPPETVRRLRSTLERAQRPVVIAGAGVRHATDRLVALCEAYGLGVYAAMRRQDVFPNDHPLYLGHLGVSPAPGTVDALREADVVLILGAALDQMTTQQFTLPAASAHRIHVDADPLTLGAGLPVDEAVVAEPRELIEALLAEPPTAPHRAWDAAHRRFLESTCAPPRTPARGCDPGAVIEAMKRAWPADTIVTSDAGNFSGFLHQYWRFTTPRSQAAPINGAMGYAVPGAVGAKAASPDRHVLGVVGDGGFLMTGSEVETAVRYGLPLTIVVLRNGLYGTIAMHQAQEMGRLSAVDIGDVDLAAYGRSLGAEGITVEEPGQLDEAMRTAATSDAVTVVDVVTDPDLITASGRLSEMFQTS

SEQ ID NO: 7156 - protein, 565 aa, Nocardioides sp. JS614
MWLNYLVQAVLLASLALSVNLLVGYAGQVSVAHAAFAGVGGYTIAYLTTARDWPFVTALVAATLIAAAVGVVIGLIALGLAEEFLILMTLAFSLAVIGIFATFDALGGVMGITNVTGLSILGHEMTGPRDWLVPALGTLVVTFAVCWRIGESPYGRVLKGIREDSDATRSLGKNTFAYKVGIFAITAGMAGWVGGLYSGWLGLATPSAFGFPLAMSVFAMVIVGGSANLFGSVLAAGVLTLIEPTLREALAMQSSQAALVQIVLYGALLVVMMILRPQGLLAERFRHVTPPASGPVELVAERGAPVVRRLDAHPVVLRAEGLEKRFGGIVAARNLSLELRRGTITALVGPNGAGKTTAFNLLTGAIAPDRGSVLLDGQELVGRRPDEIVRAGLVRTYQDVRLLGRLTCLENVMLGVPDQHGEHLGRLFVPGRAVSRADRAVAERALEWLGFVGMAEQAGVPTEALSYGQTKLVSLARALATEAPVLLLDEPASGVDSAWVETMLRMIDAVRAEGRTVCLVEHNLDVVRELADHTYFMELGEITASGTIAELTSSARLTEAYFGAQ

SEQ ID NO: 7157 - protein, 494 aa, Nocardioides sp. JS614
MAATAQTASRLVKLGYDVVVESGAGGPASQPDEAYAEAGVTVSSAEEVWSSDVVVKINAPTDDEVARLGRGATVVSLMAPARSPELVERLAAAGVTALAMDAVPRISRAQSMDVLSSMANVAGYRAVVEAAHAFGRQFTGQVTAAGKIPPARVFVVGAGVAGLAAIGAAGSMGAIVRAFDVRPEVAEQVESMGAEFVTVDMQSEVSSDGYAKEMTAEQEKATAVMYDEEARAADIVITTALIPGRPAPRLIGEETVAGMRPGSVIVDMAAANGGNVAMTVADEEVVTDNGVRILGYTDLAGRLAAQTSQLYGTNVVNLLTLMTPEKDGALTLDLDDPVQRGLTVVREGEVLWPPPPVQVSAAPKAPAPTAPAEPPPPKKKRPMWLVFAAASVLLFLVATTAPAPLPEHFFVLTLAIVIGYYVIGHVHHALHTPLMSVTNAISGIIVVGAMLQLGVDDAAVRTLSFVAVLLASINVFGGFAVTRRMLGMFRKADQ

SEQ ID NO: 7158 - protein, 424 aa, Nocardioides sp. JS614
MGIVVQKYGGSSVADAAGIKRVAQRIVNTRKAGHDVVVVVSAMGDETDNLRDLAEQVTPLPPPRELDMLLTAGERISMALVAMAIAALGHEAKSFTGSQAGVITDSAHGKAKIIDITPGRIEKALKDGAIAIVAGFQGVSQDTKDVTTLGRGASDTTAVALAAALGAEVCEIYSDVDGVFTADPRIVPAARKLARVSTEEMLEMAASGAKILHLRCVEYARRYDMPIHVRSSFSQKEGTWVIPDSKAGEDEMEQAIIAGVAHDRSEAKITVVGVPDKVGEAARIFEALAATEVNLDMVVQNVSAAATGLTDISFTLPRADGQSAMGALARIQDEVGYDKLLYDDQIGKVSLIGAGMRSHPGITARFFASLAAAGVNIEMISTSEIRISVIVDEAQVDEAVRATHTAFDLDAEEVEAVVYGGTGR

SEQ ID NO: 7159 - protein, 225 aa, Nocardioides sp. JS614
MDNDVLRQAPLFSALDDEAATALRASMTESKLRRGDVLFHEGDSGDKLYIVLDGKVKLGRTSSDGRENLLAILGPGQMFGELSLFDPGPRSATVTAVTDATFASLSHEDLLRWLEGRPVVARGLLTQLAGRLRKANDVVADLVFSDVPGRVAKALLDLADRFGRSADDGVHVHHDLTQEELAQLVGASRETVNKALADFASRGWLRLEPRSVVIMDVERLGRRAR

SEQ ID NO: 7160 - protein, 239 aa, Nocardioides sp. JS614
MIPDWLVPVRDGAAAISADQLTRFTPPAGGDARRGAVLMLFGAGEQGGELLLTERAHDMRSHPGQVSFPGGALDPGETPVEAALREAEEEVGVDPASVEVFGRLPELWLPPSNFAVTPVLGWWREPGDVSIVSQAEVHAIHHVPISELLDPEHRITVRHPRGGYQSPGFLIGPDHDVVLWGFTGGIIARLFDFLGWTRPWDESRLRDLPSYMLQADPRRGRLLDIEDDQDDDQDEEEDG

SEQ ID NO: 7161 - protein, 534 aa, Nocardioides sp. JS614
MSSDTLTAILFIGVVLITIAITFWASRQNKGTADFYAAGRSFSGFQNGMAISGDYMSAASFLGISGAIALYGYDGFLYSIGFLVAWLVALLLVAELLRNSGRYTMADQLAYRMRQRPVRTAASTSTVVVSIFYLLAQMVGAGALVALLLGADSEAAKNATIIGVGVLMIFYVTVGGMKGTTWVQIVKAVLLMGGTILITILVLAKFNFNISDLLGAAAANTGKGDAFLQPGLKYGIDTTAKIDFLSLGLALVLGTAGLPHILIRFYTVPSAKAARTSVLWAIGLIGAFYLMTLALGFGAAALLDTGAGSKVAASGGNLASPLLAEAVGGGDGTTGGAVLLALISAVAFATILAVVAGLTLTSASSVAHDLYATVFKKGAATERDEVRVARLSAFVIGGIAIALAIPAQKLNIAFLVALAFAVAASANLPSLIYNLFWRRFNTRGATWAIYGGLIASVGLVFFSPVVSGSETALFTGQDWSYFPLSNPGIISIPLGFFFGWLGTVTSQEPESAARFTELEVRAFTGAGAEQAVRH

SEQ ID NO: 7162 - protein, 681 aa, Nocardioides sp. JS614
MKRIFKGPWLWIVLAVVGVLLALQYLAPNRGGEEVDASKMQDLISSGEIKELTFVDGGEQQIKATLDNGDKVTAFWLDGTQAELDSQVQDQVDAGKIDSYTVEVPKPSLLGSILATLLPFALIILLFLFLMNQVQGGGGRGVMQFAKSRAKLISKDMPKTTFGDVAGCEEAIEELGEIKEFLQEPAKFQAVGAKIPKGVLLYGPPGTGKTLLARAVAGEAGVPFYSISGSDFVEMFVGVGASRVRDLFEQAKENAPAIVFIDEIDAVGRHRGAGMGGGHDEREQTLNQLLVEMDGFDVRGGVILIAATNRPDVLDPALLRPGRFDRQIQVDAPDLNGRHMILKVHSRGKPMSQDIDLLSVARRTPGFTGADLANVLNEAALLTARSNQKLITNANLDEAIDRVIAGPQRRTRLMSEKEKLITAYHEGGHALVAAALPGTDPVHKITILPRGRALGYTMVLPDEDKYSQTRSQMLDSLAYMLGGRAAEEMVFHDPTTGAGNDIEKATNLARAMVTQYGMTERLGAIKLGESNSEPFLGRDLGHARNYSEDVAAIVDEETKKLLANAHQEAFEILEENRDVLDALVLELVEKETLDKQQVAEVFAPLRRRSERPAWTGSPERNPSAIPPVEIPQWIRDRAAANGHSKEEGEAGPVLTPPGSGGDVHGDPGVGGAETPPGLPPH

SEQ ID NO: 7163 - protein, 135 aa, Nocardioides sp. JS614
MMKSKIHRATVTQADLHYVGSVTVDEDLLDAADLLPGELVHIVDIDNGARLETYTIAGERGSGVIGINGAAARLVHPGDLVILIAYGQMEDVEAKGFEPHVVFVDADNRVVSTGSDPADAPAGSGLLRGDRPAGR

SEQ ID NO: 7164 - protein, 347 aa, Nocardioides sp. JS614
MNRTWQNPDQPPPATPSTTEEQRTVTGMKRTTEKNLMVFSGRAHPVLAEEVATLLGTPLVPQSAYEFANSEIYVRYEESVRGCDAFVLQSHTAPVNEWIMEHLIMVDALKRASAKRITVVMPFYGYARQDKKHKGREPISARLMADLFKTAGANRLITVDLHADQIQGFFDGPVDHLMALPILADYVRDKYGSQPLAVVSPDAGRIKVAERWSARLGGAPLAFIHKTRRTDRPNESVANRVVGDVSGRMCVLVDDMIDTGGTIVKAAEALMADGAAGVIIAATHAILSDPAVDRLKNCSAVEVVVTNTLPLAPECEFDKLTTLSIAPLISRAIREVFEDGSVTSMFE

SEQ ID NO: 7165 - protein, 300 aa, Nocardioides sp. JS614
MTTTHAPAGSVVVGVDGSPSATHAVSWAAEQAAVEGRPLVLVHVGPTPAPAGTGWMEAAGVDHHRLAALLKDDARVLLEQAAAPVRAEHPDVEIHHLVRLGDARQMLLEASAEARLLVVGTRGLGPVRHLLLGSVSSALVKHATCPVVVVRPDPEHADGPARVLAGVAGEPGDAAVLDLAFDLAETRKLPLRVFHCFWDAVKIAEGARDVAPGEPGLDDEWLVLDRAVRPHTEAHPSVEVQLQLTRGMVDERLIRASHDAALVVVGHRRKPFLNELVYGSVAPVVVERSACTVAIVPLGS

SEQ ID NO: 7166 - protein, 404 aa, Nocardioides sp. JS614
MSTPAFVYAAVRTPFGRLGGALAGVRPDDLAATAVTGALAQAPDLDPAAIADVVWGCANQAGEDNRNVGRMAVLLAGLPVSVPAVTLNRLCGSSLDAAIAGSRSIESGDAEVVLTGGVESMSRAPWVLPKPERAYPAGNVTAVSTTLGWRLVNERMPAEWTVSLGEANELLAERFEVSRERQDEFAARSHRLADAAWTSGFYDDLVVPVEGVDLDRDEGIRPGSSAERLAGLRPVFRPEGTITAGNASPLNDGASAVLLGSEAAAATIGRDPVARIAGRGASAVEPQWFGYAPVEAADRALARAGIGWADVRAVELNEAFAVQSVACVDAWAEQGLDPEVVNAKGGAIAIGHPLGASGGRVLGTLAARLRESGERWGVAAICIGVGQALAVVLENVSTQTGARA

SEQ ID NO: 7167 - protein, 248 aa, Nocardioides sp. JS614
MDGMTEPVGAPSGFPSVPLGDGLSKGRILVVDDDASLAEMLTIVLRQEGFESHMVARGDLAMEAFREYRPDLVLLDLMLPGKDGIDVCKEIRAESGVPIVMLTAKGDTVDVVVGLESGADDYVVKPFKPKELVARIRARVRRFDAPAQETLTIGDLTIDVAGHAVTRAGERISLTPLEFDLLVCLARKPWQVFTREVLLEQVWGYRHAADTRLVNVHVQRLRSKVEHDPENPEIVVTVRGVGYKAGTP

SEQ ID NO: 7168 - protein, 479 aa, Nocardioides sp. JS614
MLPEICDALERVNIVTPFAIQEMTLSVALMGTDLIGQARTGTGKTLAFGIPVLQRSVAPKDPDYAELPQGKPQALIVAPTRELALQVSGDLALAGADRGLRVLTVYGGVGYEPQLDALQEGVDIVVGTPGRLIDLANRRALDISHVHALVLDEADEMLDLGFLPDVERILAMTPETRQTMLFSATMPAAIVALARTHMRHPMNIRAESSYENATVPATAQFIYQAHDLDKPEIIGRVLQAEDAGKVIVFTRTKRQAQRVADDLAERGFSASPLHGDMAQVAREKALTKFREDKLRVLVATDVAARGIDVAGVSHVINYSCPEDDKTYVHRIGRTGRAGASGIAITFVDWADLARWKMINKALDLPFDEPQETYSTSEHLYHDQGIAPGTKGRIVDPAPVERKPREDRGGERRERSGNRNRSRSRTRTRSGETVTAGTPAATSAAAEAEGGEARSNGSRNRSRSRNRRRSSGTKPAPAAE

SEQ ID NO: 7169 - protein, 235 aa, Nocardioides sp. JS614
MRDHDHRFECVRLVPIFDGLSEADQHRIAETAVTRTFEPREQVYGAGDRTGLHIVHRGQVKAYRLTEGGSEQLVRLLSPGDFLGESALLADSVSDHFAMAIRRSEVCSVPRAGMRQLLVERPAVALQMLQTVSGRLAAAEEMLAAVTGQSVGERLAQQLLHLADEAGSASFRLPTSKRDLASYLGTTPETLSRRLGALQRSGAVRLGPQRTVTVVDRRRLEQLGAGAGPPDRGPH

SEQ ID NO: 7170 - protein, 267 aa, Nocardioides sp. JS614
MGTRPPHCLTITDPEDLAGGARPWSPGRREDDVEIERAAAGPDRLWCMSEVDIFCDLDDTEMDALAQAAPMRAYATGALVYTPHQPLETLFILKKGRIRIFRVSPDGRALTTAIIDPGTIFGEMVIVGQQMHDSFAEALDDVVVCVMTKADVRRLLLGDPRISARISETLGRRIGELEQKFSDAVFKSVPERIAGALVTLASATSGRPLGRGIQVRLTHEQLAALAATSRETTTKILGDLADQGLITLGRGRITILNRERLRVLSGE

SEQ ID NO: 7171 - protein, 261 aa, Nocardioides sp. JS614
MARERRSTPLASTCTAPHTCPRPLRLDVLSHAPYFAGLSREEIIALDEAAKVRGYTEGEAIYHAGGSAEHLFLLASGRVKVLRPALDDSDVLVEVITPGATFGSVAALGHSTYPDTAMALTVSCVLRISAADLRRVMNRHPAVALAVLDEVSHRLEEAQQTVRRLSGGTVEQRVASSLLVLADQLGEPRDGGVLLQLPLTREDLASMTGTTTESVSRTLSKWRRAGLIETGRRWTSLTDRAALAAIAGAAHGPGPVRARRG

SEQ ID NO: 7172 - protein, 441 aa, Nocardioides sp. JS614
MESDKLAAEKALRVAVLGCGSVGSQVVRLLEEQAHDLAARVGARVELAGVAVRRPEAPREVEVPTELITTDATALVTREDVDLVVEVIGGIEPARSLILAALENGKSVVTANKALLAEDGPTLFEAAEKAGRDLYYEAAVAGAIPILRPLRESLAGDRVTRVLGIVNGTTNFILDRMDSSGAGFAEALEEAQELGYAEADPTADVEGFDAAAKAAILASLAFHSRVTASDVHREGISEVTAADVQSAREMNSVVKLLAICELRVTEDGQSAVAVRVHPAMIPRDHPLASVREAFNAVFVESEAAGQLMFYGPGAGGAPTASAVLGDLVTVARNRLAGTRGAGESAYADRAVLPMGETLTRYHVAIDVDDRAGVLASVATAFAENGVSIQTVRQEGRGADAQLVVVSHESTDAALRATVEHLREMDIVREVTSVMRVEGATE

SEQ ID NO: 7173 - protein, 396 aa, Nocardioides sp. JS614
MSGSVIVAGARTPIGRLLGGLKGLSAADLGGVAIKAALEKAGVTGDQVEYVIMGHVIQAGAGQITARQASVKGGIPMNVPAITINKVCLSGMNAIALADQLIRAGEHEIVVAGGMESMTQAPHLLPKSREGFKYGDTALVDSMAYDALYDQFTDQPMGTLTEACNTGARELTREEQDAFSARSHQLAAAAWKNGVFDDEVVPVEIPQRKGDPVVIANDEGIRGDTTAESLGKLRPAFSKDGTITAGSSSQISDGACAVVVMSKAKAEELGLTWLAEIGASGQVAGPDSSLQSQPANAIKKAVAKEGISVADLDLVELNEAFAAVGIVSARELGIPEEQVNVNGGAIALGHPVGMSGARIVLHLALELKRRGGGVGAAALCGGGGQGDALIVRVPKS

SEQ ID NO: 7174 - protein, 313 aa, Nocardioides sp. JS614
MTNQGSGPQPAHRSGFVSFVGRPNAGKSTLTNALVGSKVVITSDKPQTTRTVVRGIVHRDDAQLILVDTPGLHRPRTLLGERLNDLVKTTLAEVDVVAVCLPANEKVGPGDRFIVNEMAKIKRTTKVAIATKTDLASPDRIAEHLLDIARLGTETGTEWAEIVPVSAKSGDQVELLADLLVGLLPEGPQLYPDGDLSDAPEEILAAELIREAALEGLRDELPHSVAVVVEEMGLREGRPDAKPLLDIHANVYVERDSQKGIIIGPKGARLRDIGTRARGQIEALLGTPVYLDLHVKIAKDWQRDPRQLRKLGF

SEQ ID NO: 7175 - protein, 573 aa, Nocardioides sp. JS614
MTDLRYTVQPASSTEIPRPKRAEGQWALGLREPLNANEQQKKDDSPLNVRDRIVNVYSKRGFDSIDPADLRGRFRWYGIYTQRRPGLDGGKTGALEPHELDDRYFMMRVRSDGALLGAEQLRTLGGISTDFARDTADITDRQNIQYHWIDIVDVPEIWDRLARVGLTTEEACGDSPRGFLGSPVAGVAKDEIIDGTPALLEIGRRRAGNPDYANLPRKFKTSVSGHPSLDATPEINDVAFVGVVHPELGAGFDLWVGGSLSTNPFLSAKMGVWIPLDEVADVWEGVISIFRDYGYRRLRSRARLKFLVQDWGIEKFREVLENEYLHRRLPDCASPEVAAGNGDHIGVHEQKDGRFYVGASATVGRVSGSLLSRLGDLVEKYGVDGVRLTAYQKLVILGVDGARVDELLDDLELIGLSARPSPWRRSTMACTGIEFCKLAIVETKHRASALVDELERRFPDLDTPITVNVNGCPNACARTQVADIGLKGQLVLHEGEQVEGFQVHLGGGIGLTQRLGRKLRAHKVTSAGLDDYITSVVTNYLTDRTDGEAFAAWVERADEELLRGDKTLEAVAT

SEQ ID NO: 7176 - protein, 477 aa, Nocardioides sp. JS614
MSKVLTSLPVGQRVGIAFSGGLDTSVAVAWMRDKGAIPCTYTADIGQYDEPDVSGVPARAREYGAEIARVVDCRAQLVEEGLAALACGAFHIRSGGRIYFNTTPLGRAVTGTILVRAMHEDGVDIWGDGSTFKGNDIERFYRYGLLANPQLRIYKPWLDPDFVHELGGRTEMSQWLTSHGLPYRDSQEKAYSTDANIWGATHEAKTLEHLDTSLEVVTPIMGVRFWDPAVDIATEDVTVAFEQGRPVALNGRRFDDPVELVEEANAIGGRHGLGMSDQIENRIIEAKSRGVYEAPGMALLWLTYERLMNAIHNEDTLANYQISGRRLGRLLYEGRWLDPQALMLRESIQRWVASVVTGEVTVRLRRGEDYTIVRTEGPALSYHPEKLSMERTSNSAFGPTDRIGQLTMRNLDIADSRAMLEMYAGQPLDQGQVLVENGTLFGELPSGGFDQITENPEVQAEPEEEALDAAAMEAGTD

SEQ ID NO: 7177 - protein, 371 aa, Nocardioides sp. JS614
MKVGVPKEVKNNEYRVAITPIGVHELTAHGHQVYIERGAGEGSSIHDEEYAAAGAQIVPDADSTWGDVELVLKVKEPVAEEYHRLREGLTLFTYLHLAADKRLTDKLLDTKVTAIAYETVQLPSGGLPLLYPMSEVAGCLAPQVGGYSLMRAQGGRGVLMGGVGGVANAKVVIIGAGVSGQNAANIALGMGADVTLLDNDLDKLRMSFWRYNNRVHGLASSKLAIEQQVTEADLVIGAVLIPGAAAPKLVSNELVSRMKPGSVLVDIAVDQGGCFEDTRPTTHADPTYQVHNSTFYCVANMPGAVPNTSTYALTNATLPYVVAVADKGWQQASRDDHSLALGLNTHAGRLTNAAVGAAVGVAADPLDSVLT

SEQ ID NO: 7178 - protein, 366 aa, Nocardioides sp. JS614
MATEESFELKVVDVVEETADAHSVSFEAPAGAEEQFAYKPGQFLTLAVPSDQTGVAARCYSLSSSPVDGGPLTITVKRTAEGFASNWICDNVREGDTVRALPPSGIFTPASLSADLLLFAAGSGITPIMSITRTALQQGTGRIVLLYANRDERSVIFADALTRLSAEHPDRLVVVHWLESVQGLPTQEQVEAFAGGFLSYDAFVCGPAPFMKLVVGALKELEFPRERRHQEKFISLGGNPFGDLHDQEAAQHEIEDAETDAEDVGADGDAGQPEGPVRLEVELDGEEYAFDDWAPGTKLLEHLEAKGIKAPYSCREGECSACAVRLLEGEVKMLHNDVLDADDLADGIRLGCQSVPVTDVVKVTYH

SEQ ID NO: 7179 - protein, 253 aa, Nocardioides sp. JS614
MSTLEIKDLQVSVHTEDGPKEILKGVTLTIKAGETHAIMGPNGSGKSTLAYSIAGHPKYTITGGSVTLDGEDLLAMTVDERARAGLFLAMQYPVEVPGVSVSNFLRTAKTALDGEAPKLRTWVKDVNSALANLNLDPSFGTRSVNEGFSGGEKKRHEIAQLELLNPQVAILDETDSGLDIDALKVVSEGVNRFRAQEGKGVLLITHYTRILRYITPDQVHVFVDGKVAESGGPELAEHLEAHGYEKYVAGAAV

SEQ ID NO: 7180 - protein, 627 aa, Nocardioides sp. JS614
MSGMHGGGAAWRLLRSDRSIVHNRLERGTVRRVVGFARPHRRLIGVFLVLTVIDAGLVVVSPLLAKSIIDDGIKQGDRTLITLLALAMAATALVSAVLAVGVGWLSSRIGEGLIYDLRTRVFAHVQRQSLAFFTRTQTGALVSRLNNDVIGAQRAFTSTLSTTVASTISVVVVGITMVALSWQVTLLCLAIFPLLVLVSRWVSARLAGLTRDQMDGNADMGNAMTERFNVGGAMLLKLFGRRADEDALFAVKAARVRDLGVRITLLTRLFGASMMAVPALATALVYGLGGQLVVDETLTVGTLIALATLLLRLLGPLQSLSNVRIDVMTALVSFERVFEVLDLPSLIEERPDATRLPPGAARLEFDHVAFAYPRADEISLASLEVVARSESRDTGQVLTDISFTAEPGQMVALVGPSGAGKTTVTHLVARLYDAGAGSVRVGGHDVRDVTLQSLEDAVGYVTQDAHMFHDTIRANLLYARPGATDPEVWAALEAAQIATLVRGLPDGLDTVVGDRGYRLSGGERQRLAIARLLLKAPAIVVLDEATAHLDSESEAAVQRALDAALEGRTSLVIAHRLSTIRDADQILVLDDGRIVQSGTHAELLARGGLYADLYRTQFIEDQPSATV

SEQ ID NO: 7181 - protein, 573 aa, Nocardioides sp. JS614
MTTRYDHPRAHRVADAVRSPAADVVPHPALDQPVEAAAPDRAGLDRVVFGVTAAIAVAFLVWGFVSTSTLASASSDALGWTMTNTGWLFVLTASGFVVFVLWLALSRFGNIPLGRDDEEPEFRTVSWVAMMFSAGMGIGLMFYGVSEPLTHYVAPPPGTGAEGNPQAVQHAMATTLFHWTLHPWAIYAVVGLAIAYGVYRKGRLQLISAAFEPLLGRHAKGGWGRVIDMLAIFATLFGSAASLGLGALQIQSGLEIVGGLGEVGNGVLVGIITVLTVAFVLSAVSGVAKGIQWLSNINMVLAIALAAFVFVLGPTVFILNLVPTSIGSFVQDLPMMAARTSAEGSETSTWLQSWTVFYWAWWLSWTPFVGMFIARISRGRTIRQFVSGVLLVPSLVSLVWFCIFGGAAIDLQRSGTDLAGASGVESQLFGTLEAYPLATVASMVVMLLVAIFFVSGADAASIVMGTLSERGTQEPSRATVVFWGVATGAVAAVMLLVGGDQALTGLQTITIVAALPFVVVMVGLAVALVRDLRTDPLMVRRRYAAEAVEQAVIAGVTEHGDDFVLAVDRDPQA

SEQ ID NO: 7182 - protein, 198 aa, Nocardioides sp. JS614
MDHLPGQHYVVRLRAPDDYTAQRSYSVASDPDDPLLELMVECLPGGEVSGFLYDVAEVGDVLELRGPIGGWFVWEGDVPALCLAGGSGVVPVVAMTRYARRLGLQDRLRVVAVARTWDQLPYAAELSRHGAFVALTRENLGERVAAPPYPSELEAYAARAERAYVCGSVGFASYATRLLEEVGVATDTIRVEQFGETG

SEQ ID NO: 7183 - protein, 387 aa, Nocardioides sp. JS614
MPEAYIVDAVRTPVGKRGGALAGVHSADLGAHSIAALMRRTGVDPGAVDDVILGCCDTIGSQAGDVARTAWLVAGLPDHVPGVTIDRQCGSAQQAVHFAAQGVLSGTQDLVVAGGVQNMSAIPISSAMLVGQQYGFSTPFAESPGWLARYGDQEVSQFRAAELIAEKWGLSREEMESFALVSHERARAAIAEGRFKDEIEPVTLPDGTVVDTDQCPRDTSLSKMAALSPLIPDGRITAAVASQISDASVAMLIASEAAVRDHGLTPRARIHHLSVRGDDPVWMLTGPIRATRHALERSGLAIEDIDLFECNEAFAPVVLAWMKETGAPHQRVNVNGGAIALGHPIGATGARLMTTLLGELERTGGRYGLQTMCEGGGQANVTIIERL

SEQ ID NO: 7184 - protein, 504 aa, Nocardioides sp. JS614
MSLMRTKSVEQSIADTEDPDHKLRKELGALDLMVFGVGVTIGAGIFVLTGTVAASNSGPALALSFLIAAVACALAALCYAEFASTVPVAGSAYTFSYATLGELVAWIIGWDLILEFTIGAAALSTSFSGYLQELLDGTPFEVPTQFGSAADGFIDLPAVVIALLVMLVLIRGTKLSSMVNQVVVAIKLAVVAAVIVVGVAYVDPSNWTPFIPDSQPVGDAEGGFRQLPLITTLLGIEPAVFGIGGVIAGAAVVFFAFIGFDVVATTAEEARNPQRDIPIGILGSLAIVTVLYMAVSLVVTGVQSYQDIDPDDPAPLATAFSAAGVSWVGDLISVGACIGLVVVAMILMLGQCRVAFAMGRDGLLPRSVAKVHPSFGTPYRITLITGFVVAAIAGFVDLSTLADLVNIGTLFAFILVSLGVVVLRRTRPELPRSFRTPFAPVVATLATLLCFYLMLNLKGETWERFLIWMALGFVVYFVYGRRHSRVGRAEREERSGQPRDTEVR

SEQ ID NO: 7185 - protein, 67 aa, Nocardioides sp. JS614
MAQGTVKWFNDDKGFGFIAQDGGGPDVFVHHTAIAGTGFKSLKDDQRVEFEVTQGPKGPQAENVRAQ

SEQ ID NO: 7186 - protein, 508 aa, Nocardioides sp. JS614
MRPRIVPSARGDVVAGVTVALVLVPQALAYATIAGLDPVYGLYAAVAAPIAGALVGSSPYLQTGPVAVTSLLTFGALEPLARPETLRFAALAAVLAVLVGMVRVLLGLLGGGPIAYLMSQPVVVSFTTAAALLIIGTQVPALLGMQGDSANPLVGAVRALADPAAWSWTDLVVGLVAMTLMLGSRRVWSLFPGALLAVVLAVVWSRATGYDGRTVGAVDLSYSTPQGVSATDLATLLVPALVIAIVGFAEPASIARRYAAADRQPWNPNLEFVGQGLANLASGAAGGFPVGGSFSRTSLNRLSGARTRWSGGITGLVVLAILPFVSVLSALPLAVLAGLVIGAVASLVDVRTPLLYWRWSKPQFSVGVLTAVATMALAPRVERGVLVGVAAALAVHLWREMGVHLPAFVEDATLHLRPTGVLYFGSAPALERSISRLIAEHPSVDRVVLHLDRIGRLDLTGALMLRDILADAESAGRTFEIRGARAHAAGLLVRLLGPEARICGDDVA

SEQ ID NO: 7187 - protein, 402 aa, Nocardioides sp. JS614
MSALVLVINAGSSSLKYSLIDAESGASHAVGLAERIADSSGAGGSLSHTGPDGVKHRSELPLPSHEAALRAALDAFAAHGPSLEDATITAVGHRMVHGGERFSEPALVDDALVDAVRELVPLAPLHNPANLEALGVARRLFDTLPHVAVFDTAFHQTLPEQAYTYAVPHEWREEHGIRRYGFHGTSHKFVSGETARLLGRPVEDTNTIVLHLGNGASATAVAGGRSVDTSMGLTPLEGLVMGTRSGDVDPALHAHLHRQLGWSLEEIDQRLNRNSGIKGLLGFSDFRELGRLLEEGEPRARLAMDVYCYRLRKYVGAYYAVLGRVDAIAFTGGVGEHVPDVRAQALAGLERLGIRIDAEANRGGHSGAFTVSAEDSEVAVLVVPTNEEWQIARESLDVVRGG

SEQ ID NO: 7188 - protein, 696 aa, Nocardioides sp. JS614
MCTSVYVASVEGYTGKSAVALGILDVLSRRVERVGVFRPIVRNDQATARGERDYVLDLLTAHEAVTLSYDDCTGVTYDDVHADPVAALDTIVERYHRVAEQCDAVVVIGSDYTDVATPTELSYNARIAANLSSPVLLVLNGADRTPAELVTLADIASTAISASHAALFAVVANRVTHPEPAEVVAALGRDEVPAYAIPYDPLLSAPSVADLMPACNGTVVSGDPALLDREVLGLLVAGMTMPNVLDRLFDGAVVVTAGDRPEVVLGVLMAHVSSNFPQVAGIVLNGGIELPAQVARLLAGIGATLPIIATDLATQETSAALTGVRGRLTVSSPRKIAAALALFAQHVEGDALLDRLDVSPTTAVTPLMFEHQLLDSATSRRMRIVLPEGEEERILRAADLLLRRGVADLTLLGDPIRINAHAARVGADVSAATLLDPRSSELAERFAEEYFDRRKHRGVDRDDALVRVLDESYFGTLMVELGLADGMVSGAVHTTAHTIRPALEVVRTAPGVSVVSSVFFMCLENQVLVYGDCAVNPDPTAEQLADIAISSAETAAAFGVEPRVAMLSYATGSSGAGSDVEKVSAATALVRDRAPELLVEGPIQYDAAIDPAVARTKLPGSPVAGQATVFIFPDLNTGNNTYKAVQRSAGAVAIGPVLQGLRKPVNDLSRGATVRDIVNTVAITAVQAQQLAEVAR

SEQ ID NO: 7189 - protein, 330 aa, Nocardioides sp. JS614
MDFGSILTQTLQQAFGPLAIVYCLAAIGLNVHFGYTGLLNFGQAAFMAVGGYAMASVVATWGLSLWLGIVVGLVLTVVLALLLGVPTLRLRADYLAIVTIAAAEMLRQTVGSVTLLEYFGGQDGLNSFVGDFRALNPYSGSVGIPGIVEWRANDFWVMTVGWILVALSCLVVWALMRSPWGRVLKAIREDEDAVRSLGKNVYSYKMQSLVIGGLFGTFAGYIYGLSKAAVIPTDYATDTTFFAYTILLLGGAARVFGPVVGTVIFWGLINFLDQFFRQAAAHDVIPQAIMNQNQAGLMRFIVLGLALMLLMIYRPQGIFGDRRELAIDGR

SEQ ID NO: 7190 - protein, 502 aa, Nocardioides sp. JS614
MRWGNDPGDPTPTEESPMSTRAAETVDVNGPTPDLRRVMGPRLLLLFIVGDILGAGIYAVTGEMALEVGGVVWVPFLVAFAVATLTAFSYLELVTKYPQAAGAALYTHKAFGLHFVTFLVAFAVICSGITSASTSSNLLATNLLAGLDGLGWQLPQGDTAITVVAIGFMLLLAVINLRGVGESVKFNVFLTLVEMAALVIVIAIGFWVMAQGDADLGRVVVFDSGSDRGLFLAVTVATAIAFFAMVGFEDSVNMVEETKDPMRIFPRVMLTGLGIAVVFYILVAISVVAVIPEGEIESVVADEGKVLLNVVEMGAPGLPIDKVFPFLTVVAVANTALINMLMASRLLYGLARQDVLPRSLGRVLPGRRTPYAGILFSTLLALALIVVVTFLAETAVISALAGTTALLLLCVFAVVNVACLVLRRDPGPEGGFAVPGWMPMLGAATCLYLAGPWARDREDWVQYQVAGGMLALGVVLWLVTWLTNRGIRGKRTGFRDIEHLQE

SEQ ID NO: 7191 - protein, 379 aa, Nocardioides sp. JS614
MTSADPAGAPRRPTYLDSASSEPLHPAARDTLLAALERGYADPRRLHGPARDARLLLDNARAVVAECLGVRPDEVTFTSSGTDAVHRGLLGLVRASRRGDGVAYSAVEHSAVLRAVAWGGTGHEVGARPDGRVDPGLLAEAAAADGVGVVALQSANHEVGTVQPVGELEPRDGVPVFVDACASMGRLPLPDGWNVAAGSAHKWGGPAGVGVLLVRKGTRWLNPFPGDDRIDERADGFENVPAALAAAAALRAVVAERATVNPRQHDLVDRIRAAAAKIPDVEVVGDPVDRLPHLVTFSCLYVDGEALVTELDRRGYGAASGSACTSSTLTPSRVLEAMGVLTHGNLRVSLTRDTTEQDVEGFLEVLPQVVRDIRAEAGL

SEQ ID NO: 7192 - protein, 353 aa, Nocardioides sp. JS614
MPATFHSLRVAAIDELTDDAVALTFDVPTPLAAEFTFAPGQHVSIRGGDDVRRSYSICTTPSSGVLRIGVKRLPGGAFSEGVLGSLRVGDDLEVMTPAGRFTAAVDPSARRTHVAIAAGSGITPVLSIVAALLEEEPHSSVLLLYANRTHRSVMFLDEVHDLKDLFPTRLQVVHVLSREQQEVELLSGRLDGDRLRRILAALMPAEEVDQWYLCGPQQLVTELRATLTTLGVDPASVHSELFHADPVQRAPVSVLDGSPEGAARVTVRLDGRSSDLDLRPDGVSVLEAALRVRSDLPFACKGGVCGTCRARLVEGTVAMDANYALEPDEIDRGYVLTCQSHPTSERVVLDYDG

SEQ ID NO: 7193 - protein, 333 aa, Nocardioides sp. JS614
MTRYGAQFGPDITFLGVDPIDLDDADGLAAADVVVLGAPFDGGTSHRPGTRFGPSAIRQTDYLPQDGSRPHLALRVDALRDLRVVDAGDVEMPPGDITRALGNLEEAVYAVARSGAVPLVLGGDHSIALPDATGVARHLGFGRVSMIHFDAHADTGHIEFGSLYRHGQPMRRLIESGALRGDRFLQMGLRGYWPGPETLDWMAAQHMRSYEMTEIGRRGLEECLDEAFEIALDECDAVFLSVDIDVCDPGHAPGTGTPEPGGLSSRQLLDAVRRICRELPVAGIDVVEVSPPYDHAEITAYLANRVCLEALSGLAARRHGISHDPAGPLLEGR

SEQ ID NO: 7194 - protein, 441 aa, Nocardioides sp. JS614
MIPGGSVDGYYAFMLVATALVLMMTVPALALFYGGMSRSKSVLNMMMMSYVAMAVVAIVYVLWGWSMTFGPNDVGGLFANPFDLFGLNDVTPDGYLAVMFQMTFAAITAALISGAIADRVKLSSWVVFLPLWVTLSYFPIGHMVWGGGFISEHFGAQDYAGGTVVHINAGVAGLVLALVIGKRIGFGKEPMRPHNLTLTMIGAGLLWFGWYGFNVGSIVFTGSTDEENIAQFYSETGVTFLNTTIATCAAMLGWLLVERLLHGKATSLGAASGIVAGLVAITPSCGAVELPGAILIGAVAGAACAWAVGLKYKVGLDDSLDVVGVHLVGGVIGTVLIGLVSSSDAPGGIDGLFYGGGFGSLGDQAMAALIAIVWSAVATTIIAYAIKLTIGWRIPDEAEVEGVDFDQHGETAYDLHSGLGGSANAPASVLVKNTVTEGVNA

SEQ ID NO: 7195 - protein, 473 aa, Nocardioides sp. JS614
MPTDPRGLREHAPLLDAWLRFQEHPVTPFTIPGHKQRTDLVGDVVAGDVPLYAGLDTMKLATGVLAQAEARAARLWGADWCRFSTGGATHANQAVALAVAGDGDTVIVSRTLHRSLLLGLVLAGLVPVWVRPEVDAATGLPLGVAPETVRRALADHPGARAVFVGDPSYVGTVGDVAGLADAAHEHGVPLVVDAAWAAHFGFHSDLPRHPLQLGADVMVTSAHKTLPAWSQAALVLARTGRVDAARLDAGVEATATTSPAGAILASTDAARALLERDGEELLGNAIAATARARERLRAVEAVAVLDGPDVDPLKLTIVLSATGADGNAVERDLLARGLPVESADRDVLVAIVSLADTADTIGMLTDVIVESVERRRGPARPVVGPAAYRVEPVAALPPRQAYFAAAQPVPLDRAVGRVSAELVAPYPPGIPVLAPGELVTDQTLDALEHARHAGVRVAYAADPTLATLRVTAD

SEQ ID NO: 7196 - protein, 321 aa, Nocardioides sp. JS614
MHEPRVNDGGTVGPVDGLQVPRFAGHSTFARLPRLEDVETFDVAVVGVPFDSGVTYRPGARFGPSHIRQGSRLLRPYNPALDVSPFAGVQVVDAGDIAANPFSIEDGLEQIEAGVRELSADGRNVVLLGGDHTVTLPALRALKAQHGPIALVHFDAHLDTWDTYFDAPFTHGTPFRRAWQEGLLDADHTMHVGIRGSLYSKDDLADDASMGFSIVPARDLDRLGADRVVEMVRERVGDAPVYISIDIDVLDPGFAPGTGTPEAGGLTSRELLAMVRGFAGAHVVGADVVEVSPPYDHAEITAIAAANLAYEYCSVFAWNRR

SEQ ID NO: 7197 - protein, 536 aa, Nocardioides sp. JS614
MTMPAATPADRPVVLIAEELSPATVEALGPDFEIRYCDGADRGELLAALPEADAILVRSATKVDAEALAAARRLKVIARAGVGLDNVDVRAATQAGVMVVNAPTSNIVSAAELAVALMLAAARHISPAHAALKNGEWKRARYTGTELYEKTVGIVGLGRIGVLVAQRLSAFGMKIVAYDPYVQAGRAAQMGVRLVDLDTLLAEADFMSVHLPKTPETVGLIGADQLAKVKPSLVLVNAARGGIVEEAALYAALKEGRVAAAGLDVFAQEPCTDSPLFELENVVATPHLGASTDEAQEKAGIAVAKSVRLALSGELVPDAVNVQGGVIAEDVRPGIPLTEKLGRVFTAVAGEVALSIDVEVRGEITDYDVKVLELAALKGIFTDIVEDQVSYVNAPLLAAERGTAVRLVADPESPDHRNLITIRGTLADGEQVSVSGTLIGINQKERLVEVNGFDVDLEPTEHLAFLTYEDRPGMVGTVGVIIGDAGINIAGMQVARDAKGGRALVALSVDTAIPAEVLAEMQHAIDAISVRAVDLV

SEQ ID NO: 7198 - protein, 585 aa, Nocardioides sp. JS614
MSEQMTGAQSLVRSLEAVGTEHIFGIPGGAILPAYDPLMDSSIRHILVRHEQGAGHAAQGYAAATGRVGVCMATSGPGATNLVTPLADAHMDSVPIVAVTGQVGAAQIGTDAFQEADIRGITMPITKHNFLVTDPAEIPRTIAEAFHIASTGRPGPVLVDVAKSALQAATDFAWPTELALPGYRPVTRPHSKQIREAAKLMLESRRPVLYVGGGTIRAGASKELRVLAELTGIPVVTTLMARGAFPDSHPQHLGMPGMHGTVAAVAGLQRSDLIISLGARFDDRVTGKLDSFAPGARVIHADIDPAEIGKNRAVDVPIVGDCREVISDLVVALKAEADAGHTGDYEAWVDFLAGVKKKYPLGYDAPTDGGLAPQYVLERLGAIAGPEAIYCAGVGQHQMWAAHFVGYENPNTWINSGGLGTMGFSVPAAMGAKVGRPDATVWSIDGDGCFQMTNQELATCAINDIPIKVAIINNESLGMVRQWQTLFYNERYSNTDLHSKRVPDFVKLADAYGCVGLSCDSPDDVDATIRKAMEIDDAPVVVDFRVHRDAMVWPMVAAGTSNDEIKYARNLAPKFDDDADLELRP

SEQ ID NO: 7199 - protein, 399 aa, Nocardioides sp. JS614
MTAAAPSRTVYLDHAATTPMVPAAVEAMTAHLREVGNPSSLHASGRRARRVVEESRETIAQALNCRPGEVVFTSGGTEADNLAVKGIFWSRRDEDARRTRVLTTAVEHHAVLDAVHWLGHAEGAEVELLPVDDRARLDVDALRSAIERDPASVAVVSVMWANNEVGTLQPIHDVVALAAEHGIPVHTDAVQAVGHVPVDFAASGIDALTLTGHKLGGPYGVGALVVRREVPVRPLVHGGGQERDIRSGTLDTPAIAGFAAAVELAVKHQADHATHIGALRDELVRRVIEVVPDAHLHGAALDLGGTERLPGNAHLGFPGCEGDSLLMLLDARGIECSTGSACSAGVPQPSHVLLAMGCDADQARHSLRFSLGHTTTAADVDAVAEAIGPVVERARAARR

SEQ ID NO: 7200 - protein, 516 aa, Nocardioides sp. JS614
MAVPTFVDRVTLHVSAGRGGNGVASVHREKFKPLGGPDGGNGGPGGSVTLRVDPDVTTLLDYHHSPKRRAEHGGHGAGAHRNGAHGADLVLPVPDGTVVSDPQGHLLADLVGPGTELVVAQGGRGGLGNAALASAKRKAPGFALLGEPGDELEIVLELKVVADIGLVGFPSAGKSSLIAAISRARPKIADYPFTTLVPNLGVVSAGDTTFTVADVPGLIEGASEGRGLGHDFLRHIERCAAIVHVVDTASIEPGRNPVDDLDVIENELTRYGGLEDRPRLVALNKVDVPDGRDIAGFVVDELRQRGLRVFEVSAASGEGLRELTFAMAGIVEAARAAKPAVEATRIVLRPPSVDGSDAFTVTATPDGWRVRGEKPERWVRQTDFSNDEAVGFLADRLNRLGVETRLAEMGAEEGDAVLIGDPENAVVFDFKPGVDAAAEILSRRGEDQRFDESRPAARRRRAIEEAMADRAEGETRADVARRLDRPAREDGGAYGPQSYEIGGRDDPDWAEEDLGE

SEQ ID NO: 7201 - protein, 368 aa, Nocardioides sp. JS614
MAGPTTIPWGRLRGAGDKLTTPLHPDDYLRLLNPLWSERELRGRVEEVIPETDDAATLVIRPGWGWHFDHRPGQYVGIGVQVDGRFQWRSYSVSSPPLRRGRTISITVRAMPEGKLSAHLVNGLAPGTIVRLAHPEGDFVLPDPPPPRMLFLVGGSGVTPVMAMLRTMDRRARKNGRALPDVVMHYSSPTPDRMIFRAELDELEARHESLAVHRLHTDLDGMLDLAHPDRGLDGICPDWREREAWACGPGPMLDAIAEHFKAAGLEDRLHLERFSLELGGEGGEGGTITFRNSGRSVEADGATTILEAGEEAGVGMPFGCRMGICHTCTLTLVSGKVRDLRNGEEFSQPNERVQTCVTAAVGDCTLDI

SEQ ID NO: 7202 - protein, 648 aa, Nocardioides sp. JS614
MTETPTRTRRARADRPPPDWEQVYRRNFLERLKRDRPPVDVRAELPDLIARGYEAVPEEDMVRLHWWGIAHDKPKVGTFMVRVKVPGGVLTASQVRGLGRIAREHARDGVELTTRQGVQLHWVSMADLPTVVAEVEAIGLSTAGAEGDTVRNVTGCPVAGLSGHDVFDVTDVVREVAAFFGSHPDYKNLPRKHKYTISACPAQCNAPEISDVALVAVLQNGRRGFALRVGGGMANTPRISRDVGVFIPVEDTVEVLRAVTDAWQTDLRYRMSRARARIKFMIDDLGPEAFRARVEHQLGHALGDGVAPDPVGGADHLGVHPQRDGGRVYVGVPVPSGRLSGTTLTHLADLVDDIGGDLRLTRQQNFVLGHVPGARVEEVSARLAELGVPVDRSRAVGRSVACTSNRFCNYSVAETKDKLDGILTRLEATHGAERLSDLAIHLDGCPHACAQHWVGEIGLQGTTTHDPDTGERVEAYDLSVGGGLGRRTAIGRRLVRRVPTKDVEDVLDRLVGAWLAEQDRTGGRPSFGEFCDLLEDDELLAVSVGARGSVAGPGERVDAGVLVRVPGPLQRYVDGADELSVDGRTVGGVLAEVTRRHPQFGSTVLPDGEVAGAFLVTVGDQDIRGLQGLSTDVTPNDTITIVMAMAGG

SEQ ID NO: 7203 - protein, 397 aa, Nocardioides sp. JS614
MKVLLLENIHPAAVEILEGHGFEVELRSRSLSEAELIEELPGVSVLGIRSNTHLTAPVLEAATDLMAVGCFCIGTNQVDLSAASRRGVAVFNAPYSNTRSVVELVIGEIIALGRRLTEKTQRMHEGVWDKSAKGSHEVRGRTLGIVGYGNIGTQLSNVAEALGLRVIFFDTADRLAHGNAQRMRSLDELLAEADVVSIHVDGRPGNAGLFGAEEFAKMKPRSLFINASRGMVVDDVALREHVLSGHIAGAAIDVFPIEPKAQGDPFESVLRGLDNVILTPHVGGSTQEAQEEIGHFVSGKLAAFTRQGRTELSVNLPTVQAPELEVGHRIGFLHDNVPGVLASVNDLLADANANVTGQYLSTRGQQGYVVTDTLDPLPQDALAKLAEADHTIWLRTW

SEQ ID NO: 7204 - protein, 482 aa, Nocardioides sp. JS614
MKNVASSGSADLVIVANRLPVDRVPLGDGTAEWRRSPGGLVTAIEPVMRANDGSWIGWPGGTESDLEPFEDEGLDLVPITLTQQEVEEFYEGFANGTLWPLYHDVAAKPEFHREWWDAYVVVNRRFAEQAAAAASEGATVWVHDYQLQLVPQMLRELRPDLRIGFYLHIPFPPTELFQQLPWRRQLLEGLLGADLVGFQLPGAAQNFVRLVRQRVGHKTHRDLVYLPDGRTVRAAAFPISIDAKGFEDLARSEEVEKRAAEIRDALGNPSRIFLGVDRLDYTKGIYARLRAYSELLAQGDLDVEDAVFVQVATPSREQVEQYRILRDDIDRLVGRINGDLGRIGRPAISYMHASYPREEMAALYRAADIMVVTPYRDGMNLVAKEYVACRFDNDGALVLSEFAGAADELRQAWLVNPYDINGMKSALLEAYRADEKERTRRMKAMRKTVSQNDVAAWADSFLAELTAVRPSHGKTVRPARRS

SEQ ID NO: 7205 - protein, 486 aa, Nocardioides sp. JS614
MSEQAPRRIHERGGIDASVEGTEYFEKRQLAGGVAGWLLLAGLGVAYVISGDFAGWNFGMGEGGWGGMLIATGLMGTMYLFMVLGLAELSSTISTTGGGYAFARRAMGPWGGFLTGTAILIEYAIAPAAIANFIGAYVESLTGFDVGWVVFLVFYAVFIGLHLWGVGEALKLMFVITAIAVVALFVFVIAALPKFDASNLNSIPVDTSAFGSSSFLPFGLVGIWAALPYAIWFYLAVEGVPLAAEESKDPAKDMPRGIIAAIVTLLVFAFVILLVAPGAAGSDFLKDSGNPLVEALEAPGAYGGQNLVSQFINLVGLLGLIASFFSIIFAYSRQTFALSRAGYLPKFLSLTGQRKTPYVALIVPGIIGFVMAVLNQGDLLILVAVFGATISYVMMTLSHIILRFKEPELDRPYRTPGGVVTTGIACVLGVVALIAGFLVDTRVVAITAGVYVIAIAYFGLYSRHHIVASAPEEEFALIESSESELH

SEQ ID NO: 7206 - protein, 397 aa, Nocardioides sp. JS614
MTRAETRDDAIVVVDGARTPIGSFGGMLRDVPAHELGATAAREALRRAGVEAEAIDEVIMGCIGQVGPDAYNARRVALAAGLPDRTPAYTVNRLCGSGLQAVWSAAMQIRWGAAELALAGGDESMTRMPFYDFGARAGYKLGDRALVDGTVMMLTDPFHGIHMGVTAERVAEKYGVTRAEQDEFAAESQRRAATPEARAAFAEEIVPVEVGGRRPFTASEDEHPKPDTTVETLARLRPAFAEGGTVTAGNASGINDGGAAVVVASSRVAADRGLTPLVELVSVATAALEPELMGYAPVLALRSLFEQTGTTPGDIGIIELNEAFAAQAVACVRDAGLDPERVNPYGGAIALGHPVGATGANLTLRVAKDLVRRDLELGIVTMCIGGGQALAALFRRV

SEQ ID NO: 7207 - protein, 67 aa, Nocardioides sp. JS614
MAQGTVKWFNAEKGFGFIAQEDGGDDVFVHYSAIQTQGYKSLDENQKVEFDVTQGPKGPQAENVRPI

SEQ ID NO: 7208 - protein, 385 aa, Nocardioides sp. JS614
MLAHRLEGIPPTIFTEMSALAVRTRSVNLGQGFPDVDGPPAVIARAVAALEGGHNQYAPGPGVPALRQAIARHQLRHYGVELDPDAQVVVTTGCTEGIAAALLGLVDPGDEVVVLEPYYDSYTAMIQMAGGVRRPVTLRAPGFRLDPDELRAAVTPRTRFVLLNSPHNPTGTVLTRAELQAVADVAIEHDLVVVTDEVYEHLVYDDHEHVPLATLPGMFERTLTLSSAGKSYSFTGWKVGWATGPAELVGAVLAAKQWLTFTSGSPLQPAVAYALDEEPGFPTELAAELRAKRDLLCDGLARVGLDVRVPEGTYFASTDISALGWPDARSFCLALPERAGVVAIPTQAFYDSDAGRHLVRWAFCKDSEVIEEGLRRLAAADLTAS

SEQ ID NO: 7209 - protein, 866 aa, Nocardioides sp. JS614
MSQFGAEKFTTRSREAIESAQLSATTAGNIHTEPIHLLVALLLQEEGTAANLVTKAGVDVPGLVRAAAADRDRLPKASGATVQQPSASAALTRVLAGALDLAAGMKDDYVASEHLLISLATVESSARTVLTDAGLSADGLRESLTAVRGNRRVTSQDAESTYEALEKYSVDLTTAAEEGRLDPVIGRDAEIRRVVQVLSRRTKNNPVLIGEPGVGKTAVVEGLAQRVVAGDVPDSLKGRRVLSLDLAAMVAGAKYRGEFEERLKAVLEEIKAAGGQVITFIDELHTVVGAGAGGDSAMDAGNMLKPMLARGELHMIGATTLDEYRERIEKDPALERRFQQVFVGEPSVEDTIQILRGIQEKYEAHHGVRITDAALVAAATLSDRYISGRQLPDKAIDLIDEAASRLRMEIESSPEEIDRLRRAVERLKMEEFALAKESDEASKERLANLRQDLADHEEELRALEARWEREKSTLEGEGELRRQLDQLRMEADRLQREGDLGKASELLYGRIPALEQQIEAAGAAERSDIEPLVGEEVGAEQIAEVVEAWTGIPTGRMLEGETAKLLHMEDVIGQRLVGQRAAVTAVSDAVRRSRAGISDPNRPTGSFLFLGPTGTGKTELAKSLADFLFDDERAIVRIDMSEYGEKHSVARLVGAPPGYVGYDEGGQLTEAVRRRPYSVVLLDEVEKAHPEVFDILLQVLDDGRLTDGQGRTVDFRNTLLILTSNLGSGYLVDPMLDPEKKHESVLAVVRSSFKPEFLNRLDEIVVFDALTMDDLAHIVDLQLGLLAKRLAVRRITIEVTDAARRWLADVGYDPAYGARPLRRLIQSAIGDPLARLLIGGEVTDGATVSVDRAAEGDGLALETAPA

SEQ ID NO: 7210 - protein, 318 aa, Nocardioides sp. JS614
MDTTVPQPGSLTVGWIGAGRMGAAMASRLARAGEDVTVWNRTRAKAEALSEVGCGVADTIADLRGHDVVFTMVSTPADLEQVLVGEGGLLADPARVPAVVVDCSTVSTESSAAMRAACSERGVAFLAAPVSGNGKVVRAGGLSLVVSGPEETYERVAHLLDHLGKGATYVGEGELARLAKICHNVMLGVVTQCLAEITVLAEKGGMSRAAFLEFLNKSVMGSVFTTYKTPAFVNLDYTPTFTPILLRKDFDLGLAAARQLDVPMPVAAATNAAVQASVSSGRVEEDFAILLDLQAHNSGITLKAENVQVDDGLGGELG

SEQ ID NO: 7211 - protein, 384 aa, Nocardioides sp. JS614
MILRPRASTLEGMSVAIPSAASRSGSGWSLRSTLRQVAQAAVTPRDLDDVLDHFHPLRRGTDLRGRIVEVRPETAASATVVIKPGRDWTGHVPGQYLRVGVDVDGVRLWRTYSLTHGPRADRCISITVKAIPGGVVSNHLVHRIRPGQMIQIGQAEGEFVLTQPIPDKLLLVTAGSGITPVIGMLRNLFSRAVRPTTDIVLLHSALSRSEVIFGEELRRYGAAGWLRLVELHTDTHGLLQVGDPEAGLDRIVPDLAERTAYACGPAGLLDALQEHYDARGLELNVERFRAPMVATGEGGTLTFTSGVAVAADGATPILDAAESAGVLMPSGCRMGVCFGCVLPLREGAVRDLRNGQLTTAAPGDGVIIQTCINAVAGECHLDHA

SEQ ID NO: 7212 - protein, 507 aa, Nocardioides sp. JS614
MSSAVSAAGFADLGVPASLAAVLADRGIVQPTPIQAATLPDSLAGRDVLGRGRTGSGKTYAFLLPLVARLTASGRPAQARKPRALVLAPTRELVNQIEEALKPLARTAGLTTQTVFGGVGQNPQVQGLRRGADIVLACPGRLEDLIGQGHCDLSQVEITVLDEADHMADLGFLPGVRRIMDRTPRDGQRLLFSATLDKAIDVLVKRFLRNPVTHQADSAQSPVATMDHHVLHVAREHRVPVLVDLTSAPGRTVVFTRTKYGAKALARQLNKSGVPAVELHGNLSQGARTRNMDAFHTGRASTLVATDIAARGIHVDDVALVVHADPPVEHKAYLHRSGRTARAGARGTVITLMTDDQVRDVRDLTRAAGIKPTTTRINGASHPLLVELAPGERVLVPGGLVVETPAGSGGARAPRPEGAGRPGRSGGGRNRSRGRRSGGSGGSGGSGGSGGSAKSSGSGASSGGSAKSGSAGSSGGGNRSRRRSGAGRPAAGGASKHSAASFSSGRR

SEQ ID NO: 7213 - protein, 589 aa, Nocardioides sp. JS614
MSSDEQDDTTTPEVTFADLGLSDQVLKALADVGYEKPSAIQAATIPPLLAGRDVVGLAQTGTGKTAAFALPILSRLDLTQTTPQALVLAPTRELALQVCEAFERYAAHVKGVHVLPVYGGQGYGVQLSALRRGVHVVVGTPGRIMDHLEKGTLDLSELRFLVLDEADEMLNMGFAEDVETILADTPDDKNVALFSATMPAQIRRISKKYLDDPAEITVKGKTATASNITQRYLTVSYPQKVDALTRILEVENFEGMIVFVRTKNETETLAEKLRARGLSAMAINGDVAQAQRERTVNQLKSGKLDILVATDVAARGLDVERISHVVNYDIPTDTESYVHRIGRTGRAGRSGDAISFVTPRERYLLKHIEKATRQPLTQMQLPTVEDVNSTRLSRFDDAITEALSQTQRIDAFRDIVAHYVREHDVPEADVAAALAVVAQGETPLLLDPADRANELRAPREERAGQGTRRDRHDHGGPGGHGGPPRERRPRGRSDVPMATYRIAVGKRHKVEPRQIVGAIANEGGLSRQDFGHIDIRGDHSLVELPADLPAGAWDSLRSTRISGKLIELTRDGGGPAADTRHKKPRHKTR

SEQ ID NO: 7214 - protein, 547 aa, Nocardioides sp. JS614
MIADVNGVVLGVFVFLFLLVTVLGFAAARWRRAQSLDSLDEWGLGGRGFGTFIAWFLIGGDIYTAYTFIAVPATLYAGSAVGFFAVPYTIVVYPLIFVFLPRLWSVSHRHGYVTPADFVQGRYDSRPLALAVALTGILATMPYIALQLVGMQVVLEVMGLGTDSDNWLVKDFPLLLAFVVLAAYTYSSGLRAPALIAFVKDTLIYLVIIVAVVYLPSQLGGWEHIFSTVNDSFSSFNADNADAIAAGDAAPKGTMPPGPAQWAYASLALGSALALFMYPHSVTGVLSTRSRSVIRRNAALLPAYSFLLGLLALLGFVAIAAGVKVENPQQSVPQLFENEFSPWFAGVAFAAIVIGALVPAAIMSIAAANLWTRNIYKAFINRDATHAQEAKQSKVASLLVKFGALVFVLALSNSFAINLQLLGGVWILQTLPAIVIGLYTRWMHRWALFAGWAVGMAWGTWLAYGVSSPVQEHFGGPLVNFPGTETKFYIALIAFLANLLVAIVLTVVFRALDVAEGVDQTRAQDYHADVGDPGVESELEPHESVRA

SEQ ID NO: 7215 - protein, 363 aa, Nocardioides sp. JS614
MGFLGDIGAFIMTPLYYAISAVLVAWHSALDAIGLDGDSGLVWVLSIIGLTLTVRALLIPLFVKQIKSSRNMQLIQPKVKELQKKYGHDRERLAQETMKLYKDSGTNPFASCLPLIIQMPIFLALFRLLDKHAARGDGKAFITKDLAESFQSADLFSVPLKATFLRNDGSTAVMVVAAILVLAMTATTFTTQRQLMSKNMPPDALSGPYAQQQKLLLYVLPVVFAVGGIAFPVAVLFYWTTSNLWTMGQQFYVIRNNPAPGTAAAQAKADRDRAKAARHGHGLVQTADPAVEAETENRPQPRQQPKKQSREQRRKATGATPANPARPKGQQQAQPKPQSKPQSKGQQKSRQPKPKPSPEGEQQ

SEQ ID NO: 7216 - protein, 99 aa, Brassica rapa
MALVRSLLGAKKILGRSVTATASTSKRATMAAPPKGFLAVYVGESQKKRYVVPISYLSQPSFQALLSRSEEEFGFDHPMGGLTIPCPEDTFINVTSRLH

SEQ ID NO: 7217 - protein, 212 aa, Hordeum vulgare subsp. vulgare
MDKHQLFGSSNVDTTFFAANGTHDAARARKQRARRRRRRSARCGGGDGDGGEMDGGGDPKKRRLTDEQAEILELSFREDRKLETARKVYLAAELGLDPKQVAVWFQNRRARHKNKTLEEEFARLKHAHDAAILHKCHLENELLRLKERLGATDRRCGASGRQLGATGHLWMADTPLAPLACAAGARARPSRREPASSSRVSAGQTCWGGTMT

SEQ ID NO: 7218 - protein, 374 aa, Mycobacterium sp. KMS
MESRPGPGHAPLTKPVRLPPARLARIVETLRTALHRVRFKVVPPFAGILDLTMGFAVAQAIYAAARLGVADVLRDGPMTAADVADRVHADPSAVHRLMRVLAAHQIFRERRDGPFEMTALSQALCSDAAVSIRPLLLMLSHPFYWQHFGRLTDVVRTGRTSLETEYGKGLFECLDEDPEVARVFNDAMSCVTAMSIPPVLAAYDFSRFRTIIDVGGGDGHMLTAILEVATASRGVLFELPALAEQARETVRSVGLTDRATIESGSFFDHVPRGGDLYVLKHVIHDWRDDRAREILRHVRDAMSPRAVLLLVETVIPPGNGMHFGKLLDLDMLIFAGGRERTRAEFSSLLFETGFHLDRIVPTVTHLSLIEATAC

SEQ ID NO: 7219 - protein, 296 aa, Mycobacterium sp. KMS
MHIGFIGLGNMGSAMAANLLAAGHDVTAYNRSPDKVDALSAEGARPARTVAEACQGDVVVTMLANDDAVEAVSFGDDGIVASLRPDAIHVSSSTISLALAERLTAAHAEGGSRFVSAPVFGRPEAAAAAKLFVVAAGAPDTVEALAPVFEAIGQRTFVVGTEPKAANLVKVSGNFLIASVIESLGEAMALVAKGGVDVDQYLDLLTSTLFDAPAYRTYGGLLARREFEPAGFSATGGLKDVRLALEAGDGLQVPLPIASLLRDRFLTLLATGGGHLDWSAIGALSAWESGGPGPNA

SEQ ID NO: 7220 - protein, 364 aa, Mycobacterium sp. KMS
MPTALICGGGVAGLSSALHLKQQGWKVQIFESDSELRTAGVGLNIWPNGVRVLDGLGLGAQFRSFAAAMDRWWALDSDGELTSDIDVSHWNELLGAPVTGARRRRLNAMLADALDPVEIQFNTTAVGYTQTDDTVTVHFEDGRSATGDVLLGADGIGSRIRNAMFGAPPAFTDEAIVRWRGVFETAQAGVPARVQADVYGARGHFGWIPIDATHAYWYGSVGGLSTFDEFRAVYDTWTNTPVPQIIASSEPESIIGREIGHYREHLPRWVDGRVALIGDAAHPMYPGMAQGANQALIDGQTLTHHLTVHGDVPTALQMFERERIPVANKMVDYSRLHFDYERTRKEYRSGQGNLQINRYLEFES

SEQ ID NO: 7221 - protein, 355 aa, Azoarcus sp. BH72
MTPRFHPLKVAEVRRETADSVSLRFEVPADLAADYRFVQGQHLNLKAVVNGEEVRRSYSICSGVDDGELRVAIRKVDGGRFSSWAVDAVRVGDVFEVMTPEGRFSTQLDPANAHHYVAFAAGSGITPILSLIKTTLRAEPKSRFTLVYGNRNQNSAMFAEALEDLKDRYLTRFALYNVFSREEQEVPLFNGRLDQARVAAFLDTLIPAADIDAAFICGPGGMIDEVEAALKGAGVPADRIHLERFGVPASAPRHHVEAGDAPQARITVIVDGLKREMEFRAQDPSILDVALRAGLDLPYSCKGGVCCTCRAKVLEGKVRMDKNYTLEQPDIDAGYVLTCQAHPLTERVVISYDDR

SEQ ID NO: 7222 - protein, 400 aa, Azoarcus sp. BH72
MTEVFICDGIRTPIGRYGGALSGVRTDDLAALPIKALIARNSGVDWAAVDDIYYGCANQAGEDNRDVARMAGLLAGLPIDVPGSTINRLCGSGMDAVGTAARAIRTGETQLMIAGGVESMSRAPFVMGKADTAFSRSAKIEDTTIGWRFVNPLMKAKYGIDSMPETAENVATDFNINRADQDAFALRSQLRYAAAAERGFYEGELVPVEIAQKKGDPLRVTADEHPRVTTLEALAKLKGVVRPDGTVTAGNASGVNDGSVALLLASEAAAAKHGLKPRARIVAMATAGVEPRIMGIGPAPASRKLLALTGLSLDQMDVIELNEAFAAQALAVTRQLGLADDDARVNPNGGAISLGHPLGASGARLVLTALRQLEATGGRYGLCTMCIGVGQGIAMIIERV

SEQ ID NO: 7223 - protein, 447 aa, Azoarcus sp. BH72
MTFHALGLAEELIAAVEQSGYTTPTPVQEQAIPAAIAGGDLLVSSHTGSGKTAAFTLPSLHRLVGRRPAPNSGPRVLVLTPTRELAQQVEEAVKTYGRALRWLNTACLVGGAPFFAQVKQLSRPVDVVVATPGRLLDHLNRRKLKLSDVETLVLDEADRMLDMGFAEDIEAIVGAIPASRQTLLFSATLDGVVGALANKLTRNPQRIEIASTEAKRGNIEQRLMFADDMGHKSRLLEALLGTDGLQQAVVFTATKKSADELSLSLQEKGFSAAALHGDMHQTVRNRTLQRLRQGRIGVLVATDVAARGIDVAGISHVINFDPPRQVEDYVHRIGRTGRAGRDGIAITLSGPRETGLIRAIERFTGDRLAVHTIPGLEPAPRRPSAPRPGGPGRRFGSGGKPGGGFGGRSEGGYGGRGEGGRGAYGRDGHATRNERSHGDRRDRGPRG

SEQ ID NO: 7224 - protein, 706 aa, Azoarcus sp. BH72
MNVPTPLPSGPHDRVHIVGAAFALGAPHGGSADGPEALRHAMLPERLRTTGITGTWLEPLRPLRTPPPDAPMEERLAAVGEYCARLAEQIAGLPEDGFPLVLGGDHAVAIGTWRGVARRQGGAPGLIWIDAHLDSHTDQSTWSGNIHGMPLAALLGEGAPALTAIPGPRLDPARVCIIGARDWEPAERERLDRLGVRVFDIAEVRERGLPTVFCEALTIARSGHGRDGGFGVTLDLDALDPLAVPAVTCPTPDGIDPQQLVDVFHTLRSCGDFVGLEIVEYRPDLDPDGHSAALTARLVAAALGPATYWLREKERRFGATNYAPMPVVFHRGEGVWLWDVEGTRYLDMMSAYSAVSFGHANPRLLRALQDQAQLLTLTSRSFSNDRLPLLLERLCSLLGFERALPVNTGLEAVETALKAARKWAYIVKGVPPDRAEIIACEGNFHGRSITIVGLSSKEQYRDGFGPFPPGLRRVPFGDPTALEAAITPHTAAFLVEPIQGEGGIIVPPPGYLAHCAEICRRHNVLLIADEVQTGLGRTGRLLACDHDGVRPDGLILGKALGGGLLPVSAFLADREVMDVFRPGDHGSTFGGNPLGAAVALEVLDLLAETRPWEAAERLGRRLRAELEAAELPCVREVRGRGLLIGVALDPVKAPAQLVAELLLARGIATRDTNGNVIRLAPPLTIDEGTLDRAAAIIIDTLNPLGR

SEQ ID NO: 7225 - protein, 403 aa, Azoarcus sp. BH72
MSDPVVIVSVARTPMGGFQGDLSGLTGPQLGAIAIKSAVERARLAPEQVQEVIMGCVLPAGVGQAPARQAALGAGLPLAAGCTTINKVCGSGMKATMLAHDLLLAGTNEVMVAGGMESMSNAPYLLPKARGGYRLGHGQLLDHMFLDGLEDSYSKENKGRLMGTFAEDCAGHFDFSRSAQDAFAVASTERAQAAITEGAFSWEVVPVTVAGRKGDVVVDKDEQPLKAQLDKIGTLKPAFKKDGTVTAANSSSISDGAAALVLMRKSTADKLGLAPLATIVGHATHAQEPQWFTTAPVGAMQKVLAKAGWGVGDVDLWEINEAFAVVTMAAMKELNLPHDKVNVNGGACALGHPIGASGARILVTLIGALRRRGLKRGVASLCIGGGEATAMAIELNASVACGG

SEQ ID NO: 7226 - protein, 560 aa, Azoarcus sp. BH72
MYRYDDYDQRLVDERVAQFRDQTRRYLAGELSEDEFRPLRLQNGLYVQRHAPMLRIAVPYGLFSSAQLRTLADIARRYDRGYGHFTTRQNIQFNWPELAKVPEILAQLATVQMHAIQTSGNCIRNITSDAFAGVAADELIDPRPWCEILRQWSSFHPEFAHLPRKFKFAVNGAKEDRAVIQAHDIGLDVVKNDAGEIGFRVLVGGGLGRTPIIGEEIAAFVPWQHIVTYCESILRVYNLHGRRDNKYKARIKILVKALGIEEFRRQVEAEWAFHKNGPSTLTEAEVARVAAHFVDPAYESLPATDAGYASLLDENKPFAAWVKRNVRAHKVPGYASVTISLKKTGVPPGDITESQMELVADLADAYSYGEVRATHQQNLVLADVRQSDLFKVWQSLRDAGLATPNIGLLTDIISCPGGDYCALANAKSIPIANAIQERFDNLDYLYDIGEIELNISGCMNACGHHHVGHIGVLGVDKNGEEWYQVTIGGDQGNKAAIGKVIGPSFAAAEMPDVVTHLIETYIANRHEDERFVDTVRRIGIEPFKAHVYGNRQTEKKVAHA

SEQ ID NO: 7227 - protein, 299 aa, Azoarcus sp. BH72
MRTSLSVLALCFAAAGLAAPAHAAEPTGTLKKIKDSGTITVGHRESSVPFSYLDADQKPVGYAMDLCAKVVDAVKDELKLPKLEVKYQAVTSQNRIPLMQNGTIDIECGSTTNSVQRQQQVGFSVNYFVTSVRMAVRKDSGIKDIGDLNGKPVATTTGTTSDALIKQNEKGKSIDVRNIYGKDHADSFLMVESGRAAAFVMDDILLAGLIASSKNPAAYEIVGPSLRDEPYGVMLRKDDTEFKAVVDKALTGLMKSGEAEKMYTKWFTQPIPPRNVNLNFPMSAATKAALTNPTDKGVE

SEQ ID NO: 7228 - protein, 407 aa, Azoarcus sp. BH72
MSIPNLTPIYLDNNATTRCAPEAVTAMLPYFTEQFGNPSSMHSFGAKVGHATKGARASLQKLLGAEFDSEIIYTAGGTEADNTAILSALKANPERKEIITSTVEHHAVLHLCEQLEKEGYTIHKLKVDGKGRLDLDEYAKLLTDKVAVVSVMWANNETGTYFPVEKMAEMAKAAGILFHTDAVQAVGKIPLNLKDSAIDMLSLSGHKLHGPKGIGALYLRRGARFRPLLRGGGQERGRRAGTENVPGIIGLGVAAELALEHMEQENTYVRALRDKLQAGILAAVPNAFATGDVDNRLPNTLNIAFEYVEGEAILMLLNKQGIAASSGSACTSGSLEPSHVMRAMGIPYTAAHGTIRFSLSRENTEAEIDRVIAAVPPIIAQLRKLSPYWGENGPVTDPEKAFAPTYA

SEQ ID NO: 7229 - protein, 559 aa, Azoarcus sp. BH72
MNASRLSRLALGLASLPLSAAALAAGPAMEAAQKQPLNLHAIGMFFVFVLMTLGITYWAASRTKSASDFYTAGGGITGFQNGLAIAGDYMSAATLLGLTAMMYAQGVDAYIYMIAFFVGWPIILFLMAERLRNLGKFTFADITAYRLDQGKVRTMAAVSSLTVVCFYLVAQMVGAGQLIKLLFGLDYTVALFVVGALMMVYVTFGGMVATTWVQIIKACMLLLGGTTVMLLALSQFGFSFEALATRAMEVHKLGPKLFNPGSLLADPVTAISLGLGLMFGTAGLPHILMRFFTVTDAKEARKSVLYASGIIAYFFNVIALMGLAAILIVGQNPQYFEGGDLAGKIVGGGNMVAMHLAHAVGGNLLLGFLSAVAFATILAVVAGLALAGASAISHDIYARVIMKGRASETTEIRVSKFATIGLGVVAVLLGIVFEKMNVAFMVALAFGVAASANFPVLILSMYWKGLTTRGALAGGYLGLFSAVTFVVLSKSVWVDVLGNAAPIFPWTQPALFSMPLAFLATIVVSLLDSSHKARSEREAFEDQYVRAQTGVGAASAAAH

SEQ ID NO: 7230 - protein, 316 aa, Azoarcus sp. BH72
MPYGSLMVFTGNANPKLAADVARRLGISLGSVTVGRFSDGEVNVELLENVRGKDVFILQPTCAPTNENLMELLVLVDALKRASAGRITAAIPYFGYARQDRRPRSARVPITAKVVANMLQAVGVQRVLTMDLHADQIQGFFDIPVDNVYAAPVLLADLDKQKYDDLMVVSPDVGGVVRARAFAKRMECDLAIIDKRRPKANVSEVMNIIGEVDGRTCVIMDDIVDTAGTLCKAASALKEHGAKRVLAYCTHAVLSGAAVSRINDSELDELVVTDTIPLRDDAKASSRIRQVSVASLLADTVLRISNEESVSSLFME

SEQ ID NO: 7231 - protein, 177 aa, Azoarcus sp. BH72
MKLIILDRDGVINYDSDQFIKSPEEWKPIPGSLEAIAKLNQWGWRVVVASNQSGVGRGLFGMDTLNAINEKMVKSLAQVGGRLDAIFFCPHAADSTCECRKPKPGLFLQIAARFNADLAGVPCVGDSLRDLQAGAAVGCQPYLVLTGKGLKTREDPALPDNALIYPDLASVVADLTA

SEQ ID NO: 7232 - protein, 331 aa, Azoarcus sp. BH72
MDPIAPGTAPTHRAAELARHVLRVEAAAVAALAERVGDDFERAVELILGRSGRVIVTGIGKSGHIARKLAATLASTGTPAYFVHAAEAAHGDLGMITPEDVVIALSNSGASEELLMIVPLVKRQGARLIALTGRPDSPLAREADVHLDGAVSEEACPLNLAPTASTTAALALGDALAVALLDARGFGPDDFARSHPGGSLGRRLLTHVSDVMRPAPEVPVVGREAALAEALLAMTRGGMGMTVVADPDGRPLGIFTDGDLRRALEKGIDVRAARIADLMTPQPRHISPDALAAEAAEVMERQRISQLLVLDAAGKLAGALTTHDLMLAKVI

SEQ ID NO: 7233 - protein, 396 aa, Azoarcus sp. BH72
MRPVRLPRLSQRSADVQPFHVMELLRRARDLEAMGRDIIHMEVGEPDFPTPAPVVAAATRFLDGGDVHYTPALGLPALREAIARFYHDRFGADVAPDRIIVTAGASGALMLALAATTNPGDEWLLPDPGYPSNRHLVRSFEGVAQALPVDAATRYQPTAAQVDAAWSARTLGLMVATPSNPTGTLLDAAELAALHRGTQARGGLLIVDEIYQGLTYGVEASTVLSQPALNAADDLFVVNSFSKYFGMTGWRLGWLVAPPAYVREIEKLAQHFFIAPSTPAQHAALAAFAPDTTEILEARRHEFAARRDTLLPALRELGFVVATEPQGAFYIYADVSALASDSEQLARRLIEEAGVAATPGLDFGHHHPRRHLRIAYTTRQDRLLEAAERIAAVLRP

SEQ ID NO: 7234 - protein, 758 aa, Azoarcus sp. BH72
MDELIRAAALDYHRYPRPGKIAVAPTKVLSNQRDLSLAYSPGVAAACDAIVEDPAEAANLTSRSNLIGVITNGTAVLGLGNIGALAAKPVMEGKGVLFKKFAGIDVFDLEIAEPDPDKLIDMIAALEPTFGGINLEDIKAPECFYIESKLRERMKIPVFHDDQHGTAIVVGAAILNGLQMQGKDLKQVKLVTSGAGAAALACLGLLVKLGVPVENIWVTDLEGVVYEGRTALMDPIKARYAKKTEARKLAEVIEGADVFLGLSAGGVLKGEMVAKMAAKPLILALANPTPEILPEEVKAVRDDAIIATGRSDYPNQVNNVLCFPFIFRGALDVGATTITDEMQLAAVRAIAELARAEQSDIVAAAYGEKVSGFGTEYIIPRPFDPRLIVKIAPAVAEAAMSSGVATRPITDWDAYRGHLNNFVWHSGLLMKPVFAAAKKAPKRIIFSEGESEKVLRAVQTVIDEGMARPILIGRPDVIANNITRFGLRMEAERDFELVNPESDPRFKELWTHYHALTERKGVSVEYAKKEVRRRTTLIGSLLLKFGYGDGLICGTYGMHRLHLDFVETVLGRREGVNHCYTLNVLSLPERTLFLADTYVNYDPTPEQVVEMTRLAAEEMQRFGVEPRVALLSHSSFGSADSPTAEKMRTALRLLHERHSELQVEGEMHGDSALDAKLRTQIFPNARMREDANLLIFPTLDAANIAFNLLKSAAGEGMTVGPILLGAAKPVHILTPSATVRRIINMTALTVVEAGQQGA

SEQ ID NO: 7235 - protein, 316 aa, Azoarcus sp. BH72
MTLSIVCLERDAVGAAFGRPRAPHRWTEFPSSAQEQVVERLRDAEVAIINKLRLGASEIAALPRLQMVAVAATGSDNVDLEACRARGIVVSNVRGYAVHTVPEHALMLMLALRRRLFDYVADVRAGRWARSDNFCFFDHPIGDLHGATLAIIGRGGLGDGVARLGAAFGMRVIYAEHKGVAGVREGYTAFERVLAEADVLSLHCPLTPATRGLIGASELASMKREAVLVNTARGGVVDEPALAAALRAGVIAGAATDVLSSEPPREGNPLLAADIPNLIVTPHVAWASRQAMQTLADQVIDNIDAFAAGAPRNRLA

SEQ ID NO: 7236 - protein, 577 aa, Azoarcus sp. BH72
MNPNDNKDGAPAAPSNFIRNQIDEDNRSGKWSGRVETRFPPEPNGYLHYGHAKSICLNFGLAESYGGACHLRFDDTNPEKEEQEYVDSIIEAVQWLGFDWREHLYFASDYFDIMYACAESLIKAGKAYVDSLSAEEMRALRGTLTEPGKDSPFRTRSIDENLDLFRRMRAGEFAEGTHVLRARIDMASPNINLRDPAIYRIRRATHHRTGDNWCIYPMYTFAHPIEDAIENITHSICTLEFEDQRPFYDWLLDALASAGHFPRPLPQQIEFARLNLTYVVLSKRKLIQLVDEGHVDGWDDPRLPTLVGARRRGFTAEGFRLFAERIGVTKSDSWIDMSTLEECMREHLNEAAERRVAVLDPLKLVITNYAEGASEQCHAPNHPLKPELGKRDMPFGRELWIEREDFMEEPVKGFHRLYPGNTVRLRYGYVVKCTGCEKDADGNVTAVLAEYMADSKSGTPGADNYKVKGNLHWVSAAHGYAAEIRLYDRLFAHPHPGQRREGDPEGYERSFLEDINPDSKRVIRAWLEPALRAAKPEERFQFERHGYFVADRRDSVDGAPVFNRTVTLKDSWAKGGK

SEQ ID NO: 7237 - protein, 419 aa, Azoarcus sp. BH72
MTKQTFTTPELSRRGFLKASAAAGTATLLSGLFPGGVWAAGSDAPEKKEIKVGFIPLTDCSSVVMAAAQKFDEKYGIKIVPSKEASWAAVRDKLVSGELDAAHVLYGLVYGVHLGIGGPKKDMAVLMTLNNNGQAITLSNQLKEKGVTDGASLKKVVAASPAGTYTFAQTFPTGTHAMWLNYWLAANGINPLQDVKSIVVPPPQMVANARVGNMHGYCVGEPWNQRAIVDGVGFTAVTTQDIWVDHPEKVLGTTGDWVTKNPNAARALTAAILDASRWIDASIANRRTTAETVAARSYVNTDMDVILGRMLGRYENGLGKTWDDANAMKFFNDGAVNFPYLSDGMWFLTQHRRWGLIDKDPDYLGVAKAINRIDIYKQAATAANVALPKSDMRSSKLIDGVVWDGKDPAKYAAGFKIKA

SEQ ID NO: 7238 - protein, 107 aa, Azoarcus sp. BH72
MDIKDVIREQVTTHPVALYMKGVPQAPACGFSATAVQILKASGVKDFFSVNVLADDAVRQGIKEFSNWPTIPQLYVKGEFVGGADIMREMYQSGEIQQLLKDAGVTA

SEQ ID NO: 7239 - protein, 373 aa, Azoarcus sp. BH72
MPLTIGVPAERIPGERRLPVVPDVVKKYLGLGARVVIESGAGVPAHYRDETFGDVTLGAAAEVFAQSDIVLCVQPPSAEHLATMKPGALLIGLLQPWSDPERIKLLQDKQITAFAMELLPRISRAQSMDVLSSQAAVAGYECALIAADHSPKFFPMLTYAAGTIRPAKVLVIGAGVAGLQAIATARRIGAMVEAYDVRPETREQIESLGAKFVDTGVSAAGSGGYARELTDEEKAKQAERLAKAVAQCDALITTAAIPGKKAPKIITADMIARMKPGAVVVDMAAETGGNVEGTVAGEKTWINDVLVIGPTHIASRMPVHAAEMLAKNLFNFIGPFIKDGALTLDWDDEVLAGTCLTHAGELRHAGVKAALGL

SEQ ID NO: 7240 - protein, 494 aa, Azoarcus sp. BH72
MSFADLGLIPELQRAVADAGYTEPTPIQRQAIPIVIAGNDVMGGAQTGTGKTAGFTLPLLHRLARHANTSTSPARHQTRALILAPTRELAMQVYESVKTYSKHLPLRATCIYGGVDMNPQIQELRRGIEIVIATPGRLLDHVQQKTINLTQVEMLVLDEADRMLDMGFIPDIKRILALLPASRQSLLFSATFSDEIKKLADQMLKNPQLIEVARRNMVSETITHRVHPVSSGMKRNLLAHLLRHQPDTQALVFVDTKLVCGRLAHFLERHSISADSIHGDKSQQQRTETLEAFKAGKLRVLVATDVAARGIDIDELPYVINYELPHTAEDYVHRIGRTGRAGHQGNAVSLVCTEEKHLLADIQKLIKLEIPQEVVPGFEPDPDFFEAGSRAHRGRRPVEDFDERPRREPRGGREERPPREERAPREDRGARNVVAKRPPRSTIAPDGFDFSKPYVAKPVVLAEGAAPDASPAEAGTPRRGQRPIAFLLGGLGRK

SEQ ID NO: 7241 - protein, 555 aa, Azoarcus sp. BH72
MNQMTGAELIVRLLERQGVRTIAGIPGGAILPLYDALSQSDLIEHVLARHEQGAGFMAQGMARVSGVPGVCFASSGPGATNLVTAIADAQLDSIPMVAITGQVPLPMIGTDAFQEVDIYGMTVPITKHNFLVRSAEELLKVIPEAFRIAMSGRPGPVLVDVPKDVQNQRIEFAEFPPPAGRDAVPALDAAAIDRAAAMINEAERPVLYLGGGVIHSGASAQAVTLAEQAGLPTTMTLMALGAMAVDHPLSIGMLGMHGARYTNYVLEEADLLVCVGARFDDRAIGRAAQFCPGARIVHIDVDPSELHKIKTAHVAIHGDVAAVLDALLPKVKVQLRKRWLSHVESLKSRFPMQMPDLDDPRSHYGLIHAVAAALDDEAVIATDVGQHQMWVAQAYPFRRARQWLTSGGLGTMGFGMPTAIGAALAAPERTVVCFSGDGSLQMNIQELATLAELGLNVKIVLMNNNSLGLVYQQQNLFYGKRTFASKYRGGPDFCRIAEGYGIAAVDLDASDNPRATLAEALQAPGPCLIHASIDREQFVYPMVPPGAANTEMIGG

SEQ ID NO: 7242 - protein, 641 aa, Azoarcus sp. BH72
MGKIIGIDLGTTNSCVSVMEGGKPKVIENSEGARTTPSVVAYAEDGEILVGAPAKRQAVTNARNTLFAVKRLIGRRFEEKEVQKDIDLMPYTIAKADNGDAWVEVRGKKIAPPQVSAEVLRKMKKTAEDYLGEEVTEAVITVPAYFNDSQRQATKDAGRIAGLEVKRIINEPTAAALAFGMDKKPGDSKIAVYDLGGGTFDISIIEIADIDGEHQFEVLATNGDTFLGGEDFDQRIIDYIVTEFKKEQGVDLKNDVLALQRLKEAAEKAKIELSSGSQTEVNLPYITADATGPKHLAIKITRAKFESLVEDLIERSIEPCRIALKDAGVKVSDIDDVILVGGQTRMPKVIEKVKEFFGKEPRRDVNPDEAVAVGASIQGGVLQGEVKDVLLLDVTPLSLGIETLGGVMTKLIQKNTTIPTKASQVFSTADDNQSAVTIHVLQGEREMASGNKSLGQFNLSDIPPAPRGMPQIEVTFDIDANGILHVSAKDKATGKENKIKIQANSGLSDEEVERMVRDAAAHAEEDKKAHELVDARNQCDALIHSTKKALAEHGDKIGADDKAKIEAAMKDAEEAIKSGDKDSIEAKSQALAMASQKLGEAMYGQQQAEGGAQAAGAAGGSSKADDADVVDAEFTEVKDKK

SEQ ID NO: 7243 - protein, 315 aa, Azoarcus sp. BH72
MTALSMRVEQIDALTPLIRRLILRTADGSAIPAYTAGAHVELHVPRERPLRRAYSLVTPADGGDRVEIAVQLEAQGSGGSRWVHSLSEGETITVSPPKNLFPLEAAAEEHLLFAGGIGITPILCMARTLAAAGKRYALHYAARDPERAAYCAEVEALEHARCWFDGGDPARGMPLAEVIGAPAAGRHLYVCGPKGFIAAVLDTGRKLGWAEANLHCELFTGALDEAGDRPFTVELTTSGITLEVPVGKTVMDVMEEAGLDPMFDCRRGECGICTAKVVAGEADHRDICLSARERSEGGFCTCVSRARSERLVLEL

SEQ ID NO: 7244 - protein, 67 aa, Azoarcus sp. BH72
MATGTVKWFNDSKGFGFITPDDGSEDLFAHFSAINMNGFKTLKEGEKVSFEVTQGPKGKQASNIQRA

SEQ ID NO: 7245 - protein, 270 aa, Azoarcus sp. BH72
MAYLAPAEFVTKMIDAGESKLLMSTRDTLIRAYMAGAILALAAAFAVSITVNTGNPLIGALLFPVGFCMLYLLGFDLLTGVFTLAPLAVLDRRPGATWSGVMRNWSLVFTGNFAGALTVAVFMAIIFTNGFSEAPNAIGQKIGHIGEGRTVGYAAHGAAGMLTLFVRAVMCNWMVSTGVVAAMMSTSVSGKVIAMWMPILVFFYMGFEHSIVNMYLFPSGLMLGGQFTFMDYLIWNEIPTVLGNLVGGLTFVGATLYSTHYKTAPKRKVA

SEQ ID NO: 7246 - protein, 347 aa, Azoarcus sp. BH72
MSETPVHIVRFEPVGVEMEVAEGETVLDAAFRQGVAVMHGCKEGQCSSCKALLIDGDVEMLKYSTFALPDYERDANHVLLCRTLAHTDITVELLNYDEDLMRRSIAVKEFAGKVVGISALTHDIRRLDVELEQPIRFWAGQFVDITLPEKGITRSYSMASVPSSPGQVSFIIKKYPNGAFSTALDTELKPGDPVLVKGPYGGCFRREERPGPMVLIGGGSGMSPLWSILNDHIESGEQRPIRFFYGARTRRDLFYLEQFAEFEQKVPDFRFIPALSAAEPEDGWTGETGYIHEVVARTLKEEGFDGASIDAYTCGPAPMIDAITPVLHMAGVPPDQMYFDKFTQAVR

SEQ ID NO: 7247 - protein, 344 aa, Azoarcus sp. BH72
MKKSLRRIAPAVALGFAATLSATAAHAGATLDQIKRKGELACGVSSGVPGFSATDSRGNWSGLDVDVCRALAAAVLGDANKVKWVPLGSQQRFSALQAGEVDILSRNTTWTLTRDASLGLAFTAITYYDGQGFLVPKSIKVTSAKQLRDAEICVQSGTTTEKNLADYFRRQGIRVKPVVFEKFDASLKAFFNGRCVAYTTDASSLAGIRAGEAPKPDDYLILPETISKEPLGPIVRRGDDEWFTIVKWVVYALIEAEELGVTRDNADKQAAGGDPAVGRLLGKTEDLGKPLGLDAQWAYRAVRAVGNYGEVFERNLGAGSPLRLPRGQNALWSQGGLMYAPPLR

SEQ ID NO: 7248 - protein, 223 aa, Azoarcus sp. BH72
MSQPTAVSTIALKTFPLFQGLSDEVLGNVARVSMMRRIPRGQAVVRAGDRTDYVYFVLTGNLKVVVSDEDGREVILSILGQGELFGEMGMFGEQPRSASVIAVVPADLVMIAKQDFRQIMQENFEIAWRIMSNLAERLRNADRKIESLALMDVYGRVARLLIDMSEDVNGKTMVVRKISKQDIAKMIGASREMVSRVMKDLGQEGLIEETPQGIILLDRLNEV

SEQ ID NO: 7249 - protein, 860 aa, Azoarcus sp. BH72
MRFDKLTTKFQQALADAQSIAVGNDQQFIEPQHLLAAMLNQDDGGTVSLLQRAGVNVPPLKSALQKALDRLPKVEGHGGEVQVGRDLTNLLNLTDKEAQKRGDQFIASEMFLLALADDKGETGRLLKEHGLTRKALEAAVDAVRGGQNVGSQDAEGQREALKKYCLDLTERARAGKLDPVIGRDDEIRRAIQILQRRTKNNPVLIGEPGVGKTAIVEGLAQRIVNDEVPETLKGKKVLSLDMAALLAGAKYRGEFEERLKAVLKDIAQDEGRIILFIDEIHTMVGAGKAEGAMDAGNMLKPALARGELHCIGATTLDEYRKYIEKDAALERRFQKVLVDEPTVESTIAILRGLQEKYEVHHGVDITDPAIVAAAELSHRYITDRFLPDKAIDLIDEAAARIKMEIDSKPEVMDKLERRLIQLKIEQEAVKRETDEASQRRLLLIRDEIDKLEREYANLDEVWRSEKASVQGSQHIKEEIEKLRAQMAEMQRKGQFDKLAELQYGKLPQLEAQLKAAETAGSGERQFKLLRTQVGAEEIAEVVSRATGIPVSKMMQGERDKLLKMEERLHGRVVGQDEAVRLVSDAIRRSRAGLADENRPYGSFLFLGPTGVGKTELCKTLAEFLFDSEEHLIRIDMSEFMEKHSVARLIGAPPGYVGYEEGGYLTEQVRRKPYSVILFDEVEKAHPDVFNVLLQVLDDGRMTDGQGRTVDFKNTVIVMTSNLGSQMIQQMSGDDYQVIKLAVMAEVKTFFRPEFINRIDEVVVFHALDEKNIAGIARIQLKYLEKRLAKLDMSMEVSDAALAEIASAGFDPVFGARPLKRAIQERIENPLAKAILEGQFGAKDRIRVDASGSKLSFSRAD

SEQ ID NO: 7250 - protein, 304 aa, Azoarcus sp. BH72
MNIEEAVPSAKPGFRTGFVAIVGRPNVGKSTLLNRLIGQKISIVSSKAQTTRHRVTGILTNEGAQFVFVDTPGFQTQHRNALNRSMNRTVSQVLGDVDLVFFVIEAGRFGEDDRKVLEVIPADAQVVLVINKVDQLKDKSRLLPFIDQVRAAREFVEIVPLSAERGSNVEALVGAATPLLPEGAPMYEEDEITDRSERFLAAEFLREKLFRLLGDELPYGIAVEIEKFETEGNLRRIHAAVIVDKAGHKGIVIGKGGEKLKRVSTEARVELEKLFDGKVFLEVWVKVKSGWADDERALKSLGYE

SEQ ID NO: 7251 - protein, 226 aa, Azoarcus sp. BH72
MKPGSGHPAGVALDVANHPLGAALGADQPFQTPTVRHYSLGSFIATPGAGGNTVFVLQQGRLRVFLSGEDKELTLAFLEPGEVYCTHTRAWVEAVTDCTLLMADTAHFQGRLLADPTLMPVTIRVFAQLLARSIDIIENLAFRDVAARLANFLLGLARGADPALPAGLRIPVQLRTEDIARLLGTSRQTVSSLINQLVREGVIARDGRRAVLLLDPAELKRRAQGD

SEQ ID NO: 7252 - protein, 218 aa, Azoarcus sp. BH72
MALSRACDPPADARGRGAPAVFLDKDGTLLHDVPYNVDPARLRLRADAGPALALLRRNGYRLVLVSNQAGVALGRFDEAALPPLWRALGEALAPWGVALDGVYYCPHHPKGCVPAYTRHCDCRKPAPGLLQRAALELGLDLARSWFIGDILDDVEAGRRAGCRTVLLDVGSETEWISTPMRHPDHVVASLTEAAFTLLADEALRVAPEGVAEQPQWTG

SEQ ID NO: 7253 - protein, 395 aa, Azoarcus sp. BH72
MARRAPQASVTGQPRRGPFARSRRRAGMKAVALALAALGLAGLAFIAFLLVDGLRAVYQRRREERRQRPLRLVVRSREEVGGELLRLTLAHPRRRPLPVFEAGQHLMMTAPAGRGGGAIRRAYSLAAWHPRPTWYELGIKREAQGAMSSWAWNALLPGAVVDVSPPRGDFVVADDELDLVLIAGGIGITPMRAMLHASLARPRARRIVLLHAARHAGTLLYRGEFESLASLNPHFSYLPIVSRPDGFWRGERGRLDAHRVLAAVPTPQQARFYLCAGQALMEDLGGGLIAAGIDPARIHSEAFGAASAGGGHGQVITLEDGRRVDTAGEPSLLATLEAHGCAPPSDCRAGSCGECRMRLDAGAVRWLMAPACAVADGEILPCICQPAGDLRLRAA

SEQ ID NO: 7254 - protein, 340 aa, Azoarcus sp. BH72
MTATHTVKLRFADGAIRALEVGAEQTVLDAALAAGVPLLHQCRSGSCSSCLSHLVEGEALPRPGSSSTLLASEFAAGQRLLCVTQPKGDCTFELGYGSEEGAQPVVEAHAFVNAIEPIASNVVKLSLELAEGSWLACRPGQFIQVEVPGAGVLRSYSPVSTEADLPRLDLLIRLLPQGAMTSWLTCGAKVDDVVRITGPYGAFFLREKRRAPHIFVAGGTGLAPVLAMIDRIRQLGGRKPPMLLSFGCATPDVLFYLDELELRRQWLPTLETRICVDRGSNGDFHEGSPVSALTAADVRDPDTVAYLCGPQGMIDAATQRLIELGVAPENIFSEQFVPSN

SEQ ID NO: 7255 - protein, 325 aa, Azoarcus sp. BH72
MPELELTISAIEAETPLIRTLHLRAPAGSSLPAFTPGAHLQVSVPGLADARCYSLVSFDADPAAFEAPLAYRLGVRLEDASRGGSRYMHGLAVGDTVKVSGPKNDFPLHAAEAGERPIVLIAGGIGITPIAAMAASLQASGRAFELHYSGRSRDQLAFVDELAALAGNAFFVHADDDPASRLDLGALLDGLDTAQHLYVCGPKGMIDALIEGANTRGWPSERVHFELFAAAAPVAGDQAFEVELAQSGKVLLIPADKTILDVMEAEGCDPMYDCKRGECGVCTATVLEGVPDHRDYFLSDAEKAGGKLIQICISRAKTPRLVLDL

SEQ ID NO: 7256 - protein, 403 aa, Azoarcus sp. BH72
MLKFPIYLDYSATTPVDPRVAAKMIPWLTEHFGNPASRSHAFGWEAERAVEEARDEVAKLVNADPKEIVWTSGATESNNLAIKGAAHFYRSKGKHVITLKTEHKAVLDTVRELEREGFEATYLDVQENGLIDLEAFKAALRPDTTVVSVMFVNNEIGVIQPIAEIGEICREKGIVFHVDAAQATGKVEIDLAKLKVDLMSFSAHKTYGPKGIGALYVRRKPRVRLEAQMHGGGHERGLRSGTLATHQIVGMGEAFRIAREEMAEENGRIRRLRDKLLNGLTDIDATYVNGDVEHRVPHNLNISFAYVEGESLIMAIKDIAVSSGSACTSASLEPSYVLRALGRDDELAHSSIRFTIGRFTTEEEIDYAIDLLHKKIGKLRELSPLWEMVQEGVDLNTVQWAAH

SEQ ID NO: 7257 - protein, 382 aa, Azoarcus sp. BH72
MFRPAYLDWNATTPLDPAVRDAMLPWLGERFGNASSRHEYGRQARAAIDEARARVAAAVGAHPTEVIFTSGGSEANNLFVKGAAALLKPATVAVSAIEHPCVREPARQLRRQGWSFQEIAVDAEGVVAGPAWRAALDARPALISVMLANNETGVLQDIPRLAEEARPTRAWFHTDAVQALGKLPVDFRALGVHALSLSAHKVGGPLGAGALVLDKRVELAPLVAGGGQERNLRSGTENVAAIVGFGVACERAAGRVADEAPRLRRLREVVEAGVVALGARVFSMGAERLPNTVFFALEGLDGETLVGKLDRAGHAVASGSACSSANPEPSHTLLAMGVEPTVARGAVRVSLGRDTTAADVDAFLATLGVLAAELRQMTALAV

SEQ ID NO: 7258 - protein, 442 aa, Azoarcus sp. BH72
MNAAKTLNLAPAPTEPLVAVEAGAAAASPSPLSTPRAVRKSAKLADVCYDIRGPVLTRAKQMEDEGHKIIKLNIGNLASFGFDAPEEIQMDMIRNLPNSAGYSDSKGIFAARKAVMHYTQQKHIKGVGMEDIYIGNGVSELIVMAMNALLNPGDEVLVPAPDYPLWTAAVSLSGGTPVHYICDEGNGWLPDLADMRERITPNTRAIVVINPNNPTGALYPEAVLKGIIALAREFDLILYADEVYDKVLYEGAVHTSLAALSEDVLTIIFNGLSKNYRSCGYRAGWMVVCGDKRNAQDYIEGLNMLASMRLCANVPGQYAIQTALGGYQSIDDLVADGGRLRRQRDLAHELITAIPGVSCVKPKAALYMFPRLDPKIYPIEDDQAFIAELLEAERVLLVQGTGFNWPDPDHFRLVFLPHEDDLRDAIGRVARFLEGYRKRHGT

SEQ ID NO: 7259 - protein, 69 aa, Azoarcus sp. BH72
MSTQTGTVKWFNDAKGFGFITPENGGDDLFAHFSEIQSSGFKSLAENQRVEFEVKSGPKGLQAAKIRPL

SEQ ID NO: 7260 - protein, 650 aa, Azoarcus sp. BH72
MTDTVTFADLALPAPLLQALADVGYETPSPIQAACIPHLLAGHDILGEAQTGTGKTAAFALPMLARLDLADRRPQVLVLTPTRELAIQVAEAFQKYAHHLRDFHVLPLYGGQSMVVQLRQLSRGAQIIVGTPGRVMDHLERGSLKLDTLSGLVLDEADEMLRMGFIEDVEWILEHTPSGRQTALFSATMPDAIRRVAHQHLREPKEVKIRAATSTVSAISQRYWLVRGVDKLDALTRILDAEEKLDAAIVFVRTKTATTELADKLEARGYAAAALNGDMTQGLRERVIEQLKNGSLDIVVATDVAARGIDVPRISHVINYDIPYDTEAYVHRIGRTGRAGREGSAILFVAPRESRMLKAIERATRQPIEAIALPSREEVAGRRVAQFKQLVLDTLQQEDLGFFMEVVNGLVDEHEIDAHEIAAALAFLAQRDKPLQVEESGRGWDIATAPERDRRPPRETVRDGMREERGEREPRPNRDEILSRRRAFADGALVRYRIAVGRNQGATPKEIVGAIANEGGIEGKYIGQIHLFDDYSTVELPASLPGELLGLLKRTRVRQCALDIRPLTEAEAASTPARRPRRDAGDAPERTKRPYDERRPRDNDRPQSKSYDKPYDKPHAKTERAPYPPKSGEKPRPAGGDKPWKRKDKR

SEQ ID NO: 7261 - protein, 393 aa, Azoarcus sp. BH72
MASREVVVLSAVRSAVGGFGGSLKDMEPAELGGVVVKEAISRAGVDPKQVTFATVGNCIPTESRYPYVARVATIQGGMSMESVAFAVNRLCGSAQQAIVNSAQAILLGDADYAVGGGVEVMSRGAYLMPALRNGARMGDTKAIDAMVAVLTDPFGVGHMGITAENLAAKWGISREEQDAFALESQRRAAEAIADGRFKGQIVPITFETRKGPVVFDTDEHPRATTMEALAKMKPAFKKDGSVTAGNASGINDAAAFLVLADAAKASAAGHKPMARLVSYAIAGVPNDLMGEGPIPSSKLALQRAGLTLDKIDLIESNEAFAAQSLTVAKGLELDPAKTNPNGGAIALGHPVGATGAVIITKLLHELQRTGGRYGMATMCIGGGQGITTIWERI

SEQ ID NO: 7262 - protein, 157 aa, Azoarcus sp. BH72
MPLVEREDVLSVLLTRRTDHLHHHPGQISFPGGRVEAGDAGPQDTALRETEEEIGLDRRHVELLGSLPDYYTGTGFRVTPVVGLVRPPFELTLDAFEVAEVFEVPLAHFLDPLNHQRHSMEVEGRTRRFYAMPYGDYYIWGATAGMLRSLYELLQDL

SEQ ID NO: 7263 - protein, 409 aa, Azoarcus sp. BH72
MSDVKKVVLAYSGGLDTSVILKWLQDTYQCEVVTFTADLGQGEELEPARQKALKFGIKPENIFIDDLREEFVRDFVFPMFRANTIYEGEYLLGTSIARPLIAKRQIEIARATGADAVSHGATGKGNDQVRFELGYYALMPGVKVIAPWREWDLLSREKLLAYAEKHGIPIEMKHKQGGSPYSMDANLLHISFEGRHLENPAAEAEESMWRWTVSPEAAPDAAEYVDLEFEKGDLVAINGQRLKAHELLAKLNELGGKHGIGRLDLVENRYVGMKSRGCYETPGGTILLRAHRAIESITLDREVAHLKDDLMPRYASMIYNGYWWSPERQALQALVDHTQQTVNGWVRIKLYKGNVIVVARDSKTDSLFDPTIATFEDDQGAYNQKDAHGFIRLNALRMRIAANAKTKRG

SEQ ID NO: 7264 - protein, 272 aa, Azoarcus sp. BH72
MNHALHTTRRPFLRSLFGLAAGIAVASTIGLADARADVLANVQKAGTLRVAVPQDFPPFGSVGTDLKPRGYDIDMANLIAKELGVKVELIPVTSTNRIPYLTTGKADLVISSLGKNPDREKVIDFSEAYAPFFNGVFGPEDVKLTKVEELDGKTVGVTRGSVEDLELTKIASPKVTIKRFEDNNATISAYLTGQVQFVATGNVVAAAVNDMTKLRRLGAKFLIKNSPCYVATAKGETALMTKVNAIIVKAKQDGTLNDIAQRWLNAPLPKDL

SEQ ID NO: 7265 - protein, 397 aa, Azoarcus sp. BH72
MSEQLPVIVIGGGIGGLAAALALVRQGFSVKVLEQAAEIGEIGAGIQLGPNAFHAFDALGVGEKARGRAVYTDYMVMHDAIDEYQVGKIPTGEAFRKRFGNPYAVIHRVDVHLSLLEGAQETGKVEFITSTHVECVEQDDQGVTVIDSKGNRFRGIAVIGADGVKSVVRKQYVNDPPRVTGHVVYRAVIDKKDFPENLQWNAASIWVGPNCHLVHYPLRGGEQYNVVVTFHSRNKEEWGVTEGSPEEVQSYFQGICPKARQLIDLPKSWKRWATADREPIGQWTFGRATLLGDAAHPTTQYMAQGACMALEDAVTLGEALRVHNNDFEKAFDLYQRSRVARTARIVLSSREMGRIYHAKGVERLVRNDLWKGRSAERFYDAMEWLYGWNVDNCLARD

SEQ ID NO: 7266 - protein, 419 aa, Azoarcus sp. BH72
MSNPYSASEAAALTTSYDDIWLVAGQRTPFADYNGVLRDVSPTDLGIYAARALFEKSGIPASAIQAIVAGNMAQASFDAYFMPRQIGLYSGVNPNVPAVLVQRLCGTGFEAILTAADQIKLGKAKVALAVGTESMSRNPVAAYTHRAGFRMGQVDFRDFLWEATKDTSFGGSMGDTAENLAKRYGISREEVDRFAELSFSRAVAGWESGYFDDEVSAVVNSKWDLEGYNSRGLKLADRAERCERDGHVRATSFETLQKLKPAFGGVQTGGNSSAIVDGAAAVIVAHGDWVRANGVKPLARIVAGAAVAVPPEIMGIGPAPAIRAAARTAGLTVGDLGRIEINEAFGAQYLACQRELGFDTERGNVHGGAIAIGHPLGASGVRLTTTVARELKEAGAQFGVSSACAGGGQGVAIVVENAG

SEQ ID NO: 7267 - protein, 328 aa, Azoarcus sp. BH72
MELHVQPIDRKLNFEIGANLLEVLRNAEVPISYSCMSGRCGTCRCEVRAGEVLDAGPAAGRSGRNGQSGVLACQAVLTSDCVIEIPEPDEVVVHRARIVKATVAAIEAPTHDIRRLRLKLAKPLDFSPGQYASLQFTPEHIRPYSMAGLAGDDEQEFQVRRVEGGRVSAWIFDQLKVGDALRVSGPLGTAYLRRKHAGPMLCVGGGTGLAPVLSILRGALESGMKNPIHLYFGVRSPRGLYDADRLQSLADAYDNLTVHIVVATGNTDASLRSGLVTDAIAADHRSLAGWRAYLCGAPAMVEAVGLLANRLGIAPNHVHADAFYPAAW

SEQ ID NO: 7268 - protein, 67 aa, Azoarcus sp. BH72
MATGTVKWFNDAKGFGFITPENGGEDLFAHFSAIQGSGFKSLAEGQRVEFEITRGPKGQQASNIRPL

SEQ ID NO: 7269 - protein, 1129 aa, Azoarcus sp. BH72
MHAADIDILWVVLCSGLVFLMQAGFLCLESGLTRSKNAVNVALKNLVDFAVAVALYWLFGFGLMFGASAAGLIGTDRFMAPVGQGAPGALAAFFLFQAVFCSTAATIVSGAVAERMRFAAYLAVAALVGGLIYPVFGHWAWGGGLGGAPGWLAAIGFVDFAGSTAVHSVGGWVSLAAVLIIGPRRGRFDAGGVQPISGGNLPLSMLGAMLLLFGWFGFNGGSTLALDARVPGVLVNTLLGAVAGVLAALAASWWMRGYADVVQTLNGTIAGLVAVTAGAHAFSAAEALLVGGGGALVMILCNEWLLHRRIDDAVGAIPAHLAAGVWGTLAVALFGDPAALGTGLGAGEQLFVQFVGVVACGTWSFGVAWLLLKCLDRLLPLRVTPEHETLGLNVSEHGARTELLDLLEAMEVQERTGQLAVRVPVEPFTEVGQIAASYNRVMDALERAVAQTRNIIRDVRDGIITFNREGLLRSLNPGAEKLFGVAAGQAIGLPISRLLGDGQVVPEHQLRRLMVAGDKTELRLHRRGAPPRVLEVSVSESAHAGELLFTGLVRDVTDRRSMEEQLQRERDLAQVTLASIGDGVITTDEAGLVQYLNPTAELLTGWTSEEARGHNIAAIYRLEDEGTGAVLENPVRTVLAHGREIRRSEHGLLLRRDGERVPVQDTAAPIRNRLGYLMGVVLVFHDVTVTLQLTRELTLQASQDALTGVPNRREFERRLGELIERPPARGASHVLCYLDLDQFKVVNDTCGHVAGDELLRQVTALLSGRLRSADLLARLGGDEFGVIFFNCPVEKATEMAEGLREAIRDFRFAWEGKVFAIGVSIGLVPVAGNDLHMGRLLSAADAACYAAKEGGRNRVHVYRPDDDLLMEQHGQMQWVSRLHDALEGDRLRLYAQPIVPLEPGRAIHYEILVRLEEEGRIVSPGSFIPAAERYNLMPRIDDWVFRNVLAWVSDTYRQCGRVDATWCINLSGNSLNDERLLEDIRARLARAALPAGAICFEITESSAVANLSRVVSFIGEVKRLGCAFALDDFGSGLSSFAYLKNLPVDYLKIDGSFIRDIVSDPSDRAMVEAINTIGHTMGLATVAEFVEDEAILRALEEIGIDYAQGYHVGMPRPLAELGRVRMMPR

SEQ ID NO: 7270 - protein, 586 aa, Azoarcus sp. BH72
MAARPSPPRRMSAPVERLFPFLAWPKRWSAASVRGDVIAGITVALVMVPQSLAYAQLGSLPPHVGLYAALLPAVVGALFGSCGQLSTGPVALTSLLTGASLLPLASPDSPRFLALAVLLALMSGLIQLALGALRLGWLLNLLSHPVLMGFLNAAALVICLSQLPPLLGLSLPQSGRFLADIAAAFSPPHLPQLAPALFGIGALAALLVLRRAAPRLPGVLVVVAAATALSAWSGFAASGGPVVGAVPSGLPAFALPSFDFPAIVTLLPTAFVIALVSFMEAASSAKVIAGRTRQAWDQNQELIGQGLAKLAAAFTGGLPVSSSFSRAALNYAAGARSGLSSLVSAAVVLLTLLYLTPLLWHLPKPALAAVILLAVANLLDFGALRRAWRTQRDDGLAGLITFFATLAFAPNIQNGILTGLLLSLALMVYRSMSPRVALLGLHPDGTYRDLERFGLSHPHPQLVILRFDSPLTFVTAATFEDAMLRAARAQPDVRAVVVSAAGINAIDATGLHVLGGLLDRFGAQLQQIAFCGLKKQVLDTMQRDPLWPALAPHAGYRTEQQAIDALLPSLAAPTRGSSGPASAPSA

SEQ ID NO: 7271 - protein, 416 aa, Azoarcus sp. BH72
MNAPAEHANIARQHLIDPEICIRCNTCEEICPVDAITHDNLNYVVKFDVCNGCLACISPCPTGAIDSWRNVEKAVPYTLEEQFTWDVLPDTRELDQFEAGIVSGPAGETPAEVQQITDVATAGHGGPALAPWSASHPYINLYGPTNPVTATVTGNYRLTDADASSDIHHVVLDFGSTPFPVLEGQSIGIIPPGVDEKGKPHLLRMYSVASPREGERPHHNNLSLTVKRVTEDHEGKPARGVASNYVCDLKKGDKVQVTGPYGSTFLMPNNPGSSIMMICTGTGSAPMRAMTERRRRRMELKEGGDLILFFGARSPGELPYFGPLQKLPKDFIDINFAFSRVPGEPKMYVQDRIRERADKVFAMLMDDNAYIYICGLKGMEAGVVEAFRDICRARGADWDTLRPQLLAKGRFHIETY

SEQ ID NO: 7272 - protein, 402 aa, Azoarcus sp. BH72
MTHTVYLCDAIRTPFGRYGGLLSSVRADDLAALPIRALIARNPGVDWNLVDDVIYGCANQAGEDNRNVARMAALLAGLPVEVPGSTVNRLCGSSLDAIGSAARAIAAGEAELMIAGGVESMSRAPFVLGKADSAFSRSAKIEDTTIGWRFVNPLMKAQYGVDSMPETAENVATDFNVSRADQDALALRSQQRWASANERGFFAREIVPVDIPRKKGDPVRMTTDEHPRPDTTLDMLAKLKGVVRPDGTVTAGNASGVNDGAAAVLLASEAAVKRHGLTPRARILGSAAAGVAPRIMGIGPAPASEKLLARLGMGIARFDVIELNEAFAAQALAVTRRLGLADDDARVNPNGGAISIGHPLGASGARLVTTALNQLETSGGRYGLATMCIGVGQGIALAIERI

SEQ ID NO: 7273 - protein, 410 aa, Azoarcus sp. BH72
MNQRLSVQKDKLNVVLFEGIHASAVEAFRADGYGSVTAVAKALAGEELAQALAHAHFVGIRSRTRLTAEVLAQAPKLVAVGCFCIGTNQVDLGAAAARGVPVFNAPFSNTRSVAELVIAETIMLMRGIPARNALQHRGGWMKSAANAWEVRGKTLGIVGYGHIGTQVGVLAEQLGMSVVFHDIETRLPLGNARQLGSLDALLAVADVVSLHVPETPATMNMIAAPQLAAMKAGSFLINASRGTVVDIDALAQALEAGHLLGAAIDVFPVEPEGNDDPFVSPLTRFDNVILTPHIGGSTAEAQANIGREVAAKLIRYSNNGSTVTAVNFPEVSLPEHAGKCRVLHIHRNVPGMLARINERFSRAGINIAGQYLQTTPDLGYVVIDVDAAASQVAFDELCSIEGTIRCRVLY

SEQ ID NO: 7274 - protein, 408 aa, Azoarcus sp. BH72
MALIVQKYGGTSVGSPERIKNVASKVAKFRAEGHQVVVVVSAMSGETNRLIALAKDVAAKPDPRELDVVVSTGEQVTIGLLCMALQDIGVPAKSYTGAQVKILTDSAHTKARILNIDEAPIRKDLDAGAVVVVAGFQGVDEHGNITTLGRGGSDTTGVALAAALKADECQIYTDVDGVYTTDPRIVPEARKLDTITFEEMLEMASLGSKVLQIRSVEFAGKYKVKLRVLSSFQEGGQGTLITVEEDKNMEQPVISGIAFNRDEAKVTVLGVPDKPGIAYQILGPVADANLDVDMIIQNVGHDGTTDFSFTLARGDLEKAVAILEGVKTHIGARAIEGDKTMCKVSIVGVGMRSHPGVASKMFRTLAEEGINIQMISTSEIKISVAIDEKYLELAVRVLHKAFGLDQPV

SEQ ID NO: 7275 - protein, 570 aa, Azoarcus sp. BH72
MVLTGAEIVIRCLQEEKVEYVFGYPGGAVLYIYDALFQQEQVRHVLVRHEQAAVHAADGFARSTEKVGVALVTSGPGATNAVTGIATAFCDSIPMVIISGQVPTAAIGQDAFQEVDTVGITRPCVKHNFLVKDVRDIAATIKKAFYLAKTGRPGPVLVDIPKDITIAKCDFEYPKEISMRSYSPVVKGHQGQIKKAVQLLLEAKRPMIYTGGGVVLANAAEQLTKLTRLLGFPVTNTLMGLGGYPASDRQYLGMPGMHGTYEANMAMHYSDVLLAVGARFDDRVIGNPANFAEEPRKIIHIDIDPSSISKRVKVDVPIVGDLKDVLDEMIRQLEAAPTRPDASNLAAWWKQVEEWRSRKCMEYKNSDEIIKPQFVVQKLWEVTGGDAIVTSDVGQHQMWASQYYRFDKPRRWLNSGGLGTMGVGLPYAMGAQFAHPDMPVACVTGEASIQMCIQELSTCKQFRLPIKICNLNNRYLGMVRQWQQLFHGGRYSESYMDSLPDFAKLASAYGHVGIRVDKPADVEGALREAFTTHKNDLVFLDFQVDPTENVYPMVQGGKGLTEMILSAEDL

SEQ ID NO: 7276 - protein, 103 aa, Azoarcus sp. BH72
MYAVIKTGGKQYRVAAGEKIKVEQIPADVGSEITIDQVLMVGEGESVKIGTPVVSGAAVKATVVSHGRHDKVKIFKMRRRKHYQKHQGHRQNYTELRIEAISA

SEQ ID NO: 7277 - protein, 408 aa, Azoarcus sp. BH72
MKFFDEARIEVVAGDGGNGAATFRREKFIPRGGPDGGDGGRGGSVYAVADRNLNTLVEYRFKRSFRAERGENGGSKDCYGKGGEDITLHFPVGTVISDLDSGEPIADLDVDGKRVLLAQGGRGGLGNLHFKSSVNRAPRKRTMGQEGERRNLHLELKVLADVGLLGMPNAGKSTFIRAVSAARPKVGDYPFTTLQPNLGVVRTDENRSFVIADIPGLIEGAAEGAGLGHQFLRHLQRTHVLLHLVDLAPFDPEVDPVRDALAIVEELRKYDESLYNKPRWLVLNKLDLLEPEDRAPRVAAFLEAYGEVERHFEISALQGEGCRGLIFALQDFLDSERANIHAQQAAREAEERQRLAAAQSARSAAEAEALEADLAEDALAEDALAEDALAEDALDDDADGEDADPNAR

SEQ ID NO: 7278 - protein, 563 aa, Azoarcus sp. BH72
MTIPFRPKLLDTLRGYDRAGFTADLSAGITVGVLALPLAMAFAIASGLSPSAGIWTAIVAGFLIAALGGSRVQIGGPTGAFIPIIYAIVADYGVQNLLIATMMSGVMLFAMGAFRLGSMIRFIPLSVVIGFTNGIAVVIFLSQVKDFLGLRIEHLPGEFFARMKALGAALPTLHLPTVLVAVASLAVLLLWNRQATRTPWMRRLPGPLAVLILATAANALLALPVETIGSRFGGIPQEMPPFGLPELSLGTLGKLIVPALTIALLGAIESLLSARVADSQIDDRHDPNQELMAQGLANVAAPLVGGFAATGAIARTATNIRTGGRTPVAGMIHALVLLAVVLALAPLASAIPLATLSAIVVVVAVNMGEWHAFAPAELGRYSLQYRTILLGTFVVTVVFDLTLAVELGMVLASLFFIYRMSDLTRVERIALEDHYGVAALARADGTPRILAYSMFGSLFFGAANKLENLLLMQDGHPDVVILDLAKVINIDTTGLDILQTLHRNLQKRGAHLILCGLNAQPESLLMRSGFGERVGRENLAANITDALLRAQWLSGKQTEVSYA

SEQ ID NO: 7279 - protein, 762 aa, Azoarcus sp. BH72
MDQDFIAAALDYHRAPTRGKISVVPTKGLTNQRDLALAYSPGVAAACDAIVADPAEARELTSRGNLVAVVTNGTAVLGLGNIGPLAAKPVMEGKGCLFKKFANIDVFDIELAENDPDKLIDIIASLEPTLGGINLEDIKAPECFYIEKKLRERMKIPVFHDDQHGTAIISAAGLINGLKVIGKNIAEVKLVCSGAGAAAIACLDLMVSVGLKRENVYVCDSKGVIYQGREENMEPTKARYAQITEARTLGDVIAGADVFLGLSTAGVLKPEMVAKMADKPLIFALANPNPEILPADAKAVRPDCIIATGRSDFPNQVNNVLCFPFIFRGALDVGATTINEEMKLACVKAIAELAQAEQSDVVASAYGGAELSFGPEYIIPKPFDPRLIVKVAPAVAKAAMESGVATRPIEDFEAYIASLTDLVYTSGMVMKPVFSAAKRVPLEQKRVVYAEGEDERVLHATRVVIDEGLARPILVGRPSVIEMRIKKIGLNLVPGRDFDVVNPESDPRYRDLWNEYYRLKGRDGVTPDIAKAKMRRDTTLIGAMLLRTGDADALVCGTFGTYEYHFQHVQDVIGLRAGAKQFAAMNLLMLPKRTLAITDTYVNEDPSAEEVAEIARMAAEELRRFGIEPRVALLSHSNFGSSRSASARKMREASELLRQLAPELECDGEMHGDAALSVEIRNKVHPDSSLVGEANLLVMPNLDAANISFNLMKIANGDGVSVGPILLGAAKPVHILTPSATVRRLVNITALAVVDAQESRRA

SEQ ID NO: 7280 - protein, 598 aa, Azoarcus sp. BH72
MLEQFSGILRRSPNPDPSAASGTALERVDLGRATVAYRPAIAVARDGTGLCIALGRPRFADPALQAIAAQQGPAVAWLQALRDQGESVIPSVRGRFNVVFIERDGAEALFATDRFGTWPLCYAEQDGALHFADRADALPGPGRRLSAQAVYEYLFFHMIPAPTTIFEGVARLPGGHVLQWKDGRATCRAWWQPRFDERERPSFESAKRQFLDIVENAVRRDAEGPVGCFLSGGTDSSTVTGMLCKVLGRPARSYSIGFDASGYDEMEYARIAARHFGADHHEYYVTPDDLLDGIPRVAVHYDQPFGNSSAVPAWICASRAQDEGVARLLAGDGGDELFGGNTRYAKQRVFGWYDSVPGLVRRGMLEPVLALPGMGRIPLMKKGVSYVEQARVPMPDRMHMYNMLLRLGTREVFEADFLARIDVDRPQQQQREVWQASSARSQVNRMLAYDWKYTLADNDLPKVIGTTQLAGVDVAFPLLSDELLDFSLTLPPDWKLRGLTLRWFFKEALRGFLPDQIITKKKHGFGLPFGVWACAHAGLKAQAHDALRSLAARGIVRPRFIDELFTTHLPAHPGYYGEMVWILMMLEFWLRAHDGSTL

SEQ ID NO: 7281 - protein, 642 aa, Azoarcus sp. BH72
MCGIHGFYRFDGRAVERAHLSAMGDVTRHRGPDDEGQHIEPGGRCGIAMRRLSIIDLAGGHQPISNADDTLWVVCNGEIYNFRELRQELQARGYRFKTGSDSEVLLHLYDLHGDDFVHRLDGMFNFALWDARRQRLLIGRDHLGVKPLYVHQSASLLAFATEAKALLALPGMQPALNREVLGDYLHLGYVPAPHSMFAGIRKLPPATLLSVDAQGVREWRYWRLPQTVDRTVGEAEWVERIRAGMEAAVQRQMVADVPIGAFLSGGVDSSAVVAYMARHSDQPIRTYAIGFEGGEAEQLYNELPYARQVAGLFGTEHREIVVRPDVVGLLPRLLWHMDEPVADSAFITTYLVSEFARRDVKVILSGVGGDELFGGYRRYLGGHYLDKLARLPLWSRRLMARTAGLLPSDRHSKVLNTLRLARGLLASSELAPDDRYRHYLQVLPRDDVAALTRGQPGGSDALAAAFAAAGNDDALNRMFAVDAETQLPDDLLLLTDKMSMAVSLECRVPLLDRALVELAASIPESLKVRNGRLKHLMKSALADVLPPDILDRRKRGFGTPMGAWLKQQLAPVLRRLLAADVVRDRGLFDPAVVARLVADHEAARIDGTDALLALMNLEIWSRVHLDRHSVDDVTAELKSLIA

SEQ ID NO: 7282 - protein, 644 aa, Azoarcus sp. BH72
MCGIAGLFDTRGKRDFDRGLMSRMNDIQHHRGPDEGGYHFEPGVALAHRRLSIIDLATGQQPLFNEDGSVAVVFNGEIYNFQELVPELEALGHVFHTRSDTEVIVHAWEAWGEACVHRFRGMFAFVLHDRQRETLFLARDRLGVKPLFYALLADGTLAFGSELKVLTQHPGLDRRIDPLAVEEYFALGYIAEPRTIFEGARKLGPGESLCIRRGQPVVAPTRYWDVRFTLDNPLSLGDACAELTERLRESVRLRMISEVPLGAFLSGGVDSSAVVATMAALSDAPVNTCSIGFADPRFNESEFARMVAERYRTNHHVETVESDDFDLIDTLAALYDEPYADSSAIPTYRVCQLARKHVTVALSGDGGDESLGGYRRYRLHLMEERMRSALPLGVRQPLFGLLGRLYPKADWAPRVFRAKTTFQALARDAVEAYFHSVSILRRDMRSQLFSASFRAQLGGYDAIEVFRRHAAAAGTDDPLAFIQYLDLKTYLVGDINTKVDRASMAHSLEVREPLMDHPLVEWLATLPSALKMKGGEGKYVFKRAMEPMLPHDVLYRPKMGFSVPLARWFRGPLKQRVREAVLGGTLASTGIFNRPYLEHLLDAHQSGARDYSAPLWTLMMFEAFVRNLDRAAAPVAAGADLALA

SEQ ID NO: 7283 - protein, 405 aa, Azoarcus sp. BH72
MTGDRHGCENAALVRRREAAMPHFPAPVVSRLPQVGTTIFTVMSRLAQECGAINLSQGFPDFNADDALFERVAHWMRTGHNQYAPMAGVPALREAVAGKVAALYGSTYDVEHEVTITAGATQALFTAVAALVHPGDEVIVFEPVYDSYGPAVELAGGRVVRMQLAAPDYRPDWAAVAAAITPRTRMIMINSPHNPTATVWTAADYDRLAALLRDTGIIVVSDEVYEHIVFDGLQHRSCAAHPELAARSIVVSSFGKTYHITGWKVGYVVAPRELMAEFRKVHQFNVFTVNTPVQYALADYMAEASRHLGLAAFYQAKRNLFRDALAGSRFELLPSRGTYFQLARYSAISDEGDVAFCNRLARQVGVAAIPVSAFFADGRDERVIRFCFAKNDTTLNAACERLRAL

SEQ ID NO: 7284 - protein, 296 aa, Azoarcus sp. BH72
MKVGFVGLGVMGVPMAGHLLKAGHQVAIWARRPDAAQALIADGTLAGAELCATPAALAARSEVVISIITASADVEALAFGDDGLAAGFAPGAIHVDMSTIAPATARALAARYAKQGVGWVDAPVSGGGTGAREATLAIMAGGEAETLARVRPLFEVLGRTVVHIGPAGAGQVAKACNQMIMVAAIQASAEAMHLANAHGVDLAAVQRALMGGSAASRVMEVMGGRMVARDFGAGIEARLHHKDFAILMGEAVGLGVPLPVAAQVWQQLNALMASGMGRDDTSSLLRVLENMAARPS

SEQ ID NO: 7285 - protein, 293 aa, Azoarcus sp. BH72
MEVGFIGLGLMGRPMVLNLLKAGHTVHVWSRRRESMVPLLEAGAGDCASAAEVASRAAVTFSMVADAPDVEQVTLGEGGVASAARAGHIHVDMSTIAPAAAQAIAARLAERGVTLLDAPVSGGEVGAIAGTLTIMVGGDAAAFDTVKPAFEAMGKSINRIGDSGAGQVAKACNQILTGVGVAAVAEALNFATRSGVDATKVREALLGGFAYSRILENHGQRMLDRNFRPGFKAWMHQKDMRIVMEEAHRLGLALPSSAATAQMFNAMVGSGLGEDDSIAMLKLLERMSGGAGE

SEQ ID NO: 7286 - protein, 121 aa, Azoarcus sp. BH72
MPINKILVVDDSPTERLALTELLTRHGYQVATAESGEEAITKSKSEKPDLILMDVVMPGMNGYQATRTISRDDATRNIPIIMCTSKGLETDKIWGMRQGAYDYLVKPVEHNELLARIKSIG

SEQ ID NO: 7287 - protein, 537 aa, Azoarcus sp. BH72
MTTELTFASLGLAEPLLRAISDTGYTTPTPIQAKAIPLVLAGGDLLAAAQTGTGKTAGFTLPVLHKLAATHVHPHPAGKPRCLILTPTRELAAQVEESVQTYGKHLALTSMVMFGGVNINPQISALKKRVDILVATPGRLLDHVGQKTLDLSGVEILVLDEADRMLDMGFIRDIRKVLALLPKQRQNLLFSATFSDEIRDLANGLLHNPGCVEVAPRNTASERVEQTVYMIGQKQKRELLAWLIKEKQWFQALVFTRTKHGANKLAEYLTKHDIPAAAIHGNKSQSARTRALSQFKDGSLPVLVATDIAARGLDIDQLPQVVNFELPNVPEDYVHRIGRTGRAGADGNAISLVDGEEVKLLTAIERLIRRKIDRATAEGFVPSAVPDTSADDDRDERRGQDRGRGRQGQGRDGNRSQGQPQGQARRGGEGGNGGGRGQGGRPGAPARQGNGGQRRDQPRGEVNGNRAQTTQQREVDGNRMPAPRPDVDGNRMPAPSRRGEVNGNRAQPAPRQGQNNRGGRPAQQRAALFSAKPGGNR

SEQ ID NO: 7288 - protein, 600 aa, Azoarcus sp. BH72
MSRADAPAPSSLRIYFRLLGYVRPYVGQFVLSIVGFLIFASSQPMLAGVIKYFVDGLNDPGATPFTGVPLLASLPLMSAVPVLIILIVVWQGIGSYLGNYFLAKVSLGLVHDLRMALFDSLLRLPNRYFDNHNSGHLVSRITFNVTMVTGAATDAIKVVIREGLTVVFLFGYLLWMNWKLTLVMVAILPVIGLMVTSASRKFRKQSKKIQVAMGDVTHIASETIQGYRVVRSFGGEAYESRRFQAASEDNTAKQLRMVKTGATYTPMLQLVTYVAMAALLFLVLLLRGDASPGDLVAYITAAGLLPKPIRQLSEVSSTVQKGVAGAESIFEQLDEPAELDRGTVERERIAGRLEVRGLSFRYPGTERVVLDDISFVVEPGQMVALVGRSGSGKSTLASLVPRFYHHEQGQILLDGVEVEDYTLRNLRRHIALVTQQVTLFNDTVANNIAYGDLAEAPRAQVEAAAEAAYAREFIDRLPQGFDTLVGENGVMLSGGQRQRLAIARALLKDAPILILDEATSALDTESERHIQAALDSAMRGRTTLVIAHRLSTIEKADVIMVMEQGRIVERGSHAELLAAGGAYARLHAMQFRDEAEAAES

SEQ ID NO: 7289 - protein, 600 aa, Azoarcus sp. BH72
MSSDLTPLAASPRRLSALSGLWPFLRPYRARIALAFALLTLGSTTILLVPLAFRDLVDFGFGTATAPDASGGLLGTLSLDGHFVALFGLASLWAVTVAARYYTVSWIGERATADLRNAVYARVLAQSPQFFETLQTGEVLSRLTGDTTLIQTVVGSSVSMGLRSLFQFAGGMVMLAVTSLHLFSLNLGLMALLTLPILAIGRKVKRLSRESQDRIADASALAGEILNAMPTVQAYTQEPQEVRRFSARTEAGFATAIRRTRVRAALTALIITAVMGTIIFVLWVGARQVHEGVLTTGELAAFVLYATLVAGGVGTLAEVWGDVMRAAGAAERLLGLLHAEPAIRDTPAAAAPLPAAQAAIRFEHVRFAYPARPQTPALDDISLDIAPGECVALVGPSGAGKTTLFQLLLRYYELADGAIRINGQDIRQLRLHDLRGDIAIVPQDPVIFSASALENIRYGRPEASDEEVIAAARAAVADEFIARLPEGYHTFLGERGTRLSGGQRQRIAIARAVLKGARVLLLDEATSALDAESEILVQQGLAAAMRGRTTLIIAHRLATVQKADRIVVMEHGRIVETGTPDDLRSQGGLYARLAALQLDL

SEQ ID NO: 7290 - protein, 395 aa, Azoarcus sp. BH72
MKAVLVLNAGSSSLKFALFPIEPALADHAALSGQVEGIGATPEFSAKTAAGERFHETVPSNSDSQREQHREALTFLLDWLQAHNPALEIAAAGHRIVHGGDKYSEPVQLYGHILRQLQKLVPLAPLHQPHNLNAVQAIAALAPDIPQVGCFDTAFHTTQAPVAQAFALPRAISAEGVKRYGFHGLSYDYVARQLPAVIGDKASGAVVICHLGNGSSMCALRDGKSVASTMGFTALEGLVMGTRTGSLDPGVLLYLMDEKGMDAKALTRLLYKESGLLGVSGISQDMRTLLASDAPEAAEAVDLYCYRIARELGSLAAAAGGLDALVFTGGIGEHAAPVRERVARLSAWLGIDIDSDANARDASRLDRAGSKVAVAVVPTNEEGMIARYTVDVLGL

SEQ ID NO: 7291 - protein, 365 aa, Azoarcus sp. BH72
MNELAAAIPWLGKRNPLAARWLILILAIAAPLIAWQFGRSWVRILDFALLYMMLALGLNLVVGFAGLLDLGYIAFYAVGAYSFAFLASPHFDVHLPFWLILPLGAGFAALAGIALGFPVLRLRGDYLAIVTLGFGEIVRIFMLNLNYPINITNGPQGINMIDPIVLFGWDLSRNIRVTEELSINSLFLYYYFFLAFVAGSIIFIRRLQISRIGRAWAAMRDDELAAKAIGINTRNMKLLAFALGATFGGVSGCLFGAFQGFVSPESFSLMESIAVLTMVVFGGMGNIAGALVGAFVLALLPEILRHIAVPLQQAVFGHVLLDPEVLRMLLLSLAMILMMLLRPAGLIPARARYAHPENLHRSAAE

SEQ ID NO: 7292 - protein, 468 aa, Azoarcus sp. BH72
MKKLFAILLTALTVGFAGGVIAQENTAAPTAPAAVEAPAATDAAPAAAEAPAAAEEVVATVNKGDVAWIMTATLLVLFMALPGLALFYGGLVRTKNMLSVLMQVMVVFSLIAVLWAFYGYSLAFTEASPFIGSLDKLFLSGVSNSTLADTFSADAKLPEYAFIAFQATFAGITCALIVGSFAERIKFSAVLLFSVIWFTFCYLPICHMVWGPGGFLLGDGALDFAGGTVVHINAGVAGLVGAYMVGKRIGFGRESMAPHSLTLTMVGASMLWVGWFGFNAGSNLEATAGAALAFINTLLATAAAVLAWSLGEAMFKGKPSMLGAASGAVAGLVAITPACGSVGPMGAIIIGLLAGFVCLWGVNGLKRMLGADDSLDVFGVHGLGGILGAILTGVFTAPSLGGTGAEDFAMGHQVWVQTYSVLITIVWSAVVAFIGYKIADMFVGLRVPEEEEREGLDVTAHGETAYHY

SEQ ID NO: 7293 - protein, 906 aa, Azoarcus sp. BH72
MSEISRVASFGKLNSLAYKAMEGATVFCKLRGNPYVELEHWLQQLLQNEDTDLHRIVRHFDVDAARLAADMTTALDRLPRGSTSISGLSENLDTLVERGWVYASLMFGDRQIRSGYLLVGMLKTPSLRNALMAISRQFERVRPDVLTDEFTKIVAGSAEENLTARDGSGGAPGEDSGAIAPAQMGKQEALKKFTVDLTEQARSGKMDPIVGRDEEIRQVVDILMRRRQNNPILVGEAGVGKTAVVEGFAQRIARGDVPPALKDVSLLALDVGLLQAGASMKGEFEQRLRSVIDEVQASPKPIILFVDETHTLVGAGGAAGTGDAANLLKPALARGTLRTVGATTWAEYKKYIEKDPALTRRFQNVQVDEPDEKKAVLMMRGVASTMEKHHQVQILDEALEAAVKLSHRYIPARQLPDKSVSLLDTACARVAVSLHATPAEVDDSRKRIDALNTELEIIGRESNIGIEVGERRAHAEALLAEEQQRLAELEARWAAEKTLVDELLALRAKLRSGSRPVEGTGSALEAAAEAAAPEAAAESAPEPEREALFARLREVQAELATLQGEDPLILPTVDYQAVASVVADWTGIPVGRMARNEIENVLRLPQLLGQRVIGQDHAMEMIAKRIQTSRAGLDNPNKPIGVFMLAGTSGVGKTETALALAEALYGGEQNVVTINMSEFQEAHTVSTLKGAPPGYVGYGEGGVLTEAVRRKPYSVVLLDEVEKAHPDVHEMFFQVFDKGFMEDGEGRFIDFKNTLILLTTNAGTDLIASMCKDPDLLPDPEGLAKALRDPLLKIFPPALLGRLVTIPYYPLTDAMLGAIVRLQLGRIKKRVEARYKIPFEYGDDVVELVVSRCTESESGGRMIDAILTNTMLPDISREFLNRTMEGKPIVRVAMGVANADFTYNFD

SEQ ID NO: 7294 - protein, 538 aa, Azoarcus sp. BH72
MVFTLSLVMLWEGWIKHNRPPVTETPTAAAPEAATGAVPTPSASLGGTPAVPAAAAASSAPRVKVVTDVLQAEVSAEGGSIVRLELEKHRATTDRSRGFLLLDDGERHLYAAESGLIGTGLPTHRTRFALPAGDQVLKDGEDRLVLRLEAPEQNGVKVTKVMTFHRGSYLVDVNYEIANGGAEPVKAHAYYQFTRDGKPAEQVEAFGVTTFTGPAYYTDAAKFQKVKFSDIDEGKAKFAKTANDGWVAMVQHYFVGAWLPEAGVEREYFARKVGGDLYSAGAIESVADVQPGATGNAQARLYVGPQEQDKLENIAPGLDLVVDYGWLTVIAAPLFWALSALHKLTGNWGWAIILVTVALKALFFPLSAASYKSMAKMRVLGPRLQRMKELYGNDKVKMQQEMMNLYRTEKINPLGGCLPILVQIPVFIALYWVLLGSVEMRQAPWLGWIQDLSAKDPYFILPIIMGVSMLVQMKLNPTPPDPIQAKVMMAMPIVFTFMFLWFPSGLVLYWVVNNVLSIAQQWQITRMIEGGKQGAKTA

SEQ ID NO: 7295 - protein, 319 aa, 'Flavobacterium' lutescens
MSSPAAAPAPAPAPDAQVIAHKFGGTSVASAQRYRHVAELLLQRPEPTQVVVVSAMKGVTDALIELATLAAHGQPRWRDAWQALRQRHHEAATELLGEDSADLLQWLDGRFDKLAGLLEALAVIGGLPEEVLERVQGLGEVFSAQLLGRYFNRLGHPCAVLDARDVLVVAHGELGVSVDWERSAANLAAWRVDNPQSRVVVTGFVARDGQGRITTLGRNGSDYSGAIFAALFEAAELHIWTDVDGVLSADPRVVPEAVTLATLSYDEACELAYFGAKVVHPQTMSPAIARQMPIVIRNTFNPSHPGTRIASSSEPSGPI

SEQ ID NO: 7296 - protein, 360 aa, Pisum sativum
MAAAVTAAVSLPYSNSTSLPIRTSIVAPERLVFKKVSLNNVSISGRVGTIRAQVTTEAPAKVVKHSKKQDENIVVNKFKPKEPYVGRCLLNTKITGDDAPGETWHMVFSTEGEVPYREGQSIGIVPDGIDKNGKPHKLRLYSIASSAIGDFGDSKTVSLCVKRLVYTNDAGEVVKGVCSNFLCDLKPGSEVKITGPVGKEMLMPKDPNATVIMLGTGTGIAPFRSFLWKMFFEKHEDYQFNGLAWLFLGVPTSSSLLYKEEFEKMKEKAPENFRLDFAVSREQVNDKGEKMYIQTRMAQYAEELWELLKKDNTFVYMCGLKGMEKGIDDIMVSLAAKDGIDWIEYKRTLKKAEQWNVEVY

SEQ ID NO: 7297 - protein, 369 aa, Spinacia oleracea
MTTAVTAAVSFPSTKTTSLSARSSSVISPDKISYKKVPLYYRNVSATGKMGPIRAQIASDVEAPPPAPAKVEKHSKKMEEGITVNKFKPKTPYVGRCLLNTKITGDDAPGETWHMVFSHEGEIPYREGQSVGVIPDGEDKNGKPHKLRLYSIASSALGDFGDAKSVSLCVKRLIYTNDAGETIKGVCSNFLCDLKPGAEVKLTGPVGKEMLMPKDPNATIIMLGTGTGIAPFRSFLWKMFFEKHDDYKFNGLAWLFLGVPTSSSLLYKEEFEKMKEKAPDNFRLDFAVSREQTNEKGEKMYIQTRMAQYAVELWEMLKKDNTYFYMCGLKGMEKGIDDIMVSLAAAEGIDWIEYKRQLKKAEQWNVEVY

SEQ ID NO: 7298 - protein, 294 aa, Spirulina sp.
AKTDIPVNIYKPKNPYIGKCLSNEELVREGGTGTVRHLIFDISGGDLRYLEGQSIGIIPPGTDNNGKPHKLRLYSIASTRHGDHVDDKTVSLCVRQLEYKHPETGETVYGVCSTYLCNLEAGADVAITGPVGKEMLLPEDEDATIIMMATGTGIAPFRAFLWRIFKEQHEDYKFKGLAWLFFGIPYSPNILYQQELEELQEEFPENFRLTLAISREQQNPEGGKMYIQDRIKENADQLWELIQKPNTHTYICGLKGMEGGIDEGMSAAAGKFDVDWSDYQKELKKKHRWHVETY

SEQ ID NO: 7299 - protein, 388 aa, Synechococcus sp. WH 8103
TTAFHSPTSRRRKTLQEANLLEGPLMLIKSIRGFSSNRAMTWLACAPLALMGLGIFTLSAKAEELPDLNAAFLANNLWLLVATILVIFMNAGFAMVEAGMCRQKNAVNILAKNLFVFALAVTAYWFVGYSFMYGDAAIDGWLYFGGLFFDPTVTAETISDAGLVPTVDFLFQAAFAGTAATIVSGLVAERIKFGEFVVFALILTAFIYPVAGSWEWNGGWLNSVGNAEFIDFAGSSIVHSVGAWAGLVGAALLGPRIGKYVGGKVQAIPGHNMSIATLGALILWIGWYGFNPGSQLAMDQWVPYVAVTTTLGAAGGAIGATVISTITSKKPDLTMIINGILAGLVSVTAGCGNLTLTGSWVAGLVGGIIVVFSVSALDSAGIDDPVGA

SEQ ID NO: 7300 - protein, 1139 aa, Triticum aestivum
MSSSRSNNRPACSRGSSARSKHSERVVAQTPVDARLHAEFEGSQRHFDYSSSVSALNRSGASTSSAVSAYIQNMQRGRYIQPFGCLLAIHPESFALLAYSENAAEILDLTPHAVPTIDQRDALAVGADVRTLFRSQSAVALHKAAVFGEVNLLNPILVHARTSGKPFYAILHRIDVGLVIDLEPVNPADVPVTAAGALKSYKLAAKAISRLQSLPSGNLSLLCDVLVREVSELTGYDRVMAYKFHEDEHGEVIAECRRSDLEPYLGLHYPATDIPQASRFLFMKNKVRMICDCAASPVKLIQDDNLSQPISLCGSTMRAPHGCHAQYMANMGSIASLVMSITINEDDDEDGDTGSDQQPKGRKLWGLVVCHHTSPRFVPFPLRYACEFLLQVFGIQLNKEVELASQAKERHILRTQTLLCDMLLRDAPVGIFTQSPNVMDLVKCDGAALCYQNQIMVLGSTPSEGEIKKIVAWLLECHDGSTGLSTDSLLEAGYPGASALGEVVCGMAAIKISSKGFIFWFRSHTAKEIKWGGAKHEPGDADDNGRRMHPRSSFRAFLEVVKWRSVPWEDVEMDAIHSLQLILRGSLQDEDANDNNARSIVEAPSDDIKKIQGLLELKIVTNEMVRLIETATAPILAVDIVGNINGWNNKVAEITGLPTTEAIGMLLVDLVEGDSVEVVKQMLNSALQGTEEQNLEIKLKTMHQQESKGPVVLMVNACCSRDLSDKVVGVCFVAQDLTGHKMVMDKYTRIQGDYVAIVKNPNELIPPIFMINDLGSCLEWNEAMQKITGIKREDAIDKLVIGELFTLHDYGCRVKDQVTLTKLSILMNTVISGQEPEKLAFGFFNTDGKYMESLLTANKRTDAEGKITGALCFLHVASPELQHALQVQKMSEQAATHSFKELTYIRQELKNPLNGMQFTRKLLEPSDLTEEQRQLFASNVLCQEQLKKILHDNDLEGIEQCYMEMNTVEFNLEEALNTVLMQGMSVSKEKQISLDRDWPVEVSSMYLYGDNLRLQQVLADYLACTLQFTRPAEGPIVLQVIPKKEHIGSGMQIAHLEFRLVHPAPGVPEALIQEMFRHGPGVSREGLGLHISQKLVKTMSGTVQYLREAESSSFIVLVEFPVAQLNSKRSRPSTSKSNF

SEQ ID NO: 7301 - protein, 386 aa, Dactylis glomerata
MEGVEESNREAVQSCHRVLSLLSNPHGQLVPHKELVEATGEAVSKFGSVATKIATNGNGRQGHARVRKKINQPMPMFDSSLFLETTASAADAAAAKTSQPGPDTILRLFPRYQQVEGSSSKDPVRIPAQFPRRLLLENPSVGSNGPARGPPVQLVQPVSVAPPAGTPAPALPAAHLHFIQQQQSYQRFQLMHQMKLQSEMMKRGGLGEQGGSNGGVNLKFASSNCTGSSSRSFLSSLSMEGSMASLDVSRSSRPFQLVSGSQTSSTPELGLMQRKRCAGKEDGSGRCATGGRCHCAKKRKLRIRRSIKVPAISNKVADIPADEFSWRKYGQKPIKGSPHPRGYYKCSSVRGCPARKHVERCVDDPAMLIVTYEGDHNHNRAAAQPA

SEQ ID NO: 7302 - protein, 334 aa, Malus x domestica
MEEQAQHYTSCCSATMSNISSPHVMPCLTEQWGNLPFQVDDSEDMIVYNSLRDAFSLGWSPDHTFPFQVDDWEDMINNNSDALSLGWSPDHTLECIKPEQAYDLDHLFDQYHDQLPPDLFTQSQPHDFDVSINGNKPSQALVLPPDTDIPPLDHDDRDQNQVQVGDAVAEQEELNVNVPKLQKSGVARGRHYRGVRQRPWGKFAAEIRDPAKNGARVWLGTYETSEEAALAYDRAAFRIRGSKALLNFPHRIGLNEPPPVRVTGKRKEPDQEAAASSSTSSSSSATPTAATKRSKLDKSVSSSADHDHQANVCHTRQKNNTSYMLAIGEQLLVS

SEQ ID NO: 7303 - protein, 222 aa, Hordeum vulgare subsp. vulgare
MDKHQLFDSSNVDTTFFAANGTAQGDTSKQRARRRRRRSARCGGGDGDGGEMDGGGDPKKRRLTDEQAEILELSFREDRKLETARKVYLAAELGLDPKQVAVWFQNRRARHKNKTLEEEFARLKHAHDAAILHKCHLENELLRLKERLGATEQEVRRLRSAAGSHGASVDGGHAAGAVGVCGGSPSSSFSTGTCQQQPGFSGADVLGRDDDLMMCVPEWFLA

SEQ ID NO: 7304 - protein, 252 aa, Malus x domestica
MCGGAIISDFIAVKRALKLTAEDLWSDLDTISDLLGIDYSNSINKQPENHKVVQKPKPSITKVVTSDEKPKQASGSAAAAKGKRVRKNVYRGIRQRPWGKWAAEIRDPYKAVRVWLGTYDTAEEAARAYDEAAVRIRGDKAKLNFAQPPSSSPLPSLAPDTPPPTKRRCIVAESTRVEPTQPSFQTGSYYYDPLYHGGGGGEMYAKKEVAGGDEVVVEQLSQVVSGSGESDSLYLWMLDDLVAYQQQGQLLY

SEQ ID NO: 7305 - protein, 401 aa, Borrelia turicatae 91E135
MGFCMRKIAIIDGLRSPITKFGGVLKGMNIVDVSSDIVKALLARNNIDKVDEVIVGNVISAGLGQNIARQIALKAGLGEIIPAFTVNKVCGSGLKSLELAFNSIALGNSEIILAGGVEDLSNAPYLLPRGVRFDGLKFGDFKIEDSIYKDALVDTPSSTVMGLTAENLAEMYEITREMQDQFAYNSHMKATAARDSGYFNDEIYPLSVFDKKTKLKSVICSDEEIRDSLSLEKLSSLKPVFKEGGTVTAGNSSSLDDGACFLILASEDFVCKMGLQPLAYVGGFKSVGLNPLHMGFGAFLAIKEIIEKFNLTPSEIDFIETNEAFAAQSLSVLKALRQKYDVRDSIINVNGGAIALGHPFSVSGSRILLTLARLIKINNKSKGIASLCIGGGQGIAAFLYR

SEQ ID NO: 7306 - protein, 545 aa, Borrelia turicatae 91E135
MSQSKRILRAIYLSLFFIGIFMLVDDVFFSRKSPSVMEREIGFNLDRDFDVEHHSIDENDTLSLSANSKEIGVETGIYYATFSTFGGNLVSLKLKDHLNLERNPTEMVKVNMDREGLFYITFDNLTKSLFSYDKINDYTHEFKTKFEYNDKYYEYIKRYTFSSKDEYLIKLEIFLNNVDANDNFDIDFYKFVLSSDIENLSERGKLQYNNYLSQSIYYDTKLRYGKDGLSVIKPKWVGSSTKYFEVLVSKENMNVEFKQENKVLKTFVLNKIGDTSFSDTFYIYAGPRDNGYLDIFNENNLNSFGLSNVEFGMSVEKSLLYFIQVPMQLIMQIFYDVIPNWGLSIIFLTIVVRILIFPLTFKSFRATAELSKLQPKMKEIQVKFKNDPKRLNEEMGKLYREEGVNPLGGCLPILLQLPVFFALYGLVNNFFLLRGASFIPGWIDDLSIGDSIYYFGYKVFVWTDIRILPFIMMITQLLSTIISSNVSFKNLGSQQKFLYFGMPIMFFFILYDMPSGLLIYWITTNIFTILQQYYIKMNVSERRNR

SEQ ID NO: 7307 - protein, 283 aa, Borrelia turicatae 91E135
MSLNIIMVNVDMNIAIRPILKWAGGKKNLLSSILDNIPLAFNNYIEPFVGGGALFFALNVKNSIINDINSNLINFYREIAYNLDDFLLEIEKYNNAPLTKEYYVHIRNSFNNENLTNLEKACIFLYLNKTCYNGLYRENGNGKFNTPFGKHKKISLYEIKNLQLASKLLREVKVLNLDFFCLLDFIKKDDFVYLDPPYIPYSKTSNFTSYSKYGFDFRMHEKLLQFCDKIDKKGAKFLLSNSNTASSLELYKNYNVTFVDAKRFINSNPIRRGSIREILVKNF

SEQ ID NO: 7308 - protein, 650 aa, Borrelia turicatae 91E135
MHKAKINIRNQKYKRRFYMGKIIGIDLGTTNSCVAIMEHGKPVVIQNSEGGRTTPSIVAYTNKGERLVGQVAKNQMVTNPENTIYSIKRFMGRRFEEVASEIKMVPYKVEKGQNGDARVNISNIKKQMSPPEISAATLTKMKETAEAYLGETVTEAVITVPAYFNDAQRQATKDAGKIAGLDVKRIVNEPTAAALAYGIEKKNEEIVAVYDLGGGTFDISILELGDGVFEVKSTNGDTHLGGDNFDDEIIKHLITEFKKDSAIDLSNDKMALQRLKEAAEKAKIELSGAQEASINLPFITADANGPKHLQYTLTRAKFEQMVDHLVQKTKEPCLKAIKDAGLKASDINEVILVGGSTRIPAIQKIVKEIFGQEPNKGVNPDEAVAIGAAIQGGILTGETKDMVLLDVTPLSLGIETLGGVMTKLIERNTTIPTKKSQVFSTAADNQTSVDIKVLQGEREMASQNRVLGNFILDGIPAAPRGVPQIEVSFDIDANGIVHVSAKDMGTGKEQKIRIESSSGLSEDEIERMVKDAEAHAEEDKKLKESIEAKNIANSLIYQTEKSLKEYGEKITSEDKEAIENKIKELKDALEGSDIALIKSKTEELQQASYKIAEMMYKDAQSSSSNQDNAQNNASSESKEADYEVVDEDKK

SEQ ID NO: 7309 - protein, 406 aa, Borrelia turicatae 91E135
MGLLIKKSIGIIACPGGRVFADKIMEELKKIFLDSESEVIEKISQTSSCFKEDVLKLEEILSPFLEGLEFSNLRFDESVEIPVNFVKFANGEFKAEILKTIRNKDIFIVQDVSNTYPVNVNNNEKVVMTINDHLMNLMTTIDACMQAKANSVSVIIPSYPYSRQDKKHSREGLTASLFGRFLEELRVKHILTLDIHSKAIENVFRKTYFENLNASYEIFDALAELIDIRDSSLVVVSPDTGAVNRNKFFASNLKRPLALLYKERDYSKVTHNVNDSNISVTKLLGDVEGKNVFMSDDILATGGTLIKAVKLLKSMGAKKIICAISLPFFNGDAIRYFDKAYEEGYFYKIIGTNAVYHDDRLISKPWYYEANVAHLFAGAIFAIHNRVSLQKILDRSHDIQNLISKS

SEQ ID NO: 7310 - protein, 348 aa, Borrelia turicatae 91E135
MGSFNFKNYVCDRAKKIVREKGDKASIVFPESTDVRILEATIDLLKKKLAGLVVLIGRRDEVFRRLKEQSGSRDDILEMVKVVDPSSFKDFNRYLDEYFSLQHNRKLTLKQAREELLDEIAFSMMMVRLGEVKTCVCGALVSSAKVLRSVFKILPKLKETNFISSFMIMDTGNDLGRAETCFGYEGILMFADCAVIINPNALQLAEIAIQSANSFKNIFNAEPKIALLSFSTKGSANSIEVDKVKGALELVKSKCSDLLIDGELQIDAALVKGVAEKKCGDSLVAGAANVLIFPSLESGNIGYKLVERLAFANAYGPFLQGLKNPVSDLSRGCSLDDIVLTSALMIGS

SEQ ID NO: 7311 - protein, 404 aa, Borrelia turicatae 91E135
MKILTINTGSSSLKFTLYKHKNTQILVSGTIEKIKTKKSIIKIKTKNGLLEKTDKHIKSHKEALKQLIRILTNKKLKIIENPDEIQGIGHRIVHGGPSFKNSTILNTNTLSELKKISKLAPLHNPIAIKVIEITLKIFPNAKQVLCFDTSWHKTMNENAFLYATPYSWYKDYNIRKYGFHGLSYSYITKRVATILNKPKEDLNLIILHLGNGSSINAVKKGLSYDTSMGLTPLEGLVMGTRSGDIDPAIIPLMSKLLNKTPKKIEEILNKQSGMLGISLKSNDLRDIWEGVKNNEYNSKLAVEIMAYRIKKYIGSYLAVLDFNIDAIIFTAGIGVTDYGIRELSLKGFEKIGIEIDPQKNNLARDKHTESDISSEKSKTKILVIPTNEELTILEDTYNLITKPS

SEQ ID NO: 7312 - protein, 290 aa, Borrelia turicatae 91E135
MKSGFVSIIGRPSTGKSTLLNSICEHQISIISSIPQTTRNKIKGIFTDKRGQIIFIDTPGFHLSKKQFNIALMHNVHSAIKETELILYVIDIQDKPGIEENEILTIISKSKINFLVVINKIDIQKTKEREIMIFLEEKGIKKDNIIKISAEQKINIEEIKDKIYENLQEGPLYYPEEYYTDQEMNLRTSEIIRGVTIKKLKEELPYSLYIEIEILEDRKNKLFIKANIIVAVESQKGIIVGKGGKGIKTIGEEARKIISEIFEKKCDLFLQVKLRKNWNKNPKLIKNLIN

SEQ ID NO: 7313 - protein, 327 aa, Borrelia turicatae 91E135
MHTFKDSLNITVSSGSGGAGCVSFLRERFKAKGGPDGGDGGRGGNVVFKVKPDLKTLSFYKNGQKLAANNGKPGMGSRKSGASGEDLVIFVPPNTRVYDVFTDSMLFELQNFDDEVIALKGGRGGLGNVNFKSSTKRTPRFAQPGESGTTLDLRLELVLIADIGLVGLPNAGKSSLISTITASRSKVGNYPFTTKVPHLGVLKSSYEDLVIADVPGIIEGASRGMGLGFEFLRHISKTKILVFLIDVASNDFMSTYSILVNELSVYDVGLSSKKRIIVANKLDLEGAIENFNQLKRALDGEKVLGISIYDNRGIDELVNELFALSRI

SEQ ID NO: 7314 - protein, 491 aa, Candida albicans
MVALKREAEPRENGKSKKAKTSLATSSFVLHSYSKLPNINEYAKAKSTPLDVFVWGTGSMCELGLGPSAKNKEVKRPRLNPYLTEEKLGGTKIVDFAVGGMHTLALDGKNRIWSWGGNDSGVLGRDTSQAKEVLKDIDGKNGNDDDDDDDDEDGDLNEAESTPALVENLPEGEIVQLAATDNLSAALLSNGDVYAWGCFRCNEGLLGFLRDEIKLQKTPLKIKELKNIVQLAAGKDHLLALDSKGIVYAWGNGQQYQLGRRILERHRYRSLEPQQFGLYNIKYIASGDFHCFAIDHSDNVYAWGLNQYGQCALTGDNGELEDGSVLMKPTLIPELSHKGIKEIAAGEHHTLALTEDGQVYAWGRYDMKEIGIPKDKLPKSTFKDQHGNPRSVPVPTKLEFAVKIKTIGVGSHHSFAVTEDGVVYAWGFAETYGPGLGPSIDDVEKPTRIVNTATKNEDILLIGAGGQFSVSGGVKSKTKRKQKLNLISMKI

SEQ ID NO: 7315 - protein, 763 aa, Picea abies
MPAGFIIPARHVPPLMARHTKAGYTTSSGLSLAQPNMAEGQFDMSQTADSEIAKIREEEFESKSGSDNVEGASGEDQDGERRPRKKRYHRHTQHQIQEMEMFFKECPHPDDKQRKELSRELGLEPLQVKFWFQNKRTQMKTQHERHENTQLRSENEKLRSENMRYREALNNASCPNCGGPAALGEMSFDEQQLRMENARLREEIDRISGIAAKYVGKPLLSFGPSPLSSIPRSNLDLAVGSYGVQPNIGPDIYGSSSGGEIGNRSLVGPTEGEKPMVVELAVAAMEELVRMAQLGEPLWTSHPEDSTDILNEDEYIRTFPRGIGPRPYGLKAEASRETAVVIMNAINLVETLMDVNQWSSMFPGIVSRPFTVDVFSTGVAGNYNGALQVMHAEFQVPSPLVPTREIYFVRYCKQHSDSIWAVVDVSLDSLRGNSSSVIRCRRRPSGCLIQEMPNSYSKVTWVEHVEADDRAVHHIYRQLVNSGMAFGAKRWIATLQRQCERLASVLASNIPARDLGVIPSPEGRKSILKLAERMVTSFCAGVSASTAHTWTTLSGSGAEDVRVMTRKSIDDPGRPPGIILSAATSLWLPVPPKKVFDFLRDENSRNEWDILSNGGLVQEVDHIANGQDPGNCVSLLRVNTVNSNQSNMLILQESCTDASGSFVIYAPVDIVAMNVVLSGGDPDYVALLPSGFAILPDSPKCMAVTNSGINDLGTGGSLLTVAFQILVDSVPTAKLSLGSVATVNSLISCTVDRIKAAVMRENP

SEQ ID NO: 7316 - protein, 373 aa, Drechslerella dactyloides
MASPTPPNSTASPKPQAPPSQVQACRYKTGKTLGSGSYSVVRECVHIHTGRYYAAKIINQKLMAGREHMVRNEIAVLKKVSMGHQNILTLVDYFETMNNLYLVTDLALGGELFDRICRKGSYFESDAADLIRATLSAVAYLHDHGIVHRDLKPENLLFRTPEDNADLLIADFGLSRIMDEERFHVLTTTCGTPGYMAPEIFKKTGHGKPVDIWAIGVITYFLLCGYTPFDRDSNLEEMQAILKADYKFEPAQYWSDISENAKDFIRRCLTIDPKARPTAHAALEHPFICEDQPEREADLLPTVRKNFNARRTLHAAIDTIRAINKLREGGMMDGALSSAPENQKEKQPQNQPATGLWQGTAQAATAKGLWSKS

SEQ ID NO: 7317 - protein, 691 aa, Staphylococcus aureus
DHRGGVGADGITGDGAGIMTEIPFAFFKQHVTDFDIPGEGEYAVGLFFSKERILGSEHEAVFKKYFEGEGLSILGYRNVPVNKDAIAKHVADTMPVIQQVFIDIRGIEDVEKRLFLARKQLEFYSTQCDLELYFTSLSRKTIVYKGWLRSDQIKKLYTDLSDDLYQSKLGLVHSRFSTNTFPSWKRAHPNRMLMHNGEINTIKGNVNWMRARQHKLIETLFGEDQHKVFQIVDEDGSDSAIVDNALEFLSLAMEPEKAAMLLIPEPWLYNEANDANVRAFYEFYSYLMEPWDGPTMISFCNGDKLGALTDRNGLRPGRYTITKDNFIVFSSEVGVVDVPESNVAFKGQLNPGKLLLVDFKQNKVIENNDLKGAIAGELPYKAWIDNHKVDFDFENIQYQDSQWKDETLFKLQRQFAYTKEEIHKYIQELVEGKKDPIGAMGYDAPIAVLNERPESLFNYFKQLFAQVTNPPIDAYREKIVTSELSYLGGEGNLLAPDETVLDRIQLKRPVLNESHLAAIDQEHFKLTYLSTVYEGDLEDALEALGREAVNAVKQGAQILVLDDSGLVDSNGFAMPMLLAISHVHQLLIKADLRMSTSLVAKSGETREVHHVACLLAYGANAIVPYLAQRTVEQLTLTEGLQGTVVDNVKTYTDVLSEGVIKVMAKMGISTVQSYQGAQIFEAIGLSHDVID

SEQ ID NO: 7318 - protein, 495 aa, Pisum sativum
MALQVLTLPSWVTLFTTFAILLLFSRRLRRRQYNLPPGPKPWPIIGNFNLIGTLPHQSLHGLTQKYGPIMHLWFGSKRVVVGSTVEMAKAFLKTHDATLAGRPKFSAGKYTTYNYSDITWSQYGPYWRQARRMCLLELFSAKRLESYEYIRKQELHVFLHELFDSRNKTILLKDHLSSLSLNVISRMVLGRKYLEKVENSIISPDEFKNMLDELFLLNGILNIGDFIPWIHFLDFQGYVKRMKVLSKKFDGFMEHVLEEHIERRKGVKDYVAKDMVDVLLQLAEDPDLEVKLERHGVKAFTQDLIAGGTESSAVTVEWAISELIRKPEIFKKATEELDRVIGRERWVEEKDIANLPYVYAIAKETMRLHPVAPMLVPREAREDCNINGYDIPKGSLILVNTWTIARDSNVWDNPNEFMPERFLGKDIDVKGHDYELLPFGAGRRMCPGYPLGIKVIQSSLANLLHGFNWRLSDDVKKEDLNMEEIFGLSTPKKIH

SEQ ID NO: 7319 - protein, 113 aa, Nostoc sp. ATCC 53789
MRIMLKSKIHRATVTEANVNYIGSITVDKVLMEKADILPGEKVMVVDNTNGNRLETYVLEGEENSGVICMNGGSAHLVNSGDLITLLAFEVTDEIKEPKKIIVDENNKFLKYL

SEQ ID NO: 7320 - protein, 693 aa, Catharanthus roseus
MVLKRRLEYGFSGYQIPVIPKAPRSVRRRGPRKKLVDDHQICAFELLAAVAGKLLQESESSASSNASEPKDLLGIHLDGIKQERVEENNKTVRSECLDQGSCVESAFIPELAVKEHNSNPSLGDLPNTENDSFSERTSTLLSSDFSKKVDCELKLGICNDKTEGNLNSKAEDDTYALGDLSNSKTGNESVRQSEDETKQGKDLTAANPCSVKNTVEKCTNRKPLINSDSSVQLSLYRDPLPSASFPKHRNDVNLGIRDDDDNSFRCSKFSTKFRAFRPQPRNGYRRIRKMLTSKYWKVAPKLRDYELSNNNEAMRPCFRNRKSIHVRDRCLREVPSKRRRLCDRSFVVAYDQETSSESISNAPEKGTKGDNCSSDAINKKGNAASQSVKVHQKSKDHKVKLSIKSFKIPELYIEIPETATVGSLKRTVMETVTAILGGGLRVGVVLQGKKVRDDNRTLQQAGILQSGNLDNLGFMLEPTLTQVPESPKDSPHKLHCETDQNLCRSPASPVLGSGLSNDAFDSPSKMEQLHESNHVAIHSPRTNTDTVTDGEVPDSRALVTLPAVSAEALAMVPVNQKPKRCESSQRRTRRPFSVAEVEALVEAVEILGTGRWRDVKMRAFDNADHRTYVDLKDKWKTLVHTASISPQQRRGEPVPQELLDRVLSAHAYWSQHQSKQTGKHHVEPLKIMDAQAD

SEQ ID NO: 7321 - protein, 150 aa, Mesorhizobium loti
MRKLVAGKLHGIHVTEANLNYHGSITLDPDHCEAAGILPMEFVEIWNKNSGARISTYVILGERGSRCCILNGAAARTCQPDDPIIVCNSIYLDEAHITSLKPRIVTFDQDNYILDRLSYSVDLDTDGRYSFSILDEANEALAIPALVSGA

SEQ ID NO: 7322 - protein, 320 aa, Mycoplasma genitalium G37
MSVIDIFKKRLQAVSKKPVIIFPEGWSASVLKAVEMLNESKLIQPAVIFHNRQEIPANFDKKITHYVIDEMDLTSYANFVYEKRKHKGMDLKEAQKFVRDPSSLAATLVALKVVDGEVCGKEYATKDTLRPALQLLATGNFVSSVFIMEKGEERLYFTDCAFAVYPNSQELATIAENTFNFAKSLNEDEIKMAFLSYSTLGSGKGEMVDKVVLATKLFLEKHPELHQSVCGELQFDAAFVEKVRLQKAPQLTWKNSANIYVFPNLDAGNIAYKIAQRLGGYDAIGPIVLGLSSPVNDLSRGASVSDIFNVGIITAAQAIK

SEQ ID NO: 7323 - protein, 714 aa, Mycoplasma genitalium G37
MNINFTPAGENRNFLQEIGRNINDEVLKNKVDPIIGRDNEIRRLIEILSRKSKNNPVLIGEPGVGKTAIVEGFVRRVVSNDVPLNLRDVEIYELSLSGLIAGTKFQGEFEKRINTILKQVKESNGRIILFIDEIHQIVGLGRNSSSGAMDIANILKPMLARGEIKVIGATTLKEYREYIEKDGALERRFQKILINEPSSQEALTIMRGLKTRWELFHNITIFDSALVAAVEMSTRYINERNLPDKAIDLIDEAAAKIKTEMSSEPVAIDSLKREIINLETEYAALKQDKENDNKQSKKEYLEKLKKQLDALKQKRDSLINEWKKEKADFENINKLKKEIEEFQTKLETYQSEGNYESASKILYSDIPRLKKELESAQQKYATSKHDLFKTEVSENEIAEVISQTTGIPLKKLLESEKDKLLHLGDEIKKRVKGQDEAIDAVVNTVIRGRVNINDPNKPIGSFIFLGSTGVGKTELAKSLAEVLFDNEKALIRFDMSEYMEKHSVAKLIGAPPGYIGYEQSGLLTEAVRRKPYSVLLFDEIEKAHPDVTNVLLQVLDDGTLKDSQGRVVNFKNTLIIMTSNLGSNFLLEGKKDLAIQSLKKHFRPEFINRIDEIVFFNVLEKDTVLSIINSLLAQLSKRLNKQNLFFNFDSNLTEFIYKSSFDQQFGARPIKRFIDHSVATLIAKYILQGKIKKGVGYNIAVVKDNITITQNNKS

SEQ ID NO: 7324 - protein, 393 aa, Mycoplasma genitalium G37
MQSHKILVVNAGSSSIKFQLFNDKKQVLAKGLCERIFIDGFFKLEFNQKKIEEKVQFNDHNLAVKHFLNALKKNKIITELSEIGLIGHRVVQGANYFTDAVLVDTHSLAKIKEFIKLAPLHNKPEADVIEIFLKEIKTAKNVAVFDTTFHTTIPRENYLYAVPENWEKNNLVRRYGFHGTSYKYINEFLEKKFNKKPLNLIVCHLGNGASVCAIKQGKSLNTSMGFTPLEGLIMGTRSGDIDPAIVSYIAEQQKLSCNDVVNELNKKSGMFAITGSSDMRDIFDKPEINDIAIKMYVNRVADYIAKYLNQLSGEIDSLVFTGGVGENASYCVQLIIEKVASLGFKTNSNLFGNYQDSSLISTNESKYQIFRVRTNEELMIVEDALRVSTNIKK

SEQ ID NO: 7325 - protein, 433 aa, Mycoplasma genitalium G37
MAITDYCECRFTAGNGGNGIIAWKREAHYDKGGPGGGNGGNGGNVILQADHNCDSLFFLKNKKHLFAEDGQNGKPDLAHGKNGSDLLIKVPIGTTVKNLENNSVLVDFVHDKQSFILCFGGKGGKGNAAFKSPIMRAPNLYENGDKGEILNVSLEVKYLANVGIVGFPNSGKSTLISKLSNAKPKIANYRFTTLIPVLGVVKYQNNSLVFADIPGLIENASEGSGLGHDFLRHIERCEILIHLISLDPVDNDDPCKAYLQIMDELSKYSPLLVKKKMLVVANKIDVNEGEKRFKKLEKFLQKKSISVLKISALKKELGNLLDRVFELYNKTISQFGANKFSLPMELEKHYVFQNTNENNNDPLNIEKDSLNRWIVNCKRLRYWFDKIPQTTLDNIRRLGNKIKEIGIEDQLKSVGAKKGDIIFFDGCEFVIND

SEQ ID NO: 7326 - protein, 1145 aa, Pinus sylvestris
MVSISSDQACTIPKLYANFFLGSDIEFVRPDGRPEFFNADRFLSYYHSMTFAVNQEGQALLPGRKLLAMELHEPFFESWDPRHENPCKWTGVICSLDHENLVTEINIQSVQIAGNVPSQFAVLGSLRSLVISAANLTGSIPAEIGGYESLEILDLSGNRLRGNIPAEISKLKNLKSLILNSNQLQGSIPAEIGNCHNLVDLVVFDNQLSGKIPAELGRLANLEVFRAGGNENIEGTLPDELSNCTNLVTLGLAETNISGKIPLSFGSLKKLQTLAIYTAFLSGTIPAELGNCSELVNLYLYENRLSGAIPRELGKLQKLEKLYLWDNELDGSIPAELGSCSSLKFVDLSTNSLSGSIPDSFGSLKNLSELEITDNNVSGSIPAALANCTELTQIQLYNNQISGQMPAELGALKKLTVLFLWQNNLEGPIPSSLGSCDNLQSLDLSHNRLTGSIPPSLFEIKNLTKLLLLSNELTGALPPEIGNCVALSRLRLGNNRLLNQIPREIGKLENLVFLDLAMNQFSGSIPAEIGGCSQLQMLDLHGNRLGGELPRALGFLHGLQVVDLSANELTGLIPANLGNLVALTKLTLNGNALSGAIPWEISRCTNLQLLDLSLNRFSGQIPPEMGKCKRLEIALNLSWNNLSGSIPAQFSGLTKLASLDLSHNLLSGNLSALAQLSESCFSQHFFQRFFRVSARYQVFSDLCLPSDLSGNAALCTSEEVCFMSSGAHFEQRVFEVKLVMILLFSVTAVMMILGIWLVTQSGEWVTGKWRIPRSGGHGRLTTFQKLNFSADDVVNALVDSNIIGKGCSGVVYKAEMGNGDVIAVKKLWTGKESECEKVRERDSFSAEVNTLGAIRHRNIVRLLGCCTNGRSKLLMYDYMPNGSLGGLLHEKRSMLDWEIRYNIVLGVRRGLSYLHHDCRPPILHRDVKANNILLGSQYEPYLADFGLAKLVDSADFNRSSTTVAGSYGYIAPEYGYTMKITQKIDVYSFGVVLLEVVTGKQPIDPTIPEGVHLVEWARDAVQSNKLADSAEVIDPRLQGRPDTQIQEMLQVLGVAFLCVNSNPDERPTMKDVAALLKEIRHDCHDYNGKADLLLKQTPAPGSTRSPNPTADARSPVGSSFGLEYSSASTTAHESYSLHSSVSNVI

SEQ ID NO: 7327 - protein, 180 aa, Hordeum vulgare subsp. vulgare
MSVVDPLVAAHVIHDVLDPFTSTVPLTIGYNNRQVRPGAALKPSAVVSKPRVDIGGNDMRVLYTLMLVDPDAPSPSHPSLREYLHWMVADIPGTTGVSFGQELLVYERPEPRSGIHRMVFVLFQQLGRGTVFAPHMRHNFSSRNFACQYHLNTVAATYFDCQREGGSGGRRFRPESSQGE

SEQ ID NO: 7328 - protein, 308 aa, Thermotoga neapolitana
GGVLLTSMGNDRPYFSYFDRIVLNASQVTNPSIDPLREPMEIRTYIGRKEAKLEIEEDGEGNVALKTEIAPQLKLEVPVMFTAMSYGSISLNALLSLARAARTIGTFFNTGEGGLPKELREFKDNMIVQVASGRFGVSADYLNAGSAVEIKIGQGAKPGIGGHLPGEKVTEPISETRMIPVGTDALSPATHHDIYSIEDLRQLIYAIKEATRYEKPVGVKIAAVHNVAPIAAGMVRAGADYIVIDGIRGGTGAAPKVTRDHVGIPIEFAIAVVDQRLREEGIRHMASIVVAGGIRNSADVIKAIALGA

SEQ ID NO: 7329 - protein, 308 aa, Thermotoga sp. RQ7
GGVLLTSMGNDRPYFSYFDRIVLNASQVTNPSIDPLREPMEIRTYIGRKEAKLEIEEDGEGNVALKTEIAPQLKLEVPVMFTAMSYGSISLNALLSLARAARTIGTFFNTGEGGLPKELREFKDNMIVQVASGRFGVSADYLNAGSAVEIKIGQGAKPGIGGHLPGEKVTEPISETRMIPVGTDALSPAPHHDIYSIEDLRQLIYAIKEATRYEKPVGVKIAAVHNVAPIAAGMVRAGADYIVIDGIRGGTGAAPKVTRDHVGIPIEFAIAVVDQRLREEGIRHMASIVVAGGIRNSADVIKAIALGA

SEQ ID NO: 7330 - protein, 308 aa, Thermotoga maritima
GGVLLTSMGNDRPYFSYFDRIVLNASQVTNPSIDPLREPMEIRTYIGRKEAKLEIEEDGEGNMALKTEIAPQLKLEVPVMFTAMSYGSISLNALLSLARAARTIGTFFNTGEGGLPKELREFKDNMIVQVASGRFGVSADYLNAGSAVEIKVGQGAKPGIGGHLPGEKVTEPISETRMIPVGTDALSPAPHHDIYSIEDLRQLIYAIKEATRYEKPVGVKIAAVHNVAPIAAGMVRAGADYIVIDGIRGGTGAAPKVTRDHVGIPIEFAIAVVDQRLREEGIRHMASIVVAGGIRNSADVIKAIALGA

SEQ ID NO: 7331 - protein, 308 aa, Thermotoga sp. SG1
GGVLLTSMGNDRPYFSYFDRIVLNASQVTNPSIDPLREPMEIRTYIGRKEARLEIEEDSDGNVALKTEIAPQLKLEVPVMFTAMSYGSISLNALLSLARAARTIGTFFNTGEGGLPKELREFKDNMIVQVASGRFGVSADYLNAGSAVEIKIGQGAKPGIGGHLPGEKVTEPISETRMIPVGTDALSPAPHHDIYSIEDLRQLIYAIKEATRYEKPVGVKIAAVHNVAPIAAGMVRAGADYIVIDGIRGGTGAAPKVTRDHVGIPIEFAIAVVDQRLREEGIRHMASIVVGGGIRNSADVIKAIALGA

SEQ ID NO: 7332 - protein, 304 aa, Thermotoga thermarum
GGVLLSSMGNDRPYPVYWDKMVINASQVTNPSIDPLREPMELRVYIGRKPDKIEIDENLNVKTKMPQQLKLETPIMFSAMSYGSISYNAHAALARAAEELGILYNTGEGGLHKDFRKYGKNTIVQVASGRFGVDREYLNTAAAIEIKIGQGAKPGIGGHLPGEKVSEDISATRMIPPGSDAISPAPHHDIYSIEDLAQLIYSLKEATDYQKPVGVKIAAVNNVAAIASGIARAGADYIAIDGFRGGTGAAPKRIRDNVGIPIEFAIAAVDARLRSEGIRHTISLVAAGSIRNSADIVKAIALGA

SEQ ID NO: 7333 - protein, 308 aa, Thermotoga sp. RQ2
GGVLLTSMGNDRPYFSYFDRIVLNASQVTNPSIDPLREPMEIRTYIGRKEEKLEIEEDEDGTVKLKTEIAPQLKLEVPVMFTAMSYGSISLNAILSLARAARTVGTFFNTGEGGLPKELREFKDNMIVQVASGRFGVSADYLNAGSAVEIKIGQGAKPGIGGHLPGEKVTEPISETRMIPVGTDALSPAPHHDIYSIEDLRQLIYAIKEATRYEKPVGVKIAAVHNVAPIAAGAVRAGADYIVIDGIRGGTGAAPKITRDHVGIPIEFAVAVVDQRLREEGIRHMASIVVAGGIRNSADVIKAIALGA

SEQ ID NO: 7334 - protein, 245 aa, Pinus radiata
MGRGKVELKRIENKINRQVTFAKRRNGLLKKAYELSVLCDAEVALIIFSNRGKLYEFCSSSSMMKTIEKYQKCSYGSLETNCSINEMQNSYQDYLELKARVEVLQRSQRNLLGEELGPLNSKELEQLEHQLENSLKQIRSAKTQFMFDQLAHLQHKEQMLVEANRELRKKLEESNTRIPLRLGWEAEDHNNISYRRLPTQSQGLIFQPLGGYPNMQIGYNPAGSNELNVSPADQHPNGFIPGWML

SEQ ID NO: 7335 - protein, 152 aa, Streptococcus suis
MTLKPFTKWTGGKRKLLTQLHEHLPFEYNRYFEPFVGGGALFFDLAPENAVINDFNEELINTYLQIRDNPEALLDLLHIHQENNSKEYYLDVRSVDRDGRIETMSDVERAARILYMLRVDFNGLYRVNSKNQFNVPYGRYKNPKIVDSELIL

SEQ ID NO: 7336 - protein, 208 aa, Streptococcus suis
MTLKPFTKWTGGKRKLLTQLHEHLPFEYNRYFEPFVGGGALFFDLAPENAVINDFNEELINTYLQIRDNPEALLDLLHIHQENNSKEYYLDVRSVDRDGRIETMSDVERAARILYMLRVDFNGLYRVNSKNQFNVPYGRYKNPKIVDSELILSVSRYLNDNNILIMQGDFVTAVEEADAGDFVYFDPPYVPITATSSFTSYTHEGFSD

SEQ ID NO: 7337 - protein, 154 aa, Streptococcus suis
MTLKPFTKWTGGKRMLLTQPHEHLPFDYNKYFEPVVGGGAGPFEMSPEIAVMVDWSGDLKNTYVQILDNLEPVLDLLHIHQENNSKEYYLDVRSVDRDGRIKTMSDVERAARILYMLRVDFNGLYRVNSKNQFNVPYGRYKNPQIVYSELILSV

SEQ ID NO: 7338 - protein, 644 aa, Oryza sativa Japonica Group
MATTAAAAAAALSAAATAKTGRKNHQRHHVLPARGRVGAAAVRCSAVSPVTPPSPAPPATPLRPWGPAEPRKGADILVEALERCGVSDVFAYPGGASMEIHQALTRSPVITNHLFRHEQGEAFAASGYARASGRVGVCVATSGPGATNLVSALADALLDSVPMVAITGQVPRRMIGTDAFQETPIVEVTRSITKHNYLVLDVEDIPRVIQEAFFLASSGRPGPVLVDIPKDIQQQMAVPVWDTSMNLPGYIARLPKPPATELLEQVLRLVGESRRPILYVGGGCSASGDELRWFVELTGIPVTTTLMGLGNFPSDDPLSLRMLGMHGTVYANYAVDKADLLLAFGVRFDDRVTGKIEAFASRAKIVHIDIDPAEIGKNKQPHVSICADVKLALQGLNALLQQSTTKTSSDFSAWHNELDQQKREFPLGYKTFGEEIPPQYAIQVLDELTKGEAIIATGVGQHQMWAAQYYTYKRPRQWLSSAGLGAMGFGLPAAAGASVANPGVTVVDIDGDGSFLMNIQELALIRIENLPVKVMVLNNQHLGMVVQLEDRFYKANRAHTYLGNPECESEIYPDFVTIAKGFNIPAVRVTKKSEVRAAIKKMLETPGPYLLDIIVPHQEHVLPMIPIGGAFKDMILDGDGRTVY

SEQ ID NO: 7339 - protein, 682 aa, Helianthus annuus
MSSSNDNNNNFINNPLTSTKDLFPSTSLSLTLGLFRDGEDAVDDRKEEAANTTVTEISSETSGPVRSRSDDDDFDADPDVDDGDDASNKNNKSKKRKKYHRHTADQIREMEALFKESPHPDEKQRQQLSKRLGLHPRQVKFWFQNRRTQIKTIQERHENSLLKSELDKLGEENKLLRETIKKGTCTNCGFGSSSKDVHTYVDEQQLRVENAKLRAEIEKLRNISWGNIHREHHQRNSCSVGNDHENKSSLDLCSGLFGLEKSRVNGGCRSGLWKSFVQMASAGAPLWVKSLETGREILNYDEYLTKFSTVDSSNVQRLRFIEASRDSGVVFVDLPQLVRSFMDVKEFKEMFPCMISKAATLDVICNGEGPNRKGAVQLMFAELQMLTPLVATREVYFVRYSKQLTAEKWAIVDVSIDNVEKNIDASLARCRKRPSGCIIEDKSNGHCKVTWIEHWECQKSVSHSMFRAIINSGLAFGARNWMATLQQQCERLVFFLATNVPTKDSCGIGTLAGRKSILKLAQRMNVRVLVRALGASSYHTWKKIPSKTGYDIRASRKNLNDAGEPLGVILCAVSSIWLPVSHTLLFDFLRDETRRNEWDIMSNGGPVQSIANLAKGQDQGNTVSIHTMKWKENMWMIQDSCTNAYESMVVCAPVAVTAMQSIMAGCDSSNIAILTLGFFNST

SEQ ID NO: 7340 - protein, 510 aa, Ageratina adenophora
MTILTLLLYTSISALAFYLLLNLRTRHPKRLPPGPTPWPIVGNLPHLGTVPHHSLAALATKYGPLMHLRLGFVDVVVAASASVASQFLKSHDANFASRPPNSGAKHIAYNYHDLVFAPYGPRWRMLRKICSVHLFSAKSLDDFRHVRQEEVAILTRVLISAGETTVKLGQLLNVCTTNALARVLLGRRVFGDGSRDSDPKADEFKDMVVEMMVLAGEFNIGDFIPALDWLDLQGVTKKMKKLHTRFDSFFNLILEEHKSYGNSGDLLSTLIGLKDDADADGEGVKLTDIEIKALLLNLFTAGTDTSSSTVEWAIAELIRHPRLLKQAQEEIDTVVGRDRLVTELDLNQLTFIQAIVKETFRLHPSTPLSLPRISSEACEVDGYYIPKGSTLLVNVWAIARDPEMWTDPLEFRPSRFLPGGEKPNVDVRGNDFEVIPFGAGRRICVGMTLGLRMVQLLVATLVQTFDWELAKGLEPEKLNMDEAYGLTLQRAEQLIVHPKPRLAPGVYESC

SEQ ID NO: 7341 - protein, 553 aa, Amycolatopsis orientalis
MTAADFAPPLTTLCPDFPFAYDDWLAHPAGLGELPPDRLGQEVAVVGGGIAGVVAAYELLRLGLKPVVYEAGQIGGRMRSIPLAGEDGAVAEMGAMRFPPSATTLYRYIDEVGLETKPFANPLSRSTSTTVINLDGVTYRARTPADLPSVFHEVDDAWHKALQELADLSTMRDAIRMRDTAMVKAIWNRLLPELDDQSFYGFLARSTAFASFRHREIFGQVGFGTGGWDTDFPNSVLEILRVIYTGVEEGPRQIIGGCQQLPRRLWNHAPASARFWPAGTSVASLHDGSPRPAVLGLRPAADGFAVEDANGDVRTYPAVVFTAQHRVLLTKIAGVRPLLPANVWTALERTHYMGASKLFVPVDRPFWHDVDPRTGEELMGMTLTDRTPRSVYLFDDGPDSPAALCLSYTWNDDSLKFATLGPADRLELALDALADIYPGVDIRSHITGDPVTVTWENEPNFQGAFKANLPGQYRYQRRLFTHFRQDDLPAAQRGLFLAGDDISWMGGFAEGAVTSALNAVWGTLRHLGGATDPRNPGPGDVFDHIAPIELPES

SEQ ID NO: 7342 - protein, 242 aa, Volvox carteri f. nagariensis
MGEQLRQRGTVKWFNATKGFGFITPEGGGEDFFVHQTNINSDGFRSLREGEAVEFEVEAGPDGRSKAVSVSGPGGSAPEGAPRNFRGGGRGRGRARGARGAYAAYGYPQMPPMYPGYYFFPADPTGRGRGRGRGGMPIQGMIQGMPYPGIPIPGGLEPTGEPSGLQVVVHNLPWSCQWQQLKDHFKEWRVERADVVYDAWGRSRGFGTVRFATKEDAAQACEKMNNSQIDGRTISVRLDRFE

SEQ ID NO: 7343 - protein, 840 aa, Volvox carteri f. nagariensis
AICPYLGYETSRQWRLSSRTQSLIKAGKVPDISVQASQKNFKKSLEKGVLKILSKMGISLLSCYHGAQIFEAYGLGKDVMDLCFRGTVSRIGGMSLADLQREAESLWAKGFPEKAMTKLEDYGFIQSRPKGEYHSNNQEMAKLLHKAIGLGNGSQANPEAYKAYQQHFVEAPVAVLRDCLEFKSDRGPISVDQVEPAAAIMERFCTGGMSLGAISRETHETIAIAMNRIGGKSNSGEGGEDPTRWLHLSDVDGDGKSASVPHLRGLRNGDTATSKIKQVASGRFGVTPEYIMNADQLEIKIAQGAKPGEGGQLPGQKVSPYIAQLRRSKPGVPLISPPPHHDIYSIEDLAQLIYDLHQVNPKAKVSVKLVAEAGIGVVASGVAKANADIIQVSGHDGGTGASPISSIKHAGGPMEMGLAETHQTLVRNELRERVVLRVDGGVRNGRDVLLGALLGADEFGFGTVAMIATGCIMARVCHTNNCPVGVASQREELRARFPGAPEDLVNYFHFVAEEVRAGLAEMGYKSLDEVIGRADLLKQRSVELAKTEGLDLSFLTTYAGPSGSSSVRRSQEVHDNGPQLDDRILADAEVMDAIVNEKVVHKSFDIINTDRSALGRVAGMIAKHHGDNGFAGTVRLTLTGSGGQSFGCFCIKGLEVKLLGEANDYVGKGMNGGEIAIVPPPNSPFKSEEASLVGNTCLYGATGGRLFVNGRAGERFAVRNSLAEAVVEGAGDHCCEYMTGGCVVVLGSVGRNVAAGMTGGLGYFLDEDGSFCDKVNTEIVAVQRVVTAAGEAQLKGLIQAHHERTGSAKAKAILGNWEVLVGKFWQLVPPAEKNTPEVNP

SEQ ID NO: 7344 - protein, 668 aa, Amaranthus tuberculatus
MASTSQPPFSSFTKPNKIPNLQSSIYALPFSNSLKPASSSSILRRPLQISSSSSQSPKPKPPSATITQSPSSLTDDKPSSFVFRFSPDEPRKGCDVLVEALEREGVTDVFAYPGGASMEIHQALTRSNIIRNVLPRHEQGGVFAAEGYARATGRVGVCIATSGPGATNLVSGFADALLDSVPLVAITGQVPRRMIGTDAFQETPIVEVTRSITKHNYLVLDVEDIPRIVKEAFFLANSGRPGPVLIDIPKDIQQQLVVPNWEQPIKLGGYLSRLPKPTFSANEEGLLDQIVRLVGESKRPVLYTGGGCLNSSEELRKFVKLTGIPVASTLMGLGAFPCTDDLSLQMLGMHGTVYANYAVDKADLLLAFGVRFDDRVTGKLEAFASRAKIVHIDIDSAEIGKNKQPHVSICGDVKVALRGLNNILESRKGKVKLDFSNWREELNEQKKKFPLSFKTFGDAIPPQYAIQVLDELTKGDAIVSTGVGQHQMWAAQFYKYRNPRQWLTSGGLGAMGFGLPAAIGAAVARPDAVVVDIDGDGSFIMNVQELATIRVENLPVKIMLLNNQHLGMVVQWEDRFYKANRAHTYLGNPSNSSEIFPDMLKFAEACDIPAARVTKVSDLRAAIQTMLDTPGPYLLDVIVPHQEHVLPMIPSGAAFKDTITEGDGRRAY

SEQ ID NO: 7345 - protein, 669 aa, Amaranthus tuberculatus
MASLLNHQFLFTKPNKIPNLQSSIYALPFSNSLKPTSSSSSSILRRPLQISSSSSQSPKPKPPSATITQSPSSLTDDKPSSFVSRFSPDEPRKGCDVLVEALEREGVTDVFAYPGGASMEIHQALTRSNIIRNVLPRHEQGGVFAAEGYARATGRVGVCIATSGPGATNLVSGFADALLDSVPLVAITGQVPRRMIGTDAFQETPIVEVTRSITKHNYLVLDVEDIPRIVKEAFFLANSGRPGPVLIDIPKDIQQQLVVPNWEQPIKLGGYLSRLPKPTFSANEEGLLDQIVRLVGESKRPVLYTGGGCLNSSEELRKFVELTGIPVASTLMGLGAFPCTDDLSLQMLGMHGTVYANYAVDKADLLLAFGVRFDDRVTGKLEAFASRAKIVHIDIDSAEIGKNKQPHVSICGDVKVALRGLNNILESRKGKVKLDFSNWREELNEQKKKFPLSFKTFGDAIPPQYAIQVLDELTKGDAIVSTGVGQHQMWAAQFYKYRNPRQWLTSGGLGAMGFGLPAAIGAAVARPDAVVVDIDGDGSFIMNVQELATIRVENLPVKIMLLNNQHLGMVVQLEDRFYKANRAHTYLGNPSNSSEIFPDMLKFAEACDIPAARVTKVSDLRAAIQTMLDTPGPYLLDVIVPHQEHVLPMIPSGAAFKDTITEGDGRRAY

SEQ ID NO: 7346 - protein, 669 aa, Amaranthus tuberculatus
  misc_feature (89)..(89): Xaa can be any naturally occurring amino acid
  misc_feature (414)..(414): Xaa can be any naturally occurring amino acid
  misc_feature (592)..(592): Xaa can be any naturally occurring amino acid
  unsure (1)..(669): unsure at all Xaa locations
MASTSSNPPFSSFTKPNKIPNLQSSIYALPFSNSLKPASSSSILRRPLQISSSSSQSPKPKPPSATITQSPSSLTDDKPSSFVSRFSPXEPRKGCDVLVEALEREGVTDVFAYPGGASMEIHQALTRSNIIRNVLPRHEQGGVFAAEGYARATGRVGVCIATSGPGATNLVSGFADALLDSVPLVAITGQVPRRMIGTDAFQETPIVEVTRSITKHNYLVLDVEDIPRIVKEAFFLANSGRPGPVLIDIPKDIQQQLVVPNWEQPIKLGGYLSRLPKPTFSANEEGLLDQIVRLVGESKRPVLYTGGGCLNSSEELRKFVELTGIPVASTLMGLGAFPCTDDLSLQMLGMHGTVYANYAVDKADLLLAFGVRFDDRVTGKLEAFASRAKIVHIDIDSAEIGKNKQPHVSICGDXKVALRGLNNILESRKGKVKLDFSNWREELNEQKKKFPLSFKTFGDAIPPQYAIQVLDELTKGDAIVSTGVGQHQMWAAQFYKYRNPRQWLTSGGLGAMGFGLPAAIGAAVARPDAVVVDIDGDGSFIMNVQELATIRVENLPVKIMLLNNQHLGMVVQWEDRFYKANRAHTYLGNPSXSSEIFPDMLKFAEACDIPAARVTKVSDLRAAIQTMLDTPGPYLLDVIVPHQEHVLPMIPNGAAFKDTITEGDGRRAY

SEQ ID NO: 7347 - protein, 671 aa, Amaranthus tuberculatus
MASTSSNPPFSSFTKPNKIPNLQSSIYALPFSNSLKPTSSSSSSILRRPLQISSSSSQSPKPKPPSATITQSPSSLTDDKPFSFVSRFSPDEPRKGCDVLVEALEREGVTDVFAYPGGASMEIHQALTRSNIIRNVLPRHEQGGVFAAEGYARATGRVGVCIATSGPGATNLVSGFADALLDSVPLVAITGQVPRRMIGTDAFQETPIVEVTRSITKHNYLVLDVEDIPRIVKEAFFLANSGRPGPVLIDIPKDIQQQLVVPNWEQPIKLGGYLSRLPKPTFSANEEGLLDQIVRLVGESKRPVLYTGGGCLNSSEELRKFVELTGIPVASTLMGLGAFPCTDDLSLQMLGMHGTVYANYAVDKADLLLAFGVRFDDRVTGKLEAFASRAKIVHIDIDSAEIGKNKQPHVSICGDIKVALQGLNKILESRKGKLKLDFSNWREELNEQKKKFPLSFKTFGDAIPPQYAIQVLDELTKGDAIVSTGVGQHQMWAAQFYKYRNPRQWLTSGGLGAMGFGLPAAIGAAVARPDAVVVDIDGDGSFIMNVQELATIRVENLPVKIMLLNNQHLGMVVQWEDRFYKANRAHTYLGNPSKSSEIFPDMLKFAEACDIPAARVTKVSDLRAAIQTMLDTPGPYLLDVIVPHQEHVLPMIPTGAAFKDTITEGDGRRAY

SEQ ID NO: 7348 - protein, 159 aa, Rosa chinensis
MSDEEHHFESKTDAGASKTYPQQAGTIRKNGYIVIKNRPCKVVEVSTSKTGKHGHAKCHFVGIDIFTAKKLEDIVPSSHNCDVPHVNRTDYQLIDISEDGFVSLLTENGNTKDDLRLPTDDNLLTQIKDGFAEGKDLVVSVMSAMGEEQICALKDIGPK

SEQ ID NO: 7349 - protein, 665 aa, Nicotiana tabacum
MSSPTPGASPAPTSPPAPPTNSTSPPPTAVASPPALPAQAPPPTSPTPPATTPPPTASASPPPPSTSAPSSSTPPPPTTQSTPEPSGSPPSPPSPPSGSSPSPPAPSGSGRSPAGPRGGGGSSTSSPASDEGSSGVSTGLVVGIAIGGVLILAVLSLLFICCSRRKKRRNHGPVEYYPPAQPPPMGYKADPYGDPVHHWQHNAPSPADHVVSIPPKPSPPPAGASRPPHSPVTASSLQPPPPPPYMSSSGASSNYSGFDPLPPPSPGMVLGFSKSTFTYEELVRATDGFSNANLLGQGGFGYVHRGVLPNGKEVAVKQLKAGSGQGEREFQAEVEIISRVHHKHLVSLVGYCITGSQRLLVYEFVPNNTLEFHLHGKGRPPLDWPIRLKIALGSAKGLAYLHEDCQPKIIHRDIKAANILVDFNFEAKVADFGLAKLTSDVNTHVSTRVMGTFGYLAPEYASSGKLTEKSDVFSYGIMLLELITGRRPVDSSQTYMDDSLVDWARPQLTRALEDEKFDSLIDPRLGNDYNHNEVARMVACAAACVRHSARRRPRMSQVVRALEGDVSLSDLNEGIRPGHSTVYSSHGSSDYDASQYNEDMKKFRKMALGSQEYGSTGQYSNPTSEYGLYPSGSSSEGQPTREMEMGRTKKDSRGFSGSKGFIGSS

SEQ ID NO: 7350 - protein, 1143 aa, Lotus japonicus
MASASRRGGGGGGSGSGSVVERGKEEEKLKRGGGGGGGESVMMRKAIAQYTEDARLHAVYEQSGESFDYSHSLRVTVESVPEQQITAYLARIQRGGYIQPFGCMIAVDDPSFRLLAYSDNARDMLGITPQSVPSIDDDSSSSSFALGTDVRSLFSPSSAVLLDKAFAAREISLMNPLWIHSRTSGRPFYGILHRVDVGVVIDLEPARSDDPALSIAGAVQSQKLAVRAISQLQSLPGGDVKLLCDAVVQSVRELTGYDRVMVYKFHEDEHGEVVAESKRADLEPYMGLHYPATDIPQASRFLFKQNRVRMIVDCHASPVGVVQDEALMQPLCLVGSTLRAPHGCHAQYMANMGSIASLVMAVIINGNDDDAVGVGGRSSMRLWGLVVCHHTSARCIPFPLRYACEFLMQAFGLQLNMELQMAAQSLEKRVLRTQTLLCDMLLRDSPAGIVTQSPSIMDLVKCDGAALYCQGSYYPLGVTPSESQIRDIIDWLLAFHGDSTGLSTDSLADAGYPGASSLGDAVCGMAVAYITEKDFLFWFRSHTAKEIKWGGAKHHPEDKDDGQRMHPRSSFKAFLEVVKSRSSPWDNAEMDAIHSLQLILRDSFKEDEHSDSKAVVNTHLAELELQGVDELSSVAREMVRLIETATAPIFAVDVEGHINGWNAKVSELTGLPVEEAMGKSLVRDLVYKESEETVDRLLSRALKGEEDKNVEIKLRTFGPEHQDKAVYVVVNACSSKDYTNNIVGVCFVGQDVTGQKVVMDKFINIQGDYKAIVHSPNPLIPPIFASDDNTCCLEWNNAMEKLTGWGRADVIGKLLVGEVFGSCCQLKGSDAITKFMIVLHNALGGQDTDKFPFSFLDRHGKYVQTFLTANKRVSIDGQIIGAFCFLQIVSPELQQALKVQKQQEKNCFARMKELAYICQEVKNPLSGIRFTNSLLEATGLTDEQKQFLETSAACEKQMLKIIRDVDLESIEDGSLELERGEFLLGNVINAVVSQVMVLLRERNLQLIRDIPEEIKTLAVYGDQLRIQQVLADFLSNVVRYAPSPDGWVEIHVYPKIKQISDGLTLLHAEFRLVCPGEGLPSELVQDMFHNSRWVTQEGLGLCMSRKILKLMNGEVQYIREAERCYFFVLLELPVTRRSSKGVN

SEQ ID NO: 7351 - protein, 239 aa, Pyrus x bretschneideri
MGRGRVELKRIENKINRQVTFAKRRNGLLKKAYELSVLCDAEVALIIFSNRGKLYEFCSSSSMLKTLERYQKCNYGAPETNVSTREALELSSQQEYLKLKARFEALQRNQRNLLGEDLGPLSSKDLESLERQLDMSLKQIRSTRTQCMLDQLTDLQRKEHMLNEANKTLKERLFEGYHALQLNANADEYGRQQAQAAQGDVFFHPLDCEPTLQIGYQNDPISVVTAGPSLSNYMGGWLP

SEQ ID NO: 7352 - protein, 345 aa, Solanum lycopersicum
MERYEIQKDIGSGNFGVAKLVKDKWSGELFAVKYIERGKKIDEHVQREIMNHRSLRHPNIIRFKEVFLTPAHLAIVMEYASGGELFERICSAGRFSEDEARFFFQQLISGVSYCHSMQICHRDLKLENTLLDGSSTQCLKICDFGYSKSAALHSQPKSTVGTPAYIAPEVLSRKEYDGKIADVWSCGVTLYVMLVGAYPFEDPDDPRNFKKTITRILSVQYSIPYYVRVSKECNHLLSRIFVADPEKRITIEEIKKHPWFLKNLPKEFMKKGEEASLVQMNSEEKPLQSIEEALAIIQEARKPGEGSKASDYFVNSSISMDLDDFDTDADLDDEIDTSGDFVCAL

SEQ ID NO: 7353 - protein, 357 aa, Pisum sativum
MSSLSDLINFNLSDSTEKIIAEYIWVGGSGIDIRSKARTLPGPVSDPAKLPKWNYDGSSTNQAPGKDSEVILYPQAIFKDPFRRGNNILVICDVYTPAGEPLPTNKRYNAAKIFSHPDVAAEVPWYGIEQEYTLLQKDINWPLGWPIGGYPGKQGPYYCGIGADKAYGRDIVDAHYKACLFAGINISGINGEVMPGQWEFQVGPSVGISAGDEIWAARYILERITEIAGVVVSFDPKPIPGDWNGAGAHANFSTKSMRENGGYEVIKKAIEKLGLRHKEHIAAYGEGNERRLTGKHETADINVFSWGVANRGSSIRVGRDTEKDGKGYFEDRRPASNMDPYVVTSMIAETTILWKKP

SEQ ID NO: 7354 - protein, 356 aa, Phaseolus vulgaris
MSLLSDLINLNLSDTTEKVIAEYIWIGGSGLDLRSKARTLPGPVKNPSELPKWNYDGSSTGQAPGQDSEVIIYPQAIFKDPFRRGNNILVICDAYTPAGEPIPTNKRHNAAKIFSNPDVVAEEPWYGIEQEYTLLQKEVNWPVGWPVGGFPGPQGPYYCGVGADKAFGRDIVDAHYKACVYAGINISGINGEVMPGQWEFQVGPAVGISAGDELWVARYILERITEVAGVVLSFDPKPIKGDWNGAGAHTNYSTKTMRNDGGYEEIKSAIQKLGKRHKEHIAAYGEGNERRLTGRHETADINTFLWGVANRGASIRVGRDTEKAGKGYFEDRRPASNMDPYVVTSMIADTTILWKP

SEQ ID NO: 7355 - protein, 355 aa, Glycine max
MSLLSDLINLNLSDTTEKVIAEYIWIGGSGMDLRSKARTLPGPVSDPSELPKWNYDGSSTGQAPGEDSEAIYTHKPFQDPFRRGNNILVICDAYTPAGEPIPTNKRHAAAKVFSHPDVVAEVPWYGIEQEYTLLQKDIQWPLGWPVGGFPGPQGPYYCGVGADKAFGRDIVDAHYKACIYAGINISGINGEVMPGQWEFQVGPSVGISAGDEIWAARYILERITEIAGVVVSFDPKPIPGDWNGAGAHTNYSTKSMREDGGYEVIKAAIDKLGKKHKEHIAAYGEGNERRLTGRHETADINTFLWGVANRGASVRVGRDTEKAGKGYFEDRRPASNMDPYVVTSMIADTTILWKP

SEQ ID NO: 7356 - protein, 352 aa, Frankia alni
MSYQAEYIWIDGTEPEPLMRSKTRIIKDGKEPEIWGFDGSSTNQAPGSNSDCVLRPVFETPDPIRGGDNRLVLCEVQLTDFTPPTNTRAAALGVAERYADMSPMFGIEQEYTFFKDGRPYGWPEVGYPAPQGPYYCGVGGSKMPGRQIVERHTQACLDAGLAIEGTNAEVMMGQWEFQIGVLPAPAIGDQIWLGRWLLHRIAEDYGVEVSFAAKPIPGDWNGAGAHTNFSTKQTMEGWDAIVTCCEALGTRVTEHVTHYGKGIEDRLTGKHETAPWNKYSWGASDRGASVRIPWAVEKAKKGWLEDRRPNANMDPYLVTALMIDTCCSALAGDKPTLFVPSQTTPAPAEASV

SEQ ID NO: 7357 - protein, 434 aa, Hordeum vulgare
MQVRRDDDGAGGCAGDAVPGGGEGQDGVPARQPAGRVWGVSRAARATSGFKVLALGPETTGVIQRMQQLLDMDTTPFTDKIIAEYIWVGGSGIDLRSKSRTISKPVEDPSELPKWNYDGSSTGQAPGEDSEVILYPQAIFKDPFRGGNNILVICDTYTPQGEPIPTNKRHMAAQIFSDPKVTSQVPWFGIEQEYTLMQRDVNWPLGWPVGGYPGPQGPYYCAVGSDKSFGRDISDAHYKACLYAGIEISGTNGEVMPGQWEYQVGPSVGIDAGDHIWASRYILERITEQAGVVLTLDPKPIQGDWNGAGCHTNYSTLSMREDGGFDVIKKAILNLSLRHDLHIAAYGEGNERRLTGLHETASISDFSWGVANRGCSIRVGRDTEAKGKGYLEDRRPASNMDPYTVTALLAETTILWEPTLEAEALAAKKLALKV

SEQ ID NO: 7358 - protein, 430 aa, Pisum sativum
MAQILAPSTQWQMRITKTSPCATPITSKMWSSLVMKQTKKVAHSAKFRVMAVNSENGTINRVEDLLNLDITPFTDSIIAEYIWIGGTGIDVRSKSRTISKPVSHPSEVPKWNYDGSSTGQAPGEDSEVILYPQAIFKDPFRGGNNILVVCDAYTPAGEPIPTNKRHRAAEIFSNPKVEAEIPWYGIEQEYTLLQTNVKWPLGWPVGGYPGPQGPYYCAAGADKSFGRDISDAHYKACIYAGINISGTNGEVMPGQWEYQVGPSVGIEAGDHIWASRYILERITEQAGVVLTLDPKPIEGDWNGAGCHTNYSTKSMREDGGFEVIKKAILNLSLRHKIHIEAYGEGNERRLTGKHETASINDFSWGVANRGCSIRVGRDTEKNGKGYLEDRRPASNMDPYVVTALLAESTLLWEPTLEAEALAAQKIALKV

SEQ ID NO: 7359 - protein, 356 aa, Phaseolus vulgaris
MSLLSDLINLNLSESTEKIIAEYIWVGGSGMDLRSKARTLPGPVDDPAKLPKWNYDGSSTDQAPGDDSEVILYPQAIFKDPFRRGNNILVICDVYTPAGEPLPTNKRYDAAKIFSHPDVVAEVPWYGIEQEYTLLQKDVNWPLGWPLGGYPGPQGPYYCGVGADKAYGRDIVDAHYKACVYAGINISGINGEVMPGQWEFQVGPSVGISAGDEVWAARYILERITELAGAVVSFDPKPIPGDWNGAGAHSNYSTKSMREEGGYEVIKKAIEKLGLRHKEHIAAYGKGNERRLTGRHETADINTFSWGVANRGSSVRVGRDTEKQGKGYFEDRRPASNMDPYVVTSMIAETTILWKP

SEQ ID NO: 7360 - protein, 340 aa, Streptomyces hygroscopicus
MSIKAEYIWIDGTQPTAKLRSKTKILSDGSRLPRWGFDGSSTNQAEGHASDLVLEPVFSCPDPIRGGDHLLVLCEVLHTDLTPHPSNTRALLRPVAERFAGQEPIFGIEQEYTFLKGDRPLGFPEGGGYPAPQADYYCGVGADAIFGREIVEKHLDLCLAAGLGLSGINAEVMPGQWEFQVGALPPLEVSDHMWVARWLLHRVAEEFGVTASLDAKPAKGDWNGAGAHTNFSTRAMREGYDPIITACEALGQDDKPLEHVRQYGTGIEDRLTGAHETAPWDAYSYGASDRGASVRIPWQVEVEKKGYIEDRRPNANVDPYVVTRLMVDTCCTELARREQI

SEQ ID NO: 7361 - protein, 315 aa, Lupinus angustifolius
MSLLSDLINLNLSDTTEKIIAEYIWVGGSGVDLRSKARTLSGPVNDPSKLPKWNYDGSSTGQAPGKDSEVILWPQAIFKDPFRRGNNILVICDTYTPSGKPIPTNKRHAAAKIFSHPDVAAEEPWFGIEQEYTLLQKDIHWPIGMALGGFPGPQGPYYCGTGAEKAFGRDIVDSHYKACLYAGINISGINAEVMPGQWEFQVGPSIGISAGDELWVARYILERITEIAGVVLSLDPKPIPGDWNGAGAHTNYSTKSMRNDGGYEVIKQAIEKLEKRHNEHIAAYGEGNERRLTGRHETADISTFSWGVANRGASI

SEQ ID NO: 7362 - protein, 355 aa, Pisum sativum
MSLSDLINLDLSGTTEKIIAEYIWIGGSGLDLRCKARTLPGPVTDPSELPKWNYDGSSTGQAPGQDSEVILYPQAIFKDPFRRGNHILVMCDAYSPAGEPIPTNKRHAAAKVFSHPDVVAEETWYGIEQEYTLLQKDINWPLGWPAGGYPGPQGPYYCSVGADKAFGRDVVEAHYKACLFAGINISGINGEVMPGQWEFQVGPSVGISAGDEIWVARYILERITEVAGVVLTFDPKPIKGDWNGAGAHTNYSTKSMREDGGYEIIKKAIEKLGKRLPEHISAYGEGNERRLTGKHETADINTFSWGVANRGASVRVGRDTEKEGKGYFEDRRPASNMDPYVVTSMIAETTILLKP

SEQ ID NO: 7363 - protein, 356 aa, Phaseolus vulgaris
MSSISDLVNLNLSDSTERVIAEYIWVGGSGMDMRSKARTLSGPVKDPSKLPKWNYDGSSTGQAPGQDSEVILYPQTIFRDPFRRGNNILVMCDAYTPAGEPIPTNKRHNAAKIFSNPEVVAEEPWYGIEQEYTLLQKDVQWPVGWPLGGFPGPQGPYYCGIGANKAFGRDIVDSHYKACLYAGINISGINGEVMPGQWEFQVGPSVGISAADELWVARYILERITEIAGVVLSFDPKPIQGDWNGAGAHTNYSTKSMRNDGGYEVIKKAITKLEKRHKEHIAAYGEGNERRLTGKHETADMNTFIWGVANRGASIRVGRDTEKAGKGYFEDRRPASNMDPYVVTSMIAETTLLWKP

SEQ ID NO: 7364 - protein, 429 aa, Phaseolus vulgaris
MAQILAPSTQWQMRFTKSSRHASPITSNTWSSLLMKQNKKTSSAKFRVLAVKSDGSTINRLEGLLNLDITPFTDKIIAEYIWIGGTGIDVRSKSRTISKPVEHPSELPKWNYDGSSTGQAPGEDSEVILYPQAIFKDPFRGGNNILVICDAYTPAGEPIPTNKRHRAAEVFSNPRVIAEVPWFGIEQEYTLLQTNVNWPLGWPVGGYPGPQGPYYCSAGADKSFGRDISDAHYKACLFAGINISGTNGEVMPGQWEYQVGPSVGIEAGDHIWASRYILERITEQAGVVLSLDPKPIEGDWNGAGCHTNYSTKSMREDGGFEVIKKAILNLSLRHKEHISAYGEGNERRLTGKHETASINTFSWGVANRGCSIRVGRDTEKNGKGYLEDRRPASNMDPYVVTSLLAESTLLWEPTLEAEALAAQKLALKV

SEQ ID NO: 7365 - protein, 234 aa, Dunaliella salina
KAQEPWFGIEQEYTLLNSVTKWPLGWPKGGYPAGQGPYYCSVGAGRSIGRDIPEVHYRCCLHAGIQISGVNGEVLPSQWEYQVGPVEGIAMGDQMWMSRYLMYRVAELFNVEVTFDPKPIPGDWNGSGGHVNFSNRQPESPPAGKQSRSSAKKLGKRHRWHIAAYGEGNERRLTGKHETSSMNDFSWGVANRGCSIRVGRMVPVEKCGYYEDRRPSSNLDPYVVTRLLVETTLL

SEQ ID NO: 7366 - protein, 356 aa, Medicago sativa
MSLLSDLINLDLSETTEKIIAEYIWIGGSGLDLRSKARTLPGPVTDPSQLPKWNYDGSSTGQAPGEDSEVIIYPQAIFKDPFRRGNNILVMCDAYTPAGEPIPTNKRHAAAKIFSHPDVVAEVPWYGIEQEYTLLQKDINWPLGWPVGGFPGPQGPYYCGAGADKAFGRDIVDSHYKACLYAGINISGINGEVMPGQWEFQVGPSVGISAGDEIWVARYILERITEVAGVVLSFDPKPIKGDWNGAGAHTNYSTKSMREDGGYEVILKAIEKLGKKHKEHIAAYGEGNERRLTGRHETADINTFLWGVANRGASIRVGRDTEKAGKGYFEDRRPSSNMDPYVVTSMIADTTILWKP

SEQ ID NO: 7367 - protein, 356 aa, Nicotiana plumbaginifolia
MSLLSDLINLNLSDSTEKIIAEYIWIGGSGMDLRSKARTLSGPVTDPAKLPKWNYDGSSTGQAPGEDSEVILYPQAIFKDPFRRGNNILVMCDAYTPAGEPIPTNKRHAAAKIFSNPDVVAEEPWYGIEQEYTLLQRDINWPLGWPIGGFPGPQGPYYCGTGADKAFGRDIVDSHYKAYLYAGINISGINGEVMPGQWEFQVGPSVGISAGDEVWVARYILERIAEIAGVVVSFDPKPIPGDWNGAGAHTNYSTKSMREDGGYEVILKAIEKLGLKHKEHIAAYGEGNERRLTGKHETANISTFKWGVANRGASVRVGRDTEKAGKGYFEDRRPASNMDPYVVTAMIADTTIIGKS

SEQ ID NO: 7368 - protein, 262 aa, Geobacillus stearothermophilus
MKRKTVWKIWITLALIALLSITALAGCSSESSTTNKEDGAKSTETSAGTNTLEKIKKRGKLIVGVKYDLNLFGLKNPETGKVEGFDIDIAKGLAKKILGDENKIELKEVTSKTRIPMLNNGEIDAIIGTMTITEERKKEVDFSDVYFMAGQSLLVKKDSKINSVKDLKKGMTVLTAKGSTSAQNIRKVAPEVNVLEFENYAEAFTALKAGQGDALTTDNALLWGMAKQDPNYRVLDETFSKEPYGIGSAKETKNYCKSLTNT

SEQ ID NO: 7369 - protein, 502 aa, Citrus sinensis x Poncirus trifoliata
MARATSLSCSADLLAGFLGPNATNASSAASLICSQLEAINNKFTDTAYAVDSTYLLFSAYLVFSMQLGFAMLCAGSVRAKNTMNIKLTNVLDAAAGGLFYYLFGFAFAFGTPSNGFIGRHNFALKSFPTSNFDYSYFLYQWAFAIAAAGITSGSIAERTQFVAYLIYSSFLTGFVYPVVSHWFWSVDGWASASNTGDLLFGSGVIDFAGSGVVHMVGGIAGLWGAYIEGPRIGRFDRSGQSVLRGHSASLVVLGTFMLWFGWYGFNPGSFTKILSAYNTGSYYGQWSAIGRTAVTTTLAGCTAALTTLFGKRILSGHWNVTDVCNGLLGGLAAITAGCSVVEPWAAIVCRFGAAVVLIACNKLAEKAKYDDPLEAAQLHGGCGAWGVIFTALFAKEKFVNEVYPGKPGRPYGLFMGGGGKLLAAHVIQILVVAGWVSATMGPLFFVLHKLKLLRISPEDEMAGMDLTRHGGFAYVYHDDDDVQSNGIQLRKIEPTATTPSSV

SEQ ID NO: 7370 - protein, 461 aa, Gibberella fujikuroi
MLSATALVLLMVPGVGFFYSGLARRKSALSLIWLSVMSAAVTTFQWFFWGFSLTFSHTAGPFIGDLANFGFRDVLARPSVGSAHLPDMLFAVYQGMFSALTVALATGAVAERGRMLPCIIFTFVWATVVYDPIACWTWNPSGWSNKMGGLDFAGGTPVHIASGSAALAYSMMLGKRSGHGTHELNYRPHNATHIVTGTVFLWVGWFGFNAGSALSANLRGVMAAIVTNLAACVGGITWCLLDYRLERKFSTVGFCSGVVAGLVCITPGSGYVPPWSAVIFGAVGAAGSNYATKVKFLLGIDDALDIFAVHGIGGLIGNICTAFFATPSIAALDGYSHIKGGWVERHWAQMGYQLADSICGGPYSFVVTCSILFLMNLIPGLRLRVDSDAEVQGIDDAEIGEFAYDYVELTREVVSDIDNESGSRYSADPTAFHHYEKNHIPMIDARMFGGQPAHAPVTFPQ

SEQ ID NO: 7371 - protein, 96 aa, Aegilops umbellulata
MEHQGHGTGEKKGIMENIKEKLPGGQGDHQQTAGTHGQHGHTGMTGTEMHDTTATGGTHGQQGHTGTTGTGTHGTGVIGEKKSLMDKVKEKLPGQH

SEQ ID NO: 7372 - protein, 356 aa, Pisum sativum
MSLLSDLINLDLSGTTEKIIAEYIWIGGSGLDLRCKARTLPGPVTDPSELPKWNYDGSSTGQAPGQDSEVILYPQAIFKDPFRRGNHILVMCDAYSPAGEPIPTNKRHAAAKVFSHPDVVAEETWYGIEQEYTLLQKDINWPLGWPAGGYPGPQGPYYCSVGADKAFGRDVVEAHYKACLFAGINISGINGEVMPGQWEFQVGPSVGISAGDEIWVARYILERITEVAGVVLTFDPKPIKGDWNGAGAHTNYSTKSMREDGGYEIIKKAIEKLGKRHAEHISAYGEGNERRLTGKHETADINTFSWGVANRGASVRVGRDTEKEGKGYFEDRRPASNMDPYVVTSMIAETTILLKP

SEQ ID NO: 7373 - protein, 88 aa, Phillyrea latifolia
MPGSLEPLDVGVQIPYHFRCPISLELRDPVTVCTGQTYDRTSIESWVACGNTTCPVTRSTLTDFTLIPNHTLRQLIQDWCVANRSFGV

SEQ ID NO: 7374 - protein, 106 aa, Phillyrea latifolia
LNLRPRQVEVWFQNRRARTKLKQTEVDCEYLKRCCETLTEENRRLQKELQELRALKTSQPFYMQLPATTLTMCPSCERVATTPFLFWHHQHHHHNPSTTHHHHHHH

SEQ ID NO: 7375 - protein, 160 aa, Phillyrea latifolia
RGRGMGDDGYRWRFYGQKVVKGNPPPGGYYKCTYPACPVRGHVAHDLTPGVITPYEGPHNHDVPGAARGSGSHSINTPMPSKNNGNGGAGGTAIRPGAMTHHNNNNAMNKKGIHNLRLPSSEGQAFFTGEMLQPRGGSGPGYSGPGNAMLYMSLCQNALS

SEQ ID NO: 7376 - protein, 513 aa, Gibberella fujikuroi
MSYVIPGPPTAFNGTNEELGGDSTTENLNQWYQSGDQAFIILSACLVLLMVPGIAFLYSGLARRKSALSMLWVVMMSFSVIVFQWYFWGFSLAFSTTSNNPFIGDLKHFGLMKVWGAPSVGSPLIPALLYSFYQMMFCAVTGALTVGAVAERGRVVPSMVFIFFWATLVYCPLAYWVWNPNGWGFVNGVLDYAGGVPVEIGSGMSAFAYSWVLGRRNEKMMMNFRPHNISLITLGTMFLWFGWLGFNGGSSFGANFRAVMACWNSCLTAMFAAMTWCVLDFRLARKWSMVGWCSGTISGLVAATPASGFLDPWASIILGVVAGVACNFATKIKFLVRIDDSLDVFAEHGVGGIVGLIFNAFFARGSIIGLDGVNTGASGGFMDGNYVIIGWQIAAIVAASAYAFVMSAIIAKIIDFIPGLKLRASEEAELLGMDDDQHGEFSYDYVEVRRDFLAWSPHRGEPAEDGDVLEPTHGIQEHQSMMNPSESDDVRKTPSLNTPDVVAPDAVINEKHA

SEQ ID NO: 7377 - protein, 154 aa, Medicago arabica
WIEETSQTDVEAIQKMREELLLQNQENEALESWSGDPCMIFPWKGITCDDSNSSSIITKLDLSSNNLKGTIPSIVTEMTNLQILNLSHNHFDGYIPSFPPSSLLISVDLSYNDLTGQLPESIISLPHLKSLYFGCNQHMSDEDTAKLNSSLINT

SEQ ID NO: 7378 - protein, 175 aa, Medicago cancellata
ARSWIEETNQKDLELIQKTREELLLHNQENEALESWSGDPCMIFPWKGITCDDSTGSSIITMLDLSSNNLKGAIPYFVTKMTNLQILNLSHNQFDSLFPSFPPSSLLISLDLSYNDLDGRLPESIISLPHLKSLYFGCNPYMKDEDTTKLNSSLINTDYGRCKGKKPKFGQVFVM

SEQ ID NO: 7379 - protein, 165 aa, Medicago ciliaris
QTDVEAIHKMREELLLQNQENEALESWSGDPCMIFPWKGITCDDSNGSSIITKLDLSSNNLKGTIPSIVTEMTNLQILNLSHNHFDGFIPSFPPSSLLISVDLSYNDLTGQLPESIISLPHLKSLYFGCNQHMSDEDTAKLNSSLINTDYGRCKAKKPKFGQVFV

SEQ ID NO: 7380 - protein, 171 aa, Medicago sativa subsp. caerulea
  misc_feature (16)..(16): Xaa can be any naturally occurring amino acid
  misc_feature (25)..(25): Xaa can be any naturally occurring amino acid
  misc_feature (59)..(60): Xaa can be any naturally occurring amino acid
  unsure (1)..(171): unsure at all Xaa locations
WIEETNQKDLELIQKXREELLLHNXENEALESWSGDPCMIFPWKGITCDDSTGSSIITXXDLSSNNLKGAIPYFVTKMTNLQILNLSHNQFDSLFPSFPPSSLLISLDLSYNDLDGRLPESIISLPHLKSLYFGCNPYMKDEDTTKLNSSLINTDYGRCKGKKPKFGQVFV

SEQ ID NO: 7381 - protein, 176 aa, Medicago constricta
SCGRSWIEETNQKDLELIQNMREELLLHNQENEALESWSGDPCMIFPWKGITCDDSTGSSIITKLDLSSNNLKGAIPYFVTEMTNLQILNLSHNQFEMLFPEFPPSSLLISLDLSYNDLSGRLPESIISLPHLKSLYFGCNPYMKDEDTTKLNSSLINTDYGRCKGKKPKFGQVFV

SEQ ID NO: 7382 - protein, 171 aa, Medicago doliata
WIEETSQTDVEVIQKMREELLLQNQENEALESWSGDPCMLYPWKGITCDDSNGSSIITKLELSSNNLKGAIPSTVTEMTNLQILNLSHNHFDGYIPSFPPSSLLISVDLSYNDLTGQLPESIISLSHLKSLYFGCNQHMSDEDTAKLNSSLINTDYGRCKAKKPKFGQVFV

SEQ ID NO: 7383 - protein, 166 aa, Medicago sativa subsp. falcata
AYEILQARSWIEETNQKDLELIQKTREELLLHNQENEALESWSGDPCMIFPWKGITCDDSTGSSIITMLDLSSNDLKGDIPYFVTKMTNLQILDLSYNDLDGRLPESIISLPHLKSLYFGCNPYMKDEDTTKLNSSLINTDYGRCKGKKPKFGQVFVIGAITSGSL

SEQ ID NO: 7384 - protein, 153 aa, Medicago granadensis
IEETRQTDVEAIQKMREELLLQNQENEVLESWSGDPCMIFPWKGITCDDSNGSSIITKLDLSSNNLKGTIPSIVAEMTNLQILNLSHNHFNGFIPSFPPSSLLISVDLSYNDLTGQLPESIISLPHLKSLYFGCNQHMSDEDTAKLNSSLINT

SEQ ID NO: 7385 - protein, 171 aa, Medicago laciniata
WIEETNQTDVEVIQKMREELLLQNQENEALESWSGDPCMIFPWKGITCDDSTGSSIITKLDLSSNNLKGTIPSIVTEMTNLQILNLSHNHFDGFIPSFPPSSLLISVDLSYNDLTGQLPESIISLPHLKSLYFGCNQHMSDEDTTKLNSSLINTDYGRCKAKKPKFGQVFV

SEQ ID NO: 7386 - protein, 174 aa, Medicago marina
GRSWIEETNQKDLELIQKMREELLLHNRENEALESWCGDPCMIFPWKGITCDDSTGSSIITKLDLSSNNLKGAIPYFVTEMTNLQILNLSHNQFDMSFPEFPPSSLLISLDLSYNDLSGRLPESIISLPHLKSLYFGCNPYMKDEDTTKLNSSLINTDYGRCKGKKPKFGQVFV

SEQ ID NO: 7387 - protein, 176 aa, Medicago minima
GCGRSWIEETSQTDVEAIQKMREELLLQNQENEALESWSGDPCMIYPWKGVTCDDSNGSSIITKLDLSSDNLKGAIPSIVTKMTNLQILNLSHNHFDGFIPSFPPSSLLISVDLSYNDLTGQLPESIISLPHLKSLYFGCNQHMSDEDTAKLNSSIINTDYGRCKAKKPKFGQVFV

SEQ ID NO: 7388 - protein, 174 aa, Medicago monantha
ARSWIEETNQKDVEDIQKMREELLQQNPENEALESWSGDPCMLFPWKGITCDDSNGSSIITKLDLSSNNLKGYIPSIVTEMTNLQILNLSHNHFDWFNPSFPPSSLLISVDLSYNDLTGQLPESIISLPHLKSLYFGCNQDMSDEDTEKLNSSLINTDYGRCKAKKPKFRQVFV

SEQ ID NO: 7389 - protein, 176 aa, Medicago monspeliaca
CGRSWIEETNQKDVEDIQKMREELLQQNPENEALENWSGDPCMLFPWKGITCDDSNGSSIITKLDLSSNNLKGYIPSIVTKMTNLQILNLSHNHFDWSIPSFPPSSLLISVDLSYNDLTGQLPESIISLPHLKSLYFGCNPDMSDEDTAKLNSSIINTDYGRCKTKKPKFRQVFVM

SEQ ID NO: 7390 - protein, 170 aa, Medicago murex
IEETSQTDVKVIQKMREELLLQNQENEALESWSGDPCMLFPWKGITCDDSNGSSIITKLELSSNNLKGAIPSTVTEMTNLQILNLSHNHFDGYIPSFPPSSLLISVDLSYNDLTGQLPESIISLPHLKSLYFGCNQHMSDEDTAKLNSSLINTDYGRCKAKKPKFGQVFV

SEQ ID NO: 7391 - protein, 172 aa, Medicago noeana
SWIEETNQTDVEVIQKMREELLLQNQENEALESWSGDPCMIFPWKGITCDDSTGSSIITTLDLSSNNLKGTIPSTVTEMTNLQILNLSHNHFDGFIPSFPPSSLLISVDLRYNDLTGQLPESIISLPHLKSLYFGCNQHMSDEDTAKLNSSLINTDYGRCKAKKPKFGQVFV

SEQ ID NO: 7392 - protein, 179 aa, Medicago polymorpha
ARSWIEETSQTDVEVIQKMREELLLQNQENEALESWSGDPCMLFPWKGITCDDSNGSSIITKLELSSNNLKGAIPSTVTEMTNLQILNLSHNHFDGYIPSFPPSSLLISVDLSYNDLTGQLPESIISLPHLKSLYFGCNQHMSDEDTAKLNSSLINTDYGRCKAKKPKFGQVFVMELYN

SEQ ID NO: 7393 - protein, 173 aa, Medicago rigidula
RSWIEETNQTDVEVIQKMREELLLQNQENEALESWSGDPCMIFPWKGITCDDSTGSSIITKLDLSSSNLKGAIPSIVTEMTNLQILNLSHNHFDGFIPSFPPSSLLISVDLSYNDLTGQLPESIISLPHLKSLYFGCNQHMSDEDTAKLNSSLVNTDYGRCKAKKPKFGQVFV

SEQ ID NO: 7394 - protein, 170 aa, Medicago rigiduloides
WIEETNQTDVEVIQKMREELLLQNQENEALESWSGDPCMIFPWKGITCDDSTGSSIITKLDLSSSNLKGAIPSIVTEMTNLQILNLSHNHFDGFIPSFPPSSLLISVDLSYNDLTGQLPESIISLPHLKSLYFGCNQHMSDEDTAKLNSSLINTDYGRCKAKKPKFGQVF

SEQ ID NO: 7395 - protein, 151 aa, Medicago rugosa
ETNQKDLEVIQKMREKLLLHNRENEALESWSGDPCMIFPWKGITCDDSTGSSIITKLDLSSNNLKGAIPYFVTEMTNLQILNLSHNQFDMLFPSFPPSSLLISLDLSYNDLNGRLPESIISLPHLKSLYFGCNPYMKDEDTTKLNSSLINT

SEQ ID NO: 7396 - protein, 170 aa, Medicago sauvagei
IEETNQTDVEVIQKMREELLLQNQENEALESWSGDPCMIFPWKGITCDDSTGSSIITKLDLSSNNLKGTIPSIVTEMTNLQILNLSHNHFDGFIPSFPPSSLLISVDLSYNDLTGQLPDSIISLPHLKSLYFGCNQHMSDEDTAKLNSSLINTDYGRCKAKKPKFGQVFV

SEQ ID NO: 7397 - protein, 170 aa, Medicago secundiflora
IEETNQKDVEAIQKMREELLLQNQENEALESWSGDPCMIFPWKGITCDDSTGSSIITKLDLSSNNLKGTIPSIVTEMTNLQILNLSHNHFDGFIPSFPPSSLLISVDLSYNDLTGQLPESIISLPHLKSLYFGCNQHMNDEDTTKLNSSLINTDYGRCKAKKPKFGQVFV

SEQ ID NO: 7398 - protein, 175 aa, Medicago shepardii
ARSWIEETNQTDVEVIQKMREELLLQNQENEALESWSGDPCMIFPWKGITCDDSTGSSIITKLDLSSNNLKGTIPSIVTEMTNLQILNLSHNHFDGNIPSFPPSSLLISVDLSYNDLTGQLPESIISLPHLKSLYFGCNQHMSDEDTAKLNSSLINTDYGRCKAKKPKFGQVFVM

SEQ ID NO: 7399 - protein, 174 aa, Medicago tenoreana
ARSWIEETSQTDVEAIQKMREELLLQNQENEALESWSGDPCMIYPWKGVTCDDSNGSSIITKLDLSSNNLKGTIPSIVTEMTNLQILNLSHNHFNGFIPSFPPSSLLISVDLSYNDLTGQLPESIISLPHLKSLYFSCNQHMSDEDTAKLNSSIINTDYGRCKAKKPKFGQVFV

SEQ ID NO: 7400 - protein, 171 aa, Medicago tornata
WIEETNQKDLEVIQKMREELLLHNQENEALESWSGDPCMIFPWKGITCDDSTGSSIITKLDLSSNNLKGAIPSIVTKMTNLQILNLSHNQFDMLFPSFPPSSLLISLDLSYNDLSGWLPESIISLPHLKSLYFGCNPSMSDEDTTKLNSSLINTDYGRCKAKKPKFGQVFV

SEQ ID NO: 7401 - protein, 530 aa, Pseudotsuga menziesii
MTHDNNTHSSSSSSSRNIIEEDRQRAEDREGGIGAGAGMRIIVPLQGVVQGRGGFVLGSVIPCALFYFLQLYLKRHRSERTPREELPPPPRRPSKSPPKPVLASSRALHVIEDENSPYNRGWQAYKENPYDAESNPDGVIQMGLADNQLSWDLIEGWLKSHPEVSSWEGMSDTSLSLRGIAGYQEIHGMPILRSVMAEFMCELMNAPFNPDQIVLTAGATAAIEILGFCLAEPGNAFLVPSPYYPSFCKDVKWRAGVELVPVPCRSSDNFNVTINALDRAFSQTKKRGLTVRALLISNPCNPVGNTLDSATLSMLLGFATEKNIHLVCDEIYAGSVYDSPNFTSIANVVDSGEFDKSRVHIIYGTSKDLCLPGFRVGVIYSYNDKVCKAAQKMSRFCSISSQTQHLLTAMLSDTKFMQLYKIENQRRLGERYHVLTKGLEEAGMKYVKSNAGLYCWVDMGYLMPSYSEKGELNLWDKLLNEAKINVTPGSACYCIEPGWFRICFGTLSSQDLTVALQRIQEFSKRCKRSP

SEQ ID NO: 7402 - protein, 679 aa, Kluyveromyces lactis
MFSARKSSVGWLVSSLAVFYVLLAVIMPIALTGSQSSRVVARAAEDHEDYGTVIGIDLGTTYSCVAVMKNGKTEILANEQGNRITPSYVSFTDDERLIGDAAKNQAASNPKNTIFDIKRLIGLQYNDPTVQRDIKHLPYTVVNKGNKPYVEVTVKGEKKEFTPEEVSGMILGKMKQIAEDYLGKKVTHAVVTVPAYFNDAQRQATKDAGAIAGLNILRIVNEPTAAAIAYGLDKTEDEHQIIVYDLGGGTFDVSLLSIENGVFEVQATAGDTHLGGEDFDYKLVRHFAQLFQKKHDLDVTKNDKAMAKLKREAEKAKRSLSSQTSTRIEIDSFFNGIDFSETLTRAKFEELNLALFKKTLKPVEKVLKDSGLQKEDIDDIVLVGGSTRIPKVQQLLEKFFNGKKASKGINPDEAVAYGAAVQAGVLSGEEGVEDIVLLDVNALTLGIETTGGVMTPLIKRNTAIPTKKSQIFSTAVDNQKAVRIQVYEGERAMVKDNNLLGNFELSDIRAAPRGVPQIEVTFALDANGILTVSATDKDTGKSESITIANDKGRLSQDDIDRMVEEAEKYAAEDAKFKAKSEARNTFENFVHYVKNSVNGELAEIMDEDDKETVLDNVNESLEWLEDNSDVAEAEDFEEKMASFKESVEPILAKASASQGSTSGEGFEDEDDDDYFDDEL

SEQ ID NO: 7403 - protein, 411 aa, Cuphea palustris
MVAAAASSACFPVPSPGASPKPGKLGNWSSSLSPSLKPKSIPNGGFQVKANASAHPKANGSAVTLKSGSLNTQEDTLSSSPPPRAFFNQLPDWSMLLTAITTVFVAPEKRWTMFDRKSKRPNMLMDSFGLERVVQDGLVFRQSFSIRSYEICADRTASIETVMNHVQETSLNQCKSIGLLDDGFGRSPEMCKRDLIWVVTRMKIMVNRYPTWGDTIEVSTWLSQSGKIGMGRDWLISDCNTGEILVRATSVYAMMNQKTRRFSKLPHEVRQEFAPHFLDSPPAIEDNDGKLQKFDVKTGDSIRKGLTPGWYDLDVNQHVSNVKYIGWILESMPTEVLETQELCSLTLEYRRECGRDSVLESVTSMDPSKVGDRFQYRHLLRLEDGADIMKGRTEWRPKNAGTNGAISTGKT

SEQ ID NO: 7404 - protein, 411 aa, Cuphea palustris
MVAAAASAAFFSVATPRTNISPSSLSVPFKPKSNHNGGFQVKANASAHPKANGSAVSLKSGSLETQEDKTSSSSPPPRTFINQLPVWSMLLSAVTTVFGVAEKQWPMLDRKSKRPDMLVEPLGVDRIVYDGVSFRQSFSIRSYEIGADRTASIETLMNMFQETSLNHCKIIGLLNDGFGRTPEMCKRDLIWVVTKMQIEVNRYPTWGDTIEVNTWVSASGKHGMGRDWLISDCHTGEILIRATSVWAMMNQKTRRLSKIPYEVRQEIEPQFVDSAPVIVDDRKFHKLDLKTGDSICNGLTPRWTDLDVNQHVNNVKYIGWILQSVPTEVFETQELCGLTLEYRRECGRDSVLESVTAMDPSKEGDRSLYQHLLRLEDGADIVKGRTEWRPKNAGAKGAILTGKTSNGNSIS

SEQ ID NO: 7405 - protein, 395 aa, Acidovorax sp. JS42
MTHREVFVVSTARTAIGTFGGSLKDVPNTQLATTAVKAAIARAGIAPDAVGHVVMGNVIPTDTKDAYLSRVAAIDAGCPIETPAFNVNRLCGSGLQAIISAAQAIGYGDCDVAVGGGSESMSRGPYFDQGARWGTRMGDSKSIDYMLGILHDPWQKMHMGITAENVAERYQISREMQDQLALASQQRAAAAIAAGYFKEQIVPVEIATRKGTVLFQEDEHVRAATTLDVLAGMKPAFKKEGGTVTAGNASGINDGASAVVLVAGDRLQALNVKPLARLVGYAHAGVDPAYMGIGPVPATQKVLQRTGLKVQDMDVIEANEAFAAQACAVVQELGLQPSKVNPNGSGISLGHPVGATGAIITTKAIAELHRTGGRYALVTMCIGGGQGIAAIFERV

SEQ ID NO: 7406 - protein, 392 aa, Acidovorax sp. JS42
MNIPVIVDAIRSPMARAKPDGALAEVHPVDLLSQVLEQLVARNQLDPGTVDDVICGCVSQAGEQAGTPGRLAWLAAGLPAHVPSTTIDRKCGSSQQAVHFAAQAIMAGTQDIVIACGVESMSRVPMGSSRMGKNTTGPRFDARYAPGLVGQGVSADLVAAQWGLDRTALDTYAARSHQRAHAAQSSGGFAREIVGIDTPAGRVTADETIRAGTTVEKLAGLKAVFENEELSARFPQIQWATTAGNASQMTDGASAMLIMSEERAQQLGLRPRARFVAFDVVGDDPLYMLTAPIPATQRVLAKAKMKLDDIHHYEINEAFASVPLAWQKELKADGERLNPRGGAIALGHPLGASGLRLMTTMLHALEDSGQRYGLQSMCEAGGMANATIIERL

SEQ ID NO: 7407 - protein, 402 aa, Acidovorax sp. JS42
MRRAAIVTPVRTPVGTFGGSLRPVPVEELAATTVRAVVERSGIDPARIDDVVMAQSYANSEVPCVGRWAALQAGLPVSVPGMQLDRRCGGGLQAIVTASMMVQSGAADVVIAGGVESMSNIEYYSTDMRWGARSGNVRFYDRLDRGRERSQPVERFGKISGMIETAENLARDYGITREEADAFALRSHQRAAAAWEAGRFADEIVPVQVPQRKGEPVTFARDEGFRADVTPESLGKLRVLMPNGTVTAGNASQQNDASAACLIVAEDKLAELGLTPMATLVGWAAAGCEPSHMGIGPVPAVKKLLARLNLRIDDMDLVELNEAFACQVLAVLKGWEWQDQDAIAHKLNVNGSGISLGHPIGATGVRILATLLHELQRRKGRYGLETMCIGGGQGIAAVFERV

SEQ ID NO: 7408 - protein, 353 aa, Acidovorax sp. JS42
MSYQLTIEPLGATIEVEEGQTVLDAVLRQGLYLPHACGHGLCGTCKVQVCDGEVDHGAANPFALMDFERDDGKTLACCATLQADTTIEADIDEEPDARVIPVRDFAATVSRIEDLTPTIKAIHLQLDKAIDFQAGQYVQVEIPGVGSRAFSIANHPADVVATKGIELNVRKLPGGAGTTWLHEQLKAGDRLRVAGPYGRFFVRESACQPMLFMAGGSGLSSPRSMIVDLLSRGCTLPITLVYGQRSHEELYYDAEFRALAEQHANFTYVPALSHEPEGSDWDGFRGFVHEAAKAHFGGSFAGQKAYLCGPPPMIEACISTLMQGRLFERDIYTEKFLSAADAQAARSPLFRQV

SEQ ID NO: 7409 - protein, 306 aa, Acidovorax sp. JS42
MTTLTLIGAPTDVGASVLGASMGPDALRIAGIARAMQARGFDVRDQGNLAGPGNPQAEPASGFRHLAEVAAWNRAVYEATHAALQAGQLPLLMGGDHCLAIGSISAVAQHCRARGRRLKVLWFDAHADANTPESSPSGNLHGMPVACLLGHGPAQLTRLAGPEDPPALQPGQITLIGVRSVDATEKRFVNEHGIEVYDMRTIDELGMRAVMQAALADVDQDTHLHVSFDMDCLDPSVAPGVGTGVRGGPTYRETQLCMEMLADCGALGSADLVELNPALDVRNQTAELAVDLLESLFGKSTLMRPQ

SEQ ID NO: 7410 - protein, 309 aa, Acidovorax sp. JS42
MSSSINPRTYDPVPARRVAFLGLGVMGYPMAGHLASAGHTVTVYNRTATKSEAWCAEFKGVATVKHAKTPREAAQGADIVFCCVGNDDDLRSVVLGADGAFAGMQQGAVFVDHTTASAAVARELYGAARTLGLQFIDAPVSGGQAGAQNGQLTVMCGGDAAAFDAVRPTAMAFSRAFTRIGDSGAGQLAKMVNQICIAGLVQGLSEAIAFGQHAGLDMPLVLDVIGKGAAQSWQMDNRGKTMVEGRFDFGFAVDWMRKDLGLVLDEAKRNGARLPVTALVDQFYADVQLAGGNRWDTSSLITRLAPKKD

SEQ ID NO: 7411 - protein, 472 aa, Acidovorax sp. JS42
MSRLVVISNRLADPRKSAAGGLAVALGDALARTGGLWFGWSGTVTADGTPGEGALQTHQAGNVTLATVDLCQADHAAYYQGYANSVLWPVLHYRLDLADFSANYSEGYRRVNQMFARKLLPLLREDDVIWVHDYHLIPLAAELRALGCRQRIGFFLHVPVPPPLILAALPQHEWLMRSFFAYDLVGLQSEADVVHFTRYMVNEAHAQELDGQRLRAFNATVRVAAFPIGIDVQEFQRLGRAPDAVHTCEALRAEYSRRQLLLGIDRLDYSKGIPHRVRAFRQLLERYPENEHSATLVMIASPSRDDVHAYADLRQELEGLCGAINGDYGDLDWMPLRYIHRTVARKRVPGLCRAARVGLVTPLRDGMNLVAKEYVVAQEPEDPGVLVLSRFAGAAEQLKEALLVNPYDTQGMADAIQTALRMPLSERQWRHERLMERIQRQDVHWWRNSFLQALRDEAAPPVTAPAGAVAAT

SEQ ID NO: 7412 - protein, 191 aa, Acidovorax sp. JS42
MKLAILDRDGTLNALGDGFIASPDEWVPVPGALEAVARLNHAGWHVVVATNQPGLGRGLFDAQTLVAIHAKMHRQLATLGGRIDAVFYCPHTESEQCRCRKPAPGLMEQIRDRYGAEGQEILVAGSSAAHLQAASELGAQLHMVCTGRSAHLDPRQSLPPGWPAGTRAHASLGALADFIAPQNGASLPVAL

SEQ ID NO: 7413 - protein, 398 aa, Acidovorax sp. JS42
MKQIQDAYIVAATRTPIGRSHKGFFRNYRPDDLLATTLKSALAQVPGLDPASIEDIICGCAIPEAQQGLNVARIGAVLAGLPTSVGGITVNRFCASGLSAVAMAADRIRVGEAEVMIAAGVESMSMVPMMGNAPSLSPSIFERDGDVGIAYGMGLTAEKVAQQWKVSREAQDAFALESHRRAIAAQQAGEFADEITPIEVTDRTANLETGEVIASTRTVSLDEGARPDTSLEGLAKLRTVFAARGTVTAGNSSQTSDGAGALILASESAVKRFGLTPLARFVSFASKGVPPSIMGIGPIEAIPAALRYAGLKQDDIGWYELNEAFAAQSLAVINTLGLDTAKVNPMGGAIALGHPLGATGAIRSATVVHALRRKQLKYGMVTMCVGMGQGAAGIFERV

SEQ ID NO: 7414 - protein, 299 aa, Acidovorax sp. JS42
MKKHLLAAAITVLAAGSAFAQANDTLAKIKSTGAVTLGVRESSGLGYTLGNGKYVGFHTEMGERILADIQKQLGLANMEIKYQPVTSQNRIPLVTNGTVDIECGSTTNNTARQKEVAFAVTTYVEEVRIAVNAKSGITGIKDLNGKTIVTTTGTTSVQTLRKHKRADGLNFKEVMGKDHADSFLMLETGRADAFIMDGSILAANISKSKNPSDFKIVGEVLSVEPIACMIRKDDPAFKKAVDDSIKRQIADGSLAKLYDKWFMQPIPPANVKIGLPLSEATKEAWANPNDKPMESYEVK

SEQ ID NO: 7415 - protein, 750 aa, Acidovorax sp. JS42
MRALLAPDENVQAAFEVDLTPDLRFAPGLLVLTERRLLARAGDAPAQEWPLAPGMALRLLDHGGVGTVELHDTDRRLALWRFTLGRHPQALHLQQRLDAQVRRLDSLQGAIAPEAQDVPRCAVCGTPLPPDSDECTACARQQAPQTSTWVLLRLWRFARPYKKQLAAGFALTLASTAASLVPPYMTIPLMDDILIPYQSGQQIPTGMVLLYLGGLLLAALLAWALGWARTYILALVSERIGADLRTTTYEHLMRLSLDYFGSKRTGDLMARIGSETDRINVFLSLNALDFATDVLMIVMTAAILFSINPWLALVTLVPLPFIAWLIHTVRDKLRTGFEKIDRVWSEVTNVLADTIPGIRVVKAFAQEKREADRFRAANQHNLEVNDKLNKTWSLFSPTVSLMTEVGLLVVWGFGIWLVARNQITVGVLAAFIAYIGRFYIRLDSMSRIVSVTQKAAAGAKRIFDILDHVSNVPDPVNPVKVDRVQGAIEMRDVGFRYGSRTVIKNLSLTIRPGEMIGLVGHSGSGKSTLVNLISRFYDVSDGAILVDDVDIRRMAVADFRRHIGLVLQEPFLFFGTIAENIAYGKPDATREEIVAAARAAHAHEFILRLPHGYDSLVGERGQGLSGGERQRVSIARALLIDPRILILDEATSAVDTETEKEIQKALDNLVQGRTTIAIAHRLSTLRKADRLVVMDRGEVVEVGPHDELMEKQGAYWRLYEAQARRAEEDAQAAGVRIEVREHSAHPAGNP

SEQ ID NO: 7416 - protein, 447 aa, Acidovorax sp. JS42
MKRITWAFWAFLLGLTALWLMADTLWPAQPGYFAPRTVWVQYSGVLVMGAMSLAMLLAVRPVWLERHLDGLDKMYRLHKWLGIAALAIGTVHWLWAKGTKWAVGWGWLTRPPRGPRPPAENLGLAEATLRDWRGLAEGVGEWAFYAAVLLIVLALVKRFPYRLFAKTHQLLAVAYLALVFHTVVLVQWSYWSQPIGWLLTMLVAAGTVSAVLVLTRRVGGRRTVQGRIVSLQPYPALRVLETRIRLDGLWPGHRAGQFAFVTSDPKEGAHPYTIASAWMPQDPCVTFITKALGDHTSRLPDRLRVGDHVTVEGPYGCFTFDDARPRQIWIGAGIGITPFIARMKQLAHGGSHSTRPIDLFHTTADHDPVALDKLRVDAQAAGVRLHLFVDAQDGRLDGERLRALVPEWRNASVWFCGPIPFASALRADLAAHGLPTQAFHQELFQMR

SEQ ID NO: 7417 - protein, 103 aa, Acidovorax sp. JS42
MYAVIKTGGKQYRVAAGEKIKVEQIAAEVGQEIVIDQVLAVGNGAELKVGTPLVSGATVKATVVAHGKHDKVRIFKLRRRKHYQKRQGHRQQFTELQIQAIAA

SEQ ID NO: 7418 - protein, 379 aa, Acidovorax sp. JS42
MRDGTLLRTLQRPGALFVNWIPMKFVDEAFIDVAAGDGGNGCVSFRHEKYKEFGGPNGGDGGRGGHVFAVADPNLNTLVDFRYSRRHEAKRGEHGMGSDMFGAAGADITLKMPVGTIISDADTGELLYELLTPGEVVTIAKGGDGGFGNLRFKSAINRAPRQKTPGWPGERKSLKLELKVLADVGLLGMPNAGKSTFIAAVSNARPKIADYPFTTLHPNLGVVRVGPEQSFVVADIPGLIEGASEGAGLGHQFLRHLQRTRLLLHVVDMAPFDESVDPVAQAKAIVAELKKYDTQLYEKPRWLVLNKLDMVPAEERAARVKDFVKRFKWKGPVFEISALTREGCEPLVQSIFQHVHAQQLAQNAPAEVDPRFAGEPPRG

SEQ ID NO: 7419 - protein, 109 aa, Acidovorax sp. JS42
MSDVQQRIDQLVKTNDILLFMKGNASFPMCGFSGRAVQILKACGVDPKNIATVNVLDDQEIRQGIKDYSHWPTIPQLYVKGEFIGGSDIMMEMYESGELQQVLGTGDAA

SEQ ID NO: 7420 - protein, 434 aa, Acidovorax sp. JS42
MHNDPLSCPAARAAWVFSSPLNLHAMAKTSLDKSKIKFLLLEGIHPSAVEVLRSAGYTQVEVLAGALEGEELRRKIADVHFIGIRSRTQLTADVFAHAHKLVAVGCFCIGTNQVDLNAARERGIAVFNAPYSNTRSVAELVLAEAILLLRGVPEKNAAAHRGGWLKSATNAYEIRGKTLGIVGYGSIGTQLSVLAEALGMHVIFHDVVHKLPLGNARQVGSLHELLGQADIVTLHVPELPSTQWMIGAAEIAAMKPGGILINASRGTVVEIDPLAQALKGGNLLGAAVDVFPVEPKSNKDEFVSPLRGLDNALLTPHIGGSTMEAQANIGLEVAEKLVRYSDNGTSTSSVNFPEVALPEHAGKHRLLHVHHNVPGVLSQINSILSDNHINIAAQYLQTNEKIGYVVIDLDARSSDLALEKLAQVPGTIRSRVLY

SEQ ID NO: 7421 - protein, 321 aa, Acidovorax sp. JS42
MQTNPPDFVVFTGNANPGLAAEIAQNLGTTLGAIDVGRFSDGEVTVEIKQNVRARDVFVVQSTCAPTNENLMELLIMVDALKRASAERISAVIPYFGYARQDRRPRSTRVPISAKVVANMLQAVGVARVLTMDLHADQIQGFFDIPVDNIYASPVLLGDLNQKKYENLIVVSPDVGGVVRARALAKQLGTDLAIIDKRRPKANVSEVMHVIGDIEGRNCVIMDDMIDTAGTLVKAAEVLKERGAKNVYAYCTHPIFSGPAIERIAQGTALDEVVVTNTIPLSDAAKGCSKIRQLSVAPLIAETIQRIAKGESVMSLFSDQA

SEQ ID NO: 7422 - protein, 600 aa, Acidovorax sp. JS42
MARSTNAQKRPQDMRHLIRELAPFLRPYRIHLAGAMAFLLLAALATLAFPTALRQLIDGAISAATPGGKGVGAPALRTHFAVLFAVAVALGLASAARYYLMSWLGERVTADLRNAVYAHVLRQSPEFFETTQTGEVLSRLTADTTLVQTVVGSSLSMGLRNAVLGAGALGMLIWSTPYVMALAFGAIVAIVLPSMWIGRRVRRLSRASQDRVADASAIAAEVLGAIPVVQSYTAEAREAARFAAATESALRAALRRSGARAALMAFIIIASAALLLWGLYLGAQAVVAGTLSAGQLGQTILYAMFLAGAVAVLGEVYGDLLRAAGAMERLMELLATRPTLAAPSRPAMPRATDLSIEFTGVGFSYPSRPVPPALRHFDLRLLPGETVALVGSSGAGKSTVFQLLQRFYDVSEGRITLGGVDLRDMDPQVLRSHIGVVPQDAEIFSASALDNIRYGDPQASRHAVEAAARAAFAHEFIDALPQGYDTFLGEHGVRLSGGQRQRIAIARALLKNAPVLLLDEATSALDAHSERAVQLALDTALRQHSRQRITLVIAHRLATVQHADRIVVMDHGSIVEQGRHEDLLHQGGVYARLAALQFSR

SEQ ID NO: 7423 - protein, 769 aa, Acidovorax sp. JS42
MTQPLSAAEAALREAALEYHRNMTRGKIAVTPTKPLSNQRDLSLAYSPGVAYPCLDIQADPTKAFDYTSRGNLVGVITNGTAVLGLGDIGPLAGKPVMEGKGCLFKKFAGVDVFDIELDARDPDKIIEIVAALEPTLGGINLEDIKAPECFYIERELSKRMNIPVFHDDQHGTAIISSAALLNGLELVGKQIDQVKVAVSGAGAAAIACVGVMVGLGVKVENIFMCDSKGVIYEGRPGGFDESKARYAQKTDARTLADAVNGADVFLGCSAPGVLTAEMVKTMADKPIILALANPEPEIRPELAKAVRPDCIIATGRSDYPNQVNNVLCFPYIFRGALDCGATKITEAMKLACVRQIAALAKENISEEVAAAYAGQELTFGPDYLIPTPFDSRLILKIAPAVAQAALESGVASRPIEDMEAYKESLSRFVYQTGILMRPVINAAKTLPDAQKRVAYADGEDERALRAAQFAIDDRIAHPILIGRPAVIAARIAKAGLRMQPGKDVEICDPSDDPRFRQYWEAYHQLMKRDGATPEVAKAAVRRSNTIIAALMVKLGDADAMICGLVGTYETHLERIHSILGHAPGVQQYAALNALMTTNNGTLFIADTYVNEDPTAEQLADIAWSSVQEVQRFGIPPKVAFLSHSSFGSSKRASARKMRAARDLFVARHPEIECDGELHGDAALEPKIRNNYLPDSTLTGSANLLICPNIDSANILYNVLKTTTSGGVTVGPILMGTSATAYILTPAATVRRVLNMTALAVASSAARRK

SEQ ID NO: 7424 - protein, 613 aa, Acidovorax sp. JS42
MSTPVHHDTSAEAAKPSNFLRQIIESDLSHGVHAQKHWAGSPGDAAHHAAAAVDPAKIRTRFPPEPNGYLHVGHAKSICLNFGLARDYGGVCHLRFDDTNPEKEDQEYVDSIIDAVRWLGFDWKDPDGHENLYYASNYFGFMYRAAEYLIETGNAYVDEQTPEEMRANRGDFGKPGVDSPYRNRTPAENLARFREMRDGKLPDGAAVLRARIDMGHPNINLRDPAIYRIKHAEHHNTGNQWCIYPMYTFAHPIEDALECITHSICTLEFEDQRPFYDWLLDRLGEGGLIARPQPRQYEFARLNLTYVITSKRKLKHLVDSGIVSGWDDPRMPTIVGLRRRGYTPASIQMFCERIGVTKDYSWIDYGTLEGCLREDLESKAHRAMAVLDPLPLTLTNWAEVFGSDGHVEACSLPALPHAHEGQAVPERHFTLGREVWIEREDFAEVPPKGYKRLYPPRLGADGQMLPGNTVRLKGGYVIECTGCEKDAGGHVTRVLATVVPDTKSGTPGADSVKVKAAITWVGVQDGVQAEVRLYDRLFTDAQPDAGGKDFLALLNPDSLKVVTAYVEPSLAAAQPDDKFQFERFGYFVADRVDHSASRPVFNKITGLKDSWAK

SEQ ID NO: 7425 - protein, 422 aa, Acidovorax sp. JS42
MALIVHKYGGTSMGSTERIRNVAKRVAKWARAGHQMVVVPSAMSGETNRLLGLAKELTPSRITSAYHRELDMLAATGEQASSALLAIALQAEGMESVSYAGWQVPVRTDSSYTKARIESIDDKRVRADLDAGKVVIVTGFQGIDEGGNITTLGRGGSDTSAVAIAAAMKAHECLIYTDVDGVYTTDPRVVPEARRLTTLSFEEMLEMASLGSKVLQIRSVEFAGKYKVPLRVLSSFTSWDIDINEEAKSGTLITFEEDEQMEKAVVSGIAFTRDEAKISVIGVPDTPGIAYQILGAVADANIDVDVIIQNMGKEGKTDFSFTVNRNDYQRTIDLLKDKVLPQLGAEEIVGDAKIAKVSIVGIGMRSHVGVASKMFRALSEEGINIKMISTSEIKTSVVIDEKYVELAVRTLHKAFELDQAAA

SEQ ID NO: 7426 - protein, 239 aa, Acidovorax sp. JS42
MDDPILTIDEREAINSGRWFSSLSPSLRHDILRCSYVKRFKDGALIAARGDPPEEWIACARGAVRVSSTSISGKQITLTYVEPGIWFGDVAIFDGDRRTHDAYAHGDTTIVCVARADFRKILAQHTELYEAMLRLHARRIRQLFGLVEDLNTLPLRSRLAKQLLHLVRSYGVPSLSDGNEVRISLQLAQEELAQLLGASRQRVNQELKAMEREDAIRIEPGGLVIRDRDALMRISEANQ

SEQ ID NO: 7427 - protein, 419 aa, Acidovorax sp. JS42
MGRTCAPPRTQRGAALLSFQPPETDPMLSPEHRAIVQATVPLLETGGEALTTHFYKIMLSEYPEVRPFFNQAHQANGDQPRALANSVLMYARNIERLEALGPLVSQIVHKHVSLQIQPEQYPIVGSCLLRAIREVLGAEIATDAVIAAWAAAYQQLADILIGAEEKVYADTAAAPGGWRGARAFRVARKEAESAEITSFYLEPQDGGAVPGFVPGQYIGLRLVVDGQEIRRNYSLSAAPNGQFLRISVKREPGGVASGYLHEQVQVGDALDVFPPAGDFVLAEGSKPVVLISGGVGITPTLAMLDAALASQRPVHFIHFARNRAVHAFRDVVDAHQSRHAQLQRFYVYDEHAADTDAPHATGLLSNEQLAQWLPPSRDVDAYFLGPKPFMRRVKQQLRELGVPEAQTRYEFFGPAAALE

SEQ ID NO: 7428 - protein, 383 aa, Acidovorax sp. JS42
MTTPHFPSRLPNVGTTIFTVMSALAAEHQAVNLGQGFPDFHCDPQLVDAVTRAMQAGHNQYPPMAGVPALRQAVASKIEALHARQYCPNAEITITAGATQAILTAILACVQPGDEVIVLEPCYDSYVPNIALAGGVVVRVPLKPGSFRPDFAKIAAAITPRTRLLIINTPHNPSATVWTADDMRTLEELLAPTDVLLISDEVYEHMVFDGAEHQSAARFAGLAERAFIVSSFGKTFHVTGWKVGTVAAPAAMTAEFRKVHQFNVFTVNTPMQYGLADYLQNPAPYLQLPAFYQAKRDLFRQGLEGSRLKLLPSTGSYFQCVDISAVSDLNEADFCQWLTREIGVAAIPLSAFYGDGFDQRVVRFCFAKKDETLRAAIERLRTL

SEQ ID NO: 7429 - protein, 394 aa, Acidovorax sp. JS42
MSRDVVVVSAVRTAIGTFGGSLKDVPPTELGALVVRASLARAQVDGKDVGHVVFGHVVNTEPKDMYLSRVAAIQGGCAEGTPAFNVNRLCGSGLQAIVSAAQTIQLGDADVAIGGGAEVMSRAPYASLASRWGARMGDFKMIDMMIGALHDPFHNIHMGVTAENIAAKWGITREDQDRLAVESHNRAERATAAGYFKDQIVPVTLKSKKGEVQYATDEHFRAGATLDDMAKLKPVFAKDNGTVTAGNASGINDAAAAVVLMDAKAAQARGAKPLARLVAYAHAGVDPKYMGIGPVPATQLALKKAGLTVNDLDVIEANEAFAAQACAVTRDLGLDPAKVNPNGSGISLGHPIGATGALITVKALHELQRIQGRYALVTMCIGGGQGIAAIFERL

SEQ ID NO: 7430 - protein, 328 aa, Acidovorax sp. JS42
MTHRPPRILQYGRMPLPALDHELAAQFDVTVLSEQPDRAGFLAAHGADFECVVTSAAMGLPGDVVRALPRLRFVSSFGVGFDALDQAALQECGARVGYTPGVLDDCVADMAFALLLDAARSLSAADRFVRRGDWSRQRFGVHTRASGKRLGIFGMGRIGAAVARRAAGFDMQVGYHNRRPVEGSPHQYLPSLMELARWADFLVITAAGGDSTRHLVNAEVLDALGPQGFLVNVARGSVVDEAALAAALQQRRIAGAGLDVFEDEPHPLPALLTLDNVVLAPHIASGTQETRRAMADLVLQNLHSCLATGAPVQEVPWSAAAARQAHSA

SEQ ID NO: 7431 - protein, 295 aa, Acidovorax sp. JS42
MQIAFIGLGNMGAPMAINLHKAGHSVKAFDLSADALAKVRAEGLQVATSAQDAVQGAAAVVTMLPASQHVEGLFLGNGNLLASIAKGTLVIDSSTIAAATSQKVAKAAEALGIDFIDAPVSGGTGGAIAGTLTFMVGGTDAQLQRARPLLEKMGANIFHAGAVGAGQTAKICNNMLLGILMVGTSEAIALGVANGLDPKVLSEIMRRSSGGNWALEKYNPFPGVHENAPASKGYAGGFGTDLMLKDLGLAQENAIATKASTPLGGMARAIYAAHSIAGHGGEDFSSVIKMVQKKG

SEQ ID NO: 7432 - protein, 392 aa, Acidovorax sp. JS42
MEDIVIVSAVRTPVGKFGGALAKTPATDLGAIVIREALARARVAPDQVGEVIMGQVLAAGCGQNPARQAMMKAGLAQETPALTINAVCGSGLKAVMLAAQAVATGDSEIVVAGGQENMSLAPHVLNGSREGQRMGDWKLVDTMIVDGLWDVYNQYHMGITAENVARQHGITREMQDALALASQQKAAAAQDAGRFTDEIVPVTLAQKKGDPVIFAADEYLNRKTSAEALAGLRPAFDKAGSVTAGNASGINDGAAAVVVMSATKAAALGLQPLARIAAYGTSGLDPATMGMGPVPASRKTLQRAGWSVGDVDLFELNEAFAAQACAVNKELGIDPAKVNVNGGAIAIGHPIGASGCRVLVTLLHEMQRRDARKGLAALCIGGGMGVSMALER

SEQ ID NO: 7433 - protein, 406 aa, Acidovorax sp. JS42
MDMTPHFPIYLDYGATTPVDGRVVDAMIPWLREHFGNPASRSHAWGWEAEEAVEQARGHVADLIGADSREIVWTSGATESNNLAIKGAAHFYQGKGKHLITVKTEHKAVLDVMRELERQGFEVTYLDVQENGLLDIEEFKAAIRPDTILASVMFVNNEIGVIQDIPQLGALCREKGIIFHVDAAQATGKVEIDLTQLPVDLMSLASHKTYGPKGIGALYVRRKPRVRLEAQMHGGGHERGMRSGTLPTHQIVGMGEAFRLAKLEMAQDLEKVQALQKRLLDGLKDVEQVFINGDLERRVPHNLNMSFNFVEGESLIMGIKGLAVSSGSACTSASLEPSYVLRALGRSDELAHSSLRMTIGRFTTEEEIDYAISTIRHNVAKLRELSPLWEMYQDGVDLSTIQWAAH

SEQ ID NO: 7434 - protein, 337 aa, Acidovorax sp. JS42
MKILVVETEEWEHRACQRLLPGHKLVCRSNALGPDEPTADNDAEVITPFVHSRLTAEVLAQFPRLRLIATRSTGYDHIDLDYCRAHGIAVSNVPDYGDATVAEHAFALLLAVSRHIVTGAERTRRGDFSQHGLRGFELRGKTLGVLGTGRIGRRVIEIGKGFGMKIVAYDLFPDAAVAEHLGYEYLDLHVLLSQADVVTLHVPATPQTHHLLGDPEFAAMKKGAVLINTARGGVVDTSALVRALSARKLRAAGLDVLPAEPLIREEAEIFRNDRRNSDTDLRALLADHVLLRFSNVIVTPHVAYDTDEALRRILDTTIANIEAFARGQPRNLVLARD

SEQ ID NO: 7435 - protein, 580 aa, Acidovorax sp. JS42
MSSSLLHRWFPFLSWPRPTSALLQGEFWAGMTVGLMLVPQGVAYAALAGMPLVTGIYASLVPALVAVLWSSSTRLGVGPTALTSLLIGASITGLAEPGSAHWVTLAVWMALLSGLLQLLLGVVRFGWLLNLVTSPVLGGFTQAAALLILASQLPDLLGLRTSWSALAVSPSLHHFDLRALAFGLGSLGCLVLARRWRSSFPAAIVVIALAALISWAMGYADADGAVIGHLPSGLPTLYWPGWLSWEEMGALVMPVMVVTLVSFLETASSAKVEHHQGGTRWNENQDLIAHGMAKISSGLCGSFATSASFSRSAINLYAGAKSGWATLFALVLVLATLLWLTPALYHVPQPVLAAVVVTAVTSLIKPAGMFRLWRVSRVETAIGLVTFGLTLATAPRMYWGVLVGLLMNLSHFLYQRLHPRIIEVGLHPDGSLRDRHLWQLPPLAPELLALRMDAELDFASANALERRVTDELAQRPSIRHLCLFALPINRIDVTGVEAFIRLRTLLQSHGGTLHVTGIKLPVQHTLDNAGALAPGPNFALYRTDAEAIAALQRLAPPDAGKPASAPQSDTSGPAQPLPKL

SEQ ID NO: 7436 - protein, 404 aa, Acidovorax sp. JS42
MDIQFSTYYTLIFAAIVLLVGKFLVQRIRWLREFNIPEPVAGGLVAALISWGLNAAFDVRASFDTGLQTAFMLVFFSSIGLSANFLKLREGGMGLIVFLLVVVVFIGVQNSVGVALATALGLDPLIGLIAGSITLVGGHGTAGAWGSVLENDHGIPGAITLGIACATFGLVIGGLIGGPLAKWLIQRHGLKHPQGTGDAGALEAGTPNFEFPHKTRLITADAAIETMALFAGCLAFAEFMSQLTKGTALQLPTFVWALGGGVLIRNVLDYVFNFEVFDRAIDVFGNTGLSVYLAIALLSLKLWELAGLAGPLVIILGVQTLVMAAYAGFVTFRLMGSNYDAAVLCAGHCGFGMGATPTAVANMQAITNQYGASHKAFLIVPMVGAFFIDLVNAVAIQVFINVFG

SEQ ID NO: 7437 - protein, 326 aa, Acidovorax sp. JS42
MSKPHILVARKIFPEVIERLTQHFEVYANQDDNLWTQAELIERLQGKDGALLTGTQPVNAELLAACPQLRIAANMTVGYNNFDIAAMTAAGVQGTNTPDVLTETTADFGFALLMATARRITESEHYLRAGQWTRWSYDMFAGCEVHGSTLGILGMGRIGQGIAKRGAHGFGMNVIYHNRSRLSPALEAECKARYVGKDELLAQADHLVLVLPYTPESHHAIGAAEIARMKPTATLINIARGGIVDDAALAQALKERRIAAAGLDVFEGEPAVHPALLEVPNVVLTPHIASATVPTRLAMAQLAADNLVAFFDGRGALTPVNTPAKV

SEQ ID NO: 7438 - protein, 577 aa, Acidovorax sp. JS42
MTFEELKLAPAILRAVQEQGYDNPTPIQAQAIPAVLAGHDLLAGAQTGTGKTAAFTLPMLHRLAEGQAPRSQFGGKGVRALVLTPTRELAAQVEESVRGYGKYLDLNSTVIFGGVGMNPQIERIKRGVDVLVATPGRLLDLQQQGFMDLSTVEILVLDEADRMLDMGFIHDVKKVLALLPQSKQSLLFSATFSDDIRELANSLLKNPQSIQVTPRNTTVQRISQVIHPVGRGKKKQVLLHIIQEHDWSQVLVFTRTKFGANNVAEYLTKNGVSAMALHGNKSQSARTQALEGFKTGQIRALVATDIAARGIDIDDLPHVVNYEIPNVPEDYVHRIGRTGRAGREGHAVSLVCMDEEGFMMEIERFTKQEIPVQVIDGFGPDEGEKAEPIAMGRQTIWGGAGKPPSREVMQAAAKAARQEMMERIRTNKAATGGQRGSRQGGGQGEGQQRAGGQNGSGGRGGNAGNAGRPAGPRDQQRPQNTAGGRRRGGPAGAGNGGGNGGNRRFDDSQPRSENAHLGTQLGNIGIGPRHGSGRASQPDPMRTSVDSMADRGRRGGFGRGNGGGGGGRGPRGGGFGR

SEQ ID NO: 7439 - protein, 381 aa, Acidovorax sp. JS42
MHILAINAGSATLKFGVFDPASAMPVIESTIDHPAVDAAAFDEIKQQVRSSGVTSLNAIGHRVAHGGPFLREAAFVDAKVEHEIDQAAALAPQHNPVALAGIRIARERWPGVRHVAVFDTAFHAGMPEHASCYAVPQSWRAVGVRRFGFHGLSHQSVLAAVSSALMRPPSELRIVSCHIGNGASVCAIDRGRSVDTSMGMTALEGLVMGTRSGDLDPGVPGYVARTLGLSLVQIEAALYSDSGLKALSGVGSDLREIESRARDGHAAAQMALQVHAYRVRKYIGAYAAAMGGCDAVAFTGGAGENSPTLRCRILDGLEFLGLHLDEGRNRAFSPASEVSQLQASRSSVAVLAVRAREQWVIAHETARLLNGSVSAEHEIDG

SEQ ID NO: 7440 - protein, 339 aa, Acidovorax sp. JS42
MTEDHRLTVLFTDFAPTDQAAMQQRLPAHWHAHFVQREHLVASDTEDGAIEVLCVFVRTRVDESVLRMLPRLRLVATRSAGFDHIDLEACRKRGIAVCHVPDYGSASVAEHAFALLLGVTRHLTQAHERARQGSFAYRGLTGFELEGRTLGIVGLGRIGRHVARIAVGFGMDVLAYDPAFAASAARPAGVSLVTWEQVLQGSDILSLHVPATEATRHLIDARAFARMKPGVVVINTARGALIDEAALLRALDDGSVAAAGLDVLEQEGALSPEVPTGCGGLGCDTGWMASSPLLTHPRVLVTPHVGFNTTEAIARIFDETISNIAAWHAGRLRNRVDEP

SEQ ID NO: 7441 - protein, 448 aa, Acidovorax sp. JS42
MATILQHLPVGQKVGIAFSGGLDTSAALRWMKNKGALPYAYTANLGQPDEADYDEIPRKAMEYGAEKARLIDCRTQLAHEGIAAIQAGAFHISTGGITYFNTTPLGRAVTGTMLVAAMKEDDVHIWGDGSTFKGNDIERFYRYGLLTNPALKIYKPWLDQKFIDELGGRAEMSAFMTKEGFGYKMSAEKAYSTDSNMLGATHEAKDLEFLSSGIRIVNPIMGVAFWKPEVDVPAEEVSVTFDEGQPVAVNGKEIADPVELFLELNRIGGRHGLGMSDQIENRIIEAKSRGIYEAPGMALLHIAYERLVTGIHNEDTIEQYRLNGLKLGRLLYQGRWFDPQAIMLRETAQRWVARAVTGTVTLELRRGNDYSILNTESPNLTYAPERLSMEKVEDAPFSPLDRIGQLTMRNLDISDTRGKLGVYARAGLLSLGGNAALAQLEDGGAKKK

SEQ ID NO: 7442 - protein, 414 aa, Acidovorax sp. JS42
MTDLLHTRIPRRTVLQAATVGAVGVSPALRALVHAQGSDAPEKKEVRIGFIPLTDCASVVMASVLGIDQKYGVKIIPTKEASWAGVRDKLVNGELDFAHVLYGLVYGVHLGVGGPKKDMAVLMTLNHNGQAITLSRKLADKGAVNGAGLAQLMAKERREYTFAQTFPTGTHAMWLYYWLAAHGIHPLKDAKVITVPPPQMVANMRVGNMDGFCVGEPWNHRAIMDGIGITATTTQAIWKDHPEKVLGTTADFVQKYPNTARAVTAAILEASRWIDESLAHKNQMAETIAGKAYVNTSVDAINQRILGRYQDGLGKTWDDPDHMKFYGGGAVNFPYLSDGMWFLTQHKRWGLLKDHPDYLGVAKAINRTDVYRQAATAAKAPLPASDMRSHKLVDGVVWDGKDPAKYADGFKLKA

SEQ ID NO: 7443 - protein, 256 aa, Acidovorax sp. JS42
MTSTTPLLQVRDLRVRVGERTVLQSVSLDVPAGALVVLMGANGSGKSTLGMALAGHPSYQVQDGQALLDGQDLLQLPAHERARAGLFVSFQSPPDVPGVKNNLFIRTALNAVHEARGQQPLDAFDFLASAKQTAQELGLPQAMLGRPVNEGFSGGERKRNELLQLALLQPRLALLDEIDSGMDVDGVRAVVTLVQKLREQGTAFIVVSHYLHLIEQLQPDTVLRLDQGRIAETGDVELARRIARTGFARQPATAEA

SEQ ID NO: 7444 - protein, 695 aa, Acidovorax sp. JS42
MIERGGEGRSYMARLNRIVALYIAGLLGFVALMAWAEQRGLSRQWIGPIFLFLTVMAYAAIGVYGRTTDADEYYVAGRRIPPFYNGMAAAADWMSAASFISLSGALYLQGFSGTPEQPGGLAYLLGWTGGFVLVAMLIAPHLRAMNLYTVPDFFQVRFGGRWPRIIAALSAVLCSFTYVVAQIYGVGLIASRLTGVQFEIGIMLGLGGVLLCSFLGGMRAITWTQVAQYIVILLAFLIPVSWLAYKQLGNPVAPVVAGAQIGKITTLEGGLLASEVEQDVVAAYLQRAEDYKARLADVPAALAREREAARERIQRLRAQNADVGLIVAASRDLASMPRDEAAARDRWTREMRDNYERARAMGGLPRHSQAFAGDPQGTPQERQTFDDARRNFLALMFCLMVGTAGLPHLLTRYYTVPSVAGARASVAWSLFFIALLYLSAPALAVLVKFEVMNNLVGSSFDQLPNWMAQWARVDASLLSVEDVNGDGIVQFGEIRFGADLIMLATPEIGGLPYVISGLVAAGGLAAALSTADGLLLTISNALVRDLYHQETRRKASPEQRVILTKFTLLSVGLSAAFVAALKPSEILPMVSASFSIAASAFVPAMVMGIFWRGTTRQGAVAGMLAGLSVTVYYLLAQVDSVREWVPSALLVDGLWFGIHPISAGVFGVPVGLAVAWSVSLATRPGHVRPVPADGL

SEQ ID NO: 7445 - protein, 329 aa, Acidovorax sp. JS42
MKNVVHCAHSASSNAVTSTTRIPLLILNGMTPQHLDQIGQRFDVCYAPTPDARAQAIAQQGARFRAVLTIGAVGLTAQEIAAMPALELVCALGAGYENVALDAARARGIALANGAGTNDDCVADHAFGLLIAIVRGMRTLDQQCRAGVWRDAIGLPPNVSRKRLGIFGLGTIGHKIARRAAGFDMEIGYHNRSPRAEVPYRYFPSLQELAAWCDVLVCATPGGASTRHRVNAEVLQALGPQGYLVNIARGSVVDTQALAAALRERRIAGAGLDVYESEPAPPQELVGLDNVLLTPHVAGWSPEAVQASVDRFLANAEGHFAGRGVVSPI

SEQ ID NO: 7446 - protein, 867 aa, Acidovorax sp. JS42
MRLDKFTTKFQEALSDAQSLALGHDNAYIEPVHMLVAMLRQDEGPRALLQRAGANVPGLLAAAEAAVKRLPQVQGQDQVQGSPELGRVLQATEKEAIKRGDQFIASELFLLALVDSKGEAAQLAKDNGVTRKSLEAAIDAVRGGQKVDSAEAEGQREALKKYTLDLTERARQGKLDPVIGRDDEIRRVIQVLQRRSKNNPVLIGEPGVGKTAIVEGLAQRIVEGEVPETLKNKRVLVLDMAGLLAGAKYRGEFEERLKSVLKEVAHEEGRIILFIDEIHTMVGAGKAEGAMDAGNMLKPALARGELHCIGATTLDEYRKYIEKDAALERRFQKVLVDEPSVEDTIAILRGLQVRYEAHHGVDITDPAIVAAAELSHRYITDRFLPDKAIDLIDEAAAKIKIEIDSKPESMDKLERRMIQLKIEREAMKKETDEASQKRLQLIEEELGNVEREYADLEEVWKAEKASAQGSEQIRKDIDAIRTQIDDLKRKGDFNKVAELQYGTLPELEKRLKEAQDSEAGGTGTKHKLLRTQVGAEEIAEVVSRATGIPVAKMMQGEKDKLLHMEEKLHERVVGQDEAISAVANAIRRSRSGLSDPNRPLGSFLFLGPTGVGKTELCKALAGFLFDSEEHLVRIDMSEFMEKHSVARLIGAPPGYVGYEEGGYLTEAVRRKPYSVLLLDEVEKAHPDVFNVLLQVLDDGRLTDGQGRTVDFKNTVIVMTSNIGSHLIQAMVGQDAEDIKEAVWGELKGHFRPEFLNRIDETVVFHGLDAKHIEAIARIQLRLLEARLAKMDLTLQVSPAAMGELAKVGFDPVFGARPLKRAIQQRIENPLSKLLLEGRYPPKSVIPVDVDPVTDPGVFHFGEARPAG

SEQ ID NO: 7447 - protein, 410 aa, Acidovorax sp. JS42
MKPIRKSAKLNNVLYDVRGPIVDAAKQMEDEGQKIIKLNIGNLAPFGFDAPEEIQQDMIRNLPNSAGYSDSKGIFAARKAVMHYSQQQGVAGVTLDDIYLGNGASDLITMATNALLDDGDELLVPAPDYPLWTAAASLSGGRPVHYLCDEDNGWMPSLTDIRAKITPRTRGIVVINPNNPTGALYSDELLKGIVQIAREHNLVLFADEVYDKVLYDGVKHTAMASLSTDVVTLTFNSLSKAYRSCGYRAGWMVISGDKTAARDYIEGINMLANIKLGSNVPGQWAIQTALGGYQSINDLVKPGGRLCRQRDLAYELITAIPGVTCVKPQAALYMFPRLDPEMYPIADDRQFFMEVLRATRVMLVQGSGFNYPDNQHFRIVFLPHEDDLREAIGRLAGFLAAYRQRHAKAA

SEQ ID NO: 7448 - protein, 646 aa, Acidovorax sp. JS42
MGKIIGIDLGTTNSCVAIMEGNNTRVIENSEGARTTPSIIAYQEDGEILVGASAKRQAVTNPKNTIYAAKRLIGRKFDEKEVQKDIDLMPFTITRADNGDAWVEVRGQKLAPPQISAEVLRKMKKTAEDFLGEPVTEAVITVPAYFNDAQRQATKDAGRIAGLDVKRIINEPTAAALAFGLDKQDKGDRKIAVYDLGGGTFDVSIIEIADVDGEKQFEVLSTNGDTFLGGEDFDQRIIDYIIGEFKKEQGVDLSKDVLALQRLKEAAEKAKIELSNSSQTDINLPYITADASGPKHLNIKLTRAKLESLVEDLIERTIAPCRTAIKDAGISVSDIDDVILVGGMTRMPKVQEKVKEFFGKEPRKDVNPDEAVAVGAAIQGQVLSGDRKDVLLLDVTPLSLGIETLGGVMTKMITKNTTIPTKFAQTFSTAEDNQPAVTIKVFQGEREIASANKLLGEFNLEGIPPASRGTPQIEVTFDIDANGILHVGAKDKGTGKENKITIKANSGLSEDEIQKMVKDAELNAADDKKKLELVQARNQGEAAVHTVTKSLSEHGDKLDAGEKEKIEAAVKDLEAALKTEDKAAIDEKTTALMAASQKLGEKMYGDAQAAQGAEAAGAQAAASGSAGAAAQDDNVVDAEVKEVKKG

SEQ ID NO: 7449 - protein, 413 aa, Acidovorax sp. JS42
MHATGFSSHLKNALIATFLAAIVVLPIFTLHLERAGTRTIIVPEWRTLLWGCLAVFVVQLLRPLLGARLPKLSLPSLPQAAPGQRKVLIFVALMIAASWPFFAGRNAVDIATLAMIYVMLGLGLNIVVGFAGLLDLGFVGFYAVGAYTYALLFHWAGWSFWEALPLAGAAAALFGFVLGFPVLRLRGDYLAIVTLGFGEIIRLLLVNLTDWTGGPDGISSIPKPSVLGLEMTRSPTVEGGTTFHQFFGMEFNSLHMVIALYLMALLLAVVTLFISNRLIRMPIGRAWEALREDEIACRSLGLNPMKIKLSAFTLGAMFAGFGGAFFAARQGIVNPESFTFIESALILAIVVLGGMGSQLGVIVAAIILTVLPELAREFSEYRMLIFGLVMILMMVWRPQGLLPMKRHHVEVPA

SEQ ID NO: 7450 - protein, 337 aa, Acidovorax sp. JS42
MNATETVAGSADDSGASGQNDLEAMLAAARPGGDAPAEASGQRCGLIAIVGKPNVGKSTLMNALVGQKISITSRKAQTTRHRITGIRTRGATQFVFVDTPGFQTRHSTALNKSLNKTVMGAIGDVDLILFVVEAGSFTLADAKVLSLFKPGIPTLLIANKLDTVHRRAEIAPWLRDMQGRHPFAEFVPMSAKNKGDIERLYGICEKYLPEQPWWYAEDELTDRSEKFLASETVREKLFRFTGDELPYTSTVVIDKFDEEKSKQHKRFIRIAATIVVERDGHKAMVIGEKGERLKRISTEARQELEKLMDAKVFLEVWVKVRSGWADDEARVRSFGYE

SEQ ID NO: 7451 - protein, 698 aa, Acidovorax sp. JS42
MSNERSLSGGHGSGPQGQPPAAGSEAGPRFTFSAPVVVPSLLVLGLLLVLCGMFPQQAVRFFTGVQVWVVGHFDWFYSAAVTLFLVFLALVAASSFGDIRLGPDDAKPDFSFLSWTAMLFAAGMGIGLMYFGVGEPLQHYIKPPMAPAGTANAAREALQSTFFHWGFHAWAVYGTMGLVLAYFGFRYNLPLTMRSGLYPLLQQRINGPIGHTVDAFALVGTIAGIATTLGYGALQLAAGIGLLTGWDTNTALFRVAVVAVVAILAGLSAVTGLDKGVRVLSEFNLALSFVLLAFVIAFGPTVHLFQALSENVGNYFSGLVQMSLRTFAYEAPQQPGWYGDWTVLYWAWWISWSPFVGMFIARISRGRTVREFIVGVLLVPTAFNLLWMTAFGNSAIWIDTHVAQGALAQTAGNVDALLFRFFEYLPFVKIVSWLAIVLISVFFITSADSGAYVLDAIATRGNPRSPVWQRLFWAAVLGVTAAVLLVAGGLKALQALTLAAALPVAAIMVALCWGLWRAMQADRAHASQDLAMATNFWSGQHWRKRLEQIVHQPTRADVLRFMQATVLPAMRDVVAELGRRGVQAHVQDDTAVADPDAAQIRLTIPMPELRDFVYGVRPVRRKLPGFMLAEVAPQDKERLYVVEPITFFADGRSGYDIQYLRGEEVIADILRHYERYLSASASQSTQLLNRAPGHDGPV

SEQ ID NO: 7452 - protein, 244 aa, Acidovorax sp. JS42
MTPVSSHRPAGASSAAALPSLSSLPHFDPRTVPLVGVDDHLPAVPPHAQTPEALRLRFAAPPPWTPEVQREKKFAEREPAHAAVLVPIVLRDRPTVLLTERTAHLSTHSGQVAFPGGRTDPEDRDAAATALREAQEEVGLEPHWVEVLGNLSMYVTGTSFLVTPVVALVRPGFALQPNPYEVADVFEVPLDFLLNPAHHERHRLQWQGAQREWFAMPYQDGATTRYIWGATAGMLRNFYRFMMA

SEQ ID NO: 7453 - protein, 358 aa, Acidovorax sp. JS42
MKNHKIQWILGGIALLVLPLVLQYFGNAWVRIADLALLYVMLALGLNIVVGYAGLLDLGYVAFYAVGAYMFGLLASPHLADNFAWFAAQFPTGLHMSLWMVIPLALVLAACTGVLLGIPVLKLRGDYLAIVTLGFGEIIRIFMNNLDHPVNITNGPKGLGQIDSVKIFGLDLGKRLELFGYDINSVTLYYYLFLFLVLVTILVCYRLQDSRIGRAWMAIREDEIAAKAMGINTRNMKLLAFGMGASFGGVAGAMFAAFQGFVSPESFSLMESVMIVAMVVLGGIGHIPGVILGAVLLSALPEVLRYVAGPLQAMTDGRLDSSILRQLLIALAMIIVMLLRPRGLWPAPEHGKSLAQKS

SEQ ID NO: 7454 - protein, 126 aa, Acidovorax sp. JS42
MYRTLLKSKIHRVKTTHCELHYEGSCAIDEDLLEAANICENEQVHIWNVDNGERFVTYAIKGQRGSGMISVNGSAARRACVGDLLIIAAFAQVAEADVAAHQPQLVFVNDQNRQVELRHHVPTQAL

SEQ ID NO: 7455 - protein, 403 aa, Acidovorax sp. JS42
MSNARHAFICDAIRTPFGRYGGALSSVRTDDLGALPIKALMERNPGVDWAAVDDVLYGNANQAGEDNRNVARMSSLLAGLPIDVPGATINRLCGSGLDAVGSAARAIKSGEARLMIAGGVESMSRAPFVMPKAESAFSRSNAVYDTTIGWRFINKLMKAQYGVDSMPETAENVADDFKIEREAQDRMALASQQKAAAAMAAGYLAKEIVNVVIPQKKGDAVVVSQDEHPRATTLEALAKLKGVVREGGTVTAGNASGVNDGACALLLADEAAAQQYNLVPRARVVGMAVAGVAPRIMGFGPAPAVRKVLAQTGLTLDQMDVIELNEAFAAQGLAVLRDLGVADDDKRVNQWGGAIALGHPLGASGARLATTAVNQLHTLGGRYALCTMCIGVGQGIAVVLERV

SEQ ID NO: 7456 - protein, 396 aa, Acidovorax sp. JS42
MSQHHDPVVIVSAARTPMGAFMSDFADLAAHDLGGAAIKAAVERAGIAPEKVDEVLFGNCLMAGQGQAPARQAGFKGGLPQSTGAVTLSKMCGAGMEATILAHDQLIAGSRDVMVSGGMESMTNAPYLLKKGRGGYRMGHDKVYDHMMLDGLEDAYEAGRSMGTFGEDCAAKYSFTREQQDAFAIESVKRAQQATQSGAFATEITPVTVKTRKGDVTVSVDEGPAKAKLDKIAGLKPAFKKDGTITAASSSSINDGAAALVLMRQSTAQQLGCKPLAKIVAHATHSQAPEWFTTAPVGATQKALKKAGWTVQDVDLWEVNEAFAVVPMALMAELNVPHDKVNVHGGACALGHPIGASGARIIVTLIHALQRHGKKKGLATLCIGGGEGTAMAIELV

SEQ ID NO: 7457 - protein, 371 aa, Acidovorax sp. JS42
MLIGVPAETLAGETRVAATPETVKKLVAQGHTVRVQSGAGVCASVTDAGFAAVGAEITDAAGAWGCDLVLKVRAPQEAEAGLLRPGSTLVGMLNPFDAAGLHRLAAAGVTAYALEAAPRTTRAQSMDVLSSQANIAGYKAVVMAADRYQRFFPMLMTAAGTVKAARVVILGVGVAGLQAIATAKRLGAVIEASDVRPSVKEQVESLGAKFIDVPYETAEEKEAAEGVGGYARPMPQSWLDRQKAEVAKRVAQADVVITTALIPGRAAPVLVTQEMVESMKPGSVIVDLAAAQGGNCPLTQPGQTVVHHGVTLVGETNLPALVAADASALYARNVLDFLKLIINPEGALHLNRDDDIVVACLVAHEGAVTRA

SEQ ID NO: 7458 - protein, 213 aa, Acidovorax sp. JS42
MPRTASTAAPMPAAGRRIQTRRSGVHGKGVFAVQDIAEGEVLVEYTGEVISWQEAQDRHPHDPAQPNHTFYFHVDEDRVIDAKFGGNSSRWINHSCDPNCFADERDGRIFITALRNIRAGEELNYDYGLIIEERYTPKLKAEYPCWCGSKNCRGTLLAPKRGWAPPGLAPQPPTEKAGKAPKTRKAEEAKGSGKAGKPAKSAKPRQGRRSAQR

SEQ ID NO: 7459 - protein, 497 aa, Acidovorax sp. JS42
MNLLDPTVITFGIYLLAMLFIGWLGYRATTDLSDYILGGRSLGSFVTALSAGASDMSGWLLMGLPGAVYLSGLSEAWIAIGLTIGAYLNWRLVAARLRLYTERTNNALTLPDYLASRFEDGANVLRLVTTAVILVFFTIYCASGVVAGARLFESMFGLPYQTALWVGALCTIAYVFIGGFLAVSWTDTIQASLMITALILAPVVAYFAVTGELQAGQSLTEMIGAQKLDLMHNASVIGVVSLMAWGLGYFGQPHILVRFMAADSVASIPRARRIGMTWMVLCLGGAVAVGLVGIPYFAVHTQQAAGVQANAETVFIEIARQLFNPWIAGLLLAAILAAVMSTLSCQLLVCSSALTEDIYRVFLRKNATQRELVWVGRAMVFAIAVVAIVIAGNPNSRVLSMVSYAWAGFGAAFGPVILLSLFWRGMTRNGALAGIVVGAVTVVVWKQGGWLGLYEIVPGFVLGALAVVLVSKLGKQPSPAMLQRHDAVDAEMARLQA

SEQ ID NO: 7460 - protein, 770 aa, Acidovorax sp. JS42
MPDTPAAPPTSDKRALLRRAALEYHEFPQPGKITIAATKQMVNQHDLALAYSPGVAAPCEEIVKDPAAAFRYTARGNLVGVVTNGTAVLGLGDIGPLAGKPVMEGKGVLFKKFSGIDVFDIEINEKDPDKLIEIIASLEPTFGGINLEDIKAPDCFYIERKLRERMNIPVFHDDQHGTAIVVGAAILNGLKVAGKDPKKIKLVTSGAGAAALACLGLLVKLGIPRENIWVTDLAGVVYEGRTELMDEDKVQYAQKTSARTLAEVIEGADVFLGLSAGGVLKQDMVRKMNARPLIFALANPNPEISPEDVKAVRDDAIIATGRTDYPNQVNNVLCFPYIFRGALDCGATTITTEMEIAAVHAIAELAQAEQSEVVAAAYVGEPLAFGPDYLIPKPFDPRLMMKIAPAVAQAAADSGVAQRPVADMDAYRDHLQTFVYASGTTMKPIFTAAKVAPKKRVAFSEGEEERVLRAAQIVVDEKIARPTLIGRPAIIAQRIEKFGLRLKEGQDYDVVNVEQDHRYRDFWQTYHRMTERKGVTVPIAKIEMRRRLTLIGSMLLHKGEVDGLICGTWGHTSHHLQYIDQVIGKRAGVNTYACMNGLLLPDRQVFVVDTHVNYDPTAEQLAEITIMAAEEMMRFGIKPKAALLSHSNFGSSNQPSAVKMRQTLDLLRVQAPWLEVDGEMHGDVALDGKARSALMPHGTLAGDANLLVMPNIDAANISYNLLKTAAGGNIAIGPVLLGAAEPVHILTASATVRRIVNMTALTVADANAAR

SEQ ID NO: 7461 - protein, 333 aa, Acidovorax sp. JS42
MPVAPAASSSFNAEQALRLGRETVRTEAEALHAMGERLGGGFVQVVQRVLATTGRVVVMGMGKSGHVGRKIAATLASTGTPAFFVHPAEASHGDLGMVTNGDLVLALSNSGESSEITVLLPVLKRLGVPLIAMTGGLQSTLARHADLVLDCSVQREACPLNLAPTTSTTAQLAMGDALAVALLDARGFRPEDFARSHPGGALGRKLLTHVRDVMRAGADVPHVPPHANFSTLMREMSAKGVGATAVVDDAGRPVGIFTDGDLRRRIEAGLDLRETRAQDVMHASPRTIAADALAADAAQAMEHHSITSVLVTDDDGVLVGVVHIGDLMRAKVI

SEQ ID NO: 7462 - protein, 570 aa, Acidovorax sp. JS42
MNDIRRTILWVIFGFSMVLLWDKWQIHNGNKATFFPTPPAQTASTPAVAASGAGAADVPVAAASATPGAAAQPPAGASVPPAAAIPRKRVTVSTDVLRLSFDSEGGSLVHGELLQYPEMEDKTKPFLLLDESASRVYVAQTGLIGNGAGGAFPTHKTPMAVVPGPRELQDGQNELTVRFESADMGGVKLVKTWTLKRGAYDVAVKHEVVNTGTAPVSPQLYLQLARDGNKPAGESSFYSTFTGPAVYTEAKKYHKVEFKDIENGKAEIDKSSSDGYVAMVQHYFATAWLLGDGVQRDNFVRKVDTNLYSVGMITPLGEIAPGQSKAVDARLFAGPQIETLLEKLAPGLELVKDYGWLTILAKPLYWLLDQLHKVIANWGWSIVALVFLLKIAFYWLNAKAYASMAKMKAINPRIMEMRERLKDKPQQMQQEMMRIYREEKVNPMGGCLPIMIQIPVFIALYWVLLSSVEMRNAPWIGWIKDLSSPDPFFILPLLMTLSSLLQTALNPAPPDPMQAKMMWLMPLMFSVMFFFFPAGLVLYWLTNNILSIAQQWIINTRMGVPPQFNLPKFR

SEQ ID NO: 7463 - protein, 504 aa, Solanum tuberosum
MSSRGGGIAESPYLRNYRVGKTLGHGSFGKVKIAEHLLTGHKVAIKILNRRKMKTPDMEEKLRREIKICRLFVHPHVIRLYEVIETPTDIYVVMEYVKSGELFDYIVEKGRLQEDEARKIFQQIIAGVEYCHKNMVVHRDLKPENLLLDARRNVKIADFGLGNIMRDGHFLKTSCGSPNYAAPEVVSGKLYAGPEVDVWSCGVILYALLCGTLPFDDENIPNLFKKIKSGVYTLPSHLSPLARDLIPRMLIVDPMKRISVPDIRQHQWFKIHLPRYLAVPPPDARQHLKKLDEEILQQVSRMGLDRDQLLDSLQKRIQDDATVAYYLLYDNRSMASSGYLGAEFQESVDCYSPGLFPNLDLQLSTGNGVSEESLRRPFRKEKMWLVGLQSPANPKEIMNQVLGTLLELNVRWKKIGHYNMKCLWCHDLHLHSMANNHMNDDDHFISNATAISTHLQPQPTVKFEMQLYKTEDEKYLLDLQRISGPQFLFLDFCAGFIRQLEGPQ

SEQ ID NO: 7464 - protein, 214 aa, Nicotiana sylvestris
MAEESGQRAKGTVKWFSDQKGFGFITPDDGGEDLFVHQSGIRSEGFRSLAEGETVEFEVESGGDGRTKAVDVTGPDGAAVQGGRGGGGGGGGRGGGGYGGGSGGYGGGGRGGSRGYGGGDGGYGGGGGYGGGSRYGGGGGGYGGGGGYGGGGSGGGSGCFKCGESGHFARDCSQSGGGGGGGRFGGGGGGGGGGGCYKCGEDGHFARECTSGGR

SEQ ID NO: 7465 - protein, 317 aa, Neisseria meningitidis FAM18
MNQKKVVVLDADTLPGRTFHFDFPHELAVYGTTDAAETAGRVRDAHIIITNKVMISADIIAANPQLELIAVSATGVNNVDIGAAEAAGVAVCNVRAYGNESVAEHAFMLMIALMRNLPAYQRDVAAGLWEKSPFFCHYGAPIQDLNGKTLAVFGRGNIGRTLAGYAQAFGMGVVFAEHKHAPAVREGYVAFENAVRTADVLSLHCPLNAQTENMIGENELRQMKPGAVLINCGRGGLVDENALLAALKYGQIGGAGVDVLTNEPPKNGNPLLKARLPNLIVTPHTAWASREALDRLFDILLANIHAFVKGEAQNRVV

SEQ ID NO: 7466 - protein, 404 aa, Neisseria meningitidis FAM18
MEWEFNSYYTLIAATLVLLVGKFLVQKIKFLRDFNIPEPVAGGLVAAIILFALHEAYGVSFKFEKPLQNAFMLIFFTSIGLSADFSRLKAGGLPLVVFTAIVGGFILVQNFVGVGLATALGLDPLIGLITGSVSLTGGHGTSGAWGPNFETQYGLVGATGLGIASATFGLVFGGLIGGPVARRLINKMGRKPVENKKQDQDDNADDVFEQAKRTRLITAESAVETLAMFAACLAFAEIMDGFDKEYLFDLPKFVWCLFGGVVIRNILTAAFKVNMFDRAIDVFGNASLSLFLAMALLNLKLWELTGLAGPVTVILAVQTVVMVLYATFVTYIFMGRDYDAAVLAAGHCGFGLGATPTAVANMQSVTHTFGASHKAFLIVPMVGAFFVDLINAAILTGFVNFFKG

SEQ ID NO: 7467 - protein, 270 aa, Neisseria meningitidis FAM18
MASKPFLKWAGGKHKLVPFIEHNLPTPTRKRLIEPFCGSAALSLALDFEHYLLNDINADLIGLFRILKEEKSGFIDYARSFFISENNSDSRFYELREQFNFSKNLHERSALFIYLNRHAFNGLCRYNSKGVFNVPFGRYKSPYFPQQEMEGFIQKSDRVELMCGDFQMILSQTDNTDTVYCDPPYAPLSPTASFTTYAKESFNLDNQIRLAQSAQQIAPDSQGVLISNHDTEFTRDIYSFAILKTIEVQRNIAAKGSSRKKVGELLAIYD

SEQ ID NO: 7468 - protein, 642 aa, Neisseria meningitidis FAM18
MAKVIGIDLGTTNSCLAISENGQTKVIENAEGARTTPSVIAYLDGGEILVGAPAKRQAVTNAKNTIYAAKRLIGHKFEDKEVQRDIESMPFEIIKANNGDAWVKAQGKELSPPQISAEVLRKMKEAAEAYLGEKVTEAVITVPAYFNDSQRQATKDAGRIAGLDVKRIINEPTAAALAFGMDKGDNKDRKVAVYDLGGGTFDISIIEIANLDGDKQFEVLATNGDTFLGGEDFDQRLIDHIIAEFKKEQGIDLKQDVMALQRLKEAAEKAKIELSSGQQTEINLPYITMDATGPKHLAMKITRAKFESLVEDLIARSIEPCRTALKDAGLSTSDIDDVILVGGQSRMPKVQEAVRDFFGKEPRKDVNPDEAVAVGAAIQGEVLSGGRSDVLLLDVTPLSLGIETMGGVMTKLIQKNTTIPTKASQVFSTAEDNQSAVTIHVLQGERERASANKSLGQFNLGDIAPAPRGMPQIEVTFDIDANGILHVSAKDKGTGKAANITIQGSSGLSEEEIERMVKDAEANAEEDKKLTELVASRNQAEALIHSVKKSLADYGDKLDAAEKEKIEAALKEAEEAVKGDDKAAIDAKTEALGAASQKLGEMVYAQAQAEAQAGESEQANASAKKDDDVVDADFEEVKDDKK

SEQ ID NO: 7469 - protein, 405 aa, Neisseria meningitidis FAM18
MEIILGIVMFTVIVLVLALMILFAKSKLVSEGDITIKVNGEKELTMPAGGKLLGALANEGIFIPSACGGGGSCGQCRVVVKSGGGDILPTELSHISKREAREGCRLSCQVNVKTDMDIEVPEEVFGVKKWECTVISNDNKATFIKELKLAIPEGEEVPFRAGGYIQIEAPPHTVAYKDFDIPEEYHEDWDKYNLWQYVSKVDEPILRAYSMASYPEEKGIIMLNVRIATPPPRVPDAPPGQMSSYIWSLKPGDKVTISGPFGEFFAKDTDAEMVFIGGGAGMAPMRSHIFDQLKRLNSKRKITFWYGARSKREMFYVEDFDQLAAEFPNFTWHVALSDPLPEDNWDGYTGFIHNVVYENHLKNHEAPEDCEFYMCGPPIMNQSVIKMLKDLGVEDENILLDDFGG

SEQ ID NO: 7470 - protein, 544 aa, Neisseria meningitidis FAM18
MFAIFNLRASSQTRHARHAGSRFCLYAAPSNHICRTPQHTKGYIMAKVLIVPVSAGLDASAAAQAFAKALDAQIFQAVDATAETLLAQGKSDDWFDALVGKVAALDAANLVIEGIAPDADKIYLAGKNVELALSLDAAAVFAVRSDNADADELANRLNLAKQFFAAAPGVLEGFVVDGAAASVAEAAAEKTGLTFFGSSDALKDVSVLAGREAKRLSPAQFRYNLIDFARQADKRIVLPEGAEPRTVQAAAICHEKGIARCVLLAKREEVEAVAKERGISLPDSLEIIDPASLVEQYVEPMCELRKSKGLTPEDARKQLQDTVVLGTMMMAQNDVDGLVSGAVHTTANTIRPALQLIKTAPGASLVSSVFFMLLPNQVLVFGDCAVNPNPTAQQLADIAIQSADSAKAFGIDPKVAMISYSTVNSGSGPDVDTVIEATKLAREKRPDLAIDGPLQYDAATVPGVGKSKAPGSPVAGQATVLVFPDLNTGNCTYKAVQRSANVLSVGPLLQGLRKPVNDLSRGALVEDIVFTIALTAVQAKQMEG

SEQ ID NO: 7471 - protein, 307 aa, Neisseria meningitidis FAM18
MDIETFLAGERAAGGYRCGFVAIVGRPNVGKSTLMNHLIGQKISITSKKAQTTRNRVTGIYTDDTAQFVFVDTPGFQTDHRNALNDRLNQNVTEALGGVDVVVFVVEAMRFTDADRVVLKQLPKHTPVILVVNKIDKDKAKDRYALEAFVAQVRAEFEFAAAEAVSAKHGLRIANLLELLKPYLPESVPMYPEDMVTDKSARFLAMEIVREKLFRYLGEELPYAMNVEVEQFEEEDGLNRIYIAVLVDKESQKAILIGKGGERLKKISTEARLDMEKLFDTKVFLKVWVKVKSGWADDIRFLRELGL

SEQ ID NO: 7472 - protein, 655 aa, Neisseria meningitidis FAM18
MGNTFKSILVWVALGIGLMAAFNALDGKKEDNGQIEYSQFIQQVNNGEVSGVNIEGSVVSGYLIKGERTDKSTFFTNAPLDDNLIKTLLDKNVRVKVTPEEKPSALAALFYSLLPVLLLIGAWFCFMRMQTGGGGKGGAFSFGKSRARLLDKDANKVTFADVAGCDEAKEEVQEIVDYLKAPNRYQSLGGRVPRGILLAGSPGTGKTLLAKAIAGEAGVPFFSISGSDFVEMFVGVGASRVRDMFEQAKKNAPCIIFIDEIDAVGRQRGAGLGGGNDEREQTLNQLLVEMDGFESNQTVIVIAATNRPDVLDPALQRPGRFDRQVVVPLPDIRGREQILNVHSKKVPLDESVDLLSLARGTPGFSGADLANLVNEAALFAGRRNKVKVDQSDFEDAKDKIYMGPERRSMVMHEDEKRATAYHESGHAIVAESLPFTDPVHKVTIMPRGRALGLTWQLPERDRISMYKDQMLSQLSILFGGRIAEDIFVGRISTGASNDFERATQMAREMVTRYGMSDKMGVMVYAENEGEVFLGRSVTRSQNISEKTQQDIDAEIRRILDEQYQIAYKILDENRDKMETMCKALMEWETIDRDQVLEIMAGKQPSPPKDYSHNLRENADAAEDNAPHAPTREETEAPAPADTASTESEQQPENKA

SEQ ID NO: 7473 - protein, 513 aa, Neisseria meningitidis FAM18
MKIGIPRESLSGETRVACTPATVALLGKLGFETVVESGAGLAASLDDAAYQTAGATVADKAAVWACPLIYKVNAPSEGELPLLNEGQTIVSFLWPRQNEALVEALRAKKVNALAMDMVPRISRAQALDALSSMANISGYRAVIEAANAFGRFFTGQITAAGKVPPAQVLVIGAGVAGLAAIGTANSLGAVVRAFDTRLEVAEQIESMGGKFLKLDFPQESGGSGDGYAKVMSDEFIAAEMKLFAEQAKEVDIIITTAAIPGKPAPKLITKEMVESMKSGSVIVDLAAATGGNCELTRPGELSVTGNGVKIIGYTDMANRLAGQSSQLYATNLVNLTKLLSPNKDGEITLDFEDVIIRNMTVTHDGEITFPPPPIQVSAQPQQTPSEKAAPAAKPEPKPVSLWKKLAPAVIAAVLVLWVGAVAPAAFLNHFIVFVLACVIGYYVVWNVSHSLHTPLMSVTNAISGIIVVGALLQISQGNGFVTLLAFIAILIASINIFGGFFVTRRMLNMFRKG

SEQ ID NO: 7474 - protein, 563 aa, Neisseria meningitidis FAM18
MSASQLLSRLTQTVGEKYIITDPAKTEQYRQGYRFGEGKALAVVRPGSILEMWKILQACVEADVIVITQAANTGLTGGSTPDGNDYDRDIVIVNTMRMNIIQTINNNEQVVCLPGSTLNQLELLLKPLGREPHSVIGSSCIGASVLGGVCNNSGGALVQRGPAYTEMALFAQINEEGRLELVNHLGIDLGDTPEEILTNLQGHHYQNKDIKQDAGKGHDHAYCEHVRQVDEPTAARFNADPARHYEASGCAGKLMVFAVRLDTFPQEKQTAVFYIGTNDINELTDIRRAALGEFESLPVSGEYIHRHAFDIADVYGKDTFYVIKKFGTHQLPKLFDLKARVDRFGKKASFLPKHFSDKAMQFVSKYLPDHLPKSMRDYRDKYEHHLILKMGGKGVDEARAFLKEYFAHHSGAFFECNAEETQAAMLHRFAVASAAIRYRAVHDDEVEDLVALDIALRRDDRDWFEKLPSEIDNKIIHKLYYGHFMCHVFHQDYIIKKGNDCMALEHEMLHLLDQRGAQYPAEHNVGHLYEAKPALKQFYRKLDPTNSFNPGVGKTSKKKNWAE

SEQ ID NO: 7475 - protein, 675 aa, Neisseria meningitidis FAM18
MSLSEFIERRTSFNPMVILTTLFFVCVLVVLVLTVPDQAQMWLDRAKEVIFTEFSWFYVLTFSIFLGFLLILSVSSLGNIRLGRDEDVPEFGFLSWLAMLFAAGMGVGLMFFGVAEPLMHYFSDITAGTPEHRQQQALLHTVFHWGVHAWSVYGTIALALAYFGFRYKLPLALRSCFYPLLKEKISGRFGDAIDIMALLATFFGIITTLGFGASQLGAGLQEMGWIAENSFSVQVLIIAAVMSLAVVSAISGVGKGVKVLSELNLSLAFLLLFFVLAAGPTVYLLSAFGDNIGNYLENLVRLSFKTYAYEREHKPWFESWTVLYWAWWCSWAPFVGLFIARISKGRTIREFVFGVLLIPGLFGVLWFTVFGNTAIWLNDGVAGGMLEKMTSSPETLLFKFFNYLPLPELTSIVSLLVISLFFVTSADSGIYVLNNITSRDKGLSAPRWQAVMWGVLMSAVAVLLMRSGGLGNLQSMTLIVSLPFALLMLIMCFSLWKGLSADKKYFETRVNPTSVFWTGGKWKERLVQIMSQTQEQDILKFLKHTASPAMHELQRELSEEYGLSVRVDKMFHQDEPAIEFVIRKETMRDFMYGIKSVGQDVSDQLINDGNLPHIRHQTTYKPYAYFFDGRVGYDVQYMNKDELIADILKNYERYLMLLDDVGQELMAHEQVELAE

SEQ ID NO: 7476 - protein, 127 aa, Neisseria meningitidis FAM18
MFRTMLGGKIHRATVTEADLNYVGSITVDQDLLDAAGIYPNEKVAIVNNNNGERFETYTISGKRGSGVVCLNGAAARLVQKGDIVIIMSYVQLSEPEIAAHEPKVVLVDGNNKIRDIISYEPPHTVL

SEQ ID NO: 7477 - protein, 404 aa, Neisseria meningitidis FAM18
MTVKTPVYLDYAATTPVDKRVAEKMIPYLTETFGNPASNSHAFGWEAEEAVEKARADIAALINADPKEIVFTSGATESDNLAIKGAANFYKTKGKHLITVKTEHKAVLDTMRELERQGFEVTYLGVQENGLIDLEELKAAIRDDTILISVMWANNEIGVVQDIPAIGEICRERKIVFHVDAAQACGKVPVDVEAAKIDLLSMSAHKVYGPKGIGALYVRRKPRVRLEAQMHGGGHERGFRSGTLPTHQIVGMGEAFRIAKEELEQDMAHYRKLRDIFLKGIEGIEEVYINGDLEHRAPNNLNVSFNFVEGESLIMAVKELAVSSGSACTSASLEPSYVLRALGRNDELAHSSLRITFGRMTTEEEVQFAAELIKSKIGKLRELSPLWEMFKDGIDLNSIEWAAH

SEQ ID NO: 7478 - protein, 859 aa, Neisseria meningitidis FAM18
MRYDKLTAKFQQALAEAQSLALAADGSCLEAGFVLKALLDDQNSGAAALLAHAGVNVPQVKQRLQQHLNSLPKVSGQGGDILPSRELQAVLNLMDKAATKRGDAYIASELFLLALVQQNDAAGKILKEAGATEQNINAAIDAVRGGQNVNDANAEDQRDALKKYTLDLTQRARDGKLDPVIGRDDEIRRAIQVLQRRTKNNPVLIGEPGVGKTAIVEGLAQRIVNGEVPESLRNKRLLVLDLAALIAGAKYRGEFEERLKGVLNDLAKDDGNTLIFIDEIHTLVGAGKTDGAMDAGNMLKPALARGELHCIGATTLDEYRQYIEKDAALERRFQKVLVGEPSVEDTIAILRGLQERYEIHHGIDITDPAIVAAAELSDRYITDRFLPDKAIDLIDEAASRVKMEKETKPEAMDKIDRRLIQLRMEKAHVEKEKDDASKKRLELIDEEINGLQKEYADLDEIWKAEKAISDGAANIKKQIDEVKIKIEQAKRQGDLALASKLMYEDLEHLEKQRAAAERADTDSTKPANKLLRNNVGAEEIAEVVSRMTGIPVSKMMEGERDKLLKMEEVLHRRVVGQDEAVRAVSDAIRRSRSGLADPNKPYGSFLFLGPTGVGKTELCKALAGFLFDSEDHLIRIDMSEYMEKHAVARLIGAPPGYVGYEEGGYLTEQVRRKPYSVILLDEVEKAHPDVFNILLQVLDDGRLTDGQGRTVDFKNTVIVMTSNIGSQHIQQMGIQDYEAVKEVVMEDVKEHFRPEMINRIDEVVVFHGLDQANIRSIAKIQLKGLEKRLEKQNLRLTVSDAALDIIAKAGFDPIYGARPLKRAIQSEIENPLAKALLAGNYAPESEIRVEADGDRLKFA

SEQ ID NO: 7479 - protein, 405 aa, Neisseria meningitidis FAM18
MALIVHKYGGTSVGSPERIKNVAKRVAKARAEGHDIVVVVSAMSGETNRLVALAHEMQEHPDPRELDVVLSTGEQVTIGLLAMALKDIGVEAKSYTGWQVALKTDTAHTKARIESIDDEKMRADLAAGKVVIVAGFQGISSEGDISTLGRGGSDTSAVALAAALKADECQIYTDVDGVYTTDPRVVPEARRMDTVTFEEMIELASLGSKVLQIRSVEFAGKYKVRLRVLSSLQDGGNGTLITFEEDDNMERAAVTGIAFDKNQARINVRGVPDKPGVAYQILGAVADANIEVDMIIQNVGSEGTTDFSFTVPRGDYKQTLEILSERQDSIGAASIDGDDTVCKVSAVGLGMRSHVGVAAKIFRTLAEEGINIQMISTSEIKVSVLIDEKYMELATRVLHKAFNLG

SEQ ID NO: 7480 - protein, 408 aa, Neisseria meningitidis FAM18
MPSETFRSKKMSQKLILVLNCGSSSLKGAVLDNGSGEVLLSCLAEKLNLPDAYITFKVNGEKHKVDLSAHPNHTGAVEALMEELKAHGLDSRIGAIGHRVVSGGELYSESILVDDEVIAGIEKCIPLAPLHNPAHLLGLRAAQSIFKDLPNVVVFDTSFHQTMPEVAYKYAVPQELYEKYGLRRYGAHGTSYRFVADETARFLGKDKKDLRMVIAHLGNGASITAVANGESRDTSMGLTPLEGLVMGTRSGDIDPSVFGFLAENANMTIAQITEMLNKKSGLLGISGLSNDCRTIEEEAAKGHKGAKLALDMFIYRLAKYIGSMAVAAGGLDALVFTGGIGENSDIIRERVIGYLGFLGLNIDQEANLKARFGNAGVITTADSKAVAVVIPTNEELMIAHDTARLSGL

SEQ ID NO: 7481 - protein, 573 aa, Neisseria meningitidis FAM18
MPSEAICSKKTMLNKDQFADNHFIRTFIEEDLKSGKHETIQTRFPPEPNGYLHIGHAKSICLNFGLAYIYDGLCNLRFDDTNPEKENDEYVNAIKEDVEWLGFHWAGEPRFASNYFDQLYDYAVGLVKDGKAYVDDLTPEEMREYRGTLTEAGKNSPYRDRSIEENLDLFTRMKNGEFPDGSKTLRLKIDMASGNINMRDPVIYRIRRAHHHNTGDKWCIYPMYDYTHCISDAIEGITHSLCTLEFEAHRPLYDWVLDNIPAPHATRPRQYEFSRLELLYTITSKRKLNQLVVEKHVSGWDDPRMPTISGMRRRGYTPEGLRLFAKRAGISKSENIVDMSVLEGAIREELENSAPRLMAVLNPLKVTLTNFETGRTQSRRAAFHPNHEEMGEREVPISQTIYIEADDFAENPPKGFKRLIPGGEVRLRHGYVIKCDEVVKDEAGNVVELKCSIDHDTLGKNPEGRKVKGVIHWVSAEHAAEIKVRLYDRLFTVERPDAVRGEDGEYLPFTDFLNPESVKEITAYAEPAAKDLPAESRWQFERIGYFVTDRKDHGKDTPVFNRTVTLKDSWQPK

SEQ ID NO: 7482 - protein, 575 aa, Neisseria meningitidis FAM18
MQLSGAQIIVQSLKAEGVEYVFGYPGGAVIEIYDALFQLNKFKHILTRHEQAAVHAADAYARVSGKVGVALVTSGPGVTNALTGIATAYTDSIPMVVISGQVGNSLIGTDAFQEVDTVGITRPCVKHNFLVTDINELAETIKKAFQIAASGRPGPVVVDVPKDVTQAMAKFSYPQEDIFIRSYQPVVQGHIGQIKKAVQMLASAKRPVVYFGGGVVLGNASEELTRFVRMTGAPCTGTLMGLGAYPSGDRQFLGMLGMHGTYEANLAMQNADVVLAVGARFDDRVVSVPSKFFEKAKKVIHIDVDPSSIAKRVKVDIPIVGDVKNVLSEMVALWQKQEFMPSEDALGKWWKTIEEWRSQDCLWFDNGSEIIKPQYVIQKLAEITGNSAIITSDVGQHQMFAAQYYPFERPRQWLNSGGLGTMGVGLPYAIGAKLAAPDQDVFCITGDGSIQMNIQELSTCFQYRIPVNVITLNNGYLGMVRQWQEIYYGGRESETYFDSLPDFVKLAEAYGHIGIRVDKKSDVEGALLEALNQKDRLVFIDFLTDQKQNVMPMVGNGKGLDEMVLPPHMRADEKA

SEQ ID NO: 7483 - protein, 289 aa, Neisseria meningitidis FAM18
MSANEYTQIGWIGLGQMGLPMVTRLLDGGIEVGVYNRSPDKTAPISAKGAKVYGNTAELVRDYPVIFLMVSDYAAVCDILNGVRDGLAGKIIVNMSTISPTENLAVKALVEAAGGQFAEAPVSGSVGPATNGTLLILFGGSEAVLNPLQKIFSLVGKKTFHFGDVGKGSGAKLVLNSLLGIFGEAYSEAMLMARQFGIDTDTIVEAIGGSAMDSPMFQTKKSLWANREFPPAFALKHASKDLNLAVKELEQAGNTLPAVETVAASYRKAVEAGYGEQDVSGVYLKLAEH

SEQ ID NO: 7484 - protein, 307 aa, Neisseria meningitidis FAM18
MQYSTLAGQTDNSLVSNNFGFLRLPLNFMPYESHADWVITGVPYDMAVSGRSGARFGPEAIRRASVNLAWEHRRFPWTFDVRERLNIIDCGDLVFSFGDSRDFVEKMEAHAGKLLSSGKRCLSLGGDHFITLPLLRAHARYFGKLALIHFDAHTDTYDNGSEYDHGTMFYTAPKEGLIDPSRSVQIGIRTEHSKKLPFTVLTAPQVNEDSVEETVRKIKETVGNMPVYLTFDIDCLDPSFAPGTGTPVCGGLSSDRALKILRGLTDLDIVGMDVVEVAPSYDQSDITALAGATIALEMLYLQGAKKD

SEQ ID NO: 7485 - protein, 399 aa, Neisseria meningitidis FAM18
MSDQLILVLNCGSSSLKGAVIDRKSGSIVLSCLGERLTTPEAVITFSKDGNKRQVPLSGRNCHAGAVGMLLNELEKHGLHDRIKAIGHRIAHGGEKYSESVLIDQAVMDELNACIPLAPLHNPANISGILAAQEHFPGLPNVGVMDTSFHQTMPERAYTYAVPRELRKKYAFRRYGFHGTSMRYVAPEAARILGKPLEDIRMIIAHLGNGASITAIKNGKSVDTSMGFTPIEGLVMGTRCGDIDPGVYSYLTSHAGMDVAQVDEMLNKKSGLLGISELSNDCRTLEIAADEGHEGARLALEVMTYRLAKYIASMAVACGGVDALVFTGGIGENSRNIRAKTVSYLDFLGLHIDTKANMDKRYGNSGIISPTDSSPAVLVVPTNEELMIACDTAELAGIL

SEQ ID NO: 7486 - protein, 324 aa, Neisseria meningitidis FAM18
MAENGKYLDWAREVLHTEEEGLREIATELDENFVLAADALLHCKGRVVITGMGKSGHIGRKMAATMASTGTPAFFVHPAEAAHGDLGMIVDNDVVVAISNSGESDEIAAIIPALKRKDITLVCITARPDSTMARHADIHITASVSKEACPLGLAPTTSTTAVMALGDALAVVLLRARAFTPDDFALSHPAGSLGKRLLLRVADIMHKGGGLPAVRLGTPLKEAIVSMSEKGLGMLAVTDGQGRLKGVFTDGDLRRLFQECDNFTGLSIDEVMHTHPKTISAERLATEALKVMQANHVNGLLVTDADGVLIGALNMHDLLAARIV

SEQ ID NO: 7487 - protein, 187 aa, Neisseria meningitidis FAM18
MKLIILDRDGVINQDRDNFVKSVDEWIPVEGSMDAVAFLTQAGYTVAVATNQSGIGRKYFTVQNLTEMHAKMHRLVRQAGGEINGIWFCPHTDADNCNCRKPKPGMIEDIIGRFNAQASETWLVGDSLRDLQAIDAVGGKPALVLTGKGKKTLSQHGHELPEHTQVFDTLLDFSQYIMQENAAPQAD

SEQ ID NO: 7488 - protein, 384 aa, Neisseria meningitidis FAM18
MKFIDEAKIEVAAGKGGNGATSFRREKFVPRGGPDGGDGGKGGSVWAEADENTNTLVEYRFVKRYQAKNGEKGHGSDRYGAGADDIVLKMPVGTLIRDLDTDEIVADLTYHGQRVCLAKGGKGGLGNIHFKSSVNRAPKQSTPGEEGEARSLQLELKVLADVGLLGMPNAGKSTLITAVSAARPKIANYPFTTLHPNLGVVRIDENHSFVMADIPGLIEGAAEGAGLGHRFLKHLSRTGLLLHVVDLAPFDETVNPAEEALAIINELRKYDEELYGKPRWLVLNKLDMLDEEEAQTRTAAFLEAVGWDYPKPDDRFQFDMETPRLFQISALTHQGTQELVHQINQYLTEKKRIEAEKAEAEKAAANVEIIEQQPKTDTGVFKPE

SEQ ID NO: 7489 - protein, 447 aa, Neisseria meningitidis FAM18
MSQNHTILQNLPVGQKVGIAFSGGLDTSAALLWMKLKGALPYAYTANLGQPDEDDYNAIPKKAMEYGAENARLIDCRAQLAHEGIAAIQCGAFHVSTGGIAYFNTTPLGRAVTGTMLVSAMKEDDVNIWGDGSTYKGNDIERFYRYGLLTNPALKIYKPWLDQQFIDELGGRHEMSEFLIANGFNYKMSVEKAYSTDSNMLGATHEAKDLEFLNSGIKIVKPIMGVAFWDENVEVSPEEVSVRFEEGVPVALNGKEYADPVELFLEANRIGGRHGLGMSDQIENRIIEAKSRGIYEAPGMALFHIAYERLVTGIHNEDTIEQYRINGLRLGRLLYQGRWFDSQALMLRETAQRWVAKAVTGEVTLELRRGNDYSILNTESPNLTYQPERLSMEKVEGAAFTPLDRIGQLTMRNLDITDTRAKLGIYSQSGLLSLGEGSVLPQLGNKK

SEQ ID NO: 7490 - protein, 660 aa, Hordeum vulgare subsp. vulgare
MPRTVSDGGEDFDGDVCSQTASQRHTDSTHHHHGYKVGFPPAKGVFAEFAEGVKETFFADDPLREYKDQPRSKKLWLSLVHLFPVLDWSRSYTFGKFKGDLVAGLTIASLCIPQDIGYAKLANLQPHVGLYSSFVPPLIYALMGSSRDIAIGPVAVVSLLLGTLLQEEIDPVKNPLEYSRLAFTATFFAGITQAMLGFFRLGFIIEFLSHAAIVGFMAGAAITIALQQLKGLLGIAKFTKKSDIISVMESVWGNVQHGWNWQTILIGSSFLAFLLTTKYIAKKNKKLFWVSAIAPLISVVISTFCVYITRADKQGVAIVKNIKQGINPPSFDLIYWSGPYLAKGFRIGVVSGMVALTEAIAIGRTFAAMKDYQIDGNKEMVALGTMNIVGSMTSCYVATGSFSRSAVNYMAGCKTAVSNVVMAIVVMLTLLLITPLFKYTPNAILASIIINAVVNLVDYETAYLIWKVDKMDFVALLGAFFGVVFASVEYGLLIAVAISLGKILLQVTRPRTALLGNLPRTTIYRNVEQYPEATKVPGVMIVRVDSAIYFTNSNYVKERILRWLRDEEEQQQEQKLSKTEFLIVELSPVTDIDTSGIHALEELLKALEKRKIQLILANPGPAVIQKLRSAKFTDLIGDDKIFLSVGDAVKKFAPKSSLNV

SEQ ID NO: 7491 - protein, 181 aa, Antirrhinum majus
MAAKISSDPLVIGRVIGDVVDHFTSTVKMSVIYNANNSIKHVYNGHELFPSAVTSTPRVEVHGGDMRSFFTLIMTDPDVPGPSDPYLREHLHWIVTDIPGTTDSSFGKEVVSYEMPRPNIGIHRFVFLLFKQKKRGQAMLSPPVVCRDGFNTRKFTQENELGLPVAAVFFNCQRETAARRR

SEQ ID NO: 7492 - protein, 181 aa, Antirrhinum majus
MAAKISSDPLVIGRVIGDVVDHFTSTVQMSVIYNANNSIKHVYNGHELFPSAVTSTPRVEVHGGDMRSFFTLIMTDPDVPGPSDPYLREHLHWIVTDIPGTTDSSFGKEVVSYEMPRPNIGIHRFVFLLFKQKKRGQAMLSPPVVCRDGFNTRKFTQENELGLPVAAVFFNCQRETAARRR

SEQ ID NO: 7493 - protein, 164 aa, Oryza sativa Japonica Group
MPPRSLTLSRLPVAALGLPFSSCSPPPPRLRFPFAARRARSLATRASSSSPDSSFGSRMEDSVKRTLADNPVVIYSKSWCSYSMEVKALFKRIGVQPHVIELDQLGAQGPQLQKVLERLTGQSTVPNVFIGGKHIGGCTDTVKLHRKGELATMLSELDIDVNNS

SEQ ID NO: 7494 - protein, 491 aa, Oryza sativa Japonica Group
MAAVREVGSKAELEAAAGGARAAAVHFWAAWCEASKQMDEVFAHLAVDFSHAVFLRVEAEEQPEISEAYGVTAVPYFVFLKEGKTVDTLEGANPASLANKVAKLAGPASVAESAVPASLGVAAGPAVLEKVQEMAQQNGASATSSAEDALNKRLEQLVNSHPVFLFMKGTPEQPRCGFSRKVVDVLKQEGVEFGSFDILTDNDVREGMKKFSNWPTFPQLYCKGELLGGCDIVIAMHESGELKDVFKEHNIPLQPQGSKNEEAVKAKPDTEKSGAVSEPALLTAAQKERLESLVNFSTVMAFIKGTPEEPKCGFSGKLVHILKQEKIPFSSFDILTDDEVRQGLKLLSNWPSYPQLYINGELVGGSDIVMEMHKSGELKKVLSEKGIVAKESLEDRLKALISSAPVMLFMKGTPDAPRCGFSSKVVNALKQAGVSFGAFDILSDEEVRQGLKTYSNWPTFPQLYYKSELIGGCDIVLELEKSGELKSTLSE

SEQ ID NO: 7495 - protein, 593 aa, Burkholderia sp. 383
METQNTLRKPMDGTGTSPVTVLKRLWPYIRPLIGIVVLAVMTMGVVAATEAGIPALLKPLLDHGFGSHGSDSAKWYVPMAVIGLALVRGVSQYASNYLLNYVSNRILLQLRLEMFQRMLHTGASFFQRETASTVINAIVFEVNQILSVLTGVMVTLVRDSLTVIFLLGYLFYLNWRLTLIVAVILPGIGWLVSKINRRLRRLNREHQTLTNELSYIVEETVGGYKVVKVHNGEAYEMDRFTQMSKRLRGYAMRMTISGGLAQPLTQFLASIALAVVITIAVVQSSNDQTTVGGFVAFVTSMLLVISPLKHLIDVNQPLQRGMTAAELIFGLIDEPAEPQGGGRPLAQSRGDIEFRNVTFDYGAAERPTLDRISFKVAPGEMIALAGPSGSGKTTLVNLLPRFFDPTDGAILVDGVPVADYDLHALRSQMAMVSQDVVLFNDTIAANVAYGQTPDRARVQAALEAANLADAVAAMPDGLDTLVGGNGMRLSGGQRQRLAIARAIYKDAPILILDEATSALDSESERHVQAALERLMEGRTTLVIAHRLSTIERADRILVLEAGKIVEEGSHDELLRHGGLYAHLHRIQYQQQAA

SEQ ID NO: 7496 - protein, 600 aa, Pseudomonas syringae pv. phaseolicola 1448A
MTTSESSSTSSVKIYFRLLSYVRPHVGIFLLSIIGFVIFASTQPMLAGILKYFVDGLTNPEAVLFPNVPYLRELQLLQAVPLLIVLIAAWQGLGSFLGNYFLAKVSLGLVHDLRVELFNKLLVLPNRYFDTTNSGHLISRITFNVTMVTGAATDAIKVVIREGLTVVFLFIYLLMMNWKLTLVMLAILPLIAVMVGSASKKFRKQSKKIQVAMGDVTHVASETIQGYRVVRSFGGESYEQNRFAQASDSNTRKQLRMTKTGAIYTPMLQLVIYSAMAVLMFLVLFLRGDATAGDLVAYITAAGLLPKPIRQLSEVSSTIQKGVAGAESIFEQLDVEEEVDTGTIERDRVTGHLEVKNLSFFYPQTERQVLNDISFSAAPGQMIALVGRSGSGKSTLANLIPRFYGHEMGNILLDGVEINDYRLRNLRKHIAQVNQNVTLFNDTIANNIAYGDLAGAPRADIEAAAADAYAKEFIDQLPQGFDTQVGENGVLLSGGQRQRLAIARALLKNAPLLILDEATSALDTESERHIQAALDHVMKGRTTLVIAHRLSTIEKADMILVMDAGQIVERGTHTELLAQNGYYARLHAMGLDEPSPVGAV

SEQ ID NO: 7497 - protein, 187 aa, Bdellovibrio bacteriovorus
MYAIIRTGGKQYKVQAGDVVQVDKLEQALGAEFEINEVLMVGGESTAVGQPLVKGAKVTVVVTKQAKTRKEIVFKKKRRQGYRKFATHKQEFTELFVKAISFDGKTAKSDEAATVVDVKAVRAEKAQARVAARKERAANKGPAEVVKKAAKKVAKKKVAKKAVKKTVKKATKTGAKKKAAKKTSKKA

SEQ ID NO: 7498 - protein, 220 aa, Mesorhizobium sp. BNC1
MFAVIKTGGKQYRVAANDTLLIERIAGEVGEIVQIGNVLAVGEGENVTIGAPFVEGASVAAEVVEQGRGPKVIAFKKRRRQNSRRKRGHRQLLTTVRIAEILLDGAKPSKKVAAKPATSEEKAAEEKPAKAKKEAAEKGASPRETKAAPLFSAPEGEPDNLTVIKGIGPVAAGQLKEQGLTTFAQLAALSDEDIARIDEAMPFSTDQIKDWREQAKEVAK

SEQ ID NO: 7499 - protein, 135 aa, Salinibacter ruber DSM 13855
MYAVVDVKDKQFKVQEGDTLYVPYHSDATAGQELTLDRVLLVSDGDGDVTLGTPTVEDATATARVLEHVKGDKVIVFKKKRRKRYRVKRGHRQQYTQIEIESLNANGPASSDDEEAAETSDAEPDEDPEAEPAEA

SEQ ID NO: 7500 - protein, 148 aa, Pisum sativum
MGFTDKQEALVNSSSEFKQNLPGYSILFYTIVLEKAPAAKGLFSFLKDTAGVEDSPKLQAHAEQVFGLVRDSAAQLRTKGEVVLGNATLGAIHVQKGVTNPHFVVVKEALLQTIKKASGNNWSEELNTAWEVAYDGLATAIKKAMKTA

SEQ ID NO: 7501 - protein, 144 aa, Vicia faba
MGFTEKQEALVNSSSQLFKQNPSNYSVLFYTIILQKAPTAKAMFSFLKDSAGVVDSPKLGAHAEKVFGMVRDSAVQLRATGEVVLDGKDGSIHIQKGVLDPHFVVVKEALLKTIKEASGDKWSEELSAAWEVAYDGLATAIKAA

SEQ ID NO: 7502 - protein, 154 aa, Lupinus luteus
MGALTESQAALVKSSWEEFNANIPKHTHRFFILVLEIAPAAKDLFSFLKGTSEVPQNNPELQAHAGKVFKLVYEAAIQLQVTGVVVTDATLKNLGSVHVSKGVADAHFPVVKEAILKTIKEVVGAKWSEELNSAWTIAYDELAIVIKKEMNDAA

SEQ ID NO: 7503 - protein, 146 aa, Phaseolus vulgaris
MGAFTEKQEALVNSSWEAFKGNIPQYSVVFYTSILEKAPAAKNLFSFLANGVDPTNPKLTAHAESLFGLVRDSAAQLRANGAVVADAALGSIHSQKGVSNDQFLVVKEALLKTLKQAVGDKWTDQLSTALELAYDELAAAIKKAYA

SEQ ID NO: 7504 - protein, 247 aa, Oryza sativa Indica Group
MMERAEDLRLSLSLSSPLIAPRTHHVAMLFHAPPEKRFLEMPLLPAAKRSEVVAAEEERAGLRGGGGSDEEDGGCGIDGSRKKLRLSKDQSAVLEDSFREHPTLNPRQKATLAQQLGLRPRQVEVWFQNRRARTKLKQTEVDCEFLKRCCETLTEENRRLQKEVQELRALKLVSPHLYMNMSPPTTLTMCPSCERVSNTNNNSSAAAAADRRGIRTTTAAAGGSVVDTAADGGILCHRPIAVRPQQS

SEQ ID NO: 7505 - protein, 621 aa, Porphyra haitanensis
MGKVVGIDLGTTNSVIAVMEGGKPTVIPNAEGFRTTASVVAYTKSGDKLVGQIARRQAVINPENTFYSVKRFIGRKQNEISQEIRQTSYNVKTSGSSIKIACPALDKDFAPEEISAQVLRKLVEDASTYLGETVTQAVITVPAYFNDSQRQATKDAGKIAGLDVLRIINEPTAAPLSYGLDKQNNETILVFDLGGGTFDVSVLEVGDGVFEVLSTSGDTHLGGDDFDQQIVEWLIKDFKQNEGIDLAKDRQALQRLTEAAEKAKIELSNLTQTEINLPFITATQDGPKHLEKTVTRGKFEELCSNLIDKCSIPVNNALKDAKLEASSIDEVVLVGGSTRIPAIQQMVKRLIGKDPNQSVNPDEVVAIGAAVQAGVLAGEVKDILLLDVTPLSLGVETLGGVMTKIIPRNTTIPTKKSEVFSTAVDNQPNVEIQVLQGERELTKDNKSLGTFRLDGIMPAPRGVPQIEVTFDIDANGILSVKAKEKATGKEQSITISGASTLPKDDVERMVKEAEENFDTDQKRRKNIDTKNQAESLCYQAEKQIKEFEDKISQDLKTKIEELITELRSSLEKEEYENIESISQRLQNSLMDIGKMAAQAESKNTNTKDDGTVIDTDFSEAK

SEQ ID NO: 7506 - protein, 583 aa, Oryza sativa Japonica Group
MRRLLLAGILRRASSSPSSHHHLHLVRALSASSPLPASDADLRKYAGYALLLLGCGAATYYSFPLPPDALHKKAVPFKYAPLPDDLHAVSNWSATHEVHTRVLLQPDSLPALHDALAAAHGECRKLRPLGSGLSPNGLALSRAGMVNLALMDKVLGVDAKKKTVTVQAGIRVAELVDALREHGLTLQNFASIREQQVGGIIQVGAHGTGARLPPIDEQVISMKLVTPAKGTIELSREKDPDLFYLARCGLGGLGVVAEVTLQCVERHQLIEHTFVSNADEVKKNHKKWLSENKHIKYLWIPYTDTVVVVQCNPPSRWRTPKFTSKYGKDEAIQHVRDLYHESLKKYRTKAESNDPEVDQLSFTELRDRLLTLDPLDKDHVIRINKAEAEYWKKSEGYRMGWSDEILGFDCGGQQWVSETCFPAGTLAKPNMKDLDYIEELLQLIEKEDIPAPAPIEQRWTACSRSPMSPASSSQEDDIFSWVGIIMYLPTSDARQRKEITEEFFNYRSKTQTNLWDGYSAYEHWAKIEVPKDKDELAELQARLRKRFPVDAYNKARMELDPNKVLSNAKLEKLFPVTEVQHEK

SEQ ID NO: 7507 - protein, 374 aa, Crossosoma bigelovii
ALSIAGAVQSQKLAVRAISHLQSLPSGDIKLLCDTVVENVRELTGYDRVMVYKFHEDEHGEVVAESKRPDLVPYIGLHYPATDIPQASRFLFRQNRVRMIVDCNATPVKVIQDESLMQPLCLVGSTLRAPHGCHAQYMANMGSNASLAMAVIINGNEEEGVGGRSPMKLWGLVVCHHTSARCIPFPLRYACELLMQALGPQLNMELQLASQSSEKRVLRTQTLLCDMLLRDSPTGIVTQSPSIMDLVKCDGAALYYQGKYYPLGVTPTEPQIKDIVEWLLAFHGDSTGLSTDSLADAGYQGAATLGDAVCGMAVAYITKRDFLFWFRSHTAKEIKWGGAKHHPADKDDGQRMHPRSSFKAFLEVVKSRSLPWEN

SEQ ID NO: 7508 - protein, 365 aa, Averrhoa carambola
ALSIAGAVQSQKLAVRAISQLQLLPGGDIKLLCDTVVESVRELTGYDRVMVYKFHEDEHGEVVAESKRPDLEPYIGLHYPATDIPQASRFLFKQNRVRMIVDCNAKPVRVIQDEGLMQPLCLVGSTLRAPHGCHAQYMANMGSIASLAMAVIINGNDEEAIGGRNSMRLWGLVVCHHTSARCIPFPLRYACEFLMQAFGLQLNMELQLASQLSEKHVLRTQTLLCDMLLRDSPTGIVTQSPSIMDLVKCDGAALYYQGKYYRLGVTPTEAQIKDIIEWLLAFHGDSTGLSTDSLADAGYPGATSLGDAVCGMAVAYITKTDYLFWFRSHTAKEIKWGGAKHHPEDKDDGQRMHPRSSFKAFLEVV

SEQ ID NO: 7509 - protein, 365 aa, Averrhoa carambola
ALSIAGAVQSQKLAVRAISQLQLLPGGDIKLLCDTVVESVRELTGYDRVMVYKFHEDEHGEVVAESKRPDLEPYIGLHYPATDIPQASRFLFKQNRVRMIVDCNAKPVRVIQDEGLMQPLCLVGSTLRVPHGCHAQYMANMGSIASLAMAVIINGNDEEAIGGRNSMRLWGLVVCHHTSARCIPFPLRYACEFLMQAFGLQLNMELQLASQLSEKHVLRTQTLLCDMLLRDSPTGIVTQSPSIMALVKCDGAALYYQGKYYRLGVTPTEAQIKDIIEWLLAFHGDSTGLSTDSLADAGYPGATSLGDAVCGMAVAYITKTDYLFWFRSHTAKEIKWGGAKHHPEDKDDGQRMHPRSSFKAFLEVV

SEQ ID NO: 7510 - protein, 360 aa, Acanthothamnus aphyllus
AVQSQKLAVRAISHLQSLPGGDIKLLCATVVDSVRDLTGYDRVMVYKFHEDEHGEVVAESKRPDLEPYIGLHYPATDIPQASRFLFKQNRVRMIVDCRASPVGVRQDDGLMQPLCLVGSTLRAPHGCHAQYMENMGSKASLAMAVIINGNDEESIGGRNATRLWGLVVCHHTSARCIPFPLRYACEFLMQAFGLQLNMELQLAAQLSEKHVLKTQTLLCDMLLRDSPTSIVTQSPSIMDLVKCDGAALYYQGKYYPLGVTPAEAQIKDIVEWLLAFHGDSTGLSTDSLGDAGYPGAALLGNAVCGMAVAYITNRDFLLWFRSHTTKEIKWGGAKHHPEDKDDGQRMHPRSSFKAFLEVVK

SEQ ID NO: 7511 - protein, 374 aa, Acanthothamnus aphyllus
ALSIAGAVQSQKLAVRAISHLQSLPGGDIKLLCATVVDSVRDLTGYDRVMVYKFHEDEHGEVVAESKRPDLEPYIGLHYPATDIPQASRFLFKQNRVRMIVDCRASPVGVRQDDGLMQPLCLVGSTLRAPHGCHAQYMENMGSKASLAMAVIINGNDEESIGGRNATRLWGLVVCHHTSARCIPFPLRYACEFLMQAFGLQLNMELQLAAQLSEKHVLKTQTLLCDMLLRDSPTSIVTQSPSIMDLVKCDGAALYYQGKYCPLGVTPAEAQIKDIVEWLLAFHGDSTGLSTDSLGDAGYPGAALLGNAVCGMAVAYITNRDFLLWFRSHTTKEIKRGGAKHHPEDKDDGQRMHPRSSFKAFLEVVKSRSLPWEN

SEQ ID NO: 7512 - protein, 364 aa, Brexia madagascariensis
VQSQKLAVRAISRLQSLPGGDIKLLCDTVVESVRDLTGYDRVMVYKFHEDEHGEVVAESQRPDLEPYIGLHYPATDIPQASRFLFKQNRVRIIVDCHASSVRVIQDDGLMQPLCLVGSTLRAPHGCHAQYMENMGSIASLAMAVIINGNDEEVIGGRNPTRLWGLVVCHHTSARCILFPLRYACEFLMQAFGLQLNMELQLAAQLLEKHVLKTQTLLCDMLLRESPTGIVTQSPSIMDLVKCDGAALYYQGNFYPLGVTPTEAQIKDIVEWLLAFHGDSTGLSTDSFADAGYPGAALLGDAVCGMAVAYITNRDFLFWFRSHTAKEIKWGGAKHHPEDKDDGQRMHPRSSFKAFLEVVKRRSLP

SEQ ID NO: 7513 - protein, 361 aa, Brexia madagascariensis
QSQKLAVRAISRLQSLPGGDIKLLCDTVVESVRDLTGYDRVMVYKFHEDEHGEVVAESQRPDLEPYIGLHYPATDIPQASRFLFKQNRVRIIVDCHASSVRVIQDDGLMQPLCLVGSTLRAPHGCHAQYMENMGSIASLAMAVIINGNDEEVIGGRNPTRLWGLVVCHHTSARCILFPLRYACEFLMQAFGLQLNMELQLAAQLLEKHVLKTQTLLCDMLLRESPTGIVTQSPSIMDLVKCDGAALYYQGNFYPLGVTPTEAQIKDIVEWLLAFHGDSTGLSTDSFADAGYPGAALLGDAVCGMAVAYITNRDFLFWFRSHTAKEIKWGGAKHHPEDKDDGQRMHPRSSFKAFLEVVKRRS

SEQ ID NO: 7514 - protein, 363 aa, Campylostemon angolense
QSQKLAVRAISQLQSLPGGDIKLLCDTAVESVRNLTGYDRVMVYKFHEDEHGEVVAESRRPDLEPYIGLHYPATDIPQASRFLFKQNRVRIIVDCHASPVSVIQDDGLMQPLCLVGSTLRAPHGCHAQYMENMGSIASLAMAVIINGNDEDGIGGRNPTRLWGLVVCHHTSVRCIPFPLRYACEFLMQAFGLQLNMELQLAAQLLEKHVLKTQTLLCDMLLRESPTGIVTQSPSIMDLVKCDGAALYYQGNYYPSGVTPTEAQIKDIVNWLLAFHGDSTGLSTDSLADAGYPGATLLGDAVCGMAVAYITNRDFLFWFRSHTAKEIKWGGAKHHPEDKDDGQRMHPRSSFKAFLEVVKSRSLP

SEQ ID NO: 7515 - protein, 361 aa, Campylostemon angolense
QKLAVRAISQLQSLPGGDIKLLCDAAVESVRNLTGYDRVMVYKFHEDEHGEVVAESRRPDLEPYIGLHYPATDIPQASRFLFKQNRVRIIVDCHASPVSVIQDDGLMQPLCLVGSTLRAPHGCHAQYMENMGSIASLAMAVIINGNDEDGIGGRNPTRLWGLVVCHHTSVRCIPFPLRYACEFLMQAFGLQLNMELQLAAQLLEKHVLKTQTLLCDMLLRESPTGIVTQSPSIMDLVKCDGAALYYQGNYYPSGVTPTEAQIKDIVNWLLAFHGDSTGLSTDSLADAGYPGATLLGDAVCGMAVAYITNRDFLFWFRSHTAKEIKWGGAKHHPEDKDDGQRMHPRSSFKAFLEVVKSRSLP

SEQ ID NO: 7516 - protein, 358 aa, Canotia holacantha
ESQKLAVRAISHLQSLPGGDIKLLCATVVESVRDLTGYDRVMVYKFHEDEHGEVVAESKRPDLEPYIGLHYPATDIPQASRFLFKQNRVRMIVDCCASPVGVIQDDGLMQPLCLVGSTLRAPHGCHAQYMENMGSKASLAMAVIINGKDEEIVGGRNATRLWGLVVCHHTSARCIPFPLRYACEFLMQAFGLQLNMELQLAAQLSERHVLKTQTLLCDMLLRDSPTGIVTQSPSIMDLVKCDGAALYYQGKYYPSGVTPSEAQIKDIVEWLLAFHGDSTGLSTDSLADAGYPGAAFLGDAVCGMAVAYITNRDFLFWFRSHTTKEIKWGGAKHHPEDKDDGQRMHPRSSFKAFLEVVK

SEQ ID NO: 7517 - protein, 374 aa, Canotia holacantha
ALSIAGAVESQKLAVRAISHLQSLPGGDIKLLCATVVESVRDLTGYDRVMVYKFHEDEHGEVVAESKRPGLEPYIGLHYPATDIPQASRFLFKQNRVRMIVDCCASPVGVIQDDGLMQPLCLVGSTLRAPHGCHAQYMENMGSKASLAMAVIINGKDEEIVGGRNATRLWGLVICHHTSARCIPFPLRYACEFLMQAFGLQLNMELQLAAQLSEKHVLKTQTLLCDMLLRDSPTGIVTQSPSIMDLVECDGAALYYQGKYYPSGVTPSEAQTKDIVEWLLAFHGDSTGLSTDSLADAGYPGAAFLGDAVCGMAVAYITNRDFLFWFRSHTTKEIKWGGAKHHPEDKDDGQRMHPRSSFKAFLEVVKSRSLSWEN

SEQ ID NO: 7518 - protein, 374 aa, Catha edulis
ASSIAGAVQSQKLAVRAISQLQSLPGGDIKLLCDTVVESVRDLTGYDRVMVYKFHEDEHGEVVAESKRPDLEPYIGLHYPASDIPQASRFLFKQNRVRMIVDCRASPVRVIQDDGLMRPLCLVGSTLRAPHGCHAQYMENMGSLASLAMAVIINGNDEEVTGGRNPTRLWGLVVCHHTSARCIPFPLRYACEFLMQAFGLQLNMELQLAAQSLEKHVLKTQTLLCDRFLRDPPTGIVTQSPSIMDLVKCDGAALYYQGNYYPLGVTPTEVQIKDIVEWLLAFHGDSTGLSTDSLADAGYPGAALLGDAVCGMAVAYITNKDFLFWFRSHTAKEIKWGGAKHHPEDKDDGQRMHPRSSFKAFLEVVKSRSLPWEN

SEQ ID NO: 7519 - protein, 374 aa, Celastrus orbiculatus
ALSIAGAVQSQKLAVRAISRLQSLPGGDIKLLCDTVVESVRDLTSYDRVMVYKFHEDEHGEVVAESKRPDLEPYFGLHYPSTDIPQASRFLFKQNRVRMIADCRASPVGVIQDDGLMQPLCLVGSTLRAPHGCHAQYMENMGSRSSLAMAVIIHGNDEEVIGGRNATRLWGLVVCHHTSVRCIPFLLRYACEFLMQAFGLQLNMELQLAAQLSEKHVLKTQTLLCDMFLRDSPTGIVTQSLSIMDLVKCDGAALYYQGKYYPIGVTPAEAQIKDIVEWLLTFHGDSTGLSTDSLADAGYPGAALLGDAVCGMAVAYITKRDFLFWFRSHTTKEIKWGGAKHHPEDKDDGQRMHPRSSFKAFLEVVKSRSLPWEN

SEQ ID NO: 7520 - protein, 373 aa, Celastrus scandens
ALSIAGAVQSQKLAVRAISRLQSLPGGDIKLLCDTVVESVRDLTSYDRVMVYKFHEDEHGEVVAESKRPDLEPYFGLHYPSTDIPQASRFLFKQNRVRMIADCRASPVGVIQDDGLMQPLCLVGSTLRAPHGCHAQYMENMGSKSSLAMAVIINGTDEEVIGGRNATRLWGLVVCHHTSARCIPFPLRYACEFLMQAFGLQLNMELQLAAQLSEKHVLKTQTLLCDMLLRDSPTGIVTQSPSIMDLVKCDGAALYYQGKYYPIGVTPVEAQIKDIVEWLLTFHGDSTGLSTDSLADAGYPGAALLGDAVCGMAVAYITKKDFLFWFRSHTTKEIKWGGAKHHPEDKDDGQRMHPRSSFKAFLEVVKSRSLPCE

SEQ ID NO: 7521 - protein, 364 aa, Celastrus scandens
VQSQKLAVRAISRLQSLPGGDIKLLCDTVVESVRDLTSYDRVMVYKFHEDEHGEVVAESKRPDLEPYFGLHYPSTDIPQASRFLFKQNRVRMIADCRASPVGVIQDDGLMQPLCLVGSTLRAPHGCHAQYMENMGSKSSLAMAVIINGTDEEVIGGRNATRLWGLVVCHHTSARCIPFPLRYACEFLMQAFGLQLNMELQLAAQLSEKHVLKTQTLLCDMLLRDSPTGIVTQSPSIMDLVKCDGAALYYQGKYYPIGVTPVEAQIKDIVEWLLTFHGDSTGLSTDSLADAGYPGAALLGDAVCGMAVAYITKKDFLFWFRSHTTKEIKWGGAKHHPEDKDDGQRMHPRSSFKAFLEVVKSRSLP

SEQ ID NO: 7522 - protein, 370 aa, Celastrus scandens
ALSIAGAVQSQKLAVRAISRLQSLPGGDIKLLCDTVVESVRDLTSYDRVMVYKFHEDEHGEVVAESKRPDLEPYFGLHYPSTDIPQASRFLFKQNRVRMIADCRASPVGVIQDDGLMQPLCLVGSTLRAPHGCHAQYMENMGSKSSLAMAVIINGTDEEVIGGRNATRLWGLVVCHHTSARCIPFPLRYACEFLMQAFGLQLNMELQLAAQLSEKHVLKTQTLLCDMLLRDSPTGIVTQSPSIMDLVKCDGAALYYQGKYYPIGVTPVEAQIKDIVEWLLTFHGDSTGLSTDSLADAGYPGAALLGDAVCGMAVAYITKKDFLFWFRSHTTKEIKWGGAKHHPEDKDDGQRMHPRSSFKAFLEVVKSRSL

SEQ ID NO: 7523 - protein, 374 aa, Crossopetalum rhacoma
ALSIAGAVQSQKLAVRAISQLQSLPGGDIKLLCDTVVESVRHLTGYDRVMVYKFHEDEHGEVVAERKRPDLEPYIGPHYPATDIPQASRFLFKQNRVRTIVDCHASPVRVIQDDGLMQPLCLVGSTLRAPHGCHAQYMENMGSIASLAMAVIINGNDEEVIGGRNTTRLWGLVVCHHTSARCIPFPLRYACEFLMQAFGLQLNMELQLAAQLSEKHVWKTRTLLCDMLLRDSPTGIVTQSPSIMDLVKCDGAALYYQGNYYPLGVTPTEAQITDIVGWLLDFHGDSTGLSTDSLADAGYPGAALLGDAVCGMAVAYITNRDFLFWFRSHTAKEIKWGGAKHHPEDRDDGQRMHPRSSFQAFLEVVKSRSLPWEN

SEQ ID NO: 7524 - protein, 374 aa, Crossopetalum rhacoma
ALSIAGAVQSQKLAVRAISQLQSLPGGDIKLLCDTVVESVRHLTGYDRVMVYKFHEDEHGEVVAERKRPDLEPYIGPHYPATDIPQASRFLFKQNRVRTIVDCHASPVRVIQDDGLMQPLCLVGSTLRAPHGCHAQYMENMGSIASLAMAVIINGNDEEVIGGRNTTRLWGLVVCHHTSARCIPFPLRYACEFLMQAFGLQLDMELQWRAQLSKKHVWKTRTLLCDMVLRDSPTGIVTQSPSIMDLVKCDGAALYYQGNYYPLGVTPTEAQITDIVGWLLDFHGDSTGLSTDSLADAGYPGAALLGDAVCGMAVAYITNRDFLFWFRSHTAKEIKWGGAKHHPEDRDDGQRMHPRSSFQAFLEVVKSRSLPWEN

SEQ ID NO: 7525 - protein, 374 aa, Cuervea integrifolia
ALSIAGAVQSQKLAVRAISQLQSLPGGDIKLLCDTAVESVRNLTGYDRVMVYKFHEDEHGEVVAESRRPDLEPYIGLHYPATDIPQASRFLFKQNRVRIIVDCHASPVSVIQDDGLMQPLCLVGSTLRAPHGCHAQYMENMGSIASLAMAVIINGNDEDGIGGRNPTRLWGLVVCHHTSARCIPFPLRYACEFLMQAFGLQLNMELQLAAQLLEKHVLKTQTLLCDMLLRESPTGIVTQSPSIMDLVKCDGAALYYQANYYPLGVTPTEAQIRDIVEWLLAFHGDSTGLSTDSLADAGYPGATLLGDAVCGMAVAYITNRDFLFWFRSHTAKEIKWGGAKHHPEDKDDGQRMHPRSSFKAFLEVVKSRSLPWEN

SEQ ID NO: 7526 - protein, 363 aa, Cuervea kappleriana
SQKLAVRAISQLQSLPGGDIKLLCDTAVESVRNLTGYDRVMVYKFHEDEHGEVVAESRRPDLEPYIGLHYPATDIPQASRFLFKQNRVRIIVDCHASPVSVIQDDGLMQPLCLVGSTLRAPHGCHAQYMENMGSIASLAMAVIINGNDEDGIGGRNATRLWGLVVCHHTSARCIPFPLRYACEFLMQAFGLQLNMELQLAAQLLEKHVLKTQTLLCDMLLRESPTGIVTQSPSIMDLVKCDGAALYYQANYYPLGVTPTEAQIRDIVEWLLAFHGDSTGLSTDSLADAGYPGATLLGDAVCGMAVAYITNRDFLFWFRSHTAKEIKWGGAKHHPEDKDDGQRMHPRSSFKAFLEVVKSRSLPG

SEQ ID NO: 7527 - protein, 364 aa, Dicarpellum baillonianum
VQSQKLAVRAISQLQSLPGGDIKLLCDTVVECVGDLTGYDRVMVYRFHEDEHGEVVAESKRPDLEPYLGLHYPATDIPQASRSLFKQNRVRMIVDCHASPVRVIQDDGLMQALCLVGSTLRAPHGCHAQYMENMGSIASLAMAVIINVNDEEATAGRNPTRLWGLVVCHHTSARCIPFPLRYACEFIMQAFGLQLNMELQLAAQLLEKHVLKTQTLLCDMLLRDSPTGIVTQSPSIMNLVKCDGAALYYQGNYYPLGVTPAEAQIKDIVEWLLAFHGDSTGLSTDSLADAGYPGAALLGDAVCGMAVAYITNRDFLFWFRSHTAKETKWGGAKHHPEDKDDGQRMHPRSSFKAFLEVVKSRSLP

SEQ ID NO: 7528 - protein, 362 aa, Dicarpellum baillonianum
QSQKLAVRAISQLQSLPGGDIKLLCDTVVECVGDLTGYDRVMVYRFHEDEHGEVVAESKRPDLEPYLGLHYPATDIPQASRSLFKQNRVRMIVDCHASPVRVIQDDGLMQALCLVGSTLRAPHGCHAQYMENMGSIASLAMAVIINVNDEEATAGRNPTRLWGLVVCHHTSARCIPFPLRYACEFIMQAFGLQLNMELQLAAQLLEKHVLKTQTLLCDMLLRDSPTGIVTQSPSIMNLVKCDGAALYYQGNYYPLGVTPAEAQIKDIVEWLLAFHGDSTGLSTDSLADAGYPGAALLGDAVCGMAVAYITNRDFLFWFRSHTAKETKWGGAKHHPEDKDDGQRMHPRSSFKAFLEVVKSRSL

SEQ ID NO: 7529 - protein, 365 aa, Dicarpellum pancheri
QSQKLAVRAISQLQSLPGGDIKLLCDTVVECVGDLTGYDRVMVYRFHEDEHGEVVAESKRPDLEPYLGLHYPATDIPQASRFLFKQNRVRMIVDCHASPVRVIQDDGLMQALCLVGSTLRAPHGCHAQYMENMGSIASLAMAVIINGNDEEATAGRNPTRLWGLVGCHHTSARCIPFPLRYACEFIMQAFGLQLNMELQLAAQLLEKHVLKTQTLLCDMLLRDSPTGIVTQSPSIMNLVKCDGAALYYQGNYYPLGVTPAEAQIKDIVEWLLAFHGDSTGLSTDSLADAGYPGAALLGDAVCGMAVAYITNRDFLFWFRSHTAKETKWGGAKHHPEDKDDGQRMHPRSSFKAFLEVVKSRSLPGR

SEQ ID NO: 7530 - protein, 364 aa, Dicarpellum pancheri
VQSQKLAVRAISQLQSLPGGDIKLLCDTVVECVGDLTGYDRVMVYRFHEDEHGEVVAESKRPDLEPYLGLHYPATDIPQASRFLFKQNRVRMIVDCHASPVRVIQDDGLMQALCLVGSTLRAPHGCHAQYMENMGSIASLAMAVIINGNDEEATAGRNPTRLWGLVGCHHTSARCIPFPLRYACEFIMQAFGLQLNMELQLAAQLLEKHVLKTQTLLCDMLLRDSPTGIVTQSPSIMNLVKCDGAALYYQGNYYPLGVTPAEAQIKDIVEWLLAFHGDSTGLSTDSLADAGYPGAALLGDAVCGMAVAYITNRDFLFWFRSHTAKETKWGGAKHHPEDKDDGQRMHPRSSFKAFLEVVKSRSLP

SEQ ID NO: 7531 - protein, 361 aa, Elaeodendron orientale
QKLAVRAISQLQSLPGGDIKLLCDTVVECVRDLTGYDRVMVYKFHEDEHGEVVAESKRPDLEPYIGLHYPSTDIPQASRFLFKQNRVRIIVDCHASPVCVIQDDGLMQPLCLVGSTLRAPHGCHAQYMENMGSIASLAMAVVINGNDEEVIRGKNLTRLWGLVVCHHTSARCIPFPLRYACEFLMQAVGLQLNMELQLAAQLLEKHVLKTQTLLCDMLLRDSPIGIVTQSPSIMDLVKCDGAALYYQGNYYPLGVTPSEVQIKDIVEWLLAFHGDSTGLSTDSLADAGYPRAALLGDAVCGMAVAYITNRDFLFWFRSHTAKEIKWGGAKHHPEEKDDGQRMHPRSSFKAFLEVVKSRSLP

SEQ ID NO: 7532 - protein, 362 aa, Elaeodendron orientale
QSQKLAVRAISQLQSLPGGDIKLLCDTVVECVRDLTGYDRVMVYKFHEDEHGEVVAESKRPDLEPYIGLHYPSTDIPQASRFLFKQNRVRIIVDCHASPVCVIQDDGLMQPLCLVGSTLRAPHGCHAQYMENMGSIASLAMAVVINGNDEEVIRGKNLTRLWGLVVCHHTSARCIPFPLRYACEFLMQAVGLQLNMELQLAAQLLEKHVLKTQTLLCDMLLRDSPIGIVTQSPSIMDLVKCDGAALYYQGNYYPLGVTPSEVQIKDIVEWLLAFHGDSTGLSTDSLADAGYPRAALLGDAVCGMAVAYITNRDFLFWFRSHTAKEIKWGGAKHHPEEKDDGQRMHPRSSFKAFLEVVKSRSC

SEQ ID NO: 7533 - protein, 374 aa, Elaeodendron xylocarpum
ALSIAGAVQSQKLAVCAISQLQSLPGGDIKLLCDTVVESVGDLTGYDRVMVYKFHEDEHGEVVAESKRPDLEPYIGLHYPSTDIPQASRFLFKQNRVRIIVDCHASPVRVIQDGGLTQPLCLVGSTLRAPHGCHAQYMENMGSIASLAMAVVINGNDEEVIGGRNPTRLWGLVVCHHTSARCIPFPLRYACEFLMQAFGLQLNMELQLAAQLLEKHVLKTQTLLCDMLLRDSPIGIVTQSPSIMDLVKCDGAALYYQGNYYPLGVTPSEAQIKDIVEWLLAFHGDSTGLSTDSLADAGYPGAALLGDAVCGMAVAYITNRDFLFWFRSHTAKEIKWGGAKHHPEDEDDGERMHPRSSFKAFLEVVKSRSLPWEN

SEQ ID NO: 7534 - protein, 374 aa, Elaeodendron xylocarpum
ALSIAGAVQSQKLAVRAISQLQSLPGGDIKLLCDTVVESVRDLTSYDRVMVYKFHEDEHGEVVAESKRPDLEPYIGLHYPSTDIPQASRFLFKQNRVRIIVDCHASPVRVIQDGGLTQPLCLVGSTLRAPHGCHAQYMENMGSIASLAMAVVINGNDEEVIGGRNPTRLWGLVVCHHTSARCIPFPLRYACEFLMQAFGLQLNMELQLAAQLLEKHVLKTQTLLCDMLLRDSPIGIVTQSPSIMDLVKCDGAALYYQGNYYPLGVTPSEAQIKDIVEWLLAFHGDSTGLSTDSLADAGYPGAALLGDAVCGMAVAYITNRDFLFWFRSHTAKEIKWGGAKHHPEDKDDGERMHPRSSFKAFLEVVKSRSLPWEN

SEQ ID NO: 7535 - protein, 374 aa, Euonymus alatus
ALSIAGAVQSQKLAVRAISQLQSLPGGDIKLLCDTVVETVRDLTGYDRVMVYKFHDDEHGEVVAENKKPDLEPYIGLHYPATDIPQASRFLFKQNRVRMIVDCHASTVRVIQDDRLVQPLCLVGSTLRAPHGCHAQYMENMGSQASLALAVISNGNDEEVIGGRNATRLWGLVVCHHTSARCIPFLFRYACEFLMQAFGLQLNMELQLAAQVSEKHVLKTQTLLCDMFLRDSPTGIVTKSPSIMDLVKCDGAAFYYQGKYYPLGVTPAEAQIKDIVEWLLAFHGDSTGLSTDSLADAGYPAAASLGDSVCGMAVAYITNRDFLFWFRSHTTEEIKWGGAKHHHEDKDDGQRMHPRSSFKAFLEVVKSRSFPWEN

SEQ ID NO: 7536 - protein, 374 aa, Euonymus europaeus
ALSIAGAVQSQKLAVRAISQLQSLPGGDIKLLCDTVVESVRDLTGYDRVMVYKFHDDEHGEVVAESKRPDLEPYFGLHYPATDIPQASRFLFKQNRVRMIVDCHASPVCVIQDYRLIQPLCLVGSTLRAPQGGHAQYMENMGSKASLAMPVIINGNDEEVIGGRNATRLWGLVVCHHTSARCTPFPLRYACEFLLQAFGLQLNMELQLAAQLSEKHVLKTQTLLCDMLLRDSPTGIVTKSPSIMDLVKCDGAALYYQGKYYPLGVTPAQAQMKDIVEWLLAFHGDSTGLSTDSLADAGYPGAALLGDAVCGMAVAYITKRDFLFWFRSHTAKEIKWGGAKHHPEDKDDGQRMHPRSSFKAFLEVVKSKSLPWEN

SEQ ID NO: 7537 - protein, 374 aa, Euonymus europaeus
ALSIAGAVQSQKLAVRAISRLQSLPGGDIKLLCDTVVESVRDLTGYDRVMVYKFHDDEHGEVVAESKRHDLEPYFGLHYPATDIPQASGFLFKQNRVRMIVDCHASPVRVIQDDRLIQPLCLVGSTLRAPHGCHAQYMENMGSKASLAMAVIINGNDEEVIGGRNATRLWGLVVCHHTSARCTPFPLRYACEFLLQAFGLQLNMELQLAAQLSEKHVLKTQTLLCDMLLRDSPTGIVTKSPSIMDLVKCDGAALYYQGKYYPLGVTPAEAQIKDIVEWLLAFHGDSTGLSTDSLADAGYPGAASLGDSVCGMAVAYITNRDFLFWFRSHTTEEIKWGGAKHHPEDKDDGQRMHPRSSFQAFLEVVKSRSFPWEN

SEQ ID NO: 7538 - protein, 374 aa, Gyminda tonduzii
ALSIAGAVQSQKLAIRAISQLQSLPGGDIKLLCDTVVESVRELTGYDRVMVYKFHEDEHGEVAAESKRTDLEPYFGLHYPATDIPQASRFLFRQNRVRMIVDCHASPVRVIQDDGLMQPLCLVGSTLRAPHGCHAQYMENMGSKASLAMAVIINGNDEEVIGGRNATRLWGLVVCHHTSARCIPFPLRYACEFPMQAFGLQLNMELQLAAQLSEKHVLKTQALLCDMLLRDSPTGIVTQSPSIMDLVKCDGAALYYQGKYFPIGVTPTEAQIKDIVEWLLVFHGDSTGLSTDSLADAGYPGAALLGDAVCGMAVAYITKKDFLFWFRSHTTKEIKWGGAKHHPEDKDDGQRMHPRSSFKAFLEVVKSRSLPWES

SEQ ID NO: 7539 - protein, 374 aa, Loeseneriella africana
ALSIAGAVQSQKLAVRAISQLQSLPGGDIKLLCDTAVENVRNLTGYDRVMVYKFHEDEHGEVVAESRRPDLEPYIGLHYPATDIPQASRFLFKQNRVRIIVDCHASPVSVIQDDGLMQPLCLVGSTLRAPHGCHAQYMENMGSIASLAMAVIINGNDEDGMGGRNPTRLWGLVVCHHTSARCIPFPLRYACEFLMQAFGLQLNMELQLAAQLLDKHVLKTQTLLCDMLLRESPTGIVTQSPSIMDLVKCDGAALYYQANYYPLGVTPTEAQIKDIVEWLLAFHGDSTGLSTDSLADAGYPGATSLGDAVCGMAVAYITNKDFLFWFRSHTAKEIKWGGAKHHPEDKDDGQRMHPRSSFKAFLEVVKSRSLPWEN

SEQ ID NO: 7540 - protein, 363 aa, Loeseneriella africana
QSQKLAVRAISQLQSLPGGDIKLLCDTAVENVRNLTGYDRVMVYKFHEDEHGEVVAESRRPDLEPYIGLHYPATDIPQASRFLFKQNRVRIIVDCHASPVIVIQDDGLMQPLCLVGSTLRAPHGCHAQYMENMGSIASLAMAVIINGNDEDGMGGRNPTRLWGLVVCHHTSARCIPFPLRYACEFLMQAFGLQLNMELQLAAQLLEKHVLKTQTLLCDMLLRESPTGIVTQSPSIMDLVKCDGAALYYQANYYPLGVTPTEAQIKDIVEWLLAFHGDSTGLSTDSLADAGYPGATSLGDAVCGMAVAYITNKDFLFWFRSHTAKEIKWGGAKHHPEDKDDGQRMHPRSSFKAFLEVVKSRSLP

SEQ ID NO: 7541 - protein, 365 aa, Loeseneriella africana
AVQSQKLAVRAISQLQSLPGGDIKLLCDTAVENVRNLTGYDRVMVYKFHEDEHGEVVAESRRPDLEPYIGLHYPATDIPQASRFLFKQNRVRIIVDCHASPVSVIQDDGLMQPLCLVGSTLRAPHGCHAQYMENMGSIASLAMAVIINGNDEDGMGGRNPTRLWGLVVCHHTSARCIPFPLRYACEFLMQAFGLQLNMELQLAAQLLEKHVLKTQTLLCGMLLRESPTGIVTQSPSIMDLVKCDGAALYYQANYYPLGVTPTEAQIKDIVEWLLAFHGDSTGLSTDSLADAGYPGATSLGDAVCGMAVAYITNKDFLFWFRSHTAKEIKWGGAKHHPEDKDDGQRMHPRSSFKAFLEVVKSRSLP

SEQ ID NO: 7542 - protein, 364 aa, Maytenus fournieri
VQSQKLAVRAISQLQSLPGGDVKLLCETVVESVKDLTGYDRVMVYKFHDDEHGEVVAERKRPDLEPYIGLHYPATDIPQASRFLFKQNRVRMIVDCHALPVRVIQDDGLMQPLCLVGSTLRAPHGCHAQYMENMGSIASLAMAVIINGNDEEVIGGRNPTRLWGLVVCHHTSARCIPFALRYACEFLMPAFGLQLNMELQLAAQLLEKHVLKTQTLLCDMLLRDSPTGIVTQSPSIMDLVKCDGAALYYQGSYYPLGVTPTEAQIKDIVEWLLAFHGDSTGLSTDSLADAGYPGAALLGDAVCGMAVAYITNRDFLFWFRSHTAKEIKWGGAKHHPEDKDDGQRMHPRSSFKAFLEVVKSRSMP

SEQ ID NO: 7543 - protein, 363 aa, Maytenus fournieri
QSQKLAVRAISQLQSLPGGDVKLLCETVVESVKDLTGYDRVMVYKFHDDEHGEVVAERKRPDLEPYIGLHYPATDIPQASRFLFKQNRVRMIVDCHALPVRVIQDDGLMQPLCLVGSTLRAPHGCHAQYMENMGSIASLAMAVIINGNDEEVIGGRNPTRLWGLVVCHHTSARCIPFPLRYACEFLMQAFGLQLNMELQLAAQLLEKHVLKTQTLLCDMLLRDSPTGIVTQSPSIMDLVKCDGAALYYQGSYYPLGVTPTEAQIKDIVEWLLAFHGDSTGLSTDSLADAGYPGAALLGDAVCGMAVAYITNRDFLFWFRSHTAKEIKWGGAKHHPEDKDDGQRMHPRSSFKAFLEVVKSRSMP

SEQ ID NO: 7544 - protein, 358 aa, Maytenus undata
SQKLAVRAISQLQSLPGGDIKLLCDTVVESVRDLTGYDRVMVYKFHEDEHGEVMAESKRPDLEPYIGLHYPASDIPQASRFLFKQNRVRMIVDCHASPVLVIQDDRLMQPLCLVGSTLRAPHGCHAQYMENMGSIASLAMAVIINVNDGEGIGGRNPTRLWGLVVCHHTSARCIPFPLRYACEFLMQAFGLQLNMELQLAAQLLEKHVLKTQTLLCDMLLRDSPTGIVTQSPSIMDLVKCDGAALYYQGNYYPLGVTPTEAQIKDIVEWLLAFHGDSTGLSTDSLADAGYPGAALLGDAVCGMAVAYITNRDFLFWFRSHTAKEIKWGGAKHHPEDKDDGQRMHPRSSFKAFLEVVKS

SEQ ID NO: 7545 - protein, 361 aa, Peripterygia marginata
QKLAVRAISHLQSLPGGDIKLLCDTVVESVRDLTGYDRVMVYKFHEDEHGEVVAESKRPDLEPYIGLHYPATDIPQASRFLFKQNRVRMIVDCHASPVRVIQDDGLMQPLCLVGSTLRAPHGCHAQYMENMGSIASLAMAVIINGNDEEVIGGRNATRLWGLVVCHHTSARCIPFPLRYACEFLMQAFGLQLNMELQLAAQLSEKHVLKTQTLLCDMLLRDSPTGIVTQSPSIMDLVKCDGAALYYQGNYYPLGVTPTEPQIKDIVEWLLAFHGDSTGLSTDSLADAGYAGAALLGDAVCGMAVAYITNRDFLFWFRSHTAKEIKWGGAKHHPEDKDDGQRMHPRSSFKAFLEVVKSRSLP

SEQ ID NO: 7546 - protein, 374 aa, Mortonia greggii
ALSIAGAVQSQKLAVRAISQLQSLPGGDIKLLCDAVVENVRNLTGYDRVMVYKFHEDEHGEVVAESKRPDLEPYIGLHYPATDIPQASRFLFKQNRVRMIVDCHSTPVSVIQDDGLMQPLCLVGSTLRAPHGCHAQYMANMGSIASLAMAVIINGNDEDGIGGRNTTRLWGLVVCHHTSARCIPFPLRYACEFLMQAFGLQLNMELQLASQLLEKHVLKTQTLLCDMLLRDSPTGIVTQSPSIMDLVKCDGAALYHQGKYYPLGVTPTEAQIKDIVEWLLAFHGESTGLSTDSLADAGYPGAALLGDAVCGMAVAYITDRDFLFWFRSNTAKEIKWGGAKHHPEDKDDGQRMHPRSSFKAFLEVVKSRSLPWEN

SEQ ID NO: 7547 - protein, 374 aa, Mortonia greggii
ALSIAGAVQSQKLAVRAISQLQSLPGGDIKLLCDAVVENVRNLTGYDRVMVYKFHEDGHGEAVAESKRPDLEPYIGLHYPATDIPQASRFLFKQNRVRMIVDCHSTPVSVIQDDGLMQPLCLVGSTLRAPHGCHAQYMANMGSIASLAMAVIINGNDEDGIGGRNTTRLWGLVVCHHTSARSIPFPLRYACEFLMQAFGLPLNMELQLASQLLEKHVLKTQTLLCDMLLRDSPTGIVTQSPSIMDLVKCDGAALYHQGKYYPLGVTPTEAQIKDIVEWLLAFHGESTGLSTDSLADAGYPGAALLGDAVCGMAVAYITDRDFLFWFRSNTAKEIKWGGAKHHPEDKDDGQRMHPRSSFKAFLEVVKSRSLPWEN

SEQ ID NO: 7548 - protein, 374 aa, Plagiopteron suaveolens
ALSIAGAVQSQKLAVRAISQLQSLPGGDIKLLCDTVVQSVRDLTGYDRVMVYKFHEDEHGEVIAESKRPDLEPYIGLHYPATDIPQASRFLFKQNRVRIIVDCHASPVSVIQDDGLMQPLCLVGSTLRAPHGCHAQYMDNMGSIASLAMAVIINGNDEDGTGGRNPTRLWGLVVCHHTSARCIPFPLRYACEFLMQAFGLQLNMELQLAAQLLEKHVLKTQTLLCDMLLRESPTGIVTQSPSIMDLVKCDGAALYYQANYYPLGVTPTEAQIKDIVEWLLAFHGDSTGLSTDSLADAGYPGATLLGDAVCGMTVAYITNRDFLFWFRSHTAKEIKWGGAKHHPEDKDDGQRMHPRSSFKAFLEVVKSRSLPWEN

SEQ ID NO: 7549 - protein, 374 aa, Plagiopteron suaveolens
ALSIAGAVQSQKLAVRAISQLQSLPGGDIKLLCDTVVQSVRDLTGYDRVMVYKFHEDEHGEVIAESKRPDLEPYIGLHYPATDIPQASRFLFKQNRVRIIVDCHASPVSVIQDDGLMQPLCLVGSTLRAPHGCHAQYMDNMGSIASLAMAVIINGNDEDGTGGRNPTRLWGLVGWHHPSARCIPFPLRYACEFLMQAFGLQLNMELQLAAQLLEKHVLKTQTLLCDMLLRESPTGIVTQSPSIMDLVKCDGAALYYQANYYPLGVTPTEAQIKDIVEWLLAFHGDSTGLSTDSLADAGYPGATLLGDAVCGMAVAYITNRDFLFWFRSHTAKEIKWGGAKHHPEDKDDGQRMHPRSSFKAFLEEVKSRSLPWEN

SEQ ID NO: 7550 - protein, 365 aa, Pleurostylia opposita
VQSQKLAVRAISQLQSLPGGDIKLLCDTVVESVRDLTGYDRVMVYKFHEDEHGEVVAESKRPDLEPYIGLHYPATDIPQASRFLFKQNRVRIIVDCHASPVRVLQDDGLMQPLCLVGSTLRAPHGCHAQYMENMGSIASLAMAVIINGNDEEAIDGKNPTRLWGLVVCHHTSARCIPFPLRYACEFLMQAFGLQLNMELQLAAQVLEKHVLKTQTLLCDMLLRDSPIGIVTQSPSIMDLVKCDGAALYYRGNYYPLGVTPTEAQIKDIEEWLLAFHGDSSGLSTDSLADAGYPGAALLGDAVCGMAVAYITNRDFLFWFRSHTAKEIKWGGAKHHPEDKDDGQRMHPRSSFKAFLEVVKSRSLPW

SEQ ID NO: 7551 - protein, 374 aa, Pristimera andina
ALSIAGAVQSQKLAVRAISQLQSLPGGDIKLLCDTAVESVRDLTGYDRVMVYKFHEDEHGEVVAESKRPDLEPYIGLHYPATDIPQASRFLFKQNRVRIIVDCHASPVNVIQDGGLMQPLCLVGSTLRAPHGCHAQYMENMGSIASLAMAVVINGNDEDGIGGRNPTRLWGLVVCHHTSARCIPFPLRYACEFLMQAFGLQLNMELQLAAQLLEKHVLKTQTLLCDMLLRESPTGIVTQSPSIMDLVKCDGAALYYQANYYPLGVTPTEAQIKDIVEWLLVFHGDSTGLSTDSLADAGYPGATLLGDAVCGMAVAYITNRDFLFWFRSHTAKEIKWGGAKHHPEDKDDGLRMHPRSSFKAFLEVVKSRSLPWEN

SEQ ID NO: 7552 - protein, 374 aa, Pristimera andina
ALSIAGAVQSQKLAVRAISRLQSLPGGDIKLLCDTAVESVRDLTGYDRVMVYKFHEDEHGEVVAGSKRPDLEPYIGLHYPATDIPQASRFLFKQNRVRIIVDCHASPVNVIQDDGLMQPLCLVGSTLRAPHGCHAQYMENMGSIASLAMAVVINGNDEDGIGGRNPTRLWGLVVCHHTSARCIPFPLRYACEFLMQAFGLQLNMELQLAAQLLEKHVLKTQTLLCDMLLRESPTGIVTQSPSIMDLVKCDGAALYYQANYYPLGVTPTEAQIKDIVEWLLVFHGDSTGLSTDSLADAGYPGATLLGDAVCGMAVAYITNRDFLFWFRSHTAKEIKWGGAKHHPEDKDDGLRMHPRSSFKAFLEVVKSRSLPWEN

SEQ ID NO: 7553 - protein, 374 aa, Psammomoya choretroides
ALSIAGAVQSQKLAVRAISQLQSLPGGDIKLLCDTVVESVADLTGYDRVMVYRFHEDEHGEVVAESKRPDLEPYIGLHYPATDIPQASRFLFKQNRVRMIVDCHASPVHVIQDDGLMQPLCLVGSTLRAPHGCHAQYMENMGSIASLAMAVIINGNDEEVIGGRNPTRLWGLVVCPHTSARCIPFPLRYACEFLMQAFGLQLNMELQLAAQLLEKHVLKTQTLLCDMLLRDSPTGIVTQSPSIMDLVKCDGAALYYRGNYYPLGVTPTEAQIKDIVEWLLAFHGDSTGLSTDSLADAGYPGAALLGDAVCGMAVAYITNRDFLFWFRSHTAKETKWGGAKHHPEDKDDGQRMHPRSSFKAFLEVVKSRSLPWEN

SEQ ID NO: 7554 - protein, 374 aa, Psammomoya choretroides
ALSIAGAVQSQKLAVRAISQLQSLPGGDIKLLCDTVVESVADLTGYDRVMVYRFHEDEHGEVVAESKRPDLEPYIGLHYPATDIPQASRFLFKQNRVRMIVDCHASPVHVIQDDGLMQPLCLVGSTLRAPHGCHAQYMENMGSIASLAMAVIINGNDEEVIGGRNPTRLWGLVVCHHTSARCVPFPLRYACEFLMQAFGLQLNMELQLAAQLLEKHVLKTQTLLCDMLLRDSPTGIVTQSPSIMDLVKCDGAALYYRGNYYPLGVTPTEAQIKDIVEWLLAFHGDSTGLSTDSLADAGYPGAALLGDAVCGMAVAYITNRDFLFWFRSHTAKETKWGGAKHHPEDKDDGQRMHPRSSFKAFLEVVKSRSLPWEN

SEQ ID NO: 7555 - protein, 374 aa, Pterocelastrus tricuspidatus
ALSIAGAVQSQKLAVRAISQLQSLPGGDIKLLCDTVVESVRDLTGYDRVMVYKFHEDEHGEVMAESRRPDLEPYIGLHYPASDIPQASRFLFKQNRVRMIVDCHASPVLVIQDDGLMQPLCLVGSTLRAPHGCHAQYMENMSSIASLAMAVIINGSDEEGVGGRNPTRLWGLVVCHHTSARCIPFPLRYACEFLMQAFGLQLNMELQLAAQLLEKHVLKTQTLLCDMLLRDSPTGIVTQSPSIMDLVKCDGAALYYQGNYYPLGVTPTEAQIKDIVEWLLAFHGDSTGLSTDSLADAGYPGAALLGDAVCGMSVAYITNRDFLFWFRSHTAKEIKWGGAKHHPEDKDDGQRMHPRSSFKAFLEVVKSRSLPWEN

SEQ ID NO: 7556 - protein, 374 aa, Quetzalia occidentalis
ALSIAGAVQSQKLAVRAISQLQSLPGGDIKLLCDTVVESVRDPTGYDRVMVYKFHEDEHGEVVAESKRPDLEPYIGLHYPAADIPQASRFLFKQNRVRMIVDCHATPVSVIQDDGLMQPLCLVGSTLRAPHGCHAQYMANMGSMASLAMAVVINGNDEEGIGGRNTTRLWGLVVCHHPSARGIPFPLRYACEFLLQALGLQLNMELQLAAQLSEKHVLRTQTLLCDMLLRDSPTGIVTQNPSIMDLVKCDGAALYYQGKYYPLRVTPTEAQIKGIVEWMLAFHGDSTGLSTDSLADAGYPGAASLGDAVCGMAVAYITNRDFLFWFRSNTAKEIKWGGAKHHPKDKDDGQRMHPRSSFKAFLEVVKSRSLPWEN

SEQ ID NO: 7557 - protein, 374 aa, Quetzalia occidentalis
ALSIAGAVQSQKLAVCSISQLQSLPGGDIKLLCDTVVESVRDLTGYDRVMVYKFHEDEHGEVVAESKRPDLEPYIGLHYPATDIPQASRFLFKQNRVRMIVDCHATPVRVIQDDGLLQPLCLVGSTLRAPHGCHAHYMANMGSMASLAMAVIINVNDEEGIGGRNATRLWGLVVCHHTSTRCIPFPLRYACEFLMQAFGLQLNMELQLALQLSEKHVLRTQTLLCDMLLRDSPTGIVTQSPSTMDLVKCDGAALYHQGKYYPLGVTPTEAQIKDIVEWLLAFHGDSTGLSTDSLADAGYPGAVSLGDAVCGMAVAYITNRDFLFWFRSHTGKEMKWGGAKHHPEDKDDGQRMQPRSSFKAFLEVVKSRSLPWEN

SEQ ID NO: 7558 - protein, 374 aa, Reissantia sp. Chase 2095
ALSIAGAVQSQKLAVRAISQLQSLPGGDIKLLCDTAVESVRNLTGYDRVMVYKFHEDEHGEVVAESRRPDLEPYIGLHYPATDIPQASRFLFKQNRVRIIVDCHASPVSVIQDDGLMQPLCLVGSTLRAPHGCHAQYMENMGSIASLAMAVIINGNDEDGMGGRNPTRLWGLVVCHHTSARCIPFPLRYACEFLMQAFGLQLNMELQLAAQLLEKHVLKTQTLLCDMLLRESPTGIVTQSPSIMDLVKCDGAALYYQANYYPVGVTPTEAQIKDIVEWLLAFHGDSTGLSTDSLADAGYPGATSLGDAACGMAVAYITNRDFLFWFRSHTAKEIKWGGAKHHPEDKDDGQRMHPRSSFKAFLEVVKSRSLPWEN

SEQ ID NO: 7559 - protein, 374 aa, Reissantia indica
ALSIAGAVQSQKLAVRAISQLQSLPGGDIKLLCDTAVESVRNLTGYDRVMVYKFHEDEHGEVVAESRRPDLEPYIGLHYPATDIPQASRFLFKQNRVRIIVDCHASPVSVIQDDGLMQPLCLVGSTLRAPHGCHAQYMENMGSIASLAMAVIINGNDEDRMGGRNPTRLWGLAVCHHTSARCIPFPLRYACEFLMQAFGLQLNMELQLAAQLLEKHVLKTQTLLCDMLLRESPTGIVTQSPSIMDLVKCDGAALYYQANYYPLGVTPTEAQIKDIVEWLLAFHGDSTGLSTDSLADAGYPGATSLGDAVCAMAVAYITNRDFLFWFRSHTAKEIKWGGAKHHPEDKDDGQRMHPRSSFKAFLEVVKSRSLPWEN

SEQ ID NO: 7560 - protein, 361 aa, Salacia nitida
QSQKLAVRAISQIQSLPGGDIKLLCDTVVESVRDLTGYDRVMVYKFHEDEHGEVVAECKRPDLEPYIGLHYPATDIPQASRFLFKQNRVRMIVDCHASPVRVIQDDGLMRPLRLVGSTLRAPHGCHAQYMENMGSIASLAMAVIINGNDEEVIGGRNPTRLWGLVVCHHTSARCIPFPLRYACEFLMQAFGLQLKMELQLAAQLLEKHVLKTQTLLCDMLLRDSPTGIVTQSPSIMDLVKCDGAALYFQGNYYPLGVTPTEAQIKDIVEWLLAFHGDSTGLSTDSSADAGYPGAALLGDAVCGMAVAYITNRDFLFWFRSHTAKEIKWGGAKHHPEDKDDGQRMHPRSSFKAFLEVVKRRS

SEQ ID NO: 7561 - protein, 364 aa, Salacia nitida
VQSQKLAVRAISQIQSLPGGDIKLLCDTVVESVRDLTGYDRVMVYKFHEDEHGEVVAECKRPDLEPYIGLHYPATDIPQASRFLFKQNRVRMIVDCHASPVRVIQDDGLMRPLRLVGSTLRAPHGCHAQYMENMGSIASLAMAVIINGNDEEVIGGRNPTRLWGLVVCHHTSARCIPFPLRYACEFLMQAFGLQLKMELQLAAQLLEKHVLKTQTLLCDMLLRDSPTGIVTQSPSIMDLVKCDGAALYFQGNYYPLGVTPTEAQIKDIVEWLLAFHGDSTGLSTDSSADAGYPGAALLGDAVCGMAVAYITNRDFLFWFRSHTAKEIKWGGAKHHPEDKDDGQRMHPRSSFKAFLEVVKRRSLP

SEQ ID NO: 7562 - protein, 374 aa, Salaciopsis glomerata
ALSIAGAVQSQKLAVRAISQLQSLPGGDIKLLCDAVVESVRDLTGYDRVMVYKFHEDEHGEVVAESKRSDLEPYIGLHYPATDIPQASRFLFKQNRVRMIADCHASPVRVIQDDGLMQPLCLVGSTLRAPHGCHAQYMENMGSVASLAMAVIVNGNDEEVIGGRNATRLWGLVVCHHASVRCIPFPLRYACEFLMQAFGLQLNMELQLAAQLSEKPVLKTQSLLCDMLLRDSPTGIVTQSPSIMDLVKCDGAALYYQGNYYPLGVTPAEPQIKDIVGWLLAFHGDSKGLSTDSLADAGYPGAALLGDAVCGMAVAYITNRDFLFWFRSHTAKEIKWGGAKHHPEEKDDGQRMHPRSSFKAFLEVVKSRSFPWEN

SEQ ID NO: 7563 - protein, 369 aa, Schaefferia frutescens
ALSIAGAVQSQKLAIRSISQLQSLPGGDIKLLCDTVVESVRELTGYDRVMVYKFHEDEHGEVVAESKRPDLEPYIGLHYPATDIPQASRFLFKQNRVRMIVDCHASPVLVIQDDGLMQPLCLVGSTLRAPHGCHAQYMENMGSKASLAMAVIINGNDEEVTGGRNATRLWGLVVCHHTSARCIPFPLRYACEFLMQAFGLQLNMELQLAAQLSEKHVLKTQTLLCDMLLRDSPTGIVTQSPSIMDLVKCDGAALYYQGKYYPIGVTPAEAQIKDIVEWLLAFHGDSTGLSTDSLADAGYPGATLLGDAVCGMAVAYITNRDFLFWFRSHTTKEIKWGGAKHHPEDKDDGPRMHPRSSFKAFLEVVKSRS

SEQ ID NO: 7564 - protein, 309 aa, Schaefferia frutescens
ALSIAGAVQSQKLAIRSISQLQSLPGGDIKLLCDTVVESVRELTGYDRVMVYKFHEDEHGEVVAESKRPDLEPYIGLHYPATDIPQASRFLFKQNRVRMIVDCHASPVLVIQDDGLMQPLCLVGSTLRAPHGCHAQYMENMGSKASLAMAVIINGNDEEVTGGRNCTRLWGLVVCHHTFARCIPFPLRYAWEFLMQAFGLQLNMELQLAAQLSEKHVLKTQTLLCDMLLRDSPTGIVTQSPSIMDLVKCDGAALYYQGKYYPIGVTPAEAQIKDIVEWLLAFHGDSTGLSTDSLADAGYPGATLLGDAV

SEQ ID NO: 7565 - protein, 363 aa, Simicratea welwitschii
QSQKLAVRAISQLQSLPGGDIKLLCDTAVESVRDLTGYDRVMVYRFHEDEHGEVVAESKRPDLEPYIGLHYPATDIPQASRFLFKQNRVRIIVDCHASPVSVIQDDGLMQPLCLVGSTLRAPHGCHAQYMENMGSIASLAMAVIINGNDEEGMGGRNPTRLWGLVVCHHTSSRCIPFPLRYACEFLMQAFGLQLNMELQLAAQLLEKHVLKTQTLLCDMLLRESPTGIVTQSPSIMDLVKCDGAALYYQANYYPLGVTPTEAQIRDIVEWLLACHGDSTGLSTDSLADAGYPGATLLGDAVCGMAVAYITNRDFLFWFRSHTAKEIKWGGAKHHPEDKDDGQRMHPRSSFKAFLEVVKSRSLP

SEQ ID NO: 7566 - protein, 363 aa, Simicratea welwitschii
QSQKLAVRAISQLQSLPGGDIKLLCDTAVESVRDLTGYDRVMVYRFHEDEHGEVVAESKRPDLEPYIGLHYPATDIPQASRFLFKQNRVRIIVDCHASPVSVIQDDGLMQPLCLVGSTLRAPHGCHAQYMENMGSIASLAMAVIINGNDEEGMGGRNPTRLWGLVVCHHTSSRCIPFPLRYACEFLMQAFGLQLNMELQLAAQLLEKHVLKTQTLLCDMLLRESPTGIVTQRPSIMDLVKCDGAALYYQANYYPLGVTPTEAQIRDIVEWVLACHGDSTGLSTDSLADAGYPGATLLGDAVCGMAVAYITNRDFLFWFRSHTAKEIKWGGAKHHPEDKDDGQRMHPRSSFKAFLEVVKSRSLP

SEQ ID NO: 7567 - protein, 374 aa, Siphonodon celastrineus
ALSIAGAVQSQKLAVRAISQLQSLAGGDIKLLCDTVVESVRDLTGHDRVMVYKFHEDEHGEVLAESKRPDMEPYIGLHYPATDIPQASRFLFKQNRVRMIVDCHASPVRVIQDDGLMRPLCLVGSTLRAPHGCHAQYMENMGSTTSLVMAAYINGNDEKATGGRNATKLWGLAVCHHTSARCIPFPLRYACEFLMQAFGLQLNMELQLAAQLSEKHVLKTQTLLCDMLLRDSPTGIVTQSPSIMDLVRCDGAALYYQGNYYPLGVTPTEAQIKDIVEWLLAVHGDSMGLSTDCLADAGYPGSALLGDAVCGMAVAHITNRDFLLWFRSHTAEEIKWGGAKHRPKDKDDGQRMHPRSSFKAFLEVVKSRSLPWEN

SEQ ID NO: 7568 - protein, 374 aa, Siphonodon celastrineus
ALSIAGAVQSQKLAVRAISQLQSLAGGDIKLLCDTVVESVRDLTGHDRVMVYKFHEDEHGEVLAESKRPDMEPYIGLHYPATDIPQASRFLFKQNRVRMIVDCHASPVRVIQDDGLMRPLCLVGSTLRAPHGCHAQYMENMGSTASLVMAAYINGNDKKATGGRNATKLWGLAVCHHTSARCIPFPFRYACEFLMQAFGLQLNMELQLAAQLSEKHVLKTQTLLCDMLLRDSPTGIVTQSPSIMDLVRCDGAALYYQGNYYPLGVTPTEAQIKDIVEWLLAVHGDSMGLSTDCLADAGYPGSALLGDAVCGMAVAHITNRDFLLWFRSHTAEEIKWGGAKHRPKDKDDGQRMHPRSSFKAFLEVVKSRSLPWEN

SEQ ID NO: 7569 - protein, 374 aa, Tripterygium regelii
ALSIAGAVQSQKLAVLAISQLQSLQGGDIKLLCDTVVESVRDLTGYDRVMVYKFHEDEHGEVVAESKRPDLEPYIGLHYPATDIPQASRFLFKQNRVRTIVDCHALPVRVIQDDGLMQPLCLVGSTLRAPHGCHAQYMKNMGSMASLAMAVVINGNDEEVIGERNTTRLWALVVCHHTSARCIPFPFRYACEFLMQAFGLQLNMELQLAAQLMEKHVLKTRTLLCDMLLRDPPTGIVTQSPSIMDLVKCDGAALHYQGNYYPLGVTPTEAQIKDIVGWLLDFHGDSTGLSTDSLADAGYPEAALLGDAVCGMAVAYITNRDFLFWFRSHTAKEIKWGGAKHHPEDKDDGQRMHPRSSFKAFLEVVKSRSLPWEN

SEQ ID NO: 7570 - protein, 371 aa, Tripterygium regelii
ALSIAGAVQSQKLAVLAISQLQSLQGGDIKLLCDTVVESVRDLTGYDRVMVYKFHEDEHGEVVAESKRPDLEPYIGLHYPATDIPQASRFLFKQNRVRTIVDCHALPVRVIQDDGLMQPLCLVGSTLRAPHGCHAQYMENMGSMASLAMAVVINGNDEKVIGGRNTTRLWGLVVCHHTSARCIPFPLRYACEFLMQAFGLQLNMELQLAAQLMEKHVLKTRTLLCDMLLRDSPTGIVTQSPSIMDLVKCDGAALHYQGNYYPLGVTPTEAQIKDIVGWLLDFHGDSTGLSTDSLADAGYPEAALLGDAVCGMAVAYITNRDFLFWFRSHTAKEIKWGGAKHHPEDKDDGQRMHPRSSFKAFLEVVKSRSLP

SEQ ID NO: 7571 - protein, 374 aa, Tripterygium regelii
ALSIAGAVQSQKLAVLAISQLQSLQGGDIKLLCDTVVESVRDLTGYDRVMVYKFHEDEHGEVVAESKRPDLEPYIELHYPATDIPQASRFLFKQNRVRTIVDCHALPVRVIQDDGLMQPLCLVGSTLRAPHGCHAQYMENMGSMASLAMAVVINGNDEEVIGGRNTTRLWGLVVCHHTSARCIPFPLRYACEFLMQAFGLQLNMELQLAAQLMEKHVLKTRTLLCDMLLRDSPTGIVTQSPSIMDLVKCDGAALHYQGNYYPLGVTPTEAQIKDIVGWLLDFHGDSTGLSTDSLADAGYPEAALLGDAVCGMAVAYITNRDFLFWFRSHTAKEIKWGGAKHHPGDKDDGQRMHPRSSFKAFLEVVKSRSLPWEN

SEQ ID NO: 7572 - protein, 371 aa, Tripterygium regelii
ALSIAGAVQSQKLAVLAISQLQSLQGGDIKLLCDTVVESVRDLTGYDRVMVYKFHEDEHGEVVAESKRPDLEPYIGLHYPATDIPQASRFLFKQNRVRTIVDCHALPVRVIQDDGLMQPLCLVGSTLRAPHGCHAQYMENMGSMASLAMAVVINGNDEEVIGGRNTTRLWGLVVCHHTSARCIPFPLRYACEFLMQAFGLQLNMELQLAAQLMEKHVLKTRTLLCDMLLRDSPTGIVTQSPSIMDLVKCDGAALHYQGNYYPLGVTPTEAQIKDIVGWLLDFHGDSTGLSTDSLADAGYPEAALLGDAVCGMAVAYITNRDFLFWFRSHTAKEIKWGGAKHHPEDKDDGQRMHPRSSFKAFLEVVKSRSLP

SEQ ID NO: 7573 - protein, 360 aa, Wimmeria acuminata
AVQSQKLAVRAISQLQSLPGGDIKLLCDTVVESVRHLTGYDRVMVYKFHEDEHGEVVAERKRPDLEPYIGLHYPATDIPQASRFLFKQNRVRTIVDCHASPVRVIQDDGLMQPLCLVGSTLRAPHGCHAQYMENMGSIASLAMAVIINGNDEEVIGVRNATRLWGLVVCHHTSARCIPFPLRYACEFLMQAFGLQLNMDLQLAAQLSEKHVWKTRTLLCDMLLRDSPAGIVTQSPSIMDLVKCDGAALYYQGNYYPLGVTPTEAQITDIVGWLLDFHGDSTGLSTDSLADAGYPGAALLGDAVCGMAVAYITNRDFLFWFRSHTAKEIKWGGAKHHPEDRDDGQRMHPRSSFQAFLEVVK

SEQ ID NO: 7574 - protein, 374 aa, Wimmeria concolor
ALSIAGAVQSQKLAVRAISQLQSLPGGDIKLLCDTVVESVRHLTGYDRVMVYKFHEDEHGEVVAERKRPDLEPYIGLHYPATDIPQASRFLFKQNRVRTIVDCHASPVRVIQDDGLMQPLCLVGSTLRAPHGCHAQYMENMGSIASLAMAVIINGNDEEVIGVRNATRLWGLVVCHHTSARCIPFPLRYAWEFLMQAFGLQLNMELQLAAQLSEKHVWKTRTLLCDMLLRDSPTGIVTQSPSIMDLVKCDGAALYYQGNYYPLGVTPTEAQITDIVGWLLDFHGDSTGLSTDSLADAGYPGAALLGDAVCGMAVAYITNRDFLFWFRSHTAKEIKWGGAKHHPEDRDDGQRMHPRSSFQAFLEVVKSRSLPWEN

SEQ ID NO: 7575 - protein, 374 aa, Zinowiewia concinna
ALSIAGAVQSQKLAVRAISQLQSLPGGDIKLLCDTVVETVRVLTGYDRVMVYKFHEDEHGEVVAESKRPDLEPYIGLHYPATDIPQASRFLFKQNRVRMIVDCHATPVSVIQDAGLMQPLCLVGSTLRAPHGCHAQYMENMGSIASLAMAVIINGNDEEGIGGRNTTRLWGLVVCHHTTARCIPFPLRYACEFLLQALGLQLNMELQLAAQLSEKHVLRTQTLLCDMLLRDSHTGIVTQSPSIMDLVKCDGAALYYQGKYYPLEVTPTEAQIKDIVEWVLAFHGDSTGLSTDSLADAGYPGAASLGDAVCGMAVAYITDRDFLFWFRSNTAKEIKWGGAKHHPEDKDDGQRMHPRSSFKAFLEVVKSRSLPWEN

SEQ ID NO: 7576 - protein, 374 aa, Zinowiewia concinna
ALSIAGAVQSQKLAVRAISQLQSLPGGDIKLLCDTVVETVRVLTGYDRVMVYKFHEDEHGEVVAESKRPDLEPYIGLHYPATDIPQASRFLFKQNRVRMIVDCHATPVSVIQDAGLMQPLCLVGSTLRAPHGCHAQYMENMGSIASLAMAVIINGNDEEGIGGRNTTRLWGLVVCHHTTARCIPFPLRYACEFLLQALGLQLNMELQLAAQLSEKHVLRTQTLLCDMLLRDSHTGIVTQSPSIMDLVKCDGAALYYQGKYYPLEVTPTEAQIKDIVEWLLAFHGDSTGLSTDSLADAGYPGAASLGDAVCGMAVAYITDRDFLFWFRSNTAKEIKWGGAKHHPEDKDDGQRMHPRSSFKAFLEVVKSRSLPWEN

SEQ ID NO: 7577 - protein, 511 aa, Lycianthes rantonnei
MVLLLISELCASAIIFIIVHIIISKLIATGWGRRQRLPPGPMGWPVIGALPLLGTMPHVALAKMAKKYGPIMYLKVGTCGMVVASTPNAAKAFLKTLDINFSNRPPNAGATHLAYDAQDMVFAHYGPRWKLLRKLSNLHMLGGKALEDWANVRANELGHMLKSMFDASRVGGRVVVADMLTFAMANMIGQVILSKRVFVEKGAEVNKFKDMVVELMTVAGYFNIGDFIPQLAWMDLQGIEKGMKCLHKKFDDLLTKMFDEHKATTNERKGKPDFLDVVMANRDNSEGERLSTNNIKALLLNLFTAGTDTSSSAIEWALAEMMKNPQILKKVQQEMDQIIGKNRRLIESDIPNLPYLRAVCKETFRKHPSTPLNLPRISNEPCMVDGYYIPKNIRLSVNIWAIGRDPDVWENPLEFNPERFLSGKNVKIDPRGNDFELIPFGAGRRICAGTRMGIVMVEYILGTLVHSFDWKFSNDVKEINMEESFGLALQKAVPLEAMVTPRLPFDVYYTN

SEQ ID NO: 7578 - protein, 513 aa, Matthiola incana
MTTLILTILLATFLSLFIFFLLRRNRNRNHRLPPGPNPWPIVGNLPHMGPKPHQTLAAMVTTYGPILHLRLGFVNVVVAASKSVAEQFLKIHDANFASRPPNSGAKHIAYNYQDLVFAPYGQRWRMLRKISSVHLFSAKALEDFKHVRQEEIGRLTREVARADTKPVNLGQLVNMCVVNALGREMIGRRLFGDGADHKAEEFRSMVTEMMALAGVFNVGDFVPALDWLDLQGVAGKMKRLHKRFDAFLSSILKEHEINNGGDQKHTDMLTTLISLKGTDFDGDGASITDTEIKALLLNMFTAGTDTSASTVDWAIAELIRHPHIMKRTQEELDAVVGRNRPINESDLSRLPYLQAVIKENFRLHPPTPLSLPHIAAESCEINGYHIPKGSTLLTNIWAIARDPEQWSDPLAFRPERFLPGGEKFGVDVKGSDFELIPFGAGRRICAGLSLGLRTIQLLTATLVHGFEWELAGGVTPEKLNMEETYGITVQRAVPLIVHPKPRLALNVYGVGSG

SEQ ID NO: 7579 - protein, 511 aa, Pelargonium x hortorum
MYNMSLYLLLGSSALAFAAYLVLFSFSKSRRRLPPGPKAWPIVGNLPHMGSMPHQNLAAMARTYGPLVYLRLGFVDVVVALSASMASQFLKTHDSNFSSRPPNAGAKHIAYNYHDLVFAPYGPRWRLFRKITSIHLFSGKALDDYRHVRQEEVGVLASNLARAVSTIVNLGQLLNICATNALGRAVIGKKVFKDGTDDVDPKADEFKSMVVELMVLAGVFNIGDFIPPLDCLDLQGVASKMKNLHKRFDAFLSAILQEHNINSAASATPSMLTTLISLKDSVEDSEGGKLTDTEIKALLLNMFTAGTDTTSSTVEWAIAELIRQPEILIRAQKEIDSVVGRDRLVTELDLSKLPYLQAIVKETFRLHSSTPLSLPRIATQSCEINGYHIPKGATLLVNVWAIARDPDVWADPLSFRPERFLPGSEKENVDVKGNDFELIPFGAGRRICAGMSLGLRMVQLLTATLLHAFNWDLPQGQIPQELNMDEAYGLTLQRASPLHVRPRPRLPSHLY

SEQ ID NO: 7580 - protein, 563 aa, Kluyveromyces lactis
MSEITLGRYLFERLKQVEVQTIFGLPGDFNLSLLDNIYEVPGMRWAGNANELNAAYAADGYARLKGMSCIITTFGVGELSALNGIAGSYAEHVGVLHVVGVPSVSSQAKQLLLHHTLGNGDFTVFHRMCSNISETTAMITDINTAPAEIDRCIRTTYVSQRPVYLGLPANLVDLTVPASLLDTPIDLSLKPNDPEAEEEVIENVLQLIKEAKNPVILADACCSRHDAKAETKKLIDLTQFPAFVTPMGKGSIDEKHPRFGGVYVGTLSSPAVKEAVESAHLVLSVGALLSDFNTGSFSYSYKTKNIVEFHSDYTKIRRPTFPGVQMKFALQKLLTKVADAAKGYKPVPVPSEPEHNEDVADSTPLKQEWVWTQVGEFLREGDVVITETGTSAFGINQTHFPNNTYGISQVLWGSIGFTTGATLGAAFAAEEIDPKKRVILFIGDGSLQLTVQEISTMIRWGLKPYLFVLNNDGYTIERLIHGETAQYNCIQNWQHLELLPTFGAKDYEAVRVSTTGEWNKLTTDEKFQDNTRIRLIEVMLPTMDAPSNLVKQAQLTAASNAKN

SEQ ID NO: 7581 - protein, 249 aa, Ipomoea batatas
MVISSVWSGSSSRVRKGSWSEEEDQLLRECIQKYGEGKWHLIPLRAGLNRCRKSCRLRWLNYLRPDIKRGEFSPDEIDLILRLHRLLGNRWSLIAGRIPGRTANDVKNLWNTHLQKKVSAMASSRQDNYWKGKAPEITENTVVRPRPRRFLKASSSPTTLLTGNATMVAYDGQLQEHMTTQPETTSDLLMENVQQKNLTTTLPSALETTPHDNVKWWEDVLSDKELNEEGQICWSEFPTDIDLLSELLS

SEQ ID NO: 7582 - protein, 249 aa, Ipomoea batatas
MVISSVWSESSSRVRKGAWSEEEDQLLRDCIQKYGEGKWHLIPLRAGLNRCRKSCRLRWLNYLRPDIKRGHFSVDEVDLILRLHRLLGNRWSLIAGRIPGRTANDVKNFWNTHLQKKVSAMASSRQDSYWKGKAPEITENTVVRPRPRRFLKASSSPTTLLTENATKVVGYDGQLQGHMTTQPETTSNLLMENFQQKNLTTTLPSALETTPHDNVKWWEDVLSDKELNDEGQICWSEFSTDIDLSELLS

SEQ ID NO: 7583 - protein, 249 aa, Ipomoea batatas
MVISSVWLESSSRVRKGAWSEEEDQLLRDCIQKYGEGKWHLIPLRAGLNRCRKSCRLRWLNYLRPDIKRGHFSVDEVDLILRLHRLLGNRWSLIAGRIPGRTANDVKNFWNTHLQKKVSAMASSRQDSYWKGKAPEITENTVVRPRPRRFLKASSSPTTLLTENATKVVGYDGQLQGHMTTQPETTSNLLMENFQQKNLTTTLPSALETTPHDNVKWWEDVLSDKELNDEGQICWSEFSTDIDLSELLS

SEQ ID NO: 7584 - protein, 249 aa, Ipomoea batatas
MVISSVWSESSSRVRKGAWSEEEDQLLRDCIQKYGEGKWHLIPLRAGLNRCRKSCRLRWLNYLRPDIKRGHFSVDEVDLILRLHRLLGNRWSLIAGRIPGRTANDVKNFWNTHLQRKVSAMASSRQDSYWKGKAPEITENTVVRPRPRRFLKASSSPTTLLTENATKVVGYDGQLQGHMTTQPETTSNLLMENFQQKNLTTTLPSALETTPHDNVKWWEDVLSDKELNDEGQICWSEFSTDIDLSELLS

SEQ ID NO: 7585 - protein, 445 aa, Brassica juncea
MTKKTRKLGKYEVGRTIGEGSFAKVKFARNTDSGENVAIKIMAKSTILKNKMADQVKREISIMKIVRHPNIVRLYEVLASPSKIYIVLEFVTGGELFDRIVHKGRLEESEARKYFQQLIDAIAHCHCKGVYHRDLKPENLLLDTNGNLKVSDFGLSALPQQGVELLRTTCGTPNYAAPEVLNGQGYDGSAADIWSCGVILFVIMAGFLPFSETDLPSLYRKISAAEFSCPQWFSEDVKSLIQRILDPNPKTRIQIQRKLGKHSWFRLNYMPTRARKEEESNLDDVRAVFDGIEGSYVAENIERKYEGPLMMNAFEMITLSQGLNLSALFDRRQDFVRQTRFVSRREPSVIIANIEAVATSMGFRAHTRNFERRLEGLSSIEGKGEFAVVIEYEVAPSLFMVDVREAAGETLEYHKFYKKLCEKLENIIWRATEGMPKPELRTITF

SEQ ID NO: 7586 - protein, 189 aa, Brassica juncea
MATSVSDVQPRDVCVVGVARTPMGDFLGSLSSLTAPRLGSIAIEAALRRANVDPSLVEEVFFGNVLTANLGQAPARQAALGAGIPYSVICTTVNKVCASGMKAVMLAAQSIQLGLNDVVVAGGMESMSNVPKYLPDARRGSKLGHDTVVDGMTKDGLWDVYNDFGMGVCGEICADQYRITREEQDAYAI

SEQ ID NO: 7587 - protein, 160 aa, Casuarina glauca
MSTLEGRGFTEEQEALVVKSWSAMKPNAGELGLKFFLKIFEIAPSAQKLFSFLKDSNVPLERNPKLKSHAMSVFLMTCESAVQLRKAGKVTVRESSLKKLGASHFKHGVADEHFEVTKFALLETIKEAVPETWSPEMKNAWGEAYDKLVAAIKLEMKPSS

SEQ ID NO: 7588 - protein, 161 aa, Trema tomentosa
MSSSEVDKVFTEEQEALVVKSWAVMKKNSAELGLKFFLKIFEIAPSAKNLFSYLKDSPIPLEQNPKLKPHAMTVFVMTCESAVQLRKAGKVTVRESNLKRLGAIHFKNGVVNEHFETRFALLETIKEAVPEMWSPEMKNAWGEAYDQLVAAIKSEMKPSST

SEQ ID NO: 7589 - protein, 644 aa, Hordeum vulgare subsp. vulgare
MVRELRINTAPRGNRVPLLNNGETSRILSDLEEGSNVQAANVGFCRVIKLAKHDAGKLVFATIALLVASLSNLLVPKYGGKIIDIVSRDVQRPEDKAQALADVNGTILYIVLIVVTGSVCTALRAWLFNSASERVVARLRQDLFSHLINQEIAFFDVTRTGELLSRLSEDTQIIKNAATTNLSEALRNLTTTAIGLGFMFSTSWKLTLLALVIVPVISVAVRKFGRFLRELSHQTQAAAAVASSIAEESFGAIRTVRAFAQEPHEISRYGGKVNETLKLGLKQAKVVGLFSGGLNAASTLSVVVVVIYGANLTINGYMTTGSLTSFILYSLTVGSSVSALSGLYTTVMKASGASRRVFQLLDRVSSMTNTGDKCPKNENEGEVELDDVWFAYPSRPSHMILKGITLKLAPGSKVALVGPSGGGKTTIANLIERFYDPLKGRILLNGVPLVEISHQYLHQKVSIVSQEPTLFNCSIEENIAYGLEGKASSADVENAAKMANAHDFICSFPDQYKTVVGERGIRLSGGQKQRVAIARALLMNPRVLLLDEATSALDAESEYLVQDAMDSLMKGRTVLVIAHRLSTVKSADTVAVISEGQIVESGTHDELLERDGIYTALVKRQLQLPKFEGTANGTAEVEPSSNGQ

SEQ ID NO: 7590 - protein, 644 aa, Hordeum vulgare subsp. vulgare
MGREPRIDTAPRGNRAPLLDHGETARVPSDLEEGSNVQAANVGFCRVIKLAKPDAWKLIFATSALLVASLSNLLVPKYGGKIIDIVSRDVRRPEDKAQALADVNGTILYIVMIVVTGSACTALRAWVFNSASERVVARLRHDLFSHLINQEIAFFDVTRTGELLSRLSEDTQIIKNAATTNLSEALRNLTTTAIGLGFMFSTSWKLTLLSLAIVPVISAVVRKFGRFLRELSHQTQAAAAVASSIAEESFGAIRTVRAFAQEPHEISRYSGKVNETLKLGLKQAKVVGLFSGGLNAASTLSVVIVVIYGARLTINGHMTTGALTSFILYSLTVGSSVSALSGLYTTVMKASGSSRRVFQLLDRISSMKNSGNKCPKNENDGEVELDDVWFAYPSRPSHLILKGITLKLAPGSKVALVGPSGGGKTTIANLIERFYDPIKGRILLNGVPLVEISHQYLHQMVSIVSQEPTLFNCSIEENIAYGLEGKASSADVENAAKMANAHDFICGFPDQYKTIVGERGIRLSGGQKQRVAIARALLMNPRVLLLDEATSALDAESEHLVQDAMESLMKGRTVLVIAHRLSTVKTADTVAVVSEGQIVESGTHDELLGRDGIYTALVKRQLQLPKFEGAANGTAEVAPVNGHY

SEQ ID NO: 7591 - protein, 301 aa, Salmonella enterica subsp. enterica serovar Typhimurium
MSTDKTYCGFIAIVGRPNVGKSTLLNKLLGRKISITSRKAQTTRHALSVCHTEDPYQAIYVDTPGLHMEEKRLAINRLMNKAASSSIGDVELVIFVEGTRWTPDDEMVLNKLRDGKAPVILAVNKVDNVQEKVDLLPHLQFLASQMNFPDIVPISAETGMNVDTIAGIVRKHLPEAIHHFPEDYITDRSQRFMASEIIREKLMRFLRAELPYSVTVEIERFVTNERGGYDINGLILVEREGQKKMVIGNKGAKIKTIGIEARKDMQEMFEAPVHLELWVKVKSGWADDESRLRSLGYVDDL

SEQ ID NO: 7592 - protein, 253 aa, Xanthomonas oryzae pv. oryzae KACC10331
MPVQFPLKLVDRRMIAPTVAHCQFVRDDGQPLDFQPGQFIQIHFDYADGTPTKRSYSLATIHDHALGPGEAVEIAVSFVPGGSATALFEGLEIGDQLQASGPYGRFCLQPGDHNQRYVLIATGTGVTPYRSMLPLLAEAIATRGVQVVLLQGARNPTELLYGDDFRAFADAHPQFRYVPCFSRDVPEQPHADVRHGYVQQHLAEFVPDAAHDIAYLCGNPDMVDICLEALKAAGLPSAQIRREKYVSSTPPKV

SEQ ID NO: 7593 - protein, 413 aa, Xanthomonas oryzae pv. oryzae KACC10331
MSPKRTSFPKQDIRVLLLEGISPTAVDVFRAAGYSQIELHAKSLPEDELIARIADAHIVGIRSRTQLSAEVLAHAKRLIAVGCFCIGTNQVDLDAAEVAGIPVFNAPYSNTRSVAELVIAEAILLLRGIPQKNAECHRGGWSKSAAGSHETRGKVLGIVGYGHIGTQVGVLAESLGMQVIFHDIETKLSLGNARAAIDLDDLLARADVVTLHVPETPSTKDMIGAAEIARMKHGAHLINASRGTVIDIDALDAALTSGQIGGAAVDVFPIEPKGNGDAFASPLTAHDNVILTPHVGGSTLEAQDNIGIEVAAKLVRYSDNGSTLSAVNFPEVTLPEHPDSLRLLHIHRNVPGVLSQINELFSRHNLNIDGQFLRTDPKVGYVVIDVSASEELAAILKDGLAQITGTLRTRVLY

SEQ ID NO: 7594 - protein, 196 aa, Xanthomonas oryzae pv. oryzae KACC10331
MSDSLNAAALDQLFRTARTQNAFADTPVSQEVLRELYELVKWGPTAANSGPARFVFVTSADGKAKLKPALSEGNAAKTLAAPVTVIVAHDEDFHEKLPYLFPHADAKSWFDGPREGRAESAFRNGSLQGAYLILAARALGLDAGPMSGFDNAKVDAAFFAGTPIKSNFLVNLGYGDPAGLFPRSPRLSFDEAARFE

SEQ ID NO: 7595 - protein, 471 aa, Xanthomonas oryzae pv. oryzae KACC10331
MSSWLRRKSIDQVTVHEAGRQLVRSLSWPHLIALGIGAIVGTGIYTLIGVGADKAGPAVLLSFVAAGIVCACAALAYAEMATMMPAAGSAYTYSYTALGESIAWVVGWSLVLEYSLVVSTVAVGWSGYFVGFLQWLGASLPHELIAGPHAGGIANLPAVVITFLVAGMLMAGTKESATLNAVLVVLKIIALGVFVAIALPTFKSANLQPFMPYGISKAMGPDGVERGVMAAAAIIFFAFYGFDAISTAAEETKNPGRDLSIGIVGSMIGCTLIYVLVALAAVGAMRFTVFGKSPEPLALILRELGHGKAALVIGAVAIIALPTVLLAFLYGQSRIFFVMSRDGLLPRGLSKVNARTGTPVAITLLTAVLVAALAGVARLDEIAALANAGTLAAFTAVAACLLVLRVREPGRARAFRTPLAWVVGPVAILGCLYLFWSLPSNTQGWFLLWNALGVVVYLAYGRRNSRLNSAG

SEQ ID NO: 7596 - protein, 455 aa, Guillardia theta
MAPWMAVVAMVAIGMQVALAVPTHSRRRAGGGLAEPLAPGATDEITDLPGLPKEVSKFKQYAGYIPVGGGKSLFYWFVEAQKNPASSPLVLWTNGGPGCSGLTGFLSEQGPFRAEKGGQLSLNKYSWNRVANMIFIEQPAGVGFSQGPSNMTYGDAEAAKDNRAFVLGFLSRYPMYKDNDLYLTSESYGGHYIPTLAMLLLDLPNFKGFAVGNPLTWMPYRDYGQYAAYASRQLIPKPLWDRFVALGCFLFPSANQTDCDSMTASMDAMTANMDPYALDFPICQTPSLASGRTERYLLLKKIASADKKQRKTLSGYFPKYKPCVDDYMTQYLNRKDVQKAIHVSNPGSVTWSVCSDVVNEAYNPKDVAAPMMGVYNELIKHGGLKMMIYSGDDDSICSTAGAQMWIWGLGKPIEEWQQWSSKGQVAGFTVKFPGLRFTTVHGAGHMVPSTAQAGI

SEQ ID NO: 7597 - protein, 616 aa, Candida albicans
ARASADQQQHQHNHHHHHHHHHHNENQSQQQVPIDPAANPANRIGRYQILKTLGEGSFGKVKLAQHLGTGQKVALKIINRKTLAKSDMQGRVEREISYLRLLRHPHIIKLYDVIKSKDEIIMVIEFAGKELFDYIVQRGKMPEDEARRFFQQIIAAVEYCHRHKIVHRDLKPENLLLDDQLNVKIADFGLSNIMTDGNFLKTSCGSPNYMPAPEVISGKLYSSVQKLMIWSAGVILGMSCCVVDYHSMTSSIPALFKKISNGVYTLPNYLSAGAKHLLTRMLVVNPLNRITIHEIMEDDWFKQDMPDYLLPPDLSKNKNSKIDVDEDVIRALSVTMGYDRDCKIVNVIEKANKQVAAGNSSSQQSKSSNEILDAYLLMKENHRLVKDLKKSKSENIESFLSQSPPPSPFPNAGSTSSAPGVQQSLTYQTLATVPDLSTLPNSTIAILPTSLPSIHRAYMAETKQNGDPSQQHAPPPTKKSKTRWHFGIRLRSYPLDVMGEIYRALKNLGAEWAKPTEEELWTIRVRWKYDTSAQFECGSAPNLMKMQIQLFQLEPNNYLVSFKFSGWESAHGNAGTDSPQSHRQQDLDEVGSFSAYPFLHLATRLIMELAVNSQSG

SEQ ID NO: 7598 - protein, 110 aa, Saccharomyces cerevisiae
MVSQETIKHVKDLIAENEIFVASKTYCPYSHAALNTLFEKLKVPRSKVLVLQLNDMKEGADIQAALYEINGQRTVPNIYINGKHIGGNDDLQELRETGELEELLEPILAN

SEQ ID NO: 7599 - protein, 218 aa, Mesorhizobium loti
  misc_feature (2)..(2): Xaa can be any naturally occurring amino acid
  misc_feature (61)..(61): Xaa can be any naturally occurring amino acid
  misc_feature (114)..(114): Xaa can be any naturally occurring amino acid
  misc_feature (135)..(135): Xaa can be any naturally occurring amino acid
  misc_feature (142)..(142): Xaa can be any naturally occurring amino acid
  misc_feature (167)..(167): Xaa can be any naturally occurring amino acid
  unsure (1)..(218): unsure at all Xaa locations
GXADKTGTPHPLTEPGVWIERIGGRVFPPHLPALFLDRDGTINVDTDYPSDPAEIVLRPQXLPAIATANRAGIPVVVVTNQSGIARGYFGWSAFAAVNGRVLELLREEGVFVDXVLACAYHEAGVGPLAIPDHPXRKPNPGXLVEAGKRLALDLQRSLIVGDKLADXQAGKRAGLAQGWLVDGEAAVQPGFAIRPLRDSSELGDLLAAIETLGRDNRS

SEQ ID NO: 7600 - protein, 447 aa, uncultured bacterium
MLKVMAKMGISTLESYKGAQIFEAVGLAQEIMEKCFFGTASRIDGVGFDILQDETETRHQSAYTSETLDNLGQYHWRSGGEKHMWDPEAISNLQVAARNNDESAYWKFAKHANEEGTRNSTLRGLMSFKKGSPININEVEPCQEIVKRFATGAMSFGSISAESHESLAIAMNRLGGKSNTGEGGEDSKRWTADANDDSRRSAIKQVASGRFGVTIDYLNNADEIQIKVSQGAKPGEGGELPGTKVDEGIAKIRHSTPGVGLISPPPHHDIYSIEDLSQLIFDLKRSNPDARISVKLVAEVGVGTIAAGVTKAKSDHIVIAGHDGGTGASPLTSIKHAGLPWELGLAETHQTLVMNDLRSRVVIQTDGQLKTGRDVAIGILLGAEEFGFSTAPLITMGCIMMRKCHLNTCPVGIATQDKALPNNSLKPEYVVNYLFMVAQELRLIMAE

SEQ ID NO: 7601 - protein, 287 aa, uncultured bacterium
LGFKTVNEMIGRVDMLEMNQAIEHWKQSAINLDALLTTAEKPHANAGTYQTQTQDHQLELQLDNILIAKSKPAIEGNEKVKFESKITNIDRAVGAMLSSSVVKTRGSNNLGAGSIHIKFSGSAGLSLGAFLAQGITLEVEGDANDYVGKGLSGGRIIVYPPKNSTFNAEDEVIAGNVCGYGATGGELYLSGCVSERFCVRNSGVNAVVEGIGDHGCEYMTGGKVIVLGEVGRNFAAGMSGGIAFVYNPNKTFESMLSTGAMVDLDPFNSDYESELKHYIQNHYSLTA

SEQ ID NO: 7602 - protein, 636 aa, Vibrio cholerae O139
MCGVAGFISKRLSPVDCLTSMVESIMHRGPNDSGLWVDDDFGVCLAHARLSIQDLSSAGHQPMHSKSERYVMIFNGEIYNHLTLREELIEIVPSYWNGHSDTETLLAGFEVWGIEQTIQKCVGMFAIVLWDKVLKQLILIRDRFGEKPLYYGWQRDTFLFASELKALKAHPSFEGSINRQALSHFFRLNYIPTPLSIYEGIFKLEPGVIAVFSHEGQLLSKQTFWDASHAVSLQNFSDHDAVDKLDDLIKQSIQDQALSDVPLGAFLSGGVDSSTVVGILQSLSTRPVKTFTIGFDHADFNEASEASDVAKHLGTDHVELIVSAEDALAIINQLPVMYDEPFADASQVPTFLVSKLAKKEVTVCLSGDGGDELFCGYNRYHYTAKVWSYLEKIPFPIRKMLSVFLLTLSPSSWDVLSKTLGLNTRLPNLGNKTQKGAQALKARDIEDLYTRVVSNWDLDEPLVKNTAVEKLPFLSDLTELSHLNDLEKMMLWDKQSYLMDDVLVKTDRATMACSLEGRVPLLDHRIAEFAASLPIHLKYRGGKGKWLLREVLYRYVPKKLIERPKKGFSLPIAEWLRGPLKDWANVLLDSDRFDKEGFLSSELVQKKWGEHLAGKRDWSSQLWSVLMFQLWLEKNK

SEQ ID NO: 7603 - protein, 598 aa, Arabidopsis thaliana
EFNVTLNGEYTIGPYSPKPLKTETIQDLSPEQCNGGACILQLVETLKSTLPPLLNAIEAFTVIDFPQMETNEDDVTGINDVQNTYGLNRISWQGDPCVPKQYSWDGLNCNNSDISIPPIIISLDLSSSGLNGVITQGIQNLTHLQYLDLSDNNLTGDIPKFLADIQSLLVINLSGNNLTGSVPLSLLQKKGLKLNVEGNPHLLCTDGLCVNKGDGHKKKSIIAPVVASIASIAILIGALVLFFVLKKKTQSKGPPAAYVQASNGRSRRSAEPAIVTKNKRFTYSEVMQMTNNFQRVLGKGGFGIVYHGLVNGTEQVAIKILSHSSSQGYKQFKAEVELLLRVHHKNLVGLVGYCDEGENLALIYEYMANGDLKEHMSGTRNHFILNWGTRLKIVVESAQGLEYLHNGCKPLMVHRDIKTTNILLNEQFDAKLADFGLSRSFPIEGETHVSTAVAGTPGYLDPEYYRTNWLTEKSDVYSFGVVLLEIITNQPVIDPRREKPHIAEWVGEVLTKGDIKNIMDPSLNGDYDSTSVWKAVELAMCCLNPSSARRPNMSQVVIELNECLTSENSRGGAIRDMDSEGSIEVSLTFGTEVTPLAR

SEQ ID NO: 7604 - protein, 863 aa, Arabidopsis thaliana
MESHRVFVATFMLILHLVQAQDQPGFINVDCGLLPRDSPYNALGTGLVYTSDVGLVSSGKTGKIAKEFEENNSTPNLTLRYFPDGARNCYNLNVSRDTNYMIKATFVYGNYDGHKDEPNFDLYLGPNLWATVSRSETVEEIIHVTKSDSLQVCLAKTGDFIPFINILELRPLKKNVYVTESGSLKLLFRKYFSDSGQTIRYPDDIYDRVWHASFLENNWAQVSTTLGVNVTDNYDLSQDVMATGATPLNDSETLNITWNVEPPTTKVYSYMHFAELETLRANDTREFNVMLNGNDLFGPYSPIPLKTETETNLKPEECEDGACILQLVKTSKSTLPPLLNAIEAFTVIDFLQVETDEDDAAAIKNVQNAYGLINRSSWQGDPCVPKQYSWDGLKCSYSDSTPPIINFLDLSASGLTGIIAPAIQNLTHLEILALSNNNLTGEVPEFLADLKSIMVIDLRGNNLSGPVPASLLQKKGLMLHLDDNPHILCTTGSCMHKGEGEKKSIIVPVVASIVSLAVIIGALILFLVFRKKKASKVEAIVTKNKRFTYSQVVIMTNNFQRILGKGGFGIVYHGFVNGVEQVAVKILSHSSSQGYKQFKAEVELLLRVHHKNLVGLVGYCDEGENMALIYEYMANGDLKEHMSGKNRFILNWETRLKIVIDSAQGLEYLHNGCKPLMVHRDVKTTNILLNEHFEAKLADFGLSRSFPIGGETHVSTVVAGTPGYLDPEYYKTNRLTEKSDVYSFGIVLLEMITNRPVIDQSREKPYISEWVGIMLTKGDIISIMDPSLNGDYDSGSVWKAVELAMSCLNPSSTRRPTMSQVLIALNECLVSENSRGGASRDMDSKSSLEVSLTFDTDVSPMAR

SEQ ID NO: 7605 - protein, 688 aa, Arabidopsis thaliana
MLELRPMKKNMYVTQSGSLKYLFRGYISNSSTRIRFPDDVYDRKWYPLFDDSWTQVTTNLKVNTSITYELPQSVMAKAATPIKANDTLNITWTVEPPTTQFYSYVHIAEIQALRANETREFNVTLNGEYTFGPFSPIPLKTASIVDLSPGQCDGGRCILQVVKTLKSTLPPLLNAIEAFTVIDFPQMETNENDVAGIKNVQGTYGLSRISWQGDPCVPKQLLWDGLNCKNSDISTPPIITSLDLSSSGLTGIITQAIKNLTHLQILDLSDNNLTGEVPEFLADIKSLLVINLSGNNLSGSVPPSLLQKKGMKLNVEGNPHILCTTGSCVKKKEDGHKKKSVIVPVVASIASIAVLIGALVLFLILRKKRSPKVEDGRLPRSSEPAIVTKNRRFSYSQVVIMTNNFQRILGKGGFGMVYHGFVNGTEQVAVKILSHSSSQGYKQFKAEVELLLRVHHKNLVGLVGYCDEGDNLALIYEYMANGDLKEHMSGLEYLHNGCKPPMVHRDVKTTNILLNEHFEAKLADFGLSRSFLIEGETHVSTVVAGTPGYLDPEYHRTNWLTEKSDVYSFGILLLEIITNRHVIDQSREKPHIGEWVGVMLTKGDIQSIMDPSLNEDYDSGSVWKAVELAMSCLNHSSARRPTMSQVVIELNECLASENARGGASRDMESKSSIEVSLTFGTEVSPNAR

SEQ ID NO: 7606 - protein, 216 aa, Arabidopsis thaliana
MEIEIRRGPWTVEEDMKLVSYISLHGEGRWNSLSRSAGLNRTGKSCRLRWLNYLRPDIRRGDISLQEQFIILELHSRWGNRWSKIAQHLPGRTDNEIKNYWRTRVQKHAKLLKCDVNSKQFKDTIKHLWMPRLIERIAATQSVQFTSNHYSPENSSVATATSSTSSSEAVRSSFYGGDQVEFGTLDHMTNGGYWFNGGDTFETLCSFDELNKWLIQ

SEQ ID NO: 7607 - protein, 2143 aa, Arabidopsis thaliana
MEGDERGVLLACVISGTLFTVFGSGSFWILWAVNWRPWRLYSWIFARKWPKVLQGPQLDILCGVLSLFAWIVVVSPIAILIGWGSWLIVILDRHIIGLAIIMAGTALLLAFYSIMLWWRTQWQSSISDVGMGTKQNIPDTSLLIVNELLNFFLTFSFEQTGAVALLLLLGVALLCAYELCAVYVTAGAHASQQYSPSGFFFGVSAIALAINMLFICRMVFNGNGLDVDEYVRRAYKFAYSDCIEVGPVACLPEPPDPNELYPRQTSRASHLGLLYLGSLVVLLAYSVLYGLTARESRWLGGITSAAVIVLDWNIGACLYGFKLLQNRVLALFVAGISRLFLICFGIHYWYLGHCISYIFVASVLSGAAVSRHLSITDPSAARRDALQSTVIRLREGFRRKEQNSSSSSSDGCGSSIKRSSSIDAGHTGCTNEANRTAESCTADNLTRTGSSQEGINSDKSEESGRPSLGLRSSSCRSVVQEPEAGTSYFMDKVSDQNNTLVVCSSSGLDSQGYESSTSNSANQQLLDMNLALAFQDQLNNPRIASILKKKAKEGDLELTNLLQDKGLDPNFAVMLKEKNLDPTILALLQRSSLDADRDHRDNTDITIIDSNSVDNTLPNQISLSEELRLRGLEKWLKLSRLLLHHVAGTPERAWGLFSLVFILETIIVAIFRPKTITIINSSHQQFEFGFSVLLLSPVVCSIMAFLRSLQVEEMALTSKSRKYGFVAWLLSTSVGLSLSFLSKSSVLLGISLTVPLMAACLSIAVPIWMHNGYQFWVPQLSCGDQARDLRSPRIKGFILWICVVLFAGSVISLGAIISAKPLDDLKYKLFSARENNVTSPYTSSVYLGWAMSSGIALVVTAILPIVSWFATYRFSHSSAVCLMIFSVVLVAFCGTSYLEVVKSRDDQLPTKGDFLAALLPLACIPALLSLCCGMVKWKDDCWILSRGVYVFFSIGLLLLFGAIAAVIAVKPWTIGVSFLLVLFLMVVTIGVIHLWASNNFYLTRKQTSFVCFLALLLGLAAFLLGWHQDKAFAGASVGYFTFLSLLAGRALAVSSTELVLPVYVYDAHADCGKNVSAAFLVLYGIALATEGWGVVASLIIYPPFAGAAVSAITLVVAFGFAVSRPCLTLEMMEVAVRFLSKDTIVQAISRSATKTRNALSGTYSAPQRSASSAALLVGDPSAMRDKAGNFVLPRDDVMKLRDRLRNEERVAGSIFYKMQCRKGFRHEPPTNVDYRRDMCAHARVLALEEAIDTEWVYMWDKFGGYLLLLLGLTAKAERVQDEVRLRLFLDSIGFSDLSARKISKWKPEDRRQFEIIQESYLREKEMEEESLMQRREEEGRGKERRKALLEKEERKWKEIEASLIPSIPNAGSREAAAMAAAIRAVGGDSVLEDSFARERVSGIARRIRTAQLERRAQQTGISGAVCVLDDEPMISGKHCGQMDSSVCQSQKISFSVTAMIQSDSGPVCLFGTEFQKKVCWEILVAGSEQGIEAGQVGLRLITKGERQTTVAREWYIGATSITDGRWHTVTITIDADAGEATCYIDGGFDGYQNGLPLSIGSAIWEQGAEVWLGVRPPIDVDAFGRSDSDGVESKMHIMDVFLWGKCLSEEEAASLHAAIGMADLDMIDLSDDNWQWTDSPPRVDGWDSDPADVDLYDRDDVDWDGQYSSGRKRRSGRDFVMSVDSFARRHRKPRMETQEDINQRMRSVELAVKEALSARGDKQFTDQEFPPNDRSLFVDTQNPPSKLQVVSEWMRPDSIVKENGSDSRPCLFSGDANPSDVCQGRLGDCWFLSAVAVLTEVSRISEVIITPEYNEEGIYTVRFCIQGEWVPVVIDDWIPCESPGKPAFATSRKLNELWVSMVEKAYAKLHGSYEALEGGLVQDALVDLTGGAGEEIDLRSAQAQIDLASGRLWSQLLRFKQEGFLLGAGSPSGSDVHVSSSGIVQGHAYSVLQVREVDGHRLVQIRNPWANEVEWNGPWSDSSPEWTDRMKHKLKHVPQMRYSVNGQWRGYSAGGCQDYSSWHQNPQFRLRATGSDASLPIHGVGFSRTTPGFRNYQSSHDSQLFYIGLRILKTRGRRAAYNIFLHESVGGTDYVNSREISCEMVLDPDPKGYTIVPTTIHPGEEAPFVLSVFTKASIVLEAL

SEQ ID NO: 7608 - protein, 720 aa, Arabidopsis thaliana
MQTTSIGPRRSVAPQRQASRNTRLVTAEGQRSQDVVTLSQSLAANTLTQDTTNNLAITSVAGESASITQPTVSEHFNPSDRQMDFGKSAVTSLESNLDVQRKSQSLIGTSQDMEWDATNQAEASHLDACIGSKHQNLPSVDSEVSLKSEYKDSSSLAKIQGQLGEFPNFLNQPRTRCSAVGSSWATTTLIHSSSAPMLNATTHVSRSYVEADSNANPHAVQSQGNLPSCCPSSKVSNILHPNKDATASEMPASTNDPEVRVKETDTSKQQQITTGLEAPVGSSIYGSDGQANARLPEELHTSVSSQPQKSDKHEKVASSKGPSAPRKRNYDPDLFFKVNGKLYQRLGKIGSGGSSEVHKVISSDCTIYALKKIKLKGRDYATAYGFCQEIGYLKKLKGKTNIIQLIDYEVTDKTLLQEVLNGTMSNKDGRVKEDGFIYMVLEYGEIDLAHMLSQKWREIEGSDRTIDENWLRFYWQQILQAVNTIHEERIVHSDLKPANFLLVRGFLKLIDFGIAKAINSDTTNIQRDSQVGTLSYMSPEAFMCNESDENGNTIKCGRPSDIWSLGCILYQMVYGRTPFADYKTFWAKFKVITDPNHEITYNQLSNPWLIDLMKKCLAWDRNQRWRIPELLQHPFLAPPIPHEPQVKTIKLFSLIAESCGSDDDKANSMISQLEQLLSNPAPLPRNDVLDSRDQNQQLLSRVSELCIQLQDRLQGLEGEN

SEQ ID NO: 7609 - protein, 197 aa, Arabidopsis thaliana
MMRPTLLILLFSTFLPQILTVDPPLLPSNGSDFIRLACNTTLYPDLCFSTLSSFANSIQNDSNRLARVAISLTLHNTLHLLSYLQNAYNRDHPTPVLRDCFENLKDAVDGMRGSMKQMKELVSASGSIESFRFQMSNVKTWLSAALTDEYTCTDGFKDVHEDDSIKDDVCSRVDDVKKLTSNALALVNRYADESIIN

SEQ ID NO: 7610 - protein, 284 aa, Glycine max
MTVQKEDLGLSLSLSFPLLSSSPSSHNPQKPSWNDPIFTSSGEAGSFLRGIDVNRLPSVVDCEEEAGVSSPNSTVSSVSGKRSERETNGEENDTDRACSRGIISDEEDAETSRKKLRLSKDQSIVLEESFKEHNTLNPKQKLALAKQLGLRARQVEVWFQNRRARTKLKQTEVDCEFLKRCCENLTEENRRLQKEVQELRALKLSPQFYMHMTPPTTLTMCPSCERVAVPPSSAVDPATRHHHVPPSHPRAFPIGHGQALRCPPSQILDSRKQNDKIEKKDRKP

SEQ ID NO: 7611 - protein, 152 aa, Pisum sativum
MDLDSPLFNTLHHIMDLTDDTTEKNLNAPTRTYVRDAKAMAATPADVKEHPNSYVFMVDMPGVKSGDIKVQVEDENVLLISGERKREEEKEGVKYLKMERRIGKLMRKFVLPENANIEAISAISQDGVLTVTVNKLPPPEPKKPKTIQVKVA

SEQ ID NO: 7612 - protein, 676 aa, Bremia lactucae
MAQSVSGYSVGIDLGTTYSCVGVWQNDRVEIIANDQGNRTTPSYVAFTDTERLIGDAAKNQVAMNAHNTVFDAKPLIGRKFSDPIVQADIKHWPFKLTSGWRQAQIVVQFKGESKTFQPEEISSMVLIKMREVAEAFIGKEVKNAVITVPAYFNDSQRQATKDAGAIAGLNVLRIINEPTAAAIAYGLDKKGGERNVLIFDLGGGTFDVSLLSIEEGIFEVKSTARDTHLGGEDFDNRLVDHFTQEFKRKHRKDITENQRALRRLRTACERAKRTLSSSAQAYIEIDSLFDGIDFNSTITRARFEDMCGDYFRKTMEPVAPVLRDAKLSKSQVHEVVLVGGSTRIPKVQQLLSDFFNGKEPNKSINPDEPVAYGATVQAAILSGNDSSQKLQDLLLLDVTPLSLGLETAGGVMTTLIARNTTVPTKKSQTFSTYADNQPGVLIQLFEGERSMTRDNNLLGKFNLDGIPPMPRGVPQIDVTFDIDANGIFNVSAVEKSTGKENKITITNDRVVCRRHDIDRMVSEAEKYKSEDEANKIRIEAKNGLENYSYNLRNTLNDEKLKDQIPEDDKKAIEDKVTETINWLDANQSAEKEEYEGKQKELEGIANPILQKMYAAAGAAGGMPGGMPGMPGGMPGMPGGMPGMPGGMPGGMPGGMPGGWPPCWSSDQGPKIEEVD

SEQ ID NO: 7613 - protein, 655 aa, Daucus carota
MASKGGKAIGIDLGTTYSCVGVWQNDRVEIIANDQGNRTTPSYFAFTDTSRLIGDAKNQVAMNPSNTVFDAKRLIGRRFNHPSVQSDMKLWPLQVIPGPGEKPMIVVNYKGESKQFAAEEISSMVLIKMLEIAEAFLGHSVNDAVVTVPAYFNDSQRQATKDTGVIAGLNVMRIINEPNCAQIAYGLDKKSSNPPEQNVLIFDLGGGTFDVSLLTIEEGIYEVKAPKSDTHLGGEDFDNRLVNRFVTEFLTNNKKDIRWECEALRRLRTACERAKRTLSSSTAQTTIEIDSLYEGVDFYTTITRARFEELNMDLFKKCMDPVEKCLRDSKIDKAQVHEVVLVGGSTRIPKVQQLLQDFFNGKELCKSINPDEAVAYGAAVQAAILSGEGNERSDLLLLDVTPLSLGLETAGGVMTVLIPRNTTIPTKKEQIFSTYSDNQPGVLIQVYEGERARTRDNKLLGKLLGKFELTGIPPAPRGVPQINVVFDIDANGILNVFAEDKTAGVKNKITITNDNGRLSKDEIEKLVKEAEKYKAEDEEVKKKVEAKNALENYAYNMRNTIKDDKIPGKLDAGDKEKIETAVNEAIEWLEKNQLAEVDELEDKLKELEGLCNPIIARLYQGRGDVPIGGPGDMPGGGYGGSRGSSGAGPKIEEVD

SEQ ID NO: 7614 - protein, 651 aa, Petunia x hybrida
MAGKGEGPAIGIDLGTTYSCVGVWQHDRVEIIANDQGNRTTPSYVGFTDTERLIGDAAKNQVAMNPINTVFDAKRLIGRRFSDPSVQSDIKLWPFKVIPGPGDKPMIVVTYKGEEKQFAAEEISSMVLTKMKEIAEAYLGTTIKNAVVTVPAYFNDSQRQATKDAGVIAGLNVMRIINEPTAAAIAYGLDKKASSAGEKNVLIFDLGGGTFDVSLLTIEEGIFEVKATAGDTHLGGEDFDNRMVNHFVQEFKRKNKKDISGNPRALRRLRTACERAKRTLSSTAQTTIEIDSLYEGIDFYSTITRARFEELNMDLFRKCMEPVEKCLRDAKMDKSSVHDVVLVGGSTRIPKVQQLLQDFFNGKELCKSINPDEAVAYGAAVQAAILSGEGNEKVQDLLLLDVTPLSLGLETAGGGMTVLIPRNTTIPTKKEQVFSTYSDNQPGVLIQVYEGERARTKDNNLLGKFELSGIPPAPRGVPQITVCFDIDANGILNVSAEDKTTGQKNKITITNDKGRLSKEEIERMVQEAEKYKSEDEELKKKVEAKNALENYAYNMRNTIKDDKINSQLSAADKKRIEDAIDEAIKWLDNNQLAEADEFEDKMKELESICNPIIAKMYQGGAGGATMDEDGPSVGGSAGSQTGAGPKIEEVD

SEQ ID NO: 7615 - protein, 398 aa, Anabaena variabilis ATCC 29413
MSVIYLDNNATTQVDAEVLAAMLPYLTEFYGNPSSMHTFGGQVGKAVQQARGQVAFLLGAEESEIIFTSCGTEGNNAAIKAALAAQPEKRHIITTQVEHAAIINVCKQLEKQGYKVTYLSVDSQGQIDLLELEAALTGDTALVSTMYANNETGVVFPIEQIGLRAKDAGAIFHVDAVQAVGKVPLNLKTSSIDMLTLSGHKLHAPKGIGALYIRRGVRFRPLLVGGHQERGRRAGTENVPGMIALGKAAELAQIHLKDVKREKALRDRLEQGLLSAIPNTEVNGHPTSRLPTPTNIGFKYIEGEAILLSLNKYGICASSGSACTSGSLESSHVLRAMGLPYTILHGSIRFSLSRYTTEAEIDKVLQLMPPIVERLRAISPFSNDQADWLQGREEALAH

SEQ ID NO: 7616 - protein, 498 aa, Nicotiana tabacum
METPTWTAYAAACLATLSLFLLSKFLRQRKLNLPPGPKPWPIVGNFNLIAPLAHRSVHELSLKYGPIMQLRFGSFPVVVGSSVEMAKVFLKSMDINFVDRPKMAAGKYTTYNYSNITWSAYGPYWRQARKMCLMELFTAKRLESLEYIRTEELQSLLHDLYNLTGKPILLKDYLMTLSLNVISRMVLGKRYLDESKNSIVTPEEFKKMLDELFLLNGVLNIGDYIPWIDFMDLQGYVKRMKVLSNKFDRFLEYVLDEHNARRNAEENYVAKDMVDVLLQFADDPTLEVKLERHGVKAFTQDLLAGGTESTAVIVEWAISELLKKPEIFNKATEELDRVIGQNRWVQEKDIPNFPYIEAIVKETMRLHPVAPMLTPRLCGEDCKVAGYDILKGTRVLVSVWTIARDPTLWDEPEAFKPERFLGNSIDVKGHNFELLPFGAGRRMCPGYNLGLKVIQASLANLLHGFKWSLPDNMTPEDLNMEEIFCLSIPKKIPLAACD

SEQ ID NO: 7617 - protein, 260 aa, Prochlorococcus marinus str. MIT 9515
MQIKSKALDPILEVNSLFASIENLPILKGVTISVKPGEIHAIMGRNGCGKSTLSKIIAGHPSYQVTKGEIKFNGNDIQSLEPEERAQSGIFLGFQYPIEIPGVSNLEFLRVATNARRKFLNKEELDTFDFEDLVKEKLDLVKMDSAFLSRSINQGFSGGEKKRNEILQMALLEPKIAILDETDSGLDIDALRIVASGIKKISNEKTGIILITHYQRLLDEIQPDYVHVMSDGQIIKTGGSDLALELEKYGYEWTDKFIKE

SEQ ID NO: 7618 - protein, 381 aa, Prochlorococcus marinus str. MIT 9515
MFSSPILLDYQSSTPCLEDVVNSMSPYWREIFANTSSKSNLAGINASAILEVSREKIQEYLCLKKKKVIFTSGATESNNLALLGFARNFYKETKSYGHIITLKTEHKAVLEPLDQLRKEGFHITAITPEKDGLISKEKFMSFIRDDTFLVSIMMANNEIGVIQPLKEISEICKSREIILHSDYAQCLGSLELDNLDSVANMLTISSHKIYGPKGVGLLLIDRDIELQPLFFGGGQEFGLRSGTLPLALIVGFTKAIEIAVFNQKKNAEKFLFYRDKLLHGLLVNNSGVEINGSMKERLPHNLNLTVLDVNGSKLHKTLKSKIICSSGSACGNGEPSHVLLALGRSFKEAEASLRLSIGLMTTSEDIENSIQIITDTINLLR

SEQ ID NO: 7619 - protein, 327 aa, Prochlorococcus marinus str. MIT 9515
MQFIDQANIILKAGKGGNGIVSFRREKFVPAGGPSGGNGGKGGSIILVADNNLQTLLDFKFNREIFAKDGFKGGPNKRSGASGENTILKVPCGTEVRDVHTGIILGDLTIDKQSLTIAHGGRGGHGNAYYLSNQNRAPESFTEGQEGEIWEVQLELKLLAEVGIIGLPNAGKSTLISVLSSARPKIANYPFTTLIPNLGVVRKADGNGCLFADIPGLISGAAEGVGLGHDFLRHIQRTKILIHVIDSIAENPIHDFEIIEKELKQYGNGLLEKERIIVLNKKELIDENYLKIIIKKLENLSKKKVLVISSALREGLPSLLSEVWNRI

SEQ ID NO: 7620 - protein, 619 aa, Prochlorococcus marinus str. MIT 9515
MNKRWRNVGLYVLAVITVIFIGTSVFDKPNTENATKTLRYSDFIEAVQDKEVSRVLLSPDNGTAQVVENDGSRSEVNLAPDKDLLKILTENDVDIAVTPTKLANPWQQAVSSLIFPVLLIGGLFFLFRRSQSGSGGGGGGNPAMSFGKSKARLQMEPSTQVTFSDVAGVEGAKLELTEVVDFLKSPDRFTAVGAKIPKGVLLVGPPGTGKTLLAKAVAGEAGVPFFSISGSEFVEMFVGVGASRVRDLFEQAKKNAPCIVFIDEIDAVGRQRGAGMGGGNDEREQTLNQLLTEMDGFEGNSGIIIVAATNRPDVLDSALMRPGRFDRQVTVDRPDYAGRLQILNVHAKDKTLSKDVDLDKVARRTPGFTGADLANLLNEAAILAARKDLDTVSNDEVGDAIERVMAGPEKKDRVISDKKKELVAYHEAGHALVGACMPDYDAVAKVSIIPRGQAGGLTFFTPSEERMESGLYSRSYLQNQMAVALGGRVAEEIVYGEEEVTTGASNDLQQVANVARQMITKFGMSDKIGPVALGQSQGGMFLGRDMSSTRDFSEDTAATIDVEVSELVDVAYKRATKVLTDNRSVLDEMAMMLIERETIDTEDIQDLLNRSEVKVANYI

SEQ ID NO: 7621 - protein, 391 aa, Prochlorococcus marinus str. MIT 9515
MNSQKESIRDSKGIILPYGGELKDLIIKDKKLITKLFSQVSYEHECSDRNACDVELLMVGGFSPLEGFMDKEDYKSVIKSHRNTKGLLFGLPIVFDTNKEEIREGETILLTYKKQKLAFLEVSSKWEPDKSVEAEFCYGTNSLDHPAVKMIFNERGRYYIGGKIYGLELPNRDFPCKTPEEVRDLLPANFDVVAFQCRNPIHRAHYELFTNALQSDNVSSNSVVLVHPTCGPTQQDDIPGKVRYLTYKKLEEEISNENIKWAFLPYSMHMAGPREALQHMIIRRNYGCTHFIIGRDMAGCKSSSTGEDFYGPYDAQNFANKCSKELMMQTVPSRNLVYTLEKGYITAEEAKEKNYQIMKLSGTEFRKKLRNGDSIPEWFAFKSVVDVLRKS

SEQ ID NO: 7622 - protein, 244 aa, Prochlorococcus marinus str. MIT 9515
MLPTSRGFNRSTQQPSGQNTINTVGERFPINKTLMEVIKGLEGASTEMVERSKTIFSPGDPAERVYLIRRGAVRLSRVYESGEEITVALLRENSLFGVLSLLTGHRSDRFYHAIAFTRVEVITAPANSVLRAIEADASVGLLLLQGLSSRILQTETMIETLTHRDMSSRLVSFLMVLCRDFGVASKKGITIDLKLSHQAIAEAIGSTRVTITRLLGDLKDSGLLTIEKKKITVFDPIALAKRFN

SEQ ID NO: 7623 - protein, 486 aa, Prochlorococcus marinus str. MIT 9515
MTNALQTPHRRSSSKLQDASLVNGPMLLLRSIRGFSSNRSMLWLATVPLSLFGLGIFNLSAHAADLPELNAAFLANNLWLLIATILVIFMNAGFAMVEAGMCRSKNAVNILTKNLFVFALAVTSYWFIGYSLMYGGSIADGWLYFGGLFFDPTVTADMVTDAGLVPTVDFLFQSAFAGTAATIVSGLVAERVKFGEFVVFAIVLTAFIYPIAGSWKWNGGWLDSLGFVDFAGSSIVHSVGAWAGLVGAMLLGPRIGKFRDGKPQAMPGHNMAIATLGALVLWIGWYGFNPGSQLAMDQWVPYVAVTTTLAAAAGAIGATIVSTLTSGKPDLTMIINGILAGLVSITAGCGDMTLAGAWFAGLVGGIIVVFSVAAVDAAEIDDPVGAFSVHGVCGVWGTLVIGLWGTAVQADGAGLGLFNGGGIKLLLVQALGAAAYAIWTLVTCWIAWSVIGGIFGGIRVSEEEETQGLDIGEHGMEAYPDFASAK

SEQ ID NO: 7624 - protein, 449 aa, Prochlorococcus marinus str. MIT 9515
MFKKLPAKIAIATLTVPAIQLIFASLAPIHASESNISDADNTLILTSSALVLLMTPGLAFFYGGFTQAKNVLNTMGMSFVMMGIATLVWSIVGFSLAFSDGGASNAFIGNPSTYAFLENLPLNWEGLQIPGLSFALFQGMFAIITPALISGALVERISFRFWCFFTPIWILFVYAPLAHMVWGGGLLGKDLDFAGGTVVHISSGVSALVLASLAGSRRNWPRGIKPPHDITQILLGTGLLWFGWFGFNGGSQLSVGGAELPFTTTHVSAAAGLVTWALIESIKDGKASAIGMATGAVAGLVGITPAAGFVNPSSGMLIGAITSGICFLSLKLKIKLSFDDSLDTFAVHGVGGTVGALLTGLFAKSELIATHPAGLVLQEQGRIALILGQLQAVLIAYAIAAIGTLIIALVLKSLGCSFRVNETDEEDGLDISQHGEEAYGEKTGSPKTI

SEQ ID NO: 7625 - protein, 587 aa, Prochlorococcus marinus str. MIT 9515
MTLTSPPLSKGDSEKKYPKWITGAEALMDSLRIHGVRVIFGYPGGAILPIYDAVYKAESDGWLKHYMVRHEQGGSHAADGYARATGEVGVCFGTSGPGATNLVTGIATAQMDSVPLVVVTGQVPRPAIGTDAFQETDIFGITLPIVKHSWVIRDPSDIAKVVSEAFFIASSGRPGPVLIDIPKDVGQEFFNYERILPGEIIPKGFKRNGEINDNDIDKAIELIKQSAKPLLYVGGGAISSGAHKEVEILAKNFQIPVTTTLMGKGAFDERDDLSVGMLGMHGTAYANFAVTECDLLITVGARFDDRVTGKLDTFAPSAKVIHIDIDPAEVNKNRRVDVAIVSDVAVALSKINEKSLSKNTSCNTRNWLEKINSWKNKHPLFIPPEEGEIYPQEVLLKVRDLSPEAFITTDVGQHQMWAAQYLRNAPRRWISSAGLGTMGFGLPAAMGVKAALPTSEVICIAGDASVLMNIQELGTLSQYGLKIKLVIINNRWQGMVRQWQESFYHERYSSSDMSCGEPDFVKLAESFGVKGFLISERKQLHNEFKSALDFDGPALINVRVRRGENCYPMVPPGKSNAQMVGYVNCKN

SEQ ID NO: 7626 - protein, 843 aa, Prochlorococcus marinus str. MIT 9515
MSKKIAANNFQQTVDSENLLLTIIKEDSLAKEILKKNEVDIEKIEKDLISLLNSKAKMKNKQKILYIGESLNNIFLKSNDLRVSLNDVVISTEHLLYGLSYDEVCGKLILNKKKIPDFLETIIEMKSNPKIQNNFESPNESLDKFGIDLTKSASEGNLDPVIGRDEEIRRTIQILSRRTKNNPVLIGEPGVGKTAIVEGLAQRIVNGDVPSSLHNRRLISLDMGSLIAGAKYRGEFEERIKNVLKKVKSSAGKIILFIDEIHTVVGAGASGGSLDASNLLKPMLARGELRCIGATTINEHKQNIEKDPALERRFQKIKINAPSVDDTVSILRGLKEKYEVHHSVRISDNALVAAASLSERYINDRFLPDKAIDLIDEAASRLNMVITSKPEEIDEIDRKVLQLEMENLSLKRESDNFSLERIKKINNELKDLKSKQSELNIKWRKEKEEIDEISNLKEEIESTQLKIEQAKRSFDLNKAAELEFGTLISLQKKLKSKNEILVDSFKNGENNLLRQEVTFDDIAEVVSKWTSIPVNNLNQSEKDKLLKLELTLKEKIIGQSNAIFAVANSIKRSRTGLNDPNRPLASFLFLGPTGVGKTELSKVTAETIFDSSDSITRLDMSEYMEKHSVSKIIGAPPGYLGFESGGQLTEAVRKNPYSLILLDEIEKAHKDILDILLQVLDDGIITDGQGRTISFKNSIIVLTSNLGSQSINDLSIRNEDKNEIKTIVDLELKKFFKPEFLNRLDEIVIFQNLEINELKEIANIQLKNLENRLIKKDLKLKISDEAVEYLVKNSFDNNYGARPLKRIIQNQITTNIANNILNNIYLNKKEVDIFIKNGKLFVE

SEQ ID NO: 7627 - protein, 393 aa, Prochlorococcus marinus str. MIT 9515
MSEVNLSKRALSLEPSLTLQISAKAKKLSEEGKDICNLSAGEPDFDAPKEILNATSQAIFDGHTKYGPAAGDKELRKAIAKKLQIQNNLNVEFENVMVTNGAKQAIYNLFQVLLNDGDEVIIPAPYWLSYPQMVRLAGGKPIFLNSAPEDGFKINIQDLRSKISSKTKFIIINSPNNPTGRIMAKEELLQIAEVVREHKNINVLSDEIYELILKKEFRHLSLASLATDLKERIFIINGFAKGWAMTGWRVGYLVGKKEVIKASSALQSQSTSNVCSFVQRGALEALKINQEFFLKINSHYDLRREILYEGLRNIEGLVVHQPNGAFYAFPRLPNKSISSVDFCKKILNDYGLVIVPGKPFGDNQSFRISCATSKEKIIDGLSRLKKAVHNYYF

SEQ ID NO: 7628 - protein, 344 aa, Prochlorococcus marinus str. MIT 9515
MYLEKTRQKIAEILNAEIEDIIFTSGSSESTSIVFSNLSDRYKRGRVVISKVEHQATIISANKLKRKGWDIYEWPVNHDGIINISEVDEVIKNNTNLVSIIWGQSEIGSLQPVQLIGTKCKELDILFHIDGTQILSNGIFNWKELKCDLLSLSAHKFGGPKGIGLLLTNSKSRSFLKNKDISLTQEYQIRQGTTPLPLIAGMYQSIKNIKGRISFSSDKTVFDLNKNEILKNYFISKINNIPNIKITGSYTQRLPNHISFILFNSQREPIKAYKVINYMSDNNVEISSGSACSSSSGKPSQILENMGYDSNQLYSNIRVSLGSMNKKSDLDRLFELIQNCIKKF

SEQ ID NO: 7629 - protein, 384 aa, Prochlorococcus marinus str. MIT 9515
MVYSQAKVIAGGLAHIPIVIGVFYFIMTFFNKRAIDYAEANKPKKVEKKVVETKVKAKETSSVNAETKTEAPLKVENSKIDKKTMKKKHADVPVNIYRPKTPFEGTVIGNYSLLKEGAIGRVNHITFDLKGSDPFLNYVEGQSIGIMPVGEDANGKPHKLRLYSIASTRHGDDFEGNTVSLCVRQLQYEKDGETINGVCSTYLCDIKPGDKVKITGPVGKEMLLPEEEDANIVMLATGTGIAPMRAYLRRMFEATEKEKNKWNFKGKAWLFMGAPKSANLLYEEDLQRYLENYPDNFKYTKAISREQQNTKGGRMYIQDRVLESANEIFNMIEDEKTHIYLCGLKGMEPGIDEAMTKAAAEKGLNWSELRPQLKKAGRWHVETY

SEQ ID NO: 7630 - protein, 331 aa, Prochlorococcus marinus str. MIT 9515
MTSFITAVDNEVPNFNLANSRLRLVSGTSNPKLAEEIASYLGIENVPLVSKRFADGELYVQIQQSIRGCDVFLIQPTCAPVNDSLMELMIMVDACKRASARQITAVIPYFGYARADRKTSGRESITAKLTANLLEKSGVDRVLAMDLHSAQIQGYFDIPCDHIYGSPVLIDYLETLNLEEVVVVSPDVGGVARARAFAKLMKDAPLAIIDKRRSAHNIAESLTVIGEVKGKTAILIDDMIDTGGTICSGANLLKKEGAKRIFACASHAVFSPPSYERLSAKDLFEQVIVTNSIPVLDNNNFQQLKVLSVANMLGEAIWRIHEESSVSSMFR

SEQ ID NO: 7631 - protein, 465 aa, Prochlorococcus marinus str. MIT 9515
MSISSFLTKKFLKSLFFPAHNRGKALPKGLIRLLKKEPGFWDLPELPEIGSPLSKSGLIHDAQISISKKLNTKKCFFGVNGASGLIQSGIITMANPGEYILMPRNVHISVIKACALQNIIPIFFDIEFSIETGHFMPITKKWFMNVFNNIDLEKRKIAGVILVNPYYQGYASNIEPLIKICHQHNLPVLVDEAHGSYFLFCENLGLPKSAIRSKADLVVHSLHKSLNGLTQTAVIWHNGNLIEENNLIKSINLLQTTSPNSLLLSSCEESIKDWLNKDNLDKYKKRISEAKKIFKELKKRKIPLIETQDPLKIVLNTSEVGIDGFTADRFFYKNGLIAELPEMKTLTFCLGFSNQKDFISLFQDLWEKLLIQTNKSYSLKAIKPPFRLVQSPEVPIGVAWRSKTYSIPLAESLGKISADIICPYPPGIPLIVPGERIDKERIDWIETQSLYNQDLLNSYIRVLHN

SEQ ID NO: 7632 - protein, 364 aa, Prochlorococcus marinus str. MIT 9515
MQSISPEKIFRGSGAWIKAIPHIKSISKRPLLLGRSLVTNNIRQQIYKDLLSENLDTHISNLQFDCCYEDLKRVKNIALKNNCDSIIAIGGGKVLDSGKFLADSLSIPVITIPLSASTCAGWTALSNIYSTTGQFIKDIELKSCPKILVFDHAFIKTAPKRTLSSGIADSLAKWYESSLTSSKVKDGLVQQAIQISRVLRDQLLIDGESAYQSQSLQNTSWCNVVEGCALTAGLIGGIGGEKCRTAAAHAFHNAITQIVSTQKPLHGEIVGVGILLQLRLEETKNNNKLANQSINQLLVLMKKLNLPTTIAQLGINVFENNNLQRIADFTCRDKSEIHFLPFKISQQDIIEVISNFERQEIKIS

SEQ ID NO: 7633 - protein, 595 aa, Prochlorococcus marinus str. MIT 9515
MASNKQKQLEEKDEDNFGEETSSKHDSKEIENNLKIISEDKLSAEKEDIEKGFACFGFNKLILNSLENKGYKIPTPIQKAAIPELMLGRDLLGQAQTGTGKTAAFALPIIEKLENNKESNAKVLVMTPTRELATQVADSFKSYSVESTNLRTLAIYGGTDFRNQISSLKRKTDVVVGTPGRIMDHIRQGTFKINNINCLVLDEADEMLKMGFLEDIEWIIDKLPENKQMVLFSATMPNEIRNIAKKYLNDPAEILIKSVKKETQLITQRYINVQRHHKLEALKRILEITNEGVIIFVRTKLLTTSIAEALENSGHSVAVLNGDIPQNQRENTVDRLKKGFIDILVATDVAARGLDVERIKLVINYDFPFDKETYTHRIGRTGRAGRSGEAILFVNQREKHFLRNLENSTRNKIEEIEIPNNKLINEKRMGKLISNLNEISLAQENNEEKKALMIDILDILREKYSMNESNIAMAAINLAIGNKSFFLNEDESWIYKQNNSDRNRSNRNGSGNNRMRNINRRNNYQNDSFETYKFNFGKMDRVRVSNIISSICNSTNINGRSIGKIQIFNEYSLVDLPKDLHGEVRNKLRKLRIRN

SEQ ID NO: 7634 - protein, 107 aa, Prochlorococcus marinus str. MIT 9515
MENLTKNKIQKLIDSSPVMVFMKGTKLMPQCGFSNNVVQILNSLGVEFDTFDVLSDFEIREGIKEYSEWPTIPQVYLKGEFLGGSDILIEMYNSGTLKEKIEIELAS

SEQ ID NO: 7635 - protein, 349 aa, Prochlorococcus marinus str. MIT 9515
MINRLFFGIAAFGLLLTGCASNQQENISRLSLIQKRDELICGVSGKIPGFSFIERDGKYKGLDVDICKAFASAIIGDSEKIQFRPLTAAERFLAIKTGDIDLLSRNTTFTLSRDSFEGNGLTFAPVVFHDGQGLMVKKNSGIDSIQELANKSICVGSGTTTEQNINDTFESLSLPYVPIKYQDLNQVVAGYLQGRCEAMTSDRSQLAAARSGFKNAKDHIILDNVLSKEPLAPASNGSEQKLADAMRWTIFALIAAEEQGITQLNIDDKVQLAKNNPQLKSLRRFLGIDGGLGEKIGLRNDFVVNVIKATGNYGEIYDRNLGKDSDVPIPRGLNKIYSKGGLHISPPFN

SEQ ID NO: 7636 - protein, 376 aa, Prochlorococcus marinus str. MIT 9515
MTKILIPIETVSGERRVSATPGAVKKLKSLGCEVFVESSAGELSGFNDTLYKESGGQIVTESNANIWENTDVVFCVQTPSESNLGKLKRGAILLGLLNPYSNKQLQKTITSKKISALSMELLPRISRAQSSDVLSSQANIAGYKAVLLAASELDRYFPMLMTAAGTIQPAKVVVLGGGVAGLQAVATAKRLGAIVFVSDIRPAVKEQVESLGARFIELPEIDEKPGESGGYAKAVTPEFLSKQKATLTKYLSEADVAVCTAQVLGKKAPVLIDSHMIANMRSGAVVIDLAVSQGGNCEGTKSNETIIRNGVKLIGAGELPSSVPYDASTLYAKNLTSLITPFIKDGVINLDKDDELISGCLLSDEGVILQNKVFEN

SEQ ID NO: 7637 - protein, 303 aa, Prochlorococcus marinus str. MIT 9515
MNNYKSGFVTLLGRPNVGKSTLINKLIGEKITITSPVAQTTRNRLKGILTTEFGQIIFVDTPGVHKPHHLLGEILVKNAKSAIKGVDMVILVLDSSVEPGRGDEYIKDFLVSNKTEFIIVLNKWDLVNKEFKSLRLDQYRKVFGTSKSFQTVSASEGYGCSELINIILNFLPKGPMLYEEDTICDQPLDNLLADLIREQVLINTREEVPHSVAVKIEKIKEINRDNGKKFTAILATIIVERTSQKGILIGKKGSMLKTIGQTARSNMKKLINGSVHLELFVKVIPNWRKKESKLMEFGYEVDY

SEQ ID NO: 7638 - protein, 528 aa, Prochlorococcus marinus str. MIT 9515
MTKVLITDPIDQTGIDILSQVAQVDQRIGISNLELASIIQDYDALMIRSGTQVTGDIINSSKKLRIIGRAGVGVDNVDVKAATQKGVLVVNSPGGNTIAAAEHTIAMMLALSRNIPIANSSTFLGKWERKKFVGNELFKKKLGVVGLGKIGTHVAKVANALGMDVYGYDPFVSSERAQQLQVKLSELKTLFAESDYVSLHLPRTSETENLVDMKVLKSMKDNAKLINCARGGIIDEEALAEALNKSLIGGAAIDVFAEEPLDSNSPLLKVDKNLILTPHLGASTREAQENVAVDVAEQIRDVLLGLSARTAVNIPGLSPDIMDSLKPHLQLAETMGLLISQLSGGKIQKLDLRLQGEFVQHPSQPLIIASLKGLLSKALGDRINYVNASLEAESRGISVVESKDEARPEFASGSLQLTTFGDNGEHSVAGSIFADGELRIISIDQYPVNVSPSRFMLITRHRDMPGIIGKLGSLLGDHNVNIASMQVGRKIVRGEAVMVLSIDDPIPTNLLESILEVEGITSSDPVTL

SEQ ID NO: 7639 - protein, 519 aa, Prochlorococcus marinus str. MIT 9515
MYKAINSAKAFLSDQSLRSKSLIIGGLPLIIFLAICSINLNLAEKITNYGKDFALTNFGSTWLIMVVGICIVGFFLGFSPLGSLRIGGPDVKPSLNFFDWCAVLICTLLAGGGVFWSAAEPLIHFLSPASYFSDITGGTEQAIDPSLAVSFLHWGFLAWGLVASTVTITFSLLSQNGYPLRPRSLLIPIFPKRIVEGLVGDITDGLSVVAAVAGTVGPLGFLSLQLSNAAGKLSFLSNNSFLQTLIVLVLTLIFTISTLSGIQKGIKFLSEINIWLTIVLGVILLLIGPTFWLVNHFLSSNFLYLSDVKKLALPNPNDAWVKGWTIFYWGWFLGYAPLMGLFAAGVSKGRTFRELIIVVCIICPFVTNLWFTILGGNGIFLELNNPNLLGKELVEGGEAGVLFSILSQLPLSFLMIPISILLIVLFMCTSADSISYAAAIVVSGKENPPKKIRLFWALMIGFLTIALLRIGSEVGDKTSIDALQAFIVITAVPVTPLIISTIWTAPKLAIKEYVRLKKG

SEQ ID NO: 7640 - protein, 1524 aa, Prochlorococcus marinus str. MIT 9515
MRESIKRSKGPYQDSYSPSGIIGEKDACGVGFIANIYGKESNWILKQSLRGLNCMEHRGGCGGDNDSGDGAGILCSIPWEFLDQEMNLEPRPDQIRGLGMIFMPNNELKVKESKLICEQEAKKLNFKKTFWRNVPVKNEILGNLAKQNAPFICQWIVCLEKVDSQEFETLLFQLRKRIEKRIRENTKNNAADCEFYFASLSSKTVVYKGMVRSEILSKFYGDLQKKEFKVSFSVYHRRFSTNTLPKWPLAQPMRFLGHNGEINTLLGNINWAKASEKHIDEYWGELSKDIKPIVDINKSDSSNLDATLEINIRSGQLITDSLMKLVPEAFRDQPELKGKEDIKAFYEYSASLQEAWDGPALLVFTDGDFIGATLDRNGLRPARYSITDDGFVIMGSETGVVDVEDNKVIEKGRLGPGQMLAVDFTNNKILRNWEVKTEAARRNDYLNLLKKRTVKLQKKEWFENCELKDLELLQQQTVYGFSAEDNDLILDSMASVSKEPTFCMGDDIPLAVLSSKPHILYDYFKQRFAQVTNPPIDPLREKLVMSLEMHLGERCSPFETKNIKPFIHLKSPIINEQELISIKESKIKSHTISSLFDIKEGQKGFENKLNDICKQSEIAINEGSSLIIISDKGVTSNKSFIPPLLAVGAIHHYLLKKEIRLKASLIIETGQCWSTHHLACLIGYGVSAVCPWLILESARHWLKHPKTQKLIESKKINSLSTKDVQKNIKKALEDGLRKILSKIGISLLSSYHGAQIFEAVGLGSDLIKIAFDGTTSRIAGITLKELSNESFSIHTKAYPEIDLKKLEFLGFVQFRNYGEYHSNNPAISKVLHTALKEGPGYDHFNTYQELVRNRPITSLRDLLTIKSKRDSIPLDQVESVESICKRFCTGGMSLGALSREAHEVLAVAMNRIGGKSNSGEGGEDPARFNVLNDIDKNTRSATLPFIKGLENGDTACSAIKQIASGRFGVTPEYLRSGKQLEIKMAQGAKPGEGGQLPGPKVDSYIAKLRNSKPGVALISPPPHHDIYSIEDLAQLIHDLHQIHPKAKVSVKLVSEIGIGTIAAGVSKANADVIQISGHDGGTGASPLSSIKHAGLPWELGVAEVHKSLLQNNLRDRVLLRADGGLKTGWDVVIAALLGAEEYGFGSVAMIAEGCIMARVCHKNTCPVGVATQKEELRKRFKGLPDNVVNLFLYIAEEIRQIMSSIGVSKMEDLIGNKEFLTTRDISLPKTGNIDLTSLVNNNHIFNDRSWINHSKNAHNNGPVLEDEFLMDSHFMDTIRNHKEFTKDIKIKNTDRSVCAKISGEIAELFGNNGFKGKLNLNFYGHAGQSFGAFLLKGMNIQLIGEANDYVCKGMNGGLLTIVPPKVDEKSSEQVILGNTCLYGATGGKLFALGKSGERFAVRNSGAIAVTEGSGDHCCEYMTGGKVIILGSTGRNIGAGMTGGIAYILDENDDLENKVNKEIVSIYKINNLKQEEILLEILNEYHEKTKSLKALKIIKDWSNCKKIFKIVVPPSEEALLGINSQ

SEQ ID NO: 7641 - protein, 586 aa, Prochlorococcus marinus str. MIT 9515
MALLIKKFGGTSVGDITKIKAIAQSIAQSKEAGNDIVVVVSAMGNSTDKLNKLAESISKNPNRRELDMLLSTGEQVSMALLSMSLNEYGIPAISMTGSQVGIITESIHGKARILDIKTERIKNYINQGYVVVIAGFQGSTLSHTGTTEITTLGRGGSDTSAVALSTALGAETCEIYTDVPGVLTTDPRIVSDAKLLDVISCEEMLELASVGASVLHPRAVEIARNYGIKLYVKSSQTLSKGTLLHSNIKPLALKRGGLELTKTVNSLEVLEKQIVFSISKLPDRPGIAAQIFETLSEASINVDLIIQATHDGNSNDIAFTVNQFDLTKTIEQCKLITNQLGGEYNFKTNMTKLSIQGAGIMGRPSVSADLFDTLSQANINVRLIATSEIKVSCVIDIDNIPKAIRFVGEKFKLSDKQIFINPLFEREDQPEVRGIALDKNQVQVSFRNLPDKPGVAASICLALAESNLIFDTIVQSESLTSFKTKDISFTMNKQDRARANKIFYSLTKKLSGAFVEDGPAIAKVSTVGAGMASKVGTAGKIFRALANKNINIEMIATSEIRTSCIVLEKDCDQAVNAIHSYFELDK

SEQ ID NO: 7642 - protein, 294 aa, Prochlorococcus marinus str. MIT 9515
MINKNLFDKEKAIFMGSKRNPDNCSIGIFGVNYDGTCSYKSGAKFGPNAIRQVSTCLETFCPRLEKDLEDFNYVDFGSLIIHKKDSKSVIKSVKSATNFLMSKSLAPIMLGGEHSITRGAIEALVKKYPDLILIQLDAHADLRSSYMGNEHSHACTMQRCLDVLPEKKILQVGIRSGTKEEFKFMRHQNQLVRFSPGGNTQELKKALIPYSNSPIYLTIDLDWFDPSLLPGTGTPEPGGFFWNDFEAILDTLKNIRIVASDIVELSPDIDNSGVSSVVAAKVLRSLIMSLKNMQ

SEQ ID NO: 7643 - protein, 634 aa, Prochlorococcus marinus str. MIT 9515
MGKVVGIDLGTTNSCVAVMEGGKPTVIANAEGFRTTPSVVAYTKNQDQLVGQIAKRQAVMNPENTFYSAKRFVGRRVDEVNEESKDVSYGIEKAGSNVKLKCPVLDKQFSPEEVSAQVLRKLSEDAGKYLGENITQAVITVPAYFNDSQRQATKDAGKIAGLEVLRIINEPTAAALAYGLDKKSNERILVFDLGGGTFDVSVLEVGDGVFEVLSTSGDTHLGGDDFDRCIVNHLASVFKSNEGIDLREDKQALQRLTEAAEKAKIELSNATQSEINLPFITATPDGPKHLDLNLTRANFEELASKLIDRCRVPVEQALKDAKLSTGEIDEIVMVGGSTRMPAVQELVKRVTGKDPNQTVNPDEVVAVGAAIQGGVLAGEVKDILLLDVTPLSLGVETLGGVMTKMITRNTTVPTKKSETYSTAVDGQTNVEIHVLQGEREMASDNKSLGTFRLDGIPSAPRGVPQIEVTFDIDANGILSVTAKDKGSGKEQSISITGASTLSDNEVDKMVKDAESNASVDKEKREKIDLKNQAETLVYQTEKQLGELGDKVDDSAKAKVEEKSKALKEATSKEDYDSMKKLLEELQQELYAIGSSVYQQPGNQPPAPGGPNANASDDKGPDDDVIDADFTETKD

SEQ ID NO: 7644 - protein, 404 aa, Prochlorococcus marinus str. MIT 9515
MQHPKKVVLAYSGGVDTSVCIPYLKNEYGISEVITFVADLGQGDDIESISQKALNSGATKSVIGNLVEDFVEKYAFPAIRANALYGEKYPLSTALARPLIAENLVKLARKLNAGAVAHGCTGKGNDQVRFDLAINALGPDLEIITPAREWKMSREEAILYGEKFGIPAPVSKKSPYSIDVNLLGRSVEAGFLEDPMQEPNEEVFAMTSSIDDSPNYPKDIEITFKNGFPIAIGNESLSPLKIIQKVNYLAGKNGFGRIDMIEDRVVGIKSREIYEAPGLLLLIKAHKELESITLNPDVLDFKNLVEKKWAQLVYQGFWFGPLKKALDGFIDATQTSVNGKVKIRLHKGNAIIIGRSSENNSLYREDLATYSKDDIFDHKQAEGFIYMWGMSNKIWAELNSKMNN

SEQ ID NO: 7645 - protein, 346 aa, Sphingobium yanoikuyae
MFSILKKQRSSKVSIAGEPAILEIPRGKTLLEAMLAEGLAMPHDCKVGSCGTCRFKLMDGKIGELSPSALVLERDALSQGYRLACQAMPRSDLVIALDAPLSRQQAVESFTATIVATSRLCPDIINLVVKIDRPMQFSPGQYADLTGPGMAEPRSYSFAFAPERGEAQRLEFHVRHVPGGLFTDWLFGEDRIGQTLDLSGPFGQFRLNDSSAPMLCLAGGSGLAPIMAILQQAQSMGANRPVTLLYGARTRQHLYCLDEIEALSAAWDAPFEFVPVLSEEDAGSDWTGGRGLVTEPIARLPGLTRTEAYLCGPPAMIDAAEAQLIQHGVLPEMIAADRFLDKSTMR

SEQ ID NO: 7646 - protein, 261 aa, Prochlorococcus marinus str. AS9601
MQSKMKESDPILEVENLSASTDNLPILKGVSLTVYPGEIHAIMGRNGCGKSTLSKIIAGHPSYNITNGDIKFLGENINSLEPEERSQSGIFLGFQYPIEIPGVSNLEFLRVSTNARRKFLNKEELDTFDFEELVKEKLEIVKMDHAFLSRSVNQGFSGGEKKRNEILQMALLEPKIAILDETDSGLDIDALRIVASGIKKISNAQTGIILITHYQRLLDEIEPNYVHVMSDGQIIKTGESDLALELEKKGYEWTDNFIKET

SEQ ID NO: 7647 - protein, 248 aa, Prochlorococcus marinus str. AS9601
MALSSQTKETILVADDEASIRRILETRLSMIGYKVVTASDGKEALKLFKDYEPDLVVLDVMMPKLDGYGVCQELRKDSDVPIVMLTALGDVADRITGLELGADDYVVKPFSPKELEARIRCVLRRIDKEQIPGMPNSGLILVTDIKIDTNRRQVFKSDERIRLTGMEFSLLELLVSRSGEPFSRGEILKEVWGYTPERHVDTRVVDVHISRLRSKLEADPANPELILTARGTGYLFQRIVDITPFDGK

SEQ ID NO: 7648 - protein, 381 aa, Prochlorococcus marinus str. AS9601
MLSTPILLDYQSSTPCSKDVVDSMKPFWSEIFSNPASKSNLAGINASAILEASREKIEQNLFLKNKKVIFTSGATESNNLALLGFARNFYKKTGNYGHIITLKTEHKAVLEPLNQLKKEGFMVTEINPDKDGLISEEQFKKNIKEDTFLVSVMLANNEIGVIQPIENISKICKSRGIIFHSDFAQCLGYMALDNLLSDVNMITMSSHKIYGPKGIGLLLIDEEINLEPLIVGGGQEYGLRSGTLPLPLVVGFAKAIEIAVFNQKNNAEKLLFYRNNLLEGLLKNNSGLLINGSIEKRLPHNLNLTVLDLNGAKFHKLLKSKIICSTGSACSSGEPSHVLLALGRSLKEVESSIRLSIGLSTNSKDIKQAIHILTNTIRSLR

SEQ ID NO: 7649 - protein, 327 aa, Prochlorococcus marinus str. AS9601
MQFIDQANIILKAGKGGNGIVSFRREKFVPAGGPSGGNGGRGGSVILMADNNLQTLLDFKFKREIIAEDGCKGGPNKRSGASGEDTILKVPCGTEIRDIKTGIILGDLTKHKQSLTIAIGGRGGHGNAYYLSNQNRAPESFTEGKDGEIWEVQLELKLLAEVGIIGLPNAGKSTLISVVSSARPKIANYPFTTLIPNLGVVRKIDGNGCLFADIPGLISGAADGVGLGHDFLRHIQRTKILVHLIDAIAENPLHDFEIIEQELKKYGKGLLDKERIIVLNKIELVDDDYLKIISKKLEDLSKKKVLVISSSLKKGLSSLLSEVWKRI

SEQ ID NO: 7650 - protein, 391 aa, Prochlorococcus marinus str. AS9601
MELQQKTKTDNNGLIPPYGGELKNLIIKDKSLKNELISKATYEFECSERNACDVELLMVGAFSPLEGFMDANNYNSVIKNNRNTSGLLFGLPIVFDSNNEKVKTGETILLTYKKQKIAVLEVSSKWEPDKSLEAELCYGTNSLDHPAVKMIFNERGRFYIGGRVYGFELPTREFPCKTPEEVRSTLPPNHDVVAFQCRNPIHRAHYELFTNALLSENVSSKSVVLVHPTCGPTQQDDIPGKVRYLTYKELEEEISDERIKWAFLPYSMHMAGPREALQHMIIRRNYGCTHFIIGRDMAGCKSSSTGEDFYGPYDAQNFANKCADELMMQTVPSKNLVYTKEKGYITAEEAKELNYEIMKLSGTEFRKKLRNGEPIPEWFAFKSVVDVLRRS

SEQ ID NO: 7651 - protein, 244 aa, Prochlorococcus marinus str. AS9601
MIPASRGFNRFSSQQSGQSKINSVGERFPINRTLMEVIKGLDGASTEMIERSKTIFFPGDPAERVYLIRRGAVRLSRVYESGEEITVALLRENSLFGVLSLLTGHRSDRFYHAIAFTRVEMITAPANSVLRAIEEDASVGLLLLQGLSSRILQTETMIETLTHRDMSSRLVSFLMVLCRDFGVAGEKGITIDLRLSHQAIAEAIGSTRVTITRLLGDLKDSGLLNIERKKITVFDPIALAKRFN

SEQ ID NO: 7652 - protein, 486 aa, Prochlorococcus marinus str. AS9601
MTTALQTPQRRSRSRLQDASLVNGPMLLLRSIRGFSSNRSMLWLATVPLALFGLGIFNLSAHAADLPELNAAFLANNLWLLIATILVIFMNAGFAMVEAGMCRSKNAVNILAKNLFVFALAVTSYWFIGYSLMYGGSVADGWLYFGGLFFDPTVTADMVTDAGLVPTVDFLFQSAFAGTAATIVSGLVAERVKFGEFVVFAVVLTAFIYPIAGSWKWNGGWLDSLGFVDFAGSSIVHSVGAWAGLVGAMLLGPRIGKYSDGKPQAMPGHNMAIATLGALVLWIGWYGFNPGSQLAMDQWVPYVAVTTTLAAAAGAIGATIVSTLTSGKPDLTMIINGILAGLVSITAGCGDMTLAGAWFAGLVGGIIVVFSVAALDAAEIDDPVGAFSVHGVCGVWGTVVIGLWGTAVQGDGAGMGLFNGGGITLLLVQALGAAAYAIWTLVTCWIAWSVIGGLFGGIRVSEEEETQGLDIGEHGMEAYPDFASAK

SEQ ID NO: 7653 - protein, 587 aa, Prochlorococcus marinus str. AS9601
MTLTSRSFSKGSSKHENPVWITGADALMDSLKIHGVKVIFGYPGGAILPIYDAVHKAEQEGWLKHYMVRHEQGGSHAADGYARSTGEVGVCFGTSGPGATNLVTGIATAQMDSVPLVVVTGQVPRPAIGTDAFQETDIFGITLPIVKHSWVIRNPSDIAKVVSEAFFIASSGRPGPVLIDIPKDVGQEFFNYQRVLPGEIIPKGFKRNGDINDFDINKAIKLIEDSERPLLYVGGGAISSGAHDEIRTLAKNYQIPVTTTLMGKGAFDEKDNLSVGMLGMHGTAYANFAVTECDLLIAVGARFDDRVTGKLDTFAPNAKVIHIDIDPAEVNKNRRVDVAIVSDVSKAILKINEQSLKNKFTCRTKNWLEKIDFWKNKHPLYDPPKEGEIYPQEVLLKVRELSPEAYVTTDVGQHQMWAAQYLRNSPRKWISSAGLGTMGFGLPAAIGVKAALPNSDVICIAGDASVLMNIQELGTLSQYGLKVKLIIINNRWQGMVRQWQESFYDERYSSSDMSCGEPDFVKLAESFGVKGYLISDRKQLQNELKSALDHDGPALINILVRRGENCYPMVPPGKSNAQMVGYVNCED

SEQ ID NO: 7654 - protein, 860 aa, Prochlorococcus marinus str. AS9601
MKIVPSEFSNSAWDCFIVAKEIAYKNYQQNVDADNLLLALIKEDNITKNILKKNNVNLKDLEREIISSLNAKAKMKNKQDNLYIGETLHKIFLKANDIKNTLNDVVISTEHLVYCFTYDNNYGFQILNQKGIPEFLEIIKKMKSDPALNNEFNSSNESLEKYGIDLTQSARDGILDPVIGRDEEIRRTIQILSRRTKNNPVLIGEPGVGKTAIVEGLAQRIINGDVPSALQDRKLISLDMGSLLAGAKYRGEFEERIKNILKKVKKSDGKIILFIDEIHTVVGAGAGGGSLDASNLLKPMLARGELRCIGATTINEHKQNIEKDPALERRFQKIKVDAPSINDTISILRGLRERYEVHHSVRISDNALVAAATLSERYINDRFLPDKAIDLIDEAASRLNMVITSKPEEIDEIDRKVLQFEMEKLSLKRETDDFSIGRLKKINNELISLKDKQAELGAQWKKEKDEIDEISTIKEEIESVQLQIDQAKRSFDLNKAAELEFGTLNSLQKKLKEKSESLVNSQKNGDTSLLRQEVTFDDIAEVVSKWTSIPVQNLNQSEKDKLLSLESILKEKIIGQDSAIRAVADSIKRSRTGLNDPSKPLASFLFLGPTGVGKTELSKVTAKIIFDSNSSITRLDMSEYMEKHSVSKIIGAPPGYLGFESGGQLTEAVRKNPYSLILLDEIEKAHKDILDILLQVLDDGIITDGQGRTINFKNSIIVLTSNLGSQSINDLSVRKEDANEIKKVVDNEIKKFFKPEFLNRLDEIVIFNNLELNDIKEIAKIQLQHLEKRLNKKNLKFKITDEAINQLVENSFDHAYGARPLKRIIQKQIETKISNNILNNHYLNKDEINIYLVDGEINVD

SEQ ID NO: 7655 - protein, 392 aa, Prochlorococcus marinus str. AS9601
MSQVNLSDRALSIEPSLTLQISAKANQLSAEGVDICNLSAGEPDFDAPKEVIDATSKAIFDGFTKYGPAAGNLDLRKAIANKLQIQNDLNYEFENVMVTNGAKQAIYNLFQVLLNTGDEVIIPSPYWLSYPQMVRLAGGKPIFTNSSAEDGFKINIEDLKSKISSKTKFIIINSPNNPTGRVMSKEELLQIADLARENPNINILSDEIYELILKKEFKHYSLSSLANDLKDRIFIINGFAKGWAMTGWRIGYLVGPKDVIKASSALQSQSTSNVCSFVQKGALEALKINNEFFSMINSHYDQRRRLLYEGLNNINGIYIEEPNGAFYAFPKLPNSSITSVDFCNKALQDYGLVVVPGKAFGADQCIRISCAASEIKIKDGLHRLEKAISEYY

SEQ ID NO: 7656 - protein, 637 aa, Prochlorococcus marinus str. AS9601
MNQKFKTLILWALPILLVIALSYQFLSSSNVDSLKSNGTTVAPRNSAVARVSYGRFLDYINSGRVTSVDIFEGGRNAVIETIDSDLDNKVQRLRVDLPGLTPELINILKKEGISFDVHPIKTAPPALGILGNLLFPAILIGGLILLARRSNGMPGGPGQAMQFGKTKARFAMEAETGVVFDDVAGVNEAKQDLQEVVTFLKKPEKFTSVGARIPKGVLLVGPPGTGKTLLAKAIAGEAGVPFFSLSGSEFVEMFVGVGASRVRDLFKRAKENSPCLIFIDEIDAVGRQRGAGIGGGNDEREQTLNQLLTEMDGFEGNSGIIIIAATNRPDVLDSALMRPGRFDRQVTVDAPDIKGRLSILEVHARNKKLQEDLTLESIARRTPGFTGADLANLLNEAAILTARRRKDSISISEIDDSVDRIVAGMEGSPLTDGRSKRLIAYHEVGHALIGSLVKAHDPVQKVTVIPRGQAKGLTWFTPDDEQTLVSRAQLKARIMGALGGRAAEDVVFGEGEITTGAGGDFQQVASMARQMVTRFGMSNLGPIALESGNQEVFVGRDLMTRSEVSDSISKQIDESVRIMVKECYKETYDIVSKNREAMDKIVDLLIEKETLDGDEFVSILSKFTKIPEKDRTPQLLS

SEQ ID NO: 7657 - protein, 390 aa, Prochlorococcus marinus str. AS9601
MENNFIYLDNASTTPLSENVLKIINSTYRNYWHNPSSTYELGIKCSTYLEKIRSKIAYIFEADPEDIIFTSGSSESTNIVFNNIYEKFKNGRVVISNVEHQATIICANKLRKQNWDIFEWTVKNDGILNISNIEKFLNNDTKLVSIIWGQSEIGTIQPVQFIGSKCEELNIMFHLDGTQILSNGIFSWKDLKCDFLSLSAHKFGGPKGIGILLTKEKSRQILKNNDISLTQEFSIRQGTQALPLIAGMYESLKNIEGKIKLYDYITEFPSNNINKLKNYFFQKIKDNNHIKITGSINHRLPSHISFLLLNKLFEPIRAYKIVNFMSENKIAISSGSACSSSSGKPSSTLKNIGLKDDELYSNIRVTLGSINNKSEIDKFLELIQICIDKF

SEQ ID NO: 7658 - protein, 326 aa, Prochlorococcus marinus str. AS9601
MEPKKVAVSKIEAPKTEAPKTEAPKIVKKKHADVPVNIYRPKTPYEGTVIENYSLLKEGAIGRVNHITFDLKDSDPFLNYVEGQSIGIMPAGEDANGKPHKLRLYSIASTRHGDDFNGNTVSLCVRQLQYEKDGETINGVCSTYLCDIKPGDKVKITGPVGKEMLLPDEEDANIVMLATGTGIAPMRAYLRRMFEPTEKEKNKWNFKGKAWLFMGAPKSANLLYEEDLQRYITENPDNFKYTKAISREQQNTKGGRMYIQDRVLESANELFNMIEDEKTHIYLCGLKGMEPGIDEAMTKAAEEKGLNWSELRPQLKKAGRWHVETY

SEQ ID NO: 7659 - protein, 331 aa, Prochlorococcus marinus str. AS9601
MTSFITAMQSKESNFNLTNSRLRLVSGTTNPKLAEEIASYLGIENVPLISKRFADGELYVQIQQSIRGCDVFLIQPTCAPVNDSLMELMIMIDACKRASARQITAVIPYFGYARADRKTSGRESITAKLTANLLEKSGVDRVLAMDLHSAQIQGYFDIPCDHIYGSPVLIDYLESLDLEEIVVVSPDVGGVARARAFAKLMNDAPLAIIDKRRSAHNIAESLTVIGEVKGKTAILIDDMIDTGGTICSGANLLKKEGANRIFACASHAVFSPPSYERLSSKNLFEQVIVTNSIPVKHKDNFPQLKVLSVANMLGEAIWRIHEESSVSSMFR

SEQ ID NO: 7660 - protein, 465 aa, Prochlorococcus marinus str. AS9601
MSISSFLTKKFLKSLFFPAHNRGAALPKKLVKLLKNPPGYWDLPELPEIGSPLSQIGLIAKSQREFSDKFGAKGCFFGVNGASGLIQSAVIAMANPGENILMPRNVHISVIKICAMQNINPIFFDLEFSTITGHYKPITKIWLENVFKKLNFDENKIAGVILVSPSYHGYAGDLEPLIDCCHQKNLPVLVDEAHGSYLLFCENLNLPKPALSSNADLVVNSLHKSLNGLTQTAVLWYKGNLINEYKLIKSINLLQTTSPSSLLLSSCEESIRDWLNKKSLSKYQKRILEAKNIYKKLIQKNIPLIETQDPLKIVLNTSKAGIDGFTADNFFYRNGLIAELPEMMTLTFCLGFGNQKDFLNLFEKLWKKLLLNSKKSKSLKVLRSPFKLVQAPEIEIGIALRSKSQNIPFSQSLNKISGDIICPYPPGIPLLVPGEKIDLDRFNWINNQSLCNKDLVNFNIRVLET

SEQ ID NO: 7661 - protein, 363 aa, Prochlorococcus marinus str. AS9601
MQSISPETIYRGNNAWEKSLPQITKLTKSPLILGRGIQTNNLRNNIFNDLKNQKLNVNFANLQFDCCYEDISRVRNIISNNNNDCVIAAGGGKVLDSGKYIADSLNIPCITVPLSASTCAGWTALSNIYTKDGQFIKDVALGSCPKILVFDHKFIQTAPSRTLASGIADALAKWYESSITSSNIDDGLVQQAIQISRVLRDQLLIDGEKAFKAQFENNPSWQNTVEACGLTAGLVGGIGGEKCRTAAAHAIHNAITQIITPNKFFHGEIVGVGLLLQLRIEEMKNNNKLADQLIKQLFVLMNELNLPTSIGQLGINVFENNNLEKIADFTCRDKSEIHFLPFEINKRDIIEVISNFEQQKIKI

SEQ ID NO: 7662 - protein, 593 aa, Prochlorococcus marinus str. AS9601
MAFKKDSNSLGSEQENFHNEDSPLLESKNLENKKEIESQLLEVSKENDNENGFLDFGFNQSILNSLINKGYKNPTPIQKAAIPELMLGRDLLGQAQTGTGKTAAFALPLIEKLTDNKELNAKVLVMTPTRELATQVAESFKSYSSESSNFKTVAIYGGTDYRNQISALKRKVDVVVGTPGRIMDHIRQGTFKIKDINCLVLDEADEMLNMGFLEDIEWIIDQLPENKQMVLFSATMPSEIRNIAKKYLNDPAEILIKSVKKETQLISQKFLYVQRHHKLDALKRILELNNEGVIIFVRTKLLTTSIAEALENSGHTVAVLNGDIPQNQRENTVDRLKKGFINILVATDVAARGLDVERIKLVVNYDFPFDKETYTHRIGRTGRAGRSGEAILFVNQREKHFLRNLENSTRTKIEEINIPSNKIINEKRMEKLIDNVNESFLAKDENEENKALIIDVLDNLKEKYSMDESNIAMAAINLVIGNKSFFVDEDDSWINKQNNTDRNRSNRNSNNRMRNSNRRNNYQNDSFETYKFNFGKFDGVRVANIISSICNSTNINGRSIGKIQIFNDYSLVDLPRDLHRETKNKLKKIKLRN

SEQ ID NO: 7663 - protein, 107 aa, Prochlorococcus marinus str. AS9601
MDNSTKDKIQKLIDSNPVMVFMKGTKLMPQCGFSNNVVQILNSLGVEFGTFDVLSDFAIREGIKEYSDWPTIPQVYLKGEFLGGSDILIEMYNSGSLKEKIEIELAS

SEQ ID NO: 7664 - protein, 376 aa, Prochlorococcus marinus str. AS9601
MTKILIPSETSSGERRVSATPEAVKKLNSLGCDVYIESSAGKLSGFSDLSYEESGGTIINNLDQKIWGEADLVFCVRTPSEDNLTKLKKGAVLLGLLNPYGNKELLRIINSNKISALSLELLPRISRAQSSDVLSSQANIAGYKAVLLAASELDRYFPMLMTAAGTVQPAKVVVLGGGVAGLQAVATAKRLGAIVFVSDIRPAVKEQVESLGARFIELPEVEEKPGEAGGYAKAVTPEFLSKQKATLTKYLSEADVAICTAQVLGKKAPVLIDSPMIEKMRPGAVVIDLAVSQGGNCEGTKSNETIIKDGVKLIGAGELPSSVPYDASSLYAKNLTSLITPFIKDGVIKLDKEDELISGCLLSDEGVVLQNKVFEN

SEQ ID NO: 7665 - protein, 303 aa, Prochlorococcus marinus str. AS9601
MTNYRSGFVTLLGRPNVGKSTLINKLIGEKITITSPIAQTTRNKLKGILTTKDGQIIFVDTPGVHKPHHRLGEILVKNAKSAINGVDMVIFVIDSSEEPGRGDEYILNFLIANKTEFIVALNKWDLVNKEFRNLRLDQYRRFFGIYRNFQVVSASQGEGCSELIDMALNFLPEGPKLYGEETICDQPLDNLLSDLVREQVLKNTREEVPHSVAVKIEKREEMKRKNGKVFTAILATIIVERSTQKGILIGKKGSMLKMIGQSARSNMSKLIDGPVHLELFVKVVPNWRKKESRLIEFGYEEEF

SEQ ID NO: 7666 - protein, 166 aa, Prochlorococcus marinus str. AS9601
MIAYLAKSNYKFEPDSVFKKMTNSKNSSSNSLKSNELFAIAETSGQQFWFEVNRYYDIDRLNAKEKDKITLEKVLLLKDKDSITVGKPYVKDAKIELEVVSHKRDKKILVYKMRPKKKTRRKMGHRQELTRVMVKSITIGKDTPKSSSKKETIKKETKPKSEKSTN

SEQ ID NO: 7667 - protein, 528 aa, Prochlorococcus marinus str. AS9601
MTKVLITDPIDQTGIDILSQVAQVDQKIGISDSELASIIKDYDALMIRSGTQVTEEIINSSSKLRIIGRAGVGVDNVDVKAATQKGVLVVNSPGGNTIAAAEHTIAMMLALSRHIPVANSSTLSGKWERKKFVGNELYNKKLGVVGLGKIGAHVAKVANALGMEVYGYDPFVSTERAQQIQVKLSEIKDLFQQSDYVTLHLPRTPETENLVNMKVLKSMKSSAKLINCARGGLIDEEALAEALNESLIGGAAIDVFSKEPLESNSPLLKVEKNLILTPHLGASTREAQENVAVDVAEQIRDVLLGLSARTAVNIPGLSPDIMDSLKPHLQLAETMGLLISQLSGGQIQKLEVKLQGEFVQHPSQPLIIASLKGLLSKALGDRINYVNASLEADSRGISVVESKDEARPEFASGSLQLTTYGDNGDHSVAGSIFADGELRIISIDQYPVNVSPSRYMLVTRHRDMPGIIGKLGSLLGSNNVNIASMQVGRKIVRGEAVMVLSIDDPIPNKLLDTIIEVEGITNANPVTL

SEQ ID NO: 7668 - protein, 1524 aa, Prochlorococcus marinus str. AS9601
MGESIKRIGGPYQDSYSPNGIIGEKDACGVGFIANVKGIESNWILKQSIKGLNCMEHRGGCGGDSDSGDGAGILCSIPWNYLEKEVNLKNKKESDKGLGMVFMPNKKEKIELCKSICDKEAEKLNVNETFWRTVPVNNEILGPLAKTNAPFICQWILCIDKKDHQNIEKILFQLRKRIEKIIRETLKNHVGDCEFYFASLSSQTVVYKGMVRSEILSEFYQDLKQESFKVSFSVYHRRFSTNTLPKWPLAQPMRFLGHNGEINTLLGNINWAKASETHIDDFWGELSNEIKPIVDVNKSDSSNLDATLEINIRSGQPITDSLLKLVPEAFRDQPELEQRKDIKSFYEYSASIQEAWDGPALLVFADGNFVGATLDRNGLRPARYSITNDGFVVMGSETGVVDLEEERVIEKGRLGPGQMLAVDLHQNRILRNWEVKSEAAQRHDYKKLLSNRTIKIENSQWVKDCELKDLELLQQQTAYGFSAEDNDLILDSMASLAKEPTYCMGDDIPLAVLSSKPHILYDYFKQRFAQVTNPPIDPLREKLVMSLEMHLGERCTPFEIKDPKPFVHLQSPILNEEELISIKKSKIKSQTISSLFDIEEGVQGLENQLLAICKQSELSIKEGCSLIIISDKGINPKKTFIPPLLAVGAIHHYLLKKEIRLKASLIIETGQCWSTHHLACLIGYGASAVCPWLTFEAGRHWLKHPKTQKLIDSKKIDPLSIIGVQENIKKALEDGLRKILSKIGISLLSSYHGAQIFEAVGLGSDLIKMAFDGTTSRIAGITLKELTNETLSIHTKAYPEIDLKKLEFLGFVQFRNNGEYHSNNPEMSKVLHSAVKLGPGYDHFETYKKLISNRPTTSLRDLLTINSKRKSIPLEEVESVESICKRFCTGGMSLGALSREAHEVLAVAMNRIGGKSNSGEGGEDPARFNVLNDIDENTQSATLPFIKGLENGDTACSAIKQIASGRFGVTPEYLRSGKQLEIKMAQGAKPGEGGQLPGPKVDSYIAKLRNSKPGVALISPPPHHDIYSIEDLAQLIHDLHQVHPKAKVSVKLVSEIGIGTIAAGVSKANADVIQISGHDGGTGASPLSSIKHAGLPWELGVAEVHKSLLENNLRERVILRTDGGLKTGWDVVIAALLGAEEYGFGSVAMIAEGCIMARVCHTNKCPVGVATQKEELRKRFKGIPENVVNFFLYIAEEVRQIMSSIGVSNMEELIGNQEFLSARNIDLPKTSNIDLSSLLNKKYLNTDRSWLKHSKAAHSNGFVLEDEFLSDTEFVNSIKNHEILTKEIEIKNTDRSVCAKISGEIAELHGNTGFNGELNLNFKGCAGQSFGAFLLKGMNVQLIGEANDYVCKGMNGGILTIIPPKIEKTSSEQVILGNTCLYGATGGKLFALGKSGERFAVRNSGATAVTEGAGDHCCEYMTGGKVVILGSIGRNISAGMTGGIAFIIDEKNDLSNKVNKEIVSIHKITSSKQEDILLEIIREYLAKTNSLKAAKIIENWSYYKSTFRLIVPPSEEEMLGIKKM

SEQ ID NO: 7669 - protein, 586 aa, Prochlorococcus marinus str. AS9601
MALLVKKFGGTSIGDIKKIKNIASSICQSKEAGNEIVVVVSAMGQTTDDLNCLAESISKNPNRRELDMLLSTGEQVTIALLSMALNECGIPAISMTGSQVGIITESIHGKARILDIKTERIQNYLNQGFVVVVAGFQGTTLSHTGSMEITTLGRGGSDTSAVALSTALGAETCEIYTDVPGVLTTDPRIVPNAKLLDEISCEEMLELASVGASVLHPRAVEIARNYGIKLCVKSSQSDSSGTLLESQIQPLPLKRGSLELTKTVNSLEVLENQAVFSLSNIPDRPGIAAQIFEKLSEASINVDLIIQATNDGNKNDITFTVGELEVQKTAEQCELITSQLGGEFNLKTNMTKLSIQGAGIMGRPSVSADLFDTLSQANINVRLIATSEIKVSCVIEVNNIPKAIRFVAEKFKLSETQIFVNPINEKQDQPEVRGIALDRNQVQVSFRKLPDRPGVAASICLALAENNLLIDTIVQSERISTLKTKDISLTMNKQDRDKANLVFEALTKKLPGSYVEDGPAIAKVSTVGAGMAFKVGTAGKIFRALADQNINIEMIATSEIRTSCIVLEKDCDKAVNAIHNHFELEK

SEQ ID NO: 7670 - protein, 293 aa, Prochlorococcus marinus str. AS9601
MTKNLFDNENAIYMGAKRSPENCSIGIFGVNYDGTCSFKPGARFGPEAIRQVSSCLETYCPKIKKDLEDIMYVDFGSILIDKNDSKSVIESVKSATNYLISKRLSPIMLGGEHSITRGAIEALVKKYPDLILVQLDAHADLRESYIGNEHSHACTMKRCLEVLPEKKILQVGIRSGTKEEFEIMHNNNQLVNFCPGGNAYELKQALLPYAKCPIYLTIDLDWFDPSLLAGTGTPEPGGFFWNDFEEILKTLKNLRIVGSDIVELSPEIDRSGVSSIVAAKVLRSLILSLENMQ

SEQ ID NO: 7671 - protein, 635 aa, Prochlorococcus marinus str. AS9601
MGKVVGIDLGTTNSCVAVMEGGKPTVIANAEGFRTTPSVVAYTKNQDQLVGQIAKRQAVMNPENTFYSAKRFVGRRVDEVNEESKEVSYSVEKSGSSVKLKCPILDKQFSPEEVSSQVLRKLADDAGKYLGDKVTQAVITVPAYFNDSQRQATKDAGKIAGLEVLRIVNEPTAAALAYGLDKENEKILVFDLGGGTFDVSVIEAGDGVTEVLSTSGDTHLGGDDFDRCIVDHLANTFKSNEGIDLRQDKQALQRLTEAAEKAKIELSNATQSEINLPFITATPEGPKHLDLNLTRAKFEELAASLIDRCKTPVERAISDAKISTSEIDEVVMVGGSSRIPAVLDLVKKIIGKEPNQTVNPDEVVAVGAAIQGGVLAGEVKDILLLDVTPLSLGVETLGGVMTKMINRNTTVPTKKSETYSTAVDGQTNVEIHVLQGEREMASDNKSLGTFRLDGIPSAPRGVPQIEVTFDIDANGILSVTAKDKGSGKEQSISITGASTLSDNEVEKMVKDAESNASADKEKREKIDLKNQAETLVYQTEKQLGELGDKIDAATKSKVEEKSNSLKEATSKEDYESMKKLLEELQQELYAVGSSVYQQPGNQPPSPGAASGSDQSDSNEKGGDDVIDADFTETKD

SEQ ID NO: 7672 - protein, 404 aa, Prochlorococcus marinus str. AS9601
MQQLKKVVLAYSGGVDTSVCIPYLKNEYGISEVVTFVADLGQGEDLELVRQKALNSGASKSIVGNLVNSFVERYAFPAIRANALYLDKYPLSTALARPLIAENLVNIAREINADAVAHGCTGKGNDQVRFDLAINALGPDLKIITPAREWNMSREEAILYGEKFGIPAPVSKKSPYSIDVNLLGRSIEAGILEDPMQEAPEDIFSMTSSVNNSPDSHQDIEIVFKNGFPVGINDQFLTPVEIIQRANNLAGKHGFGRIDMIEDRVVGIKSREIYETPGLLLLIKAHKELESITLNPDVIDFKGMVEKKWGQLVYQGFWFGPLKESLDAFISSTQTSVNGRVKIRLYKGNAIVIGRMSENNSLYREDLATYSKDDVFNHSLAEGFIYMWGMSNKIWAELNSKTKD

SEQ ID NO: 7673 - protein, 247 aa, Antirrhinum majus
MGRGRVELKRIENKINRQVTFAKRRNGLLKKAYELSVLCDAEVALIIFSNRGKLYEFCSSSNMLKTIERYQKSSYGSLEVNHQAKDIEASSYKEYLKLKSKYESLQGYQRHLLGDDLGPLNMNDLEHLEHQLETSLKHIRSTRTQVMLDQLSDLQTKEKMMVDANKALERKLEEIYAANHLQQSWGGGGDHSNAYNDHQHAQSQGFFQPLECNSTLQIGFNDPVASSQMTAPTDAQNMHGLVPGWML

SEQ ID NO: 7674 - protein, 385 aa, Rickettsia felis
MKDVILIANAGSSSLKISIFEIQNKKVKDKIYNIFLEKNVNKILFHINKKQESATDIKDDAIEMMIDLFEDWWKKQENLNLIATGHRIVHGGKNFNKPVIVYEKVSKDLTVLIPLSPLHQPYNLQVLDLFLQKYKEISHIACFDTSFHFTNPPITKAFGLPKKYYDKGIIRYGFHGLSYKYVSSHFKEMTKEDLPTKTIIAHLGSGSSLCAIKNGLSLTSSMGFSVLDGVMMGTRTGNLDPGVVLYLIDHEKMTTKEVTELLYKKSGLLGMSGESSDMRTLLASNSPDAKFAIDLFVYRIVLEIGKLTAALEGVDCLIFTAGVGQNSAVIRKMITEKLLWLGIKIDDTKNQKNEHLISTSDSKVKVFAVPTNEELIIAEEVMKFL

SEQ ID NO: 7675 - protein, 298 aa, Cucumis melo
MTVAGLELPPGFRFHPTDEELVLHYLCRKCSSQPIAVPIIKEIDLYKYDPWHLPELAVCGEKEWYFFSPRDRKYPNGSRPNRAAGTGYWKATGADKPIGRPKTLGIKKALVFYAGKAPRGVKTNWIMHEYRLANVDRSAANKTNNLRLDDWVLCRIYNKKGCIEKHYQSTDDKAAEFPDFEDEKPNITTNNMVQLPLHNQLQMETSDSVPRMQTESSSGSDLVTSPELTWDKEVQSQSKWEGEGGGERAAVADFDFFEFNYMDSFSMPEDVPFGSQVQFQMDHLSPLQDMFSYLQRQI

SEQ ID NO: 7676 - protein, 595 aa, Prochlorococcus marinus str. MIT 9303
MALLVQKFGGSSVGNVERIQAVAERIATSKDLGHDLVIVVSAMGQTTDELTALAKVISSNPPQREMDMLLATGEQVSISLLAMALHELGIPAISMTGAQVGIVTESAYGRARILDVRTERLQSLLSTGKVVVVAGFQGTSLSSVGTAEITTLGRGGSDTSAVAIAAALGADACEIYTDVPGVLTSDPRQVSDAQLMQEVSCDEMLELASLGASVLHPRAVEIARNFGVALVVRSSWSNEAGTKLTSKSKRPLGREGLELGRPVDGVELAEGQAVIALSHVPDQPGVAATLFENLSSDGVNVDLIIQSTHDGNSNDIAFTVAEADLAKAHSLCEGLLKTVGGQLSAEAGMSKLSISGAGIMGRPGIAASLFDTISRAGINLRLIATSEVKVSCVIDATLGSKALRAVSTAFELSDSQVRINPLVNGKGEPEVRGVALDQGQAQLSVRGVPNRPGTAAALCSAMAEAGISLDAIVQSERQHDDGSRDISFTLKRDEREQANKTLAPLLAQWPGANLEDGPAIARVSAVGAGMPATAGTAGRMFRALADAKINIAMIATSEIRTSCVVAEPDGVKALQSVHKGFGLGEETGHPVQSNS

SEQ ID NO: 7677 - protein, 220 aa, Prochlorococcus marinus str. MIT 9303
MNRHIIHTIKSSREILGINNKCLFLDRDGVIIKDKNYISSPLEVELEKGAKYLINLAKKNHYLVVIITNQSGISRGYFNWNQYEEVTKEMIKQLGGEMMVDGIYANGIYPDASTKADSWRKPGIGMIIQAKNDFNIELKDSILIGDRLSDILSGLRAGLGHVIHVETGHGHKERSKVEKYLVRETPNMICFEEDGTKTNFTRLTSLEELDKEDINIFSST

SEQ ID NO: 7678 - protein, 262 aa, Prochlorococcus marinus str. MIT 9303
MISLDAPVLIEIRDLCACVDDQPILNGVNLTIRAGEIHALMGRNGSGKSTLSKVLAGHPAYKVTEGSVLYRGEDLLPLEPDERSRIGLFLGFQYPVEIPGVSNLEFLRVSTNARRLEQGMEELDTFAFEDFVRERLGLVQMDPAFLDRSVNEGFSGGEKKRNEILQMALLEPLVAILDETDSGLDIDALRIVSGGVNQLANVDNATLLITHYQRLLDLIQPDYVHVMAAGRIVRSGDKALALELEQRGYEWVDRELDALEMT

SEQ ID NO: 7679 - protein, 329 aa, Prochlorococcus marinus str. MIT 9303
MQFIDQARITVRAGRGGDGIMAFRREKYVPAGGPSGGDGGEGGNVVLEADGNLQTLLDFKYNRLFPAPDGRRGGPNRCTGASGKDLIIKVPCGTEVRHLSTGILLGDLTRSDDLLVVAFGGRGGLGNAHYLSNRNRAPEKFTEGRDGEEWFLQLELKLLAEVGIIGLPNAGKSTLISVLSAARPKIADYPFTTLVPNLGVVRRPSGDGTVFADIPGLIAGAAQGAGLGHDFLRHIERTRLLIHVLDGGAEDPVEDLLVVEKELVAYGHDLVERPRLLVLNKQELLDEQHQDQLVDALQAASGRRLILISAAMGLGLEGLLAQVWKELGV

SEQ ID NO: 7680 - protein, 379 aa, Prochlorococcus marinus str. MIT 9303
MDSSILSAPIASIGVPTEIKADELRVALTPDGVKELVNKGLEVRVQAGAGAGAGIGDEAFADAGAKLVNREEAWAAHLVVKVKEPQEEEFCLLRQDMVLFTYLHLAAYPKVGEALLNAGTTGVGYETVQLENGSLPLLAPMSEIAGRLAAQVGAHLLERPHGGRGVLIGGCTGVQPARVVVLGAGTVGWNAARLAAAMDAEVMLLDRSPERLRSLETSRRGRLISVVNSRGLLERLIPTADLLIGAVLTPGGRAPTLVDEEMVKQMKPNSVIVDVAIDQGGCVATSQETTHTHPTVTIHGVQHYAVGNMPGAVPFTSTEALVSVTLPYILGIAGRGLEEAVTERPELLSGLNTIQGSVCHPGVAKALGLPPRHPMACLR

SEQ ID NO: 7681 - protein, 223 aa, Prochlorococcus marinus str. MIT 9303
MTLQLLLDSADPSEWEAWLPTGLFAGITTNPTLLRRAQQPCQLDHLKSLAGAAERLGCLELHLQAWGKHAIELAECGAALAQLTTPALTVHVKLPITQAGSQAASTLIGAEIPITFTACFEAPQVLIAAALGAQHIAPYLGRINDQGRDGYTELIAMQRALEGVGSSCKLLVASLRNRRDLSHLAAEGIDTFTISAELAEELFEVKATLEAAAAFEQDASPGA

SEQ ID NO: 7682 - protein, 528 aa, Prochlorococcus marinus str. MIT 9303
MTKVLVSDPIDQAGIDILAQVAQVDQRVGLSEDDLKAMIGDYDALMIRSGTQVTADVIKAGGRLRIIGRAGVGVDNVDVPTATQQGVLVVNSPEGNTIAAAEQALALMLSLSRHVPQAHASTMAGGWDRKKYVGNELYKKVLGVVGLGKIGSHVARVCNAMGMEVIAYDPFISADRAQQMQVRLSSLENLFEQADYITLHLPRTPDTENLVNEELLGKMKSTARLVNCARGGIIDESALADALKAGVIGGAALDVYAQEPLATDSPLRSVQERLILTPHLGASTTEAQENVAVDVAEQIRDVLLGLPARSAVNIPGLSAEIMERLKPHLQLAETLGLLVSQLSGGQLQELEVRLQGEFAQHPSQPLVIAALKGVLTSALGDRINYVNASLEAKGRGIRVLEVKDETSKDFAGGSLQLTTRGDQGGHSVTGAVFANGDLRITTIDEFPVNVSPSRHMLLTRHRDMPGIIGQLGSVLGEHNVNIASMQVGRRIVRGDAVMVLSIDDPIPPSLLVTIHAINGIKEAHPVTL

SEQ ID NO: 7683 - protein, 593 aa, Prochlorococcus marinus str. MIT 9303
MTLTSSTTALGGSSQQEQKRITGADALMDALRRNGVDIIFGYPGGAILPIYDAVHKAEQQGWLKHILVRHEQGGAHAADGYARATGRVGVCFGTSGPGATNLVTGIATAQMDSVPMVVITGQVPRPCIGTDAFQETDIFGITLPIVKHSWVVRDPGDLASVVAQAFFIAASGRPGPVLIDIPKDVGQEEFDYQPVEPGSVVPAGFHRFPAPELSSIEAALDLIDDAQRPLLYVGGGVISAGAHESLKGFAERHQIPVTTTLMGKGAFDERHPLALGMLGMHGTAYANFAVTECDLLIAVGARFDDRVTGKLDTFAPRARVIHFEIDPAEVAKNRRPDVAVLGDVGVSLVKLLDLSKQKPVELRTSAWLTRIESWKDLYPLMTPPEEGPIYPQEVLLAIRDLAPEAYITTDVGQHQMWAAQYLRNGPRQWISSAGLGTMGFGMPAAIGVQIALPDEQVVCIAGDSSILMNIQELGTLIEYNIPAKIVIVNNQWQGMVRQWQQSFYEDRYSATDMLPGMPDFVALAKAFRIGGVLITERKDLRSSLKQALATPGPMLIDVHVRRDENCYPMVPPGKSNAQMVGLPNHPELSGVSL

SEQ ID NO: 7684 - protein, 397 aa, Prochlorococcus marinus str. MIT 9303
MPGGRPRNLAWFNQSCLLPRLLIPVESAMGETRVAASPDTVKKFLSLGSKVAIERGAGLAAGFVDGDFNTIGAELVAPGDSQAWSEADVVLCVQSPSASALARMRSGALVVGLLAPYANSSLAASLKTAKLSAMALELLPRISRAQSADALSSQANIAGYKAVLLAAAALDRYFPMLMTAAGTVQPARVVVLGAGVAGLQAVATAKRLGAVVYVSDVRSAVKEQVESLGARFIEPPEIDQRPDESGGYAKQASEAFLTAQREQLSNQLAQADVVICTAQVPGRKAPRLISDLMLDRMRPGAVVVDLAVEQGGNCANTRPGETVDRNGVKLIGASDLPCSVPNHASALYSRNLVALLEPVLKDGQLSLNIEDELIAGCLISHNGVIRHDDVLNTGGSN

SEQ ID NO: 7685 - protein, 366 aa, Prochlorococcus marinus str. MIT 9303
MAFNQTEVVLGGIAHIPLVIGAFYVVKALFYRGQDGKLVPFSFSYRQAAQIKSSSTTTSTEKPDTKSPPAQKAIPINLYKPKAPFEGTVLENYSLVKEGAVGRVNHITFNLAGSDPHLSYVEGQSIGIIPAGTDANGKPHKLRLYSIASTRHGDNLEGKTVSLCVRQLQYELDGKTINGVCSSYLCDINPGAKTKITGPVGKEMLLPDDEEANVIMLATGTGIAPMRAYLRRMFEPTERSKNGWKFRGKAWLFMGAPYTANLLYDDDFERYLREFPDNFIYTKAISREQQNSKGGRMYIQDRVMEYSDQIFKMIENPKTHVYMCGLKGMEPGIDEAMTAAATAKGIDWSELRPQLKKAHRWHVETY

SEQ ID NO: 7686 - protein, 107 aa, Prochlorococcus marinus str. MIT 9303
MDPTTKTRIEALIQSSPIMVFMKGTKLMPQCGFSNNCVQILNSLGMSFETFDVLSDMEIRQGIKDYSNWPTIPQVYVKGEFIGGSDILIEMYNAGELAEKLEIALSS

SEQ ID NO: 7687 - protein, 636 aa, Prochlorococcus marinus str. MIT 9303
MGRCLPDLKDQSGRQRLFSMTHTKSHEDVSCSPEKSAPEISSTSSDDGLTTVAEATNQNNSDDGSVAVAAEACEDIEATELVSEFDCFGFSEPLLKTLAEKGYKQPSPIQKAAIPELMLGRDLVGQAQTGTGKTAAFALPLIERLQDHGSRPQVLVLAPTRELAMQVADSFRAYAVGHPHLKVLAVYGGADFRSQINTLKRGVDVVVGTPGRLMDHMRQGTLDTSGLRCLVLDEADEMLRMGFIDDVEWILEQLPKERQMVLFSATMPSEIRRLSKRYLHEPAEITIKSRDQEARLIRQRCITLQNSHKLEALRRVLEAFTGEGVIIFARTKVITLTVAEALESAGHDVAVLNGDVPQNQRERTVERLRKGSVNILVATDVAARGLDVDRISLVINYDIPFDSEAYVHRIGRTGRAGRSGEAILFVNPRERRFVGGFERAVGQPIEPMDIPNNAAINQSRLDRLRQRLTTAAKTERDNSEETALLQELIQRVVEELSLSPEQLAVAALELAVGPGPILVQADEGWLQQSTQRSRRNDRHEISRGGSGRRPERSSRPPEDHMERFRVEVGHRDRVKPGNLVGAIANESGLEGRMIGRIQIFESHSLVDLPKGMPEDVFKDLKRLKVMNRELHIQRAS

SEQ ID NO: 7688 - protein, 337 aa, Prochlorococcus marinus str. MIT 9303
MLAVDVTSFLTAARTEQESISYDMQRLRLFSGTSNPALAREIAAYLGVPDGPRICKRFADGELYVQIQESIRGCDVFLIQPTCAPVNDNLMELLIMVDACQRASARQITAVVPYYGYARADRKTAGRESITAKLTANLLVKSGVNRVLAMDLHSAQIQGYFDIPCDHIYGSPVLVDYLAAQELNEVVVVSPDVGGVARARAFAKQMRDAPLAIIDKRRSGHNVAESLTVIGDVAGKTAILIDDMIDTGGTICSGARLLRQEGAKRVIACASHAVFSPPACERLSEEGLFEQVLVTNSIPIAAERRFPQLQVLSVANMLGEAIWRIHEESSVSSMFRG

SEQ ID NO: 7689 - protein, 466 aa, Prochlorococcus marinus str. MIT 9303
MGFLPLLTRDRGRSLHLPAHGRGAGLPDDLRAMLRHRAGIWDLPELPELGGPLMQQGAVAESQRQAAIAIGAERGWYGVNGATGLLQAALLAIARPGQAVLMPRNVHRSLIQACVLGDLTPVLFDLPFMVDRGHVFPPDGPWLKDVLNELPIAGVEIAAAVLVHPTYQGYATDLKPMVVELHSRGWPVLVDEAHGAHFASRVDASLPDSAITAGADLIVHSLHKSAAGLTQTAVLWSQGDRVDPNAVERSLGWLQTTSPSALLLASCEASLSDLCKPAGLHKLGTRLKDARELAVQLRQLGLPLLENQDPLRLILHTAAEGISGLEADAWLMARGLVGELPEPGCLTFCLGLAPQRGLVRLMHRRWRGLLAAKGKGLPLPVFTPPPLPRITAPAMACGLAWRAQSQRVSIADAVGRVAAELICPYPPGIPLLVPGEKLDHRRVDWLLEQQNLWPEQIAGTVKVLAL

SEQ ID NO: 7690 - protein, 417 aa, Prochlorococcus marinus str. MIT 9303
MTTSKSLSAMSAKLLPHRNSLEQASDTSPTSMNKNNLPEEVSHCSHSIAPAKVVRGERAWEESHQLIASICRSPLLLGRSIATAELRQGLLNNLRNLGLNTVSAELKHDCCEMDLKRINALALYNSCDGVIAAGGGKVLDAGKLLAHRLGIPCITVPLSAATCAGWTALANIYSPTGAFQRDQVLARCPHLMIFDHGLVRQAPPRTLASGIADAIAKWYEASVSNGSSNDGLIQQAVQMARVLRDQLLLDGPEALKDQNSLAWIRVAEACALTAGLIGGIGGSRCRTAAAHAVHNALTQLKDCHEVLHGEKVGYGILVQLRLEEIIGGHQLAGQARRQLIPFLKELDLPVNLEDLGLSNLSLHELHEVCQFACQQGSDLHQLPFPVNSSALLEALLGASDNGPVPVESTVTKRMAAS

SEQ ID NO: 7691 - protein, 401 aa, Prochlorococcus marinus str. MIT 9303
MPSTKHPQPGTKIDAVLDPVIPELNELVAKTPGTLSLAQGMVNWAPPVAVKLAMNNALVNQESSLNRYGPVRGDPALLELINQKLMIQNGLDLAESMVMVTAGSNMAFHAIAQVLCDPGDEVILPLPYYFNHFMAIQLAGGVPVPVDAGLIPNPELIEAAITKCTRAIVTISPNNPSGIVFPQTLLAAINGICAQHGLLHISDEAYEDFVFGDVPHWSPGSIPGAGNHTVSLYSFSKAYGMAGWRLGYMSAPIGWSKALAKVQDTVLICPPRFCQQAAIAALADGSDWMRQNVSQFMSRYQYLLNRFAASNDRPWRFLHQPNGAFYCLLEVDCGCNGDTLMRQLVRDYRVATIGGCSFGFKNESCVLRISVGMLEGAELIEAFDRLEAGLLNAVQKGVRNT

SEQ ID NO: 7692 - protein, 333 aa, Prochlorococcus marinus str. MIT 9303
MTLTASPDPRPHLVITNYVQEEVIDLLSTFARVTANRSQAPWSRSDLLEAARYADGLLMFMPDYVDAQFLDQCPRLRSIAGALRGFDNFDLAACEARGVRYRFIPNLLAAPTAELTVAMLISLARSMPAGDAFVRSGRFHGWRPKFYSKGVINSTVGILGMGQLGLEFAKRMQGFGATLLYSDPVPLDRTCEQRLELAHVEFNELLERSDHLVLMVPLDNDTQHLINSDVLTRCKPGAVLINPCRGSVVDELAVVEALQSGHLAGYGADVFEMEDWARRDHPESIPQALLDQPDRTLLTPHIGSAVQTIREDIAMTAALNLKALVLTTLSPIA

SEQ ID NO: 7693 - protein, 349 aa, Prochlorococcus marinus str. MIT 9303
MIRRFATGLVTLSLLATGCASIDQGGGSRLELISKRGQLHCGVSGKIPGFSFLLGNGRYEGLDVDICRAMAAAVVGDATKVQYRPLTAPERFTALKTGEIDLLSRNTTLNLSRDAAGGNGLTFAPVVFHDGQGLMVKRSTGIKGLQDLKASNICVGSGTTTEQNLNDAFQERKLSYTPIKYQDLNQVVAGYLQGRCLAMTSDRSQLAAARSGFPDPEQHIILDVVLSKEPLAPASVGGDQRLGDAIRWVVFALFAAEEFGITQENVDSKLQQAKTNPQMSSLRRFLGVDAGLGQKLGLADDFVVKVIRATGNYGEIYNRHLGPNSSVPIPRGLNRSYRQGGLLIAPPFN

SEQ ID NO: 7694 - protein, 592 aa, Prochlorococcus marinus str. MIT 9303
MFSSSEAGFRRLLPLLRPHLRRLIWGGVCMLIYVGCWPLLAWLAGQLIPAIGAGKLTQVVQVIAIALTVFLVQKLAQFGQDTMLAGPALRVSQDLRHDLFAQLQQVELGALEKLSSGDLTYRLTEDADRVGEVIYKTIQDTTPSALQLVAVFGYMVFLDWQLSLATLLLAPIVAILVSQFGARVMRAAERSQRQVSDLAGLLGEAIQGLPLVRAFAAEPWLQKRFDAEVDLHRQARYQTLRLLALQHPVVGFIEAAGILTVLAIGAARIQTGGMDGQSFSSYVAALLMLIDPISHLTTNFNEFQQGQASLRRLREIEREPQEPPDIDQAEPLGRLKGDLVLRQVSFAYVNEQQVLHDLSLEVKAGQVVALVGPSGAGKSTLFSLLLRFNTAQQGKILLDGHELGQVKAQELRRQVALVPQRTTVFSGSVEEAILFGRSASQEKVKEAASLANAHDFIMSLPEGYSTQLEERGTNLSGGQLQRIAIARAVLGNPAVLLLDEATSALDAEAEAAIQLGLRRAMQGRTVLVIAHRLATVQEADQIVVLEQGRISDRGSHDELMSRTGRYRELCERQFIRDLQSVSKVDEGMERIP

SEQ ID NO: 7695 - protein, 392 aa, Prochlorococcus marinus str. MIT 9303
MPLPPHLSDRVVALQPSLTLAISARAKALQQEGRDICSMSAGEPDFNTPEFIIDATVKALRDGITRYGPAAGDPELREAIATKLSKENTVPTNAEQVLVTNGGKQAIFNLFQVILNPGDEVLIPAPYWLSYPEMARLAGAKVTTLPSTPENGFCLDLNNLEASIGSKTRLLILNSPGNPTGRVMARKELEALADLLRNYPQILVMSDEIYEFILEDGQQHHSFSAIAPDLSDRTFIVNGFAKGWAMTGWRLGYLAGPAHAVKAATALQSQSTSNVCSFAQRGALAALQGSRECVKKMVNSYNTRRELLASGLLGLEGISLISPKGAFYAFPKLPEGSLDSVSFCQQALENYGLAMVPGAAFGDDSCIRLTCAVSHKTICDGLERLRKALKQS

SEQ ID NO: 7696 - protein, 638 aa, Prochlorococcus marinus str. MIT 9303
MNQRLRLIALWLLPIGVALLLAWQILGNGKLTGEQPSNTTLAPRNAAVTRMSYGRFLDYVEAGRVTAVDIYDGGRNAVVEAVDPELDNRVQRLRVDLPGLAPELINTLKSEGISFDIHPARTTPPALGLLGNLLFPLLLIGGLILLARRSSSMPGGPGQAMQFGKTKARFAMEAETGVKFDDVAGVSEAKQDLEEVVTFLKKPERFTSVGAQIPRGVLLVGPPGTGKTLLAKAIAGEAGVPFFSLSGSEFVEMFVGVGASRVRDLFKRAKENTPCLIFIDEIDAVGRQRGAGIGGGNDEREQTLNQLLTEMDGFEGNSGIIIIAATNRPDVLDSALMRPGRFDRQVSVDSPDIKGRLAILEVHARDKKLEEDLSLKNVARRTPGFTGADLANLLNEAAILTARRRKKAISLDEIDDAVDRIIAGMEGRPLTDGRSKRLIAYHEVGHALIGTLVKDHDPVQKVTLIPRGQAQGLTWFAPDEEQMLVTRAQLKARIMGALGGRAAEDVVFGDAEITTGAGGDIQQVASMARQMVTRFGMSDLGPVALESGNQEVFIGRDLMTRSEISDAISRQIDEAVREMVKLCYSETVKIVKQHREAMDRLVEILIEKETIDGEEFTSVVAEFTSVPEKERSIPILQS

SEQ ID NO: 7697 - protein, 414 aa, Prochlorococcus marinus str. MIT 9303
MDTFEIRSLISISIGILVLFIGKRINGNIQVLQNLSIPDSVTGGLIAALAITLVKWTTDIEVIFDLGARDFLLIYFFTTVGISSNLINMRRGGKALGILLGLVIAFITIQNIFGEWTVNLFGLQEGLGPLLGSVSLAGGHGVTIAWAPTFAKQFGIKNALEIGVAASTFGLLVASLIGGPIANYLIRKNHLNLDHKKEIYNENRNGEENTDKTELNNQLPSKLDYNSILSSVLAVNICIILGKICQEFLFKLDIQLPLFVVSMIVGIILSSILPDRKILNDFLIWPKQTAALLLLAELSLGTFLAMSIMSLQFWDLLDLPPALLFILVFQTILSIVVNLYLVFPLMGRNYDAAVICSGFAGMSIGSSAAGLANMTAISRKYGPTKKAFIVVPLIATFIEIINSGLIIPASIRFL

SEQ ID NO: 7698 - protein, 343 aa, Prochlorococcus marinus str. MIT 9303
MFKAWRWGAHGCYACFQSGYGATLSQVMSPEAMESLPEGYRSGFVALIGRPNVGKSTLVNQLVGEKVAITSPVAQTTRNRLRAIVTTPEAQMVLVDTPGIHKPHHLLGERLVQSARAAIGEVDLVLLLLEGCEPPGRGDAFIVELLRQQDLPVLVALNKWDRVAEQQHDPAEEAYRQLLADSAWPLIRCSAISGEGCNGLVEALVGQLPLGPQLYPAEMVCDQPERVLLAELIREQVLMHTREEVPHSVAVSIDRVEEMPVANGRPGKQGRTAVLATVLVERKSQKGILIGKGGSMLKTIGQGARLQMQTLIDGPVYLELFVKVVPDWRSKPARLAELGFEGK

SEQ ID NO: 7699 - protein, 1527 aa, Prochlorococcus marinus str. MIT 9303
MSQDHRRSNWPYCDSTAPTAVVGEKDACGVGFLAQIDGVASNWILQQALRALNCMEHRGGCGGDADSGDGAGLLCAIPWSYLEAVWSAVEAANHRCGLGMLFMPRDAARRAEARCFCEQEAESLGLRSRGWREVPVDAAVLGPLARDTAPVIEQWLVQGSQPGDALEALLFRLRRRIGDRARQAWGEHANDLYVVSLSSRTVVYKGMVRSEVLAAFYADLLDPRFEVPFAVYHRRFSTNTLPRWPLAQPMRLLGHNGEINTLLGNLNWARATEVNLDTVWGVDAADLKPVVNAAFSDSANLDATLELLVRSGRPIVDSLLTLVPEAFREQPELADKPEIQAFYEYSACTQEPWDGPALLVFSDGRSVGASLDRNGLRPARYCITSDGFVVMGSETGVVELEESRIIEKGRLGPGQMLAVDLEKGRLLRNWDVKQEVAGRYPYSEWLSQNRCKLGQKSWQQESQLGDLELLQQQTAFGFTAEDLELIIDSMAAGAKEPTFCMGDDIPLAVLSDKPHLLYDYFKQRFAQVTNPPIDPLREKLVMSLEMHLGKRGSPLKPEAAAASVIHLETPILNEAELAAFGQLEFPSTTLSTLLPVNDGPSGLGVSLKRLCVEAEDAVRDGSQILVLSDRGVGASTTYIPPLLAVGAVHHHLLNQGLRLNASLVVDTAQCWSTHHLACLIGYGASAVCPWLTWETTRHWWQHPRTQKLIETGKLPALTIDQSQDNLRKAQEDGLRKILSKIGISLLASYHGAQIFEAIGIGADLIELAFKGTTSRVAGLSLNDLASETLTFHAKAFPELDRTKLEFMGFVQYRSGGEFHLNTPDMSKALHAAVRAGPGYDHFSTYKNLLENRPATALRDLLTFRLAPTPLPLDQVESVESICARFCTGGMSLGALSREAHEVLAVAMNRIGGKSNSGEGGEDPARFKILDDVDLESRSETLPSIKGLRNGDTACSAIKQVASGRFGVTPEYLRSGKQLEIKVAQGAKPGEGGQLPGQKVDPYIAKLRNSKAGVALISPPPHHDIYSIEDLAQLIHDLHQVHPAAKVSVKLVAEIGIGTIAAGVAKAKADVIQISGHDGGTGASPLSSIKHAGSPWELGLTEVHRSLLENGLRDRVLLRADGGLKTGWDVVIAALLGAEEYGFGSVAMIAEGCIMARVCHTNKCPVGVATQQEGLRKRFPGVPEHVVNFFLFVAEEVRQLMSVLGVARLEDLIGRTELLEPRSLNLVKTQALDLSCLLDPIPAAADRAWLIHDAKAHDNGPILEDQLLADVELMAAIDGHGHIARNLAIVNTDRSVCARISGEIAERHGNKGFRGQLDLSFEGAAGQSFAAFLLQGVNVRLVGEANDYVGKGMNGGRITLVPPSGADQSGSQVILGNTCLYGATGGELFALGRAGERFAVRNSGVKAVVEGAGDHCCEYMTGGVVVVLGSTGRNVGAGMTGGVTFLLDEQGIVSDLVNKEIVEIFSLTTVEQEAILKTLLEAHLAQTGSTKAKAILANWISLKALFKVLVPPSEKVNVGLTLLEKVAA

SEQ ID NO: 7700 - protein, 390 aa, Prochlorococcus marinus str. MIT 9303
MIASPSASAQSPGVIAPYGGTLVDLMVATDQQEAVKASANHVLECSDRNACDLELLVGGGFSPERGFMHQGDYDAVVAGHRTLSGYLFGLPIVMDTDREDVAIGDRVLLSYKGQDLAVLQVEDKWEPDKVVEAKGCYGTTSLEHPAVRMIATERKRFYLGGTLQGLELPKRIFPCKSPAQVRAELPAGEDVVAFQCRNPIHRAHYELFTRALHASNVSENAVVLVHPTCGPTQQDDIPGGVRFQTYERLAAEVDNPRIRWAYLPYAMHMAGPREALQHMIIRRNYGCTHFIIGRDMAGCKSSLSGDDFYGPYDAQNFAQECAGELAMETVPSLNLVFTEEEGYVTAEHAEARGLHVKKLSGTQFRKMLRSGEEIPEWFAFRSVVEVLRAT

SEQ ID NO: 7701 - protein, 222 aa, Prochlorococcus marinus str. MIT 9303
MANSPAPTQKTLLEVIRELDGASNEMVERSKTIFFPGDPAEKVYLIRRGAVRLSRVYESGEEITVALLRENSLFGVLSLLTGHRSDRFYHSVAFTRVEMITAPATSVRQAIENDTSVGLLLLQGLSSRILQTETMIETLTHRDMSSRLVSFLLVLCRDFGVPGEQGITIDLRLSHQSIAEAIGSTRVTITRLLGDLRNSGLVQIDRKKITVLDPIALAKKFN

SEQ ID NO: 7702 - protein, 482 aa, Prochlorococcus marinus str. MIT 9303
MTTAPLPPSRRRTMRLQEASLLEGPMLLLRSIRGFSSNRSITWLACVPFALFGLGVFNLSAHAADLPELTPGFLANNLWLLIAAVLVIFMNAGFAMVEAGMCRQKNAVNILAKNLFVFTLAVTAYWFIGFQIMYKADWVIPGVLKFGGLFFDPAVTAGMVTNGDLVPSVDFLFQAAFAGTAATIVSGLVAERIKFGEFVVFSLILTAFIYPIAGSWQWNGDGWLAEAGFIDFAGSTLVHSVGAWAGLVGAIALGPRIGKFVGGKAQALPGHNMAIATLGCLILWIGWYGFNAGSQLAMDAAVPYIAVTTTLAAAGGAIGATIISTLYSGKPDLTMIINGILAGLVSITAGCDGVAMWAAWLIGLIGGVIVVFSVAFIDGLQVDDPVGAFSVHGTCGIWGTLAVGLFNTDAGLLTGHGFSQLGVQALGCISYAVFIVVSCWIAWSVIGALFGGIRVTEAEEIEGLDIGEHGMEAYPDFASAGN

SEQ ID NO: 7703 - protein, 347 aa, Prochlorococcus marinus str. MIT 9303
MAVVCRRITASSRTYSLSALTRCLQEEAAAIAVAAERLSSSQVEKALVLLERCGDQRAKLVITGVGKSGIVARKIAATFSSIGLMALYLNPLDAMHGDLGVVAQEDVCLLLSNSGETAELLEVLPHLKRRGTARIALVGKPDSSLARGSDVVLEASVDREVCPLNLAPTASTAVAMAIGDALAAIWMERRNISPADFAFNHPAGSLGKQLTLTASDLMVPVAKVQPLQPNTSLQDVICKLTQDGIGSGWVEDPSTAGLLLGLITDGDLRRALRDHSAENWASLSAADLMTADPITVDADLLAVEAIKQMECNRRKPISVLPVVGPDSSGNLLLGLLRLHDLIQAGLT

SEQ ID NO: 7704 - protein, 248 aa, Prochlorococcus marinus str. MIT 9303
MTATSPSKETILVVDDEASIRRILETRLSMIGYQVVTACDGNEALDLFHNCEPDLVVLDVMMPKLDGYGVCQELRKESDVPIVMLTALGDVADRITGLELGADDYVVKPFSPKELEARIRCVLRRVEKEHVAGIPNSGVIQVAELRVDTNKRQVFRGDERIRLTGMEFSLLELLVSRSGEPFSRGEILKEVWGYTPERHVDTRVVDVHISRLRSKLEDDPANPELILTARGTGYLFQRIIDSLAPEGL

SEQ ID NO: 7705 - protein, 402 aa, Prochlorococcus marinus str. MIT 9303
MRDRATELSTMLPSLSSGSLKQSPLCLDYQATTPCAAEVVKAMAAYWSEDWGNASSRQHRSGLKAAAAVSLAREQLACHLRVTPQRVIFTSGATEANNLALLGHARARAEQRGAPGHLITLVTEHHAVLDPLRQLQKEGFRLTELQPRADGLLRPEQLAEAFENDTLLVSVMVANNETGVIQPLAELSELCRKRDVVLHSDAAQAFGHVHLDPDALGLDLLSISGHKLYGPKGIGALVVRPEVPINPLQWGGGQEQGLRPGTLPVPLIVGLAKAVELAMEDIKSRQDKLCTLRNQLWDGLRERLPDLILNGSLEHRLPHNLNITIPGVRGSSLHQQLRPLIACSSGSACSQGAPSHVLMALGRTSAEAEASLRLSLGRNTSSEEISQAVESISTVVTDLRAG

SEQ ID NO: 7706 - protein, 301 aa, Prochlorococcus marinus str. MIT 9303
MSKAQLSPRSSLAFVGLGALGLPMAANLLAAGYELKVHSRSRAAELNLALKGSRPCSSPAEAAADSQALLICVSDDEAVEAVLFGSQGAASKLSSGAVVVDFSTIAPATSITLAERLAQQGVTYLDAPVTGGTEGARAGTLTVLVGGNTQALARVQPLLEVIGESIHHFGSVGRGQQVKALNQVLVAGSYAALAEAIALGQQLGLPMPEVITALQHGAAGSWALQHRSTAMLEDHYPLGFKLALHHKDLGIALETAERVGLQLPITSKVKSMEANLIELGHSEEDVSVLRRWFDQQQAEFQ

SEQ ID NO: 7707 - protein, 304 aa, Prochlorococcus marinus str. MIT 9303
MTQNTTTTQARFDSEGAIFMAARRDPTGCNVGLFGVPYDGTSSFRPGSRFGPAAIRDVSNGLETYCPQLDLDLEEIAFTDLGALDIPFGDPKPVVEAVKKATQNVLQMGLRPLMLGGEHSISSGAVAAITESHSDLVLLQLDAHADLRQEYLGARHSHACAMRRCLEVLPSAQLLQLAIRSGTRAEFQELHDQQRLVNHNPGQAATDLAKALAPHQGKPLYLTVDLDWFDPSVLPGTGTPEPGGFLWRDFAAVVDVIRHHQLVGADVVELAPQLDPSGMSSVLGAKVTRSLLMLLSLCATSEQN

SEQ ID NO: 7708 - protein, 375 aa, Prochlorococcus marinus str. MIT 9303
MLKAFQQRRWPLVIVWVLIIAAIVAAPAVVSVFGLNLLGRFLSLSIVALGIDLIWGFTGLLSLGQGIFFALGGYAAAMYLQLNSSSEQPNGIPEFFGLYGVDQLPGFWQPFHSPWFTLIAIWLIPALLAALLGNLVFRNRIKGVYFSILTQAALLVFFNFFNGQQKLINGTNGLKTDVTELFGQQVGSAFMQRGFFWLTAVMVILAWLAVRWVVRGRFGEVLIAIRDDEPRLRFAGYNPTLFKTIVFAMAGGLAGIGGALYTVQSGIVSPQYMTVPFSIDMVIWVAVGGRGTLIGAILGALVINLARSQISTVWPEGWLFILGGLFILVVTALPEGVVGWWQAGGPRNLLTRLGVARRIGTYPRLEMDGKEEVQS

SEQ ID NO: 7709 - protein, 542 aa, Prochlorococcus marinus str. MIT 9303
MTVSSPTKKFLQGKKLNKIEQNKAFKDGLDVGDELETFAQVGWEQVDKTDLELRLKWYGMFWRPKTPGKFMLRLRIPNGVLNSHQIKVVASIVGRYGEDGSCDITTRQNLQLRGVLLSDLPEILRRLEEAGLNTIQSGFDNPRNVTGNPLAGIDPLEIVDTRPYTTELQNFLTNQGKGNHEFSNLPRKWNTAVAGARDNFLLHNDIIFHPVEHDGVMGFGVWLGGILSSQMNDYALPLNAWVKPNEICRLTGTIITLWRDNGERNNRPKGRFRMYLDSVGIEAFRTMVAEQFGPLTPDPGSVFNDKPRSFYGIHPQKQTGLHYAGMHVPVGRLSAEDLQDLASASLNYGSGEIRLTEDQNIILVGLSTTNLDKFQADPLLQRFPLEPGSIAAGTVSCTGNTYCSFALTNTKDQAMAMAHELDAELILPEEIKVHWTGCPNSCGQAYMGAIGLTGTKARAPNGGQGMVEAYDLSLEGRQGPDARIGTLHRKGIPGSELKDVLRELLIERFGAQPRSQPKQNSDPFSNFMNWFSNLGENSSPSP

SEQ ID NO: 7710 - protein, 303 aa, Prochlorococcus marinus str. MIT 9303
MSATASQMDYVLPNELVDGMITAGGKKATVSVKNLLVRGFYSGAILGLAVILALTVGLKSGQPWLGSLLFPFGFASIVLFGMELVTGNFALLPMATWAGKSTWGATFRNWGWVWLGNWIGTAVVALLMAISLTSGGTVDPASAADGGGMWQQVAAKIIALNKTNVVTKYENLQSLGFFLAFLRGLIANWLVCLGVTMALVSKSVPGKILACWLPITAFQTMGMEHIVVNMFLHTAGPMLGSGVSFGQVIVWNFIPVTLGNIIGGMVFIGMLFYSTHRTQMSNVLPTVHDEKLERELAAELGAR

SEQ ID NO: 7711 - protein, 637 aa, Prochlorococcus marinus str. MIT 9303
MGKVVGIDLGTTNSCVAVMEGGKPVVIANAEGFRTTPSVVAYTKNQDQLVGQIAKRQAVMNTDNTFYSAKRFVGRRVDEVNEESKEVSYEVEKSGSNVRLKCPVLDKQFSPEEVSAQVLRKLAEDAGKYLGENVTQAVITVPAYFNDSQRQATKDAGKIAGLEVLRIINEPTAAALAYGLDKKSNERILVFDLGGGTFDVSVLEVGDGVFEVLSTSGDTHLGGDDFDKVIVDHLAATFKANEGIDLRQDKQALQRLTEAAEKAKIELSSATQSEINLPFITATSEGPKHLDLTLTRAKFEELASKLIDRCRVPVEQALKDAKLSSGELDEIVMVGGSSRMPAVQELVKRVTGKDPNQTVNPDEVVAVGAAIQGGVLAGEVKDILLLDVTPLSLGVETLGGVMTKMITRNTTVPTKKSETYSTAVDGQTNVEIHVLQGEREMASDNKSLGTFRLDGIPPAPRGVPQIEVTFDIDANGILSVNAKDKGSGKEQSISITGASTLSENEVEKMVKDAETNASADKEKRERIDIKNQAETLVYQAEKQLGELADKVDADSKAKVEDKRVKLKAAIEKDDFDAMKSLLEELQQELYTLGASVYQQAGAAAAAESGADAGAAGAGAGDSSSGDDVIDAEFTESK

SEQ ID NO: 7712 - protein, 401 aa, Prochlorococcus marinus str. MIT 9303
MGRAKKVVLAYSGGVDTSVCIPYLKHEWGVDEVITFAADLGQGDELDPIRLKALDAGASQSLVGDLIEPFVEEFALPAIRANALYEGRYPLSTALARPLIARRLVEVAREVGADAVAHGCTGKGNDQVRFDLAIAALAPDLKVLTPAREWSMSREEAIAYGERCGIPAPVSKKSPYSIDLNLLGRSIEAGPLEDPMVAPPEEVFAMTSSIDAAPSQAQDIEIRFEAGNPVAIDGVRLDSVGLIKEANRLAGRHGFGRLDIIENRVVGIKSREIYETPGLLLLIRAHQELESLTLAADVLRMKRQLEMQWAELVYQGLWFSPLKDALDGFMDRTQIYVNGLVRIRLHKGNAMVIGRSSDTNSLYISEMATYGSEDNFDHRAAEGFIYIWGLPSRLWAAARRG

SEQ ID NO: 7713 - protein, 263 aa, Prochlorococcus marinus str. NATL1A
MISSTSETILSIKDLHASVEDQEILHGVNLLVKEGEIHAIMGRNGSGKSTLSKVIAGHPAYKVLSGSIQFKGKNILELEPEERARIGIFLGFQYPVEIPGVSNLEFLRVATNSRRKELLKSELDTFQFEDLVKQRLKIVEMNPAFLERSVNEGFSGGEKKRNEILQMALLEPVISILDETDSGLDIDALRIVASGINRLSQPNSATILITHYQRLLNEITPDFVHIMADGKIIKTGNKELAIDLEKSGYDCIDKNTKEKEIAK

SEQ ID NO: 7714 - protein, 248 aa, Prochlorococcus marinus str. NATL1A
MTATSPSKETILVADDEASIRRILETRLSMIGYQVVTACDGNEALDLFRNCEPDLVVLDVMMPKLDGYGVCQELRKESDVPIVMLTALGDVADRITGLELGADDYVVKPFSPKELEARIRCLLRRVEKEQIAGLPNSGVIAVMNLKIDTNKRQVYRNDERIRLTGMEFSLLELLVSRSGEPFSRGEILKEVWGYTPERHVDTRVVDVHISRLRSKLEDDPANPELILTARGTGYLFQRIVDSMIPEGS

SEQ ID NO: 7715 - protein, 382 aa, Prochlorococcus marinus str. NATL1A
MDNNHLIFDFQSSTPCCTKVVEEMAPYWNELWGNPSNTNNRSGVFASAAVEVSREKIASYLNINPKRLIFTSGATEANNLGLVGHARAKAQLIGKPGHIITVSTEHHAVLDPLRQLQREGFRLTELQPNKEGLINIEQLSEAFEKDTFLVSVMAANNEIGVLQPIGDIGSFCKRKGIAFHSDAAQAFGYLDLDPDKFRIDLMSLSAHKIYGPKGIGALVIREGFPLEPSQYGGGQELGLRSGTLPVPLIVGFAKAVEITKNDQDERNKRLLFFRNLLLSGLKKNISGLIVNGSIDQRLPHNLNITFPGVKGSQLHGQLRRFIFCTSGSACSNGEASHVLQEIGLSKKDAEASIRMSIGRNTTEKDIHKAINIITNIVINLRQ

SEQ ID NO: 7716 - protein, 329 aa, Prochlorococcus marinus str. NATL1A
MQFIDQAIIDVKAGSGGDGISAFRREKYVPAGGPAGGDGGQGGNVVLEADDNLQTLLDFKFQKLISAENGQRGGPNKCTGASGKDTVLKVPCGTEVRHLSTNIILGDLTNKGQQLIVAFGGKGGFGNARYLSNSNRAPEKFTEGKVGEEWSLQLELKLLAEVGIIGLPNAGKSTLISVLSSARPKIADYPFTTLIPNLGVVRRPSGDGTVFADIPGLISGASKGIGLGHDFLRHIERTKVLLHLIDSASTDPINDFKTINEELTSYGHGLISRPRIFVLNKKELLNEHEIKKLLNKIEKLTMKKVHIISAVTKFGLDDLLSSIWYELGY

SEQ ID NO: 7717 - protein, 405 aa, Prochlorococcus marinus str. NATL1A
MGPLSGRISRLLKEKMTSKQSSNKNLAGLIKPYGGELINLMASDQEAKELKKNSFKTLNCSDRNACDIELLLIGAFSPLNGFMSEKNYNSVVKQNRLESGLLFGLPIVMDTDREDINPGDSVVLNYKDQELAILEIQEKWTPDKVIEAKFCYGTTSLEHPAVRMISMERKKYYLGGSIKGLELPKRVFTCQTPAQVRKNLPSGEDVVAFQCRNPIHRAHYELFTRALEANNVSKNGVVLVHPTCGPTQEDDIPGSVRFQTYEKLASEVNNPKIRWSYLPYSMHMAGPREALQHMIIRRNYGCTHFIIGRDMAGCKSSLNGEDFYGPYDAQNFANECCQELEMQTVPSLNLVFTEEEGYVTADYAKEKGLHIKKLSGTQFRKMLRSGEEIPEWFAFKSVVDVLRAA

SEQ ID NO: 7718 - protein, 243 aa, Prochlorococcus marinus str. NATL1A
MVTSYRGFTRFNQPKNSQMVGNSSTPLPPNKTLLDVIKSLEGVSTETVDRSKTIFFPGDPAERVYLIRRGAVRLSRVYETGEEITVALLRENSLFGVLSLLTGHRSDRFYHAVAFTRVELVSAPATSLRNAIEQDASVGLLLLQGLSSRVLQTETMIETLTHRDMSSRLASFLLVLCRDFGVPGEKGVTIDLRLSHQAIAEAIGSTRVTITRLLGELKSSSLLAIDRKKITIFDPIALAKRFN

SEQ ID NO: 7719 - protein, 587 aa, Prochlorococcus marinus str. NATL1A
MTLTSTPNQIEDSGTQTQHEMSGADALMDSLRRHGVDTIFGYPGGAILPIYDAVFKAEQEGWLKHILVRHEQGGTHAADGFARATGKVGVCFGTSGPGATNLVTGIATSQMDSVPLVVITGQVPRPAIGTDAFQETDIFGITLPIVKHSWVVRDPSEIAKVVAQAFLIASSGRPGPVLIDIPKDVGQEMFKYLPVEPGSIKPLGFELPFAPEHKAISSALDLIENAEQPLLYVGGGVISSGAHETLAAIANRYQIPVTTTLMGKGAFDERDPLSVGMLGMHGTAYANFAVTECDLLIAIGARFDDRVTGKLDTFAPKAKVIHFEIDPAEINKNRVVEVSVLGDVGISLVKLLDLSNQRKTNPRTSQWLNKIKNWKNNFPLITPPKEGEIYPQEVLIALRDLAQDAYITTDVGQHQMWAAQYLLNGPRQWISSAGLGTMGFGMPAAMGVKVALPKEKVICIAGDASILMNIQELGTIAQYKLNLKVIIINNHWQGMVRQWQESFYDERYSASNMSVGEPDFISLSKAFGIEGIVISERENLIPQLQKALENEGPVLVNVNVRKGENCYPMVPPGKSNAEMVGISEIKK

SEQ ID NO: 7720 - protein, 863 aa, Prochlorococcus marinus str. NATL1A
MKVNPDDFTNIAWQGIIDAKDLALTEKHQTLETEHLFWSLLKKNEIAIKIIERSGGVIKNLLTEIENFIKNQPKMLQAQESIFFGKNISLSISRAKNIQQSFKDDFISSEHLVISLFDDERICNRLFGQNHVDKNSLLEAINVLRGDKKVTQKNAENSYEALQKYGLDLTSAARDGKLDPVIGRDEEIRRTIQILSRRTKNNPVLIGEAGVGKTAIIEGLAQRIINGDVPTALENRQLISLDMGALIAGAKFRGEFEERLKSVLKNVTDSEGKIILFIDEIHTVVGAGASGGAMDASNLLKPMLARGELRCIGATTINEHRENFEKDPALERRFQQILVKQPSVQDTISILRGLKERYEVHHGVRISDNALIAAAILSDRYIPERFLPDKAIDLIDESASRLKMEITSKPEEIDEIDRKIIQLEMEKLSLEGESDTSSKERLELITTELALLTKNQIEVTKKWKQEKESIEEISTLKEDIEKVQLEIEKAKRNYDLNRAAELEYGTLVNYQQNLKSKELNLKNSTENAEKSLLREEVLADDVAEIIAKWTSIPVKRLAQTEIEKLLNLESQLQKRVIGQDKAVQSISSAIQRSRTGLSDPSRPIASFLFLGPTGVGKTELSKALASQLFDSENALIRIDMSEYMEKHSISRLIGAPPGYVGYEAGGQLTEAIRRKPYCVLLFDEIEKAHKDVFNVLLQILDEGRVTDGQGRTTNFKNTIIILTSNLGSELISDNDVTNDPSTNIDELINQELKSNFRPEFLNRLDEIINFEPLKKETLLKVVDLQLNRLRERLEAKGIELEINDDVLSLITELGYNPSYGARPLKRVIQKELESEIAKYILKGKYKEGSTIKIESKESKLIFH

SEQ ID NO: 7721 - protein, 392 aa, Prochlorococcus marinus str. NATL1A
MTDKSQISIRALSIKPSLTLEISAKAKALKAEGKNICSLSAGEPDFDTPEFIVDATLKALKDGKTRYGPAAGDPELREAIAQKQSDINKVPTKTDNVLVTNGGKQAIYNLFQVVLNPGDEVLIPTPYWLSYPEITLLAGAKPIKIKSSTKDKFKIDINSLEEHVTAKTRLLIINSPSNPTGCVLTEQEMKTISDFLRRHPRILLMSDEIYEFLISPNQVHHSFAKIAPDLKNRIFTVNGFAKAWAMTGWRIGYLTGNAEVIKKAIALQSQSTSNVCSFAQKGAIAALQGSKDCVHEMANIYNKRRLLITERLKKIKHISFVPPNGAFYVFPEINLEEIDSISFCKLALEKVGLAIVPGIAFGDDKCIRISYAASNKMIEDGVNRLERLLNDF

SEQ ID NO: 7722 - protein, 639 aa, Prochlorococcus marinus str. NATL1A
MCGITGSTNLSLPCESYNNAISSIEYRGPDNTGRYLDNNIFLAHTRLSISELSKNGNQPYISKNYKGYVLVYNGEIYNIENVKNYLSKYKIKIKSKCDTELLYLMLSEFGIDKTLKLIEGIFSFAFYDKNQQKVWICRDHLGIKPLYYSLEKGLSFSSSQDGVINYLLEANDTSSIISKKGIISYLQFGYNLPNSQNNSKIKALLPGHYICHDIKHSKTMLKKWFKIIVNNKNRKVINNNTLKNTEKLIESIIKEQSVSEVEGTIFLSGGIDSTLIASNVDKNYIKKAFTIKYSDNDSNDESYIAEKVAKDCGLELLTFEFNFFNYNIDKAAERQLKITRYPFANSTLLSTDFLCQKANKEGIRMALVGDGGDELFGGYPRYKAVYLNYLLSKHNYIKGPTLAIKNTLKYSIQKNIMGFNYLINKKSYLDRRVRALLSILGSTSSFAHRKSHTYLDKDSLVNKDFNLCTDEFDAFFPLNEKPPCSSMVADLLTWIPFNLNHCSDLASMNNNIEIRVPFLDRRLLNYVFSQDISHLGIFNSKILLRKILNKKGFRYISKLPKKGFNPPLKNLVDLNLTEISEIIAETNYLLSEYIDIDVILFFLKSHKSKEKDFSRELWSVYLLAKWIRDPFKFLNYKLL

SEQ ID NO: 7723 - protein, 287 aa, Prochlorococcus marinus str. NATL1A
MKLAFIGLGAIGKPMSQRLIDNGYDLNLYQRNKLNNDSKRKYFFDPIEAVSDCDGLLICVTDDNAVESVLFGDNGVSGSLKPNSFVIDFSTISPDKSISIHKRLGEQNIFYVDCPVSGGTEGAHNGSLSLFIGASEKDCLSFENIFQVLGKSINYFNGVGKGQQVKALNQILVAGTYAAVAEAMELGKMLELPMDDVVAALKVGAANSWPLENRSKAMLIDKHPLGFKLELHHKDLSIATELAKSINIDLPIASKVKEMEQRLMQTGLGELDVSVLHRYISNKRINH

SEQ ID NO: 7724 - protein, 640 aa, Prochlorococcus marinus str. NATL1A
MDKKWKVIALWVLPITIVILITWQILGSSTNTQVNQTNTSNPSRNAPVAKISYGRFLDYVKAGRVTSVDIYDGGRNAIVESVDPEIDNRIQRLRVDLPGLAPELVSSLKDEGISFDIHPPKTAPAGVGILGNLLFPIILIGGLILLSRRSNSMPGGPGQAMQFGKTKARFAMEAETGVKFDDVAGVNEAKQDLEEVVTFLKQPERFTSVGAQIPRGVLLVGPPGTGKTLLAKAIAGEAGVPFFSLSGSEFVEMFVGVGASRVRDLFKRAKENSPCLIFIDEIDAVGRQRGAGIGGGNDEREQTLNQLLTEMDGFEGNSGIIIIAATNRPDVLDSALMRPGRFDRQVTVDAPDISGRLSILKVHSRNKKLEKDLTLESIARRTPGFTGADLANLLNEAAILTARRRKDQIGLSEIDDAVDRIIAGMEGTPLVDGRSKRLIAYHEVGHALIGSLVKDHDPVQKVTVIPRGQAQGLTWFSPDDDQSLISRAQLKARIMGALGGRAAEDIIFGREEVTTGAGGDVQMVASMARQMVTRFGMSSLGPVSLEGDSQEVFVGRSLMNTSDISDGISKQIDEQVRSIVKKCYNETLELVEKNRSAMDKLVEILIEKETMDGDEFCKILSQYTTIPEKDRFIPVLPDAK

SEQ ID NO: 7725 - protein, 393 aa, Prochlorococcus marinus str. NATL1A
MKDIYLDASATTPPHLDVITKLKDIQFECWGNPSSIHKVGVIAREILERSRLSIANKLKASSDELFFTSGATESNFLALKAVSNNLDKGRIVISSVEHPSINLIANQLRNEGWDIKYWPVDSYGIIDLDLLEEVLSPPTKLVSIIWGQSEIGSIQPINLIGMECKKRNILFHTDATQVLPCGLIDWSNLNVDMLSASAHKLQGPKGIGLLMLRKGIQDLLMKNPSYGFKNGSIRSGTESVPLIAGFSTAIDLLNEYIEVKDNQTLFPVNNVSKMTSRLKKNLINNKHFTFIGPDIERLPNNLSFLCHTESMIPIKGREIVRLLSKHGVYISSGSACSSSIQGPNPILVAINVDKTFQESGLRITIGPWISNDDITSVSNIIFESLQTLELKKQ

SEQ ID NO: 7726 - protein, 245 aa, Prochlorococcus marinus str. NATL1A
MTSPVSDKISKAKRLLIVEDDKSIRETLREALVAEGYQVEVCKTGDEAEARVFSQFDTRKKIDLIVLDLMLPNLNGIELCRRVRKNNIKTPILIVSAKDSESDRVLGLEVGADDYLIKPFGLNELIARCRAILRRSETNHEKTQDLSQVLSYKNISLYRQEYRVTKNSKEINLAPKEYKIMELFLQNPKRVWSRDQLLEQIWGIDYVGDSKTVDVHIRWIREKIEDDASDPDYIRTVRGFGYKFG

SEQ ID NO: 7727 - protein, 589 aa, Prochlorococcus marinus str. NATL1A
MTNKNPHEDSSCPVEQDVLEESTEEILEESEQNSENGFSEFNFSEELIQTISDKGYSSPTPIQKAAIPELLLGRDLVGQAQTGTGKTAAFALPILERLKKNVGHPQVLVLAPTRELAMQVAESFRTYSAGHPHFKVLAIYGGSDFRNQINTLRRGVDVVVGTPGRVMDHMRQKTLNTSHLSCLVLDEADEMLRMGFIDDVEWILEQLPEERQLVLFSATMPSEIRRLSKKYLNSPAEITIKATELKERLIRQRYISVQNVYKVNALQRVLEAVSEEGVIIFARTKAITIVVAEKLESYGYNVAVLNGDIPQNQRERTVERLRQGSINILVATDVAARGLDVDRIGLVINYDMPFDREAYVHRIGRTGRAGRNGEAILFVNPRERSFLSNLERAVGQPIEKMDIPDNDLINNNRIKKLQAKLIKAASTERDNPEEANILEELIKNVEKELDIDPKDLTLAALNLAVGFNALLENGNEDWIRQSAQRNTRNDRRDNNKFKQRRRGDFDNNRLEDEMDRFRVEVGHRDRVKPGNLVGAIANEAGLKGRSIGRIRIFENYSLVDLPKQMPDKVFQALKKVKVMNRELQINRAD

SEQ ID NO: 7728 - protein, 372 aa, Prochlorococcus marinus str. NATL1A
MFINNHCISPSNVVRGEGAWGDSLDLIIKLCKRPLIIGRSSSTKKIRTSFKKDLLLKGIQSISLDLDHDCCELDIQNAYLISKHNNCDGIIAAGGGKVLDAGKLIADLLGINCITVPLSASTCAGWTALSNIYTPDGKFVKDVTLKSCPNLLIFDHTIVRNAPPRTLASGMADAVAKWYESSLTSSSSQDGFVQQAVQMARVLRDQLFLNGQKAFLDPLSNSWETVAEGCALTAGIIGGLGGARCRTAAAHPIHNGLTQLAYTNKPLHGELVGFGLLVQLHLEEKNSNSQLPKQAKSQLLEFFSQLNLPISIESICLRNTTSNELYKACKFACNDDSDIHKLPFPINEKDILEAIQSLQSLPTTSRIKINNT

SEQ ID NO: 7729 - protein, 464 aa, Prochlorococcus marinus str. NATL1A
MGLLNLLSANRSENLFLPAHGRGNALPEKIKTLLRLRPGIWDLPELFEIGGPLISEGAIAESQKSSAYEVGVDRCWYGVNGATGLLQSSLLALARPGQAVLMPRNIHKSCIQACLFGGLTPLLFDVPYLTDRGHASVLDRKWLQRVLKKAKDYEDDIAAVVLVNPTYQGYSADMESLIKEIHSHSLPVLVDEAHGAYLISQIRPDLPRSAISFGADLVVHSLHKSASGLVQSAVLWSQGDKVDPFKIERTIELLQTSSPSSLLLASCESSIKELLESKGIKKLRSCIEEAEMLKDFLIKNEVPLLKNSDPLKIILHTSKFGLSGIEVDKSFIKKRMIGELAEPGTLTFCLGLSSHKRLGKRFVRIWNEILKAYGKQKPCFFKRPPFDIVSKPYKSYSDSWGSNFEKVNLKDAIGRISVEMVCPYPPGIPLLIPGEILDEARVDWLIEQKSFWPEQISDFVRVIS

SEQ ID NO: 7730 - protein, 387 aa, Prochlorococcus marinus str. NATL1A
MAYSETKVVLGGLAHIPIIIGFFYLIRRQYSFGAMLRNGKNALSEKVTKANPAKAATPAKAATPAKAATPAKAATPAKAATPAKAAAVKKPHADVPVNTYKPKAPFTGTVTENYSALKEGAIGKVQHITFDLSGGDPDFKYVEGQSCGILAAGEDAKGKPHRPRLYSIASTRYGDNFAGNTLSLCVRQLQYEKDGETINGVCSTYLCNLSPGDKVKISGPVGKEMLLPEEEDSNIIMLATGTGIAPMRAYLRRMFEPTEIEKHQWNFKGKAWLFMGAPKTANLLYDADFEHYKSKFPENLRYTKAISREQNNTKGGRMYIQDRVLEHAEEIFDMIENPKTHIYLCGLKGMEPGIDEAMTTAASAKGLDWSELRPKLRKAGRWHAETY

SEQ ID NO: 7731 - protein, 381 aa, Prochlorococcus marinus str. NATL1A
MVSFLIPFESALGETRVSATPETVKKFLDLGCKVFFEKGAGKAAGFLDDTYMDAGAELVERENDEVKKIVDIVLCVQPPNEKFLSHLKPGSFLVGLLNPYGNKLLAETLKSKNISAIALELLPRISRAQSSDALSSQANIAGYKSVLLAASALDRYFPMLMTAAGTIQPSKIVVLGAGVAGLQAIATAKRLGAVVYVSDIREAVKEQVESLGARFIELPKIDETPSESGGYAKQVSDDFIVAQRKELAKQLSEADVAICTAQVPGKKAPKLIDEKMLDDMRPGSVVIDLAVLSGGNCACSKPGETIVREGVKIIGASNLPCSIPNHASSLYSRNLLSLLQPMFKEGKFLIDNDDELIAGSLISKDGVILKSEIIENGGTRS

SEQ ID NO: 7732 - protein, 313 aa, Prochlorococcus marinus str. NATL1A
MSLGDLSQEDFKSGFIALIGRPNVGKSTFINKFIGEKIAITSPIAQTTRNRLKVILTNEKSQIIFVDTPGIHKPHHLLGERLVQSAKRSIGDVDAVLVIFEASHSPGRGDAFILNLIRNLKIPVIVALNKWDLLALSQIKERKKEYLEFLEGTNWPVFCCSALTGQGCIELISEIEETLPFGPQLYPSDMNCDHPEKFLIAEFIREQVLIYTREEVPHSVAVSIDKIEDITSKKKSEQKSRTGILATICVEKKSQKGILIGKGGSMLKKIGQESRMQIQTLINGNVYLELFVKVVPDWRSKSSRLNEFGYEGS

SEQ ID NO: 7733 - protein, 139 aa, Prochlorococcus marinus str. NATL1A
MADKKSSPKKENPQDKTYAIVEASGKQFWLQPNRYYDFDRCQAEVDDVLTLENVLLLNDGKDLKLGKPYVKDAKVEIKVLEHRRGPKIIVYKMRPKKKTRRKNGHRQELTRVLVQSISIGSNTKKSKAVKTTASKVESD

SEQ ID NO: 7734 - protein, 528 aa, Prochlorococcus marinus str. NATL1A
MTKVLVSDPIDQAGIDILTQVAQVDQKVGLSPDQLKNIIGEYDGLMIRSGTQVTSDVISEAKKLRIIGRAGVGVDNVDVPTATRKGVLVVNSPGGNTIAAAEHALAMMLALSRNIPPANASMFAGGWDRKKYVGNELYKKTLGVVGLGKIGSHVAKVANAMGMEVIGFDPFVSNERAQQMQVRLSDIEELFKESDYVTLHLPRTPETENLVDIDLLRKMKPTARLVNCARGGIINENDLANALAENVIQGAAIDVYAKEPLAENSPLRAVKKGLVLTPHLGASTVEAQQNVAIDVAEQIRDVLLGLPARSAVNIPGLSAEIMDSLKPHLKLAETLGLLVSQISGGQIQKLEVRLQGEFAQHPSQPLVIATLKGLLTSALGDKINYVNASLEAKGRGIDVVEIKDELCPEFARGSLQLDSFSDKGGHSVSGTVFGDGDLGITSIDEYPINFVPSRHMLFTRHRDMPGIIGQIGSLLGKYNVNIASMQVGRRIVRGEAVMVLSIDDPIPSELLGSILSMQGINEAHSVTL

SEQ ID NO: 7735 - protein, 1475 aa, Prochlorococcus marinus str. NATL1A
MEHRGGCGGDSDSGDGAGILCEIPWSYLRQVWDTAKKCEPQSSGIGMMFMPKDLKNREIAKKICEQEAESLGLTSKGWRDVPVHEEVLGKLARENEPFITQWIVDIKDKEINLEALLFRLRQRISNRANIELKEDELGLYICSLSSKTIVYKGMVRSEILAPFYNDLKDDRFEVSYAVYHRRFSTNTLPKWPLAQPMRLLGHNGEINTLLGNINWAKATETDISSVWKENANDLKPIVNNLYSDSANLDLNLELLVRSGRPITDSLLTLIPEAFRDQPELINKPEITAFYEYAAGTQEPWDGPALIVFTDGTNIGATLDRNGLRPARYCITKNGYVVMGSETGVVELEEDVIQEKGRLGPGQMLAVDLESKRILRNWDVKEESANRYPYLDWLKANRINLNNQSWEINNKFDKQKLLQYQIAFGFSAEDFDYIINSMAANAKEPTYCMGDDIPLAILSNKSHILYDYFKQRFAQVTNPPIDPLREKLVTSLEMNLGVRKAPLRPKEESARLIHLKSPILNEKELTSIIKSELSCKQISILIPINNDKINLEEGLKNLCKEAEDSVINGRDILILSDRDINRENSYIPPLLAVGAVHHHLLRKGLRLKTSIIIDTAQCWSTHHIACLIGFGASAICPWLTWETTRHWWQLPKTQKLISDGKLSNLSIEIAQDNVKKAMEDGLRKILSKIGISVLASYHGAQIFEAIGIGADLIDLAFKGTTSRIAGLTLSELSIETCSFHKKAFPELEQKKLDFNGFVQYRSSGEFHLNNPEMSKILHAAVKAGPRYDHFKTYQQLLESRPATTLRDLLTFKTATQPLPLDQIESVESICQRFCTGGMSLGALSREAHEVLAIAMNRIGGKSNSGEGGEDPARFNVLDDVDENNQSKILPNLKGLVNGDTACSAIKQIASGRFGVTPEYLTSGKQLEIKVAQGAKPGEGGQLPGPKVDEYIAKLRNSKPGVALISPPPHHDIYSIEDLAQLIHDLHQINPTAKVSVKLVAEIGIGTIAGGVAKANADVIQISGHDGGTGASPLSSIKHAGLPWELGLTEVHRSLLENGLRQRVLLRADGGLKTGWDVLIAALLGAEEYGFGTVAMIAEGCIMARICHTNKCPVGVATQQEGLRKRFPGLPEHVVNFFIFVAEEVRQLMSQVGVAKVEDLIGRTDLLIPRNIDLTKTKEVDLSSLLKPIDNPTDRSWLSHEIEAHSNGEVLENALLKDKEVSNAIQTQGSITKEIPIVNTDRSVCARISGEIAKKYGNKGFNGNLNLIFKGSAGQSFGAFILKGMNISLIGEANDYVGKGINGGSITIVPEIINDTSNTQVILGNTCLYGATGGKLFALGIAGERFGVRNSGAHAVIEGAGDHCCEYMTGGVVVVLGKTGRNIGAGMTGGIAFILDKKNELDLRMNKEIVEVHPLTATNHEQFLNDLIYEYHQKTKSPLAQKILADWSSWKELFKAVVPPSEKSKLGIEEVLEKATI

SEQ ID NO: 7736 - protein, 588 aa, Prochlorococcus marinus str. NATL1A
MALLVQKFGGTSLGSIERIKAVAQRIKSSKEKGADLVVVVSAMGHQTDELTRLASEITVDPPHREMDMLLSTGEQVSISLLTMALNELGTPAISLTGTQAGIITESAHGRARILEIRTERIKNLLDQGQTIVIAGFQGTTLGIGGIAEITTLGRGGSDTSAVALAASLEAATCEIYTDVPGVLTTDPRIVKNAKLMKSISCDEMLELASLGAAVLHPRAVEIARNFGVTLVVKSSWDNLDGTTLTSNKKPDFSQGGIEHQSPVDGLELLENQAVVALSNIPDRPGIAAELFESLSEGGVNVDLIIQATHQIDSNDITFTIAENELHNALTQCKKLVNTIGGDISFQKDLTKLSIYGAGIMGRPGIASSLFQILSDSGINIRLIATSEVKVSCVIDAELGKKALRNVSEVFKLTDKQITVNPTIENNNEPEVRGIALDKDQIQISVKNVPDKPGTASSICSTLAEKNISLDTIVQSERKHKDKTKDISFTLKKNDRSDAKYALKELIENWKGAKLEEGESIVRISAVGSGMPFTKGTAGKIFRALANQKINIEMIATSEIRTTCIISEKYGEKALNEIHSCFKLGKNKS

SEQ ID NO: 7737 - protein, 299 aa, Prochlorococcus marinus str. NATL1A
MTKSNLKDLSLFNNDGGIFLGAQRGIDQCRVSLLGVPYDGTCCFRPGARFGPSAVREDSYGIETYCPQLNLDLEDIKFADIGSLDVPLGDAKLTLDYIKDATNILLKNNLKPLIIGGEHSITSGIIKSIITKYPDLIMLQLDAHADLRDEWLGSKFSHACTMKRCLEILPSKKIFQIGIRSGTKSEFLEMNNSKRLIQHTLGENAKSLEEALKSFKGRPIYLTFDLDWFDPSVMPGTGTPEPGGYFWGDFAAIINVIKSHNLIGADVVELSPKLDNTGISSILAAKVVRSLILLLDKSS

SEQ ID NO: 7738 - protein, 553 aa, Prochlorococcus marinus str. NATL1A
MVQYYLEGKKLNQVEKNKAAKDGLEIGKDIDKFAEMGWEQMDKTDLELRLKWYGMFWRPKTPGKFMLRLRIPNGIINAEQLKVIASIVARYGENGSCDITTRQNIQLRGVLISDLPEILNRLKKVNISTTQSGFDNPRNVTGNPIAGVDPEEIIDTRIYTSKMQDHLTNDGKGNSEFSNLPRKWNTAIAGSKDNFLLHNDLIFHPVKINGVLGFSVWIGGVLSSVMNEYAVPLNAWVEEEKIYELTSIILSLWRDNGERNIRPKGRFRFYLDKIGIETFRDLIEKQYGTLKEDPGSIFSDKPRSFFGIHSQKQEGKYFAGIHVPVGRLLAEDLQDLANICENFGDKEIRLTEDQNIIITGIDTNLIEEFKEQSILQKFPLEPETIAAGTVSCTGNTYCGFALTNTKDQALKISHELDKELDLKDELKIHWTGCPNSCGQAYMGGIGLTGKKAKDKEGKTVEAYDISIGGSQGPNYKLGELIKKSVPQDELKDVLKDLLISDFDAKEKIFLSKKSGSLSRFMNWFSPLGKDKPLINRANGSHDIFSKFMNRISN

SEQ ID NO: 7739 - protein, 630 aa, Prochlorococcus marinus str. NATL1A
MGKVVGIDLGTTNSCVAVMEGGKPTVIANAEGFRTTPSVVAYTKNQDQLVGQIAKRQAVMNPENTFYSSKRFVGRRVDEVNDESKEVSYGVEKAGSNVKIKCPILDKQFSPEEVSAQVLRKLSDDAGKYLGETVTQAVITVPAYFNDSQRQATKDAGKIAGLEVLRIINEPTAAALAYGLDKKSNERILVFDLGGGTFDVSVLEVGDGVFEVLSTSGDTHLGGDDFDRVIVDHLASTFKGNEGIDLRQDKQALQRLTEAAEKAKIELSNATQSEINLPFITATPEGPKHLDLTLTRGKFEELASNLIDRCRVPVEQALKDAKLSTGEIDEIVMVGGSTRMPAVKELVKRVTTKDPNQTVNPDEVVAVGAAIQGGVLAGEVKDILLLDVTPLSLGVETLGGVMTKMISRNTTVPTKKAETYSTAVDGQTNVEIHVLQGEREMASDNKSLGTFRLDGIPPAPRGVPQIEVTFDIDANGILSVNAKDKGSGKEQSISITGASTLSDNEVEKMVKDAEMNASTDKEKREKIDIKNQAETLVYQAEKQIGELGDKVDEAAKAKVEEKRVKLKEATEKDDYETMKKLVEELQQELYSLGASVYQQANDASQAAADSNTDSKVDGDDVIDADFTETK

SEQ ID NO: 7740 - protein, 400 aa, Prochlorococcus marinus str. NATL1A
MGKAKKVVLAYSGGVDTSVCIPYLKKEYGVEHVIAFAADLGQGDELDQIKQKAISAGASESLIGNLVKPFIEDFAFPAIRSNALYQGRYPLSTALARPLIAKNLVEIARELNADGVAHGCTGKGNDQVRFDVTIGALAPDLQLLTPAREWGMSREETIAYGEKYGIVPPVSKKTPYSIDLNLLGRSIEAGPLEDPFEMPSEEVFGITSSIADSPNEPEIVDILFENGYPVAINGEAMEPVSLIKKANSLAGKHGFGRLDIIEDRVVGIKSREIYETPGLLLLIKAHQEIESLTLPADLLDTKFRLERQWADLVYKGFWFSPLKEALDGFINYSQKQVNGTVRVRLFKGNVDVIGRKSKENSLYISDMSTYGSEDKFNHKSAEGFIYVWGLPSRIWSWINK

SEQ ID NO: 7741 - protein, 160 aa, Populus tremula x Populus tremuloides
MSTSEFKGFTEEQEALVVKSWSAMKKNASELSLKFFLKIFEIAPSAQKLFPFLRDSSVPLEQNPKLKPHAMSVFIMTCESAVQLRKAGKVTVRESSLKKLGAVHFKNGVVDEHYEVVKFALLETIKEAVPEMWSPEMKKAWGDAYDQLVAAIKTEMKPSS

SEQ ID NO: 7742 - protein, 184 aa, Pteris vittata
MASRAVQTSVGLLGGSDLHSSSTSTNNFQSLLSFSPTFLLSKRATVLSSTQHRPSWTTAQPPNRLVCRSSYGGAPTGLSPELKEAVDKFVTSNKVVLFMKGTKLFPQCGFSNTVVQILNSLNVPYETVNILENEQMRYAMKIYSSWPTFPQLYVDGEFFGGCDITLEAFKNGELQEAIEKAMCS

SEQ ID NO: 7743 - protein, 225 aa, uncultured ammonia-oxidizing beta proteobacterium
MNAKNLIKLGKLGKLGKLGVLGLYGMATLAMTLGLDITPAAAHGERSQEPFLRMRTIQWYDMKWGPETTKVNDIAGMSGKFHLAEDWPRAVGKPGRAFFNVGSPSPVFVRLSTKLNGEPTMISGPLEIGRDYAFEVKLKARIPGRHHMHAMVNIKDAGPIAGPAAWMNVTGSWDDFTNPVKLLTGETIDTETFNFSNGIFWHALWMGLGIFWIGYYVARPMFLPR

SEQ ID NO: 7744 - protein, 220 aa, uncultured ammonia-oxidizing beta proteobacterium
MKLKTIFKAGVIGLYGAAIGAASLVLTVAVDVSPVAAHGERSQEPFLRMRSIQWYDMKWQPKVTKVNDIATMTGKFHLAEDWPRAVGKPERAFFNVGSPSPVFVRLSTTLNGEPTFISGPLVIGRDYEFEARLKARIPGRHHMHAMVNVKDAGPIAGPAAWMNISGSWDDFTNPVKLLTGETIDTETFNLSNGLFWHLLWGAIGCFWIGIFVARPMFLPR

SEQ ID NO: 7745 - protein, 220 aa, uncultured ammonia-oxidizing beta proteobacterium
MKLKNIFKAGVIGLYGAAIGAASLVLTVAVDVSPVAAHGERSQEPFLRMRSIQWYDMKWQPKVTKVNDIATMTGKFHLAEDWPRAVGKPERAFFNVGSPSPVFVRLSTTLNGEPTFISGPLVIGRDYEFEVRLKARIPGRHHMHAMVNVKDAGPIAGPAAWMNISGSWDDFTNPIKLLTGETIDTETFNLGNGLFWHLLWGAIGCFWIGIFVARPMFLPR

SEQ ID NO: 7746 - protein, 220 aa, uncultured ammonia-oxidizing beta proteobacterium
MKLKTIFKAGVIGLYGAAIGAASLVLTVAVDVSPVAAHGERSQEPFLRMRSIQWYDMKWQPKVTKVNDIATMTGKFHLAEDWPRAVGKPERAFFNVGSPSPVFVRLSTTLNGEPTFISGPLVIGRDYEFEVRLKARIPGRHHMHAMVNVKDAGPIAGPAAWMNISGSWDDFTNPVKLLTGETIDTETFNLSNGLFWHLLWGAIGCFWIGIFVARPMFLPR

SEQ ID NO: 7747 - protein, 392 aa, uncultured ammonia-oxidizing beta proteobacterium
MKLKNIFKAGVIGLYGAAIGAASLVLTVAVDVSPVAAHGERSQEPFLRMRSIQWYDMKWQPKVTKVNDIATMTGKFHLAEDWPRAVGKPERAFFNVGSPSPVFVRLSTKLNGEPTFISGPLVIGRDYEFEVRLKARIPGRHHMHAMVNVKDAGPIAGPAAWMNISGSWADFTNPIKLLTGETIDTETFNLSNGLFWHLLWGAIGCFWIGIFVARPMFLPRSRVLLAYGDELLLDPMDRKIGFAVAILTCALVWGGYRYTETKHPYTIPIQAGESKVAPLPVPPNPVAIKITDANYDVPGRALRITMDITNNGDTDINIGEFTTAGVRFVNTLGQQHLDPDYPRELVATGLTLDDDSGIQPGETKEINLEAKDALWEIQRLMALLGDPESRFG

SEQ ID NO: 7748 - protein, 392 aa, uncultured ammonia-oxidizing beta proteobacterium
MKLKNIFKAGVIGLYGAAIGAASLVLTVAVDVSPVAAHGERSQEPFLRMRSIQWYDMKWQPKVTKVNDIATMTGKFHLAEDWPRAVGKPERAFFNVGSPSPVFVRLSTKLNGEPTFISGPLVIGRDYEFEVRLKARIPGRHHMHAMVNVKDAGPIAGPAAWMNISGSWDDFTNPIKLLTGETIDTETFNLSNGLFWHLLWGAIGRFWIGIFVARPMFLPRSRVLLAYGDELLLDPMDRKIGFAVAILTCALVWGGYRYTETKHPYPIPIQAGESKVAPLPVPPNPVAIKITDANYDVPGRALRITMDITNNGDTDINIGEFTTAGVRFVNTLGQQHLDPDYPRELVATGLTLDDDSGIQPGETKEINLEAKDALWEIQRLMALLGDPESRFG

SEQ ID NO: 7749 - protein, 392 aa, uncultured ammonia-oxidizing beta proteobacterium
MKLKNIFKAGVIGLYGAAIGAASLVLTVAVDVSPVAAHGERSQEPFLRMRSIQWYDMKWQPKVTKVNDIATMTGKFHLAEDWPRAVGKPERAFFNVGSPSPVFVRLSTKLNGEPTFISGPLVIGRDYEFEVRLKARIPGRHHMHAMVNVKDAGPIAGPAAWMNISGSWDDFTNPVKLLTGETIDTETFNLSNGLFWHLLWGAIGCFWIGIFVARPMFLPRSRVLLAYGDELLLDPMDRKIGFAVAILTCALVWGGYRYTETKHPYTIPIQAGESKVAPLPVPPNPIAIKITHANYDVPGRALRITMDITNNGDTDINIGEFTTAGVRFVNTLGQQHLDPDYPRELVATGLTLDDDSGIQPGETKEINLEAKDALWEIQRLMALLGDPESRFG

SEQ ID NO: 7750 - protein, 220 aa, uncultured ammonia-oxidizing beta proteobacterium
MKLKNIFKAGVIGLYGAAIGAASLVLTVAVDVSPVAAHGERSQEPFLRMRSIQWYDMKWQPKVTKVNDIATMTGKFHLAEGWPRAVGKPERAFFNVGSPSPVFVRLSTKLNGEPTFISGPLVIGRDYEFEVRLKARIPGRHHMHAMVNVKDAGPIAGPAAWMNISGSWADFTNPIKLLTGETIDTETFNLSNGLFWHLLWGAIGCFWIGIFVARPMFLPR

SEQ ID NO: 7751 - protein, 225 aa, uncultured ammonia-oxidizing beta proteobacterium
MNAKNLIKLGKLGKLGKLGVLGLYGMATLAMTLGLDITPAAAHGERSQEPFLRMRTIQWYDMKWGPETTKVNDIAGMSGKFHLAEDWPRAVGKPGRAFFNVGSPSPVFVRLSTKLNGEPTMISGPLEIGRDYAFEVKLKARIPGRHHMHAMVNIKDAGPIAGPAAWMNISGSWADFTNPIKLLTGETIDTETFNLSNGLFWHLLWGAIGCFWIGIFVARPMFLPR

SEQ ID NO: 7752 - protein, 220 aa, uncultured ammonia-oxidizing beta proteobacterium
MKLKNIFKAGVIGLYGAAIGAASLVLTVAVDVSPVAAHGERSQEPFLRMRSIQWYDMKWQPKVTKVNDIATMTGKFHLADDWPRAVGKPVRAFFNVGSPSPVFVRLSTKLNGEPTFISGPLVIGRDYEFEVRLKARIPGRHHMHAMVNVKDAGPIAGPAAWMNISGSWADFTNPIKLLTGETIDTETFNLSNGLFWHLLWGAIGCFWIGIFVARPMFLPR

SEQ ID NO: 7753 - protein, 220 aa, uncultured ammonia-oxidizing beta proteobacterium
MKLKNIFKAGVIGLYGAAIGAASLVLTVAVDVSPVAAHGERSQEPFLRMRSIQWYDMKWQPKVTKVNDIATMTGKFHLAEDWPRAVGKPERAFFNVGSPSPVFVRLSTKLNGEPTFISGPLVIGRDYEFEVRLKARIPGRHHMHAMVNVKDAGPIAGPAAWMNISGSWADFTNPIKLLTGETIDTETFNLSNGLFWHLLWGAIGCFWIGIFVARPMFLPR

SEQ ID NO: 7754 - protein, 220 aa, uncultured ammonia-oxidizing beta proteobacterium
MKLKNIFKAGVIGLYGAAIGAASLVPTVAVDVSPVAAHGERSQEPFLRMRSIQWYDMRWQPKVTKVNDIATMTGKFHLAEDWPRAVGKPERAFFNVGSPSPVFVRLSTLLNGEPTFISGPMVIGRDYKFEVKLKARIPGRHHMHAMVNVKDAGPIAGPAAWMNITGSWADFTNPIKLLTGETIDAETFNLSNGLFWHLLWGAIGCFWIGIFVARPMFLPR

SEQ ID NO: 7755 - protein, 220 aa, uncultured ammonia-oxidizing beta proteobacterium
MKLKNIFKAGVIGLYGAAIGAASLVLTVAVDVSPVAAHGERSQEPFLRMRSIQWYDMRWQPKVTKVNDIATMTGKFHLAEDWPRAVGKPERAFFNVGSPSPVFVRLSTKLNGEPTFISGPLVIGRDYEFEVRLKARIPDRHHMHAMVNVKDAGPIAGPAAWMNISGSWDDFTNPIKLLTGETIDTETFNLSNGLFWHLLWGAIGCFWIGIFVARPMFLPR

SEQ ID NO: 7756 - protein, 225 aa, uncultured ammonia-oxidizing beta proteobacterium
MNAKNLIKLGKLGKLGKLGVLGLYGMATLAMTLGLDITPAAAHGERSQEPFLRMRTIQWYDMKWGPETTKVNDIAGMSGKFHLAEDWPRAVGKPGRAFFNVGSPSPVFVRLSTKLNGEPTMISGPLEIGRDYAFEVKLKARIPGRHHMHAMVNIKDAGPIAGPAAWMNITGSWADFTNPIKLLTGETIDTETFNLSNGLFWHLLWGAIGCFWIGIFVARPMFLPR

SEQ ID NO: 7757 - protein, 225 aa, uncultured ammonia-oxidizing beta proteobacterium
MNAKNLIKLGKLGKLGKLGVLGLYGMATLAMTLGLDITPAAAHGERSQEPFLRMRTIQWYDMKWGPETTKVNDIAGMSGKFHLAEDWPRAVGKPGRAFFNVGSPSPVFVRLSTKLNGEPTMISGPLEIGRDYAFEVKLKARIPGRHHMHAMVNIKDAGPIAGPAAWMNITGSWDDFTNPIKLLTGETIDTETFNLSNGLFWHLLWGAIGCFWIGIFVARPMFLPR

SEQ ID NO: 7758 - protein, 225 aa, uncultured ammonia-oxidizing beta proteobacterium
MNAKNLIKLGKLGKLGKLGVLGLYGMATLAMTLGLDITPAAAHGERSQEPFLRMRTIQWYDMKWGPETTKVNDIAGMSGKFHLAEDWPRAVGKPGRAFFNVGSPSPVFVRLSTKLNGEPTMISGPLEIGRDYAFEVKLKARIPGRHHMHAMVNIKDAGPIAGPAAWMNITGSWDDFTNPVKLLTGETIDTETFNLSNGLFWHLLWGAIGCFWIGIFVARPMFLPR

SEQ ID NO: 7759 - protein, 241 aa, Chlorokybus atmophyticus
MTNTNYNEKIMVVDDEAIVRQIIQTRLSMIGYNVITANDGEEAIKMFFKEQPQLVVLDVMMPKLDGYSVCQQLRRESDVPIIMLTALEDVADRITGLELGADDYIMKPFSPKELEARIRSVFRRSNRNSYVVKQNKDSSIINIGSLIIDKKRKQVFKDNKRLRLTGMEFSLLELLINRSGESVSRYEILKEVWEYGNDSYIDTRVVDVHISRLRSKLEEDPANPDLILTVRGIGYLFQKFD

SEQ ID NO: 7760 - protein, 159 aa, Nicotiana plumbaginifolia
MSDEEHQFESKADAGASKTYPQQAGTIRKNGHIVIKGRPCKVVEVSTSKTGKHGHAKCHFVAIDIFTGKKLEDIVPSSHNCDVPHVNRTDYQLIDISEDGFVSLLTENGNTKDDLRLPTDDNLLTQIKDGFAEGKDLVVSVMSAMGEEQICALKDIGPK

SEQ ID NO: 7761 - protein, 161 aa, Medicago sativa
MSDEEHQFESKADAGASKTYPQQAGTIRKNGYIVIKNRPCKVVEVSTSKTGKHGHAKCHFVAIDIFTSKKLEEVYVPSSHNCDVPHVNRTDYQLIDISEDGFVSLLTENGNTKDDLKLPTDDSLLTQIKDGFAEGKDLVVSVMSAMGEEQICALKDIGGKN

SEQ ID NO: 7762 - protein, 199 aa, Rhodiola sachalinensis
VHVDAAYAGLNRYRVGDILRVTGFYNSAPQFHFVRRKNVLLSIDSDKTDESELQQAVENASSLLKNFHTSVVEYTSYADTKTIPGHYVIYWELLIKDSADSPTDDALNQCCLAMEESLNSVYRQGRVECNSIGPLEIRVVQSGTFEELMDYAISRGASINQYKVPRCVNYTPIMELLDARVVSSHFSPSLPHWSPERRR

SEQ ID NO: 7763 - protein, 94 aa, Pisum sativum
ARGEDKKPTDQGGAHINLKVKGQDGNEVFFRIKRSTQLKKLMNAYCDRQSVDFNSIAFLFDGRRLRAEQTPDELEMEDGDEIDAMLHQTGGSVV

SEQ ID NO: 7764 - protein, 180 aa, Cryptomeria japonica
LQHTLTGHGDAVSSVEFSKDGLLVGSGSVDKSIRLWSSSTGTFERSLHGHTEGISDVAWSSDSRYICSASDDKTLKIWDVHTGDCVKTLKGHSNFVFTVNFNDHSNLIVSGGFDETVRIWDVKTGKCLRVIHAHTDPVTAADFNRDGSLIVSSSHDGSCKIWDASNGNCLKTLIDDKTPA

SEQ ID NO: 7765 - protein, 180 aa, Cryptomeria japonica
LQHTLTGHRDAVSSVEFSKDGLLVGSGSVDKSIRLWSSSTGTFERSLHGHTEGISDVAWSSDSRYICSASDDKTLKIWDVHTGDCVKTLKGHSNFVFTVNFNDHSNLIVSGGFDETVRIWDVKTGKCLRVIHAHTDPVTAADFNRDGSLIVSSSHDGSCKIWDASNGNCLKTLIDDKTPA

SEQ ID NO: 7766 - protein, 180 aa, Thujopsis dolabrata
LQHTLAGHGGAVSSVEFSKDGRLVGSGSVDKTIRLWSSSTGAFKRSLHGHTEGISDVAWSSDSRYICSASDDKTLKIWDVHTGDCVKTLKGHSNFVFTVNFNDHSNLIVSGSFDETVRIWDVKTGKCLRVIQAHTDPVTAADFNRDGSLIVSSSHGGSCKIWDASSGNCLKTLIDDKMPA

SEQ ID NO: 7767 - protein, 180 aa, Chamaecyparis formosensis
LQHTLVGHGGAVSSVEFSKDGRLVGSGSVDKTIRLWSSSTGAFGRSLHGHTEGISDVAWSSDSRYICSASDDKTLKIWDVHTGDCVKTLKGHSNFVFTVNFNDHSNLIVSGSFDETVRIWDVKTGKCLRIIPAHTDPVTAADFNRDGSLIVSSSHDGSCKIWDASSGNCLKTLIDDKTPA

SEQ ID NO: 7768 - protein, 180 aa, Chamaecyparis pisifera
LQHTLAGHGGAVSSVEFSKDGRLVGSGSVDKTIRLWSSSTGAFGRSLHGHTEGISDVAWSSDSRYICSASDDKTLKIWDVHTGDCVKTLKGHSNFVFTVNFNDHSNLIVSGSFDETVRIWDVKTGKCLRIIHAHTDPVTAADFNRDGSLIVSSSHDGSCKIWDASNGNCLKTLIDDKTPA

SEQ ID NO: 7769 - protein, 180 aa, Chamaecyparis obtusa
LQHTLPGHGGAVSSVEFSKDGRLVGSGSVDKTIRLWSSSTGAFGRSLHGHTEGISDVAWSSDSRYICSASDDKTLKIWDVHTGDCVKTLKGHSNFVFTVNFNDHSNLIVSGSFDETVRIWDVKTGKCLRVIRAHTDPVTAADFNRDGSLIVSSSHDGSCKIWDASNGNCLKTLIDDKTPA

SEQ ID NO: 7770 - protein, 180 aa, Chamaecyparis obtusa
LQHTLAGHGGAVSSVEFSKDGRLVGSGSVDKTIRLWSSSTGAFERSLHGHTEGISDVAWSSDSRYICSASDDKTLKIWDVHTGDCVKTLKGHSNFVFTVNFNDHSNLIVSGSFDETVRIWDVKTGKCLRVIHAHTDPVTAADFNRDGSLIVSSSHDGSCKIWDASNGNCLKTLIDDKAPA

SEQ ID NO: 7771 - protein, 321 aa, Medicago truncatula
MANVPMRFQRVMEAFDADVALSRGKLCSESSGSEHSPESSPDLSDLVLSFMEDSERSGEEKDVVARSKDCDGKGAEDVEEIGEWCDSEKNEILKGLFGGNEDVVDEDEKDAKERIRREVELAIGLLGSDSFPGFKRSLMSCLREKGFDAGLCKTKWEKKGKLTAGDYEYIDVNLSGKRYIIEVSLAAEFEIARPTNQYSSLLNIFPKIFVGKMEELKRIVRLMCSAIKGSMKKMDLHIPPWRRNLYMQTKWFSSYKRTTNAVATIKASSHFSVESFCPKKFMGFEARHVKAYNCRDDYVGINNGFRVGHLAAALNSDNFGL

SEQ ID NO: 7772 - protein, 332 aa, Medicago truncatula
MNCSQFATTMRSAFSLHHFNSPRLSRHVSNVSASLQPQGQGTDTPPRIGFLGLGIMGTPMALNLIKAGVDLTVWNRTKSKCDPLISLGAKYKPSPEEVAASCDLTFAMLADPQSAVDVACGKHGVANGIGPGKGYVDVSTVDVDTSKLINGHIKSTGALFLEAPVSGSKKPAEDGQLIFLTAGDRNLYETVAPFLDIMGKSKFYLGDVGNGAAMKLVVNMIMGSMMASFSEGLLLSEKVGLDPKVLVEVISQGAINAPMYSMKGPSMIQSNYPTAFPLKHQQKATESVSQPIPIAAAANELYKVAKSHGYSDEDFSAVIEALKSKFQHSENQ

SEQ ID NO: 7773 - protein, 246 aa, Medicago truncatula
MIAAATATDMLWLCNSKPSARVMVLSCQAGEKAVSCGVTNADSIDELSDIKDLHLRTVEELGVDRDVISKHLEELEQLLKGIAMMKELTPRTQDYLVSFGECMSTRIFAAYLNKIGVKARQYDAFEIGFITTDDFTNADILEATYPAVAKRLHSDWVSDPAIPIVTGFLGKARKSCVRTTLGRGGSDLTATTIGKALGLQEIQVWKDVDGVLTCDPNICPQAQPVPYLTFDEAAELAYFGAQAFVE

SEQ ID NO: 7774 - protein, 286 aa, Medicago truncatula
MNRSMDVEMEHLNLNRNVMNLREKELQIVVQSPSKVEVPDGWLVEQRPRPSNPNHIDRYYIEPHTGQKFRSLVSVQRYLNGGETGDYLPTQRIISENNNNLPDGWLVEHRPRLSNSDRVDRYYIEPRTGQKFRSLTSVQRYLMAEARDYLPTERMISENATCIKSRTAQKLRPAKDFEGRLSFSAENACRATPKLVFKCGSGKKSAPSISYKENDSQKKIKIGEDDRGSIHNLARPPTKVSWVLSDPRGFWNPFLDDSVVPASEKRKWSEAFSISINEGATSGVNN

SEQ ID NO: 7775 - protein, 251 aa, Medicago truncatula
METEFCEFSLELEDMFKIFEHIRGFNVTIVTSANTQYETLPHLIAFNSFCYIEPHTGQKFRSLVSVHRYLNGGETKDYLSTERMISENKNTTFIKSRKRQKFRCPSSDFEGRGLTGKNACRATPKVPKPSNGENTCRATPKLVSKCGSGKRSTPSMRSYENPVEKSFSDAEDQTTPEPSIQSTDSEITDSQKKIKTGEDDGGSIHNLTKPPTKVSWVLSGPGGFWSPFLDDSIVPTSEKTKWNETFFNILQ

SEQ ID NO: 7776 - protein, 365 aa, Medicago truncatula
MTQPLLLLLKKHNTLLSSPTLSMCADMSNNNPPSTSKAKDFFPSPALSLSLAGIFRHGGGAAAEGEGGSISNMEVEEGEEGSTIGGERVEEISSEYSGPAKSKSIDEYEGDELEDDEGEDDEGDGDGDGDGVNKNKKKKRKKYHRHTSEQIRVMEALFKESPHPDEKQRQQLSKQLGLAPRQVKFWFQNRRTQIKAIQERHENSLLKSEIEKLREKNKTLRETINKACCPNCGVPTTNRDGTMATEEQQLRIENAKLKAEVERLRAALGKYASGTMSPSCSTSHDQENIKSSLDFYTGIFCLDESRIMDVVNQAMEELIKMATMGEPMWLRSLETGREILNYDEYMKEFADENSDHGRPKRSIEA

SEQ ID NO: 7777 - protein, 360 aa, Medicago truncatula
MGRAPCCEKNNGLKRGPWTQEEDQKLIDYIQKHGYGNWRLLPKNAVAGLQRCGKSCRLRWTNYLRPDIKRGRFSFEEEETIIQLHSILGNKWSSIASRLPGRTDNEIKNYWNTHIRKRLLRMGIDPVTHNPRFDLLDLSSILNSSLYASTSSSQMNIQRLIGTQSIVNPEILKLASSLFSSQNGQENHQIDHKQQISSHMDQEACTMLLNPPFDNNSMSFIQTHLENIYSSFLPEFGFQQHHENVQLNYLHCNGIASSNVTEDFVHQLPCYNYLSSDYHANDLNVDPHISETSTFHCNNNNQNFNFASVLSTPSSSPTQLNSNSANMNESSSTEDETESYVSNNMFEFHISDILGVNEFM

SEQ ID NO: 7778 - protein, 602 aa, Medicago truncatula
MASGGLGLSIDSDPNSSFLYHKQIEFSTLFLNTTTPKTSSGNLYSHKMDTTNNKNKNKNKNKSPFQVNHEISHQPFDHEMRPIINELDFFSQNNNHHNHSSASASASTSTPPSLNLHHHHINDHYTDPSLLEFKVNTSLNLLTTNTSNDQSMMEEDIASDSEDKRAKLELVVLQAELERMKVENHQLRNMLDEGNRKYNTLQMHWMSMVQDKKVEDCNEEQKQVMGGKLDEEKQNGNGGVLVPRQFMELGLPANHSDAIDEPRSQDQSKSLANNNEEGSKDEELVLDHDKKESDRGNERNGSPADRVLAANNNNNVANFSPQTNVEQAEATMRKARVSVRARSEANMINDGCQWRKYGQKMAKGNPCPRAYYRCTMALGCPVRKQVQRCAEDKTILITTYEGHHIHALPPAAMEMVQTTSSAARMLLSGPMTSADGLMNPNYLTRAILPYSSSIATISASAPFPTVTLDLTQSPNQNQFPNNHSNQFQFPFPQNFLPQVFGQTLLNQSKFSGLQMSQDAANSSQQTPQNLADTVNAIAADPNFTAALAAAITSIIGAAQPNNNNGTSNNGNGTIANNSNGNVTSSNNTNGSPKINNPNSSVE

SEQ ID NO: 7779 - protein, 444 aa, Medicago truncatula
MMATNLHRHRRRISTLTHRLYSSFSTTTTTKTSTLYTTDTPDPTTVQLLSWGKGASGQLGGGVEETRLYPSPVTNLLLAPKFTLFNTPGLLPGPEGSNNKGVEVGISCGLFHSCLVVDGGLWVWGKGDGGRLGLGHESSMFVPTLNPHLENVKSVALGGLHSVALTSAGEVFTWGYGGFGALGHSVYTRELFPRLVKGAWEGTIKHIATSGAHTAAVTESGDLYIWGREEGEGRLGLGPGRGPDHAGGLSIPCKVKELPFPVAAVSCGGFFTLALTEEGQLWNWGANSNYELGRGDRIGGWRPRPVPSLEKVRVIQIASGGYHSLALTDDGKVLSWGHGGQGQLGHGSVENQKIPTLVEAIAHEHIIYISCGGASSAAVTDEGKLYMWGNASDSQLGVPGLPAIQPYPVEVNFLMEDDGLGSHKVLSIANGASHAMCLALRESC

SEQ ID NO: 7780 - protein, 1152 aa, Medicago truncatula
MASTSRGEKTEPNTSSSSSQRRHQLQITTTKEPEQQNNNNNKSMKKAIAQYTEDARLHAVFEQSGDSFDYSQSIRLTTAAHSQSVPEQQITAYLAKIQRGGFIQPFGSMIAVDEPSFRVLAYSENARDMLGITPQSVPSLEDDDESSSSGFNIGTDVRSLFTHSSGVLLEKAFAAREISLMNPIWIHSRSTGKPFYGILHRIDVGVVIDLEPARSEDPALSIAGAVQSQKLAVRAISQLQSLPGGDVKVLCDAVVESVRELTGYDRVMVYKFHEDEHGEVVAESKRIDLEPYIGLHYPATDIPQASRFLFKQNRVRMIVDCNASPVRVFQDEALVQPVCLVGSTLRAPHGCHAQYMANMGSIASLAMAVIINGNDEDGVGIGGTGRNSMRLWGLVVCHHTSARCIPFPLRYACEFLMQAFGLQLNMELQLAAQSLEKRVLRTQTLLCDMLLRDSPTGIVTQSPSIMDLVKCNGAALFYQGNYYPLGVTPTESQIRDIIEWLLAFHGDSTGLSTDSLADAGYPGAASLGDAVCGMAVAYITEKDFLFWFRSHTAKEIKWGGAKHHPEDKDDGQRMHPRSSFKAFLEVVKSRSMQWDNAEMDAIHSLQLILRDSFKEAENNDSKAVVHTHMAELELQGVDELSSVAREMVRLIETATAPIFAVDVNGRINGWNAKVSELTGLLVEDAMGKSLLHDLVYKESQETVDKLLSHALKGEEDKNVEIKMRTFGPGNQNKAVFIVVNACSSKDYTNNIVGVCFVGQDVTGQKVVMDKFINIQGDYKAIVHSPNALIPPIFASDDNTCCLEWNNAMEKLSGWSRTDVIGKLLVGEVFGSFCQLKGSDAMTKFMIVLHNALGGQDTDKFPFSFVDRHGKFVQTFLTANKRVNMDGQIIGAFCFLQIVSPELQQALTVQRQQDSSCFARMKELAYICQEVKNPLSGIRFTNSLLESTCLTDEQKQLLETSVACEKQMLKIIRDIDLDIIDNGSLELEKREFLLENVINAVVSQVMLLLRERNLQLIRDIPEEIKALAVYGDQLRIQQVLADFLMNVVRYAPSPDGWVEIHVFPRIKQISDGLTLLHAEFRMVCPGEGLPPELIQDMFHNSKWVTQEGLGLSMSRKIIKLMNGEVQYVREAERCYFLVVLELPVTRRSLKNVN

SEQ ID NO: 7781 - protein, 322 aa, Medicago truncatula
MHTLITRQDVDQVQDLIERCILLYMTPKEIVSTLHEKAKIEPKFTKIVWQKLNEQNPEFFKAYYTRLALKQQIEKFNELLEKQKELMDSQTNVASLPNSNESHIPAIPENPAYSHVSVQTPEGLNSKNLQHGVVSNFSDLFNNKGSSFGMVDTSAHGDIPSMTFTQNSNMGMQQGVNGGMTISKPDNSSFSPHMFGADGKVGGSSAMPFPNFLNRGGSSFGKADMFVQGDIPSMAYTHNTNMGVQQGINGGMNTSKPGYSSYSPHMFGAHGNVVNASATSFTNAESSSHHGIEAVLETLDKFYGSPFINLGDNNSPQTREQG

SEQ ID NO: 7782 - protein, 452 aa, Medicago truncatula
MSSVSSDMARKSVKNVTYKDIEQVRNLIERCMQSYMSPKEVANSLLNEAKIEPKFTELVWQRLEEQNPEFFQAYYTRLALKKQIEEFNKLMHKQKELIDSEQAKVASLPTSNGFHYHDVSSLPTSNGTPTPATTENPACYYVSVQPAEGLNPKNMQHGWESNLSYELNNGGSSFGMVDVSAQGDCSTMHYSQNTNMGFQQGINEGIAISEPEYPSSSTRMFGIDENVLEACPIVGNTSATPIFNNGTGSPFRMVDMSAHGDFSSMHYSQNSNMGFQQGINGGMAITEPEYPSSSPSMFGVDENVMETCPIVRNASAMPIYSNGGSSFHMVEMSAHGDILSMHHSQNSNMDLQQGVNGQMAIVQPEYSSFPHMSGADRNAVETGSNVRDASAMPISGIESNSDSDNEAVMDFLNTCSSFPDLVSLFSGEPDDDPFGLYNIPETPDMLTSKVNS

SEQ ID NO: 7783 - protein, 340 aa, Medicago truncatula
MEQATVGLSGSIHDDSVQFDEEIQGIMIPAPAPENASSFTALLELPPTLAVELLHLPEQKPYLPNSSNGNLTFPTNAALIERAAKFSVFAGENSSPGDSRLFPVESVKNEPQETDSNPCSTQECVSDPAENKNQRNVKRKEREKKGKASSSKKSKSIADETSGAGEKLPYVHVRVRRGQATDSHSLAERARREKINARMKLLQELVPGCEKISGTALVLDEIINHVQTLQRQVEILSMKLAAVNPRIDFNLDRLLAADGSSLMDSNLPSTMVTPLVWPEMPLNSNRQHYQQQWQFDAFHQPLWGREEDNHNFTTPENSLLSYNSSANSASLHSNQLKMEL

SEQ ID NO: 7784 - protein, 344 aa, Medicago truncatula
MMQGSGELTVPPGFRFHPTDEELLYYYLRKKVSYEAIDLDVIREVDLNRLEPWDLKDKCRIGSGPQNEWYFFSHKDKKYPTGTRTNRATTAGFWKATGRDKAIYHTNSKRIGMRKTLVFYTGRAPHGHKTDWIMHEYRLDDDDNAEVQEDGWVVCRVFKKKNTNRSYQQEIEEEDHHMINHMRSTNGPNHFLEPKHHHHMQQLGLYDYNNNTTTTFDGTIHLPQLFSPESAIAAPPTSFHNSSMDILECSQNLLRLTTTNTSSGLNLMQQQQQQGERLISGSDWSFLDKLLASHNGMDLNLRNKLCNTPNNHQAAPSAVGTSSAQKFPFHYLGCESHDIMKFSK

SEQ ID NO: 7785 - protein, 534 aa, Medicago truncatula
MASSSHKLFILLFTILFSLTLPLNTNTSITTSLNPNKLTSLKSLCKTTPYPKLCFNSLKLSISININPNIITYLLHSLQLAISETTKLSNLFHDVGTSNIVEKQRGSIQDCKELHQSTLTSLKRSLSGIRSSNKRNIADARIYLSAALTNKNTCLDGLDSASGTYKPILVDSIINTYKHVSNSLSMLSNHAPEPSNQKGHNKNLVSPKWLSKRLDFDEYDPNEMLVVSADGSGNFSTINDAINFAPNNSLVRIVIYVKEGYYDENVEIPSYKTNIVMLGDGSDSTVITGNRSVVDGWTTFRSATLAVSGDGFLARDIAIENRAGPEKHQAVALRVNADLTAFYKCAIYGYQDTLYVHSFRQFYRECDIYGTIDFIFGNAAVVLQECDIVSRMPLPGQFTVITAQSRDNPDEDTGISIQNCSIIATDELYSNSSKVKSYLGRPWRVFSRTVLIESYIDDFIDQKGWTKWSNDQGLDTLFYGEYENYGPGSKIDNRVEWVGYHLMDYNDAYNFSVSEFIIGDQWLESTSVPYDDGI

SEQ ID NO: 7786 - protein, 466 aa, Medicago truncatula
TSLNLLTTNTSNDQSMMEEDIASDSEDKRAKLELVVLQAELERMKVENHQLRNMLDEGNRKYNTLQMHWMSMVQDKKVEDCNEEQKQVMGGKLDEEKQNGNGGVLVPRQFMELGLPANHSDAIDEPRSQDQSKSLANNNEEGSKDEELVLDHDKKESDRGNERNGSPADRVLAANNNNNVANFSPQTNVEQAEATMRKARVSVRARSEANMINDGCQWRKYGQKMAKGNPCPRAYYRCTMALGCPVRKQVQRCAEDKTILITTYEGHHIHALPPAAMEMVQTTSSAARMLLSGPMTSADGLMNPNYLTRAILPYSSSIATISASAPFPTVTLDLTQSPNQNQFPNNHSNQFQFPFPQNFLPQVFGQTLLNQSKFSGLQMSQDAANSSQQTPQNLADTVNAIAADPNFTAALAAAITSIIGAAQPNNNNGTSNNGNGTIANNSNGNVTSSNNTNGSPKINNPNSSVE

SEQ ID NO: 7787 - protein, 924 aa, Medicago truncatula
MVERRRKPLILCSTKTAINSVLKSSNSSINENEFPNFNLPVGILRFSNKFPSFDHSALIALSTSLLKTLSITSGSPVLVKNAEMNTQRVAVAIALDPPSSDTTTLDIDHSPPASSRIMLVFPSCDFPLNGPLLNGEIAYLSPLLAFNLNLHISCLKSIIHNSQDALASYFKPQCQVGDEDAAKSFEDSVINIELKPLAQPPRFASLLRVAFVKIPECGILDSIKPISDVESKERQDMIDLALQKYFEVDRYLSSGDVFGISISWNCNSTICIPCNQKTQKNENIICFKVIAMEPSDEPVLRVNKTLTALVLVGSSPSALPPDLLTTGPEGPVPLQRDTVKILASILAPTLCPSALSSKFRVSVLLYGLEGCGKRTVVRYVARRLGLHVVEYNCHDLTGSDRTSVALAQAFKAAQRYSPTILLLRHFEVFRDSQSPEVSQNDQRGNTSEVASVIRRFTEPVGEHGDSNSLVKSNGQFVEKNSEKTSGHQVLLIAAADSSEGLPASIRRCFSHEIKMGPLTEEQRAEMLLHSLQNVYGLHSNTDLEGFVKEIVGQTSGFMPRDMCALIADAGANLFPGSNVEVGKDQPEDSDSSLISEVTEDNNESEVSARKPGKEDLVNALERSKKRNASALGTPKVPNVKWEDVGGLEDVKKSILDTVQLPLLHKDLFASGLRKRSGVLLYGPPGTGKTLLAKAVATECSLNFLSVKGPELINMYIGESEKNVRDIFQKARSARPCVIFFDELDSLAPARGASGDSGGVMDRVVSQMLAEIDGLSDSTQDLFIIGASNRPDLIDPALLRPGRFDKLLYVGVVSDATYRERVLKALTRKFKLHEDVSLYTIATKCPPNFTGADMYALCADAWFLAAKRRVLNAEPESSNPDNDADSIVVEYDDFVQVLEELQPSLSMAELKKYELLRDQFEGTSK

SEQ ID NO: 7788 - protein, 684 aa, Medicago truncatula
MIRNFLYLLLNLVLFSSILISQSLALTHSAEVWALQDLHRALNYSEALRGWNGSDPCEESWTGVACSESSVISMDVSSNNIVGEMPFGLPPNVTHMNLSHNFLIGPIGDVFTGLDNLKEMDISYNNFSGDLPRSFGSLTNLARLFLHSNKFTGSVAYLAELPLTDLNIQDNLFSGLLPRHFQHIKNLWIAGNEFHAADNSPPWPAPSETLSVEHNISHPPTTNANAIKNYAPPVVSEHKPKKKKLGPGGIALIVGGGTLVAAGLALLVAIRLNKLHPQSQNLNYSESKDISLHSHPTSASIEVSSAELDDMPLLPPVNVASLLGPMRFPFVRHSNVEETSRRSFSKRGRSTGRTKIYTIAELQLATNFFNEGNLLGEGSLGPVYKAVFPEGKNLAVKIINMAGLSYREEEKFMDVICTASKLKHPNIVALNGYCFEHGEHLLVYDYFGHLTLNDALHSGASEPLAWFQRLRIALGVAQALDYLHSACCPPVPHGNLKAANVLLDENLTPRVGDCSLAILRPFMKSNQVKFPATETTTADRGYVPADLSRRRDVFAFGVLLLELLTGRKPFDSARPREEQNLAKWVSHRLRDNMGLEQIVDPSIKTTLSSKALSGYTDIISLCMQPSKQLRPPMSEVVSSLISFGQEFNFAKSGVADGADLFEKSSFCSANTGFVNSPTSSHLSA

SEQ ID NO: 7789 - protein, 275 aa, Medicago truncatula
MKLIKERVYEDIKGVGMDMDNTIGVKKGAWTYEEDNLLKAYINKYGEGKWHLIPQRAGSGLNRCRKSCRLRWINYLKPNINRKSFSEDEVDMILRLHKLLGNRWSLIAGRLPGRTANSVKNYWNTHLLKKVVSKQEEEKEKPMETMKAHQVIKPRPITFSTQSSWLNVKHNNFVTQPLLASNNDGCFPRDRDDKMTMVVPNQIGKDCASSSQPILGNVPIPCTMWSESLWNLGEQVDSEIIGSSSSLQVENYEEFSIVDDFWDFNICDYDSLWDL

SEQ ID NO: 7790 - protein, 607 aa, Medicago truncatula
MPTSLDYDLSQKNKKTLDFIEDITTHADEIQKKVLAEILNRNANVEYLQRHGLNGHTDSETFKKLLPIITYEDIQNDINLIANGDTSPILTSNPISNFLTSSGTSGGERKLMPATEEEFGRRYLLYSYLMPIMSQFIPDLEKGKGMYLMFIKNESKTPGGIKASPVLTNYYKSSHFLNRPYDPYTNFTSPNETVLCLDSYQSMYSQLLCGLIQNNEVLRVGAVFASGLIRAIRFLEKNWRLLCNDIRTGTLDLLITDDSVREAVMKILKPNKNLADFVEGECNKGSWQGIITRLWPNTKYVDVIVTGTMSQYIPTLDYYSNGLPLVCTMYASSECYFGVNLNPLSKPCHVSYTLIPTMCYYEFLPVNRSNCEVNGSIPPSTTKSLGEKKYQEVVDLVDVKLGQEYELVVTTYAGLYRYKVGDVLKVTGFKNKAPQFSFVCRKNVVLSIESDKTDEVELQNAMKNAVTHLAPFEADVAEYTSYADTTTIPGHYVLYWELNLKGSTKIPHSVYEDCCLTIEESLNSVYRQGRVSDKSIGPLEIKIVEQGTFDKLMDYAINLGASINQYKTPRCVKFAPMVELLESRVMAKYFSPKCPKWVPGHKKWNNE

SEQ ID NO: 7791 - protein, 511 aa, Medicago truncatula
MGFLSLCHIQLFIDKIDAIAPPRKDGGEELSKRLVVTLLGLMDGIRRNEGLVVIAATNRLDRIDPALRRPGRFDKEVEIGVPSQVERGDILRAILGEIDHSLSETQIEELASITHGFVGADLVGLRNWAALICLRRYAEQKLKKTCNASSDDITKQPTPLKSATNSKDHSGIITSSVSDMSVASSLLLPSFLMGETSEIIDETPDHGEEEHILKVTFEDFQKARPEIRPSAMREVTLEVPKVNWEDIGGQKEVKNQLLEAVVWPQKHRDAFTRIGTDPPTAVLMFGPPGCSKTLMARAVASEAGLNFLAVKGPELFSKWVGESEKAVRSLFDKARANAPAIIFFDEIDSLAITRGKDGDGVSVSDRVMAQLLVQLDGVLKRVDVIVIAATNRPDKIDPALLRQGRFDRLLYVGPPNEIDREEIFSIHLRKTPYDSDVSMKELAQLTDGYTGADIAHICRQAALAALEESFDASVVTMKHFKMAIKQVQPSEFQSYQKLSAKFQRAVFSDAI

SEQ ID NO: 7792 - protein, 560 aa, Medicago truncatula
MCGETESCTSSTNGHHKAEDVVGGNAKAIQILRELITYPRLFTSEAKQLGLKFPRGLLLYGPPGTGKTSLVRAIVEECGANLTIISPNTVNSALAGESERNLREAFSEASSHAALGKSSVIFIDEIDGLCPRRDSIRELDVRIASQLCTLMDSNKATSSNPGVVVVASTNRVDAIDPALRRYGRFDIETEVTVPNEEERLQILELYTRKIPRDSQDLEYVAASCNGYVGADLRDLCLEAVKSAIERSDNANKDVNDSSLTMEDWKNARSLVQPSITRGITVEIPKVTWKDIGGLKDVKTKLEQAIEWPMKHPDAFSRLGITPIRGILLHGPPGCSKTTLAKAAANAANVPFFSLSCAELFSMYVGDGEGLLREIFQKARLAGKSIIFFDEADIVAGKRGDSSSGGAVVGERLLSTLLTEMDGLEEAKGVLVLAATNRPYAIDAALMRPGRFDLILYVPPPDLEGRFEILKVHTRGMNLGSDVDLRKLAEDTELFTGAELQGLCKEVGIVALRENIDASVVYDHHFKTAKNSLKPALTAEEIVSYSSFKRTSSRALSKEIE

SEQ ID NO: 7793 - protein, 122 aa, Linum usitatissimum
DVGGGTGAVLSMILSKHPSIKGINFDLPHVIEDAPALPGVQHVGGDMFASVPTGDAIFMKWICHDWSDQHCLKFLKNCFDALPANGKVIVCECIMPVAPDTSLATRNVVHIDCIMLAHNPGG

SEQ ID NO: 7794 - protein, 667 aa, Nicotiana tabacum
MAAAAPSPSSSAFSKTLSPSSSTSSTLLPRSTFPFPHHPHKTTPPPLHLTHTHIHIHSQRRRFTISNVISTNQKVSQTEKTETFVSRFAPDEPRKGSDVLVEALEREGVTDVFAYPGGASMEIHQALTRSSIIRNVLPRHEQGGVFAAEGYARATGFPGVCIATSGPGATNLVSGLADALLDSVPIVAITGQVPRRMIGTDAFQETPIVEVTRSITKHNYLVMDVEDIPRVVREAFFLARSGRPGPILIDVPKDIQQQLVIPDWDQPMRLPGYMSRLPKLPNEMLLEQIVRLISESKKPVLYVGGGCSQSSEDLRRFVELTGIPVASTLMGLGAFPTGDELSLSMLGMHGTVYANYAVDSSDLLLAFGVRFDDRVTGKLEAFASRAKIVHIDIDSAEIGKNKQPHVSICADIKLALQGLNSILESKEGKLKLDFSAWRQELTEQKVKHPLNFKTFGDAIPPQYAIQVLDELTNGNAIISTGVGQHQMWAAQYYKYRKPRQWLTSGGLGAMGFGLPAAIGAAVGRPDEVVVDIDGDGSFIMNVQELATIKVENLPVKIMLLNNQHLGMVVQWEDRFYKANRAHTYLGNPSNEAEIFPNMLKFAEACGVPAARVTHRDDLRAAIQKMLDTPGPYLLDVIVPHQEHVLPMIPSGGAFKDVITEGDGRSSY

SEQ ID NO: 7795 - protein, 664 aa, Nicotiana tabacum
MAAAAAAPSPSFSKTLSSSSSKSSTLLPRSTFPFPHHPHKTTPPPLHLTPTHIHSQRRRFTISNVISTTQKVSETQKAETFVSRFAPDEPRKGSDVLVEALEREGVTDVFAYPGGASMEIHQALTRSSIIRNVLPRHEQGGVFAAEGYARATGFPGVCIATSGPGATNLVSGLADALLDSVPIVAITGQVPRRMIGTDAFQETPIVEVTRSITKHNYLVMDVEDIPRVVREAFFLARSGRPGPVLIDVPKDIQQQLVIPDWDQPMRLPGYMSRLPKLPNEMLLEQIVRLISESKKPVLYVGGGCSQSSEELRRFVELTGIPVASTLMGLGAFPTGDELSLSMLGMHGTVYANYAVDSSDLLLAFGVRFDDRVTGKLEAFASRAKIVHIDIDSAEIGKNKQPHVSICADIKLALQGLNSILESKEGKLKLDFSAWRQELTVQKVKYPLNFKTFGDAIPPQYAIQVLDELTNGSAIISTGVGQHQMWAAQYYKYRKPRQWLTSGGLGAMGFGLPAAIGAAVGRPDEVVVDIDGDGSFIMNVQELATIKVENLPVKIMLLNNQHLGMVVQWEDRFYKANRAHTYLGNPSNEAEIFPNMLKFAEACGVPAARVTHRDDLRAAIQKMLDTPGPYLLDVIVPHQEHVLPMIPSGGAFKDVITEGDGRSSY

SEQ ID NO: 7796 - protein, 559 aa, Klebsiella pneumoniae
MDKQYPVRQWAHGADLVVSQLEAQGVRQVFGIPGAKIDKVFDSLLDSSIRIIPVRHEANAAFMAAAVGRITGKAGVALVTSGPGCSNLITGMATANSEGDPVVALGGAVKRADKAKQVHQSMDTVAMFSPVTKYAIEVTAPDALAEVVSNAFRAAEQGRPGSAFVSLPQDVVDGPVSGKVLPASGAPQMGAAPDDAIDQVAKLIAQAKNPIFLLGLMASQPENSKALRRLLETSHIPVTSTYQAAGAVNQDNFSRFAGRVGLFNNQAGDRLLQLADLVICIGYSPVEYEPAMWNSGNATLVHIDVLPAYEERNYTPDVELVGDIAGTLNKLAQNIDHRLVLSPQAAEILRDRQHQRELLDRRGAQLNQFALHPLRIVRAMQDIVNSDVTLTVDMGSFHIWIARYLYTFRARQVMISNGQQTMGVALPWAIGAWLVNPERKVVSVSGDGGFLQSSMELETAVRLKANVLHLIWVDNGYNMVAIQEEKKYQRLSGVEFGPMDFKAYAESFGAKGFAVESAEALEPTLRAAMDVDGPAVVAIPVDYRDNPLLMGQLHLSQIL

SEQ ID NO: 7797 - protein, 579 aa, Arthrospira platensis
MQDQKQAVKRVTGAFALIDSLRRHGVQHIFGYPGGSNLPIYDEIYRAEQAGEIKHYLVRHEQGAAHAADGYARSTGKVGVCLATSGPGATNLVTGLATAYLDSVPVLAITGQVPRSALGTDAFQEIDIFGITLPIVKHSYLVREPSELPRIVVEAFHLAMSGRPGPVLIDIPKDVGNAQIDYIPVEPGSVRRVGYRPTERGNPRQINQALQLISEATKPLLYVGGGAIMAGAHAEIAELSERFQIPVTSTLMGKGRFDENHPLSLGIVGMLGMHGTAYANFAVMELDFVIAVGVRFDDRVAGTGDQFAHSAKVIHIDIDPAEVGKNRSTDVPIVGDVRQVLGDMLQRTYHWERKLSRNKPRNGTDLNQLREPIPLTVPHPEDGISPQDGDWELSHQCPDAFYTTDVGQHQMWAGQFVQNGPRRWMTSGGLGTMGYGLPAAVGVKVAHPHDTVTCISGDGSFQMNMQELGTIAQYGIGVKVIILNNGWLGMVRQWQHMFYNDRYEATNLEDGTPEFARLADVYGLEAMNVRQRKIYQRRLPKALSHKGPMILDVRVTRDEDCYPMVAPGHDNSDMMGLSS

SEQ ID NO: 7798 - protein, 184 aa, uncultured bacterium
QHAFPELKHVAVFDTAFHQTMPSHAYRYAIPAEYYEKHGVRRYGFHGTSYRYVAQEAGRVLNRDSNRLALVIAHLGNGASISAVLNGKSQDTSMGLTPLEGLVMGTRSGDIDPSLFSFLSENFAMSVEQTTNMLNRQSGLLGLSGLSNDCRTLEAAAKEGHAGATLALEVFAYRLAKYIGAMTV

SEQ ID NO: 7799 - protein, 212 aa, uncultured bacterium
PADLEIIDPDTIRSNYGGPMVEFRKSKGLTAEFAEEQLKDTVVLGTMMLAFDEVDGLVSGAVHTTANRICPALQLIKTTPDGGLVSSEFFMLMPDQVLVYGDCAVNPNPTLEELAIIAIQSGDSDKAFGIEPKVAMISYSSGTSGAGPDVEKVAKGEELVRIKCPDLLIDGPVQYDAASVSSVGKSKAPDSAVAGQATVFVFSDLNTGNTTY

SEQ ID NO: 7800 - protein, 226 aa, uncultured bacterium
PADLEIIDPDTIRTNYVGPMVEFRKSKGLTAEAAAEQLKDTVVLGTMMLALDEVDGLVSGAVHTTANTIRPALQLIKTTPDAGIVSSVFFMLMPDQVLVYGDCAVNPNPTSEELAIIAIQSADSAKAFGIEPKVAMISYSTGTSQAGPDVEKVAKAVELVRTKRPDLLIDGPLQYDAASVPSVGKSKAPDSAVAGQATVFVFPDLNTGNTTYKAVQRSANVLSVGP

SEQ ID NO: 7801 - protein, 224 aa, uncultured bacterium
EGPADLEIIDPDTIRTNYGGPMVEFRKSKGLTAEAAAEQLKDTVVLGTMMLALDEVDGLVSGAVHTTANTIRPALQIIKTTPDAGLVSSEFFMLMPDQVLVYGDCAVNPNPTSEELAIIAIQSADSAKAFGIEPKVAMISYKTGTSSAGPDVEKVAKAVELVRTKRPDLLIDGPLQYDAASVPSVGKSKAPDSAVAGQATVFVFPDLNTGNTTYKAVQRSANVL

SEQ ID NO: 7802 - protein, 226 aa, uncultured bacterium
PADLDIIEPDTIRTNYVGPMVEFRKSKGLTAEAAAEQLKDTVVLGTMMLALDEVDGLVSGAVHTTANTICPALQLIKTTPDAGLVSSVFFMLMPDQVLVYGDCAVNPNPTSEELAIIAIQTADSAKAFGIEPKEAMISYSTGTSGAGPDVEKVAKAVDLVRTKRPDLLIDGPLQYDAASVPSVGKSKAPDSAVAGQATVFVFSDLNTGNTTYKAVQRSANVLSVGP

SEQ ID NO: 7803 - protein, 202 aa, uncultured bacterium
HIMGIEACRSVLPNVPMAAVFDTAFHQTMPRQAYLYGLPYEYYEKYKIRRYGFHGTSHRYVTARAAQLLGKPIEQLKLISCHMGNGSSFTAVDGGKSIDTTMGLTPLEGLIMGTRSGDVDPTVVEMLMTQTGMSVADAMSVLNKKSGLLGLSAGLSSDWRDIKTNAQSGDAAAKRAAEVFAYRAKKYIGGYIAAMNGCDAIL

SEQ ID NO: 7804 - protein, 202 aa, uncultured bacterium
ANIMGIEAARKVLPNVPHCAIMDTAWHQTMPPESYLYAVPSEWYEKYQVRRYGFHGTSFLYTAKRAAVLLGKDPFKTNLIICHLGNGASVNAVKDGCSFDTSMGITPLEGLVMGTRSGDLDPALPFYVMRKTGMSAADIESALNKKSGLLGLTGQYTDRRDIQQAAVSGDKRALQAQYIEAQRVKKYIGGYQATLGRVDALV

SEQ ID NO: 7805 - protein, 203 aa, uncultured bacterium
ANIMGIEACRSVMPAVPMVAVFDTAFHQTMPRRAYLYGLPYEYYEKYKIRRYGFHGTSHRYVTTRAAQLLGKPIEQLKLISCHMGNGSSFTAVDGGKSIDTTMGLTPLEGLIMGTRSGDVDPTVVEMLMTQTGMSVADAMSVLNKKSGLLGLSAGLSSDWRDIKTNAQSGDAAAKRAAEVFAYRAKKYIGRCIAAMNGCDAIL

SEQ ID NO: 7806 - protein, 202 aa, uncultured bacterium
ANILGIEAAQAVLPNVPHCAIMDTAWHQTMPAQCYMYSVPYDWYEKYGVRRYGFHGTSFLYTAKRAAVLLGKDPLRCNLVIAHIGNGASINAVKNGVSYDTSMGLTPLEGLVMGTRSGNIDPALPMYIMRKTGLSAAAVDAILNKESGLLGISGKYADRRDIQAAAEQGDERCQLAEDMECHLLRQYIGGCFADLGGADAIV

SEQ ID NO: 7807 - protein, 203 aa, uncultured bacterium
ANIMGIEACRSVMPNVPMAAVFDTAFHQTMPRQAYLYGLPYEYYEKYKIRRYGFHGTSHRYVTARAAQLLGKPIEQLKLISCHMGNGSSFTAVDGGKSIDTTMGLTPLEGLIMGTRSGDVDPTVVEMLMTQTGMSVADAMSVLNKKSGLLGLSAGLSSDWRDIKTNAQSGDAAAKRAAEVFAYRAKKYIGGYIAAMNGCDAIL

SEQ ID NO: 7808 - protein, 201 aa, uncultured bacterium
ANLMGIRACQKSLPGVPQIAVFDTAFHQTMPDYAYFYAIPYKYYEENDIRRYGFHGTSHRYVSEEAIRLLGNPEHSKIITCHLGNGGSIAAIKDGRSVDTTMGFSPLEGLPMGTRSGSVDPAIVGFIANQENITTFEVVSILNRQSGVLGISGISSDFRDLGEAAKEGNSRARLALEVFEYNVSKYIGSYIAVLGGVDAIV

SEQ ID NO: 7809 - protein, 202 aa, uncultured bacterium
TNLLGIAACKELMPGTPQVAVFDTAFHQTMPPESYIYAIPYEYYTKYGIRRYGFHGTSHKYVAERAADMLGVNIADLKLITCHLGNGASVSAIKRGKCIDTSMGFTPLAGLAMGTRSGSIDPAIISFIADKENLSADEVLDILNKKSGMLGISGISSDFRDIADAIEDGNIRAELALKVFAHRVRYYIGAYIAEMNGVDAIV

SEQ ID NO: 7810 - protein, 203 aa, uncultured bacterium
ANIMGIEACRSVMPNVPMAAVFDTAFHQTMPRRAYLYGLPYEYYEKYKIRRYGFHGTSHRYVTARAAQLLGKPIEQLKLISCHMGNGSSFTAVDGGKSIDTTMGLTPLEGLIMGTRSGDVDPTVVEMLMTQTGMSVADAMSVLNKKSGLLGLSAGLSSDWRDIKTNAQSGGEAAKRAAEVFAYRAKKYIGGSIAAMNGCDAIL

SEQ ID NO: 7811 - protein, 203 aa, uncultured bacterium
ANIMGIEACRSVMPNVLMAAVFDTAFHQTMPRRAYLYGLPYEYYEKYKIRRYGFHGTSHRYVTARAAQLLGKPIEQLKLISCHMGNGSSFTAVDGGKSIDTTMGLTPLEGLIMGTRSGDVDPTVVEMLMTQTGMSVADAMSVLNKKSGLLGLSAGLSSDWRDIKTNAQSGGEAAKRAAEVFAYRAKKYIGGSIAAMNGCDAIL

SEQ ID NO: 7812 - protein, 200 aa, uncultured bacterium
NLVGIVAAKNLLPNATQVAVFDTAFHQTMPDFAYRYAVPAAWYKELGVRKYGFHGTSHLYVSKRAAAMLGKPAEECNFVSMHIGNGASACAIRGGISVDTSMGMTPLSGLTMGTRPGDIDPGVVLYVMDRLGLTTKEMNAHLNKGSGHLGVTECFFDRRELEGNKDTNDFCKLSLNIEALNAKKYIGGYMAELGRVDALI

SEQ ID NO: 7813 - protein, 203 aa, uncultured bacterium
ANIMGIEACRSVMPNVPMVAVFDTAFHQTMPRQAYLYGLPYEYYEKYKIRRYGFHGTSHRYVTARAAQLLGKPIEQLKLISCHMGNGSSFTAVDGGKSIDTTMGLTPLEGLIMGTRSGDVDPTVVEMLMTQAGMSVADAMSVLNKKSGLLGLSAGLSSDWRDIKTNAQSGGEAAKRAAEVFAYRAKKYIGGGIAAMNGCDAIL

SEQ ID NO: 7814 - protein, 203 aa, uncultured bacterium
ANIMGIEACRSALTNVPMVAVFDTAFHQTMPRQAYLYGLPYEYYEKYKIRRYGFHGTSHRYVTARAAQLLGKPIEQLKLISCHMGNGSSFTAVDGGKSIDTTMGLTPLEGLIMGTRSGDVDPTVVEMLMTQTGMSVADAMSVLNKKSGLLGLSAGLSSDWRDIKTNAQSGGEAAKRAAEVFAYRAKKYIGGYIAAMNGCDAIL

SEQ ID NO: 7815 - protein, 202 aa, uncultured bacterium
TGVLGMKAAIAPLPDIPHVAIFDTAFFSTLPPEAYTYAIHAPTATQYKIRKYGFHGTSHSYVSKKVAEVLGRDVTSFNQIVCHLGNGASISAVAGGVAVDTSMGLTPLAGLVMGTRSGDVDPGVFAYLQREAGLDSQAVDTLLNKQSGMAGLADGSSDFRDIATKIAAGDADAKLAYDVYLHRLVSYIGSYLAILGRTDAIT

SEQ ID NO: 7816 - protein, 201 aa, uncultured bacterium
ANLLGIRACQKAMPGVKQVAVFDTAFHQTMPEKAYTYAIPYEYYTKYNVRRYGFHGTSHRYVSGEAIKMLGGKPNSRIITCHLGNGSSVAAILDGKCVDTSMGLTPLEGLPMGTRSGSIDPAIIEFIANHEDLTREEIFDILNKKSGVLGISGVSSDFRDIEGEAEKGNHRAQLSLDVFRYNVAKYIGREFAALGGADAMY

SEQ ID NO: 7817 - protein, 212 aa, uncultured bacterium
ANITGIEACKSVMPNVPMVAVFDTAFHQTMPRRAYLYAIPYEDYENLKIRRYGFHGTSHKYVSERAAKLLGKPASELKIITCHMGNGSSITAVDGGKSVDTSMGLTPLEGVVMGTRSGDVDAAVVQMLANAKHIDADGALNILNKKSGLLGLSAGKYSDWRDVKQSAQSGELEGVRTAEVFAYRVKKYIGSYIAAMNGVDAIVFTGGIGENS

SEQ ID NO: 7818 - protein, 203 aa, uncultured bacterium
ANIMGIEACRSALPNVPMAAVFDTAFHQTMPRQAYLYGLPYEYYEKYKIRRYGFHGTSHRYVTARAAQLLGKPIEQLKLISCHMGNGSSFTAVDGGKSIDTTMGLTPLEGLIMGTRSGDVDPTVVEMLMTQTGMSVADAMSVLNKKSGLLGLSAGLSSDWRDIKTNAQSGDAAAKRAAEVFAYRAKKYIGGYIAAMNGCDAIL

SEQ ID NO: 7819 - protein, 203 aa, uncultured bacterium
ANIMGIEACRSPLPNVPMVAVFDTAFHQTMPRQAYLYGLPYEYYEKYKIRRYGFHGTSHRYVTARAAQLLGKPIEQLKLISCHMGNGSSFTAVDGGKSIDTTMGLTPLEGLIMGTRSGDVDPTVVEMLMTQTGMSVADAMSVLNKKSGLLGLSAGLSSDWRDIKTNAQSGGEAAKRAAEVFAYRAKKYIGGYIAAMNGCDAIL

SEQ ID NO: 7820 - protein, 203 aa, uncultured bacterium
SNIMGIEACRSALPNVPMAAVFDTAFHQTMPRRAYLYGLPYEYYEKYKIRRYGFHGTSHRYVTARAAQLLGKPIEQLKLISCHMGNGSSFTAVDGGKSIDTTMGLTPLEGLIMGTRSGDVDPTVVEMLMTQTGMSVADAMSVLNKKSGLLGLSAGLSSDWRDIKTNAQSGGEAAKRAAEVFAYRAKKYIGGYIAAMNGCDAIL

SEQ ID NO: 7821 - protein, 194 aa, uncultured bacterium
ANIMGIEACRSVMPNVPMAAVFDTAFHQTMPRRAYLYGLPYEYYEKYKIRRYGFHGTSHRYVTARAAQLLGKPIEQLKLISCHMGNGSSFTAVDGGKSIDTTMGLTPLEGLIMGTRSGDVDPTVVEMLMTQTGMSVADAMSVLNKKSGLLGLSAGLSSDWRDIKTNAQSGGEAAKRAAEVFAYRAKKYIGEDIA

SEQ ID NO: 7822 - protein, 194 aa, uncultured bacterium
ANIMGIEACRSALPAVPMVAVFDTAFHQTMPRRAYLYGLPYEYYEKYKIRRYGFHGTSHRYVTTRAAQLLGKPIEQLKLISCHMGNGSSFTAVDGGKSIDTTMGLTPLEGLIMGTRSGDVDPTVVEMLMTQTGMSVADAMSVLNKKSGLLGLSAGLSSDWRDIKTNAQSGDAAAKRAAEVFAYRAKKYIGSYIA

SEQ ID NO: 7823 - protein, 200 aa, uncultured bacterium
ESEGIHAIRNILPETPQVAVFDTAFHQTMPDYAYMYGLPYEMYTDCGVRRYGFHGTSHRYVSARACKILGVPCETRRIITAHIGNGGSVTAIQNGKSVDTSMGLTPVEGLLMGTRCGDIDAGVLPFLMNKLGLDAAGLSDLINKRSGVLGVSGVSSDMRELEKAVRENNPRAVLAMKMYTSRVKKYIGAYAATLGGVDIL

SEQ ID NO: 7824 - protein, 201 aa, uncultured bacterium
ANIIGIEAAKKVLPNVPHCAVMDTAWHQTMPPETFLYAVPYEWYEKYSVRRYGFHGTSFLYTAKRAAVLLGKDPFKTNLIICHLGNGASINAVKDGCSFDTSMGLTPIEGLVMGTRPGDADLAMPFYVMKKSGMSSSEIETALNKKSGLLGITGKYSDRRDIEKAKQEGDARAELSQNMEAHRVKKYIGGYQAILGRVDAL

SEQ ID NO: 7825 - protein, 201 aa, uncultured bacterium
ANLMGIRACQKSMPGVPQIAVFDTAFHQTMPDYAYFYAIPYKYYEENDIRRYGFHGTSHRYVSEEAIRLLGNPEHSKIITCHLGNGGSIAAIKDGRSVDTTMGFSPLEGLPMGTRSGSVDPAIVGFIANQENITTFEVVSILNRQSGVLGISGISSDFRDLGEAAKEGNSRARLALEVFEYNVSKYIGSCIAVLGGVDAIV

SEQ ID NO: 7826 - protein, 196 aa, uncultured bacterium
ANIMGIEACRSVMPNVPMAAVFDTAFHQTMPRRAYLYGLPYEYYEKYKIRRYGFHGTSHRYVTARAAQLLGKPIEQLKLISCHMGNGSSFTAVDGGKSIDTTMGLTPLEGLIMGTRSGDVDPTVVEMLMTQTGMSVADAMSVLNKKSGLLGLSAGLSSDWRDIKTNAQSGGEAAKRAAEVFAYRAKKYIGGCIAAM

SEQ ID NO: 7827 - protein, 201 aa, uncultured bacterium
ANLLGIRACQKALPGVKQVAVFDTAFHQTMPEKAYTYAIPYEYYTKYNVRRYGFHGTSHRYVSGEAIKMLGGKPNSRIITCHLGNGSSVAAILDGKCVDTSMGLTPLEGLPMGTRSGSIDPAIIEFIANHEDLTREEIFDILNKKSGVLGISGVSSDFRDIEGEAEKGNHRAQLSLDVFRYNVAKYIGSYFAALGGADAIV

SEQ ID NO: 7828 - protein, 202 aa, uncultured bacterium
ANIMGIEAVTEVLPRVSQVGVFDTAFHQTMPEKAYIYPIPYGYYEKYGVRRYGFHGTSHFYVANRTAEILGKPIERLKIITCHMGNGSSITAVDGGKSVDTSMGFTPLAGIAMGTRSGDLDPAIFSFIAETEKLSVKDVDSLFNKKSGLLGISGISSDLRDIEEAAARNEPRAKLALHVLAYGAKKYIGACAAAMGGLDVIV

SEQ ID NO: 7829 - protein, 202 aa, uncultured bacterium
TNLLGIAACKELLPGTPQIAVFDTAFHQTMPPESYIYAIPYEYYTKYGIRRYGFHGTSHKYVAERAADMLGVNIADLKLITCHLGNGASVSAIKRGKCIDTSMGFTPLAGLAMGTRSGSIDPAIISFIADKENLSADEVLDILNKKSGMLGISGISSDFRDIADAIEDGNIRAELALKVFAHRVRYYIGAYIAEMNGVDAIV

SEQ ID NO: 7830 - protein, 203 aa, uncultured bacterium
NNIMGIEACRSALPNVPMAAVFDTAFHQTMPRQAYLYGLPYEYYEKYKIRRYGFHGTSHRYVTARAAQLLGKPIEQLKLISCHMGNGSSFTAVDGGKSIDTTMGLTPLEGLIMGTRSGDVDPTVVEMLMTQTGMSVADAMSVLNKKSGLLGLSAGLSSDWRDIKTNAQSGDAAAKRAAEVFAYRAKKYIGGYIAAMNGCDAIL

SEQ ID NO: 7831 - protein, 199 aa, uncultured bacterium
ANLKGITACRKAMPGVPQVATFDTSFHQTMPEHAYIYAIPYEYYEKYNVRRYGFHGTSHRYVSEEAIRMLGGAAEGTRIITCHCGNGTSIAAIRDGKCIDTSMGLTPLEGVPMGTRSGSIDPAIIEFVANNEGLTREEIFEVLNKKSGVLGVSGVNSDFRFVEAAASDPSHPNQKRAQLALNIFYYDVAKYVASYYAIL

SEQ ID NO: 7832 - protein, 203 aa, uncultured bacterium
ANIMGIEACRSVMPNVPMAAVFDTAFHQTMPRRAYLYGLPYEYYEKYKIRRYGFHGTSHRYVTARAAQLLGKPIEQLKLISCHMGNGSSFTAVDGGKSIDTTMGLTPLEGLIMGTRSGDVDPTVVEMLMTQTGMSVADAMSVLNKKSGLLGLSAGLSSDWRDIKTNAQSGDAAAKRAAEVFAYRAKKYIGGCIAAMNGCDAIL

SEQ ID NO: 7833 - protein, 196 aa, uncultured bacterium
ANIMGIEACRSVMPNVPMAAVFDTAFHQTMPRQAYLYGLPYEYYEKYKIRRYGFHGTSHRYVTARAAQLLGKPIEQLKLISCHMGNGSSFTAVDGGKSIDTTMGLTPLEGLIMGTRSGDVDPTVVEMLMTQTGMSVADAMSVLNKKSGLLGLSAGLSSDWRDIKTNAQSGDAAAKRAAEVFAYRAKKYIGGCIAAM

SEQ ID NO: 7834 - protein, 203 aa, uncultured bacterium
PNIMGIEACRSAMPNVPMAAVFDTAFHQTMPRQAYLYGLPYEYYEKYKIRRYGFHGTSHRYVTARAAQLLGKPIEQLKLISCHMGNGSSFTAVDGGKSIDTTMGLTPLEGLIMGTRSGDVDPTVVEMLMTQTGMSVADAMSVLNKKSGLLGLSAGLSSDWRDIKTNAQSGDAAAKRAAEVFAYRAKKYIGGYIAAMNGCDAIL

SEQ ID NO: 7835 - protein, 202 aa, uncultured bacterium
PGVLGMKAAIAVLPDIPHVAIFDTAFFSTLPPEAYTYAIHAPTATQCKIRKYGFHGTSHSYVSKKVAEVLGRDVTSFNQIVCHLGNGASISAVAGGVAVDTSMGLTPLAGLVMGTRSGDVDPGVFAYLQREAGLDSQAVDTLLNKQSGMAGLADGSSDFRDIATKIAAGDADAKLAYDVYLHRLVSYIGSYLAILGRTDAIT

SEQ ID NO: 7836 - protein, 203 aa, uncultured bacterium
ANIMGIEACRSPMPNVPMVAVFDTAFHQTMPRQAYLYGLPYEYYEKYKIRRYGFHGTSHRYVTARAAQLLGKPIEQLKLISCHMGNGSSFTAVDGGKSIDTTMGLTPLEGLIMGTRSGDVDPTVVEMLMTQTGMSVADAMSVLNKKSGLLGLSAGLSSDWRDIKTNAQSGGEAAKRAAEVFAYRAKKYIGGYIAAMNGCDAIL

SEQ ID NO: 7837 - protein, 203 aa, uncultured bacterium
ANIMGIEACRSVMPAVPMVAVFDTAFHQTMPRRAYLYGLPYEYYEKYKIRRYGFHGTSHRYVTTRAAQLLGKPIEQLKLISCHMGNGSSFTAVDGGKSIDTTMGLTPLEGLIMGTRSGDVDPTVVEMLMTQTGMSVADAMSVLNKKSGLLGLSAGLSSDWRDIKTNAQSGDAAAKRAAEVFAYRAKKYIGRSIAAMNGCDAIL

SEQ ID NO: 7838 - protein, 202 aa, uncultured bacterium
KNLEGIHAIRNTLPETPQVAVFDTAFHQTMPDYAYMYGLPYEMYTDCGVRRYGFHGTSHRYVSARACKILGVPCETRRIITAHIGNGGSVTAIQNGKSVDTSMGLTPVEGLLMGTRCGDIDAGVLPFLMNKLGLDAAGLSDLINKRSGVLGVSGVSSDMRELEKAVRENNPRAVLAMKMYTSRVKKYIGAYAATLGGVDILV

SEQ ID NO: 7839 - protein, 202 aa, uncultured bacterium
PNLLGIEACAELMPGTPQVAVFDTAFHQTMPPESYIYAIPYEYYTKYGIRRYGFHGTSHKYVAERAADMLGVNIADLKLITCHLGNGASVSAIKRGRCIDTSMGFTPLAGLAMGTRSGSIDPAIISFIADKEGRSADEVLTILNKESGMLGISGISSDFRDIADAIEEDNARAELALKVFAHRVRYYIGASIAEMNGVDAII

SEQ ID NO: 7840 - protein, 203 aa, uncultured bacterium
ANIMGIEACRSVMPNVPMAAVFDTAFHQTMPRRAYLYGLPYEYYEKYKIRRYGFHGTSHRYVTARAAQLLGKPIEQLKLISCHMGNGSSFTAVDGGKSIDTTMGLTPLEGLIMGTRSGDVDPTVVEMLMTQTGMSVADAMSVLNKKSGLLGLSAGLSSDWRDIKTNAQSGGEAAKRAAEVFAYRAKKYIGGCIAAMNGCDAIL

SEQ ID NO: 7841 - protein, 193 aa, uncultured bacterium
ANLLGIRACQKAMPGVKQVAVFDTAFHQTMPEKAYTYAIPYEYYTKYNVRRYGFHGTSHRYVSGEAIKMLGGKPNSRIITCHLGNGSSVAAILDGKCVDTSMGLTPLEGLPMGTRSGSIDPAIIEFIANHEDLTREEIFDILNKKSGVLGISGVSSDFRDIEGEAEKGNHRAQLSLDVFRYNVAKYIGRYFAA

SEQ ID NO: 7842 - protein, 203 aa, uncultured bacterium
ANIMGIEACRSVMPNVPMAAVFDTAFHQTMPRQAYLYGLPYEYYEKYKIRRYGFHGTSHRYVTARAAQLLGKPIEQLKLISCHMGNGSSFTAVDGGKSIDTTMGLTPLEGLIMGTRSGDVDPTVVEMLMTQTGMSVADAMSVLNKKSGLLGLSAGLSSDWRDIKTNAQSGDAAAKRAAEVFAYRAKKYIGGSIAAMNGCDAIL

SEQ ID NO: 7843 - protein, 202 aa, uncultured bacterium
ANILGIEAAQAVLPNVPHCAIMDTAWHQTMPAQCYMYSVPYDWYEKYGVRRYGFHGTSFLYTAKRAAVLLGKDPLRCNLVIAHIGNGASINAVKNGVSYDTSMGLTPLEGLVMGTRSGNIDPALPMYIMRKTGLSAAAVDAILNKESGLLGISGKYADRRDIQAAAEKGDARCQLAEDMECHLLRQYIGGCFADLGGADAIV

SEQ ID NO: 7844 - protein, 206 aa, uncultured bacterium
KNLKGIVACQKALPGTPQVATFDTSFHQTMPEHAYIYAIPYEYYEKYNVRRYGFHGTSHRYISEEAIRMLGGEVNGTKIITCHCGNGSSIAAIKDGKCIDTSMGLTPLEGVPMGTRSGSIDPAIIEFVANNEGLTREEIFEVLNKKSGVLGVSGVNSDFRFVEAAANDPAHPNQKRAQLALDIFYYDVAKYVASYYAILGGADAIV

SEQ ID NO: 7845 - protein, 190 aa, uncultured bacterium
ANIMGIEACRSVMPNVPMAAVFDTAFHQTMPRQAYLYGLPYEYYEKYKIRRYGFHGTSHRYVTARAAQLLGKPIEQLKLISCHMGNGSSFTAVDGGKSIDTTMGLTPLEGLIMGTRSGDVDPTVVEMLMTQTGMSVADAMSVLNKKSGLLGLSAGLSSDWRDIKTNAQSGDAAAKRAAEVFAYRAKKYIG

SEQ ID NO: 7846 - protein, 464 aa, Humulus lupulus
MGRSPCCEKVGLKKGPWTPEEDQKLLAYIEEHGHGSWRALPAKAGLQRCGKSCRLRWTNYLRPDIKRGKFSLQEEQTIIQLHALLGNRWSAIATHLPKRTDNEIKNYWNTHLKKRLTKMGIDPVTHKPKIDALGSGSGNPKDAANLSHMAQWESARLEAEARLVRESKLLVTNNIVNNSNNNNNNNNSNSNNIAVLPHNHNHQLGSAPAHHFMNKPGGAIAPPPCLDVLKAWQGAWTKSSNSSRDCNTLAGMMAVDDLESPTSTLNFPDANHSYTRINNQTTTTVGGGFGTNTTTDHDQTDNVDGWKSCYGTTTTNTPTKVAMSDHNHNNNHMAVAPPTPPEFKERNMEHANTMSLQDIAFACSHDGGAWFVDHGFRAGATMDGTSDSVAVPTVALSNIIEGFTDAFMYNSEQEPNSAVVDVVGDGENSNDGSCGASGIFEENKNYWNSILNLVNTSPSGSPVF

SEQ ID NO: 7847 - protein, 317 aa, Herbaspirillum seropedicae
MALENLMVFTGNANPELARGVAEKLGIPLGKANVSKFSDGEVMVEINENVRGKDVFVLQSTCAPTNDNLMEIMIMVDALKRASAGRITAAIPYYGYARQDRRPRSARVAISAKVVANMLQEAGVERVLIMDLHADQIQGLLRYPGGQHLRFAHPAGRPGQQELRRPAGGLARRRRRGARPCAGQCCLNCDLAIIDKRRPKANVSEVMNIIGEVEGRNCVIMDDMVDTAGTLTKAAEVLKERGAKKVVAYCTHPVLSGPAIERIANSPLDELVVTDTIPLSPAARGCPKVRQLTCADLLAETFKRITKGDSVMSLFAE

SEQ ID NO: 7848 - protein, 770 aa, Herbaspirillum seropedicae
MDSMISKKEEVRQQLRQAALDYHEFPTPGKIAVTPTKLLTNQRDLSLAYSPGVAAACEEIVADPLNAFRYTARGNLVAVISNGTAVLGLGNIGALASKPVMEGKGVLFKKFAGIDVFDIEVNETDPDKLIDVIAALEPTFGGINLEDIKAPECFYIERKLREKMKIPVFHDDQHGTAIIVGAAILNGLKVVGKDIKNVKLVVSGAGAAALACLDLIVDLGFPIENIYVTDLAGVVYKGRKELMDPDKERFARETEARTLAEVIPDADIFLGLSAAGVLKPEMVKQMAARPLVLALANPTPEILPEEVKAVRDDAIIATGRSDYPNQVNNVLCFPYIFRGALDSGATTITREMEIATVHAIAELAQAEQSDIVATTYGIANLSFGPEYIIPKPFDPRLMIKIAPAVARAAESSGVAARPIQDMDAYIEKLEQFVYHSGTFMRPIFQVAKKAAEAKKRIVYAEGEEERVLRAVQVIVDENLAKPILVGRPEVLEQRIQKFGLRLRAGTDFEVINPNFDNRYRDYWQTFLEMSRRKGVTEQYAKLEMRRRHTLIGSMAIHKGDADGMICGTYGTTQLHLHYIDQVLGKREGVNVYAAMNAVILPNRQLVMVDTHVNENPNARELAEITMLAAEEMRRFGLHPRAALLSHSNFGSSNSESARKMREALAILREIAPELEVDGEMHGDTALDSKLLNAVIPDSPLKGDANLLVMPNIDAANIAYNLLKTASGNGVAIGPILLGCAKPVHILTPSATVRRIINMTALCVMDALSER

SEQ ID NO: 7849 - protein, 758 aa, Herbaspirillum seropedicae
MTQQISAAEQLLRDAAREYHRTPSRGKIEVRPTKPLSNQRDLSLAYSPGVAYPCLDIEADPLKAFDYTSRGNLVAVISNGTAVLGLGNIGPLASKPVMEGKGCLFKKFAGVDVFDIELAENDPDKLVEIIASLEPTLGGINLEDIKAPECFYIEQKLSARMNIPVFHDDQHGTAIISSAALLNGLELVGKDIGKVKIAVSGAGAAAIACVEVMIGLGVKRENVYMVDSKGVIYEGRPGGLDASKQRYAIKTEARTLADVVNGADVFLGCSAPGVLSAEMVKTMADKPIILALANPEPEIRPELAKSVRPDCIIATGRSDYPNQVNNVLCFPYIFRGALDCGATKITEAMKLACVREIADLAKAETSAEVSAAYPGKELVFGADYLIPTPFDSRLILKIAPAVAKAAAESGVATRPIKDYDAYRAELTRFIYQTGMFMQPVFNTAKVAPQRVVYADGQDERVLRAVQFVADEGLAAPILVGAPAAIEAGIKKAGLRIKIGQNVQVIDPATDARVAQYAAQYKDGGEADVRASGSLLAALMVKAGDADAMLCGLDGNYDGHLAHVEKVIGLKQGAQEFAALNAVLLPDQTLFITDTYVNDTPDAEQLARIAQAAAEEVARFGVPPKVAFLSHSNRGSSSRPSARKMAAAHEAFKKLAPEVESAGELHGDAALSEKIRNNAGLADSGLTGAANVLVCPNLDAANILFNVLKTSSGQGTTIGPILLGAAAPVHVLTPSSTVRRVINMTALAAAKAQDGKSKA

SEQ ID NO: 7850 - protein, 326 aa, Herbaspirillum seropedicae
MKPKIFVARAVFPEVLARLEQHFEVESNQDDRIYSAAELQAKAQGKDGLFTTPSEPVTAALFAANPQLKAVCNMAVGYNNIDVAAATQAGVMATNTPDVLNETTADFGWALMMAAARRITESEHFLRAGKWKKWSYDSFVGPDIHGATLGIIGMGRIGQAIARRSLGFDMQVLYHNRSRLAPELEARANHARYVSKEELLRQADHVILVLPYSKDTHHTIAAAELALMKPTATLTNIARGGIVDDAALIAALREGRIAAAGVDVFENEPAFKPEFLDLSNVVLTPHIASASTPTRLAMANCAADNLIAALSGQRPPNLLNPDVVKG

SEQ ID NO: 7851 - protein, 444 aa, Herbaspirillum seropedicae
MSNILQSVPVNQKVGIAFSGGLDTSAALTWMRQKGAIPYAYTANLGQPDEPDYDAIPKKAMQYGAQQARLIDCREQLANEGIAALQSGAFHISTAGITYFNTTPLGRAVTGTMLVSAMREDNVDIWGDGSTYKGNDIERFYRYGLLVNPNLKIYKPWLDSTFIDELGGRKEMSEFMIKSGFDYKMSVEKAYSTDSNMLGATHEAKDLEFLNSGIKIVQPIMGVAFWRDDVEVKAETVTVRFEEGRPVALNGKTFASMTELILEANRIGGRHGLGMSDQIENRIIEAKSRGIYEAPGLALLFIAYERLVTGIHNEDTIEQYRDNGRKLGRLLYQGRWFDSQAIMLRETAQRWVARAITGEVTVELRRGNDYSILNTESPNLTYHPERLTMEKGEGSFSAIDRIGQLTMRNLDIADTRQKLAIYQNTGLLESSTAVSLPLLGKDEK

SEQ ID NO: 7852 - protein, 861 aa, Herbaspirillum seropedicae
MRLDKLTTKLQEALADAQSQAVGHDNQYIEPVHLILALLNQEDGGARSLLQRAGVNVNGLSAALQAAVKRLPQVSGNGGEVQVGRELVALLNLADKEAQKHGDQFVASEMVLLGLVDDKSDAGRAARENGLTRKSLEAAITAVRGGASVSSQQDEGQREALKKYTLDLTERARAGKLDPVIGRDDEIRRAIQVLQRRSKNNPVLIGEPGVGKTAIVEGLAQRIVNGEVPDSLKSKRVLSLDMAALLAGAKYRGEFEERLKAVLKEIAQDEGQTIVFIDELHTMVGAGYAEGAMDAGNMLKPALARAELHCVGATTLDEYRQYIEKDAALERRFQKILVDEPSVEATIAILRGLQEKYEVHHGVDITDPAIVAAAELSHRYITDRFLPDKAIDLIDEAASKIKIEIDSKPEVMDKLDRRLIQLKIEREAVKREKDEASQKRLQLIEEEIEKLEREYADLEEIWKAEKSSAQGGQQLKEEIEKVRLQMEEATRKSDWQKVSELKYGKLAELEAALEVQNKKDAAGVKTEKPKLVRTQVGAEEIAEIVARATGIPVSRMMQGEREKLLHMEDVLHERVVGQDEAIVAVSDAIRRSRAGLGDPSKPYGSFMFLGPTGVGKTELCKALASYLFDTEEAMIRIDMSEFMEKHSVARLIGAPPGYVGYEEGGYLTEAVRRKPYSVILLDEIEKAHPDVFNVLLQVLDDGRMTDGQGRTVDFKNTVIVMTSNLGSHKIQSMEDSDPALVKLAVMAEVRTHFRPEFINRVDEIVVFHALDAKNIGAIAKIQLRILEQRLAKLEIGLEISEAGLQKIAEAGFDPVYGARPLKRAIQQEIENPLSKQILAGKFGPKDVVRVDVDHGQLSFSK

SEQ ID NO: 7853 - protein, 398 aa, Herbaspirillum seropedicae
MSKQLQDAYIVAATRTPIGKAPRGMFKNTRPDDLLVRAIQSAVAQVPGLDPKLIEDAIVGCSFPEGAQGLNMARNAVLLAGLPNTIGGVTINRYCASGITAIAMAADRIRVGEADVMIAAGAESMSMVPMMGFHPSININAFKDENVGMAYGMGLTAEKVAQQWKVSREAQDEFSLASHQKAIAAQEAGEFADEMTSFEIVERFPNLATGEIDVKTRTVSLDEGPRADSNLAALAKLKPVFAAKGSVTAGNSSQTSDGAGALIIVSEKILKQFNLTPLARFVSFAVRGVPPEIMGIGPKEAIPAALKAGGLTQDQIDWIELNEAFAAQALAVIGDLGLDPSKVNPMGGAIALGHPLGATGAIRAATTIHALRRKNLKYGMVTMCVGTGMGAAGIFERV

SEQ ID NO: 7854 - protein, 391 aa, Herbaspirillum seropedicae
MDDVVIVAAQRTAIGKFGGALSKIAAADLGAQVIKALLAKTGIKPEAISEVILGQVLTAGLGQNPARQSVIKSGLPDMVPAFVVGKVCGSGLKAVQLAAQAIRCGDAQIVIAGGQENMSASPHVLNNSRDGFRMGDAKLTDTMIVDGLWDVYNQYHMGITAENVAKKFEISREEQDAFAAASQNKAEAAQKAGKFKDEIVPIEIKGKKETVVFDTDEFVKHGVTAESLATLRPAFDKAGTVTAGNASGINDGAAAVVVTSAKLAAELGLPVLAKIKAYSSAGLDPSIMGMGPVPASQLTLKKAGWTPQDLDLMEINEAFAAQAIAVNKQMGWDTSKINVNGGAIALGHPIGASGCRVLVTLLHEMVRRDAKKGLASLCIGGGMGVALAVER

SEQ ID NO: 7855 - protein, 342 aa, Herbaspirillum seropedicae
MSVTDDKTTPASFSAGAARRAIELARQTLQIEADAILALKNRLGDDASEPLAQAVHLLLQCNGRAVVSGIGKSGHIGRKIAATLASTGTPSLFMHPAEAAHGDLGMVTPNDVFIAISNSGETGELMAIMPIVKRMGAVIIAMTGNDNSSLARMANVHLNVGVDKEACTLNLAPTASTTATLAMGDALAVSLLDARGFLEEDFARSHPGGALGRRLLTHVRDVMRSGDAIPAVSPDVSLSQALMEITRKGMAMTAVVDADFRPIGVFTDGDLRRLLERGQDFSQFRIAEIMHANPRTVNQDQLAVDAVQLMEEFRINQLLVTDAQGVLTGALHIHDLTRAKVI

SEQ ID NO: 7856 - protein, 479 aa, Glomus intraradices
MSAPAAAPAAEPNPFDGVNITELIANVSALSSVNDIDQGHTAWIMMSTALVFIMIPGVGYFYSGMARSKNALSLIMLSVLSLAVVSIQWWAIGFSLAFGPGTSGYIGNLNYAFFMGVGTEPLNGAVKIPGIVFAMYQCMFAAITPALAIGSAAERGRIFPSIVFIFIWSTIVYDPIAYWTWNLNGWSAKMGGLDFAGGTPVHISSGAAALAYCLILGKRTSHGTDEFKPHNIANVVLGTVLLWFGWFGFNGGSALNSTSRAAMAIAVTNLSAAVGGLTWCLLDYRLEKKLSALAFCSGAVAGLVAITPGSGYVGTPAAVAFGFIAGICCNLAVKLKHIFDFDDALDVFAVHGVGGVIGNILTAIFAEQKIVALDETVLPGGWLNQHWIQMGHQLADSVTGVAYSFVVTYLILFIMDKIPGLSLRADPESEAKGLDETELGELAYYHVDRLVAVNTRTGETKPVKEETIPQQNDANATIV

SEQ ID NO: 7857 - protein, 356 aa, Lotus japonicus
MSLLSDLINLNLSETTDKIIAEYIWIGGSGLDMRSKARTLPGPVSDPSQLPKWNYDGSSTGQAPGEDSEVILYPQAIFRDPFRRGSNILVICDAYTPAGEPIPTNKRHAAAKVFSHPDVVAEVPWYGIEQEYTLLQKEVNWPVGWPIGGFPGPQGPYYCGIGADKAFGRDIVDAHYKACLYAGVNISGINGEVMPGQWEFQVGPSVGISAGDEVWVARYILERITEIAGVVLSFDPKPIKGDWNGAGAHTNYSTKTMREDGGYEVIKKAIDKLGLRHKEHIAAYGEGNERRLTGRHETADINTFLWGVANRGASIRVGRDTEKEGKGYFEDRRPASYMDPYVVTSMIADTTILWKP

SEQ ID NO: 7858 - protein, 642 aa, Xanthomonas campestris pv. campestris
MGKIIGIDLGTTNSCVAIMDGGKARVIENSEGDRTTPSIVAYTKDGEVLVGASAKRQAVTNPKNTFYAVKRLIGRKFTDGEVQKDISHVPYGILAHDNGDAWVQTSDSKRMAPQEISARVLEKMKKTAEDFLGEKVTEAVITVPAYFNDSQRQATKDAGRIAGLDVKRIINEPTAAALAYGLDKNGGDRKIAVYDLGGGTFDVSIIEIAEVDGEKQFEVLATNGDTFLGGEDFDNRVIEYLVDEFNKDQGIDLRKDPLALQRLKDAAERAKIELSTSQQTEVNLPYVTADASGPKHLNIKLTRAKLEALVEDLVKKSIEPCRTALNDAGLRASDINEVILVGGQTRMPKVQQAVADFFGKEPRKDVNPDEAVAVGAAIQGGVLAGDVKDVLLLDVTALSLGIETMGGVFTKIIEKNTTIPTKASQTFSTAEDNQSAVTVHVLQGEREQARFNKSLAKFDLSGIEPAPRGMPQVEVSFDIDANGILHVSAKDKKTNKEQKVEIKAGSGLSDEEIQRMVADAEANREEDKKFQELVQTRNQADGLIHATRTAITEHGSKVGGDVIGKVEAALADLETAMKGDDKAQIEARSKTLEEAGQSLYAAAAAAEQGGNADAASGNAQASKAADDVVDAEFTEVKDDKKA

SEQ ID NO: 7859 - protein, 602 aa, Escherichia coli O157:H7 EDL933
MSLAANCLSKIGRLMCFTHFFRQTVRQAMEMLSGAEMVVRSLIDQGVKQVFGYPGGAVLDIYDALHTVGGIGHVLVRHEQAAVHMADGLARATGEVGVVLVTSGPGATNAITGIATAYMDSIPLVVLSGQVATSLIGYDAFQECDMVGISRPVVKHSFLVKQTEDIPQVLKKAFWLAASGRPGPVVVDLPKDILNPANKLPYVWPESVSMRSYNPTTTGHKGQIKRALQTLVAAKKPVVYVGGGAITAGCHQQLKETVEALNLPVVSSLMGLGAFPATHRQALGMLGMHGTYEANMTMHNADVIFAVGVRFDDRTTNNLAKYCPNATVLHIDIDPTSISKTVTADIPIVGDARQVLEQMLELLSQESAHQPLDEIRDWWQQIEQWRARQCLKYDTHSEKIKPQAVIETLWRLTKGGAYVTSDVGQHQMFAALYYPFDKPRRWINSGGLGTMGFGLPAALGVKMALPEETVVCVTGDGSIQMNIQELSTALQYELPVLVVNLNNRYLGMVKQWQDMIYSGRHSQSYMQSLPDFVRLAEAYGHVGIQISHPQELESKLSEALEQVRNNRLVFVDVTVDGSEHVYPMQIRGGGMDEMWLSKTERT

SEQ ID NO: 7860 - protein, 244 aa, Escherichia coli O157:H7 EDL933
MRQLFREFSRDSLHSDKKYILRMVMELYLDTSDVVAVKALSRIFPLAGVTTNPSIIAAGKKPLEVVLPELHEAMGGQGRLFAQVMATTAEGMVNDARKLRSIIADIVVKVPVTTEGLAAIKMLKAEGIPTLGTAVYGAAQGLLSALAGAEYVAPYVNRIDAQGGSGIQTVTDLHQLLKMHAPRAKVLAASFKTPRQALDCLLAGCESITLPLDVAQQMISYPAVDAAVAKFEQDWQGAFGRTSI

SEQ ID NO: 7861 - protein, 356 aa, Escherichia coli O157:H7 EDL933
MMSQKYLFIDRDGTLISEPPSDFQVDRFDKLAFEPGVIPQLLKLQKAGYKLVMITNQDGLGTQSFPQADFDGPHNLMMQIFTSQGVQFDEVLICPHLPADECDCRKPKVKLVERYLAEQAMDRANSYVIGDRATDIQLAENMGINGLRYDRETLNWPMIGEQLTRRDRYAHVVRNTKETQIDVQVWLDREGGSKINTGVGFFDHMLDQIATHGGFRMEINVKGDLYIDDHHTVEDTGLALGEALKIALGDKRGICRFGFVLPMDECLARCALDISGRPHLEYKAEFTYQRVGDLSTEMIEHFFRSLSYTMGVTLHLKTKGKNDHHRVESLFKAFGRTLRQAIRVEGDTLPSSKGVL

SEQ ID NO: 7862 - protein, 308 aa, Escherichia coli O157:H7 EDL933
  misc_feature (210)..(210): Xaa can be any naturally occurring amino acid
  unsure (1)..(308): unsure at all Xaa locations
MLELQEASRLPERLGDDFVRAANIILHCEGKVVVSGIGKSGHIGKKIAATLASTGTPAFFVHPAEALHGDLGMIESRDVMLFISYSGGAKELDLIIPRLEDKSIALLAMTGKPTSPLGLAAKAVLDISVEREACPMHLAPTSSTVNTLMMGDALAMAVMQARGFNEEDFARSHPAGALGARLLNKVHHLMRRDDAIPQVALTASVMDAMXELSRTGLGLVAVCDAQQQVQGVFTDGDLRRWLVGGGALTTPVNEAMTVGGTTLQSQSRAIDAKEILMKRKITAAPVVDENGKLTGAINLQDFYQAGII

SEQ ID NO: 7863 - protein, 394 aa, Escherichia coli O157:H7 EDL933
MMKDVVIVGALRTPIGCFRGALAGHSAVELGSLVVKALIERTGVPAYAVDEVILGQVLTAGAGQNPARQSAIKGGLPNSVSAITINDVCGSGLKALHLATQAIQCGEADIVIAGGQENMSRAPHVLTDSRTGAQLGNSQLVDSLVHDGLWDAFNDYHIGVTAENLAREYGISRQLQDAYALSSQQKARAAIDAGRFKDEIVPVMTQSNGQTLVVDTDEQPHTDASAEGLARLNPSFDSLGSVTAGNASSINDGAAAVMMMSEAKARALNLPVLARIRAFASVGVDPALMGIAPVYATRRCLERVGWQLADVDLIEANEAFAAQALSVGKMLEWDERRVNVNGGAIALGHPIGASGCRILVSLVHEMVKRNARKGLATLCIGGGQGVALTIERDE

SEQ ID NO: 7864 - protein, 380 aa, Escherichia coli O157:H7 EDL933
MPHLALLISKGAIMDRIIQSPGKYIQGADVINRLGEYLKPLAERWLVVGDKFVLGFAQSTVEKSFKDAGLVVEIAPFGGECSQNEIDRLRGIAETAQCGAILGIGGGKTLDTAKALAHFMGVPVAIAPTIASTDAPCSALSVIYTDEGEFDRYLLLPNNPNMVIVDTKIVAGAPARLLAAGIGDALATWFEARACSRSGATTMAGGKCTQAALALAELCYNTLLEEGEKAMLAAEQHVVTPALERVIEANTYLSGVGFESGGLAAAHAVHNGLTAIPDAHHYYHGEKVAFGTLTQLVLENSPVEEIETVAALSHAVGLPITLAQLDIKEDVPAKMRIVAEAACAEGETIHNMPGGATPDQVYAALLVADQYGQRFLQEWE

SEQ ID NO: 7865 - protein, 342 aa, Burkholderia sp. NK8
MSSYNIALNFEDGVTRFVECKAGEKVLDAAFRAKINLPMDCSDGVCGTCKCRAESGSYDLGEDYIEDALSDDEKEGGLVLTCQMVPQSDCVIAVPASSTACKTAQSKFAAKVTKVAPHNDAAVVLELDVDAAASAPVFLPGQYVNIDVPGSGQHRSYSFSSAPGETKISFLIKKIPGGVMSTWLESAETGSTVELTGPLGSFYLRAVERPLLFLAGGTGLAPFLSMLEVLARANSQQKIHLIYGVTRDLDLVQVEAIEAYTAKLSNFTFSTVVADADSDHPRKGWVTQHMPAESLNDGDVDVYLCGPPPMVDAVRKHFDDNGVKPNSFHYEKFTPNAAPVTA

SEQ ID NO: 7866 - protein, 252 aa, Saccharum officinarum
MGRSPCCEKAHTNKGAWTKEEDERLVAYIRAHGEGCWRPLPKAAGLLRCGKSCRLRWMNYLRPDLKRGNFTDDEDELIIRLHSLLGNKWSLIAGQLPGRTDNEIKNYWNTHIKRKLLARGIDPQTHRALGADAATAPGVAAHHRATAAALLHHAGAAVVVVPAPVKLAAVKPAPAESSSDDGGSSSGSSSGGGAGEPRCPDLNLDLSVGPPAVVADTPTLHLAVCLGYRLCLRPGRFAVTMLKLYCVSIWFY

SEQ ID NO: 7867 - protein, 471 aa, Triticum aestivum
MSSFTGSLDHAGFTFTPPPFITSLTELLSGSGAGDVEGSPRGFNRGGRTGVPKFKSAQPPSLPISSPASPFSCFSIPAGLSPAELLHSPVLLNYSHILASPTTGAIPARRYDWQASADLNTFQQDEVGRGDSGLFGFSFHAVKPNATVNAQTNYLPLFKEHQQQQQQQQVVEVSNKSSSGDNNKQVEDGYNWRKYGQKQVKGSENPRSYYKCTYNNCSMKKKVERSLADGRITQIVYKGAHDHPKPPSTRRNSSGCAAVIAEDHTNGSEHSGPTPENSSVTFGDDETDNGAEPETKRRKEHGDNEGSSGGTGACVKPVREPRLVVQTLSDIDILDDGFRWRKYGQKVVKGNPNPRSYYKCTTVGCPVRKHVERASHDNRAVITTYEGRHSHDVPVGRGAGASRALPTSSSSDSSVVVCPAAAGQAPYTLEMLANPAAGHRGYAAKDEPRGGAFQRTKDEPRDDMFVESLLC

SEQ ID NO: 7868 - protein, 440 aa, Triticum aestivum
MSSSTGSLDHAGFTFTPPPFITSFTELLSGSGAGDAERSPRGFNRGGRAGAPKFKSAQPPSLPISSPFSCFSVPAGLSPAELLDSPVLLNYSHILASPTTGAIPAQRCDWQVSADLNTFQQDELGLSGFSFHAVKSNATVNAQANCLPLFKEQQEQQQEEVVQVSNKSSSSSGNNKQVEDGYNWRKYGQKQVKGSENPRSYYKCTYNNCSMKKKVERSLADGRITQIVYKGAHDHPKPLSTRRNSSGCAAVVAEDHTNGSEHSGPTPENSSVTFGDDEADKPETKRRKEHGDNEGSSGGTGGCGKPVREPRLVVQTLSDIDILDDGFRWRKYGQKVVKGNPNPRSYYKCTTVGCPVRKHVERASHDNRAVITTYEGKHSHDVPIGRGRALPASSSSDSSAVIWPAAAVQAPCTLEMLAGHPGYAAKDEPRDDMFVESLLC

SEQ ID NO: 7869 - protein, 433 aa, Oryza sativa Indica Group
MYSNFKEQAIEYVKQAVQEDNAGNYVKAFPLYMNALEYFKTHLKYEKNPKIKEAITAKFTEYLRRAEEIRAVLDEGGGGGGANGGDAAVATRPKTKGKDGEGGGDDSEQSKLRAGLNSAIITEKPNIKWNDVAGLESAKQALQEAVILPVKFPQFFTGKRRPWRAFLLYGPPGTGKSYLAKAVATEADSTFFSISSSDLVSKWMGESEKLVANLFQMARENAPSIIFIDEIDSLCGQRGEGNESEASRRIKTELLVQMQGVGHNDDKVLVLAATNTPYALDQAVRRRFDKRIYIPLPDLKARQHMFKVHLGDTPHNLNESDFESLARRTDGFSGSDIAVCVKDVLFEPVRKTQDAMFFFKADGDMWMPCGPKQSGAVQTTMQELASKGLAAKILPPPISRTDFEKVLARQRPTVSKKDLEVHERFTKEFGEEG

SEQ ID NO: 7870 - protein, 452 aa, Oryza sativa Indica Group
MYSNFKEQAIEYVKQAVQEDNGGNYVKAFPLYMNALEYFKTHLKYEKDPKIKDAIAAKFTEYLRRAEEIRAVLDGHIGGGGDSEQAKPRGMPRSAIVAAKPSVKWSDVAGLESAKEALQEAAILPIKFPHFFTGKRSPWKAFLLYGPPGTGKSYLAEAVATEVDSTFFSISSSDLVSKWMGESEKLVANLFQMARENAPSIIFIDEIDSLCGQRGECNENEASRRIKTELLVQMQAMRRRFDKCIYIPLPDLKARKDTFKIHIGDTPHSLTEGDFESLAYQTEGFSGSDIAVCVKDALFQPVRKTQDAKFFIKADDDTWTPSEQSQPGSIQTTMQELASKGLAAKILLPPISKIDFDEVLVRQRPTVSKKDLVVYEKFTQEFSEEEIFISPLSNEKPQSHDVPFKKSEEEILTMQKKTKSEEEILTMQKKTKSPMRNFLNVWAKACCCASTI

SEQ ID NO: 7871 - protein, 597 aa, Oryza sativa Indica Group
MDTTIGSVPTASDAAAPPPAPAAATAPREATLGRHLARRLAEVGARDVFTVPGDFNLTLLDELEAEAGHGGVRLVGCCNELNAAYAADGYARARGGGVGACAVTFTVGGLSAINAVAGAFSENLPVVCIVGGPNSNDYGSNRILHHTIGLPDFTQELRCFQTVTCYQAVVNNLEDAHEQIDAAISTAIKESKPVYISISCNLPSIPHPTFSRHPVPFFLSPRLSNQMNLEAAVETAAAFLNKAVKPVLVGGPKMRVAKACKSFVELADACGYPVAVMPSAKGLVPEHHPRFIGTYWGAVSTPFCAEIVESADAYLFAGPIFNDYSSVGYSLLLKKEKAIIVQPDRVVIGHGPAFGCVLMKDFLHALSARLKKNTAAYENYRRIYVPPGEPPLSEPGEPLRVNVLFQHIQKMLSANSAVIAETGDSWFNCQKLKLPEGCGYEFQMQYGSIGWSVGATLGYAQAAKDKRVIACIGDGSFQVTAQEVSTMLRWGQKSIIFLINNGGYTIEVEIHDGPYNVIKNWNYTGVVEAFHNGEGKCYTAKVRTEEELKEAIEEAQGPKKDCLCFIEVIVHKDDTSKELLEWGSRVSAANSRPPNPQ

SEQ ID NO: 7872 - protein, 384 aa, Oryza sativa Indica Group
MAALLLRRLAGTHRGRVPLAAAAAVTGGAALFCASSPPTIALMEEKGEDAAAKVALNPDKWLEFKLQEKATVSHNSQLFRYTPISDPDSKGYFDLLIKVYPDGKMSQYFASLKPGDVVEVKGPIEKLRYSPNMKKQIGMIAGGTGITPMLQVVRAILKNPDDNTQVSLIYANVSPDDILLKRELDRLASSYPNFKVFYTVDKPSNDWRGGVGYISKDMALKGVESDEEIRRVPEMGGGGGSASSGAGADERQGKEDGKQQGGGGGGAAAAGGGQEQAPPARKRGRSAGDKEQNRLKRLLRNRVSAQQARERKKAYMTELEAKAKDLELRNAELEQRVSTLQNENNTLRQILKNTTAHAGKRGGGGGGKGGDGGGGGKKHHFTKS

SEQ ID NO: 7873 - protein, 1449 aa, Oryza sativa Indica Group
MQSSGGGKATETLRAPARAEHEPEHLKEAETAGDSWRAIQQFRNYSPGLGGDSRGSGDSSSTRVAADPDTHQDFQPTSKSSNMSFDDIVAQDIKENPVLIYMKGFPESPMCGFSALAVKVLKLYDVPISARDILGDLKLKECVKAHTREPGDSAIEEPLLNGSGASATAAGENNSNNCAADASMFTGAGFLSVLTFSWMGPLLAVGHRKTLDLDDVPGLDPGDRVAGLLPPFKTNLEALAGDGSGRKVTAFTLSKALVRTVWWHVAVTAFYALVYNVSTYVGPYLIDSLVQYLNGDERYASKGQLLVLAFIVAKVFECLSQRHWFFRLQQAGIRARSALVAVVYQKGLVLSSQSRQSRTSGEMINIISVDADRVGLFSWYMHDLWLVPLQVGMALFILYSTLGLASLAALGATVVVMLANVPPGQMQEKFQQKLMDCKDVRMKATSEILRNMRILKLQGWEMKFLSKIIDLRKTETNWLKKYLYTSTIVTFVFWGAPTFVAVVTFIACMLMGIPLESGKVLSALATFRVLQEPIYNLPDTISMLIQTKVSLDRIASFLCLEELPTDAVLKLPSGSSDVAIEVRNGCFSWDASPEVPTLKDLNFQAQQGMRIAVCGTVGSGKSSLLSCILGEIPKLSGEVKTCGTMAYVSQSAWIQSGKIQDNILFGKQMDNEKYDRVLESCSLKKDLEILPFGDQTVIGERGINLSGGQKQRIQIARALYQDADIYLFDDPFSAVDAHTGSHLFKECLLGELASKTVVYVTHQIEFLPAADLILVMKGGRIAQAGKYDEILGSGEEFMELVGAHKDALTALDAIDVTNGGNEASSSSKTASLARSVSVEKKDKQNGKEDDANAQSGQLVQEEEREKGRVGFWVYWKYLTLAYRGALVPFILLAQILFQVLQIASNYWMAWAAPVSKDVEPPVSMSTLIYVYVALAFGSSLCILVRALILVTAAYKTATLLFNKMHMSIFRAPMSFFDSTPSGRILNRASTDQSEVDTSIAYQMGSVAFSIIQLVGIIAVMSQVAWQVFVVFIPVLAACFWYQRYYIDTARELQRLVGVCKAPIIQHFAESITGSTTIRSFGKENQFVSTNSHLMDAFSRPKFYNAAAMEWLCFRLDMLSSLTFAFSLIFLVNLPTGLIDPGISGLAVTYGLNLNMLQAWVVWSMCNLENKIISVERILQYMSIPAEPPLSVQDDKLTQDWPSEGEIMLNNVHVRYAPHLPFVLKGLTVTFPGGMKTGIVGRTGSGKSTLIQALFRIVDPTVGQILVDSIDICTIGLHDLRSRLSIIPQEPTMFEGTVRTNLDPIGEYTDSQIWEALDRCQLGDEVRRKELRLDSPVIENGENWSVGQRQLVCLGRVILKRSKILVLDEATASVDTATDNLIQKTLRQQFSDATVITIAHRITSVLDSDMVLLLDNGVAVERDTPTSLLEDKSSLFSKLVAEYTMRSTHT

SEQ ID NO: 7874 - protein, 194 aa, Oryza sativa Indica Group
MAAQEQEQEKQQAKTSTTSSLPSSSERSSSSAPNNLKEGGGGVESDEEIRRVPEMGGGGGSASSGAGADERQGKEDGKQQGGGGGGGGAAAGGGQEHAPPARKRGRSAGDKEQNRLKRLLRNRVSAQQARERKKAYMTELEAKAKDLELRNAELEQRVSTLQNENNTLRQMCFYSLPIEALQTKRKPFLGLTGY

SEQ ID NO: 7875 - protein, 507 aa, Oryza sativa Indica Group
MDVVVESPPVRDEKKVDVAAIGGAPPIVFESFAPSTQRDSTIIKKEEKMEAAKAEMGEVREENERLKTMLTRIVSDYKSLHTHFLDVVKVKEQTAAELSGDDDDDEPDDLVSLSLCTRPNAAAARRKGHERTPSSGGGGDDGRLSLGLSCARGGVASDDDDDKQASRRALPPMPVLNLSSDSSGDAAGAGAGEPTQPNKASRSSSGGGDGADDEVLQQQQAKKARVSVRVKCDTPTMNDGCQWRKYGQKISKGNPCPRAYYRCTVAPNCPVRKQVQRCADDMSILITTYEGTHSHPLPPAAAAMASTTSAAAAMLTSGSTTSTMHGGGGVHHHLPFASAVGGGGGVGLLGPTTISTATSCPTVTLDLTAPHSLLHPSSASPYAAAAAGYESSRALPAAWSSGYLAYGGAAAAQPYYAKGVAPSPFGHHFGMMGMAAAAARPAPEQLFGGQTTSPYLQRAIGGGGVAPAAVTDTIAKAITSDPSFQSVLAAAITSYMGRGGGAAAPNK

SEQ ID NO: 7876 - protein, 303 aa, Oryza sativa Indica Group
MAPKRLVCFLAVAAALATTCHGWGAGAGDVVSSSAAALSFVDRLRQMMIPAAVGDGDYCDSWRVGVEANNVRGWTAAPRKCDNYVENYMRGHHYRRDSKVVVDEAAAYAEAAVLSGDPAADANATWVFDVDETALSHVKFYKKHGFGYHRTDEPAFMEWLIAGRASALPNTVTLYKKLLLLGVKIVFLSDRPDTPELRNATATNLIKEGFDCWDELILRSESSTATGSVVEYKSGERKKLEEEKGMVIIGNIGDQWSDLLGSPEGRRTFKLPNPAYYIDNYKRAGTAVRAAVAITASSSSSSS

SEQ ID NO: 7877 - protein, 292 aa, Oryza sativa Indica Group
MAIATESRCEEEKASPHSQEVKRWVLSDFDIGKPLGRGKFGHVYLAREKRSNHIVALKVLFKSQLKQSQVEHQLRREVEIQSHLRHPNILRLYGYFYDQTRVYLILEYALKGELYKELQRCKHFSERRSATYIASLARALIYLHGKHVIHRDIKPENLLIGSQGELKIADFGWSVHTFNRRRTMCGTLDYLPPEMVEKTEHDYHVDIWSLGILCYEFLYGVPPFEAKEHSETYRRIVKVDLKFPLKPFVSPAAKDLISQMLVKNSAHRLPLHKLLEHPWIVQNADPSGVYRG

SEQ ID NO: 7878 - protein, 386 aa, Oryza sativa Indica Group
MMMMGEGVSSVPPWSHLPVSGVDVLGGGGGGGDEMTPYVIAALRDYLPANDVGVGADEEEEAAAMAAAVDAYACDEFRMYEFKVRRCARGRSHDWTECPFAHPGEKARRRDPRKYHYSGTACPDFRKGGCKRGDACEYAHGVFECWLHPARYRTQPCKDGTACRRRVCFFAHTPDQLRVLPAQQSSPRSVASSPLAESYDGSPLRRQAFESYLTKTIMSSSPTSTLMSPPKSPPSESPPLSPDGAAAIRRGSWPGVGSPVNDVLASFRQLRLNKVKSSPSGGWSYPSSSAVYGSPKAATGLYSLPTTPLASTATVTTASSFMPNLEPLDLGLIGDEEPVQRVESGRALREKVFERLSRDGAIYGDATAFATAGVGLDVDWVSDLIN

SEQ ID NO: 7879 - protein, 347 aa, Oryza sativa Indica Group
MGDSSGSVSIDVERISFGGKEHRVRTRYGSVSVSVFGDEDKPALITYPDVALNYMSCFQGLFFCPEAASLLLHNFCIYHITPQGHELGAAPISSDVPVPSVDELVDQVADVLDFFGLGSVMCLGVTAGAYILTLFATKYRDRVIGLMLVSPLCKAPSWSEWLYNKVLLNLLYYYGSRGLVKECLLQRYFSTEVRGNGQDPESEIVQACRSLLHERQGSNVWRFLQAINERHDLTEALKKLQCRTLIFVGENSQFHDDAVHMTTKLDRRYCALVEVQACGSLVTEEQPHAMLIPMEYFLMGYGLYRPSQLDSSPRSTLNPFCISPELLSPESMGVKLKPIKTRISLKV

SEQ ID NO: 7880 - protein, 176 aa, Oryza sativa Indica Group
MSGRGRGDPLVLGRVVGDVVDPFVRRVALRVAYGAREVANGCELRPSAVDDQPRVAVGGPDMRTFYTLVMVDPDAPSPSDPNLREYLHWLVTDIPATTGVSFGTEVVCYESPRPVLGIHRLVFLLFEQLGRQTVYAPGWRQNFSTRDFAELYNLGLPVAAVYFNCQRESGTGGRRM

SEQ ID NO: 7881 - protein, 109 aa, Oryza sativa Indica Group
MSGVWLFKNGVVRLVEKQQATAGTSVAGGRRKALVHTPSGQVVSSYAALEARLTALGWERYYEDPSLFQFHKRGSLDLISLPADFSAFSSVHMYDIVVKNRDSFRVVDA

SEQ ID NO: 7882 - protein, 339 aa, Oryza sativa Indica Group
MATSMGCLLMLCLVSPLLLATSVHGNPWYGYGYGLFPQFYDHSCPKAKEIVQSIVAQAVARETRMAASLVRLHFHDCFVKGCDASVLLDNSTTIISEKGSNPNMNSLRGFEVVDEIKAALEAACPGTVSCADILALAARDSTVLVGGPYWDVPLGRRDSLGASIQGSNNDIPAPNNTLPTIITKFKRQGLNIVDVVALSGGHTIGMSRCTSFRQRLYNQSGNGMADYTLDVSYAAQLRQGCPRSGGDNNLFPLDFVSPAKFDNFYFKNILSGKGLLSSDQVLLTKSAETAALVKAYADDVNLFFKHFAQSMVNMGNISPLTGSQGEIRKNCRRLNNYYH

SEQ ID NO: 7883 - protein, 1262 aa, Oryza sativa Indica Group
MAAAAAREAADGGDINGGGGGGGERSSSPAAAAAGNSDVGRVAVRRMFAFADGADAALMAVGAAAAVANGMAQPLMTFIFGDVINAFGSTSSPDVLAKVTKVILNFVYLGIGAGFVSTLQVSCWTITGERQAARIRALYLKAILRQDIAFFDKEMSTGQVVERMSGDTFLIQDAIGEKSGKCIQLLSTFFGGFIIAFVRGWLLALVLLSCIPPIAVAGAFVSRLMTRISTRMQEKYGDAGNIAEQTIGAIRTVASFNGEKQAINTYNKFIRKAYESTLQEGVVNGLGLGTVMAILFCSYGLAVWYGSKLIVNRGYNGGIVINVLMSVMMGAMSLGQATPSITAFAEGQGAAYRMFKTIKRQPDIDVCDTKGIILEDITGDVELKDVYFSYPTRPEYLVFNGFSLQIPSGRTMALVGESGSGKSTVISLVERFYDPQSGEVLIDGIDIRRMNLGWIRGKISLVSQEPVLFSSTIRENIAYGKEDQTLEEIKRAVELANAAKFVDKLPNGLEMMVGERGIQLSGGQKQRIAIARAIIKNPRILLLDEATSALDMESERVVQDALNRIMLERTTIIVAHRLSTVKNADVISVLQQGKMVEQGSHVELMKKPEGAYAQLIQLQGAQQDAEVHNDDPDMIIRSDSGSRSINVKPRSQSTSFRRSITKGSSFGHSGRHPIPAPLDFPDPMEFKDDLGMEETTDKVPRGQKKASISRLFYLNKPEAFVLVLGSVTAAMHGLMFPIFGILISSAIKMFYEPPSELLKDSRFWASMFVVVGASAFVLIPTEYFLFGLAGGKLVERIRSLTFRSVMHQEINWFDKPEHSSGSIGARLSVDALNVKRLVGDNLALNVQTVSTVISGFTIAMVANWKLALIITVVVPLVGFQAYAQMKFLKGFNKNAKLKYEEASQVATDAVGGIRTVASFCAEQKVIEAYEKKCESPVRQGIREGVVGGLGFGFSFLVFYFTYALCFYVGAKFVHQGVATFPEVFRVFFVLVLATSGISRTSAIGADSTKANESAVSIFEILDRKSKIDSSSEEGVVIASVRGDIEFHNTVALVGESGSGKSTAIALLERFYDPDTGKILLDGVDLKTFKVSWLRIQIGLVAQEPVLFNDTIHANIAYGKQEQASQEEIMAAAEAANAHQFISALPDGYSTVVGERGIQLSGGQKQRVAIARAIMKDPKVLLLDEATSALDAESERVVQEALDRVMVGRTTVVVAHRLSTIKGADIIGVLKNGAIVEKGGHDELMRIKDGTYASLVELSSSSR

SEQ ID NO: 7884 - protein, 98 aa, Oryza sativa Indica Group
MVSERVKGMVKGFDATNGFSFITPDDGSEDLFIHQSSLKFDGYRSLNDDDVIELSVGSGDDGRTKAVDVTAPGSDAHTSGSRTSCSHIPTAGRPLVVS

SEQ ID NO: 7885 - protein, 228 aa, Oryza sativa Indica Group
MGATSPSGLELTMAVPGLSSSGSEGAGCNNNNAGGGCNMRDLDINQPASGGEEEEFPMGSVEEDEEERGVGGPHRPKKLRLSKEQSRLLEESFRLNHTLTPKQKEALAIKLKLRPRQVEVWFQNRRARTKLKQTEMECEYLKRCFGSLTEENRRLQREVEELRAMRVAPPTVLSPHTRQPLPASALTMCPRCERITAATGPPAVRPPPSSAAAAAPSPFHPRRPSAAF

SEQ ID NO: 7886 - protein, 1154 aa, Oryza sativa Indica Group
MAGERQSARIRSLYLEAILTQDIAFFDVEMTTGEAASRISADTVLIQDALGEKVGKYIQVLTAFVGGFVIGFIRGWMLALVVMACIPPSIFSFALVSRLRAQISGKTHVSYSYAGNVVEQTIGSIRMVVSFNGEKRAITMYNTLIKKAYKATIMEGIISGFGIGSIFFVVYCSYSLAFWYGAKLVISKGYTGGQVINVVFAILTGSMAIGNASPSISAIAEGQSAAHRLFEIINRKPNIDITGTSGIILEDIKGNVELKDVCFSYPARPEQLILDGLCLQVPNGTTMAIVGQSGSGKSTIISLVERFYDPQDGEVLIDGINIKTLKLHWIRGKMSLVSQEPLLFMTSIKDNITYGKENATDEEIKRAAELANAANFIDKLPNAYDTMVGQHGAQLSGGQKQRIAIARAILKNPKVLLLDEATSALDVESERLVQEALNRVMIGRTTLIVAHRLSTIKNADCIAVVHQGKIVDQGSHDELIKDPDGAYSQLIQLQQTHTEEMHDVQYSEVSTSRLKSRSLSLEQSMINDSPRNRRKNSLAKHIGSSGSDGLHKHGLTDEPEDKECGDNKDINKAPIRRLFNLNKPEAPILLLAIITAFVHGLLFPIFSIMMSGGIRTFYYPPHQLRKDSRFWALMCILMAIISLVSIQLEYFLFGMAGGKLIERVRCLSFQSIVHQEVSWFDDPSHSSGSLGAKLYIDALNIRRLVGDNLAILVQCIVTLIAGFTIAFASDWKLTLTIMCPIPLVGLQNYVQLKFLKGFSEDAKVMYEDASQVVTEAIGSIRTVASFCAEKRVIKTYNQKCQASMKESIRSGMVGGLGFSFSYLMVYLTYALCFYVGAQFVHGGKSTFKDVFRVYFALVFTAFGISQTSAMASDSSKAHESAASILAIIDRKSNIDSSIDEGIILEKVNGTIELNHVNFKYPSRPDVQVLCDFTLGIPSGKTVALVGESGSGKSTVIALLERFYDPHSGTISLDRVELKNLKLSWLRDQMGLVSQEPILFNDTIHANIAYGRKGQVTEEEIIAVAKASNAHEFISSLPQGYNTTVGERGTQLSGGQKQRIAIARAILKDPKILLLDEATSALDAESERIVQDALDQVMVSRTTIVVAHRLSTIKGADVIAVIKDGSIAEKGQHDSLMRINGGVYASLVDLHSKTT

SEQ ID NO: 7887 - protein, 1274 aa, Oryza sativa Indica Group
MDAAANGGRDGKEKKAKNGRDGEDKKKEEDGDAGKKVSFTGLFRYADGTDLLLMAVGTVAALANGVSQPLMTVIFGQVINAFGEATNGDVLHRVNQAVLNFVYLGIATAVVSFLQVACWTMTGERQATRIRSLYLKSVLRQDIAFFDVEMTTGQIVSRMSGDTVLVQDAIGEKVGKFLQLVATFAGGFVVAFVKGWLLSLVMLACIPPVVIAGGAVSKMLAKISSKGQASYSDAANVVEQTIGAIKTVVSFNGEKQAVASYNKLINKAYKAAVEEGLTNGFGMGSVFFIFFSSYGLAIWYGGKLVVSKGYSGGDIINILFAVMTGAMSLGNATPCMAAFAEGQSAAYRLFKTIKRKPQIDPDDITGKQLTDIRGDVELKDVYFSYPARPEQLIFDGFSLHVSSGTTMAIVGESGSGKSTVISLVERFYDPQAGEVLIDGINIKSLRLNWIRGKIGLVSQEPLLFMTSIKDNITYGKEDATIEEIRRAAELANAANFIDKLPDGYDTMVGQRGAQLSGGQKQRIAIARAILKNPKILLLDEATSALDVESERIVQEALNRIMVNRTTLVVAHRLTTVRNADCISVVQQGKIVEQGPHDELVMNPNGAYSQLIRLQETHEEEEKKLDHHISDSRSKSRSLSFKRSISRDSAGNSSRHSLALPFGLPGSVELLEGNDSTVGEQTEQGGDGEVQQKAPIGRLARLNKPEVPILLLATLAAGVHGVLFPMFGVMISNAIKTFFEPADKLKKDASFWGLMCVVLGIISIISIPVEYFMFGIAGGKLVERVRALSFRSIIHQEVAWFDDPRNSSGALGARLSVDALNVRRLVGDNLALAVQVVSTLITGIVIAMIADWKLTLIILCVIPLVGLQGYAQVKFLKGFSEDAKMLYEDASQVATDAVSSIRTVASFCSEKRVMTMYDNKCEASKNQGVRTGMVGGLGFGFSFLMLYLTYGLCFYVGAQFVRHNKTTFGDVFKVFFALVLATIGISQTSAMASDSTKAKDSAISIFALLDRKSQIDSSSDEGRTLANVKGNIDFRHVSFKYPTRPDVQIFSDFTLHIPSGKTIALVGESGSGKSTAIALLERFYNPESGTILLDEVEIKSLKVNWLRDQMGLVGQEPVLFNDTIRANIAYGKHGDVTEEELIKAAKASNAHEFISSLPQGYDTTVGERGVQLSGGQKQRVAIARAILKDPKILLLDEATSALDAESERIVQDALDNVMVGRTTIIVAHRLSTIKGADIIAVLKDGAIAEKGRHEALMNIKDGVYASLVELRSGSS

SEQ ID NO: 7888 - protein, 262 aa, Oryza sativa Indica Group
MSLSNLVLGFFEEAEREQRWPENGDDDDEGSSGSGAAESKAFWQNQHSQLHEALAKTSQVESRIREDTEEAIRKMRAAGAVCSCARRAAAGDCRSCTLRHVDERLRDTGYNSAICKSKWTRSPDIPSGEHSYVDVVVQTRSGKAVRVVVELSFRAEFEVARASAEYRALVTALPEVFVGRADRLRAVVKAMCAAAKQCMKENNMHMGPWRKHKYMQSKWLGTPERVAAAAAAPVAVWSPEKQTKFRASMLSFDFARAAVEVA

SEQ ID NO: 7889 - protein, 224 aa, Oryza sativa Indica Group
MENRVGESSATAVDGGGGAKDSGSFECNICLELAQDPVVTLCGHLFCWPCLYEWLHVHAHSRECPVCKAGLEEEKLVPLYGRGKASTDPRSRSVAGVQIPSRPAGQRPATAPQPDHHHDHLPHHDPWFMGGAGAPVAGGRWGNYTFSAAIGGLFPLLSFQVHGFPQAAAYGPAAGFPYGYGHSFHGWHGHGFPHQAPQGQHVDVFLKVLLVLVGVLVIASLIVF

SEQ ID NO: 7890 - protein, 404 aa, Oryza sativa Indica Group
MASAAAEVPSYFVCPISLQLMRDPVTLPTGISYDRAAIARWLAAPGARRTCPVTRQPLEHGLELTPNHTLRRLIQSWAASVSPGSAVDEEVAALRPVSSDKVASLLSDAAAAQVGALRRLRELAAECEDSRAMLESQGGVFDVLSRVVTSGSACSTAREEAVGVLASLRIPEQELIGVSTRHGNLAESLTAVLRSSNLQSRAHAVQLVRTLADAVVPAWVIGLNAELLAEVVGVVRDRVSARATKASLHALAALCPYGRHRVKIVGAGAVAALVELLLDEPERRVCELALAVLDRLCTCAEGRAELVAHAAGVAVVGKKVLRVSEAASERAVRVLRSVARHAATPAVLQEMAQCGVVGKLCLALRSEQCGVKTKEKAHEVLKLHSRVWRASPCLSPSFLALYPS

SEQ ID NO: 7891 - protein, 532 aa, Oryza sativa Indica Group
MADTVAGAVDYRGRPASRAATGGWKSSVFVMAMEIAERFAYKGVAANLITYLTGPLGQPMARAAASIDAWKGVSQMLPLPLACVADAWLGRYRAIVLASVIFVLSMGTLSMSSAFPVSRAGHVAVFYVALYMVALGEGAHKPCAQAFAADQFDEKDGGECAARSSFFNWWYFGMCAGTAVTTMVSSYVQDNVGWGLGFGIPCIVIVVSLAAFLLGTRSYRFYTARTASPVARVAKAFLTLIKSWRSNRRTNPASGGKGDGDGDAGDLVEEVKSVFRLLPIWASCIIYAIIFSQTSTFFTKQAATLDRRIGRSFNVPPAALQTFISVSIVVFIPVYDRLFVPLARRYTGRPSGITMLQRVGAGLALSLVAVVLSALVETRRLRVAAGAGMADAPKARLPMSLWWMVPQYVLVGVADVFAMIGLQEFFYDQVPDAVRSLGLALFLSIFGVGHLLSSLLISVIDGATARRAGGSWFANNLNRAHLDYFYWLLAGLCAVELVAFFLFSRVYTYKKKGNDADGNCDYRGVDDDGICV

SEQ ID NO: 7892 - protein, 465 aa, Oryza sativa Indica Group
MNKNAAPEDVESGEHERTGTVWTATAHIVTAVIGSGVLALAWSVAQLGWVAGPLALAGFACVTYYTSTLLANAYRAPHPVTGTRNRTYMDAVRSYLSPREVFMCGIAQYVNLWGTMVGYTITATISMVAIRRSDCIHRNGAGAAARCDNTSATVLMLAFSIVQVVLSQFPGLEHITWLSVVAAVMSFAYSFIGLGLSVAEWVSHGGHLSGRIQGATAASSSKKLWNVLLALGNIAFAYTFAEVLIEIQDTLKPSPPENKTMKKAAMYGIGATTIFYISVGCAGYAAFGSDAPGNILTASGMGPFWLVDIANMCLILHLIGAYQVYAQPIFATMERWISSRWPEAKFINSAYTVNVPLIQRGSVTVAPYKLVLRTVVVIATTVVAMMIPFFNAVLGLLGAFSFWPLTVYFPISMHIAQEKITRGGRWYLLQGLSMVCLMISVAVGIGSVTDIVDSLKVATPFKTVS

SEQ ID NO: 7893 - protein, 466 aa, Oryza sativa Indica Group
MDVEKVERKEVAVDDDGRVRTGTVWTATTHAITAVIGSGVLALPWSVAQMGWVLGPIALVVCAYITYYTAVLLCDCYRTPDPVHGKRNYTYMDVVRSCLGPRDVVVCGIAQYAILWGAMVGYTITTATSIMSVVRTNCHHYKGPDATCGSSGTMYMVLFGLAEVVLSQCPSLEGVTLISVVAAVMSFTYSFVGLFLSAAKVASHGAAHGTLLGVRVGAGGVTASTKAWHFLQALGNIAFAYTYSMLLIEIQDTVKSPPSENVTMKRASLYGIGVTTVFYVSIGCVGYAAFGNAAPGNVLTGFLEPFWLVDIANVAVVIHLVGAYQVYAQPVFACYEKWLASRWPESAFFHREYAVPLGGGSAVRFTLCKLVLRTAFVAVTTVVSLVLPFFNAVLGLLGAVAFWPLTVYFPVTMYMAQAKVQRGSRKWVALQALNVGALVVSLLAAVGSVADMAQRLRHVTIFQTQL

SEQ ID NO: 7894 - protein, 104 aa, Oryza sativa Indica Group
MAERVARLSSQRAVVIFGASNCFMCHVVKTLFSELGVSWAVHEVDKDPNGKDVERALAGMVGRTPPVPAVFIGGKLVGPTDQVMSLHLAGKLVPLLREAGALWL

SEQ ID NO: 7895 - protein, 378 aa, Oryza sativa Indica Group
MVGQMVMRIVRPCFKPDHQLAVGGGGTRDGLLWYKDTGRHACGDFSMALVQANNLLEDVSQVEAAPLLSHSSSTTFVGIYDGHGGPETAHFIAQHLFPNLKKFATEQQTVSVDVIRKSYAATEEGFLNLVRKQWLIKPQLASVGSCCLVGIINEGVLYVANTGDSRAVLGRLERGVIKAVQLSAEHNASIESVREELRQFHPDDPRIVVLKHNVWRVKGLIQVSRTLGDAYLKSTEFNREPLLARFRLSEPFHKPILSPEPSIEVHKLCTEDQFVIFASDGLWEHMTNQEAVDIVNCSPRNGIARRLIKAALRDAAKKREMRYSDLKKIDRGVRRHFHDDITVVVLFLDSALVGKRFYGGPLLSLMGGDGASTLTQKC

SEQ ID NO: 7896 - protein, 326 aa, Oryza sativa Indica Group
MEYSYSYRFMLVCSVLVLCLNTRGARCQLSDDFYDYICPDVYTVVQQHVYAAMRTEMRMGASLLRLHFHDCFVNGCDGSILLDGDDGEKFALPNKNSVRGFEVIDAIKEDLENICPEVVSCADIVALAAGYGVLFSGGPYYDVLLGRRDGLVANQSGADNGLPSPFEPIKSIIQKFNDVGLDTTDVVVLSGGHTIGRARCTLFSNRLSTTSSSADPTLDATMAANLQSLCAGGDGNETTVLDITSAYVFDNRYYQNLLNQKGLLSSDQGLFSSDDGIANTKELVETYSANAHKFFWDFGRSMVKMGNISPLTGDDGQIRKNCRVVN

SEQ ID NO: 7897 - protein, 212 aa, Oryza sativa Indica Group
MAPLPPRAISLVFLFLFFTAASATRRLDDAGGQPTAASSATAFLRSRCATTRYPDVCYDSLLPYASTFQTSHVKLPVAAANVAAAKLRAFSARINDLLAQGGAARVDAALKDCKSTISDAGDLARQSSAELGQLDAGAAAAGVSSRQARWHVSNVQTWLSAAITDEGTCTDGFEEAGEAAAGSPAGKEVAAGVARVKQHTSIALALVNGIPL

SEQ ID NO: 7898 - protein, 221 aa, Oryza sativa Indica Group
MPSSRAGPRHVVLVMLFFAAAVAARGADAASPVTTRPCGAAAAASFLCSRCATTVYPAVCYDSLLPYAGAFQDSRVRLARAAADVAAARLRDFSASLDELVHGSGDVGAVTTPPRVAAAVRDCVGTVSSAAGLARRSSAALGRLDAGAAAGGGGSRLARWEVSNAKTWLSAAMANVATCADGFADADSWSAAGIEEVVAGEAANVSKYTSNALALVNGIPL

SEQ ID NO: 7899 - protein, 412 aa, Oryza sativa Indica Group
MEAKLSAASRRVAPSPIQQLSHLAQRAGAVNLAEGFPDFPAPAHVKAAAAAAIAADLNQYRHVQGICDALAETMKRDHGLRVDPLTDFAVCCGQSEAFAAAIFAIIDQGDEVLLFDPAFETYQTCIELARGVPVYVPLDPPSWTLNEDKILKSFTNRTKAVVLNSPHNPTGKVFSREELLIIAQACQKMDCFAITDEVYEYITYDENKHISLASLPGMQERTIITSSLSKTYSVTGWRIGWACAPANIASAIRNIHVKLTDSAPAPFQEAALVALTSPPDFYSSLKQDYTARRDFILQVLTDFGFRISFKPQGSIFVFVELPRSWQLSDMDFVTNLIKNAGVAAVPGRGFFHSSTDDPSYHHRYVRFAFCKSNDTLNAAAEKMRKLAVSHDARLLRPTDDGEAGQTASATSP

SEQ ID NO: 7900 - protein, 491 aa, Oryza sativa Indica Group
MAPVREVGSKAELEAAAGGARAAAVHFWAAWCEASKQMDEVFAHLAVDFPHAVFLRVEAEEQPEISEAYGVTAVPYFVFLKEGKTVDTLEGANPASLANKVAKLAGPASVAESAVPASLGVAAGPAVLEKVQEMAQQNGASSTSSAEDALNKRLEQLVNSHPVFLFMKGTPEQPRCGFSRKVVDVLKQEGVEFGSFDILTDNDVREGMKKFSNWPTFPQLYCKGELLGGCDIVIAMHESGELKDVFKEHNIPLQPQGSKNEEAVKAKPDTEKSGAVSEPALLTAAQKERLESLVNSSTVMAIIKGTPEEPKCGFSGKLVHILKQEKIPFSSFDILTDDEVRQGLKLLSNWPSYPQLYINGELVGGSDIVMEMHKSGELKKVLSEKGIVAKESLEDRLKALISSAPVMLFMKGTPDAPRCGFSSKVVNALKQAGVSFGAFDILSDEEVRQGLKTYSNWPTFPQLYYKSELIGGCDIVLELEKSGELKSTLSE

SEQ ID NO: 7901 - protein, 214 aa, Oryza sativa Indica Group
MARSLSLLLLLVACFLVAGATAARPAPSTSGAAAISSFVRSWCAGTEYPALCDATLAPYSAAVGASPAKLAWAALTVTLSAARNATSAVRSIAARSSSSHLPPVAAEAAGDCASELGDGVDALRRCVDAMARVAVGEESSSTAAAARRKVRFEVDNVRTWASAALTDDNMCMEGFKGEAAGGGGAREAVRGHIMGLLHLTANALGILNAMAKQI

SEQ ID NO: 7902 - protein, 329 aa, Oryza sativa Indica Group
MAQPTWSARRVTAALVVMVVVVVVLAVAGGSWAQLSPSFYSFSCPGVFNAVKRGMQSAIAREKRIGASIVRLFFHDCFVQGCDASLLLDDTASFTGEKTANPNNGSVRGFEVIDAIKSAVETICPGVVSCADILAIAARDSVAILGGPSWDVKVGRRDSRTASLSGANNNIPPPTSGLANLTSLFAAQGLSQKDMVALSGSHTIGQARCTNFRAHIYNETNIDSGFAMRRQSGCPRNSGSGDNNLAPLDLQTPTVFENNYYKNLVVKKGLLHSDQELFNGGATDALVQSYISSQSTFFADFVTGMIKMGDITPLTGSNGEIRKNCRRIN

SEQ ID NO: 7903 - protein, 215 aa, Oryza sativa Indica Group
MSRDPLVVGHVVGDIVDPFVTTASLRVFYNSKEMTNGSELKPSQVLNQPRIYIEGRDMRTLYTLVMVDPDAPSPSNPTKREYLHWMVTDIPETTDARFGNEIVPYESPRPTAGIHRFVFILFRQSVRQTTYAPGWRQNFNTGTLLSSTTSSRASHIANGLKLPCVIDNLELKNLEPSILVLSNGPSGGSTQSGDNYSEFSRNKDLRACLIGQPGR

SEQ ID NO: 7904 - protein, 184 aa, Oryza sativa Indica Group
MSRDPLVVGHVVGDIVDLFVTTASLRVFYNSKEMTNGSELKPSQVLNQPRIYIEGRDMRTLYTLVMVDPDAPSPSNPTKREYLHWMVTDIPETTDARFGNEIVPYESPRPTAGIHRFVFILFRQSVRQTTYAPGWRQNFNTRDFAELYNLGSPVAALFFNCQRENGCGGRRKLELRIVPIDYMV

SEQ ID NO: 7905 - protein, 662 aa, Oryza sativa Indica Group
MTSTSSENALDHDHDHDASSPAPATATAAALPPMIPACDPHDGPACLELIEVLTTRAAAVQRRVLAEVLAMNTGTDYLRRFLGDEVAAAAGGEDELAAAFKERVPVVEYEDVKPYIERIANGAPSSLISSKPITELLTSSGTSGGQPKLMPATEEELDRKTFLYNLLVPVMNKYVEGLDEGRGMYLLFVKPEITTASGMVARPVLTSYYKSRHFRRRPDSPYTRYTSPDAAILCPDSRQSMYAQLLCGLARRGEVLRVGAVFASAFLRAVKFLEGHWRALCADIRAGRADPAVVTDAACRGAVDAVLAARADPDLADAIAAECGGASWRGIVRRLWPRTKYIDVIVTGSMAQYIPLLEFYGGGLPLVSTMYASSESYFGINLRPLDPPEEVVYTLLPNMCYYEFIKVEKDGDGEKVRDGEVVDLVGVEVGAYYELVVTTFTGLYRYRVGDILQVAGFHNAAPQFRFVHRRNVVLSVDTDKTSEDDLLRAVTAAKPLLDPLSCVLAEYTAYADTSSIPGHYVLFWELTPSPSPPPPPCHDDANDAADIGEDKDKVAHVMAACCAAVEAGLDSVYRRCRSRDRSIGPLEIRVVAPGAFDALMDMCVSHGSSVNQYKTPRCIKHPDAIAVLEQRVVGRFFSDAVPHWEPLKVDGAAAAPATGSDQ

SEQ ID NO: 7906 - protein, 108 aa, Oryza sativa Indica Group
MERVAKLASERAVVVFTASNCGMCHAVTSLLVGELGVNAAVHELDKDPRGRDMERELARRLNGGGGGGRAVPAVFVGGNLVGGANRVMSLHLAGELVPMLKNAGALWL

SEQ ID NO: 7907 - protein, 109 aa, Oryza sativa Indica Group
MAERVAMLASERAVVVFTKSGCCMCTAVTTLLGELAVSAAVHELDRDPLGKEMERELARRLYGSGGRGGPAVPAVFIGGSLVGGTSKVMAMHLKGELVPMLKSAGALWL

SEQ ID NO: 7908 - protein, 237 aa, Oryza sativa Indica Group
MVTVREEMRKGPWTEQEDLQLVCTVRLFGDRRWDFVAKVSGLNRTGKSCRLRWVNYLHPGLKHGRMSPQEEHLIIELHARWGNRWSRIARRLPGRTDNEIKNYWRTHMRKKAQERRGDMSPSSSSSSLAYQSCLLDTVPIISMDGGDIHDDRSCMARVLKSTQSVMDGYTMDQIWREIEAPGAPSLLGIDEGKDKACSNLPCPLLTSTMSDYSCPEVFWKIDNEGTRMLATQSGYGK

SEQ ID NO: 7909 - protein, 475 aa, Oryza sativa Indica Group
MASGQKVVKPMEVSVEAGNAGEAAWLDDDGRARRTGTFWTASAHIITAVIGSGVLSLAWAIAQLGWVAGPAVMLLFAFVIYYTSTLLAECYRTGDPATGKRNYTYMDAVRANLGGAKVTFCGVIQYANLVGVAIGYTIASSISMRAIRRAGCFHHNGHGDPCRSSSNPYMILFGVVQIVFSQIPDFDQIWWLSIVAAVMSFTYSGIGLSLGIVQTISNGGIQGSLTGISIGVGVSSTQKVWRSLQAFGDIAFAYSFSNILIEIQDTIKAPPPSEAKVMKSATRLSVATTTVFYMLCGCMGYAAFGDAAPDNLLTGFGFYEPFWLLDVANVAIVVHLVGAYQVFVQPIFAFVERWASRRWPDSAFIAKELRVGPFALSLFRLTWRSAFVCLTTVVAMLLPFFGNVVGLLGAVSFWPLTVYFPVEMYIAQRGVPRGSARWISLKTLSACCLVVSIAAAAGSIADVIDALKVYRPFSG

SEQ ID NO: 7910 - protein, 468 aa, Oryza sativa Indica Group
MVQIEPLEVSLEAGNQADSALLDDDGRPRRTGTFWTASAHIITAVIGSGVLSLPWATAQLGWVGGPAVMVVFGGVTYFTATLQAECYRTGDEETGARNYTYIGAVRAILGGANAKLCGIIQYANLVGTAIGYTIAASISMQAIKRAGCFHANGHNVPCHISSTPYMLIFGAFEIVFSQIPDFHEIWWLSIVAAVMSFTYSGVGLGLGIAQTVADGGFRGTITGVTNVTATQKAWRSLQALGNIAFAFAFSNVYTEIQDTIKAPPPSEAKVMKQASLLSIVATSVFYALCGWMGYAAFGNAAPDNLLTGFGFFEPFWLVDAANVAIAVHLIGAYQVYCQPVFAFVERKASRRWPDSGFVNSELRVGPFTISAFRLAWRSVFVCFTTVVAMALPFFGVIVGLLGAISFWPLTVYLPTEMYIAQRGVRRGSALWIGLRALAVAGFVVSAAATTGAVANFVGDFMKFRPFSG

SEQ ID NO: 7911 - protein, 481 aa, Oryza sativa Indica Group
MAHALGCGAATAPAGVGLLHHHEKAGALFSAAGSIVRVQQLSGKGSKSQAIRCAMPSASEHGGISTATANSSDQKKGGLRGKLNKVVLAYSGGLDTSVIVPWLRENYGCEVVCFTADVGQGDIELEGLEKKAKASGASQLVVKDLKEEFVSEYIYPCLRAGAVYERKYLLGTSMARPVIAKAMVDVAKEVGADAVAHGCTGKGNDQVRFELTFYALNPELKVVAPWREWDITGREDAIEYAKKHNVPIPVTKKSIYSRDRNLWHLSHEGDILEDPANEPKEDMYMMSVAPENAPSKPEYLEIGIIAGVPVSINGKDLSPASLLAKLNEIGGKHGIGRIDMVENRLVGMKSRGVYETPGGTIMAAAVRELESLTLDRETMQWKDMLALKYAELVYAGRWFDPLRQSIDAFMENITATTTGSVTLKLYKGSVNVASRKSPYSLYREDISSFENGEIYNQADAEGFIRLYGLPTRVRAMLEKGI

SEQ ID NO: 7912 - protein, 444 aa, Oryza sativa Indica Group
MAPPSAMNTSRAEEKAIDDWLPITSSRNAKWWYSAFHNVTAMVGAGVLSLPFAMSELGWGPGVAAMIMSWVITLYTLWQMVEMHECVPGRRFDRYHELGQHAFGDKLGLWIVVPQQLVVEVGVCIVYMVTGGKSLKKFHDLVAPPSAPPIRTSYFIVIFGCLHLVLSQLPNFNSITGVSLAAAVMSLSYSTIAWAASLHHRNHNNGAAAVDYSLTAATPAGRTFNFLSALGDVAFAYAGHNVVLEIQATIPSTPERPSKGPMWRGVVLAYGVVAVCYLPVAFAGYYVFGNAVDDNVLITLERPAWLIAAANMFVVVHVVGSYQIYAMPVFDMLETFLVKKLRFKPGMPLRLIARSLYVLFTMFVAIAVPFFGGLLGFFGGFAFAPTTYFLPCIMWLSIMKPKRFGLSWCINWFCIIIGVLLSVFAPIGGLRSIIVNAQSYKFFS

SEQ ID NO: 7913 - protein, 265 aa, Oryza sativa Indica Group
MATARLILLLTVAAAAAGSCCFCSAQEVIVGGVGEQLATAPPAAPAPSPPPPYCGSVRTAVEAHNIIGWKTVPADCAEYVSDYLTGERYGRDSDVVINEAIAYAESLKLSGHGKEIWVFDVDETALSTLPYQAKHGYGTKPYDHASFVQYVAGESAPALQGTLRLYRRLLQLGIKPVFLTDRTEDQRAVTTHNLLSQGYYSWEKLLLQPVGLQTTTQAFKTGERQKLVSAGYVIIGNIGDQWSDILGSPEGYRTFKYPNPIYYVA

SEQ ID NO: 7914 - protein, 104 aa, Oryza sativa Indica Group
MERVAKLSMEKAVVIFTASNCPMCHTVVSLFSDLGVGAAVHELDRDPLHGRDMERDLARRLGRSPPVPAVFIAGKLVGSTDRVMSLHLAGKLVPMLKAAGAIWL

SEQ ID NO: 7915 - protein, 300 aa, Oryza sativa Indica Group
MAASQRSRSTAAQLDVDDQAAADQLMTMMRRPAAVLQDEAAAEEEASAAAADLQLELRRGPWTVDEDLTLVNYIADHGEGRWNSLARAAGLKRTGKSCRLRWLNYLRPDVKRGNFTADEQLLILDLHSRWGNRWSKIAQHLPGRTDNEIKNYWRTRVQKHAKQLNCDANSARFKDAMRYLWMPRLADASQLGDHHGYNSTTAMGDAHGMPVMTSSSSDSFATSESYDGGLYANVQDNEMVNGGDYWMQAANKGLCSNYESEQLHPHEHSQFQDPDLVGWVQGFSEGLSENFWSLEDIWKM

SEQ ID NO: 7916 - protein, 337 aa, Oryza sativa Indica Group
MAKSRRIAAAHLTCMEIFNRALDWALERELHTSRRGADDDRQILKLVHAATARGRRSRGRGSTSPPRLEFIKDHILKLEPTSTQRWKKSKKTGSEPIQVREETRKGPWTEQEDLQLVCTVRLFGERRWDFIAKVSGLNRTGKSCRLRWVNYLHPGLKRGRMSPHEERLILELHARWGNRWSRIARRLPGRTDNEIKNYWRTHMRKKAQERKSNMSPSSSSSSLTYQSCHPETPSMIIGIEEQELHGGSGCITSIMKSTPVDMDGYPMDQIWMEIEAPNVLPGPCFDEAKDSASNSLSGPLLPYPMWDYYCPETCLRMDDEIKVAPQFGYGKGVGPCY

SEQ ID NO: 7917 - protein, 869 aa, Oryza sativa Indica Group
MAEAAATVHRRWRRRLLPKLMLLLCAVVHGQQPDSLGFISIDCGIPDGGGYSDESTRGLRYVPDAGFLDAGAGLSAGINPPYTDRDLAARYLTVRYFPGAASAAGERGGCYTLRQLSPGGRYLVRATFYYGNYDGAIAMLPVVFDLHLGANRWTAVNVTAADAIYIFEAVVSPPADFLQVCLVNIGKGTPFISGLDLRPLKPELYPEATANQSLLLLNHDRPPARFAFNRYQFWRPASYYKLFRYPFDPYDRLWQPYGDDPSWTNITVAAAVDVTNISRSDDPSPILRSAATPANATVRRLDFPWSSDDAATTTYLLLLYFAELQRLPAGAARRFDVLVDGDASAGGGRRGYTPRYLAAEVVRATVRAARPGQRHVVSLVAAPDSALPPIVNGLEIYSVQPMPELATNDRDAKAMMEIRDNYELKKNWMGDPCAPKAFAWVGLNCSYSSSDPALVTALNLSSSVLIGPVNLSFGDLKSLQYLDLSNNSLSGPIPDFLVQMPALKFLDLSSNKLSGSIPSDLLQKRENGSLVLRIGNNANLCYNGANNTCAPESKQSKRILVIAIAVPIVAATLLFVAAIVILHRRRNKQDTWITNNARLISPHERSNVFENRQFTYRELKLMTSNFKEEIGKGGFGTVFLGYLEDGTPVAVKMCSKTSSEGDKEFLAEAQHLTRVHHRNLVSLIGYCKDKKHLALVYENMQGGNLEDRLRGEASIAAPLTWHQRLKIALDSAQGLEYLHKSCQPPLIHRDVKTRNILLSGDLDAKIADFGLTKVFAGDVVTHVTTQPAGTLGYLDPEYYHTSRLSEKSDVYSFGVVLLELVTGRPPAVPLGDGDGGGGESVHLAVWARQRLAEGDIESVATRPWEAASR

SEQ ID NO: 7918 - protein, 601 aa, Oryza sativa Indica Group
MAEAAAGGEVRRRGGCCGGGGGGGGLFPEESFASWGAYGRALMETGPRLVERATAGSAAAVEVNEVRGRSGAEMKRNLTWWDLAWFGVGAVIGAGIFVLTGQEARDAAGPAVVLSYAVSGVSAMLSVLCYTEFAIEIPVAGGSFAYLRVELGDFVVFIAAGNILLEYCIGGAAVARAWTSYFATLLNHRPNDFRIHAASLAADYSRLDPIAVAVIAVVCALSVLSTKASSRFNYALSIAHLAVLVFIVAAGLSRARLSNLTADFAPFGARGVFAASAVLFFAYVGFDAVSTMAEETRDPARDIPAGLVGAMAVTTAAYCALAATLCLMQPYREIDPDAPFSVAFSAAGMGWARYVVAFGALKGMTTVLLVSAVGQARYLTHIARAHMAPPCLARVHPRLGTPVNATVAMLAATAAIALFTDLGVLANLLSISTLFIFMLVAVALLVRRYYATGETARGDRNRLAGCLAVIVASSVATAAYWGLGGDGGGWAAYAVAVPAWLAATLFLQLRVPMARTPEKWGVPLVPWLPSASIFINIFLLGSIDGRSFMRFGVWTAALLAYYFFFGLHASYDTAKALAAEVAAGKVEEGGSKPAVVGAAGN

SEQ ID NO: 7919 - protein, 484 aa, Oryza sativa Indica Group
MEMTTTKRQQDHQVETMTTKKIDEEDEEVDDDGRAKRRGTVWTAASHIITAVIGSGVLSLAWAIAQLGWVVGPTVMLLFAAVIYFTSNLLADCYRTGDPATGRRNYTYMEAVKANLGGAKVKVCGCIQYLNLLGVAIGYTIAASISMMAIQRSNCFHARGEQDPCHASSNVYMIMFGIVQVFFSQIPDFDQVWWLSILAAVMSFRYSAVGLALGAAQVAQNRTFAGSAMGVAVGFVTKTGDVVTPAQKVWRNLQALGDIAFAYSYSIILIEIQDTLRSPPAEARTMRKATGISVVVTSVFYLLCGCMGYAAFGDDAPGNLLTGFGFYKPYWLLDVANMAIVVHLVGAYQVYCQPLFAFVERRAERRWPNGLPGGDYDLGWIKVSVFRLAWRTCFVAVTTVVAMLLPFFNDVVGILGALGFWPLTVYFPVEMYIAHRRIRRWTTTWVGLQALSLACLLVSLAAAVGSIAGVLLDLKSYRPFRSTY

SEQ ID NO: 7920 - protein, 547 aa, Oryza sativa Indica Group
MAAPPLLSLSQRLLFLSLSLPKPQLAPNPSSFSPGRAVSTAPATPEGAGPAAPSRGDRFLGTQLAAEPAARVLAPEDAERRRRRREKRKALARKPSAAACYGCGAPLQTADEAAPGYVHPATYDLKKRHHQLRTVLCGRCKLLSHGHMITAVGGHGGYPGGKQFVSADQLRDKLSYLRHEKALIIKLVDIVDFNGSFLARVRDFAGANPIILVITKVDLLPRDTDLNCIGDWVVEAVVKKKLNVLSVHLTSSKSLVGVTGVISEIQQEKKGRDVYILGSANVGKSAFISAMLRTMAYKDPVAAAAQKYKPIQSAVPGTTLGPIQIEAFLGGGKLYDTPGVHLHHRQAAVIHADDLPSLAPQSRLRARCFPANDTDVGLSGNSLFWGGLVRIDVVKALPRTRLTFYGPKKLKINMVPTTEADEFYEREVGVTLTPPAGKEKAEGWVGLQVVRELQIKYEESDRPACDIAISGLGWVAVEPLGVPSSNPDESAEEEDNESGELHLRVHVPKPVEIFVRPPLPVGKAASQWYRYQELTEEEEELRPKWHY

SEQ ID NO: 7921 - protein, 431 aa, Oryza sativa Indica Group
MDAGDDGGGGGVAVVPSCDSCRGERAVVHCAQHGGARLCLVCDLAAHHAAAARAHRRAPLCDACHAAPAVARSDHHAEAFCASCARDASRHCHRPAAAYTGIPGPAEMARIFSIDVPAPPPPPPAAAATDEPWITDTLPFVPYDNSMSYTNYCYYPEMFEDANPDISKEMATIGGEDLLVDNANQQDYFQAWTNSFDSVALMEPGALQEPSYLDLDPSYFDLGSYLDPDHQQMASSSCSDIALLSDTSFLQPLNMSNAPYVQLPMMDANINNEIGAATSSSELAQLIPQSSDHSLLQPLNINDETAYDQLPVIDTNSSNNNTGSEFPCVNFQSSNTGSLLGGSSNMFDGQDQQTSHIVLPEKSCPDPEKRQRAVQRYKEKKSNRRFVKQIMYASRKATADTRRRVRGRFVKASLEQGTSSNDNKQPKHEGN

SEQ ID NO: 7922 - protein, 221 aa, Oryza sativa Indica Group
MEVGNGKCGGGGAGCELCGGVAAVHCAADSAFLCLVCDDKVHGANFLASRHRRRRLGVEVVDEEDDARSTASSSCVSTADSASSTAAAAALESEDVRRRGRRGRRAPRAEAVLEGWAKRMGLSSGAARRRAAAAGAALRAVGRGVAASRVPIRVAMAAALWSEVASSSSRRRRRPGAGQAALLLRLEASAHVPARLLLTVASWMARASTPPAAEEGWAECS

SEQ ID NO: 7923 - protein, 347 aa, Oryza sativa Indica Group
MSTIYMSQLPATLPLMEGDQDQGLYPAFHRAKDPPILFPFMIDSAVEHQGQIYGDQGLRRQQVLGESNQQFNDHMMMGGSDVFLTPSPFRPTIQSIGSDMIQRSSYDPYDIESNNKQHANGSTSKWMSTPPMKMRIIRKGAATDPEGGAVRKPRRRAQAHQDESQQQLQQALGVVRVCSDCNTTKTPLWRSGPCGPKSLCNACGIRQRKARRAMAAAANGGAAVAPAKSVAAAPVNNKPAAKKEKRAADVDRSLPFKKRCKMVDHVAAAVAATKPTAAGEVVAAAPKDQDHVIVVGGENAAATSMPAQNPISKAAAASPAFFHGLPRDEITDAAMLLMTLSCGLVHS

SEQ ID NO: 7924 - protein, 338 aa, Oryza sativa Indica Group
MAAMSASGRRVFLLGALLLVAVSCHGGFGGVGVAEGLSTRYYAKTCPAVESVVRSVMARVVAADRRMGASVLRLFFHDCFVNGCDGSVLLDDAPPGFTGEKGAGANAGSARGFEVVDAAKARVEAACRATVSCADVLALAARDAVALLGGPTWPVRLGRKDARTASQAAANGNLPGPVSSLTSLLATFAAKGLSARDMTALSGAHTVGRARCATFRGRVNGGDANVNATFAAQLRRLCPAGTGGDGNLAPLDAETPDVFDNGYFRELTKQRGLLHSDQELFAGGGGGRSSSQDALVRKYAGNGAEFARDFAKAMVKMGNLAPAAGTPVEVRLNCRKPN

SEQ ID NO: 7925 - protein, 323 aa, Oryza sativa Indica Group
MASRSSWHCCLLAFFLLSSAACGQLSTTFYAASCPTLQLVVRATVLSTLLAERRMGASLVRLFFHDCFVQGCDASILLDDVPATSFVGEKTAFPNVNSVRGYDVIDQIKRRVELLCPGVVSCADIVALAARDSTALLGGPSWEVPLGRRDSTTASLSAANSDLPAPSSDLATLVARFGSKGLSPRDMTALSGAHTIGFSQCANFRDRIYNDTNIDPAFAALRRGGCPAAPGSGDTSLAPLDALTQNVFDNAYYRNLLAQRGLLHSDQVLFNGGSQDALVQQYSSNPALFAADFAAAMIKMGNINPLTGAAGQIRRSCRAVNSS

SEQ ID NO: 7926 - protein, 335 aa, Oryza sativa Indica Group
MAAASSTTTTAWRCCLLLALVLPMISSSAAGDDAPPLPMTPSYYRKSCPTLEAIVRGTMVSAIKAERRMGASILRLFFHDCFVQGCDASILLDDVQGFVGEKTAGPNANSIRGYEVIDKIKANVEAACPGVVSCADILALAAREGVNLLGGPSWEVPLGRRDSTTASKSEADSDLPGPSSSLADLIAAFGKKGLAPRDMTALSGAHTIGYAQCQFFRGHIYNDTNVDPLFAAERRRRCPAASGSGDSNLAPLDDMTALAFDNAYYRDLVGRRGLLHSDQELFNGGSQDERVKKYSTDPDLFAGDFVAAMIKMGKICPLTGAAGQIRKNCRVVSSS

SEQ ID NO: 7927 - protein, 442 aa, Oryza sativa Indica Group
MEVAAAEVPSYFLCPISLEIMRDPVTLATGITYDRSSIERWMFGGGGGDGGKGTCPVTRRQLAPAEREATPNHTLRRLIQAWCAAHAVERFPTPRPPVDSCRVAALVDEGTTTMLGGGGRQRQLAALREIKAIAAESDRNKRCVEATPGAVEFLVSVVVQSHAAASTSASSDDDDLFDSVIDSPMSTSSPEEEALGVLYSLKPSEPTLRRVLGKDNGVGFLDTLASVLRRPSYRSRAYAILLLKAVTSAMPPERLMAVSPELVEEVVRVVSDGVSSKAVKAALHVLCRLCPWGRNRVKAVEAGAVAALVELLLDEEGGGGRRRAAELAVVAIDHLCGCAEGRSELVAHPAGLAVVSKRAMRVSPAATESAVRALHAVARNAATPAVLQEMLAVGVVAKLLLVLQADGGERARARAREMLRANARVWKDSPCLQAHLKASYPS

SEQ ID NO: 7928 - protein, 448 aa, Oryza sativa Indica Group
MAEDAPPSSLPLLLPRKSLSSSSAQRKQQYARCVSHAGDELHSFRSCLAWMCVDHSTRARGAASWAAFLLLAVAAPSAATLALPSPVGGGGSPFDGQVQVSLTLAAALAYLTLTALLQGRGLRRLLYLDRLRDDSEEVRSGYIEELAGSFRVLACFLLPCTLAEAAYKAYWYLAAPPFRSPWWSAAACAVEVASWAYRTAVFFMVCVLFRTICYLQILRMKGFAREFCRFADVAAVLESHRRIRKQLHRISHRYRRFILCCLVLVTASQFAALLATTRPHAQINLATAGELALCSLSLVAGLLVCLQSAAKITHKTQAITSVAAGWHADATINAFDNDQEDPNPDLPRIVGYLVPVNAYWMASGESSSDSSSSSSSDDDDSGHPKSKYIPFQNNHCFQQRQALVTYLENNRAGITVYGFVVDRTWLHALFMIEFSLVMWLLGKTVGIS

SEQ ID NO: 7929 - protein, 709 aa, Oryza sativa Indica Group
MGRGSHGCSVLGSSLLLLFCLGSAAAQKASTWKTLSGNPPAIIAKGGFSGLFPDSSDFAYGFVAAASSPDTALWCDVQLTRDGAGICLPDIRMDNCTNIANVYPKGKKTYSVNGVSTPGWFSVDYDSTGLSKVNLVQSLFSRVPYYDGTLPILPVESVFANYKAPAVWLNVQEELTRRRKLVFRLLNELAVEPSTNQTYGSMLKNLTFIKTFASGILVPKNYIWPVTQDNYLQPSTSVVGDAHKAGLEVYAADFANDFLLSYNYSYDPLTEYLNFIDNGAFSVDGVLTDFPITPSEAIGCFSNLNNSKTDNAKPLIISHNGASGDYPDCTDLAYQKAVTDGADVIDCPVQVTKDGIPICMSSIDLMDVTTVSTSQFSSQTTVIKDIKNGAGVYSFNLTWDDIAKNLKPKISNPMTTFDVYRNPRNKNAGSFMRLSDFLAFAKGKELSGVMISIEHAAFMAEKLGFGVVDAVIKALDDSGYSKQTAQKVMIQSTNSSVLVKFKEQTKYNLVYMLEEDVRDAAPSSLADIKKFANAVSVRTTSIYPESKHYLINQTSHIVQTLQSAGLPVYVYVLMNEFVSQPNDFFADATTQINTYVQKKGAGVDGIITDFPATVHRYRLSPCTSKESNLPTFMLPVQPGGLSGTIIDPAAQPPAMAPMPLLTDSDVAESPLPPVKNVTAPAPGASRAIKMRTDASIIVALLVLCASLII

SEQ ID NO: 7930 - protein, 447 aa, Oryza sativa Indica Group
MVSMPPSLPPLPLPPQLSLADLKALSVLGRGARGVVFHVVPAGGTAAAVSATADEDPMALKAISRAAARHKCAEVAGGPGGDGHRRIWFERDVLLALRHPLLPSLRGVVATDSVVGFAIDRCAGGDLNALRRRQAGRVFSVAAIRFYAAELVLALEHLHGLGVVYRDLKPENVLIQDSGHIMLVDFDLSTTLPPPPPPPPPDTAPPPQTARSRGGRRDSTKAAAAVFGCFSSRRAAASRPSPSSSSSSRSPPSTSRTASSSSSSTRCSSAAAKSNSFVGTEDYVAPEIVAGSGHDHAVDWWGLGVVLYEMLYGRTPFRGRSRRETFHRVLAARPDMPGEPTPLRDLIGLLLEKDPGRRLGAHGVKRHAFFRGVDWDRVLHVARPPFIPTPDDDDAGAAAEALDVEKVLHEAFAASTAAAAGETAAVETAAPEAGSDRGRDEDFSVFF

SEQ ID NO: 7931 - protein, 289 aa, Oryza sativa Indica Group
MEGQQFAWGREEGGWRKGPWTAQEDKLLVEYVMQHGEGRWNSVAKITGLKRSGKSCRLRWVNYLRPDLKRGKITPQEESVILELHALWGNRWSTIARSLPGRTDNEIKNYWRTHFKKGKPSKNIERARARFLKQRREMQQQSQLMQTGQQQQLGQDDDATSAVVDDNLAEVAPPAATSLTHDGELQIMQEMAPDMDDLLYYHPGDMSPYSYDDLLGSGGGECGAVAASAGAAASTSEGSSEELDGGAATWGSLWNLDDVVHDMMIDCAAGAGCCWGSFPPLQDQGLAFY

SEQ ID NO: 7932 - protein, 422 aa, Oryza sativa Indica Group
MGLGNEASSSSSRLLDPAPLLPHHGGDGAGKLSSQPKTFANVFIAVVGAGVLGLPYTFSRTGWAAGSILLLSVAALTFYCMMLLVACRRRLADEHPKIASCGDLGDAVFRGPGRLAVDTMLVLSQASFCVGYLIFISNTMAHLYPVFAPSSNALLSPKALFIWAMLPFQLGLNSIKTLTLLAPLSIFADVVDLGAMGVVLGEDVSVWLAKPPPVFAFGGLSAILYGIGVSVYAFEGIGMVLPLEAEAANKKKFGTTLGLSMGFIAVMYGLFGAMGYIAFGDATRDIITTNLGTGWLSAAVQLGLCINLFFTMPVMMHPVYEVAERLLHGKRYCWWLRWLLVLAVGLSAMYVPNFTDFLALVGSSVCVLLGFVLPASFHLKVFGAEMSWPGVLSDVLLVLLGLSLAVFGTYTSLLQIFHSSST

SEQ ID NO: 7933 - protein, 311 aa, Oryza sativa Indica Group
MATRLLCWTALLLPIIAATAAASPLPEACPVPTAAEEILGPGGTCTPLDRRGDPVGVIEGDEVTLAKAITLVHMNKDDYIAVLFYASWCPFSQECKPNFEILASLFPSIRHFAFEESSIRPSIISRYGIHGFPTLFLLNSTMRVRYHGPRTVKSLAAFYRDVSGFDVSMTSEAVLHSVDGIELKKDAEQENCPFWWARSPEKILQQDTYLALATAFVILRLLYLLFPKIGSFAKRAWRRHTLFPNLVGVHEYFFTYLEQARHKFFRLYPSKRGNLQEGARNATAWASKSLASVSIGEPSTIGRTNSTNELR

SEQ ID NO: 7934 - protein, 360 aa, Oryza sativa Indica Group
MDFPGGSGRQQQQQQLPPMTPLPLARQGSVYSLTFDEFQSTLGGVGKDFGSMNMDELLRSIWTAEESHAVGAATTTTATTASVAAAEHAAVGAPPVQRQGSLTLPRTLSQKTVDEVWRDMMCFGGGGASTAPAAAEPPPPAHRQQTLGEITLEEFLVRAGVVREDMSVPPVPPAPTPTAAAVPPPPPPQQQTPMLFGQSNVLPPMVPPLSLGNGLVSGAVGHGGGGAASLVSPVRPVSSNGFGKMEGGDLSSLSPSPVPYVFNGGLRGRKAPGIEKVVERRQRRMIKNRESAARSRQRKQAYMMELEAEVAKLKELNDELQKKQDEMLEQQKNEVLERMSRQVGPTAKRICLRRTLTGPW

SEQ ID NO: 7935 - protein, 365 aa, Oryza sativa Indica Group
MCGGAIIHHLKGHPEGSRRATEGLLWPEKKKPRWGGGGRRHFGGFVEEDDEDFEADFEEFEVDSGDSDLELGEEDDDDVVEIKPAAFKRALSRDNLSTITTAGFDGPAAKSAKRKRKNQFRGIRQRPWGKWAAEIRDPRKGVRVWLGTFNSAEEAARAYDAEARRIRGKKAKVNFPEAPTTAQKRRAGSTTAKAPKSSVEQKPTVKPAFNNLANANAFVYPSANFTSNKPFVQPDNMPFVPAKNSAAPIEDPIINSDQGSNSFGCSDFGWENDTKTPDITSIAPISTIAEVDESAFIKSSTNPMVPPVMENSAVDLPDLEPYMRFLLDDGAGDSIDSLLNLDGSQDVVSNMDLWSFDDMPVSDFY

SEQ ID NO: 7936 - protein, 382 aa, Oryza sativa Indica Group
MAFFVKISAPCSLAGHGTTSSSSGSSRSKRGLLLPVGAGAGAGAYGGRQYSDVVPVPALSQAQASSSGGRLRIFSGTANPRLAQEVACYLGMELGRVKIKRFADGELYVQLQESVRGCDVFLVQPTCPPANENLMELLIMIDACRRASAKTITAVVPYFGYARADRKMRGGRESIAAKLVANLITEAGAHRVLACDLHSGQSIGYFDIPVDHVYGQPVILDYLASKTICPDEVVVVSPDVGGVARARTFAKKLSDAPLAIVDKRRQGHNQSEVVHLIGDVRGKVAVMVDDMIDTAGTVSQGAELLHREGARAVYACSTHAVLNPPAVDRLSSGLFQEVIVTNTVPVLHHRTFPQLTVLSVANLLGETIWRVHDDCSVSSIFQ

SEQ ID NO: 7937 - protein, 429 aa, Oryza sativa Indica Group
MNGGIGDALMQPQHVQVMSSSLPMVASTFVAEPAAAAAAANKPRAAGLPPTPPQVFAAQRAAAAAGGDVCMEESAQGGGGGLPPRKAHRRSSSDVPFGYLAGQHQLLPPKVEAGWGHLGAGAGGAAAADDLFNAYLNLDGLDGLNSSDDRHDEGDSRGSSIKTNGADSSENESEECADDTRGGIRLWSADGGERREGVKRNAAGEPATAPLARHARSLSMDSLIGKFNFTAGTAAAAGNGVALGPNRFSLEFGSGEFTPSEMKKIMADEKLAEMALADPKRVKRVLANRQSAARSKERKMRYIAELEQKVQILQSEATNLSAQLTMMQRDSAGLATQNNELKFRLHAMEQQAQLRDALNEALTTEVQRLKLATAELGDSCSSSSLAQQIQLNAQNQMFQLQQQQATQIPFYQLQQSQQNGAAKNNESKE

SEQ ID NO: 7938 - protein, 394 aa, Oryza sativa Indica Group
MDYFRSCWGPRSPAGHRVRGSDVAGRQDGLLWYKDAGQLVTGEFSMAVVQANNLLEDQSQVESGALSMAEPGPQGTFIGVYDGHGGPETARFINDHMFHHLRRFATEHKCMSTDVIRKAFQATEEGFLSLVSKQWSLKPQIAAVGSCCLVGVICSGTLYVANLGDSRAVLGRFVKSTGEVVATQLSSEHNACYEEVRQELQASHPDDPQIVVLKHNVWRVKGLIQISRSIGDVYLKRPEYNREPLHSKFRLRETFKRPILSSEPAIAVHQIQPNDHFVIFASDGLWEHLSNQEAVDLVQNNPRNGIARRLVKVAMQEAAKKREMRYSDLKKIDRGVRRHFHDDITVIVVFLDSNAISKANWSRGPSVSLRGGGVTLPANSLAPFSAPTVLSSTY

SEQ ID NO: 7939 - protein, 157 aa, Oryza sativa Indica Group
MGFVSFAGRVLFASVFLLSAYQEFSEFGADGGPAAKALRPKYNVFTKNISAHLGVAVPHVELKHIVAATIGLKGLGGLLFILSSSFGAYLLLIYLAFITPVVYDFYNYNMEKSEFVQLFMKFTQNLALFGALLFFLGMKNSIPKRQAKKKAPKSKTN

SEQ ID NO: 7940 - protein, 1017 aa, Oryza sativa Indica Group
MKNLFKSKIKWQHRSNDPASSQGQGQGLPQQTPPSPSPASSPSGGPPALSVSTVSSSSPSAAATPTGAAAAGAGGGGGGTGGEDYMLSEEEFQMQLAMALSASNSECVGDLDGEQIRKAKLISLGRGNRFAAVRDDEQTADALSRRYRDYNFLDYHEKVIDGFYDIFGPSMESSKQGKMPSLADLQTGIGDLGFEVIVINRAIDTTLQEMEQVAQCILLDFPVANIAALVQRIAELVTDHMGGPVKDANDMLTRWLEKSTELRTSLHTSLLPIGCIKIGLSRHRALLFKILADSVGIPCKLVKGSNYTGDDDDAINIIKMNEREFLVDLMAAPGTLIPSDVLSWKGNSLNSNARLTQNPLAGSSSTTDSNLSANALPPGHKGGQLPLFSSGDWILASQSGYEKDGATTSSQASSSGTTSVAAGSAFDSSWTLVSHGQSDDPSTSAGMSAQQKVILPGGEHPWNENINARNENIKLVSDLQGNSESINLFADLNPFGGREPKRTSVPLNGPDNRNNELQRRRENVVPSTRRPQQRLVMKNWSPYNDVSNNKQYNYVEDSFARRNIGDNAASSSQVARPSAKNTNLNVGVRTDTPYMAAHNYDNSMAGSSAMKMTSTAGIGKVPDKVLYGDLDKGLTNSRLGDQPPIERHKWGNSVEGRIPTGTVHNQAKEHKENFDGKQDNKKLHPDPKKSPLDRFMDTSMPSRNPESVSPSFARSHKLDTMFDDVSECEIHWEDLVIGERIGLGSYGEVYRADWNGTEVAVKKFLDQDFYGDALDEFRSEVRIMRRLRHPNIVLFMGAVTRPPNLSIVSEYLPRGSLYKILHRPNCQIDEKRRIKMALDVAKGMNCLHISVPTIVHRDLKSPNLLVDNNWNVKVCDFGLSRLKHSTFLSSRSTAGTPEWMAPEVLRNEQSNEKCDVYSFGVILWELATLRMPWSGMNPMQVVGAVGFQDKRLDIPKEIDPLVARIIWECWQKDPNLRPSFAQLTSALKTVQRLVTPSHQESQSPPVPQEIWVNSSTP

SEQ ID NO: 7941 - protein, 316 aa, Oryza sativa Indica Group
MQKSNPRFFPLLLLLLLCRYHDEISRRDERGARRDETRREGAARRNATQRKATLRLGEWVHDPSEGMNGSRQMELHYINTGFPYTITESFMDFFEGLTYAHADFAIADAFHDQANPYWAMMHTNSYKYGYSGAGNYYSYGHVYDMNDYMHRADGGRRIWDNATPVNNTESPNVVLQGGETPHANTSSTTEECIQQQVHQNSSSPQVIWQDNIDPDNMTYEELLDLGEAVGTQSRGLSQERISLLPVTKYKCGFFSRKKTRRERCVICQMEYRRGNLQMTLPCKHVYHASCVTRWLSINKVCPVCFAEVPGDEPKRQ

SEQ ID NO: 7942 - protein, 251 aa, Oryza sativa Indica Group
MCGGAILAEFIPAPSRAAAATKRVTASHLWPAGSKNAARGKSKSKRQQRSFADVDDFEAAFEQFDDDSDFDDAEEEDEGHFVFASKSRVVAGHDWRAAARAASKKKRGRHFRGIRQRPWGKWAAEIRDPHKGTRVWLGTFNTPEEAARAYDVEARRLRGSKAKSGGSPAKKARSDDVDSSEGSVGGGSDTLGFTDELEFDPFMLFQLPYSDGYESIDSLFAAGDANSANTDMNAGVNLWSFDDFPIDGALF

SEQ ID NO: 7943 - protein, 391 aa, Oryza sativa Indica Group
MGALRRWLPCCCCCRGGGGGGGGGSVGDGLVWDVALKAHASGDYSVAVAQANEALEDQAQVFVSPAATLVGVYDGHGGPEAARFVNKRLFSLIQEFAAQSGGISAEVLEKAFGETEEEFVASVQRSWPSQPRILSVGSCCLVGAIEDGTLYVANLGDSRAVLGRRAAAGAAHGRKGKNRVVPERLSRDHNVADEDVRRELKELHPDDSHIVLNTHGVWRIKGIIQVSRSIGDVYLKKPEICKSNPMLQQTICPFPLRRPVMSAVPTIKTRKLRPGDQFVIFASDGLWEQLTDEAAVAIVAGSPRRGVAMRLVRAAQLEAARKKDVKYERIRTIEKGQRRHFHDDITVVVLFLDKCRGKAGRGDEIDGTDGPVDVFSLSPDDREDPTRPVLR

SEQ ID NO: 7944 - protein, 162 aa, Oryza sativa Indica Group
MALVEGNNGVSGGAVSFSEEQEALVLKSWAIMKKDSANIGLRFFLKIFEVAPSASQMFSFLRNSDVPLEKNPKLKTHAMSVFVMLRKAGKVTVRDTTLKRLGATHFKYGVGDAHFEVTRFALLETIKEAVPVDMWSPAMKSAWSEAYNQLVAAIKQEMKPAE

SEQ ID NO: 7945 - protein, 262 aa, Oryza sativa Indica Group
MASASTSLSLAFSPLLLPTPRPRPYSRPINPGFPTPLLLRLACSPPSRRAGPVAAVPDGVAVADVVEKDWSFLDAAAAAAAAGGSLPRALAAGALSPASRVLAVTPAPSFVDALLSGHPCELLVAAHESLYVLAGIKEGHDEVRCFHLEGGGGGRGGGVVEGVPERFDAFDAVFVCYFPGMGVSAAALLKSLAKRCSKGGRVVIFLDQGRQSLEQHRREHPEVVTADLPTRPSLEKATAGSKFEILEFVDEPTLYLAVLQFQ

SEQ ID NO: 7946 - protein, 329 aa, Oryza sativa Indica Group
MDMAHERDASSEEEVMGGDLRRGPWTVEEDLLLVNYIAAHGEGRWNSLARSAGLKRTGKSCRLRWLNYLRPDLRRGNITPQEQLLILELHSRWGNRWSKIAQHLPGRTDNEIKNYWRTRVQKHAKQLKCDVNSQQFKDVMRYLWMPRLVERIQAAAAGQQQQQEGGADTPPLSWQHGGSDGLYESPELPAPDASCWPAEYCAAAGGAQSGGTPAPELSSTTAGSSSLSTDSGAGAQPSWPTQADGAEWFTTACDASSATGGVAMRDTELELAQPPCQGGQTWTMSESSLPGLTFPDLAVADFEIGGFDVDSFWTSMEDDQLWCPTQAAV

SEQ ID NO: 7947 - protein, 318 aa, Oryza sativa Indica Group
MEEQKHTDKAKAKLSMLKSKVICCKLYISESQNAKVVDAITRIGQKDPEVVLLSKFEDDHYNRVRYTLASYIINENSTGEVKFSPMRRVLLEMIEKAFSTINLETHTGTHPRIGVIDDMSFHPLNQATMEDAAQLAKTVASDIGNFLQVPVFLYGAAHPTGKPVTAVRRELGYFQPNYMGIQWMGQVLPDILPVKPDEGPDHVSRERGAIMIGAAPLPLSYNVPVLSKDIPTIRRITRRVTGRGGGLPTVQALALSHGDDCTEIACFLDPDHVSADQVQQQVEQIAAEQGLEVEKGYFTDFSKDAMLEKYFKIVLSVD

SEQ ID NO: 7948 - protein, 233 aa, Oryza sativa Indica Group
MAANVGESTSSGTNGDAAGGSFECNICFELPQEPIVTLCGHLFCWPCIYRWLHIHAHSPECPVCKAVVEEDKLVPLYGRGKDRVDPRSKNIPEADIPNRPTGQRPATAPQADPNNNFAHANPNANANPWFMGTGVPLANARWGNYAFSAAFGGLFPMLSFQVHGFPDANPYAQPAGFHYGYGHGHGFHGGHMGHAAHSVPRQGPLEQPQQADIYLKALLIMVGFLVVASLLAF

SEQ ID NO: 7949 - protein, 742 aa, Oryza sativa Indica Group
MERRDNFLQPPAAAAAPAAGGGKGLPVPATGDATNLTSSSSSTSSLTLSPPDFLRQVQAALKRHRPTGSMQSNQPRATRVLVSRGEGSTKAVANPSVAQNPEGKVVQQRRGPLGASRLRNAAPDQNKAVVSSQDELLLTTPLTLGTITDTHDQNGGQNHQPKSDTDLLVDRKKSSMEVSSSQMACANALVGEDFKKDLFYLTSDPQLTSQTGDNFPVAQVADDQGKNHKEIGIASAAVEMDIKYDAANLSRRIDEACDQNHGEPMTRCSAMGSSVTAVSLYSGPTIQSKSAAQIDQYASPAQMPQCGRESSGVSGHGSQKLHGVAMNHADCNTNKQQVDTNGGMDKPVSSSAVCLPSQGLSGNDQSLSAKDDGAPRRSKVEKERRKKNYDPDVFFKVNGKLYQKLGKIGSGGSSEVHKVISAECTIYALKKIKLKGRDYPTAYGFCQEIEYLNKLKGKSNIIQLIDYEVTDKSLLQDDSLSPRDGRIKDDHYIYMVLEYGEIDLANMVAQEWKERNTSNMKIDENWLRFYWQQMLKAVNTIHEERIVHSDLKPANFLLVRGALKLIDFGIAKAIMNDTTNIQRDSQIGTLNYMSPEAFMCNEQDSGGNVIKCGRPSDIWSLGCILYQMVYGKTPFADYKNFWAKFKVVTDKNHKIKYEPVDNPWLIDLMQRCLAWDRNDRWRIPQLLEHPFLVPLVPRDLPSIDQDPCRLLMERVRVHWANPKLHSFIAELEKDQCRPATQM

SEQ ID NO: 7950 - protein, 888 aa, Oryza sativa Indica Group
MSSSRSNNRATCSRSSSARSKHSARVVAQTPMDAQLHAEFEGSQRHFDYSSSVGAANRSGATTSNVSAYLQNMQRGRFVQPFGCLLAVHPETFALLAYSENAAEMLDLTPHAVPTIDQREALAVGTDVRTLFRSHSFVALQKAATFGDVNLLNPILVHARTSGKPFYAIMHRIDVGLVIDLEPVNPVDLPVTATGAIKSYKLAARAIARLQSLPSGNLSLLCDVLEYHDGSTGLSTDSLVEAGYPGAAALGDVVYGMAAIKISSKDFIFWFRSHTAKEIKWGGAKHEPIDADDNGRKMHPRSSFKAFLEVVKWRSVPWEDVEMDAIHSLQLILRGSLQDEDANKNNNAKSIVTAPSDDMKKIQGLLELRTVTNEMVRLIETATAPILAVDITGSINGWNNKAAELTGLPVMEAIGKPLVDLVIDDSVEVVKQILNSALQGIEEQNLQIKLKTFNHQENNGPVILMVNACCSRDLSEKVVGVCFVAQDMTGQNIIMDKYTRIQGDYVAIVKNPSELIPPIFMINDLGSCLEWNEAMQKITGIKREDAVDKLLIGEVFTHHEYGCRVKDHGTLTKLSILMNTVISGQDPEKLLFGFFNTDGKYIESLMTATKRTDAEGKITGALCFLHVASPELQHALQVQKMSEQAAMNSFKELTYIRQELRNPLNGMQFTRNLLEPSDLTEEQRKLLASNVLCQEQLKKILHDTDLESIEQCYTEMSTVDFNLEEALNTVLMQAMPQSKEKQISIDRDWPAEVSCMHLCGDNLRLQQVLADFLACMLQFTQPAEGPIVLQVIPRMENIGSGMQIAHLEFRLVHPAPGVPEALIQEMFRHSPGASREGLGLYISQKLVKTMSGTVQYLRESESSSFIVLVEFPVAQLSTKRCKASTSKF

SEQ ID NO: 7951 - protein, 153 aa, Oryza sativa Indica Group
MQPDKPTAGPVSGVPVGSAPWSSGLFDCFDDYGLCCMTWWCPCITFGRLAEIVDMGSTSCGHSGALYVFLAVVTGFQWIYTCTYRGKMRAQYGLSGEPCGDCCIHCWCEPCALIQEYRELAARGYDPKLGWHLNMERRAAAAAAAPAVQHMGR

SEQ ID NO: 7952 - protein, 136 aa, Oryza sativa Indica Group
MARPQHNDWSSGLFACFNDCEVCCLTTVCPCITFGRSAEIVSRGERTCCAAGVLCVLLGFFAHCHCLYSCCYRGKMRDSFHLPEDPCCDCCVHALCLQCALCQEYRHLKSLGYKPSLGWLGNNQHVPPKHNPPMRR

SEQ ID NO: 7953 - protein, 163 aa, Oryza sativa Indica Group
MIIASTNQIEADTLSYQINSPLAHYIKRPPIPSTSSNSIDHILAAAAGCMTCWCPCITFGRVAEIVDRGSTSCGASGALYALLAMVTGCQCIYSCTYRGKMRAQYGLADAACGDCCVHCWCESCALCQEYRELVARGYDPKLGWHLNVERGAAAAPAVQHMGR

SEQ ID NO: 7954 - protein, 479 aa, Oryza sativa Indica Group
MSSSATVVPLAYQGNTSASVADWLNKGDNAWQLVAATLVGLQSVPGLVVLYGGVVKKKWAVNSAFMALYAFAAVWICWVTWAYNMSFGEKLLPIWGKARPALDQGLLVGRAALPATVHYRADGSVETAAVEPLYPMATVVYFQCVFAAITLILVAGSLLGRMSFLAWMIFVPLWLTFSYTVGAFSLWGGGFLFHWGVIDYCGGYVIHVSAGIAGFTAAYWVGPRAQKDRERFPPNNILFTLTGAGLLWMGWAGFNGGGPYAANSVASMAVLNTNICTAMSLIVWTCLDVIFFKKPSVVGAVQGMITGLVCITPAAGVVQGWAALVMGVLAGSIPWYTMMILHKRSKILQRVDDTLGVFHTHGVAGLLGGLLTGLFAEPTLCNLFLPVADSRGAFYGGAGGAQFGKQIAGGLFVVAWNVVVTSLICLAINLLVPLRMPDDKLEVGDDAVHGEEAYALWGDGEMYDVTKHGSDAAVAPVVV

SEQ ID NO: 7955 - protein, 355 aa, Oryza sativa Indica Group
MREHEYLQSLHFNCIRLPDGAGVVNMSLPIVLAIGDREKEEIGASPDVALQGPDGAVLAILRRVEIYPHNKEERIARTWGTTAPGLPYVDEAIAQAGNWLIGGDLEVIEPIKYNDGLDHYRLSPQQLRNEFDKRGADAVFAFQLRNPVHNGHALLMNDTRRRLLEMGFKNPILLLHPLGGFTKADDVPLPVRMEQHSKVLEDGVLDPETTIVSIFPSPMHYAGPTEVQWHAKARINAGANFYIVGRDPAGMGHPTEKRDLYNPDHGKKVLSMAPGLEKLNILPFKVAAYDTVAKKMAFFDPSRSKDFLFISGTKMRAFAKSGENPPDGFMCPGGWKVLVDYYNSLQTEEAAVASV

SEQ ID NO: 7956 - protein, 662 aa, Oryza sativa Indica Group
MATTPASLAAAAAAATAAPEPRGIRPPRAPVHRLRLRHHATRVGCSTVSVSTRPATTTTTTTTRSQPPPPQPPQAAEPLQRRWGPTERRKGADILVEALGRCGVRDVFGYPGGASMEIHQALTRSPAIRNHLLRHEQGEAFAASGYARSSGRPGVCVATSGPGATNLVSALADAHLDSVPLVAITGQVPRRMIGTDAFQETPIVELTRSITKHNYLVLDVDDIPRVINEAFFLATTGRPGPVLVDIPKDIQQQMAVPSWDAPMRLPGYISRLPKPPSANLLDEVIRLVGDAERPVLYVGGGCSASGDELRRFVELTGIPVTTTLMGIGNFPSDDPLSLRMLGMHGTVYANYAVDNADLLLALGVRFDDRVTGKVEAFASRAKIVHVDIDPSELGKNKQPHVSICADVKLALQGMNATLEQQQRKNLDFSAWRSELEKKKAEFPLGYRTFGEEIPPQYAIQVLDEVTNGEAIVATGVGQHQMWATQHYTFRRPRQWLSSAGLGAMGFGLPAAAGAAVANPGATVVDIDGDGSLLMNIQELAMVRVENLPVKVMVLNNQHLGMVVQWEDRFYDANRAHTYLGNPAANGGGEVYPDFVAIAGGFGIPAARVTRKGEVRAAVEEMMAAPGPYLLDVVVPHQEHVQPMIPSNGAFKDIIVDGGGRRT

SEQ ID NO: 7957 - protein, 350 aa, Oryza sativa Indica Group
MSQEGADLSQDVDESPYHTAVVTTNNLVRSIKAEKSNSSSSSGKPVETDIGLKVASPTMFGFNTKIEGTGKNMAVKREEGEGGGRPGVSNGVSTRDTNGKGKNAMDMEHALHIWTERERRKKMKNMFSTLHGLLPKIPGKVANAIEKFYISLIYQDLTDKASIVGEAIGYIKTLEDVVQKLETIKTERVRAHQWAAAAAAAVAANGGGEGSSHSHSQPPRHATAVTVAVAEPAPVAAAVNAQAPQKKAAAAAAPTLQTWSAPNITLTMAGVDAFINMCLPRQRASFTTVAFVLEKHQIDVVTSTISADHDKSLFSVHVRLNEASLQSTEGLTPEAKYKLAVSELMVRLAE

SEQ ID NO: 7958 - protein, 442 aa, Oryza sativa Indica Group
MTDTASPAAAREAMIEPASTPLLRRRGSYTRSMSHARDELGSFRSCLRWMCVEHSDGSSAVASWLVFTLLAVAVPAAARAALPRRAYDGQVQASLTLSAALAYLTLSRLVRRRGLRRLLYLDRLRHDSQDVRAGYTVELAGSFRLLACFVLPCFLADAAYKVYWYCANRPFPLWWSAAACALEMASWMYRTAMFFMACVLFRIICFLQILRMTGFARDFGQCADVADVLRQHRRIREQLRRISHRYRKFIVSCLLLVTASQFSALLAATRPHAQVNIATSGELALCSLSLVTGLLICLHSAAKITHKTQAITSVAAQWHADATINSQERDHENPRTPIKASSYLHAAGPVVPQPAPNASSSGDESEDETSPSDDGLDGTKIVSFHATHISFQKRQALVTYLENNRAGITVFGFVVDRTWLHALFMIEFSLVMWLLGKTIGIS

SEQ ID NO: 7959 - protein, 644 aa, Oryza sativa Indica Group
MAPLPSSSSTRATSLVAIPGASCPHGQAQRLLAFRPPRRGSQWRGLCVSRGRHGATVAMAMPAAQAAGRRARVLVAGGGIGGLVFALAAKRKGFEVVVLERDMSAVRGEGKYRGPIQLQSNALAVLEAVDAGAADQVMDAGCITGNRVNGIVDGVSGSWYIKFDTFTPAAERGLPVTRVISRMTLQQILARAVGDDAILNDSHVVDFIDDGNKVTAILEDGRKFEGDLLVGADGIWSKVRKVLFGQSEATYSEYTCYTGIADFVPPDIDTVGYRVFLGHKQYFVSSDVGAGKMQWYAFHKEPAGGTDPENGKKKRLLEIFNGWCDNVVDLINATDEEAILRRDIYDRPPTFNWGKGRVTLLGDSVHAMQPNLGQGGCMAIEDGYQLAVELEKSWQESAKSGTPMDIVSSLRRYEKERILRVSVIHGLAEWQQSWLPLIDHTWFLTKLRIPHPGRVGGRFFIKYGMPLMLSWVLGGNSTKLEGRPLSCRLSDKANDQLRRWFEDDDALEQAMGGEWYLLPTSSGDSQPIRLIRDEKKSLSIGSRSDPSNSTASLALALPQISENHATITCKNKAFYVTDNGSEHGTWITDNEGRRYRVPPNFPVRFHPSDAIEFGSDKKAVFRVKVLSTLPYESARGGPQILQAA

SEQ ID NO: 7960 - protein, 441 aa, Oryza sativa Indica Group
MAVHHSLEVAAAGGDGGGGRCYDDDGHPARTGTMWTCVAHIITAVIGSGVLSLAWSVAKLGWVGGPACMACFALVTYVSAALLSDCYRRGDDDKGPRSRSYMDAVRAFLGKKHTWACGLLQYASLYGCGVAYTITTATSMRAILRSNCYHTHGHDAPCKYGGSYYMLMFGAAQLFLSFIPDFHDMAWLSVLAAVMSFSYSFIGLGLGLANTIANGTIKGSITGAPTRTPVQKDTLKAPPAENKTMKKASIISIVVTTFFYLCCGCFGYAAFGSDAPGNLLTGFGFYEPYWLIDFANACIILHLLGGYQVYSQPIYQFADRFFAERYPASRFVNDFHTVKLPLLPPCRVNLLRVCFRTVYVASTTAVALAFPYFNEVLALLGALNFWPLAIYFPVEMYFIQRHVPRWSPRWVVLQSFSVLCLLVSAFALVGSIQGLISQKLG

SEQ ID NO: 7961 - protein, 271 aa, Oryza sativa Indica Group
MAAAAAATTRRMSRRRWPAERQEDARDLGAAEDEAAACYRRADTGKDKLFEPDLLAAFRGAVDAYARALQEAKRRDDDDDDGFFLLDEEEGCGVAGGVGFGVDEDPLEGFETRCPPGGERAVVLYTTSLRGVRKTFEDCATVRRLLEGLRVAFLERDVSMHAPYRDELRALLVGLDDAAVPPRLFVDGRYLGGANEVVTLHEQARLRPVLRRAPRRGAGDAACAVCGGAWFVVCGACSGSHRLYDAAAAAGGRVPCTGCNENGLVPCPLCS

SEQ ID NO: 7962 - protein, 591 aa, Oryza sativa Indica Group
MAALRDVLLSIAQTPHRLRRRALVTWTPAQETSEVRDRSGARMKRRLEWYDLVGLGVGGMLGAGVFVTTGRVARDTAGPAVFASYVIAGVSALLSSFCYAEFSVRVPAAGGAFSYLRVTFGELVGFFGGANILMEYVLSNAAVARSFTDYLASTCGITEPDAWRIQVDGIAKGYNALDFPAVALILVLTLCLCYSTKESAMLNMVITVFHLLFFVFIILAGLWNGSARNLVSPHGLAPYGVRGVLDGAAIVYFSYIGYDSASTMAEEIRDPARALPVGIAGSVLVVSALYCLMSLALCAMLPYTEIAESAPFSAVFREKAGWEWAGSVVGAGASLGIVASLLVAMLGQARYLCVIARARLVPAWLAKVHPSTGTPMNATIFLDRANGSIKYTNNFTEVKVLTTVSDHENCNAGLCTASIALFTELQVVFEMISIGTLLVFYLVANALIYHRYAKLGANRSLHVLLFLLLLTLSSLGFSLSRRIHGQCRWGMALFGATSVTITAMFHCAVRRDMPEPPSEWMVPLMPWPAAASVFLNVFLMTTLKVMSFQRFGLWSFVIIVFYVCYGVHSTYSAEENEAVNAMIHHANMDIS

SEQ ID NO: 7963 - protein, 319 aa, Oryza sativa Indica Group
MARSMLRNHPEASVLDTIRQHLLEEPRGGGGGGGEAAEASFGSLVADMWSDSLPFRDDDADDMVVFGAMRDAFSCGWLPDGVFAEVKPEPLLSPDSSSYDGSSCCFGFADVSEPVTPSDAASGAAEAAAAAAAATAEHGKEEEAAAAVARGKHYRGVRQRPWGKFAAEIRDPAKNGARVWLGTFDTAEDAALAYDRAAYRMRGSRALLNFPLRIGSEIAAAAAAAAAAAAGDKRPSPEPATSESSFSSSSSCTTTTTSSSTSSSGSPKRRKRGEAAAASMSMPLVPPPSQLNWPVQAWYPAAAPVEQVAITPRVEQLVI

SEQ ID NO: 7964 - protein, 578 aa, Oryza sativa Indica Group
MAAKPSSSSSSTGGHHTVDIRAAQAQPEEARQSAMSGPINIRGERRPPPMQRAFSRQVSLGSGVTVLGMDKVGKNGGRGQQRALPRSGKSLGVLNHTGALGQAAAGDGAARRGDFSMFRTKSTLSKQNSLLPSRIREPDLELPPHVEGPSVGRQGGEDPLNKSVPAGRYFAALRGPELDEVRDYEDILLPKDEVWPFLLRFPVGCFGVCLGLGSQAILWGALAASPAMRFLHVTPMINVALWLLALAVLVAVSVTYALKCVFYFEAIRREYFHPVRVNFFFAPSIAAMFLTIGLPRAVAPERLHPAVWCAFVAPLFALELKIYGQWLSGGKRRLCKVANPSSHLSVVGNFVGAILAARVGWAEAGKFLWAIGVAHYIVVFVTLYQRLPTNEALPKELHPVYSMFIATPSAASLAWAAIYGSFDAVARTFFFMALFLYMSLVVRINFFRGFRFSIAWWSYTFPMTTASLATVKYAEAEPCFTSRALALSLSLMSTTMVSLLLVSTLLHAFVWRSLFPNDLAIAITKDRQNGAFKPHGKGRKAGKRVYDIKRWAKQAPLSLVSSITKSNSADKEEEEKTE

SEQ ID NO: 7965 - protein, 212 aa, Oryza sativa Indica Group
MGFPVCCYSELLLPKQLLHLLLLLGYIRRFLLWAFHAVGLGDLLDLGDEQQAVLQDHAREHRAPAQALPPQQQHRRAEFRTVPAMVIEEVLPVVRFDELVAAAPAVCGGGDCAVCLSGIGGGDEVRRLSNCRHVFHRGCLDRWMEHDDQRTCPLCRAPLIPDEMAGALWAAAGVPDTSDFDFSYFGAPLTPMPTPTLLRPHELLLTGLGGYQ

SEQ ID NO: 7966 - protein, 421 aa, Oryza sativa Indica Group
MAMEPPPLFLCPISMELMEDPVTVATGVTYDRRSIERWFFKYGKTTCPATMQRLASFDFTPNHTLKRVISSWLDRASSSSSPSTAGSPATTSSSSSSNAMERERLPSVLAGIEETPFKATALKNLRSCMAGDEAAREDFVACGGIQVLGRVMTQALAESSAGGDFSAFRTCEEAAAVLATLPLSDDASVELLLKPECMRPVSELVQRGSAEARLHAMSMISKISRASVRDWTAEVDVDDMVKALLELLSDGASAKLSSRALDVLLDVTARYSRGARRAKAVELGAVRVLAELLLDADRHVAERSLLLLKRMCKCPEGRLAFAEHGLAVAAVARAVLRVSGLATRLAVNVLWLVACAPAPAERVLEDMVVGGAVAKLLALMQVESSPSTKDKAVKMLRAHGAFWRQYPCFPTDLKDYLKSLN

SEQ ID NO: 7967 - protein, 184 aa, Oryza sativa Indica Group
MCEAAAPRYRGVRKRPWGRFAAEIRDPAKRARVWLGTYDSAEAAARAYDVAARNLRGPLARTNFPLVSSLPLPSPHYHLPGKAAAAAPPVAGPACSASSTVESSSGPRGPRPAATAAAVPRRRVPRPAPPAPDAGCHSDCASSASVVDDADDASTVRSRVAAFDLNLPPPLDRDHVDLCTDLRL

SEQ ID NO: 7968 - protein, 417 aa, Oryza sativa Indica Group
MEEQQQVEVEVEVPSYFVCPISLQIMRDPVTLPTGITYDRDGIERWLLTAGTCPLTKQPVPPDCDPTPNHTLRRLIQSWCALHADHGVDLVPTPKPPADRARVADLVSRLRAATSSAALLDALRELRDVSAESERNRKLLAAVPGAVDVLAAVVVASCRDAKAACDEALEIVCSLELSERCLARLVERNEELVDALVATLQRTNTTSRAHAALLLEAVTAVMPSNRLVSLPEEVFGEAVQLLRDRVSSPATRAALHVLVGTTSWGRNRVKAVDAGAVAVLVDMLLDRASRAARVRAGPGGAGPDVRVRGGAGGAGVARRGRGGGGEEGAEGVGGGEREGGAGAAVGGEARGDGGGGAGDGADGGGGEAVRGGAVGAVRGEDAGAGAGDAAAARQSVEELALLAASPPGPLPFLLIEF

SEQ ID NO: 7969 - protein, 278 aa, Oryza sativa Indica Group
MAEAEAEEEMMMRMMCGSGGNEMMKTKMKKKNREGEEEEEVSGGGRMRKGPWTEQEDVQLVWFVRLFGERRWDFLAKVSGLKRTGKSCRLRWVNYLHPGLKRGRITADEERLILHLHSQWGSRWSRIARSLPGRTDNEIKNFWRTHMRKIAHHAKKKTNSPSPAPTTSSGSLSSSLTTATTTMATAAALQESSSCGGDDEAVDQLVAAATTPASQLLTMDYTMDQLWNDIAAAEADTSCYDAAAMASPPSPVWEFCTDYSLWRIDDEEYYKKMLDASQ

SEQ ID NO: 7970 - protein, 311 aa, Oryza sativa Indica Group
MEMMRMAMSPAMSSATAAAASEDEGDLRRGPWTVEEDMLLVDYIANHGEGRWNSLARCAGLRRTGKSCRLRWLNYLRPDVRRGNITADEQLLILDLHSRWGNRWSKIAQYLPGRTDNEIKNYWRTRVQKHAKQLRCDVNSKEFRDVVRHVWMPRLVERIQADAAAAGEVAAPAPVSAAATRSMSSPAGAMYLHHQQIPLAAGAMVVAPAVSSEAYHHHGCGGGGDTSCSEPSQAAVTMSPDDASSTLRSSSAAAENDTIHGDVLSGSWSELLATTTTTTIAATAGLPDFDELGDFEDNLWSLEDIWLHQQC

SEQ ID NO: 7971 - protein, 1274 aa, Oryza sativa Indica Group
MSESSRAFGVNASSSSSGGGGGEAVAGTTGKNGGGGSVAFHRLFAFADGTDAALMLLGTLGAVANGAALPFMTVLFGGLIDAFGGAAGGDVVARVSEVSLQFIYLAVASAAASFIQVACWMITGERQAARIRSLYLRTILRQEVAFFDKHTNTGEVVGRMSGDTVLIQDAMGEKVGKFVQLLVTFLGGFGVAFAQGWLLTLVMLATIPPLVLSGAVMSNVVARMASLGQAAYADASVVVEQTIGSIRTVASFTGEKQAVAKYSRSLKRAYSSGVREGLAAGVGMGTVMVLLFCGYSLGIWYGAKLILEKGYTGAQVMNVIFAVLTGSLALGQASPSMKAFAGGQAAAYKMFETINREPEIDAYSATGRKLDDIQGDIEFRNVYFSYPTRPDEQIFRGFSLAIQSGTTVALVGQSGSGKSTVISLIERFYDPQLGEVLIDGVNLKELQLRWIRSKIGLVSQEPILFAASIIDNIAYGRDNATNQEIRAAAELANASKFIDKMPQGFATLVGEHGTQLSGGQKQRIAIARAILKDPRILLLDEATSALDTESERIVQEALDRVMSNRTTIIVAHRLTTVRNADTIAVIHQGSIVEKGSHHELISDPDGAYSQLIRLQENSHDSEMQIPEQVSKKSDSGIRSGKQSFSYQSTPQRSSRDNSNNHSFSVSATPLEIDVQGGSPKKIAEETPQEVPLSRLAALNKPEIPVLLLGSVASAVSGVIFPIFAILLSNVIKAFYEPPQVLKKDAEFWSSMFLVFGAVYFLSLPIGSYLFSVAGCRLIRRIRLMTFEKVVNMEIEWFDHPENSSGSIGARLSADAAKIRGLVGDALQLVVQNLATLVAGLLIAFISNWELSLIILALIPLIGVNGWIQMKFIQGFSADAKMMYEEASQVANDAVSSIRTVASFSAEEKVMDLYKMKCEGPLRTGIRTAIISGIGFGVSIFLLFGVYAASFYAGARLVEDRKTTFPNVFRVFLALTMAAIGVSHTSNLTSDSSKAKSAVSSIFAIVDRKSRIDPSDDAGVSLEPLRGDIEFQHVSFRYPTRPDVQIFEDLCLTIQSGKTVALVGESGSGKSTAISLLQRFYDPDAGHILLDGVDIQKFQLRWLRQQMGLVSQEPALFNDTIRANIAYGKEGDATESDIVSSAQLANAHKFISSLHQGYETMVGERGAQLSGGQKQRIAIARAIVKDPKILLLDEATSALDAESERVVQDALDRVMMNRTTVIVAHRLSTIQGADMIAVVKNGMIIEKGKHDALIGIKDGAYASLVALHVSAAAIS

SEQ ID NO: 7972 - protein, 734 aa, Oryza sativa Indica Group
MGELKRALDARGHALLEMPTGTGKTAALISLITSYSLASPSRPLRLIYCTRTVHEMEKTLAELRLLFAHLPAAASRSLLALGLSSRKNLCVHPQASAAAARDSVDTACRRLTASWVRDRAASDPDSTPLCDFFESFDRAAAAGDLASYMPPGVYTLADLRALGRDRGICPYFLARQMVKYANVVVYSYQYLIDPKVASIVSREMQKECVVVFDEAHNIDNVCIEALSVSIRKQTLEGAERNLRRISQEIDRFKATDANRLRAEYNRLVDGLAQRGNLPISDAWLANPALPEDILKEAVPGNIRRAEHFLAVLRRLVRFLDGRLETENVENEMPVAFVASIHSQAGIDQKMLRFCYDRLHSLMLTLEITDTDEFMHIQTICDFATLIGTYTRGFSIIIEPYDERMPDIRDPVIQLSCHDASLAIQPVFERFQTVVITSGTLSPIDLYPRLLNFNPVISRSFTMSLTRDCICPMVLTRGSDQLPVSTKFDMRSDPGVVRNYGRLLLEMASAVPDGIVCFFVSYSYMDGIVNSWNEMGILQDIMQHKLVFIETPDVVETTLALDNYRKACDCGRGAIFFSVARGKVAEGIDFDRHYGRLVIMFGVPFQYTLSRILLARLEYLRETFQIKEGDFLTFDALRQAAQCVGRVIRSKADYGMMIFADKRYSRHDKRSKLPGWILSHLHDAHLNLSTDMALHIAREFLRRMAQPYDKTGSGGNKTLLTEEDLQNMAQDAMEM

SEQ ID NO: 7973 - protein, 246 aa, Oryza sativa Indica Group
MATTTARLLLLLTVAGFCLCHTTGQEAAPPPPPYCGSLRTAVEARNIIGWKTVPPPCAKYVADYITGERYGRDADVVINEAIAYAESLKLSGTGKEIWVFDVDDTALSTVPYQANHGYGVQLFDNQSFLKYVVQGSAPALQSTLRLYRRLLQLGIKPVFLTDRTEDQRTVTTNNLIQQGYCNWEKLVLQPVGLQTSTLAFKTCERQKLVNDGYIIVGNIGDQWNDIRRSPDGCRTFKFPNPMYYVD

SEQ ID NO: 7974 - protein, 280 aa, Oryza sativa Indica Group
MATAAARLLLLLFLTAAASAWEMNIRLPTEMLSGGEAVVAPVIHALRPLLGSGGQLAARAGVACDSWRLGVEAHNVIGWRTVPARCEGYVGHYMLGGHYRRDSAVVVDEAIAYAESLQLAGNGKEIWVFDIDETSLSNLPYYANHGFGATLYNDTSFREYVAEGSAPALPETRRLYRRLLQLGVKPVFLTGRTEDQRNITVTNLRRQGYSGWMELLLKPVVHAAGELQGSAVAYKSGERQKLEDAGFTIVGNIGDQWSDILGTPEGARTFKLPDPMYYIG

SEQ ID NO: 7975 - protein, 847 aa, Oryza sativa Indica Group
MPSSSAAALLLQLQLLLVISLSTAQPGFISLDCGGDGDFTDDIGIQWTSDDKFVYGGKTANLSVQNDLPKQLKTVRYFPVDDRKYCYTMNVSERTRYLVRATFLYGNFENSNIFPKFDLSLGAAPWTTVVVYDDTTPAVVEAIILASAPTLSVCLSNASTGQAPFISTLELRQLNGSLYETDYENQFFLKLSARINFGAESNASVRYPDDPFDRIWRSDLVRRANYLVDVAPGMERISTKRHISIRTDGEEPPEEVMRTAVVGQNGSLTYRLNLDETPGNSWAYAYFAEIEDLAPNETRKFKLAIPEMPEYSTPTVNVEENAPGKYRAYEAANNMAILVSRYPQESWAQEGGDPCLPASWSWIQCSTEKAPRVLSICSSQCLEFWKDKNYFLFRRTLSGKNITGSIPVELTKLPGLVEFHLEDNQLTGALPSSLGDLPNLKQFFSGNSNLHVAHNTITHPVIIIVCVVIGAFVLLVAAVGCYLFAYNRKKKPSDAPAKQLSSPLSEVTTESVHRFALSEIEDATDRFGRRIGYGGFGIVYYGKLADGREIAVKLLINDSYQGTREFLNEVTLLSKIHHRNLVSFLGYSQQDGKNILVYEFMHEGTLKEHIRGGPAYVKVTSWVKRLEIAEDAAKGIEYLHTGCSPTIIHRDLKSSNILLDKNMRAKVADFGISKPVVSGSHVSTMVRGTFGYLDPEYYGSQQLTEKSDIYSFGVILLELISGQEPISDDHFGPHCRSIVAWATSHIESGNIHAIIDQSLDTGYDLQSVWKVAEVAIMCLKPTGRQRPSMSEVLKEIQDAIALERGGRELVPSIQHPVSKCSPSVNMDSVVLEQNSRFDELLELPGLR

SEQ ID NO: 7976 - protein, 605 aa, Oryza sativa Indica Group
MELALVGDPSNGVAKPSCDSVGSLPAVSSKAVIHPPVTSAAGATLGRHLARRLVQIGATDVFAVPGDFNLTLLDYLIAEPGLKLIGCCNELNAGYAADGYARARGVGACAVTFTVGGLSVLNAIAGAYSENLPVICIVGGPNSNDYGTNRILHHTIGLPDFSQELRCFQTITCYQAVINNLDDAHEQIDTAIATALRESKPVYISVGCNLAGLSHPTFSREPVPLFISPRLSNKANLEHAVEAAADFLNKAVKPVMVGGPKIRVAKAKKAFAGIAESSGYPFAVMPSAKGLVPEHHPRFIGTYWGAVSTTFCAEIVESADAYLFAGPIFNDYSSVGYSLLLKREKAVIVQPDRVVVGNGPAFGCILMTEFLDALAKRLDRNTTAYDNYRRIFIPDREPPNGQPDEPLRVNILFKHIKELLSGDTAVIAETGDSWFNCQKLRLPEGCGYEFQMQYGSIGWSVGATLGYAQAAKDKRVISCIGDGSFQMTAQDVSTMLRCEQKSIIFLINNGGYTIEVEIHDGPYNVIKNWDYTGLIDAIHNSDGNCWTKKVRTEEELIEAIATATGAKKDCLCFIEIIVHKDDTSKELLEWGSRVSAANSRPPNPQ

SEQ ID NO: 7977 - protein, 463 aa, Oryza sativa Indica Group
MELTESKCDGGQEVSLLDAQLELYWNTFAVIKSMALKSALDLGIADAVHRHGGAATLAEIASEVALHPSKIPCLRRLMRALTVSGVFAAAVKPGDGGGGEPVYELTPSSRLLVGSSNLSGIMSMILHPTLVVPFLGVGEWLRRDREPPEEDPYCIFKQAHGRSLWELAGRDAAFDALVNDGMVSDSRVIMDYVVREHGEVFRGIASLVDLAGGLGAAAQVISKAFPEVRCSVMDLVHVVAKAPAGTDVEYIAGDMFESVPPADAVFLKWVLHDWGDDDCIKILKNCKKSIPPRDKGGKVIIMDIVVGAGPSDQKHREVQALFDMYIMLVNGIERDEQEWKKVFVEAGFSGYKIMPILGFRSMIEWVLHDWSDDDCIKILKNCKKAIPPRDKGGKVIIMDIVVGAGPSDQKHREVQTLFDMYIMFVNGIERDEQEWKKVFMGAGFSGYKIMPVLGFRSMIEVYP

SEQ ID NO: 7978 - protein, 940 aa, Oryza sativa Indica Group
MAARSWLLLLCFVAVATAGVLQARAQPDSNGFISVDCGLPGKTGFVDDKTMISYAADDGFTDGGACHNISAEYITPGLAKRYHTLRSFPDGKRNCYTLRSLVAGLKYLFRATFFYGNYDGLNKLPVFDLYVGVNYWTMVNITGPGDAVIVEAIVVVPDDFVQVCLVNTGAGTPFISGLDLRPLKNTLYPQSNATQGLVLLGRLNFGPTDYTDVIRYPDDPHDRIWFPWVDSTKWSQISSTKKVQDLDNDMYETPTAVMQTAITPRNASRNIEFSWDPVPLPNDPTPGYIAIFHFSELQLLPGNAVREFYINLNGKPWSLTAFKPEYLYNDATFNRNPFLRYPQYNISINATANSTLPPLINAVEVFSVIPTATIGTDPEDVAAITAIKEKYQVVKNWMGDPCVPKMLAWDKLTCSYAISNPARIIGLNLSSSGLSGEVSSYFGNLKAIQNLDLSNNKLTGPIPDALSQLPSLTFLDLTGNQLSGSIPSGLLKRIQDGSLNLRYGNNPNLCTNGDSCQPAKKKSKLAIYIVIPIVIVLVVVIISVAVLLCCLLRRKKQAAMSNSVKPQNETVSNVSSNGGYGHSSSLRLENRRFTYNELEKITNNFQRVLGRGGFGYVYDGFLEDGTQVAVKLRSESSNQGAKEFLAEAQILTRIHHKNLVSMIGYCKDGEYMALVYEYMSEGTLQEHIAGKNNNRIYLTWRERLRIALESAQGLEYLHKACNPPLIHRDVKATNILLNTRLEAKIADFGLSKTFNHVNDTHVSTNTLVGTPGYVDPEYQATMQPTTKSDVYSFGVVLLELITGKPSILREPGPFSIIQWARQRLARGNIEGVVDAHMHGDHDVNGVWKAADIALKCTAQTSTQRPTMTEVVAQLQECLELEDRRCGMEDTYNNFYAGNNNDPNSSYNMYNTDQSTEVSQNNTMEHNFERVPTMATGPVAR

SEQ ID NO: 7979 - protein, 701 aa, Oryza sativa Indica Group
MSRYPDDPRDRVWTPWDSPSNWTEISTTRPVQQTYDDLFEVPTAVMQTAIVPMFATDNIELAWVAYTQPKDPSPGYIAIMHFSELELSPPSRDVREFYINLNGNMMYSKGYKPVYLYAHAIYNTNPFLRYPQYNISINATYNSTMRPFINAMEVYSVFSTTTIGTYGQDASAMMVIKEKYQVKKNWMGDPCIPTEFTWESLTCSYENSKHVIKINLSSSGLSGEISSSFGDLKALQYLDLSNNNLTGSIPDALSQLPSLTVLYGNNPNLCTNDNSCQAAKHKSKLAIYIVAPVVLVLVIVSVTILLFCLLGQKKKQGSMNTSIKPQNEANYVPTNDSDGHGSSMQLENRRFTYKDLEKITNNFQRVLGRGGFGKVYDGFLEEGTQVAVKLRSESSNQGDKEFLVEAQILTRIHHKNLVSMIGYCKDGKYMALVYEYMSEGTLQEHIAGKRNNGRHLTWRERLRIALESAQGLEYLHKWCNPPLIHRDVKATNILLNARLEAKIADFGLSKSFNLENGTHVSTNTLVGTPGYVDPEYQATMQPSTKSDVYSFGVVLLELVTGKSAVLRDPEPISIIHWAQQRLAQGNIEEVVDACMCGDHDVNGVWKVADIAFKCTAQVSARRPTMTDVVAQLQECLELEEEHCAVNDANNNFYTSNNSNPNSSYDTYAADHSIDVSQNSVAFEMEKNFGRMPSTAPGPATR

SEQ ID NO: 7980 - protein, 912 aa, Oryza sativa Indica Group
MAARWWLLLLLGLAVAGVVRGQGGAPDTSGFISIDCGLPEKTSYVDDATKLKFTSDDAFTDAGTIHNVSSEFATPKTTTDRSLYNVRSFPAGARNCYTVPSVVPGSKYLVRAKFLYGNYDGLNKPPVFDLHLGVNFWQTVTVPSADWLGNAEVIAVVPDDFLQVCLVNTGAGTPFISGLDLRPLPSSLYAPANATQGLVLLDRRNFGASGSTVIRYPDDTYDRVWWPWSNPPAEWSDISTADKVQNTIAPVFDVPSVVMQTAITTRNSSIPIQFSWDTKPNHVYPDPGSIFTLYVTELELLAGNAVRQFNVTINGVIWTKAPYKPVYLSTDAMYNGDRPYRGITRYNFSLNAAGSSTLPPILNAAEAFSVISTADLATDAQDVSAITAIKAKYQVNKNWTGDPCAPKTLAWDGLTCSYAISTPPRITGVNMSYAGLSGDISSYFANLKEIKKLDLSHNNLTGSIPNVISQLQFLAVLDLTGNQLNGSIPSSLLKRSQDGSLTLRYGNNPNLCSNSSSCQLPQKKSNSMLAVYVAVPVVVIGAVAVFLILFIRKKKNKSKGAVKPQILGNGVQSHSQNGSGGSLLELHNRQFTYKDLAVITNNFQRVLGKGGFGPVYDGFLKDGTHVAVKLRDESSSQGYSEFLTEAQTLTKIHHKNLVALIGYCKDEIHLALVYEHMSEGTLEDKLRGKDHKGRSLTWRERLRIVLESAQGLEYLHKACSPRFVHRDVKSSNILLNANLEAKVADFGLTTAFKCDGDTHVSTVRVVGTYGYLAPEYATALQVSEKIDVYSFGVVLLEVITGQPPIIKLPEPTTIIQWTRQRLARGNIEGVVDVNMPDDRYDINCIWKVADVALKCTAHAPGQRPTMTDVVTQLKECLELEETSFKGDTSSSYMSGSSIDPNSSYNTYTTEMS

SEQ ID NO: 7981 - protein, 1213 aa, Oryza sativa Indica Group
MEEASTARAADGDKRGKEENDRRMAKDGKVAFHHLFKYADSTDVALMLVGTIASLASGMSQVIMTIIFGQMVDAFGKSSPGNILHQVNKAVLYFVYLGIGSGIVCFLQVSCWSVTGERQATRIRSLYLKTILRQDMAFFDKEMTTGQVISSISTDTTLIQGATGEKVGKFLQLVTTFLGGFVLAFLKGWLLTLVMLSTIPPFIFAAGIVSKMLAKISNEGLASYSKAGDIVEQTVGSIRTVVSFNGEKKAIGLYNDLIKKAYKGAVKEGFIQGFGMGFLNLIYFSSFGLIVWYGSKLSLSRGYSGADIMNILFGIMIGARALGDATPCTAAFEEGRIAAYRLFKVIKRKPEIDYDDTSGIVLEDIKGDIELKDVFFSYPSRSEQLIFDGFSMCVSNGTTMAIVGESGSGKSTVINLVERFYDPQAGEVLIDGMNIKSLRLEWIRGKIGLVNQEPILFMTSIKDNIHYGKENATLEEIKRAAELANAARFIESMPNGYDTLVGQRGAQLSGGQKQRIAIARAILKNPKILLLDEATSALDLESERIVQDALNQIMVGRTTLVVAHRLSTVRNAHCISVVHKGKIAEQGHHDELVKDPNGAYSQLIRLQEAQQAIDPHLDGPLNKRSQSLKRSLSRNSAGSSSHSLNLPFSLRGATELLEYDGADGENRNLKNDGKLPKKGSMGRLISLNKPEIAILLFGSLAAAIDGAVFPMIGLVLASAVKVFYESPDKREKDATFWGLLCVGMGAIAMISKLANILLFAIAGGKLIKRIRALTFRSIVHQEVSWFDHPANSSGALGGKLCVDALNGYAQVRFLQGFSQDAKIMYEEASQVATDAIGSIRTVASYCAEKKVMTKYNQKCQASRYQGIRTGIVGGLGFGFSNMMLFMTSALCYYVGAKFVSQGNSTFGDVFKAFFSLVVAMLGVSSTAAMASDSSKAKDSASSIFAILDRKSQIDSSSNEGLTLELVKGDIEFTHISFRYPSRPDVQIFSDFTLSIPSGKTVALVGQSGSGKSTAIALLERFYDPDSGVILLDGVEIKKLEISWLRDQMGLVSQEPVLFNDTIRANIAYGKNEEVTEEEIVAAAKAANAHEFISSMPEGYSTSVGERGTQLSGGQKQRIAIARAIVKDPRILLLDEATSALDAESERIVQDALDHVMVGRTTVVVAHRLSTIQGADIIAVLKDGAIVEKGRHEALMRIASGAYASLVELRHNVT

SEQ ID NO: 7982 - protein, 423 aa, Oryza sativa Indica Group
MELGLALRLVAPPPRLPCRALQPPPMPCFSPCAARRSRIRSSRLERRVGVVVSGGSMASLAMQEEEEEEWEEAEEEAEGWQEEEAAVVTTRPRLELIEKPDRSLCLLDEYESEELGTSHCANHRSGYVAVLGKPNVGKSTLINQIVGQKLSIVTDKPQTTRHRILGICSEPEYQIILYDTPGVIKKEMHKLDTMMMKNVRSAVGSADCVLVVVDACKMPEKIDEILEEGVGNKDTELPVLLVLNKKDLIKPGEIAKKLEWYQKFTNADDVIPISAKFGHGVDDIKEWILSKLPLGPAYYPKDIASEHPERFFVGEIVREKIFLQYRQEIPYACQVNVISYKSRPTAKDFIQVEILVEKESQRSIILGKDGKAIKMLATASRLDIEDFLQKKVYLEIMVKVKENWRQDELLLKRYGYGGEIQAL

SEQ ID NO: 7983 - protein, 249 aa, Oryza sativa Indica Group
MQYTVEGSGGGGVQTVEAAVRKGPWTMEEDLSLVNYIAANGEGAWNTLARAAGLNRTGKSCRLRWLNYLRPDVRRGNITPEEHTLIVELQARWGNRWSKIARYLPGRTDNEIKNFWRTKIQKKHRKSTDGIYATTTSESIMPAATVHQNTVAEDQGSSSVSGRTTTATVAVTQEYATEAPPPSGMSSDNYLDQLQPGYASSIHGGQDGGAAAAAAGDVVVSDEFLAASSDNFWALEDLWPTVQSLHGNC

SEQ ID NO: 7984 - protein, 362 aa, Oryza sativa Indica Group
MCGGAILSDLIPPPRRVTAGDLWLEKTKKQQQQKKKNKGARRLPLRQEEEDDFEADFEEFEVDSGEWEVESDADEAKPLAAPRSGFAKGGLKNTTVAGADGPAARSAKRKRKNQFRGIRQRPWGKWAAEIRDPRKGVRVWLGTFNSPEEAARAYDAEARRIRGKKAKVNFPDGAPVASQRSHAEPSSMNMPAFSIEEKPAVMSAGNKIMYNTNAYAYPAVEYTLQEPFVQIQNVSFVPAMNAIEDTFVNLSSDQGSNSFGCSDFSQENDIKTPDITSMLAPTITGVDDSAFLQNNASDAMVPPVMGNASIDLADLEPYMKFLIDGGSDESIDTLLSSDGSQDVASSMDLWSFDDMPVSAEFY

SEQ ID NO: 7985 - protein, 507 aa, Oryza sativa Indica Group
MAHTSSQKHGNDDVDTGAEAAMDQLAGRSSLSPAREKTRRRPEKSGTVWTATAHIVALLIGSSVLAVAWTFAQLGWVAGPAVVVALSVVTYYSSALLADCYRDDDPLHLGGGAVHGEYIAAVRSYLGPKSVTFCGIIQYGVLWAAMVGYTITSSSSMSAVRRVNRFHRNWLAAGDGDGGGGGGGATGVRYMVVFGAFQLLLSQLPSLENVAWLSVIAVATSFGYSSICLGLCAAKWASHRGGVRGTLAGAAAGSPGEKVFNVLLAVGNIAISYIYSPVLFEIQDTVRTPPSESKTMKRASLYGLAMSAVFYLVLGASGYAAFGDDAPSNILTGAAFHEPFWLVDVANACVVVHFLGAYQVIAQPVFARLEAYVGGRWPESRLVTASYELRLRVPAWTSAPPTAVTLSPARMALRAAVIVATTAVAAMMPFFNAVLGFIAALGFWPLAVYLPVSMHIARVKIRRGEARWWALQGASAALLVVAVGMGVASVRDMVQSLNEAAPFKTTG

SEQ ID NO: 7986 - protein, 352 aa, Oryza sativa Indica Group
MVRCLVENASLCQNCDWNGHSAGSSAAGHKRQTINCYSGCPSSSELSKIWTFVSDIPNVAPEPNCEQGISMMSISDSGVSNQDNAAGDSSLLDIASATLMSDLGTAGKPKSLIGSSSEAGVNLLPLATDQMAGSVDSTSAKVPYTADQDMFSKDSIYEDFCVDDVDLSFENYEELFGTSHIQTEQLFDDAGIDSYFESKEIPSGNSDEQPKLMQPVTSNAVSADSGMSIPGAKGDSSLCIPVRQARSSISLSFSGLTGESSAGDYQDCGVSPVLLMGEPPWHPPGPEGSFAGATRDDAITRYKEKKKRRKFDKKIRYASRKARADVRKRVKGRFVKAGEAYDYDPLCETRSY

SEQ ID NO: 7987 - protein, 378 aa, Oryza sativa Indica Group
MAMWRAPSAAGQLLGRALASTAAQTSAGSKKVVGVFYKGGEYADKNPNFVGCVDSALGIRGWLESKGHRYIVTDDKEGINCELEKHIEDAHVLITTPFHPAYITAERIKKAKNLELLLTAGVGSDHIDLPAAAAAGLTVAEITGSNTVSVAEDQLMRILLLLRNFLPGHHQIVNGEWNVAGIAHRAYDLEGKTVGTVGAGRIGRLLLQRLKPFNCNLMYHDRVKIDPELEKEIGAKYEEDLDAMLPKCDVVVINMPLTEKTRGMFNKERIAKMKKGVTIVNNARGAIMDTQAVADACASGHVAGYGGDVWFPQPAPKDHPWRYMPNHAMTPHCSGTTIDGQLRYAAGVKDMLDRYFKGEDFPAQNYIVKAGQLASQYQ

SEQ ID NO: 7988 - protein, 318 aa, Oryza sativa Indica Group
MATQWVLVVVAVMAVLFAGGAAGGQLSTRYYDGKCPNVQSIVRAGMAQAVAAEPRMGASILRMFFHDCFVNGCDASILLDDTANFTGEKNAGPNANSVRGYEVIDAIKTQVEASCNATVSCADILALAARDAVNLLGGPTWTMQLGRRDALTASQSAANGNLPGPGSDLATLVTMFGNKGLSPRDMTALSGAHTLGQARCATFRSRIFGDGNVDAAFAALRQQACPQSGGDSTLAPIDVQTPDAFDNAYYANLVKKQGLFHSDQELFNGGSQDALVRKYAGNAGMFAADFAKAMVRMGALLPAAGTPTEVRLNCRKVN

SEQ ID NO: 7989 - protein, 327 aa, Oryza sativa Indica Group
MGFLFARSSGYSFVALALLACVLLAPCQAAKAGLSTKFYAKTCPGVDTIVRSVVAQAVAKEPRMGASIIRLFFHDCFVNGCDASILLDDTPTFTGEKNAGANINSVRGYEVIDAIKSQVEAACKGVVSCADIVALASRDAVNLLGGPTWNVQLGRKDSRTASGTAANANLPGPASSGASLVAAFAGKGLSAREMTALSGAHTVGRARCLMFRGRIYGEANINATFAAALRQTCPQSGGGDGNLAPFDDQTPDAFDNAYFKNLVAQRGLLHSDQELFNGGSQDALVRKYAGNAGMFAGDFAKAMVKMGGLMPAAGTPTEVRLNCRKVN

SEQ ID NO: 7990 - protein, 613 aa, Oryza sativa Indica Group
MALAPPLCHLLAAPPPSTSAAADAAHDHAGALAPHRRASPLRRRGRLFLACRVPAAAPSARGVAAEAAAGRPTVLVTEKLGDAGLELLRRFANVDCAYELTAEELRAKVSLVDALVVRSATRVTREVFEAARGRLRVVGRAGVGIDNVDLQAATEAGCLVVNAPTANTVAAAEHAIALLAAMARNVAQADASLKAGKWQRNKYVGVSLVGKTLAIMGFGKVGSEVARRAKGLGMDIISHDPYAPVDRARAIGVDLVSFDEAISTADFISLHMPLTPSTAKLFDDETFANMKKGVRIINVARGGVVDEDALLRALDNGTVSQAALDVFTEEPPPKDSKLVHHEHVTVTPHLGASTSEAQEGVALEIAEAVLGALKGELAATAVNAPMVPAEVLSELSPYVVLAEKLGRLVVQLVAGGSGIKGVKIGYSSSRDPDDLDTRVLRAMVTKGIIEPISSAFVNIVNADYVAKQRGLRISEERILLDGSPEIPIDSIQVHLANVESKFAGALSDEGDIRVEGEVKDGKPHLTLVGPFSVDVSLEGNLILCRQVDQPGIIGKVGSILGKMNVNVNFMSVGRTAPGKQAIMAIGVDEEPEKEALKLIGDIPSVEEFVFIKL

SEQ ID NO: 7991 - protein, 561 aa, Oryza sativa Indica Group
MEATTTDGTTDHAGKPAVRSKSGTACPFILGNECCERLAYYGMSANLVNYMVDRLRQGNAGAAASVNNWSGTCYVMPLVGAFLADAYLGRYRTIAAFMALYIVGLALLTMSASVPGMKPPNCATISASSCGPSPGQSAAFFVALYLIALGTGGIKPCVSSFGADQFDDADPREHRSKASFFNWFYMSINVGALVASSVLVWVQMNVGWGWGFGIPAVAMAVAVASFLMGSSLYRHQKPGGSPLTRMLQVVVAAARKSRVALPADAAALLYEGDKLACGTRRLAHTEQFRWLDRAAVVTPTTDKDDDTGSRWRLCPVTQVEELKAVVRLLPVWASGIVMSAVYGQMSTMFVLQGNTLDPRMGATFKIPSASLSIFDTLAVLAWVPVYDRLIVPAARRFTGHPRGFTQLQRMGIGLLISVFSMVAAGVLEVVRLRVAAAHGMLDSTSYLPISIFWQVQYFIIGQIDFFYDQAPDDMRSTCTALSLTSSALGNYLSTLLVVIVTAASTRGGGLGWIPDNLNRGHLDYFFWLLAALSAVNFLVYLWIANWYRCKTITTTEAAAQT

SEQ ID NO: 7992 - protein, 430 aa, Oryza sativa Indica Group
MANSDDKALISEDTAHQISADPWYQVGFVLTTGVNSAYVLGYSGSVMVPLGWIGGTCGLILAAAISLYANALLARLHEIGGKRHIRYRDLAGHIYGRKMYSLTWALQYVNLFMINTGFIILAGQALKATYVLFRDDGVLKLPYCIALSGFVCALFAFGIPYLSALRIWLGFSTFFSLIYITIAFVLSLRDGITTPAKDYTIPGSHSARIFTTIGAVANLVFAYNTGMLPEIQATIRPPVVKNMEKALWFQFTVGSLPLYAVTFMGYWAYGSSTSSYLLNSVKGPVWVKAMANLSAFLQTVIALHIFASPMYEFLDTKYGSGHGGPFAIHNVMFRVGVRGGYLTVNTLVAAMLPFLGDFMSLTGALSTFPLTFVLANHMYLMVKRHKLSTLQISWHWLNVAGFSLLSIAAAVAALRLIMVDSRTYHLFADL

SEQ ID NO: 7993 - protein, 221 aa, Oryza sativa Indica Group
MEQHSHCWYYGGGMAVTAAAGAGAASSTSSESQPSGYDYETAGSAEVSAPGGGAGRERAARKEEGGAGAAAAAAGFIGVRKRPWGRFAAEIRDSTRNGVRVWLGTFETAEAAAMAYDQAALSARGAAAALNFPVERVRESLRALALGAAGGSPVLALKGRHSKRKRRKRSELAGATATANKTTTTTSATTGGEHKQIVLELEDLGADYLEELLWMSEQTSH

SEQ ID NO: 7994 - protein, 75 aa, Oryza sativa Indica Group
MASEWSKEENKLFEQAIAYYGEGAPDLWHKVSRAMGGTKTADEVRRHFEILVDDIKLIEARRVPFPKYNTQGAWN

SEQ ID NO: 7995 - protein, 111 aa, Oryza sativa Indica Group
MHDASTPYNDTSFREYVAEGSAPALPETRRLYRRLLELGVKPVFLTGRTEDQRAITVANLRRQGYTGWEKLLLKPAAHVAGGLQLSAVAYKSGERQKLQDAGFVIVGNIGD

SEQ ID NO: 7996 - protein, 322 aa, Oryza sativa Indica Group
MGRAPCCEKSGLKKGPWTPEEDEKLVAYIKEHGQGNWRTLPKNAAIAARLPGRTDNEIKNYWNTHIRKRLLRMGIDPVTHAPRLDLLDLTSLLKPAAAAAYYPTQADLDTLRALEPLAGYPDLLRLASAILPAATTTGAAAAAAAEQAQLLLPWLLQAQMAQQQQQVTPPPPPPPQAAATEQFLQATSTACHQMPGLVHASPTQQLAQQPQDHMAAATCHRRGAVQHPSYDNQLDYVPALMQMASDASNLQQWSSTVSSSNNHNVNSGVSTPSSSPAAAGQINSSSTTTTTTYGLNASGDVDDAGLLINMHLSELLDVSDYM

SEQ ID NO: 7997 - protein, 626 aa, Oryza sativa Indica Group
MAARFGPLLLVLPLSSALLVLSAATAPRGRPSQVDVGRQLREELWERNQGHEMLRSWRDGDPCSPSPWEGFSCRWKDGNLFVVKLNFSSKKLQGPIPAAIGNLTELDEIDLQDNNFTGSIPESFFDLTHLLKLSVKCNPFLNNQLPHGLSISVEFSYGGCAYHSPPGASNQRIAVIGGVAGGSLACTFALGFFFVCFNKREKNPQKKDCSSTRNPVFEECSTHKATNSAVQQLSLKSIQNATCNFKTLIGEGGFGSVYRGTLAHGEEVAVKVRSTSSTQGTREFNNEVQMKPAPASIKESCCGLGVNQILKKLFIVLHSGKEAKYGFFGRKFKNKEMLRLLSAVRHDNLVPLIGYCCEKDQEILVYPFMSNGSLQDRLYGEASKRKVLDWPTRLSVCIGAARGLAHLHGFAGRCIIHRDVKSSNILLDHSMCGKVADFGFSKYAPQEGDSNASMEVRGTAGYLDPEYYSTQSLSTKSDVFSFGVVLLEIVTGREPLDVQRPRDEWSLVEWAKPYIREYRIEEIVDPGIKGQYCSEAMWRVLEVASACTEPFSTFRPSMEDVVRELEDALIIENNASEYMRSIESTGTLGSNRYLSIDRKMFASGSARFASFDATKGHLQTMPSLPG

SEQ ID NO: 7998 - protein, 341 aa, Oryza sativa Indica Group
MCGGSILSDLHLPVRRTVNAGDLWGDAGKGRDGGDGLKKRKGSSWDFDVDCDDDDDDFEADFEEFEDDYGDDDDVGFGHDDQESDMNGLKLAGFSTTKLGLGGSRKRKTRYRGIRQRPWGKWAAEIRDPRKGVRVWLGTFGTAEEAAMAYDVEARRIRGKKAKVNFPDAAAAAPKRPRRSSAKHSPQQQKARSSSSSPASLNASDAVSKSNNNRVSSAGSSTDATAAAIAIDDGVKLELLSETDPSPPMAAAAAAWLDAFELNDLDGSRCKDNAFDHQIHKVEAAVADEFAFYDDPSYMQLGYQLDQGNSYENIDALFGGEAVNIGGLWSFDDMPMEFRAY

SEQ ID NO: 7999 - protein, 324 aa, Oryza sativa Indica Group
MASATNSSLSLMLLVAAAMASVASAQLSATFYDTSCPNALSTIKSVITAAVNSEARMGASLLRLHFHDCFVQASFTQPIGCDASVLLSGQEQNAGPNVGSLRGFSVIDNAKARVEAICNQTVSCADILAVAARDSVVALGGPSWTVLLGRRDSTTASEALANTDLPAPSSSLAELIGNFSRKGLDATDMVALSGAHTIGQAQCQNFRDRIYNETNIDSAFATQRQANCPRPTGSGDSNLAALDTTTPNAFDNAYYSNLLSNKGLLHSDQVLFNGGSADNTVRNFASNAAAFSSAFTTAMVKMGNISPLTGTQGQIRLSCSKVNS

SEQ ID NO: 8000 - protein, 321 aa, Oryza sativa Indica Group
MAPFLLVFAVMAAAFASASGSGELTPDFYSETCPQALTTIKLVVGAAILKEPRMGASLVRMHFHDCFVNGCDGSVLLDDTDDMIGEKLAKPNNMSLRGFDVIDAIKVAVNTACLGNVVSCADILAVAARDSIVALGGSSYEVLLGRRDATTASIDDANDDIPNPFMDLPDLVDNFESHGLSLQDLVVLSGGHTLGYSRCLFFRSRLYNETDTLDPAYAAALEEQCPIVGDDEALASLDDTPTTVDTDYYQGLTQGRALLHTDQQLYQGGGGGDSDELVKYYGENPDKFWEDFGAAMVKMGNISPLTGDDGEIRENCRVVNQ

SEQ ID NO: 8001 - protein, 570 aa, Oryza sativa Indica Group
MSKGAIIGASTVLVVAVVAAVCVVSFKNGGGGKEDGELSTSVKSVKAFCQPTDYQQTCEEELGKAAGNGASSPTDLAKAMFAVTSEKISKAISESSTLEELKNDKRTSGALQNCKELLEYAVDDLKTSFEKLGGFEMTNFHKAVDDLRTWLSAALTYQGTCLDGFLNTTTDAADKMKSALNSSQELTEDILAVVDQFSATLGSLNIGRRRLLADDGMPVWMSEGGRRQLLEAAGPEAGPVEFKPDVTVAADGSGDVKTIGEAVAKVPPKNKERYTIYVKAGTYKEYVSVGRPATNVNMIGDGIGKTIITGNKNFKMNLTTKDTATMEAIGNGFFMRGITVENTAGPENHQAVALRAQSDMAVFYQCEFDGYQDTLYPHAQRQFFRDCTVSGTIDFIFGNSQASKIVVLQNCLLQPRKPMDNQVNIITAQGRREKRSAGGTVIHNCTVAPHPDLEKFTDKVKTYLARPWKEYSRTIFVQNEIGAVVDPVGWLEWNGNFALDTLYYAEVDNHGPGADMSKRAKWKGVQSLTYQDVQKEFTVEAFIQGQEFIPKFGVPYIPGLLPQTQQGRMH

SEQ ID NO: 8002 - protein, 193 aa, Oryza sativa Indica Group
MASERVKGTVKWFDATKGFGFITPDDGGEDLFVHQSSLKSDGYRSLNDGDVVEFSVGSGNDGRTKAVDVTAPGGGALSGGSRPSGGGDRGYGGGGGGGRYGGDRGYGGGYGGGDRGYGGGGGYGGGGGGSRACYKCGEEGHMARDCSQGGGGGGGYGGGGGGYRGGGGGGGGGGCYNCGETGHIARECPSKTY

SEQ ID NO: 8003 - protein, 455 aa, Oryza sativa Indica Group
MAAESSAAAAAGGGERRGPMDLNLYLGLPPLPPPPGRLDVAADYPSLLLNSAATVANEQRGSVVVAAPPPAAAAYSPSNALSAPEQVLVDPVAAWLVDPGEQQPVPPLETPSYMARASSTLPQIFACAALEMLVQTGGAIPPTGLIRGAEIAAASRPMTPENRLRRLIQVSDQHGVGNGRAGPGPVSRSRRANSPEADNLARAIQRSHNSLEASRRQMLDGDGSDATKKDDGCGCNGSFECNICFESAKDPVVTPCGHLFCWPCIYQWLHGHSEHSDCPVCKGEVLEVNVTPIYGRGGGEENSSRNDIQIPPRPSAQRTESLRQQLQRPDTRGGIANMVRRLMQNQDIVAGQAASSAPRPRGRGRRQARQDAPSAPATQQQVVNADAGSGNQAPLPPPDANGAAPAAAVAPQQSSSVEQASTSSTVGVIAGGPAQGRRSRVSESTPARRTRRRHQ

SEQ ID NO: 8004 - protein, 232 aa, Oryza sativa Indica Group
MVGTTEVEGIEALVRRLRLYQPPPSPYDGASTTAAGGGGELFRPRRAAVLVCLFRRGGGDGELRVILTKRSSSLSTHSGEVALPGGKAEEGDADDAATALREAKEEIGLDPSLVTVVASLEHFLSKHLLVVVPIVGILSDIEAFKPVLNVDEVDDIFDVPLEMFLKDENRTSEEREKMGQTFTIHYFNYEKENQKYLIWGLTARILIHAASVVYQRPPDFPERRVHFNLPKF

SEQ ID NO: 8005 - protein, 240 aa, Oryza sativa Indica Group
MEAPGADIQALIQRLRLHRPRPSPYAAAAAPSPDAAAPPAELLFRPRRAAVLICLFRGAAGELRVLLTKRSSKLSSHSGEVSLPGGKAEEGDADDAATALREAKEEIGLDPASVTVVASLEHFLSKHLLVVVPVVGILSDIQAFKPVLNVDEVDSIFDVPLEMFLKDEKRTSEEREWMGQEFTIHYFNYEKGSEKYVIWGLTAGILIHAASVVFQRPPDFPARTVQFNLPKYSKECSSMP

SEQ ID NO: 8006 - protein, 621 aa, Oryza sativa Indica Group
MATAAAASRAALSRPHAAAAAARASPAAGARVTLPRRRSVRSAVISSSASAAAVAASEPAAGRVTLGAGTDGALWPKPAVLVAEKLSEAGLAVLRGFADVECAYGMSPAELLAKVAQFDALIVRSGTKVTREVLEAGRGRLRVVGRAGVGIDNVDLQAATEAGCLVVNAPTANTVAAAEHGIALLASMARNVSQADAALKAGKWQRTKYVGVSLVGKTLAVMGFGKVGSEVARRAKGLGMHVIAHDPYAPADRARAIGAELVSFDEAIGRADFISLHMPLTPATSKVFNDESFAKMKNGVRIINVARGGVIDEDALVRALDSGKVAQAALDVFTEEPPAKDSKLVLHENVTVTPHLGASTVEAQEGVAIEIAEAVVGALRGELAATAVNAPMVPAEVMSELAPYVSLAEKLGKLAVQLVAGESGGIKGVKVVYTTARGPDDLDTRLLRAMVTKGIVEPVSSTFVNLVNADYTAKQRGLRITEERVSHESPAAEAPLESIQVRLSHVQSKFAGAISDGGDIVLEGRVKYGVPHLTVVGPYEVDVSLEGNLILCRQIDQPGMIGKVGNILGQTNVNISFMSVGRTFRGKQAIMAIGVDEEPDKETLEHIGHIPAIEEFVFLEL

SEQ ID NO: 8007 - protein, 520 aa, Oryza sativa Indica Group
MEPSALATLLSMALAAFLLLGLIKRKGSRRGYNLPPGPTPWPVIGNFNLIGALPHRSIHELSRKYGELMLLRFGSFPVVVGSSVAMARLVLKTHDAVFIDRPRTASGKHTTYGYADITWSPYGAYWRQARRICVTELFSARRVASFEHIRADEVRALVRGLFAAASSGRSGAVYLNRDHLSTLSMNVITRMVLGKRFFGEGADAAEGPVSTLSEFKWMLDELLLLNGVLNVGDWIPWVDWMDLQGYVRRMKKVGKMFDAFMEHVLDEHSERRRREGEAFVARDMVDVLMDLADDPSLEIKLGRVGVKAFTQDLIAGGTESSSVTVEWALSELFKNPAIFATATDELDRVVGRGRWVTEKDIPNLPYLDAIMKETMRMHPIVPLLIPRVARDDAAVAGYDIPKGARVLINVWTIGRDPELWDAAEEFMPERFIGSRIDVKGQDFELLPFGSGRRMCPGYNLGLKVMQLSLANLLHGFAWRLPEGMKEEELSMDEVFGLSTTRKYPLQVVVEPRLPVHLYSL

SEQ ID NO: 8008 - protein, 557 aa, Oryza sativa Indica Group
MERQTSFRLGALEKLKSFRGMEKQKSFKMMSMDNFRRHRDSPGKRGDTPLHLAARSGNAAGAQRIIAEFDPEVAAERAAQANHDGETPLYVAAERGHTDVVREILKVSDVQTAGVKANNSFDAFHIAAKQGHLEVLKELLQAFPALAMTTNSVNATALDTAAILGHTEIVNLLLESDANLARIARNNGKTVLHSAARLGHVEIVRSLLSRDPGIGLRTDKKGQTALHMASKGQNAEIVIELLKPDISVIHLEDNKGNRPLHVATRKANIVIVQTLLSVEGIEVNAVNRSGHTALAIAEQLNNEELVNILREAGGVTAKEQVHPPNPAKQLKQTVSDIRHDVQSQIKQTKQTKMQVQKIKKRLEKLHIGGLNNAINSNTVVAVLIATVAFAAIFTVPGNFVEDITQAPPGMSLGQAYVASNPAFLVFLVFDALALFISLAVVVVQTSLIVVEQKAKRRMVFVMNKLMWLACLFISVAFIALTYVVVGRDDWWLAWCTMAIGAVIMLTTLGSMCYCIIAHRMDERKIRKASTSQSRSWSQTVDSDPDLLNSEYKKMYAL

SEQ ID NO: 8009 - protein, 435 aa, Oryza sativa Indica Group
MDDPGAADPGARPHHVSPGQPPVVPRSPTPLDLSSAAAAAAAASYRRLSPSLRPPAHPQARLPSPYPQIPSSSSSAAAGSSGHHARSLSQPLFFSLDSLPPLPYADLAAPPAIPPSPPSSSSDPPPPGLPPRKGGHRRSQSDIPFGFSHLSPPLPPPAPVKREAATAAEGCRSDGDDFALYDLVNSYMDLDGMEALNSSEERHEDRDSRASGTRAGSVADSSENEAESHSTPVERKDGGGKSRHCRSLSVDSFIEKLNFDESPKLPLPSPSGGLSRSGSGSLDGGAASLFGAEFANGEFTEAEKKKIMANERLAEIALTDPKRVKRILANRQSAARSKERKMRYIQELEHKVQVLQTEATTLSAQLTMLQRDSTGLATQNNELKIRLQAMEQQAQLRDGNACYQPSSALVLIFPYNNEVKGYNLIGELAAFDLKL

SEQ ID NO: 8010 - protein, 320 aa, Oryza sativa Indica Group
MDDPGAADPGARPHHLSPGQPPVVPRSPTPLDLSSAAAAAAAASYRRLSPSLRPPAHPQARLPSPYPQIPSSSSAAAAGSSGHHARSLSQPLFFSLDSLPPLPLSVDSFIEKLNFDESPKLPLPSPSGGLSRSGSGSLDGGAASLFGAEFANGEFTEAEKKKIMANERLAEIALTDPKRVKRILANRQSAARSKERKMRYIQELEHKVQVLQTEATTLSAQLTMLQRDSTGLATQNNELKIRLQAMEQQAQLRDALNEALTAEVQRLKLATGEITDGRMSKGLQQQMNSQLIQLQQLQIQQQQSSQTTQQGQQQQPQKSA

SEQ ID NO: 8011 - protein, 164 aa, Oryza sativa Indica Group
MPPRSLTLSRLPVAALGLPFSSCSPPPPRLRFPIAARRARSLATRASSSSPDSSFGSRMEDSVKRTLADNPVVIYSKSWCSYSMEVKALFKRIGVQPHVIELDQLGAQGPQLQKVLERLTGQSTVPNVFIGGKHIGGCTDTVKLHRKGELATMLSELDIDVNNS

SEQ ID NO: 8012 - protein, 945 aa, Oryza sativa Indica Group
MTTVVVTSPGSVAPAASSRRRRRIDRPRCPLSTPARDRLPHHQLSAPTLDPLAPPFALGRGALGAESAQGSAARGGRATLAAVKVRTGKGRLVVGGSGGGSFLSIDCGLEADDSYPDDLTGITYVPDGRYTDAGENHKVTTIYRDAWWGPDTRTLYTVRSFPSAEGQRNCYSLPTDVRSKYLVRLEFLYGNYDGLDSSSLKFNLTLGVKHWDTVSIGTTDGNDGYNVHEAVFVAWASWAPVCLINIGQGTPFVSTVELRPLGILPYPAVMGNVSLSLYVRSNLGSSPDDDNLVRYPDDQYDRFWFTDTYTEADPLTTNISTQSTIQPSTEFAVPSPVLQKAVVPSGNSTKQVFFSDQLDALLHDHFVILHFADFQNKKSREFTVSIDNGVQSSPYSTPYLKGLSVTGGWSSNSEGKYNFTIAATATSALPPILNAYEVYGRIIHDNPTTFSQDFDAIMAIKYKYGIKKNWMGDPCFPPEYVWDGVKCSDAGDKIMRIISIDLSNSKLNGSISNSFTLFTALKYLNLSCNQLNGTIPDSLLKNNGSIDFSYESDGNMCKTHATPSLSRNTLAVSVVAPVLVLAILVLAYLIWRAKRKLNTSSTDLAMVPELMGAPGHITNHWDHLQKPENRRFTYQELEKFTENFKHLIGHGGFGHVYYGCLEDSTEVAVKMRSELSSHGLNEFLAEVQSLTKVHHRNLVSLVGYCWEKEHLALVYEYMSRGNLCDYLRGKTGMGEILNWKTRVRVALEAAQGLDYLHKGCNLPIIHGDVKTNNILLGQNFKAKIADFGLSKTYHSDSQTHISAAAAGSMGYIDPEYYTTGRLTESSDVYSFGVVLLEITTGEPPIIPENGHIVQRVKQKIVSGNISSVADAHLGGAYNVSSMWKVVNIAMMCTTDIATQRPKMGDVVVQLKESLDLVEVHGDRGDMENLASDTMSSMSTFGPSAR

SEQ ID NO: 8013 - protein, 399 aa, Oryza sativa Indica Group
MCGGAIISGFIPPSAAAAAAAAAAAAKKQQGRRVTADVLWPGMLRKGKAAAAEEDFEADFREFERGMSDDEAEGGGGEEEEEEEDDVVVEVPPPATARFVVRAAAKAAPPTADGMLTTKLVQHDGPTARSAKRKRKNQYRGIRQRPWGKWAAEIRDPSKGVRVWLGTYNTAEEAARAYDAEARKIRGKKAKVNFPDEPAVAQKLSLKQNAAKQEKLAPPLKSCGDDAFFQLNSSDNDLFAMLAKVPAKPAEPVDLMPPVKPLASTETFEMNMLSDTSSNSFGSSDFGWEDDTLTPDYTSVFVPNAAMPAYGEPAYLTGGAPKRMRNNYGIAVPQGNGMPNLAQNMPTFDPEMKYLPLPYVESSSDESMDNLLQNDATQDGASNEGIWSLDELLMAAGAY

SEQ ID NO: 8014 - protein, 514 aa, Oryza sativa Indica Group
MELMLPPWASFVAVVLATVLFLKTVLGRSRRVYNLPPGPKPWPVIGNLNLVGTLPHRSIHNLSKKYGPLMYLRFGSFPVVVGSSVEMAKFFLKTHDVVFTDRPKTAAGKHTTYNYSDITWSPYGAYWRQARKMCLTELFSAKRLESYEYIRGEEVRALLRDLHGAAGGVVVLKDYLSTVSLNVITRMVLGKKYLDKDAGGSVTTPEEFKWMLDELFLLNGVLNIGDSIPWLDWLDLQGYIKRMKKLGKMFDRFLEHVVDEHNERRRREGESFVAKDMVDVLLQFADNPNLEVKLKREGVKAFTQDLIAGGTESSAVTVEWALSELLKKPEVFAKATEELDRVVGRGRWVTEKDVPSLTYVDAIVKETMRLHPVAPMLVPRLSREDTSVDGYDIPAGTRVLVSVWTIGRDPKLWDAPEEFMPERFIGNKIDVKGQDFELLPFGSGRRMCPGYSLGLKVIQLSLANLLHGFAWRLPDGVTREQLSMEEIFGLSTPRKFPLEAVVEPKLPAHLYAAA

SEQ ID NO: 8015 - protein, 518 aa, Oryza sativa Indica Group
MEFLLWVSYLTITLATILLFLRTLILRHNRRVYNLPPGPKPWPIIGNLNLMGSLPHRSIHSLSKKYGPLMHLRFGSFPVVVGSSVEMAKFFLKTHDVVFADRPKTAAGKHTTYNYSDMTWSPYGAYWRQARKVCLAELFSAKRIESYEHIRREEVRALLRDLHAASGRVVALKDYLSAASLNVISRMVLGKKYLEREVVHEGEVVTTPERFRWMIDELFLLNGVLDIGDSIPWLGWLDLQGYIRRMKKLSKMFDQFLEYVLDEHENRMCREGESFVAKDMVDALLNVASDPSLEVKFSRDSVKAFTQDLIAGGTESSSATVDWAIAELLRKPEVFAKATEELDRVVGRGRWVTEKDIPSLPYIDAIMKETMRMHPVAPMLAPRLSREDTSVDGYDIPAGTRVLVGVWSIGRDPKLWDAPEEFMPERFIGSKIDVKGQDFELLPFGSGRRMCPGYSLGLRVIQVSLANLLHGFAWRLPDGMTKEQLSMEEIFGLSTPRKFPLEVVVEPKLPADLYVSAC

SEQ ID NO: 8016 - protein, 438 aa, Oryza sativa Indica Group
MAVFLLVLLAALVSVDVAAAHSGGGFGFKATLTHVDANAGYTKAQLLSRAVARSRARVAALQSLATAADAITAARILLRFSEGEYLMDVGIGSPPRYFSAMIDTGSDLIWTQCAPCLLCVEQPTPYFEPAKSTSYASLPCSSAMCNALYSPLCFQNACVYQAFYGDSASSAGVLANETFTFGTNSTRVAVPRVSFGCGNMNAGTLFNGSGMVGFGRGALSLVSQLGSPRFSYCLTSFMSPATSRLYFGAYATLNSTNTSSSGPVQSTPFIVNPALPTMYFLNMTGISVAGDLLPIDPSVFAINETDGTGGVIIDSGTTVTFLAQPAYAMVQGAFVAWVGLPRANATPSDTFDTCFKWPPPPRRMVTLPEMVLHFDGADMELPLENYMVMDGGTGNLCLAMLPSDDGSIIGSFQHQNFHMLYDLENSLLSFVPAPCNLS

SEQ ID NO: 8017 - protein, 485 aa, Oryza sativa Indica Group
MASSSSLLVRGRAFALVVAVALVAAPRRINGGAAGPAARTNDPNWHVFSVSSLLPSSACTASKAASNSSALGVVHRHGPCSPVQARRRGGGGAVTHAEILERDQARVDSIHRKVAGAGGAPSVVDPARASEQGVSLPAQRGISLGTGNYVVSVGLGTPAKQYAVIFDTGSDLSWVQCKPCADCYEQQDPLFDPSLSSTYAAVACGAPECQELDASGCSSDSRCRYEVQYGDQSQTDGNLVRDTLTLSASDTLPGFVFGCGDQNAGLFGQVDGLFGLGREKVSLPSQGAPSYGPGFTYCLPSSSSGRGYLSLGGAPPANAQFTALADGATPSFYYIDLVGIKVGGRAIRIPATAFAAAGGTVIDSGTVITRLPPRAYAPLRAAFARSMAQYKKAPALSILDTCYDFTGHRTAQIPTVELAFAGGATVSLDFTGVLYVSKVSQACLAFAPNADDSSIAILGNTQQKTFAVTYDVANQRIGFGAKGCS

SEQ ID NO: 8018 - protein, 351 aa, Oryza sativa Indica Group
MAMGMEGSGGGGSAKKKEESLPPGFRFHPTDEELITYYLRQKIADGGFTARAIAEVDLNKCEPWDLPEKAKMGEKEWYFFSLRDRKYPTGVRTNRATNAGYWKTTGKDKEIFTGQPPATPELVGMKKTLVFYKGRAPRGEKTNWVMHEYRLHSKSIPKSNKDEWVVCRIFAKTAGVKKYPSNNAHSRSHHPYTLDMVPPLLPALLQQDPFGRGHHPYMNPVDMAELSRFARGTPGLHPHIQPHPGYINPAAPFTLSGLNLNLGSSPAMPPPPPPPPQSILQAMSMPMNQPSTTNQVMVTEQMIPGLANGVIPQGTDGGFTTDVVVGGTGIRYQNLDVEQLVERYWPGSYQM

SEQ ID NO: 8019 - protein, 213 aa, Oryza sativa Indica Group
MSDRDVDMHILTALMADMADSSSSSSSSSSSDDSDMRASAAAAEPEHRRSPAPPPPPRQQQLIGVRKRPWGKFAAEIRDSTRKGARVWLGTFDSPEAAAMAYDQAAFSVRGASAVLNFPLHRVQESLQALALGAAGGSPVLALKRRHSIRKRRKPTKHMLLMQQQQQEPTVVELEDLGADYLEELLRLSESSSSSSSSSISNFTTTPNRHCQC

SEQ ID NO: 8020 - protein, 328 aa, Pseudomonas aeruginosa
MELLVLPNNRRLPFDSGANLLEVLREHRVGISYSCMSGRCGTCRCRVIDGSVISSAAKSGDSNRIEEHYVLACQSVLTSNCAIEIIDSDDIVTHPARIIKGMVVAVESPTHDIRRIRIRLAKPFEFSPGQYAMLQFSPEHVRPYSMAGLPDDQEMEFHIRKVPGGRVTEYIFEHVREGTSIKLSGPLGTAYLRQAHTGPMLCVGGGTGLAPVLSIVRGALKSGMTNPIHLYFGVRSQQDLYDADRLNQLAAIHPQLTVHTVIATGPINEGQRAGLITDLIEKDIPSLAGWRAYLCGAPAMVDALCTVAKDLGISPEHIYADAFYPSGV

SEQ ID NO: 8021 - protein, 433 aa, Oryza sativa Japonica Group
MYSNFKEQAIEYVKQAVQEDNAGNYVKAFPLYMNALEYFKTHLKYEKNPKIKEAITAKFTEYLRRAEEIRAVLDEGGGGGGANGGDAAVATRPKTKGKDGEGGGDDSEQSKLRAGLNSAIITEKPNIKWNDVAGLESAKQALQEAVILPVKFPQFFTGKRRPWRAFLLYGPPGTGKSYLAKAVATEADSTFFSISSSDLVSKWMGESEKLVANLFQMARENAPSIIFIDEIDSLCGQRGEGNESEASRRIKTELLVQMQGVGHNDDKVLVLAATNTPYALDQAVRRRFDKRIYIPLPDLKARQHMFKVHLGDTPHNLNESDFENLARRTDGFSGSDIAVCVKDVLFEPVRKTQDAMFFFKADGDMWMPCGPKQSGAVQTTMQELASKGLAAKILPPPISRTDFEKVLARQRPTVSKKDLEVHERFTKEFGEEG

SEQ ID NO: 8022 - protein, 952 aa, Oryza sativa Japonica Group
MGEPLLTTLSMENTNSHPCTRLSMDPAGSHAASGDSSGGGGGGGSTGAGGGGGGGGGDRELFIIPRRESAHPGPPDINLPLSADPSPPPPPHPPSWGIDQFDMLDVGLGTQTYESEVALTLPKLTGNGNTAVGVGARKCAKRGDSIWGAWFFFNHYFKPALVEKPKGKVTRDSSGSVSGFEKSDLRLDVFLVQHDMENMYMWVFKERPDNALGKMQLRSFMNGHSKHGEPSFPFSADKGFARSHRMQRKHYRGLSNPQCLHGIEIVSSPNLSAVPEAEMKRWAELTGRELNFSIPPEASDFESWRNLPSTDFELDRPLPLSSKITHGSHSHKKALNGSGLNLSTPPSSDDGMDLSPKCAKRRKDFFAHGADEDCVMANNSCSDREQEIEVHTGEPSWMHEFTGVAKHASGPVTAAKTIYEDDEGYLIMVSMLFSDPHSVKVSWRNTLTHGIVKISCVSTARMPFVKRHDRTFKLTDPFPEHCPPGEFVREIPLATRIPEDAKLEAYYDETGTGLEIMVPKHRVGPEEHEVQRPEAALYTLADAAVVAADAAAGGGGGGGGGGGEAAASVAQKNGGWFGFISEALEVVLKVLKDGLSAVHVPYSYGFAIILLTVIVKAATLPLTKQQVESTLAMQNLQPQIKAIQQRYAGNQERIQLETARLYKQAGVNPLAGCFPTLATIPVWIGLYQALSNVANEGLLTEGFFWIPSLGGPTTIAARQSGAGISWLLPFVDGHPPLGWHDTICYLVLPVLLVASQFVSMEIMKPPQTDDPSQKNTLLVLKFLPFMIGWFSLSVPSGLSIYWFTNNILSTAQQVWLRKLGGAKPVVNQGGSGIITAGRAKRTSAQPAQPGERFKQLKEEESKRKGNKALAAGDSDLSASTSEDEESDDETTEEVNSVGQYGCVVDLGHNFDDQLGRLIFRCRTDTKHSSGTGVLLAHSKMKIVQYTTIGLRG

SEQ ID NO: 8023 - protein, 347 aa, Oryza sativa Japonica Group
MGDSSRSVSIDVERISFGGKEHRVRTRYGSVSVSVFGDEDKPALITYPDVALNYMSCFQGLFFCPEAASLLLHNFCIYHITPQGHELGAAPISSDVPVPSVDELVDQVADVLDFFGLGSVMCLGVTAGAYILTLFATKYRDRVIGLMLVSPLCKAPSWSEWLYNKVLLNLLYYYGSRGLVKECLLQRYFSTEVRGNGQDPESEIVQACRSLLHERQGSNVWRFLQAINERLYLTEAFKEASVSDTDFCGENSQFHDDAVHMTTKLDRRYCALVEVQACGSLVTEEQPHAMLIPMEYFLMGYGLYRPSQLDSSPRSTLNPFCISPELLSPESMGVKLKPIKTRISLKV

SEQ ID NO: 8024 - protein, 176 aa, Oryza sativa Japonica Group
MSGRGRGDPLVLGRVVGDVVDPFVRRVALRVAYGAREVANGCELRPSAVADQPRVAVGGPDMRTFYTLVMVDPDAPSPSDPNLREYLHWLVTDIPATTGVSFGTEVVCYESPRPVLGIHRLVFLLFEQLGRQTVYAPGWRQNFSTRDFAELYNLGLPVAAVYFNCQRESGTGGRRM

SEQ ID NO: 8025 - protein, 98 aa, Oryza sativa Japonica Group
MVSERVKGMVKGFDATNGFSFITPDDGSEDLFIHQSSLKFDGYRSLNDDDVIELSVGSSDDGRTKAVDVTAPGSDAHTGGSRPSCGHIPTAGRPLVVS

SEQ ID NO: 8026 - protein, 426 aa, Oryza sativa Japonica Group
MELDRSLIACEEPPSEPMDFLSSAWCSSAIQVLQTGSMDCSMALVENPVMAPDNDRRDLLPKNDRSLVVDSSGFSTTQWKYDDLKSWIWLQKAIHPELDYDLKKKWLPRKMAPWSGISLKKWVKERKQKRKEEARLHKAEVHAAVSVAGVAAALAAIAAESSTPAATMKETAVASAAALVAAQCAKVAEAAGATRDQVAAAVNAAVAATDASNVITLTAAAATSLRGAAALRGRRSSGGGGGGGSQNERMDHASSALSQDDLDFDFNYARSKAALAKGDEMFVAMPDGKWKLHTVSAATSKGGKVVMRIKKMNLVMAFSNAKESKKPNAQVDRATAIPVHLLTLRENDRAGVIHDVQPCAPEKPSRDEDATYPIEVTTSKGKVELRADDYGVYKRWVTALTHMLAAPTAICKAHELPPPPPPHRRN

SEQ ID NO: 8027 - protein, 378 aa, Oryza sativa Japonica Group
MASAAAEVPSYFVCPISLQLMRDPVTLPTGISYDRAAIARWLAAPGARRTCPVTRQPLEHGLELTPNHTLRRLIQSWAASVSPGSAVDEEVAALRPVSSDEVASLLSDAAAAQVGALRRLRELAADACSTAREEAVGVLASLRIPEQELIGVSTRHGNLAESLTAVLRSSNLQSRAHAVQLVRTLADAVVPAWVIGLNAELLAEVVGVVRDRVSARATKASLHALAALCPYGRHRVKIVGAGAVAALVELLLDEPERRVCELALAVLDRLCTCAEGRAELVAHAAGVAVVGKKVLRVSEAASERAVRVLRSVARHAATPAVLQEMAQCGVVGKLCLALRSEQCGVKTKEKAHEVLKLHSRVWRASPCLSPSFLALYPS

SEQ ID NO: 8028 - protein, 151 aa, Oryza sativa Japonica Group
MSSPAGEDEKKPAGGEGGGAHINLKVKGQDGNEVFFRIKRSTQLKKLMNAYCDRQSVDIKSIAFLFDGRRLNAEQTPDQDGNEVFFRIKRSTQLKKLMNAYCDRQSVDIKSIAFLFDGRRLNAEQTPDQLEMEDGDEIDAMLHQTGGSLPA

SEQ ID NO: 8029 - protein, 268 aa, Oryza sativa Japonica Group
MATAPCFPATPGLPARGAVAARSRMAAGGSRSQRRRSSSGVFLCRSSTTGSSRMEDYNTAMKRMMRNPYEYHHDLGMNYAIISDSLIVGSQPQKPEDIDHLKDEEKVAFILCLQQDKDIEYWGIDFQTVVNRCKELGIKHIRRPAVDFDPDSLRTQLPKAVSSLEWAISEGKGRVYVHCTAGLGRAPAVAIAYMFWFENMDLRTAYEKLTSKRPCGPNKRAIRAATYDLAKNDPHKESFDSLPEHAFEGIAGSERSLIQERVRALREA

SEQ ID NO: 8030 - protein, 184 aa, Oryza sativa Japonica Group
MEMVLQRTSHHPVPGEQQEAAAELSSAELRRGPWTVDEDLTLINYISDHGEGRWNALARAAGLKRTGKSCRLRWLNYLRPDVKRGNFTAEEQLLILDLHSRWGNRWSKIAQHLPGRTDNEIKNYWRTRVQKHAKQLNCDVNSKRFKDAMKYLWMPRLAERIHARAGAVDDSGDYSNNDLSVYLV

SEQ ID NO: 8031 - protein, 469 aa, Oryza sativa Japonica Group
MVQIEPLEVSLEAGNQADSALLDDDGRPRRTGTFWTASAHIITAVIGSGVLSLPWATAQLGWVGGPAVMVVFGGVTYFTATLQAECYRTGDEETGARNYTYIGAVRAILGGANAKLCGIIQYANLVGTAVGYTIAASISMPGHQEGRAASTPNGHNVPCHISSTPYMLIFGAFEIVFSQIPDFHEIWWLSIVAAVMSFTYSGVGLGLGIAQTVADGGFRGTIAGVTNVTATQKAWRSLQALGNIAFAFAFSNVYTEIQDTIKAPPPSEAKVMKQASLLSIVATSVFYALCGWMGYAAFGNAAPDNLLTGFGFFEPFWLVDAANVAIAVHLIGAYQVYCQPVFAFVERKASRRWPDSGFVNSELRVWPFAISAFRLAWRSVFVCFTTVVAMALPFFGVIVGLLGAISFWPLTVYLPTEMYIAQRGVRRGSALWIGLRALAVAGFVVSAAATTGAVANFVGDFMKFRPFSG

SEQ ID NO: 8032 - protein, 349 aa, Oryza sativa Japonica Group
MPIMHDGYRYELVREIGSGNFGVARLMRNRASGDLVAVKYIDRGEKIDENVQREIINHRSLRHPNIIRFKEVILTPTHLAIVMEYASGGELFERICSAGRFSEDEARFFFQQLISGVSYCHSMQVCHRDLKLENTLLDGSTAPRLKICDFGYSKSSVLHSQPKSTVGTPAYIAPEVLLKKEYDGKIADVWSCGVTLYVMLVGAYPFEDPEDPKNFRKTIQKILGVQYSIPDYVHISPECRDLITRIFVGNPASRITMPEIKNHPWFMKNIPADLMDDGMVSNQYEEPDQPMQNMNEIMQILAEATIPAAGTSGINQFLTDSLDLDDDMEDMDSDLDLDIESSGEIVYAM

SEQ ID NO: 8033 - protein, 313 aa, Oryza sativa Japonica Group
MGSLPVSSPECAPGRRVTVAASDLAPLFGAQRRHLDHFFDRLDLSQAAAFAQALVDAPGAVFFTGVGKSGIVARKLAQTLASPRSGASDELLALAPCARAKGAHLISLTSAASGADCPLAAVCDLNVHLPLQAEVCPFGLAPVTSTAIQMVFGDTVVAAIMEARRLSRDQYASNHPAGKIGKSLIFKVKDVMKKQNELPLCKEGDMIMDQLTELTSKGCGCLLVVDDEYHLIGTFTDGDLRRTLKASGQAIFNLTVGEMCNRHPRTITADAMAVQAMEKMESPPSPVQFLPVVDSNNVVCGIITLHGLVSAGL

SEQ ID NO: 8034 - protein, 415 aa, Oryza sativa Japonica Group
MEEAAAEVPSYFLCPISLEIMRDPVTLATGITYDRSSIERWMFGGGGGGGGKGTCPVTRRQLAPAEREATPNHTLRRLIQAWGRRRCSAAAAGSGSSPRSGEIKAIAAESDRNKRCVEATPGAVEFLVSVVVQSHAAASTSASSDDDDLFDSVIDSPMSTSSPEEEALGVLYSLKPSEPTLRRVLGKDNGVGFLDTLASVLRRPSYRSRAYAILLLKAVTSAMPPERLMAVSPELVEEVVRVVSDGVSSKAVKAALHVLCRLCPWGRNRVKAVEAGAVAALVELLLDEEGGGGRRRAAELAVVAIDHLCGCAEGRSELVAHPAGLAVVSKRAMRVSPAATESAVRALHAVARNAATPAVLQEMLAVGVVAKLLLVLQADGGERARARAREMLRANARVWKDSPCLQAHLKASYPS

SEQ ID NO: 8035 - protein, 431 aa, Oryza sativa Japonica Group
MVSMPPSLPPLPLPPQLSLADLKALSVLGRGARGVVFHVVPAGGAAAAVSATADEDPMALKAISRAAARHKCAEVAGGPGGDGHRRIWFERDVLLGRRRVRPSTRCAGGDLNALRRRQAGRVFSVAAIRFYAAELVLALEHLHGLGVVYRDLKPENVLIQDSGHIMLVDFDLSTTVPPPPPPPPPDTAPPPQTARSRGGRRDSTKAAAAVFGCFSSRRAAASRPSPSSSSSSRSPPSTSRTASSSSSSTRCSSAAAKSNSFVGTEDYVAPEIVAGSGHDHAVDWWGLGVVLYEMLYGRTPFRGRSRRETFHRVLAARPDMPGEPTPLRDLIGLLLEKDPGRRLGAHGVKRHAFFRGVDWDRVLHVARPPFIPTPDDDDAGAAAEALDVEKVLHEAFAASTAAAAGETAAVETAAPEAGSDRGRDEDFSVFF

SEQ ID NO: 8036 - protein, 496 aa, Oryza sativa Japonica Group
MATCADTLGPLLGTAAANATDYLCNQFADTTSAVDSTYLLFSAYLVFAMQLGFAMLCAGSVRAKNTMNIMLTNVLDAAAGALFYYLFGFAFAFGAPSNGFIGKHFFGLKQVPQVGFDYSFFLFQWAFAIAAAGITSGSIAERTQFVAYLIYSAFLTGFVYPVVSHWIWSADGWASASRTSGSLLFGSGVIDFAGSGVVHMVGGVAGLWGALIEGPRIGRFDHAGRSVALRGHSASLVVLGSFLLWFGWYGFNPGSFLTILKSYGPPGSIHGQWSAVGRTAVTTTLAGSTAALTTLFGKRLQTGHWNVIDVCNGLLGGFAAITAGCSVVDPWAAIICGFVSAWVLIGLNALAARLKFDDPLEAAQLHGGCGAWGVIFTALFARKEYVDQIFGQPGRPYGLFMGGGGRLLGAHIVVILVIAAWVSFTMAPLFLVLNKLGLLRISAEDEMAGMDQTRHGGFAYAYHDDDASGKPDRSFGGFMLKSAHGTQVAAEMGGHV

SEQ ID NO: 8037 - protein, 382 aa, Oryza sativa Japonica Group
MAFFVKISAPCSLAGHGTTSSSSGSSRSKRGLLLPVGAGAGAGAYGGRQYSDVVPVPALSQAQASSSGGRLRIFSGTANPRLAQEVACYLGMELGRVKIKRFADGELYVQLQESVRGCDVFLVQPTCPPANENLMELLIMIDACRRASAKTITAVVPYFGYARADRKMRGGRESIAAKLVANLITEAGAHRVLACDLHSGQSIGYFDIPVDHVYGQPVILDYLASKTICPDEVVVVSPDVGGVARARTFAKKLSDAPLAIVDKRRQGHNQSEVVHLIGDVRGKVAVMVDDMIDTAGTVSQGAELLHREGARAVYACSTHAVLSPPAVDRLSSGLFQEVIVTNTVPVLHHRTFPQLTVLSVANLLGETIWRVHDDCSVSSIFQ

SEQ ID NO: 8038 - protein, 426 aa, Oryza sativa Japonica Group
MNGGIGDALMQPQHVQVMSSSLPMVASTFVAEPAAAANKPRAAGLPPTPPQVFAAQRAAAAAGGDVCMEESAQGGGGGLPPRKAHGRSSSDVPFGYLAGQHQLLPPKVEAGWGHLGAGAGGAAAADDLFNAYLNLEGLDGLNSSDDRHDEGDSRGSSIKTNGADSSENESEECADDTRGGIRLWSADGGERREGVKRNAAGEPATAPLARHARSLSMDSLIGKFNFTAGTAAAAGNGVALGPNRFSLEFGSGEFTPSEMKKIMADEKLAEMALADPKRVKRVLANRQSAARSKERKMRYIAELEQKVQILQSEATNLSAQLTMMQRDSAGLATQNNELKFRLHAMEQQAQLRDALNEALTTEVQRLKLATAELGDSCSSSSLAQQIQLNAQNQMFQLQQQQATQIPFYQLQQSQQNGAAKNNESKE

SEQ ID NO: 8039 - protein, 920 aa, Oryza sativa Japonica Group
MALSASNSECVGDLDGEQIRKAKLISLGRGDRFAAVRDDEQTADALSRRYRDYNFLDYHEKVIDGFYDIFGPSMESSKQGKMPSLADLQTGIGDLGFEVIVINRAIDTTLQEMEQVAQCILLDFPVANIAALVQRIAELVTDHMGGPVKDANDMLTRWLEKSTELRTSLHTSLLPIGCIKIGLSRHRALLFKILADSVGIPCKLVKGSNYTGDDDDAINIIKMNEREFLVDLMAAPGTLIPSDVLSWKGNSLNSNARLTQNPLAGSSSTTDSNLSANALPPGHKGGQLPLFSSGDWISASQSGYEKDGATTSSQASSSGTTSVAAGSAFDSSWTLVSHGQSDDPSTSAGMSAQQKVILPGGEHPWNENINARNENIKLVSDLQGNSESINLFADLNPFGGREPKRTSVPLNGPDNRNNELQRRRENVVPSTRRPQQRLVMKNWSPYNDVSNNKQYNYVEDSFARRNIGDNAASSSQVPRPSAKNTNLNVVVRTDTPYMAAHNYDNSMAGSSAMKMTSTAGIGKVPDKVLYGDLDKGLTNSRLGDQPPIERHKWGNSVEGRIPTGTVHNQAKEHKENFDGKQDNKKLHPDPKKSPLDRFMDTSMPSRNPESVSPSFARSHKLDTMFDDVSECEIHWEDLVIGERIGLGSYGEVYRADWNGTEVAVKKFLDQDFYGDALDEFRSEVRIMRRLRHPNIVLFMGAVTRPPNLSIVSEYLPRGSLYKILHRPNCQIDEKRRIKMALDVAKGMNCLHISVPTIVHRDLKSPNLLVDNNWNVKVCDFGLSRLKHSTFLSSKSTAGTPEWMAPEVLRNEQSNEKCDVYSFGVILWELATLRMPWSGMNPMQVVGAVGFQDKRLDIPKEIDPLVARIIWECWQKDPNLRPSFAQLTSALKTVQRLVTPSHQESQSPPVPQEIWVNSSTP

SEQ ID NO: 8040 - protein, 317 aa, Oryza sativa Japonica Group
MGALRRWLPCCCCCCRGGGEEFAAQSGGISAEVLEKAFGETEEEFVASVQRSWPSQPRILSVGSCCLVGAIEDGTLYVANLGDSRAVLGRRSAAGAAHGRKGKNRVVPERLSRDHNVADEDVRRELKELHPDDSHIVLNTHGVWRIKGIIQVSRSIGDVYLKKPEICKSNPMLQQTICPFPLRRPVMSAVPTIKTRKLRPGDQFVIFASDGLWEQLTDEAAVAIVAGSPRRGVAMRLVRAAQLEAARKKDVKYERIRTIEKGQRRHFHDDITVVVLFLDKCRGKAGRGDEIDGTDGPVDVFSLSPDDREDPTRPVLR

SEQ ID NO: 8041 - protein, 502 aa, Oryza sativa Japonica Group
MAQEDVGHLSDAGLALGLSLGGGGGGTTDAAAAHRGGCRRPSPSSQCPPLEPSLTLSLPDDAAAGAAATATATASGGGGPAHSVSSLSVGAAAAAAVKRERAEEADGERVSSTAAGRDDDDDGSTRKKLRLTKEQSALLEDRFREHSTLNPKQKVALAKQLNLRPRQVEVWFQNRRARDERETASPGTHEKRIEVAATGAAAAGGLSVVNMAQEDVGHLSDAGLALGLSLGGGGGGTTDAAAAHRGGCRRPSPSSQCPPLEPSLTLSLPDDAAAGAAATATATASGGGGPAHSVSSLSVAAAAAAAVKSERAEDADGERVSSTAARRDDDDERSTRKKLRLTKEQSALLEDRFPDHSKLNPKQKVALAKQLNLRPRQVEVWFQNRRARTKLKQTEVDCEFLKRCCETLTEENRRLQRELQELRALKFAPPPPSSAAHQPSPAPPAPFYMQLPAATLTICPSCERVGGPASAAKVVAADGTKAGPGRTTTHHFFNPFTHSAAC

SEQ ID NO: 8042 - protein, 145 aa, Oryza sativa Japonica Group
MAANGSNVVSRGAVRFTEEQEALVLKSWAIMKNDSAHIGHRFFLKIFEVAPSARQLFSFLRNSDVPLEKNPKLKIHAMAVFVMTCEAAAQLRKTGRVTVAKFALLETIKEAVPASMWSPAMKGAWGEAYDHLVAAIKQGMKPAAA

SEQ ID NO: 8043 - protein, 324 aa, Oryza sativa Japonica Group
MRGLRSRILRTLQSFPNAVNVQPGLLLPAPDVQPSPPPPPKAPCRSQEEQPDGGGGGGGDDKENVSPEVAPRKAKKMRVSLGAAEDEAAAYYRRPDPATATLFDPDLLAAFRGAVDAYARALQEAKRRDDDDNDGFFLLDEEEGCGVAGGVGFGVDEDPLEGFETRCPPGGERAVVLYTTSLRGVRKTFEDCATVRRLLEGLRVAFLERDVSMHAPYRDELRALLVGLDDAAVPPRLFVDGRYLGGANEVVTLHEQARLRPVLRRGASRGAGDAACAVCGGAWFVVCGACSGSHRLYDAAAAAGGRVPCTGCNENGLVPCPLCS

SEQ ID NO: 8044 - protein, 611 aa, Oryza sativa Japonica Group
MGENPRIKSRKRAPLFAQGETSRALSDLEEGSNVQPENVGFCRVIKLARHDAGKLVIATMALLVASLSNILVPKYGGKIIDIVSRDVRRPEDKAQALDDVTGTILYIVIIVVTGTNLEIAFFDVTRTGELLSRLSEDTQIIKNAATTNLSEALRNITTTSIGLGFMFATSWKLTLLALVIVPVISIAVRKFGRFLRELSHQTQAAAAVASSIAEESFGAIRTVRSFAQESHEVLRYGEKVDETLKLGLKQAKVVGMFSGGLNAASTLSVVIVVIYGANLTINGYMTTGSLTSFILYSLTVGSSVSALSGLYTTVMKASGASRRVFQLLDRVSSMANSGDRCPTNENDGEVELDDVWFAYPSRPSHMILKGITLKLTPGSKVALVGPSGGGKTTIANLIERFYDPLKGRILLNGVPLPEISHQFLHRKVSIVSQEPVLFNCSIEENIAYGLEGKASSADVENAAKMANAHNFICSFPDQYKTVVGERGIRLSGGQKQRVAIARALLMNPRVLLLDEATSALDAESEYLVQDAMDSLMKGRTVLVIAHRLSTVKSADTVAVISDGQIVESGTHDELLSRDGIYTALVKRQLQGPRFEGTSNATAEIEPISNGQ

SEQ ID NO: 8045 - protein, 163 aa, Oryza sativa Japonica Group
MDRRRRRSRCRCSNSRAFRGVRKRPWGKFAAEIRDSTRNGVRVWLGTFDSAEEAALAYDQAAFAMRGSAAVLNFPMEQVRRSMDMSLLQEGASPVVALKRRHSMRAAAAGRRRKSAAPAPADQEGGGGVMELEDLGPDYLEELLAASQPIDITCCTSPSHHSI

SEQ ID NO: 8046 - protein, 442 aa, Oryza sativa Japonica Group
MADTASPAAAREAMIEPASTPLLRRRGSYTRSMSHARDELGSFRSCLRWMCVEHSDGSSAVASWLVFTLLAVAVPAAARAALPRRAYDRQVQASLTLSAALAYLKLSRLVRRRGLRRLLYLDRLRHDSQDVRAGYTVELAGSFRLLACFVLPCFLADAAYKVYWYCANRPFPLWWSAAACALEMASWMYRTAMFFMACVLFRIICFLQILRMTGFARDFGQCADVADVLRQHRRIREQLRRISHRYRKFIVSCLLLVTASQFSALLAATRPHAQVNIATSGELALCSLSLVTGLLICLHSAAKITHKTQAITSVAAQWHADATINSQERDHENPRTPIKASSYLHAAGPVVPQPAPNASSSGDESEDETSPSDDGLDGTKIVSFHATHISFQKRQALVTYLENNRAGITVFGFVVDRTWLHALFMIEFSLVMWLLGKTIGIS

SEQ ID NO: 8047 - protein, 629 aa, Oryza sativa Japonica Group
MARRNACSPSVPHDAGHSCPGLCVSPGGATGRPSPWQCRRRRRRGAGRASWWPAAASAAWSSALAAKRKGFEVVVLERDMSAVRGEGKYRGPIQLQSNALAVLEAVDAGAADQVMDAGCITGNRVNGIVDGVSGSWYIKFDTFTPAAERGLPVTRVISRMTLQQILARAVGDDAILNDSHVVDFIDDGNKVTAILEDGRKFEGDLLVGADGIWSKVRKVLFGQSEATYSEYTCYTGIADFVPPDIDTVGYRVFLGHKQYFVSSDVGAGKMQWYAFHKEPAGGTDPENGKNKRLLEIFNGWCDNVVDLINATDEEAILRRDIYDRPPTFNWGKGRVTLLGDSVHAMQPNLGQGGCMAIEDGYQLAVELEKSWQESAKSGTPMDIVSSLRRYEKERILRVSVIHGLARMAAIMATTYRPYLGVGLGPLSFLTKLRIPHPGRVGGRFFIKYGMPLMLSWVLGGNSTKLEGRPLSCRLSDKANDQLRRWFEDDDALEQAMGGEWYLLPTSSGDSQPIRLIRDEKKSLSIGSRSDPSNSTASLALPLPQISENHATITCKNKAFYVTDNGSEHGTWITDNEGRRYRVPPNFPVRFHPSDAIEFGSDKKAVFRVKVLSTLPYESARGGPQILQAA

SEQ ID NO: 8048 - protein, 411 aa, Oryza sativa Japonica Group
MSLADDLAAVERGGHMVPSKAAGVDGDGEPRRTGTMWTASAHIITAVIGSGVLSLAWGVAQLGWVAGPAVMLLFGAVIYCCSVLLVECYRTGDPYTGQRNRTYMDAVRANLGGTKVVFSQIPNLHKMWWLSTLASAMSLSYSAIGIALGVAQIVVLDMFEIEFAANGGIRGTITGVFVGAGAGVTSMQKDTVKPVAPPSTETKVMRKAVAVSVATTTAVYLMCGCVGYAAFGNDSPDNLLTGFGFFEPFWLLDLANAGVVVHLVGTYQVVAQPVFAFLDGRAAAGAWPGSAALGKRRRVLRVGSLAEIEVSPFRLAWRTAFVCVTTAASTLLPFFGSMVGLIGAASFWPLTVYFPVEMYIAQRRVPRGSAQWLSLQALSAGCLVVSVAASAGSIAGVVEAFKAHNPFCWTC

SEQ ID NO: 8049 - protein, 281 aa, Oryza sativa Japonica Group
MAAAEVQSAAGWGRQLQQDGGGWRKGPWTSQEDALLVEHVRQHGEGRWNSVSKLTGLKRSGKSCRLRWVNYLRPDLKRGKITPQEESIIVQLHALWGNRWSTIARSLPGRTDNEIKNYWRTHFKKGKPSKNIERARARFLKQRREMQQSQQLQQPTLMPTPTPQSKDIIVAETGDARTDYDACGAAAAVAPSSSSSSLSMAGREAEDLIMHQDAMDDLMMCPAMSYHLILHGAAVAGHQLSDGGGSCCASTSEDYGSSEDDGATWGSLWNLDGAAGACTLW

SEQ ID NO: 8050 - protein, 571 aa, Oryza sativa Japonica Group
MAALRDVLLSIAQTPHRLRRRALVTWTPAQETSEVRDRSGARMKRRLEWYDLVGLGVGGMLGAGVFVTTGRVARDTAGPAVFASYVIAASPRSSPPSATPSELVGFFGGANILMEYVLSNAAVARSFTDYLASTCGITEPDAWRIQVDGIAKGYNALDFPAVALILVLTLCLCYSTKESAMLNMVITVFHLLFFVFIILAGLWNGSARNLVSPHGLAPYGVRGVLDGAAIVYFSYIGYDSASTMAEEIRDPARALPVGIAGSVLVVSALYCLMSLALCAMLPYTEIAESAPFSAVFREKAGWEWAGSVVGAGASLGIVASLLVAMLGQARYLCVIARARLVPAWLAKVHPSTGTPMNATIFLDRANGSIKYTNNFTEVKVLTTVSDHENCNAGLCTASIALFTELQVVFEMISIGTLLVFYLVANALIYHRYAKLGANRSLHVLLFLLILTLSSLGFSLSRRIHGQCRWGMALFGATSVTITAMFHCAVRRDMPEPPSEWMVPLMPWPAAASVFLNVFLMTTLKVMSFQRFGLWSFVIIVFYVCYGVHSTYSAEENEAVNAMIHHANMDIS

SEQ ID NO: 8051 - protein, 293 aa, Oryza sativa Japonica Group
MTARSMLRNHPEASVLDTIRQHLLEEPRGGGGGEAAEASFGSLVADMWSDSLPFRDDDADDMVVFGAMRDAFSCGWLPDGVFAEVKPEPLLSPDSSSYDGSGGRGGGGDGGAREGGGGAAAVARGKHYRGVRQRPWGKFAAEIRDPAKNGARVWLGTFDTAEDAALAYDRAAYRMRGSRALLNFPLRIGSEIAAAAAAAAAAAAGDKRPSPEPATSESSFSSSSSCTTTTTSSSTSSSGSPKRRKRGEAAAASMSMPLVPPPSQLNWPVQAWYPAAAPVEQVAITPRVEQLVI

SEQ ID NO: 8052 - protein, 248 aa, Oryza sativa Japonica Group
MMERAEDLRLSLSLSSPLIAPRTHHVAMLFHAPPEKRFLEMPLLPAAKRSEVVAAEEERAGLRGGGGSDEEDGGCGIDGLTQEAPGLSKDQSAVLEDSFREHPTLNPRQKATLAQQLGLRPRQVEVWFQNRRARTKLKQTEVDCEFLKRCCETLTEENRRLQKEVQELRALKLVSPHLYMNMSPPTTLTMCPSCERVSNTNNNSSAAAAADRRGIRTTTAAGGGSVVDTAADGGILCHRPIAVRPQQS

SEQ ID NO: 8053 - protein, 557 aa, Oryza sativa Japonica Group
MAAKPSSSSSSTGGHHTVDIRAAQAQPEDARQSAMSGPINIRGERRPPPMQRAFSRQVSLGSGVTVLGMDKVGKNGGRGQQRALPRSGKSLGVLNHTGALGQAAAGDGAARRGDFSMFRTKSTLSKQNSLLPSRIREPDLELPPHVEGPSVGRQGGEDPLNKSVPAGRYFAALRGPELDEVRDYEDILLPKDEVWPFLLRFPVGCFGVCLGLGSQAILWGALAASPAMRFLHVTPMINVALWLLALAVLVAVSVTYALKCVFYFEAIRREYFHPVRVNFFFAPSIAAMFLTIGLPRAVAPERLHPAVWCAFVAPLFGLELKIYGQWLSGGKRRLCKVANPSSHLSVVGNFVGAILAARVGWAEAGKFLWAIGVAHYIVVFVTLYQRLPTNEALPQGAPPGVLHVHRHAVGGEPRVGGDLRQLRRRGAHLLLHGALPVHVPRRSHQLLPRLPYAEAEPCFTSRALALSLSLMSTTMVSLLLVSTLLHAFVWRSLFPNDLAIAITKDRQNGAFKPHGKGRKAGKRVYDIKRWAKQAPLSLVSSITKSNSADKEEEEKTE

SEQ ID NO: 8054 - protein, 421 aa, Oryza sativa Japonica Group
MAMEPPPLFLCPISMELMEDPVTVATGVTYDRRSIERWFFKYGKTTCPATMQRLASFDFTPNHTLKRVISSWLDRASSSSSPSTAGSPATTSSSSSSNAMERERLPSVLAGIEETPFKATALKNLKSCMAGDEAAREDFVACGGIQVLGRVMTQALEESSAGGDFSAFRTCEEAAAVLATLPLSDDASVELLLKPECMRPVSVLVQRGNPKQRLHAMSMISKISRASVRDWTAEVDVDDMVKALLELLSDGASAKLSSRALDVLLDVTARYSRGARRAKAVELGAVRVLAELLLDADRHVAERSLLLLKRMCKCPEGRLAFAEHGLAVAAVARAVLRVSGLATRLAVNVLWLVACAPAPAERVLEDMVVGGAVAKLLALMQVESSPSTKDKAVKMLRAHGAFWRQYPCFPTDLKDYLKSLN

SEQ ID NO: 8055 - protein, 142 aa, Oryza sativa Japonica Group
MAPRNAAEAVAVAVAEGGGAGMEPRFRGVRKRPWGRYAAEIRDPARKARVWLGTFDTAEAAARAYDSAALHFRGPKAKTNFPVAFAQAHHQAPPPPLPKAAALAVVSPTSSTVESSSRDTPAAAPVAAAGQGPGARLGLGSI

SEQ ID NO: 8056 - protein, 312 aa, Oryza sativa Japonica Group
MISRPTSRSSRWIPASGRWSPTPTRPNRLPGPGAASPKGGLKNTTVAGADGPAARSAKRKRKNQFRGIRQRPWGKWAAEIRDPRKGVRVWLGTFNSPEEAARAYDAEARRIRGKKAKVNFPDGAPVASQRSHAEPSSMNMPAFSIEEKPAVMSAGNKTMYNTNAYAYPAVEYTLQEPFVQIQNVSFVPAMNAIEDTFVNLSSDQGSNSFGCSDFSQENDIKTPDITSMLAPTMTGVDDSAFLQNNASDAMVPPVMGNASIDLADLEPYMKFLIDGGSDESIDTLLSSDGSQDVASSMDLWSFDDMPVSAEFY

SEQ ID NO: 8057 - protein, 475 aa, Oryza sativa Japonica Group
MAHTSSQKHGNDDVDTGAEAAMDQLAGRSSLSPAREKTRRRPEKSGTVWTATAHIVALLIGSSVLAVAWTFAQLGWVAGPAVVVALSVVTYYSSALLADCYRDDDPLHLGGGAVHGEYIAAVRSYLGPKSVTFCGIIQYGVLWAAMVGYTITSSSSMSAVRRVNRFHRNWLAAGDGDGGGGGGGATGVRYMVVFGAFQLLLSQLPSLENVAWLSVIAVATSFGYSSICLGLCAAKWASHRGGVRGTLAGAAAGSPGEKVFNVLLAVGNIAISYIYSPVLFEIQHPATPPSATTRPATSSPAPPSTEPFWLVDVANACVVVHFLGAYQVIAQPVFARLEAYVGGRWPESRLVTASYELRLRVPAWTSAPPTAVTLSPARMALRAAVIVATTAVAAMMPFFNAVLGFIAALGFWPLAVYLPVSMHIARVKIRRGEARWWALQGASAALLVVAVGMGVASVRDMVQRLNEAAPFKTTG

SEQ ID NO: 8058 - protein, 397 aa, Oryza sativa Japonica Group
MAMWRAAAGHLLGRALGSRAAHTSAGSKKIVGVFYKGGEYADKNPNFVGCVEGALGIREWLESKGHHYIVTDDKEGLNSGELRMIFIWLMEGGKEVLDVCELEKHIEDMHVLITTPFHPAYVSAERIKKAKNLELLLTAGIGSDHIDLPAAAAAGLTVAEVTGSNTVSVAEDELMRILILLRNFLPGYQQVVHGEWNVAGIAYRAYDLEGKTVGTVGAGRIGRLLLQRLKPFNCNLLYHDRLKIDPELEKEIGAKYEEDLDAMLPKCDVIVINTPLTEKTRGMFNKERIAKMKKGVIIVNNARGAIMDTQAVADACSSGQVAGYGGDVWFPQPAPKDHPWRYMPNHAMTPHISGTTIDAQLRYAAGVKDMLDRYFKGEDFPVQNYIVKEGQLASQYQ

SEQ ID NO: 8059 - protein, 309 aa, Oryza sativa Japonica Group
MATQWVLVVVAVMAVLFAGGAAGGQLSTRYYDGKCPNVQSIVRAGMAQAVAAEPRMGASILRMFFHDCFVNGCDASILLDDTANFTGEKNAGPNANSVRGYEVIDAIKTQVEASCNATVSCADILALAARDAVNLLGRRDALTASQSAANGNLPGPGSDLATLVTMFGNKGLSPRDMTALSGAHTLGQARCATFRSRIFGDGNVDAAFAALRQQACPQSGGDTTLAPIDVQTPDAFDNAYYANLVKKQGLFHSDQELFNGGSQDALVRKYAGNAGMFAADFAKAMVRMGALLPAAGTPTEVRLNCRKVN

SEQ ID NO: 8060 - protein, 451 aa, Oryza sativa Japonica Group
MAAKAAALSSSPFVSSRRLSSPAASLRARTPRCVMGSEQVRVVVEEEGKTKKRMGVAEPRSAPPAVWTPRAPAQEARLAALRTDGRDSRLKIFSGTANRPLAQEIASYLGVDLGKVLIKRFADGEIYVQLQESVRGCDVFLVQPTCSPVNENLMELFVMIDACRRASARSITVVIPYFGYARADRKAQGREAITAKLSANLLTEAGSDRVIVCDIHSTQALGYFDIPVDHIHGQPVILDYLASKTISKDLVVVSPDVGGVVRARAFAKKLSDAPLAIVDKRRQGHNMSEVMHLIGDVKGKVAIMVDDMIDTAGTITSAAALLKQEGAEAVYACSTHAVFSPPAIERLSGGIFEEVIVTNSILLPEHKCFPQLTVLSMANLVAETIWHVHRDGSSSISTSETHSLPLTKEASDALPGYNQPRGHMTLLPTTKEASDAPTYGGVVILASEAQL

SEQ ID NO: 8061 - protein, 394 aa, Oryza sativa Japonica Group
MDHSGPWGAALSWLLFLLLAVAVPAAAHFLLAFRASRRPFSAVVQVSLSAASAAGFLCLSSSFRRIGLRRLLYLDKLRTKSDRVRLNYTARLSFSFRLLASLVAPCFAAEAAYKVWWYATSGDRVPFFGNDVLSNAVACSVEMAAWMYRSAIYLLTCVLFRLICHLQGLRLEDFAGTLLVEVEEGRAGVERVLREHLDIRKQLKVISHRFRKFIVASLLIATASQFASLLLTTRHDSVDDLLNTSELALCSVVLMSGLIIILSSAAKITHQAQALTGQTTKWHACCTIEPVPDEEAEPGSNHSSMLEVEPVSDSDGESSEETGDEDLLENTKIMLPQAHVISFQKRQALVTYLENNRAGITVFGFTLDRSYLHTIFMLEWTLFLWLLGKTIGFS

SEQ ID NO: 8062 - protein, 613 aa, Oryza sativa Japonica Group
MALAPPLCHLLAAPPPSTSAAADAAHDHAGALAPHRRASPLRRRGRLFLACRVPAAAPSARGVAAEAAAGRPTVLVTEKLGDAGLELLRRFANVDCAYELTAEELRAKVSLVDALVVRSATRVTREVFEAARGRLRVVGRAGVGIDNVDLQAATEAGCLVVNAPTANTVAAAEHAIALLAAMARNVAQADASLKAGKWQRNKYVGVSLVGKTLAIMGFGKVGSEVARRAKGLGMDIISHDPYAPVDRARAIGVDLVSFDEAISTADFISLHMPLTPSTAKLFDDETFANMKKGVRIINVARGGVVDEDALLRALDNGTVSQAALDVFTEEPPPKDSKLVHHEHVTVTPHLGASTSEAQEGVALEIAEAVLGALKGELAATAVNAPMVPAEVLSELSPYVILAEKLGRLVVQLVAGGSGIKGVKIGYSSSRDPDDLDTRVLRAMVTKGIIEPISSAFVNIVNADYVAKQRGLRISEERILLDGSPEIPIDSIQVHLANVESKFAGALSDEGDIRVEGEVKDGKPHLTLVGPFSVDVSLEGNLILCRQVDQPGIIGKVGSILGKMNVNVNFMSVGRTAPGKQAIMAIGVDEEPEKEALKLIGDIPSVEEFVFIKL

SEQ ID NO: 8063 - protein, 188 aa, Oryza sativa Japonica Group
MRKSKQPQPQPSPEIRYRGVRKRPSGRYAAEIRDPAKKTPIWLGTFDSAEVAARAYDDAARSLRGPTARTNFPLAAPSAPPPRPPAAAAAAATSSHSSTVESWNRGAPRVTASALARSAAPMEATQEEDCHSYCGSSSSVLCEDGSDDAAASRTPLPFDLNMPPPEEELDMAAVADQMGIRYDTLLRL

SEQ ID NO: 8064 - protein, 160 aa, Oryza sativa Japonica Group
MALLLAAFAAAATANSGAAPAASDFIRKSCRATQYPAAPFGFEVLLGTYGALAAAAAAPAARAPCATAWRTWADSVGHLRDAAQELGGNMGRAGSPGFKWHLSNVQTWCSAALTDENTCLDGLSRGVDAATRSAIRGKIVEVAQVTSNALALVNRVAPAN

SEQ ID NO: 8065 - protein, 322 aa, Oryza sativa Japonica Group
MGRAPCCEKSGLKKGPWTPEEDEKLIAYIKEHGQGNWRTLPKNAAIAARLPGRTDNEIKNYWNTHIRKRLLRMGIDPVTHAPRLDLLDLTSLLKPAAAAAYYPTQADLDTLRALEPLAGYPDLLRLASAILPAATTTGAAAAAAAEQAQLLLPWLLQAQMAQQQQQVTPPPPPPPQAAATEQFLQATSTACHQMPGLVHASPTQQLAQQPQDHMAAATCHRRGAVQHPSYDNQLDYVPALMQMASDASNLQQWSSTVSSSNNHNVNSGVSTPSSSPAAAGQINSSSTTTTTTYGLNASGDVDDAGLLINMHLSELLDVSDYM

SEQ ID NO: 8066 - protein, 574 aa, Oryza sativa Japonica Group
MAARFGPLLLVLPLSSALLVLSAATAPRGRPSQVDVGRQLREELWERNQGHEMLRSWRDGDPCSPSPWEGFSCRWKDGNLFVVKLNFSSKKLQGPIPAAIGNLTELDEIDLQDNNFTGSIPESFFDLTHLLKLINWSRSVRGNPLLNHSANLMAYLSAWNLDPVFEECSTHKATNSAVQQLSLKSIQNATCNFKTLIGEGGFGSVYRGTLAHGEEVAVKVRSTSSTQGTREFNNEVQMKPAPASIKESCCGLGVNQIPKKLFIVLHSGKEAKYGFFGRKFKNKEMLRLLSAVRHDNLVPLIGYCCEKDQEILVYPFMSNGSLQDRLYGEASKRKVLDWPTRLSVCIGAARGLAHLHGFAGRCIIHRDVKSSNILLDHSMCGKVADFGFSKYAPQEGDSNASMEVRGTAGYLDPEYYSTQSLSTKSDVFSFGVVLLEIVTGREPLDVQRPRDEWSLVEWAKPYIREYRIEEIVDPGIKGQYCSEAMWRVLEVASACTEPFSTFRPSMEDVVRELEDALIIENNASEYMRSIESTGTLGSNRYLSIDRKMFASGSARFASFDATKGHLQTMPSLPG

SEQ ID NO: 8067 - protein, 570 aa, Oryza sativa Japonica Group
MSKGAIIGASTVLVVAVVAAVCVVSFKNGGGGKEDGELSTSVKSVKAFCQPTDYQQTCEEELGKAAGNGASSPTDLAKAMFAVTSEKISKAISESSTLEELKNDKRTSGALQNCKELLEYAVDDLKTSFEKLGGFEMTNFHKAVDDLRTWLSAALTYQGTCLDGFLNTTTDAADKMKSALNSSQELTEDILAVVDQFSATLGSLNIGRRRLLADDGMPVWMSEGGRRQLLEAAGPEAGPVEFKPDVTVAADGSGDVKTIGEAVAKVPPKNKERYTIYVKAGTYNEYVSVGRPATNVNMIGDGIGKTIITGNKNFKMNLTTKDTATMEAIGNGFFMRGITVENTAGPENHQAVALRAQSDMAVFYQCEFDGYQDTLYPHAQRQFFRDCTVSGTIDFIFGNSQASKIVVLQNCLLQPRKPMDNQVNIITAQGRREKRSAGGTVIHNCTVAPHPDLEKFTDKVKTYLARPWKEYSRTIFVQNEIGAVVDPVGWLEWNGNFALDTLYYAEVDNHGPGADMSKRAKWKGVQSLTYQDVQKEFTVEAFIQGQEFIPKFGVPYIPGLLPQTQQGRMH

SEQ ID NO: 8068 - protein, 91 aa, Oryza sativa Japonica Group
MASERVKGTVKWFDATKGFGFITPDDGGEDLFVHQSSLKSDGYRSLNDGDVVEFSVGSGNDGRTKAVDGGIPVWFMQLGLQITNHLFDLRN

SEQ ID NO: 8069 - protein, 238 aa, Oryza sativa Japonica Group
MASERVKGTVKWFDATKGFGFITPDDGGEDLFVHQSSLKSDGYRSLNDGDVVEFSVGSGNDGRTKAVNVTAPGGRAVNRRIPSQARAGTAATAGAEAAAATAVTAATAAVAAATAGATAATEAAAGTAAAAAEAAARATSAARRATWPGTAPREEAAVVATVVVAAATAAVVVAAAAAGATTAARPATSLASAPARPTRRCSRRQIQLPPMMRFAPPPSLNHRAAGDQFDLISSRRSR

SEQ ID NO: 8070 - protein, 287 aa, Oryza sativa Japonica Group
MALLLLAFFAAAATANGGAAPAASNFIRKLCRATQYPAVCVQSQASYGGAPLPRSPPELVHAVLSVSVDKAQSVSMYVGRICGPGGSRGVAGPVRDCLENMADSVGHLCDAAQELGGNMGRAGSPGFKWHLSNVQTWCSAALTDKNTCLDGLSRGVDAATRSATRGKIVVGVHRRRPPSSSTAWPGCGGRRLLVAGASADASMSSSRRRESATARAGVRPSPASSSSTALACAHVSRGVVCSPSPPSLSSTARAARAHVSHGVVRSPSPPSSSSTARAARPPAGARR

SEQ ID NO: 8071 - protein, 232 aa, Oryza sativa Japonica Group
MVGTTEVEGIEALVRRLRLYQPPPSPYDGASTTAAGGGGELFRPRRAAVLVCLFRRRGGDGELRVILTKRSSSLSTHSGEVALPGGKAEEGDADDAATALREAKEEIGLDPSLVTVVASLEHFLSKHLLVVVPIVGILSDIEAFKPVLNVDEVDDIFDVPLEMFLKDENRTSEEREKMGQTFTIHYFNYEKENQKYLIWGLTARILIHAASVVYQRPPDFPERRVHFNLPKF

SEQ ID NO: 8072 - protein, 639 aa, Oryza sativa Japonica Group
MPTNPMWANLSTTSNIQEESTMFGVPSAILQKAVTVAGNGTMLNIMSEDRSFFEFMVFLHLADFQDNKIRQFNVYFNSDNPLPYIPQYLAADYVYSRNWYSSTDGKFNITLAATAKSLLPPMLNALEIYTLVAHSTPTTFSKDFDAIMAIKFEYGIKKNWMGDPCSPSRFAWDGVICRNTSDNIPRIISLDLSNSNLHGVISNNFTLLTALENLNLTGNQLNGTIPDSLCKLNAGSFIFSYNSDQDLCKKTSPSSSRSRATILAISIAAPVMVVAILGLSYLIWRVKRKSNIFAYNPPRVPEPTNASRNEKYHWDHLQENENRQFTYKELEKITDNFQLIIGEGGFGRVYHGRLEDNTEVAVKMLSGTSSSGFNGFLAEVQSLTKVHHKNLVSLVGYCSEKAHLALVYEYMSRGNLFDHLRGKSGVGENLNWAMRVRVLLDAAQGLDYLHKGCNKSIIHRDVKTSNILLGQNLRAKIADFGLSRTYISDSQSHMSATVAGSMGYIDPEYYQTGWITENNDVYSFGVVLLEVVTGELPILQGHGHIIQRVKQKVDSGDISSIADQRLGDDYDVNSMWKVVEIALLCTEPVAARRPSMAAVVAQLKESLTLEEARQERGLKENPTDDVVVAMVPTFGPSAR

SEQ ID NO: 8073 - protein, 362 aa, Oryza sativa Japonica Group
MELGLSLGEAMADAGRELVLGLGMGRREEAAEAGRRDHEVRRELEFGSMSSRCGGSSPEPTVRLTLLPMVPGLGLPWPPPPPPSSESRHLEASTRGFDVNRPPSSGGGCGGGGAEEEQDDVAGAALSSSPNNSAGSFPMDDFSGHGLGGNDAAPGGGGGDRSCSRASDEDDGGSARKKLRLSKEQSAFLEESFKEHSTLNPKQKLALAKQLNLRPRQVEVWFQNRRARTKLKQTEVDCEYLKRCCETLTEENRRLQKELAELRALKTVHPFYMHLPATTLSMCPSCERVASNSAPATASSAATSSTAAPPAAPSSGGIAATSSSAAAAAAPDHRPSSFAALFSSPRGFPLSVAPQAQPPTSS

SEQ ID NO: 8074 - protein, 216 aa, Oryza sativa Japonica Group
MSDRDVDMHILTALMADMADSSSSSSSSSSSSSSDEFDMRASAAAAEPEHRRSPAPPPPPRQQQLIGVRKRPWGKFAAEIRDSTRKGARVWLGTFDSPEAAAMAYDQAAFSVRGASAVLNFPLHRVQESLQALALGAAGGSPVLALKRRHSIRKRRKPTKHMLLMQQQQQEPTVVELEDLGADYLEELLRLSESSSSSSSSSISNFTTTPNRHCQS

SEQ ID NO: 8075 - protein, 174 aa, Vitis labrusca x Vitis vinifera
MPRERDPLVVGRVVGDVLDPFLRSITLRVTYNNREVANGCEFRPSQLVSQPRVDIGGDDLRTFYTLVMVDPDAPSPSNPNLREYLHWLVTDIPATTGANFGQEIVCYESPRPTAGIHCFVFVLFRQLGRQTVYAPGWRQNFNTRDFAELYNLGLPVAAVYFNCQREGGSGGRRS

SEQ ID NO: 8076 - protein, 174 aa, Vitis labrusca x Vitis vinifera
MPRERDPLVVGRVVGDVLDPFLRSITLRVTYNNREVANGCEFRPSQLVSQPRVDIGGDDLRTFYTLVMVDPDAPSPSNPNLREYLHWLVTDIPATTGANFGQEIVCHESPRPTAGIHRFVFVLFRQLGRQTVYAPGWRQNFNTRDFAELYNLGLPVAAVYFNCQREGGSGGRRS

SEQ ID NO: 8077 - protein, 226 aa, Vitis labrusca x Vitis vinifera
MGRGKIEIKRIENTTNRQVTFCKRRNGLLKKAYELSVLCDAEVALIVFSSRGRLYEYANNSVKSTIERYKKASADSSNTGSVSEANAQFYQQESSKLHQQIRNLQNSNRHMLGESLGSLNFKDLKSLEIRLEKGISRIRSKKNELLFAEIEYMQKREIDLHNDNQYLRARIAENERNEQQMSLMPGGANYELMPSQQFDSRNYFQLNGLQPNQSYSRQDQPALQLV

SEQ ID NO: 8078 - protein, 653 aa, Brassica oleracea var. acephala
MSIEMQSHQAEAAPAEEPLSQWLINMPEPPTMWQEFVGYIRTNVLSKKRNKMKKKSSNPVYSYLKSVFPILIWGRQYKLNMFKKDLMAGLTLASLCIPQSIGYANLAGLDPEYGLYTSVVPPLIYSMMGSSRELAIGPVAVVSLLLSSMVSDLQDPVTDPIAYRKIVFTTTFIAGAFQAIFGLFRLGFLVDFLSHAALVGFMAGAAIVIGLQQLKGLFGLSHFTNKTDVVSVLSSVFHSLHHPWQPLNFVIGSSFLIFILLARFLGKRNKKLFWIPAMAPLISVILATLIVYLTNADTRGVKIVKNIKPGFNRPSVNQLEFNGPHLGQVAKIGIICAIIALTEAIAVGRSFATIKGYRLDGNKEMMAMGFSNIAGSLTSCYVATGSFSRTAVNFSAGCETVVSNIVMAITVMVSLEVLTRFLYFTPTAILASIILSALPGLIDISGALHIWKLDKLDFLVLVAAFLGVLFASVEIGLLLAVGISFTRIILSSIRPTVEALGRLSKTDIFGDINQYPMATKTQGLLTLRISSPLLCFANANFIRDRILNSIQKVEEEEDDEQEVKRAKVLQVVILDMSCVMGLDTSGVVALEELHQELASNDTQLVIASPRWRVLHKLKLAKLEEKVKKENIFMTVGEAVDFYVRARTTSHDMC

SEQ ID NO: 8079 - protein, 160 aa, Myrica gale
MSTVEGREFSEDQEALVVKSWTVMKLNAGELALKFFLKIFEIAPTAQKLFSYLKDSNVPLERNSKLKSHATNVFMMTCESAVQLRKAGKVTVTESSLKRIGDVHFKLQVVDEHYEVTRFALLETIKEAVPEMWSPEMKNAWGEAYDQLVSAIKTEMKPPS

SEQ ID NO: 8080 - protein, 400 aa, Sesamum indicum
MGDRVFQHRNSSSILNCPSSVMATTSISDNVAGMSICSESMFKPPNGIDPFYSSSGWDPVISQDQSGNFGNSSMVLQNEFANPNYPVLLENQTMGSSSHLVHFPSDSGLVGMVPKIPSFGSGSFSEIVSSFGHSNFAQNNGAGVQNTVKNVEDAQDHRQDSENGVLGASPNGKRKRKNVEVEKQKDQTRDLAELPKEYDEKKNSGPSSRSRQAVKEAKDNSSGAEASKENYIHVRAKRGQATNSHSLAERVRRERISERMRLLQELVPGCNKITGKAVMLDEIINYVQSLQQQVEFLSMKLATVNPELNVDIERLLSKDILHSRGSNATALGIGPGLSSSHPFQGLPQGTLNAFPGTAPQFQSLPQNLWNNELQNILQNGYDSNPSVGSLGPSGLSKMEL

SEQ ID NO: 8081 - protein, 559 aa, Gibberella moniliformis
MPSLGFLKEKRTREGNSDPSASSPTSPVTPTTSRSKSISKAFHLPRTSRQSTSAPSAQPTNGQSQQQPDQIQEGAVSQSNQSSAPNEQTTAATDGQQQEDMSAINLHQPSYGAGSPMNHDHQNLPSINNLINPPQQQQQHNAQGNSYNNGQTNPQYLAATIDSHRPQTVSPGTDPAALQQQQQQALPQPSMPPQQQQSQAQQQHQQNQSQNQAQQQQQYQHQPHHQQNASTGSVMRVTKGKYSLGDFDILRTLGTGSFGRVHLVQSKHNQRFYAVKVLKKAQVVKMKQVEHTNDERRMLADVKHPFLITLWGTFQDPKNLYMVMDFVEGGELFSLLRKSGRFPNPVAKFYAAEVTLALEYLHSKNIIYRDLKPENLLLDRHGHLKITDFGFAKRVPDKTWTLCGTPDCLAPEVVSNKGYNKSVDWWSLGILIYEMLCGYTPFWDSGSPMKIYENILKGKVKYPAYVNADAQNLLERLITADLTKRLGNLYGGPDDVKNHPWFAEVTWDRLARKDIDAPYTPPVKAGAGDASQFDRYPEDPEKYGVVTAPDEYGHMFTEF

SEQ ID NO: 8082 - protein, 432 aa, Picea abies
AFDVSILTIDNGVFEVLSTSGDTHLGGEDFDQRIMDYFIKLVKKKHNKDISKDKRALGKLRRECERAKRALSSQHQVRVEIESLFDGVDFSEPLTRARFEELNMDLFKKTMGPVKKALEDANLQKTEINELVLVGGSTRIPKVQQLLKDLFDGKEPNKGVNPDEAVAYGAAVQGGILSGEGGDETKDILLLDVAPLSLGIETVGGVMTKLIPRNTVIPTKKSQVFTTYQDQQTTVSIKVYEGERSLTKDCRELGKFDLSGIPPAPRGVPQIEVTFEVDANGILNVRAEDKGTKKSEKITITNDKGRLSQEEIDRMVKEAEEFAEEDKKVKERIDARNNLETYVYNMKSTINEKDKLADKIDSEDKEKIEDALKEALDWLDENQSAEKDDFEEKLKEVEAVCSPIIKKVYEKTGGPSGGDGGDDEEDDSHEEL

SEQ ID NO: 8083 - protein, 262 aa, Picea abies
RLAEPYKGIGDCFGRTIKDEGFIALWRGNTANVIRYFPTQALNFAFKDYFKRLFNFKKDRDGYWKWFAGNLASGGAAGASSLLFVYSLDYARTRLANDSKAAKKGGERQFNGLVDVYKKTLKSDGIAGLYRGFNISCVGIIVYRGLYFGMYDSLKPVVLTGDLQNNFLASFLLGWGITIGAGLASYPIDTVRRRMMMTSGEAVKYKSSLDAFNQIVKNEGTKSLFKGAGANILRAIAGAGVLAGYDQLQLILLGKKYGSGGG

SEQ ID NO: 8084 - protein, 196 aa, Picea abies
ATGRIHKGVCSNWMKNSVPSEKSHDCSWAPVFVRQSNFKLPADPSVPIVMVGPGTGLAPFRGFLQERDALQESGEKLGPAVLFFGCRNRQMDYIYEDELKNYVDNGVLSDLVLAFSREGTTKEYVQHKITEKASYIWNLISQGGYLYVCGDAKGMARDVHRTLHNIVQEQESVDSTSAEATVKKLQTEGRYLRDVW

SEQ ID NO: 8085 - protein, 1615 aa, Oryza sativa
MATLPRAAAAAAPSPAAALLPLPRAAPLLAGRAAARSAARRLRARGTRAPPLAAARRGWGGVSPRAVLDLPRRREAAEKPAQKAADLNEILSERGACGVGFVANLKNEPSFNIVRDALVALGCMEHRGGCGADNDSGDGSGLMSGIPWDLFNDWANKQGLAPLDRTNTGVGMVFLPQDENSMEEAKAVVAKVFTDEGLEVLGWRTVPFNVSVVGRYAKETMPNIQQIFVKVAKEDNADDIERELYICRKLIERATKSASWADELYFCSLSSRTIVYKGMLRSEILGQFYLDLQNELYKSPFAIYHRRYSTNTSPRWPLAQPMRLLGHNGEINTIQGNLNWMRSREATLQSPVWRGREHEIRPFGDPKASDSANLDSTAELLLRSGRSPAEAMMILVPEAYKNHPTLSIKYPEVIDFYDYYKGQMEAWDGPALLLFSDGRTVGACLDRNGLRPARYWRTSDDFVYVASEVGVIPMDESKVVMKGRLGPGMMITVDLQTGQVLENTEVKKSVASANPYGSWLQQSTRSIKPVNFQSSVAMDNETVLRHQQAFGYSSEDVQMVIETMASQGKEPTFCMGDDIPLAVLSQKPHMLFDYFKQRFAQVTNPAIDPLREGLVMSLEVNIGKRRNILEVGPENADQVTLSSPVLNEGELESLLNDSKLKPKVLSTYFDIRKGLDGSLDKAIKVLCDEADAAVRNGSQLLVLSDRSEALEPTRPAIPILLAVGAIHQHLIQNGLRMSASIVADTAQCFSTHQFACLIGYGASAICPYLALETCRQWRLSNKTVNLMRNGKMPTVTIEQAQRNFIKAVKSGLLKILSKMGISLLSSYCGAQIFEIYGLGQEVVDLAFCGSVSKIGGLTLDELGRETLSFWVKAFSEDTAKRLENFGFIQSRPGGEYHANNPEMSKLLHKAVREKSDNAYTVYQQHLASRPVNVLRDLLELKSDRAPIPIGKVEPATSIVERFCTGGMSLGAISRETHEAIAIAMNRIGGKSNSGEGGEDPIRWSPLADVEDGYSPTLPHLKGLQNGDTATSAIKQVASGRFGVTPTFLVNAEQIEIKIAQGAKPGEGGQLPGKKVSAYIARLRNSKPGVPLISPPPHHDIYSIEDLAQLIYDLHQINPKAKVSVKLVAEAGIGTVASGVSKGNADIIQISGHDGGTGASPISSIKHAGGPWELGLSETHQTLIQNGLRERVVLRVDGGFRSGLDVLMAAAMGADEYGFGSVAMIATGCVMARICHTNNCPVGVASQREELRARFPGVPGDLVNYFLFVAEEVRATLAQLGFEKLDDIIGRTDILKAKHVSLAKTQHIDLKYLLSSAGLPKWSSSQIRSQDVHSNGPVLDETILADPDISDAIENEKEVSKTFQIYNVDRAVCGRVAGVIAKKYGDTGFAGQLNITFTGSAGQSFGCFLTPGMNIRLVGEANDYVGKGMAGGELVVVPVEKTGFVPEDAAIVGNTCLYGATGGQVFVRGKTGERFAVRNSLGQAVVEGTGDHCCEYMTGGCVVVLGKVGRNVAAGMTGGLAYILDEDDTLVPKVNKEIVKMQRVNAPAGQMQLKGLIEAYVEKTGSEKGATILREWEAYLPLFWQLVPPSEEDSPEACAEFERVLAKQATTVQSAK

SEQ ID NO: 8086 - protein, 1615 aa, Oryza sativa
MATLPRAAAAAAPSPAAALLPLPRAAPLLAGRAAARSAARRLRARGTRAPPLAAARRGWGGVSPRAVLDLPRRREAAEKPAQKAADLNEILSERGACGVGFVANLKNEPSFNIVRDALVALGCMEHRGGCGADNDSGDGSGLMSGIPWDLFNDWANKQGLAPLDRTNTGVGMVFLPQDENSMEEAKAVVAKVFTDEGLEVLGWRTVPFNVSVVGRYAKETMPNIQQIFVKVAKEDNADDIERELYICRKLIERATKSASWADELYFCSLSSRTIVYKGMLRSEILGQFYLDLQNELYKSPFAIYHRRYSTNTSPRWPLAQPMRLLGHNGEINTIQGNLNWMRSREATLQSPVWRGREHEIRPFGDPKASDSANLDSTAELLLRSGRSPAEAMMILVPEAYKNHPTLSIKYPEVIDFYDYYKGQMEAWDGPALLLFSDGRTVGACLDRNGLRPARYWRTSDDFVYVASEVGVIPMDESKVVMKGRLGPGMMITVDLQTGQVLENTEVKKSVASANPYGSWLQQSTRSIKPVNFQSSVAMDNETVLRHQQAFGYSSEDVQMVIETMASQGKEPTFCMGDDIPLAVLSQKPHMLFDYFKQRFAQVTNPAIDPLREGLVMSLEVNIGKRRNILEVGPENADQVTLSSPVLNEGELESLLNDSKLKPKVLSTYFDIRKGLDGSLDKAIKVLCDEADAAVRNGSQLLVLSDRSEALEPTRPAIPILLAVGAIHQHLIQNGLRMSASIVADTAQCFSTHQFACLIGYGASAICPYLALETCRQWRLSNKTVNLMRNGKMPTVTIEQAQRNFIKAVKSGLLKILSKMGISLLSSYCGAQIFEIYGLGQEVVDLAFCGSVSKIGGLTLDELGRETLSFWVKAFSEDTAKRLENFGFIQSRPGGEYHANNPEMSKLLHKAVREKSDNAYTVYQQHLASRPVNVLRDLLELKSDRAPIPIGKVEPATSIVERFCTGGMSLGAISRETHEAIAIAMNRIGGKSNSGEGGEDPIRWSPLADVEDGYSPTLPHLKGLQNGDTATSAIKQVASGRFGVTPTFLVNAEQIEIKIAQGAKPGEGGQLPGKKVSAYIARLRNSKPGVPLISPPPHHDIYSIEDLAQLIYDLHQINPKAKVSVKLVAEAGIGTVASGVSKGNADIIQISGHDGGTGASPISSIKHAGGPWELGLSETHQTLIQNGLRERVVLRVDGGFRSGLDVLMAAAMGADEYGFGSVAMIATGCVMARICHTNNCPVGVASQREELRARFPGVPGDLVNYFLFVAEEVRATLAQLGFEKLDDIIGRTDILKAKHVSLAKTQHIDLKYLLSSAGLPKWSSSQIRSQDVHSNGPVLDETILADPDISDAIENEKEVSKTFQIYNVDRAVCGRVAGVIAKKYGDTGFAGQLNITFTGSAGQSFGCFLTPGMNIRLVGEANDYVGKGMAGGELVVVPVEKTGFVPEDAAIVGNTCLYGATGGQVFVRGKTGERFAVRNSLGQAVVEGTGDHCCEYMTGGCVVVLGKVGRNVAAGMTGGLAYILDEDDTLVPKVNKEIVKMQRVNAPAGQMQLKGLIEAYVEKTGSEKGATILREWEAYLPLFWQLVPASEEDSPEACAEFERVLAKQATTVQSAK

SEQ ID NO: 8087 - protein, 340 aa, Clostridium thermocellum ATCC 27405
MVEKIDRLIIPPDYHPTLSVRETEAAIKKIKDFFETALAAELNLSRVSAPLFVRPETGMNDNLNGVERPVSFDVKAIGGNTVEIVHSLAKWKRMALAKYGFKVGEGLYTDMNAIRRDEDLDNLHSIYVDQWDWELVINKEDRNEETLKNIVKKIYNVLKKTEDFIAEQYPQIPKFLPEDIFFITTQELEDMYPELSPKEREDAIAKEKKAIFLMKIGGVLKSGKKHDGRAPDYDDWTLNGDIILWYPLLERSFEISSMGIRVDENSLLSQLKEAGCEERKEMKFHKDLLQGKLPYTIGGGIGQSRICMYFLKKAHIGEVQSSVWPDSMIEICENANINLL

SEQ ID NO: 8088 - protein, 103 aa, Clostridium thermocellum ATCC 27405
MYAVIETGGKQYKVQEGDVLFIEKLANEEGSTVTFDKVVAVSKDDKVSFGTPFVSNASVTAKVLCHGKGKKIIVFKYKPKKGYRRKQGHRQPYTKIQIEKINA

SEQ ID NO: 8089 - protein, 424 aa, Clostridium thermocellum ATCC 27405
MFVDRARIYIKAGDGGDGAISFHREKYISKGGPDGGDGGKGGDVIFVVDEGLRTLQDFRYKTRYRAEDGQNGGSSNCSGRSGEDLIIKVPPGTLVKDEQTGRILADLVKPGKKVVIAKGGKGGAGNQHFATPTRQVPSFAKPGEPGEELWVILELKLLADVGLIGFPNVGKSTILSMVTAAQPKIANYHFTTINPNLGVVNIDAENAFVMADIPGLIEGAHQGVGLGHEFLKHIERTKLLIHVVDISGSEGRDPVQDFEVINEELKKYNPVLCERPQIIAANKMDVTGAEENLEKFRKVIEPRGYKIFPVSAASNKGLKELIYYAAQKLKELPDTVLVNDQDNEVVYTAVEEEPFNIRKENGVFVVEGSWVQRLVRSVNFDNYESLQYFQRAIRRKGIVDALESMGINEGDTVRMYDLEFEYFR

SEQ ID NO: 8090 - protein, 405 aa, Clostridium thermocellum ATCC 27405
MSQKEKVILAYSGGLDTSIIIPWLKENYDYEVIAMAADVGQGEELEPLREKAIKTGASKIYIEDLKEEFVTDFIFPTLKAGAVYEGKYLLGTSFARPLIAKRMVEIALKEGATAVAHGATGKGNDQVRFELTVKALAPHLKIIAPWRIWDIKSREDEIEYAQARNIPIPVSKEDNYSMDRNLWHLSHEGLDLEDPWNEPQYDKILKLMVPPEKAPDKPTYVEIYFEKGIPKKVNGVEYGPVELIEVLNKIGGENGIGIVDIVENRLVGMKSRGVYETPGGTILYAAHRELELLCLDRDTLHYKDLVAQRFAELVYYGQWYTPLREAISAFVDVTQETVTGTVRLKLYKGNIISAGAKSDYSLYSEELSTFGEDNVYNQKDAEGFINLFGLPMKVQALMKEKNKGK

SEQ ID NO: 8091 - protein, 501 aa, Clostridium thermocellum ATCC 27405
MGINFLYPEYEVVRNMDRCINCRVCERQCANEVHSYDQEKKIMCSDDSKCVNCHRCVALCPTRALKIVKTDHTFKENANWRGSIINEIYKQAESGAVLLSSMGNPNEYPVYFDKILLNASQVTNPSIDPLREPMETKVFLGSKPRSIQRDENGKLVNNLSCGIELSVPIMFSAMSYGSISYNAHESLARAAKEAGILYNTGEGGLHRDLYQYGSNTIVQVASGRFGVHKDYLEAGAAIEIKMGQGAKPGIGGHLPGTKIVGDISRTRMVPEGSDAISPAPHHDIYSIEDLRQLVYSLKEATNYTKPVIVKIAAVHNVAAIASGIARSGADIIAIDGFRGGTGAAPTRIRDNVGIPIELALASVDQRLREEGIRDNVSIVVGGSIRNSSDVVKAVALGADCVYIGTAALIALGCHLCRSCHTGKCNWGIATQEPELVKRLNPDMGYKRLVNLVNAWKHEIKEMMGGMGINSIESLRGNRLMLRGVGLNEKELQILGIKHAGE

SEQ ID NO: 8092 - protein, 469 aa, Clostridium thermocellum ATCC 27405
MRKYGLKKIVWMLGILCFLVVSLNTSIFAADGKNVVLGDVNGDSKINAIDVLLMKKYILKVINDLPSDGVKAADVNADGQINSIDFTWLKKYMLKAVEKFPGEASNNPDAVIQFESGFAHSVLLKKDGTVWVLGNNGKGQLGLPEVSAVNEPVMINGLSGIKSVAAGREHTLALQEDGTLWAWGNNYSLQLIEYMERDPDTKERFTSIPIKVETHSDIKYVAAKFSRTLIVKNDGTVWLYSLPPINTSSDAEYMPWEIKGFGDIKMADIGTGHIVALREDGTVWTWGENVWGQLGNGWQQHHNIHTYIYFEPNQAKNLSDIVSIAAGDAHSVALKSDGTVWTWGSNFNGELGNGTTTYILEPKKVEGLEDIVAIDAGIGHTVALKADGTVWVWGKNSYGQLGNGTTMRSTVPIQVEGLEGIVAIQAGMECTIAYKNDGTVWAWGKNDFGQLGDGTFENILRPVKVFERK

SEQ ID NO: 8093 - protein, 390 aa, Clostridium thermocellum ATCC 27405
MNIAEMVLPTVRQVPPSGIRKFFDLVNEMKDAISLSIGEPDFVTPWNIREAGIYSLEKGHTHYSPNAGFMELREEICKYQERKYNLKYDPKTQVIVTVGGSEGIDIALRALVGPGDEVIIPEPCFVAYKPCTIFTGATPVIVNLSAENEFRLTPELLEKAITDRTKVLILPYPNNPTGAVMEKKDLEAIVEVLKDKDIIVISDEIYSELTYGVKHVSIASFPEMKDKTVVINGFSKAYAMTGWRLGYCLGHPDLISQMYKIHQYAIMCSPTTAQYAAIEALRNSDDDVEAMVREYNRRRRIMVEGFRSAGLECFEPLGAFYVFPCIESTGMTSYEFSERLLMEEKVAVVPGTAFGECGEGYVRSCYASSMDNIIEAMKRIKRFVERNRKK

SEQ ID NO: 8094 - protein, 613 aa, Clostridium thermocellum ATCC 27405
MCGIAGWINLKSDLTNQKEILNSMIDRLTPRGPDASGSWISPNALIAHKRLIVVDPEGGIQPMVRRQGENTYVITYNGELYNTADLRNELESRGHEFLTSSDTEVLLVSYIEWGAKCVEHLNGIYAFGIWDEGKKRLFLGRDRFGVKPLFYAQRGDSLIFGSELKALLANPLVEPKLDAEGLAEIFALGPARTPGHGIFKDVYELKPAHSMIFDINGIQIRKYWSLESYPHTDSEKATISKVRDFVLDAITRQLVADVPVCTFLSGGLDSSAITAVASKTFASQGKGQLNTFSVDYVDNDIYFKPSMFQPNSDEPWIKKMSESFNTCHHYVKFDTPQLVDALIDAVKARDLPGMADIDSSLFLFCREVKKFSVVALSGECADEIFGGYPWFHNEKMLFADTFPWSVSVHERTKILSPEILNLIKPEEYIQRRYRETLSEVPHLKGENRIEARRREIFYLNINWFMATLLDRKDRMSMASGLEVRVPFCDHRLVQYVWNIPWELKMYNKREKGLLRQALKGILPDDIIERKKSPYPKTHNPSYKKAVSKWLLEILNDSSSPLHQLIDVKVVRSMAEGNSDNTDPWFGQLMAQPQMLAYLIQVDFWLRDNHISIV

SEQ ID NO: 8095 - protein, 397 aa, Clostridium thermocellum ATCC 27405
MISESVVNSLKKASWIRAMFEEGEKLRKIHGADNVYDFTLGNPDHEPPSSVKETLKKIVTEDKPGIHRYMNNAGYEDVRQKVADYLNRTSGLSSISSQHIIMTCGAAGALNVVLKTLLNPGEEVIILAPYFAEYIFYVGNHGGKVVIVPPEKDSFKPDLKILENSITEKTKAIIINSPNNPSGYIYSEETLKEIFEVLEKKEKEYNSSIYAISDEPYYKLVYDNVKLPFLFRLYKKSFIVNSFSKSLALAGERIGYIAVNPEIPELELILESLIFCNRTLGYVNAPALFQKAIADSLDADIDVESYKQRRDLIYDTLTRLGFSCIKPQGTFYIFPKSPIEDDIQFIKHAVKYNILLVPGTGFGLPGHFRLSYCVSMDIIKKSLPAFEALAKDFNLIK

SEQ ID NO: 8096 - protein, 289 aa, Clostridium thermocellum ATCC 27405
MSLRNGNSTLPTKFMASIDSYDDASIVMAGVPMDFTCSFRPGTRFGPQKIREVSIGIEEYSVYMDRDLTQCSFFDAGDLDLPFGDVDKSLKLIGDVAEEILSDNKFPLFIGGEHLISVPVIKKVYEKYGPELIVVQFDAHADLREGYLGCPNSHASAVRRLIDFMPGKNIYQFGIRSGTKDEFEYAKKHTNMYTIDVFEPLSRVLDDIKDKPIYITLDIDVVDPAYANGTGTPEPGGISSRELLDSIHLFKGANLVGFDIVEVSPHYDQSDRTALLAAKIIREIIMMVG

SEQ ID NO: 8097 - protein, 394 aa, Clostridium thermocellum ATCC 27405
MSDNRFVYLDHAATTPVKPEVLEAMLPYFSNKFGNASSIYSIGRESKKAIEEAREKVAKAIGALPREVFFTGSGTEADNWAIKGVAYANRDKGRHIITTAIEHHAVLHACQYLESDGFEVTYLPVDENGLVSPQQVQDAIRPDTILITIMFANNEIGTIQPIAEIGKIARERGVIFHTDAVQAVGNIPINVVDLNVDLLSMSGHKFYGPKGVGALYIRKGVKIVSFMHGGAQERGRRASTENVAGIVGMGKAIELAVENMEENNKKLIELRDRTIEEVMKKIPFVRLNGDRYKRLPGNVNFSFEFIEGESLLLMLDMKGIAASSGSACTSGSLDPSHVLLAIGLPHEIAHGSLRLTFGIENTHEDIDYLMEVLPTIVDRLREMSPLYEKVKRGN

SEQ ID NO: 8098 - protein, 395 aa, Clostridium thermocellum ATCC 27405
MVVSKKALSISPSSTLAIDAKAKKMRSEGIDIIGFGAGEPDFDTPDHIKKAAIDAINAGFTKYTPASGTLELKQAICRKFKRDNGLDYNPSNIVISNGAKHSLVNALQAICNPGDEVIIPTPAWVSYPEMVKLADGVPVYIHCSEEEGFKFTIDKLEKAITDKTRAIIINSPSNPTGMIYSEEELRAVADLAVSKGIYIISDEIYEKLIYDGYKHVSIASFNDKIKDLTIVVNGVSKSYAMTGWRIGYTASNEQIAKIMANVQSHATSNPNSIAQKAALAALEGPQEIIDEMSAEFVKRRDYMVDRINSMNGVSCIKPNGAFYVMMNISKLIGKEIAGMKITGSDSFAEALLEKANVALVPGSGFGTDIHVRLSYATSMENIVEGLNRIEKFLSM

SEQ ID NO: 8099 - protein, 126 aa, Clostridium thermocellum ATCC 27405
MFITLMKSKIHRATVTEANLDYVGSITIDEDLMEAADIMENEKVQVVDNNNGNRFETYVIKGERGSGMICLNGAAARLVHPGDLIIIISYGIFDREEAKTFNPKVVFVDEKNKIINIKSEEKHGEI

SEQ ID NO: 8100 - protein, 580 aa, Clostridium thermocellum ATCC 27405
MDAQVDGKANELNSTEENEKVYSNFIQDIIDEDNRTNRYGGRVHTRFPPEPNGYLHIGHAKSICLNFGIAEQNGGLCNLRFDDTNPSKEDTEYVESIKADVKWLGFDWEDRLYYASDYFDKMFEYAVKLIKMGKAYVCDLSADEIREYRGTLTEPGKESPYRNRSVEENLDLFMRMKNGEFEEGSRVLRAKIDMASPNLNMRDPVIYRIIKASHHRSGDKWCIYPMYDFAHPISDSLEGITHSICTLEFEDHRPLYNWVLETLDMECKTRQIEFARLNLTYTVMSKRKLLRLVQEGHVRGWDDPRMPTISGLRRRGYTPSAIRNFCARIGVAKSNSTVDISLLEHCIREELNQKAQRVMAVLRPLKLVIDNYPEGMVEEFEVENNPEDPNAGTRKVPFSKVLYIEKDDFCENPPKKYFRLAPGQEVRLKGAYIVKCVDVVKDDKTGEITEVHCTYDPQSRGGNASDGRKVKGTIHWVSAAHAIDAEVRLYDHLFSVPNPGADENVDFIEQLNPNSLEVLKSCKLEPSLAGAKPGDAFQFLRLGYFCVDLVDSKEGSLVFNRTVTLKDTWAKIASKEKEDK

SEQ ID NO: 8101 - protein, 399 aa, Clostridium thermocellum ATCC 27405
MNILVINTGSSSLKYQLIDMTNESVLAKGVCDRIGLEHSFLKHTKTGGETVVIEKDLYNHKLAIQEVISALTDEKIGVIKSMSEISAVGHRIVHGGEKFKESAIIDEDVMKAIRDCVELAPLHNPSNIIGIEACKQILPDVPMVAVFDTAFHQTMPRHAYIYALPYEIYEKYKLRKYGFHGTSHKYVAHRAAQMLGKPIESLKLITCHLGNGASICAVKGGKSVDTSMGFTPLQGLCMGTRSGNVDPAVITYLMEKEKMNINDINNFLNKKSGVLGISGVSSDFRDVQDAAEKGDDRAQLALDIFCYGVRKYIGKYIAVLNGVDAVVFTAGIGENNAYIRREVLKDMDFFGIKIDLDKNEVKGKEADISAPDAKVKTLVIPTNEELEIARETLRLVKNL

SEQ ID NO: 8102 - protein, 358 aa, Clostridium thermocellum ATCC 27405
MIIYSYKYYKYSFYDNSFGIMKGEEFMSFLEQIIERAKSDVKTIVLPESTDLRVIKAASMIMKKGIAKVVLIGNEKEIKSLAGDIDLEGVMIEDSLNSEKLEDYANTLYELRKSKGMTIEAARETIKDPLYYGVMMVKKGEADGMVAGAVNSTANTLRPALQILKTAPGTKLVSSFFVMVVPNCEYGHNGTFVYADCGLVENPDADQLSEIAISASKSFEMLVGAKPQVAMLSYSSYGSAKSELTEKVIKATQLAKEKAPHLAIDGELQVDAAIVPEVAKSKAKGSSVAGKANVLIFPDLDAGNIAYKLTQRLAKAEAYGPITQGLARPVNDLSRGCSAEDIVGVAAITAVQAQYVKA

SEQ ID NO: 8103 - protein, 387 aa, Clostridium thermocellum ATCC 27405
MSREIYLDNSATTRPYDEVIDFVNHISREVYGNPSSLHTKGIEAERMVRNAREIVAKSLGVSRDEIYFTSGGTEANNLAIAGYLFANPRKGKHIITTKIEHPSVLEVFNNLSQHGYKVDFIDVDKNGIVIVDDLRKKINEETSLISVIYINNETGAVQPIDKIVEVKNSINKDIVLHVDAVQAYGKIRIAPEKQGIDLLTMSSHKIHGPKGVGALYTRRDIKLKPIIFGGGQESQLRSGTENVPGICGFGAAVDITFRKMEESSKYCEKLKSMLLDMLKKEVEDVVIVSPEGSSPYILNAAFPNVRAEVLLHHLETKNIFVSTGAACSSRKQVLSHVLRAMGIKPEIIEGAIRFSFSSFNNEEDIIKTVEAIKDILPKIRIKRGGRR

SEQ ID NO: 8104 - protein, 297 aa, Clostridium thermocellum ATCC 27405
MAFKSGFVSIVGRPNVGKSTLLNKFTGEKIAIMSDKPQTTRNTIRAIDTGEDYQIIYIDTPGIHKPKTKLGDFMVNIALDSLNEVDLVLFLVEATCPQPGPGDLYIIEQLKNLKTPVFCLINKIDLVEKEQILPIIAAYKDTMEFSQIIPISALEYESVEVVKNEIKKVLPEGPKYFPDDMITDQPEKVIAAELIREKILHLLSDEVPHGVGVEVVTFKKRDDKDILDIQATIYCEKESHKGILIGKEGKMLKKIGSLSRAEIEGLFGTKVFLELWVKVKPDWRNNEFMLKTLGYKK

SEQ ID NO: 8105 - protein, 608 aa, Clostridium thermocellum ATCC 27405
MGKVIGIDLGTTNSCVAVMEGGEPVVIPNSEGSRTTPSVVAFTKNNERLVGQVAKRQAITNPERTIISIKRDMGTDKRVKIDDKSYTPQEISAMILQKIKADAEAYLGEKVTQAVITVPAYFSDSQRQATKDAGRIAGLEVLRIINEPTAAALAYGLDKESDQKILVFDLGGGTFDVSILEIGDGVFEVLATSGNNRLGGDDFDQRIIDYLIDLFKKEHGIDLSTDKMAMQRLKEAAEKAKIELSGVTTTNINLPFITADANGPKHLDVTLTRAKFEELTADLVEKTMEPTRRALEDSGLTPDKIDKILLVGGSTRIPAVQEAVRKFFGKEPFKGINPDECVAIGAAIQAGVLTGEVKDLLLLDVTPLSLGIETLGGVFTKLIERNTTIPTKKSQIFSTAADGQTAVTVRVFQGERAMAADNKLLGEFTLDGIPPAPKGVPQIEVTFDIDANGIVHVSAKDLGTGKEQHITITASTNLSEAEIEKAINEAKKYEEEDRKRKESAETRNNADSMVFQAEKTLKDLGDKLSSEDKAKIEAEIEKVREALKGTDTQAIKKATEDLQQAFYSVSAKIYQQGQAAGANPGAQTTGGEQGNVYDAEYKVVDDDK

SEQ ID NO: 8106 - protein, 449 aa, Clostridium thermocellum ATCC 27405
MKVAKFGGSSLADANQIRKVCDIILSDKDRKLIVVSAPGKRCKEDTKVTDLLIALGEKYYKEGKADAELQAVIDRFDDIVKGLELSPDITQMVADDLKKRLECNNGNKDKFMDTIKAAGEDNNAKVVAAYLVSRGIDAEYVNPKDAGLLLSEEYGNARVLPESYENLKRLRERDKIMIFPGFFGYSKKGDVVTFPRGGSDITGAILAAAVKADVYENFTDVDSVFAANPNIIENPKPIATFTYREMRELSYSGFSVLHEETLEPVYRMEIPVCIKNTNNPSAPGTTIVPKRKLDNGPVIGIASGTGFCCIYISKYMMNREIGFGRKVLSILEDEGLSYEHIPSGIDNMSIIIEQKQLDKAKEERVVRRIKDELNVDDIKIEYDRALVMIVGEGMMSTVGIAARACTALAKANVNIEMINQGSSEVSMMFGVKAEDNVKAVKALYDEFFS

SEQ ID NO: 8107 - protein, 584 aa, Clostridium thermocellum ATCC 27405
MNTTMIVDTLWVVFAALLVFFMNLGFAAVESGFARSKNTVNILSKNFIVFAVSSLGFMLLGWGLMFGGDNPIIGTKELFILGGSDLGFYKDTLTSTVPFWGKFFFQLVFCGTAATIVSGAVAERIKYISFIVFSFILTLFIYPVVGHWIWGGGWLANLGFMDFAGDTVVHSVGGWAALTGAIILGPRHGKYDKDGKPKAIPGHSLALAVIGLFVLWLGWFGFNPGSTMSFQNPEDVVHIIVTTNTAAIAAILTATATSWIFIGKPDLGMTINGCLAGLVGITGSCAYVSVGSSLIIGAIAGIIVVFSVIFFDRIKVDDPVGATSVHLVCGVFGTLCVGLFAQEGVTSLSTVNGLFFGGGFSLLGAEIIGIIAVGAFVVASSALVWFILKKTIGIRVSLEEEIQGLDIGEHGNSAYPDFAIVAPITASGNGNGDSIVAISQVETIKPSSVKVTPEAAIPVVNRSHPGAKMTKVTVITNQDKYTQLQNALDKIGITGLTVTNVLGYGMQKGHTEYFRGLPVKTRLLPKVQVDIVVCKIPVETVVDTVKKALYTGNMGDGKIFIYDVENVIKIRTGEEGYDALQDEE

SEQ ID NO: 8108 - protein, 313 aa, Clostridium thermocellum ATCC 27405
MEFAISINNINSTVCAKPFVKWAGGKGQLLDTFRQYYPSTLIKGYIRRYIEPFVGGGAVLFEILQKYKVEEAFIFDINEDLINTYVVIKNDVHNLVEYLSDLECKYLNLDEKSRKDMYYDIRDAYNSRALKNNQPDVERAAQFIFLNRTCFNGLYRVNRAGHFNVPSGDYKNPTICDEKNLYAVSSLLQRVHIFVGDYRECAGYVDKDSFVYFDPPYRPLNVTSSFTSYSKFDFTDEDQIQLAKFFSEMNDTGALLMLSNSDPKNENPDDNFFDELYKEFFIHRIKAKRAINSNGSRRGLISELLVTNYEVKD

SEQ ID NO: 8109 - protein, 382 aa, Clostridium thermocellum ATCC 27405
MERNLRYLKGSIFKGRISANDIIITLLFVVLALAPLFLSDFRTNLLGKFIAYAILALGIDLIWGYTGILSLGHGVYFGLGAYCMAMYLKLEASNGKLPDFMSWSGQNVLPWFWKPFAYAPVAIILSVLVPAVLALIIGYLTFKNRIKGVYFSILTQALSIIFVVLFVGQQAYTGGTNGITNFKTIFGFPLSGFSTKVTLYYVALGFLILAFLFCRWIVQSRLGKVLIAIRDSENRARFSGYNPAIYKTFVYCISAGLAGLAGALFVPQVGIISPAEMGIVPSVEMVIWVAIGGRGTLVGSVIGAILVNSLKSMVSESFPAVWSYFIGISFIAVVIFMPYGLAGLLNQIKGKIYAQKAQKSVKRYSSATLNILEESGCDEYVG

SEQ ID NO: 8110 - protein, 362 aa, Clostridium thermocellum ATCC 27405
MYRVLVVDDDVAVRYMLKRYKGWESFGFVLAGEASDGREALRKLDKEPFDVVISDIKMPGMDGIELLSELRNNGNDICVLFLSTHSDFSYAKQGIRLGVFDYLTKPFSDETLGEALDRVKVYLDEKKKQKALVNIYNKNALESSQVYYSKNDEKKLVSVILSGSLEAINLGDRLFEKMAQFTEGDAKKLAILMENILLEVDEGIYKAIPWIKNLKNRPSNKSFEGMDEKELKERFIDHISGWVRLVVKFELHQSDSLMRKICEYVINHVEEDIKIENIANELYVSRDYIGKLFKQKAGYNLSEYITKVKMEHAKYLISKGEYKNYEISEILGYKKADYFSQVFKSYVGCTPSEYRKNAGFDF

SEQ ID NO: 8111 - protein, 66 aa, Clostridium thermocellum ATCC 27405
MERGRVKWFNAEKGFGFIEREGGKDVFVHFSAINMDGYKTLEEGAEVEFEVVEGAKGPQAANVTKA

SEQ ID NO: 8112 - protein, 486 aa, Clostridium thermocellum ATCC 27405
MVLRMNQLKTPVFDAVKRYVESNVIQFHVPGHKQGAGLEELREYIGETALKMDANGMEDLDFANNPTGVIYESEMLAAQAFGAQHAYFLVNGTTSGVQAMIMSACEPGDKIILPRNAHKSTIGGIILSGAVPVYVQPEINEKLGIAMGITVESLKKAIKENPHAKAVFIINPTYYGIASDLKSLVRIAHRYEMAVLVDEAHGAHMSFHDDFPLTAMEVGADMSAVSTHKTGGSLTQSSLLLLRGNMISPERVKQVLNLTYTSSASYLLMCSLDIARKQLATKGSDMLEETLRLARMAREEINKIEGLYAFGKELIGTPGCHDFDETKLGICVSGLGYTGYEMEAKLRKEYNIQIEMSDLSNILAIVSIGDREENLVALINALKDIAAKTEKKEYPKPPIIPPTPKMIVSPRDAFYSPKKIVPLDKSVGEISGEMVMAYPPGIPVVCMGERITQDIVDYIKILKEQKTQLQGTADPYIDHIMVLGVD

SEQ ID NO: 8113 - protein, 485 aa, Clostridium thermocellum ATCC 27405
MVDSKVMNVPIYNALRNYSNSCPTVFHMPGHKLGKGIPLSFLRDLYLMDLTEIPGLDSLYCPSGVIKEAQELAAKAFGADKTFFLVNGSTCGIQAAIMTVCKPKDKLIIARDCHKSAVAGMMLSGAVPVYVKPQFNSSFGIPSIISEKEIEKALAENPDAVGVYITRPNYYGICSDIKSISELVHSYNKILIVDEAHGAHLKFSENLPPSSVEYGADICIQSAHKTLPALTQGAYLHVKGSRVDVEKLEFTLSLLGTTSPSYIIMAHLDIARAIMEETGEENIKRVLAGIEMLSSALSKSGVFKILSDDDINDGEIDRTRVVINVRNTGKTGFEFEKILRNQYNIQVEMSDLYNIVCITTVADTPEDIMRLQRAFVELADCPGKSGGQRKFEKEFKIDCLDIPEQRVEPAAVMHSGFVKRKLYDAVGCVSRTMITPYPPGIPVVCPGEVINGDIVEYIVKIIEAGGVVNGVSSNLEVDVIDRSNL

SEQ ID NO: 8114 - protein, 599 aa, Clostridium thermocellum ATCC 27405
MKYFKNISFYIVLFVMLLAFLVIVQSRPVEKEQKYSQLISDIHNGKVQEIILEDNKATVKYKEEGQRDQFVYIPDVEVFMNEINDLIREGELEFRSKVPYSPPWWISILPTLVIIVVFVLFWVFFLQQSQGGGSRVMSFGKSRAKMTIDDKRKVTFNDVAGADEEKEELREIVEFLKNSKKFLELGARIPKGVLLVGPPGTGKTLLAKAVSGEAGVPFFSISGSDFVEMFVGVGASRVRDLFEQAKKNAPCIVFIDEIDAVGRHRGAGLGGGHDEREQTLNQLLVEMDGFGANEGVIILAATNRPDILDPALLRPGRFDRRVVVGLPDIKGREEILKVHAKGKPLAEDVKLDELAKSTPGFTGADLENLLNEAALLAARANKKVITMAEIKEATFKVVMGPEKKSRVMSEKEKRLTAYHEAGHAIAIKEVSTTDRVDRISIIPSGMAGGFTAHKPDEDKNYETKSHLIEKIIVALGGRAAEEIVLGEVSTGAYSDLKQANGIARSMITKYGMSDTLGNLVFANESDEVFIGRDFVQTKNYSEEIAAQIDREVKKIIDSCYERIKNILKENINKLHAVANALMEKEKLEGYEFEELYANA

SEQ ID NO: 8115 - protein, 291 aa, Clostridium thermocellum ATCC 27405
MGIISQLLGQILVFIYENLSFGSYGLAIILFTVFIKLLLLPLSIKQYKSSLKMQEMQPLIQEIQRKYKNDPQKQSEELMNLYKEHNFSPASGCLTSFIQLPIIVSLYYVIREPLTYMFNMTKDQIEALVNQLNQAANGLPQINTRSIYFQIEAALRSGKLDVVEELGFIKFDLGKIPKLNFTEDVATYLPLLLIPVLAIVATYFSSKMMMKRTQSLRSSTNSKKSKNQSQDDMTAAMNKSMMWIAPVMTGIISFQAPAALGLYWLTSNVFQIIQEFIINKFIMKKKEDSDS

SEQ ID NO: 8116 - protein, 280 aa, Clostridium thermocellum ATCC 27405
MKRNPLVAPVLKWAGGKRQLLKDIKKHIPEKFSTYYEPFLGGGAVLFELQPSKAVVNDINEELMNVYLVIRDHVEELIEELKKHERKNSEEYYYEIRELDRDKRKYEQLSNIEKAARIIYLNKTCYNGLFRVNSQGQFNVPYGRYKNPDIVNEVTLRAVSNYFNKAKITFKCGDFEEAVKGAREGSFVYFDPPYDPVSDTSSFTGYDINGFDKEEQIRLKELCDKLNKKGVKFLLSNSATDFILDLYKDYNITIVQANRAINSKADKRGKVDEVLVKNYE

SEQ ID NO: 8117 - protein, 542 aa, Clostridium thermocellum ATCC 27405
MKLSGAQAIVKALELEGVEVVFGYPGAAICPFYDALMESKIRHILTRHEQGAAHAASGYARTTGRVGVCVATSGPGATNLITGIADAYMDSIPLVAITGQVNSELIGRDVFQEADITGATDPFCKHNYLVKNAKDLPRVLKEAFYIASTGRPGPVLIDVPIDVQTKEINFEYPESVDIKGYKPNLKGHSLQIKKIAQAIEKAKKPVICAGGGVINSNASEELLTLSRKCGIPVVTTLMGIGSVPYDYELNLGMLGTHGVYIANYAVNNADLLIIIGARVADRAISNPQQVAKRKQIVHIDIDPAEIGKNIDVSIPVVGDVKQVLKELIDISQKGDTEEWIKTTQKEREKHAEKPEPRPGIGFVNPKYLLSVLTGLLGDDDIITTEVGQNQIWAANYFGVKKPRTFITSGGLGTMGYGLPAAVGAKIGCPDRKVVCVGGDGSFQMNMQELGTIKQNRLGVKVILFNNSRLGMVRELQKTKYCGRYFQVFLDDNPDFIKLFDAYGFKGRRIDDDSQVEDALKEMLSDDKPYLLECKIDPEESTL

SEQ ID NO: 8118 - protein, 320 aa, Clostridium thermocellum ATCC 27405
MNLHGKDIKIFAGNSNRELAEEIAQKIGLPLGLATVGKFSDGETAINIDEVVRGSDVFIIQSTCPPVNDNLVELLIMIDAVKRASAGRITAVIPYFGYARQDRKAKARDPISAKLVANLITTAGADRVLTMDLHAPQLQGFFDIPLDHLLGGNILANYFLEKFGDMSDVVVVSPDVGSVSRSRKFAQRLDVPLAIIDKRRPKANVSEIMNIIGDVDNKRVILVDDLIDTGGTIVNAANALMEIGAKEVYACCTHGLLSGPAIDRIKESPIKQLVTLNTIPLDERKRIDKIVSLSVASVFAEAIERIYGDMSISSLFTQQD

SEQ ID NO: 8119 - protein, 555 aa, Clostridium thermocellum ATCC 27405
MKLTGSKILIECLKEQGVDTIFGFPGGAVLNIYDELYRSQNEIRHILTSHEQGAAHAADGYARATGKVGVCLATSGPGATNLVTGIATAYMDSVPMVAITGQVATPLLGKDSFQEVDITGITMPITKHNFIVKDVNKLADIVRRAFYIAKEGRPGPVLIDICKDVTAAYAEYEPKSPQELPEVPVRVDEKCIDEAAEAINKAERPVILAGGGVSIAGANKELFEFATNAQIPVTTTLMGMGAFPGTHELFMGMIGMHGTKTTNMAVSESDLFIAIGARFSDRVISNVQRFAPKASIMHIDIDPAEIGKNINVQYALEGNIKKILQLLNERVKKKECTDWVRKINEWKELYPLKYPQDDKLHPQYIIERMYELTKGEAIITTEVGQHQMWAAQFYKYTSPRQFLSSGGLGTMGYGLGACIGARIGRPDKKVINVAGDGSFRMNCNELATAVEYKLPIIVAIFNNHALGMVRQWQQLFYGGRYSSTSLDRCTDFKALAEAYGAIGINVTAKEEVDEALNRALASEDTPVVINFEIDKDEMVFPIVPPGAPLSELIEE

SEQ ID NO: 8120 - protein, 232 aa, Clostridium thermocellum ATCC 27405
MNNHICSCERCQHKICAKRVPIFSTLNSEEINKVVNLIIRKRYSRGEMIVLEGSHLDRLIIINSGKVKAFRNTFEGKEQILYIFSQGDFFGEKNLLINQTAQYNVEALEETHVCTIKKNDFKNLLREYPEIGLKIIEELCNRLERLENAVENMGTKNAEERVSAVLLEFARKYGKESQNGIIVELPLSREGIANYIGVARETVSRKMNMLQEEGIIEMVGNKKVIIRNIDAL

SEQ ID NO: 8121 - protein, 390 aa, Clostridium thermocellum ATCC 27405
MPKLSSKIEGFTDSVIRRMTRIANSYGAINLSQGFPDFDPPVELKNALSRVASGSIHQYAVTWGAKNFRESLAKKQSRFMGIPIDPETQIVVTCGSTEAMMAAMMTVCNPGDKVVVFSPFYENYAADAILSGAEPIYVHLRPPGFNFDVDELEEAFKQRPKALILCNPSNPSGKVFTLEELKTIAYFAEKYDTFVITDEVYEHIVYPPHHHIYFASLPGMFERTISCSSLSKTYSITGWRLGYLIAPSYIVDGARKVHDFLTVGAAAPLQEAAVVALNFGDDYYENLKRIYTEKRDFFLDGLDRLGLAYTVPQGAYYVMVDISEFGAKSDLEFCEWMAREVGVAAVPGSSFFRDNVNHLIRFHFAKKKETLAEAVKRLEKLKDKARERWR

SEQ ID NO: 8122 - protein, 327 aa, Clostridium thermocellum ATCC 27405
MKRKAAIFILLVLIILSLAGCSNGDRAAGTANNGTNANTEVKTVKIAYLPITHALPLYVENELANENFKNFKLELVKFGSWTELVDALNSGKVDGASMLIELAMKAKEQGIDLKAVALGHRDGNVVVVSKDINKVEDLKGKSFAIPSKLSTHNILLHIMLKNHGLAYNDVNVVELPPPEMAAALAEGRISGYCVAEPFGAKSVAVDKGKTLFESQDLWEGSVCCGLVLRNDFIKNNEAIAEEFIKEYIKAGEKAEAKDETIRDIATKYLKAEEQVLDLSLKWISYENLKLEEKDYNELAEYMVEMGLSENPPKYDEFVDNTFIGKVK

SEQ ID NO: 8123 - protein, 575 aa, Clostridium thermocellum ATCC 27405
MKNFIRILKQGRQYWKYLIVAGISLLAITAFNLVTPWKVRELVDILSKEGTKNMASIRNIAIILAVAYIARAFFSYLYRYFSHVAAWRLVADMRVIVYEHLQKLSLSFYQDKQTGQLMSRAINDTATFEVLIAHAVPDLVTNVLILVGTGILLFVINPLLAALTLIPIPFLVLGSGIFTKKVLPNFREAQGKLGDLNAVVQDNISGIKEIQAFNQQSREKKRVEKRARKYTSAILHALRVSAIFHPVVEMISSLGTVIVVAFGGWFALKGYVSTADIVGFIMFLGLFYQPITTLARVIEDLQQAAAGAERVFELLDTEPDIVDSEGAKTITSSKGEITFKNVSFHYIPSNPVLKNISFTAKPGQMIALVGPTGVGKSTVISLIARFYDPVSGEILLDGMNIKDITISSLRNQISIVLQDTFLFNGSVADNIAYGSRDASFEDIVRAAKIARAHDFIMQLPEGYDTVIGERGVKLSGGQKQRLSIARAVLRNTPILILDEATASVDVETEAEIQKAIGELAGTRTIIVIAHRLSTVKQADNILVLKDGEIVESGTHDELIKQDGLYKYLCEVQFGI

SEQ ID NO: 8124 - protein, 296 aa, Rhizobium sp. WSM870
  misc_feature (106)..(106): Xaa can be any naturally occurring amino acid
  misc_feature (281)..(281): Xaa can be any naturally occurring amino acid
  unsure (1)..(296): unsure at all Xaa locations
RGKTQIKEFDAFPTLEQLPLWGFDGSSTQQAEGRSSDCVLKPVAVYPDPVRTNGALVMCEVMMPDGKTPHPSNTRATVLDDESAWFGFEQEYFFYKNGRPLGFPEXGYPAPQGPYYTGVGYKNVGDIARQIVEEHLDICLAAGINHEGINAEVAKGQWEFQVFGKGSKKAADEVWLARYLLLRLTEKYGIDVEFHCKPLGDTDWNGSGMHANFSTAYLREVGGKDYFEALMAAFEKNLHDHINVYGPDNHLRLTGKHETAPWDKFSYGVADRGASIRVPHXFVNNGYRGYLEDRRP

SEQ ID NO: 8125 - protein, 400 aa, Gloeothece sp. KO68DGA
MRDCIYLDNNATTQIDEEVLGAMMPYLTLYYGNPSSMHTFGGQVGKAVKTAREQVASLLGAEASEIIFTSCGTEGDNAAIRAALTAQPNKRHIVTTEVEHPAVLNLCRHLEKQGYTVTYLSVNSQGRLDLDEVQASLTGNTALVSIMYANNETGVVFPVEQVGQIAKEYGALFHVDAVQAVGKIPLDMSNSTIDMLTLSGHKIHAPKGIGALYVRKGVRFRPLMVGGHQERGRRGGTENVAGIVALGKAAELAQSHLENIAYERQLRDYLEHSILTLIPDTVVNGHPTERLPNTTNIGFKYIEGEAILLSMNQYGICASSGSACTSGSLEPSHVLRAMGLPYSVLHGSIRFSLSRFTTQDEIDRVIEVLPDTITRLRAMSPFSSDDATWLQEQEKAALAK

SEQ ID NO: 8126 - protein, 540 aa, Solanum tuberosum
MDKGWGLTLETSPSNSDRAGFFKNKPVFGFNLSPKYNAGEMFSSSDEKRSIVNEVDFFSDKKPIVKKENSQGDNSIRTDDQFVVNTGLQLVTANAGSDQSTVDDGVSSEVLEDKRAKIQQLAQLQVELERMNSENQRLKGMLVQVNNSYSALQMHLVTLMQQQQLNSKTENTHPHEVVGAKSDEEKKKENNGTIVPRQFMELGPSGSKVDPMDEPSHSHSSSEERTLSGSPRNNVELVSRDKAINREESPESESWAPNKAPKLMNSSSKPVEQSTEATMRKARVSVRARSEAPMISDGCQWRKYGQKMAKGNPCPRAYYRCTMAVGCPVRKQVQRCADDRTILITTYEGTHNHPLPPAAMAMASTTSAAANMLLSGSMPSADGLMNTDFLARAMLPCSSNMATISASAPFPTVTLDLTAQNPNGALPNYHQRINQANPHFQFPLPAGLNHPNFAASMSAPQMPHILGQPLYNQSKFSGLQISQDNIHHPSISHDTLSAATAAITADPNFTAALAAAISSIIGGSHPNNGNSPMSGPSSNK

SEQ ID NO: 8127 - protein, 142 aa, Cucumis sativus
HPQKQEGLSFVGIHIPVGRVQADDMDELARLADEYGTGELRLTVEQNIIIPNIQNSKLEALLKESLLQKFSPEPPILMKGLVACTGNQFCGQAIIETKARALKVTEEVQRRVTVTRPVRMHWTGCPNTCGQVQVADIGFMGS

SEQ ID NO: 8128 - protein, 392 aa, uncultured bacterium
MSNVVIVAAARTPVGKFGGSLAKIPAADLGAIVIKEVLKRANVKPEQVDEVIMGQVLTAGVGQNAARQAVIKAGLPVTVPATTINKVCGSGLKAVMLAAQAIANGDAEIVVAGGQENMSASPHVMQGSRDGYRMGDAKIIDSMIVDGLWDVYNQYHMGITAENVAKEHNVDRATQDQFALASQQKAAAAQDAGRFKEEIVAVPIPQRKGDPISFDADEFINRKTNAEALSGLKPAFDKQGSVTAGNASGLNDGAAALLVMSEAKAKELGLKPLATIKSFASAGVDPKIMGMGPAPASRKALKKAGWTADQVDLMEINEAFAAQACAVNKDMGWNTEKINVNGGAIALGHPIGASGARILVTLLHEMKRRDAKKGLAALCIGGGMGVALAVER

SEQ ID NO: 8129 - protein, 618 aa, Cyanophora paradoxa
MGKIVGIDLGTTNSVVAVMEGGKPTVITNAEGFRTTPSVVAYTKTGDRLVGQIAKRQAVLNPGNTFYSVKRFIGRKFDEVTEEAKQVPYKVTGTQNVRIECPALQTSFTPEEISAQVLRKLAEDASKYIGEPVTQAVITVPAYFNDSQRQATKDAGKIAGLEVLRIINEPTAASLAYGLDKKKNETILVFDLGGGTFDVSILEVGDGVFEVLSTSGDTHLGGDDFDKKLVDFFIEEFQKLENINLREDQQALQRLTEAAEKAKIELSSVTQTEITLPFLSLTPSGPKHFDTTLNRAKFEELCSTLIDRCRIPVETALKDAKLTKEDIDEVVLVGGSTRIPAVRELVQKVLDKVPKQSVNPDEVVAVGAAVQAGVLAGEVKDIVLLDVTPLSLGVETLGGVMSKIIVRNTTIPTQKSELFSTATDGQTNVEIHVLQGERGFAKDNKSLGTFRLDGIAPAPRGVPQIEVTFDIDANGILSVTAKDKGTGKEKSITITGASTLSQDEVERMVQEAEKNAAQDKENRQKIELRNQAESLINQAERQLKEFKLEPNVQAPIEQTIQQLQTALKEDNLEQVQSLCQELQNSLLEIGKQVYSKTETTTPNKNEEDVIDASFSEEK

SEQ ID NO: 8130 - protein, 418 aa, Nitrosomonas cryotolerans
MSIKNIFKLGIIGLYGVAYGVATLALTVVLDVSPVAAHGERSQEPFLRMRTIQWYDLKWGPQTTKVNDIATMTGKFHLAEDWPRAVGKPERAFFNVGSPSPVFVRLSTKLNGEPTFIAGPLVIGRDYEFEVKLKARIPGRHHMHAMVNVKDAGPIAGPASWMNITGSWDDFTNPIKTLTGKTIDTETFNHGNGVFWHALWMGLGVFWIGYFVARPMFLPRSRVLLAYGDELLLDPMDRKVGLAVAILTCAIVWGGYRYTETVHPYTVPIQAGESKVAPLPIAPNPVAIKVTHANYDVPGRALRVTMSITNNGDTGINIGEFTTAGVRFVNALGQEHLDPAYPRELVATGLSMDDDTAIEPGETREVKMEAKDALWEVQRLMALLGDPESRFGGLLMTWDEEGNRYINSIAGAVIPVFS

SEQ ID NO: 8131 - protein, 575 aa, Staphylococcus aureus
MKRENPLFFLFKKLSWPVGLIVAAITISSLGSLSGLLVPLFTGRIVDKFSVSHINWNLIALFGGIFVINALLSGLGLYLLSKIGEKIIYAIRSVLWEHIIQLKMPFFDKNESGQLMSRLTDDTKVINEFISQKLPNLLPSIVTLVGSLIMLFILDWKMTLLTFITIPIFVLIMIPLGRIMQKISTSTQSEIANFSGLLGRVLTEMRLVKISNTERLELDNAHKNLNEIYKLGLKQAKIAAVVQPISGIVMLLTIAIILGFGALEIATGAITAGTLIAMIFYVIQLSMPLINLSTLVTDYKKAVGASSRIYEIMQEPIEPTEALEDSENVLIDDGVLSFEHVDFKYDVKKILDDVSFQIPQGQVSAFVGPSGSGKSTIFNLIERMYEIESGDIKYGLESVYDIPLSKWRRKIGYVMQSNSMMSGTIRDNILYGINRHVSDEELINYAKLANCHDFIMQFDEGYDTLVGERGLKLSGGQRQRIDIARSFVKNPDILLLDEATANLDSESELKIQEALETLMEGRTTIVIANRLSTIKKAGQIIFLDKGQVTGKGTHSELMASHAKYKNFVVSQKLTD

SEQ ID NO: 8132 - protein, 410 aa, Rickettsia felis
MNPQLNNPNLPIYMDYQATTPLDPRVMEAMLPYFTTKFGNPHSRSHSFGWEAENAVEEARSRVARLIGADTKEIIFTSGATESNNLAIKGIAKFYGNKKNHIITVVSEHKCVLDACRHLEQEGIKITYLPIKPNGIIDLETLKNAITDQTMLVSVMAVNNEIGVVQPLKEIGKICRERGVFFHSDIAQGFGKIPIDVNEFNIDLASISGHKIYGPKGIGALYVRKKPRVRVTPLINGGGQERGMRSGTLPTPLIVGLGMAAEIAYSVMEKDTKHVNYLFDRFLNNIHNRISEVYLNGDKNQRYKGNINLSFAGVEGESIILAIKDLAVSSGSACTSASLEPSYVLRSMGIGEELAHTSIRFGIGRFTTEQEVDYAVDLICSKIDKLRELSPLWEMVQEGIDLKKIKWATH

SEQ ID NO: 8133 - protein, 149 aa, Glycine max
QKCRMMWLIDELGIEVFRSEVEKRMPGKKLERASKEELVKKQWERRDYLGVHPQKQEGLSYVGIHIPVGRVQADDMDELARLADEYATGELRLTVEQHIIIPHEDNNKIDGLLNEPLLRGRFSPEPSLLMKTLVAFTGNQFCGQAIIET

SEQ ID NO: 8134 - protein, 154 aa, Lupinus luteus
MGVLTDVQVALVKSSFEEFNANIPKNTHRFFTLVLEIAPGAKDLFSFLKGSSEVPQNNPDLQAHAGKVFKLTYEAAIQLQVNGAVASDATLKSLGSVHVSKGVVDAHFPVVKEAILKTIKEVVGDKWSEELNTAWTIAYDELAIIIKKEMKDAA

SEQ ID NO: 8135 - protein, 147 aa, Medicago truncatula
MSFTDKQEALVNSSYEAFKQNLSGYSVFFYTVILEKAPAAKGLFSFLKDSAGVQDSPQLQAHAEKVFGLVRDSASQLRATGGVVLGDAALGAIHIQKGVVDPHFVVVKEALLKTIKEAAGDKWSEELSTAWEVAYDALATEIKKAMS

SEQ ID NO: 8136 - protein, 146 aa, Medicago truncatula
MGFTEKQEALVNSSWELFKQNPGNSVLFYTIILEKAPAAKGMFSFLKDTAGVQDSPKLQSHAEKVFGMVRDSAVQLRATGGVVLGDATLGAIHIQKGVVDPHFVVVKEALLKTIKEVSGDKWSEELSTAWEVAYDALAAAIKKAMG

SEQ ID NO: 8137 - protein, 148 aa, Sesbania rostrata
MGFTEKQEALVNASYEAFKQNLPGNSVLFYSFILEKAPAAKGMFSFLKDSDGVPQNNPSLQAHAEKVFGLVRDSAAQLRATGVVVLADASLGSVHVQKGVLDPHFVVVKEALLKTLKEAAGATWSDEVSNAWEVAYDGLSAAIKKAMS

SEQ ID NO: 8138 - protein, 148 aa, Sesbania rostrata
MGFTEKQEALVNASYEAFKQNLPGNSVLFYSFILEKAPAAKGMFSFLKDFDEVPQNNPSLQAHAEKVFGLVRDSAAQLRATGVVVLADASLGSVHVQKGVLDPHFVVVKEALLKTLKEAGGATWSDEVSNAWEVAYDELSAAIKKAMS

SEQ ID NO: 8139 - protein, 402 aa, Fusobacterium nucleatum
MSKVYVVAAKRSAIGSFLGSLAPLKPGELGAQIVKNILEETKVDPANIDEVIVGNVLSAGQAQGVGRQVSIKAGIPYEVPAYSVNIICGSGMKSIITAFSNIKAGEANLVIAGGTESMSGAGFILPGAIRGGHKMADLTMKDHMILDALTDAYHNIHMGITAENIAEKYGITREEQDDFALESQKKAIAAVDSGKFKDEIVPVVIPNKKGDITFDTDEYPNRKTDAEKLAKLKPAFKKDGSVTAGNASGLNDGASFVMLASEEAVKKYNLKPLVEIISTGTGGVDPLIMGMGPVPAIRKAFNKTDLKLKDMELIELNEAFAAESLGVIKELCKEHGVTPEWIKERTNVNGGAIALGHPVGASGNRITVTLIHEMKKRGVEYGLASLCIGGGMGTALILKNVK

SEQ ID NO: 8140 - protein, 145 aa, Psophocarpus tetragonolobus
MGGFTEKQEALVNSSYEAFKANVPQYSVVFYTSILEKAPAAKDLFPFLANGVDPTNPKLIGHAEKLFGLVHDSAAQLRAKGAVVADAALGSLHAQKGVTDPQFVVVKEALLKTVKEAVGDKWSDELSNAWEVAYNELAAALKKAF

SEQ ID NO: 8141 - protein, 576 aa, Rickettsia felis
MDIKLLYRLIKYLKFYKKDLIIVMISLLSVSASLLLIGSVFRNLVDNGLSQNHILSVDKSILYICLLIIILSIASFFRSYFINNVAEKAVNQIRKDAYSNLITYEIEEFEELKIGDIISRLTNDIDQISTLIVNFLSFFIRNSVMLIGGVTLMFFESFKLASIVIITIPILLIPLIKFGKHVKALSKKALESKSLLASDIDETFNNIRAIYAFNNQTNKITDFDTKLQNYLTYCKTRLKIRALFFAISIAIIFLAITLVVWIGASDIVKGNLSAGQIISFIYYAIIAGFSSGGIFELLSEIHLPLAALERIITIIDKTPITHNSYLELNNSDPISIEFKNVDFTYHSRPNLRIINNMSLKINADKFIGIVGRSGGGKSTLMQLLLRFYRQESGTILINNQDITLSNPAEIRKLIAYVPQEANIFSGTIKSNIIFGNTQASDDDINEIIKITGIEEFAAKLHDGINAKIGERGVRLSGGQKQRIAIARALLRKPQILLLDEAMSALDTMSEQKLLESIKEIMKGKIIISIAHRISSIESADYILVIDKGGVAASGSHNDLSKNSEIYRNICREQLTV

SEQ ID NO: 8142 - protein, 383 aa, Saccharum arundinaceum
MCGGAILSGFIPPSGVAAAAAAKKKQQQQRRVTADLLWPGPGKKGAPQEEDFEADFREFERGLSEGGDDEVQELPAPQPARFAFAAAPKAPRPEVDGVMTPKDAYGDRPTANSIKRNRKNQYRGIRQRPWGKWAAEIRDPSKGVRVWLGTYNTAEEAARAYDAEARKIRGKKAKVNFPDEVSGAQKSTAKPTAANATKLAQPPKACADEVFNNLNNDNNDLFAMFAFNDNKVPVKPAEGARFLPAVKPLVPSKRSATYMLSDQSSNSYGSSDFGWDDDTMTSDYTSVFAPNNVIPAPYMQGGVSKRMRNNYGVAMLQGNGVPSLTQVMPCFDPEMNYQPLPYVESSSSDASMDSLLQTDIPQDVASNGDIWSLDELLMAAGAY

SEQ ID NO: 8143 - protein, 581 aa, Zea mays
MASPPSIHGRSAPLRPKSRGWKGSRGSLSLDAPVAASKLRRERRPAPASVNPGPQCLRRRRGLAVRCQTGSTAPPVLRTEEAPAAAAGARNAQAGFTVVMKFGGSSLASAERMREVAGLILSFPDETPVVVLSAMGKTTNNLLLAGEKAVSCGAPKASEIPELAVIKDLHLRTVDELGLDRSIVSGLLDELEQLLKGVAMMKELTLRTRDYLVSFGECMSTRIFAAYLNKLGKKARQYDAFDIGFITTDDFTNADILEATYPAVAKRLHEDWMDDPAIPIVTGFLGKGCKSCAVTTLGRGGSDLTATTIGKALGLREIQVWKDVDGVLTCDPNIYANAIPVPYLTFDEAAELAYFGAQVLHPQSMRPARDGDIPVRVKNSYNRHAPGTVITKSRDMSKSILTSIVLKSNVTMLDIVSTRMLGQYGFLAKVFSIFEDLGISVDCVATSEVSISLTLDPSKLWSRELIQQELDHVVEELKKFAVVHLLQRRSIISLIGNVQRSSLILEKAFNVLRRNGVNVQMISQGASKVNISLVVNDSEAKQCVQALHSAFFENGFLSEVEGADVPQNGASLNSNGAVYGN

SEQ ID NO: 8144 - protein, 397 aa, Thermoplasma volcanium
MKELLLLYSGGLDTSVMIKWMNENLGYDVSTLTLDIGNNDLKSIREKAEAIGAVETFVEDVKQEFSYEYISKSILANGSYEGYPLSTALARPLMAKKAVELAEKHGFEAIAHGSTGRGNDQVRFELGIKALNPSLEMLAPVRDWNMLRSEEIEYAKKNNIIVPSDGKYSVDENLWGRSIEGSEIENMSLPVPEDAYEWLVPPWEAGPGEVIKLEFSNGLPVAINDSDFELQNLIANLNIIGGRNSIGLIDHVEDRITGIKSREVYECPAAEIITYAHGYLESLILNKHEISIKSFLDSKFSQFVYNGLWYDPAMKPLIAGEEILNSEINGSISLKLYKGKIYFNGSKGANFSYNSNVANYSTYEFDQKSSKGFIDIFKNDTVYSILARQKAKEEALS

SEQ ID NO: 8145 - protein, 603 aa, Bradyrhizobium sp. WM9
MGKVIGIDLGTTNSCVAVMDGKNAKVIENSEGMRTTPSIVAVTDDGERLVGQPAKRQAVTNPERTFFAVKRLIGRRYDDPMVEKDKKLVPYKIVKASNGDAWVEADGQTYSPSQVSAFILQKMKETAEAHLGQKVDQAVITVPAYFNDAQRQATKDAGKIAGLEVLRIINEPTAAALAYGLDKTKTGTIAVYDLGGGTFDISILEIGDGVFEVKSTNGDTFLGGEDFDMRLVGYLADEFQKEQGINLRNDKLALQRLKEAAEKAKIELSSTTQTEINLPFITADQTGPKHLTMKLTRAKFEALVDDLVQKTVEPCRKALKDAGVTAGEIGEVVLVGGMSRMPKVQEVVKQLFGKEPHKGVNPDEVVAIGAAIQAGVLQGDVKDVLLLDVTPLSLGIETLGGVFTRIIDRNTTIPTKKSQVFSTAEDNQNAVTIRVFQGEREMAADNKMLGQFDLMGIPPAPRGMPQIEVTFDIDANGIVNVSAKDKATAKEQQIRIQASGGLSEADIEKMVKDAEANAEADKKRREAVTAKNEADGLVHSTEKALAEHGSKVGEPERRAIEDAVSDLKEALKGDDAEAIKAKTQTLAQASMKLGEAMYKQQAE

SEQ ID NO: 8146 - protein, 484 aa, Mycobacterium sp. JLS
MDSDRHTRAPLFEALRRFVERDQAPFYSPGHKGGRTLDPWFREHIAAVDLNNLADLDTLHCPSGPILEAEELIADAWGAKASFILVQGSTGGNITVALSALRPGDPVLVQRNAHKSVLAGLVQSGARPIWLTPQWDADFGVAHGLPVDRVEAALTAEAAAALWILHPTYFGTTADIAALTAVCRRHGIPLLADGAHSPHFAFHPDLPAAAETAGAAATVQSVHKILSGLSQAAVLHVDTDQLDVPTVRRALQLVQTTSPHFAIMASIDLARRQMVEDGRRLLDETLRRARDTAARLAQIPGLRVLSDHDLTGPGSGLHQRDETKLLIGTHGLAADASDILARLTREHGVQPELAGAGHILCITTIGNTDADMDRLVDGLTDVALAVGRRDGGCPPDVGGALDLAPEIVLTPREAFFADVDTVSLRAAVGRIAAEPITPYPPGIPLVMPGERLSAEVVDVLDGLRGAGNPISAADPTLERVTVVR

SEQ ID NO: 8147 - protein, 339 aa, Mycobacterium sp. JLS
MIADVDSVQLIVTDVIEESHDARSLVFAEAAGLDYRPGQFLTLRVPGTDGGAVARCYSLASSPHTDAAPKVTIKRVDGGYGSNWLCDNVVAGHVIESLPPSGTFTPADLDRDLVLWAGGSGITPVMSILKSALAVGRGRVTLVYANRDERSVIFAAELRGLVTRHPDRFTVAHWLESVQGLPGREQLAALARRFAGGEAYLCGPAPFMAAVQGALADAGVARDAVHTEVFRSLTGDPFAEVAPVDTATEDGADLRVDLDGRQHGLRWPRQSTLVDTMIAAGLDVPYSCREGQCGSCAATLRSGRVDMPDTDILEPEDIEAGTILGCQATPASDDVHIEF

SEQ ID NO: 8148 - protein, 428 aa, Mycobacterium sp. JLS
MDDVTMPQTPAERTWHAQGHQPRPRTFTQSSKLQDVLYEIRGPVHEHASRLEAEGHRILKLNIGNPAPFGFEAPDVIMRDIIQALPYAQGYSDSKGIMPARRAVFTRYELVDGFPRFDVDDVFLGNGASELIQMVLQALLDNGDQVLIPAPDYPLWTACTSLAGGTPVHYLCDETQGWNPDVADIESKITDRTKAIVVINPNNPTGAVYSRETLERIADLARKHQLLLLADEIYDKILYDDAKHISLASVAPDVLTLTFNGLSKAYRVAGYRSGWLVITGPKEHASSFIEGISLLANMRLCPNVPAQHAIQVALGGHQSIDDLVLPGGRLLEQRDVAWEKLNEIPGVSCVKPAGALYAFPRLDPEVYEIHDDELLVLDLLLQEKILVVQGTGFNWPTPDHLRIVTLPWARDLANAIERLGNFLVSYRQ

SEQ ID NO: 8149 - protein, 492 aa, Mycobacterium sp. JLS
MADSSETRSYGDVGSAPHGELTPEQERGLRRGAINWRQVAVLSVAGCGPASVIALNLQFMGQFAGAALVLAFVLVWPGILLLVNTFAEFSKRLPTSGGLYTWNSKAWGPNVGFVYGWTFIGAYLVFSAAGFAVFGGWVQEWLQTQFGISVPWWLFTFAALAYVCVLAYLGITQSLHAALGLLAFEIIVLLALAAWIFITGPQSGSGFGVAPFQVSSAGALALGGVGLAMTYGVLSHVGIEEGATLGQEVKDPKRQIPRGLWVAAVVVPVFYIVVAYAMVYGYGIDDMTAFGEDPAPLQTIAQTYWGQVGLTVIVLATLSSILAFSQTAFLAGARVLYTLGREGVLPTRLGAVSRRQTPAVGIAVMGVLSMLLGVPLAFLVGPFNVWGYFGFLISIAFLVSYIFTNIGLVRYMLRIGEFHWFRHGVLGALGSLVFLYPLYKTVWPLQTGIYGALPFVYLAWIVLGIGLLIYTLRRRPEVMSRIGTSLADDDVS

SEQ ID NO: 8150 - protein, 399 aa, Mycobacterium sp. JLS
MTRTVLVLNSGSSSLKFQLLEPDSGASLADGIVERIGEDSSSASLVCGEREVTHSERVPDHEAALRTAYGLFDEAGAELGSVGLVAVGHRVVHGGPDLYQPTLIDDALVDTLESLAPLAPLHNPPAVLGIRGARKAFPDLPHVAVFDTAYFHDLPAAAATYAIDRDLSEQWHIRRYGFHGTSHQYVSEQAALFLDVPLSSLSQIVLHLGNGASASAILGGRPIDTSMGLTPMEGLVMGTRSGDVDPGVLVYLWRTAGMSVDEIETMLNKRSGVRGLGGEIDFRVLHQRIESGDESDRENAQLAYDVYIHRLRKYIGAYLALLGSTDVIVFTAGVGENDAAVRRDALSGMGRLGIELDEHLNESPSHTARRISAETSPTTVLVIPTNEELAIARACVEVI

SEQ ID NO: 8151 - protein, 331 aa, Mycobacterium sp. JLS
MSARAKNRQSVMKRLLALLSATVLVLAGCGQAASVVPTPGVTLAPPTPAGMEELPPEQARLPIPETDDCNRRASLRPFPTRAEADAAVAYIRERGRLIVGLDIGSNLFSFRDPITGDITGFDVDIAGEIARDIFGSPAQVDYRILSSADRIVALQNNQVDVVVKTMTITCERKKKVGFSTVYLNADQRILAPRDSAITRAADLSGRRVCVVKGTTSLRRVQQISPPPIIVSTVTWADCLVALQQRQVDAVSTDDAILAGLVAQDPYLHIVGPSMNQEPYGIGVNLENTGLVRFVNGTLQRIRNDGTWYALYRKWLTVLGPAPAPPVARYVD

SEQ ID NO: 8152 - protein, 284 aa, Mycobacterium sp. JLS
MSYVNPAQFVTKMIDAGETKAFMSTRDTVIRAYMAGAILALAAAFAVTITVQTGNALAGAVLFPVGFCLLYLLGFDLLTGVFTLVPLALLDKRRGVTVRSVMRNWGLVFLGNFAGALTVAFMMAIVFTYGFSVDPNEVGQKLGEIGHSRTVGYAEHGAAGMLTLFIRGVLCNWMVSTGVVAAMMSTSVSGKVIGMWMPIMLFFYMGFEHSVVNMFLFPSGLMLGGDFSIMDYLVWNEIPTVVGNLVGGLAFVGLTLYATHARTGTEWNRPVDPEQFTLPVEARA

SEQ ID NO: 8153 - protein, 294 aa, Mycobacterium sp. JLS
MSSSVTTHGIVVGVDGSAAGKVAADWAARDAARRGVPLTLVHVIAPKDLQMWIEVPAPQEYLRWQSERSERVMAEATAIAERAAENRQLTVVRQVVPGEAKATLIEMSKDADMVVVGSRGLGAWGRRLLGSVSTAVVHHAQCPVAVIHDEDPLMDHPDQAPVVVGVDGSKAAEQAIAIAFEEASLRGVDLVAVHAWNDVDYEFPDIKWVDYTARGERIVAECLAGYCETYPDVTVRKVLVRDRPAHQLLQQSEAAQLLVVGSHGRGGFPGMLLGSVSSEVVQSARMPVIVARSN

SEQ ID NO: 8154 - protein, 399 aa, Mycobacterium sp. JLS
MTVTAYVAVGEELDPQHAEIITATLPLVGAHIDEITKVFYSRMFAARPELLRNLFNRGNQAQGAQQRALAASIATYATHLVDPKLPHPAELLSRIGHKHASLGITADQYEIVHEHLFAAIVEVLGADTVTAEVAGAWDAVYWMMARTLIELERNLYAEAGVDDGDVYRRASVVAREDDPSGAVLLTVRSTGRPFATFRPGQYVSVGVTLPDGARQLRQYSLINTPADGDLTFAVRPLGEVSNWIRANVQAGDVLDVTVPFGDLPDPEAHHRPLVLVSAGIGITPMVGILEHLAAVAPATSVTVWHADRSAVTHPLKERQRELVAALPDATLEVWYEEADADAREGLLDVSAVELPDDAEVYLCGGNGFVQAVRAQLQERGVPNERLHCELFSPNDWLLA

SEQ ID NO: 8155 - protein, 355 aa, Mycobacterium sp. JLS
MFTETRTRSLRERVLRSPLLDLLTGPHGVDRYTELVTPTWTLGEARARVVAVRRQTARSVTLTLEPNQVFTGFRAGQHINLSVEIDGRRRTRCYSPASAEGAALIELTVGRHDGGLVSTYLCDHARPGMVVGLDSVGGDFTMPTTRPRRILFVAGGSGITPVLSMLRTLRAEGSDREVAFVHYARSAAEACYRDELAAMSGVRVLHGYTRDTTGSDLTGRFDADHLAAAMPEADAVFVCGPPDLVDAVRRIRPDALAESFVPPTWDAPTEASGGQVSFADSGVAVTDDGRPLLEQAEAAGLTPESGCRMGICHSCTRRKTSGVVKNLITGAVSGVDEEDVQICVSAPVGDVEIAL

SEQ ID NO: 8156 - protein, 582 aa, Mycobacterium sp. JLS
MTVSSEKDNEKHRRRRVDAIRSPTDEAIPHPILDIPVDEEAYTGYRGLDWVVFGVTAVIAVAFLAWGFVSTESLATASGNALTWVMDNTGWLFVLAASGFVVFVLWLALGRYGNIPLGRDDEEPEFRSVSWVAMMFSAGMGIGLMFFGVAEPLTHFATPPPGVVPQGGAETGAEAVESAMATTLFHWTLHPWAIYAVVGLAIAYGVYRKGRLQLISAAFEPLIGSRANGPWGKVIDMLAIFATLFGSAASLGLGALQIRSGLQIVGGIGETGNTVLIVIITALTVAFVLSAVSGVARGIQWLSNINMVLALLLALFIFVVGPTVFILNLLPTSMGSYLADLAMMSARTGAEGPDVDTWLQSWTIFYWAWWISWTPFVGMFIARISRGRTIRQFVTGVLLVPSLVSLVWFCILGGAAIDTQQGGVDLAGEGSNEEQLFTLLGQYPIATVASIVVMVLVAIFFVSGADAASIVMGSLSERGTIKPTRGVVIFWGVTTGAVAAVMLLVGGADALTGLQTITIIAALPFVLVMVGLAVALVKDLRNDPLVVRKKYAAEAVDSAVIHGVIEHGDDFIISVEKDPDAR

SEQ ID NO: 8157 - protein, 376 aa, Mycobacterium sp. JLS
MAKSQIKVSARVADTVRPRVAAKNPALNALRNIAAKITTPLLPDDYLQLANPLWSARELRGRVINVRRETEDSATLVIKPGWGFTFDYQPGQYIGIGLLIDGRWRWRSYSLTSSPRSGGRTITITVKAMPEGFLSTHLVGGVAPGTIVRLAAPQGNFVMPDPAPAKVLFLTGGSGVTPVMSMLRTLVRRDQITDVVHVHSAPTEADVMFGGELAALQDGHEGYRLHVRTTRTQGRLDLSRLDEIVPDWRERQTWACGPEGMLNDAEKVWEQAGIADELHLERFAVAKAAPHGAGGTVTFARSGKTVDLDAATSLMDAGEKAGIQMPFGCRMGICQSCVVPLVDGHVRDLRTGAEHEAGSRIQTCVSAASGDCILDV

SEQ ID NO: 8158 - protein, 881 aa, Mycobacterium sp. JLS
MTSTESRTHQVALSFEDGVTRFISCRDDQTVADASYRQRINIPLDCRDGACGTCKALCESGTYDGGTYIDDALPADEAAAGYVLPCSMRPRSDLVLQIASSSKVAKTAAATFEGTLVELHRLSPTTVAFGVEIPNREDLAFLPGQYVNVAVPGTDVARSYSFSNAPHEQRLTFLVKLTPGGAMSTYLAERAAVGDAITFTGPHGSFFLRETERPVLLLAGGTGLAPVLSMLRTLRAARSPRKAHLVYGVSSDADLVELDTLRAVAADLPGFTWDHCVADPASTAANKGPERAYVTSLIRPEHLYDGDVAVYLCGPPPMVESVRKHVAAEGIEPFGFYYEKFALAAPAAETSAAAAPASVAPAPREALRFAPDARSVAGQTVFRDTSIGPAPGNVTAADDGDTARRIAGQLIGVSGGGTAPATPLDDDTALIDGADRAVAGQHLFPAQTAPAPPEVAPDGYQIGEEHPELHESDAIFQAREALELGALELTIGRLSPSQLTGYRLLAESTLAYVDGDRFVDAAQYTETNAAFHDHLFTLTGNDHLLQAYQALGVKARMSDVLRNATWCHPLCAQDHVDIVAAFDAGDRVAARSLIAAHAERSKQTMRRAMADARAARRPRFVTPGRFAGKVVLVTGAAQGIGEQTARRISAEGGRLVLADRSELVKELADELAAGGPDTLPVTTDLEHPDGAESMVAQALSAFGRIDVLINNVGGAINFKPFIEFTDREIRAEVDRSLMTTLYACRAALPSMVSRGAGVIVNVSSAATRGIHRIPYSAAKGGINAITASLAVEYAGDGIRVVAAAPGGTAAPPRRISRGTPDFAGETERAWFQAHVDQTVDSSLMKRYGTLDEQAAAICFLASDEASYITGSILPVAGGDQG

SEQ ID NO: 8159 - protein, 427 aa, Mycobacterium sp. JLS
MNSPSSGALARRLGTRDAVLIGLGSMIGAGVFAAFGPAAQAAGTGLLVGLAIAAVIAYCNAVASAQLAAQYPTSGGTYIYGRERLGPWWGFIAGWGFVVGKTASCAAMAMTVAAYAVPGPWWAQRLVGVAAVVGLAALNYRGVTKTAGLTRILVGCSLIALTVVVVGIAVGGQASLDHLGGWPALGAGGVYGVLQSAGLLFFAFAGYARIATMGEEVRDPTRTIPRAILIALFITVGVYLIVGVAALLAVGPDGLAHATAPLTAAVDGAGAGELAPVVRIGAVLAALGALLALIAGVGRTSLAMARHRDLPVWLSAVHPRYQVPHHAELALAVVVSVLVLTADLRDVIGFSSFGVLIYYAITNASAFTQPAAQRRWPRWLNVAGLAGCLILTATLPWPSVLAGAAMFAIGLAGRWLIVGRRTHTTHA

SEQ ID NO: 8160 - protein, 507 aa, Mycobacterium sp. JLS
MTPLTTPVDMTFASLGVRDEICRALAEEGIHQPFAIQELTLPMALAGDDLIGQARTGMGKTYAFGVPLLQRVTTDTEKELSGIPRALIVVPTRELCLQVHSDLSLAAKYLTAGDRKLSVVSIYGGRPYEPQIESLRKGADVVVGTPGRLLDLAQQGHLQLGGLSVLVLDEADEMLDLGFLPDIERILRQTPDTRQAMLFSATMPDPIITLARTFMNQPTHIRAESPQSSATHDTTAQFAYRAHALDKVEMVSRILQADGRGATMIFTRTKRTAQKVADELAERGFKVGAVHGDLGQGAREKALKSFRTGEVDVLVATDVAARGIDIDDITHVINFQIPEDEQAYVHRIGRTGRAGKTGVAVTLVDWDELPRWSMIDKALGLNTPDPAETYSSSPHLYEELGIPTEAGGSVGEPKARAAAKRSERPARGERDGDRDGDDKPARSRSRNRRRTRAGKPVTGHVEGSAEQPVVEAADGNGDGDTEAGGESGQAGRRRRRRRPRKAAPATS

SEQ ID NO: 8161 - protein, 404 aa, Mycobacterium sp. JLS
MRDTVICEPVRTPIGRYGGMFKDLTAVELGVTALQGLLTRTGIAPDAVEDVIVGHCYPSMEAPAIGRVIALDAGLPVTVPGMQIDRRCGSGLQAVLQGAMQVASGNNDLVVAGGADSMSNVVFHSTDMRWGGARGGIAVHDALSRGRTTAGGKNHPVPGGMLETAENLRREYGITRAEQDELAVTSHQRAVAAQKNGVFAEEIIPVTVRTRRGEDVVDTDEHPRADTSMETLGRLKPILAKQDPEATVTAGNASGQNDAASMCVVTTPEKAAELGLEPLVRLVSWGLAGVPPKVMGIGPVPATEAALARAGLDPADIDLIELNEAFAAQALAVMREWKFTAADMERTNVHGSGISLGHPVGATGGRMLATLARELTRRQGRYGLMTMCIGGGQGLAAVFERVTP

SEQ ID NO: 8162 - protein, 365 aa, Mycobacterium sp. JLS
MAASAFGPDITFLGVPRCDLSDASTYADADIVILGAPLDGGTTYRSGARFGPSALRQACYLPQDGSRPSLALRVDGLKDLRVYDAGDVALYSGNVEQAVQLIEDEVFTISAAGAIPIILGGDHTIAWPDHTGVARQHGFGKVSMIHFDAHADTGDIHAGSLVGHGTPMRRLIESGALRGDRFLQLGLRGYWPDEPVLQWMAAQGLRSYEMTEIVARGLETCLTEAFEIATDDCEGVFLSVDIDVCDPGHAPGTGTPEPGGFSARQLLDAVRRICYELPVLGVDVVEVAPPYDHADITALLGNRVVLEVISAIARRRKDAAAGTTWDPSQPLLAGREVDEQMRLIAEGEDARRRREGGGRPHHHHH

SEQ ID NO: 8163 - protein, 397 aa, Mycobacterium sp. JLS
MTSPKSVYLDHAATTPMHPAAIEAMTAVLTTVGNASSLHGAGRLARRRMEEARETLAGLLGARPSEIIFCAGGTESDNLAVKGIFWARRDAERRRNRIVTTPIEHHAVLDAVQWLVEHEGAEVTWLPVQADGSVTAAALREVLQSCDDVALVSVMWANNEVGTVQPIAELAAVAAEFGVPMHSDAVQAVGQLPVDFATSGLSAMSVTAHKFGGPTGIGALLLRRDTACVPLLHGGGQERDVRSGTADVAGAVAMAAAARVAIDGLDAHRARVSALRDRLIEGVLATIDDVSFNGSRVDRLPGNAHFTFRGCEGDSLLMLLDAKGIECSTGSACTAGVAQPSHVLIAMGADPASARGSLRLSLGHTSTDADVDAALEVLPAAVDRARQAALAASGVTD

SEQ ID NO: 8164 - protein, 528 aa, Mycobacterium sp. JLS
MSLPVVLIADKLAASTVAALGDQVEIRWVDGPDREKLLAAVPEADALLVRSATTVDAEVLAAAPKLKIVARAGVGLDNVDVDAATARGVLVVNAPTSNIHSAAEHALALLLSAARQIPAADSTLRERTWKRSSFNGTEIYGKTAGVVGLGRIGQLVAARLAAFGTHVVAYDPYVSHARAAQLGIELLSLEDLLARSDFISVHLPKTPETAGLIGREALAKTKKGVIIVNAARGGLIDEQALADAVTGGHVRAAGLDVFATEPCTDSPLFELPQVVVTPHLGASTAEAQDRAGTDVAASVRLALAGEFVPDAVNVGGGVVGEEVAPWLDLVRKLGLLAGTLATEPTTTLSVRVCGELAAEEVEVLRLSALRGLFSTVTDQQVTFVNAPALAAERGVQSELTTASESPNHRSVVDVRAVGSDGSVTNVAGTLSGPQQVEKIVQINGRNFDLRAEGVNLIVNYIDQPGALGKIGTLLGTAEVNIHAAQLSEDAEGPGATILLRLDRDVPAELRSALAEAVDAKTLEVVDLS

SEQ ID NO: 8165 - protein, 321 aa, Mycobacterium sp. JLS
MTTPAGHVYVSRLLTDGAMERLRRLDRPLRVGGEDPPTRDELAAGFTGACAAVVTLTERVDAGILDTAGDGLRVVANVAVGYDNIDVAAAHAAGVTVTNTPGVLDNATADHTFALILAVTRRVVDGDRFLRSRRPWIWGPRMLTGLDVSAGATLGILGYGRIGRAVARRARAFDMTVLATSRRRTSGADGDVRFVDTDTLLADSDVVCVLTPLTPETRHLIDGAALDRMKSTAYLVNTARGGVVDESALIDALRAGRIGGAALDVFENEPHVNPALLDAPNLVLTPHIASAGEATRDAMGVLAVDNVAAVLAGRPALTPVR

SEQ ID NO: 8166 - protein, 371 aa, Mycobacterium sp. JLS
MRVGIPTEIKNNEYRVAITPAGVAELTSHGHDVLIQSGAGEGSAISDADFKAAGAQLIAGADEVWAEADLLLKVKEPIEPEYSRMREGQTLFTYLHLAASQPCTDALLASRTTSIAYETVQTADGALPLLAPMSEVAGRLSAQVGAYHLMRTQGGRGVLMGGVPGVAPAKVVVIGGGMAGDNAAAVAWGMGAHVTVFDVNINILRKIDAEYGGAIETRYSSRLELEEAVTQADLVIGAVLIPGAKAPKLVTNSTVAQMKSGAVLVDIAIDQGGCFEDSRPTTHDDPTFKVHDAVFYCVANMPGAVPRTSTFALTNATMPYVLKLADKGWRGACQADPALAKGLSTHAGALLSEQVAADLDLPFTDPATVLA

SEQ ID NO: 8167 - protein, 301 aa, Helicobacter pylori
MKTKAGFVALIGKPNAGKSTLLNTLLNAHLALVSHKANATRKLMKCIVPFKDKEWYESQIIFLDTPGLHHQEKLLNQCMLSQALKAMGDAELCVFLASVHDDLKGYEEFLSLCQKPHILALSKIDTATHKQVLQKLQEYQQYDSQFLALVPLSAKKSQNLNALLECISQHLSPSAWLFEKDLMSDEKMRDIYKEIIRESLFDFLSDEIPYESDVMIDKFIEEERIDKVYARIIVEKESQKKIVIGKNGVNIKRIGTNARLKMQEVGEKKVFLNLQVIAQKSWSKEEKSLQKLGYIHRRNRD

SEQ ID NO: 8168 - protein, 588 aa, Mycobacterium sp. JLS
MVPTSDHLRCVVGAWRWHMTVSGGDLLARALADAGVTEVFTLHGGHLDAFLVACGKHDVRLTDTRHESSAGHAADAYARVTGSLGVCVVTSGPGFTNAYTAIANAYLDRTPTLFIVGGPPLRESETNPLQGGFDQVAAAAPVTKWAYRLTEAARIPEIVSLAVRKATTGAPGPVLLEVPIDVMFGEADETEVRYPARYALDARSVPSDSVVHQALDVLQGAQHPVIVIGGGVTFSRAADALVAFAETVGVPVFYPGKSDGAIPASHRLAAGGLLGLGALSALGAPTPDVVLLVGARAGMFTGGRASMFPGARIVQVDLDAAEIGRMQDVAVAIVADCRETLRALQAAAADRDWPDWSEWVHTAVQAQRFHRALYPDAATPSGRMHPYFAARAVVEACPPGTTFVLDGAEAPAWAEFFATTETVGGVLRLGYLGTLGVGPGFAIGAARARPAAPVVLITGDGAAGFHLGEFDTMARHGMPVLTVVFNNAVWGMSVHGQQAVYGDGGVVVSELADSSYEKVAEAFGGYGERVGEVDEIAAAVQRAFAAQVPACLNLEIDPHTVHPLTTMMLGDVTATDAIVVPYYENLPR

SEQ ID NO: 8169 - protein, 394 aa, Mycobacterium sp. JLS
MSGFTGRDAVIVGAVRTPIGKGKPGGGLHEVLPADLLAHSLRELVTRTGVDPAQVDDVIAGAVTQVGDQAVNIARNALLGAGFPESVPGTTVDRQCGSSQQAISFAAQGVASGAYDIAIAAGVESMSRVPMGSSVLPGSNPFGDDFARRYPDGLVPQGISAELIAAKWGLSRTALDEFSAGSHEKAAAATKAGLFEGELAPIAGLATDEIIRPGTTVETLAGLKPAFYHPTYEERFPQIGWEITAGNSSPLSDGSAAVLITTTEAAKRLGLRPLARIHTAVAVGSDPLYMLTGVIPATEKVLAKAGLTLADIDLFEVNEAFAPVVLAWARDTGADLDKTNVNGGAIAIGHPLGASGVRIMTTLVNALEQRGGRYGLQTMCEAGGMANATIIERL

SEQ ID NO: 8170 - protein, 345 aa, Mycobacterium sp. JLS
MGHAHDREPQRDLPPGMAEQLDLPHSGMATFGHRPFLTETAQLDSWRPDVAIVGAPFDVGTTNRPGARFGPRAIRATAYEPGTYHMDLGLEIFDWLEVVDFGDAYCPHGQTEVSHANIRERVAAVASRGIVPVVLGGDHSITWPAATAVADVHGYGNVGIVHFDAHADTADTIEGNLASHGTPMRRLIESGAVPGTHFVQVGLRGYWPPQDTFEWMLEQGMTWHTMQEIWERGFQEVMRDAVAEALAKADKLYVSVDIDVLDPAHAPGTGTPEPGGITSADLLRMVRRLCYEHDVAGVDVVEVAPAYDHAELTVNAAHRVVFEALAGMAARRRDAAGAQPGPPAR

SEQ ID NO: 8171 - protein, 214 aa, Mycobacterium sp. JLS
MRVGPEDAGLTALAGEVLAREADAVSALAGTVEGGVVAVARRLLDVTGKVVTTGSGTSGIMAERLAHLLSVCGTPAVYLPAMDALHGGMGAVTAHDLVLAISKTGRSAELTRLTERLVDRGVDVVAITEDAKSPFALAATQVQALPRTPGDADPGGMIALASTLVVGAWGDALAVVSMTLRGRTLHDVVHSHPAGGVGARGHRPGDESAPVVRT

SEQ ID NO: 8172 - protein, 582 aa, Mycobacterium sp. JLS
MNDSTVGTAFRSRVVDHIVDYLSAGGVRYLFGVDGANIEDVYDAAHLRGDVTAVLAKHEFSAAAMADGYSRSGAGLGVVMATSGGGSLNLVPGLGESLASRVPVLALVGQPPLALDGRGSFQDTSGCNGSLDALALFSTVSVFCERITEPADILTALPRAVRAAFSGGPAVLLLPKDVQQAVLDVRHSTEGHERAPVTRQVGDPRPIARALQKVDGPVTIVVGSQVIHDDARAELEQLRAVLRARVAVTPDAKDAAGTPGMGSSSLVGVTGVMGHPGTAEAIGDSALCLLVGSRLPVTARAGLDAVLAGTRTLSIGSAPPFVPCTHIHSDDLRASLPLLTRGLIGRRRPRGLRVADTIPRKELSPPIFDGEGVRFRDAMKALDRLLPADVDIVVDAGNTGASAVHYLPVRRRGRFLVALGMGGMGYSFGAGIGVAFGRRRRTVVIAGDGSFFMHGLELHTAIQHRLPVTFVLFNNNAHGMCVTREQLYYDGTYSYNRFAPSHLGAGLNAMFPGMPSVDVADVTELAGAVTSALDAHGPSVVSVECSADEIPPFAPFLAAGPPAAPDPATVHEEESIDVPASA

SEQ ID NO: 8173 - protein, 384 aa, Mycobacterium sp. JLS
MVGALIGGDRVESRPDPGHAPLTKPVRLPPARLARVVETLRTALHRVRFKVVPPFAGILDLTMGFAVAQTIYAAARLGVADVLCDGPMTAADIADRVHADPTAVHRLMRVLAAHQIFRERRDGRFEMTALSQALRSDAAVSIRPLLLMLSHPFYWEHFGRLTDVVRTGRTSLETEYGKGLFECLDEDPEVARVFNDAMTCVTAMSIPPVLAVYDFSRFRTIIDVGGGDGRMLTAILEAATASRGVLLELPALAEQARKTVRSAGLTDRATIESGSFFDHVPRGGDLYVLKHVIHDWRDDRAREILRQVRDAMPPRAVLLLVETVIPPGNGMHFGKLLDLDMLIFAGGRERTRAEFSSLLFETGFHLDRIVPTVTHLSLIEATAC

SEQ ID NO: 8174 - protein, 400 aa, Mycobacterium sp. JLS
MSERVILAYSGGLDTSVAISWIGKETGREVVAVAIDLGQGGEDMDVVRQRALDCGAVEAVVVDARDEFAENYCLPAIQSNALYMDRYPLVSALSRPLIVKHLVDAAREHKGGIVAHGCTGKGNDQVRFEVGFASLAPDLEVLAPVRDYAWTREKAIAFAEENAIPINVTKRSPFSIDQNVWGRAVETGFLEHLWNAPTKDVYDYTEDPTLNWSTPDEVIVGFDKGVPVSVDGRDVTVLQAIEELNRRAGAQGVGRLDVVEDRLVGIKSREIYEAPGAMVLITAHTELEHVTLERELGRFKRTTDQKWGELVYDGLWFSPLKTALESFVAKTQEHVSGEIRLVLHGGHIAVNGRRSQESLYDFNLATYDEGDTFDQSSAKGFVHVHGLSSSISARRDLGIK

SEQ ID NO: 8175 - protein, 247 aa, Mycobacterium sp. JLS
MTKSVEDRKVLLEVRDIVVHYGRIRALHGVSLKVHEGELVTLLGSNGAGKTTMMRAISGLRPLTSGSVWFDGRDISRVKAHRRVTDGLIQAPEGRGVFPGMTVTENLEMGCYARKFDTKAEHREQLDWVFETFPRLAERRSQVGGTLSGGEQQMLAIGRALMARPKVLLLDEPSMGLAPMVISQIFKIIADINSRGTTVLLVEQNAQQALSRSDRAYILETGEVTRTGNARELLHDDSVRAAYLGVA

SEQ ID NO: 8176 - protein, 345 aa, Mycobacterium sp. JLS
MQTLKLHGRIVSNVDATRIGAGRRLRSMTGHILGAVPATEVPRYAGKSTFARIADIGEVSDYDIAILGVPFDGGTSYRPGARFGPMGVRQAARTLRPGYHVELGVAPLERVQVVDAGDVTVTPYDIAEACRQIQNHAADILGGGSRRIVAIGGDHTIALPNLRALHAVHGPVALVHFDAHLDTWDTYFNAPVTHGTIFRRAFEEGLLVEDHSIHVGIRGPIYDQIDLHEDAEMGFKIIRAGDLDVIGIDAAVDTVRRRVGDAPVYLSVDIDVLDPAFAPGTGTPESGGLTARELLRMLRRLHGLNIVGGDVVEVAPAYDHAEITCVAAATVVFDLVSLMVAGGAG

SEQ ID NO: 8177 - protein, 299 aa, Mycobacterium sp. JLS
MSEFRSGFVCFVGRPNTGKSTLTNALVGTKVAITSNRPQTTRHTIRGIVHRDEFQIILVDTPGLHRPRTLLGQRLNDLVKTTYSEVDVIGLCIPADEAIGPGDRWIHEQIRAVAPRTTLVVIVTKIDKVPKDRVAAQLMAVSELIGPDAEIVPVSATTGEQLDVLTDVLAGKLPPGPAFYPDGELTDEPEETLMAELIREAALEGVRDELPHSLAVVIDEVSPREDRDDLIDVHAILYVERDSQKGIVIGKGGARLREVGTAARLQIEKLLGTKVYLDLRVKIAKNWQRDPKQLGRLGF

SEQ ID NO: 8178 - protein, 560 aa, Mycobacterium sp. JLS
MTETPTRPAKPVKRPRGEGQWALGYREPLNANEQSKKDDNPLNVRERIENIYAPGGFDTIDKGDLRGRFRWWGLYTQRKPGFDGTWTGDENTDMLEDEYFMLRVRSDGGALTAKALRTLGEISTEFARDTADISDRQNVQYHWIDVRNMPEIWRRLDEVGLQTTEACGDCPRVVLGSPLAGESLDEVIDGTPAVDEIVKRYIGKPEYSNLPRKFKTAISGLQDVVHEVNDVAFIGVVHPEHGPGFDLWVGGGLSTNPMLGQRVGAWVPLDEVPDVWEGVVSVFRDYGYRRLRSKARLKFLIKDWGVEKFRQVLETEYLKRPLIDGPAPDPVTRPIDHVGVQKLKNGLNAVGVAPIAGRVSGTILSKVADLAEAAGSDRIRFTPYQKLIVLDVPDEKLDELRAGLDALGLPSTPSHWRRNLMACTGIEFCKLSFAETRSRSQVLVPELEKRLEDINAQLDVPVTININGCPNSCARIQVADIGFKGQMVDDGDGPEEGFQVHLGGSLGLDSGFGRKLRQHKVLATELGDYIERVVRNFVKQREDGERFATWALRADEADLR

SEQ ID NO: 8179 - protein, 389 aa, Mycobacterium sp. JLS
MSQQILVVGAGIAGLATAVALQRIGHPVTVVEEKADTSAGAGISIWPNALAALDAFGLGDAVRASGGRVTAGALRWHDGTWLRRPSADRMVRALGEPLVVTRRADLTAILAGALAPGTVQRGVAASVIDTTPAGVRITLSDGSVRDAAAVIGADGVGSMVARHLNGPLRHRYAGYTAWRGIAAHRLDPQLAGQTLGAGTEVGHVPLGPDHTYWFATERTAEGGSIPQGELDYLREKYRSWAEPIPTLLATSAAQDVLRNDLYDREQIRVWSRGLVTLVGDAAHPMRPHLGQGGCQGLEDAAVLARFVAAATGTETDFATAFVRFAGFRRARVRALVRESKLIGRVVNLRPAVLSALASRATVVIPEAVLGRHLAAVAAGSAFTLPEAPG

SEQ ID NO: 8180 - protein, 339 aa, Mycobacterium sp. JLS
MSEPVADFSPLRVKRVVRETSDAVSLVLDVPRHCSGRFRYQVGQFLTLRVNLDGQELRRCYSMSSAPVEEELRITVKRDPGGLVSNWLNDTVSEGAEIHAAPPEGRFLLRDTDSEIVAFAGGSGITPIMSLIRTALATSARSIRLFYANRNRGSVIFADDLARLVEHNADRLVLTHHYDDDSGVVTPAAIESFVAGAGDADFYICGPGPFMDTVEGALATRGAPRDRVHLERFQVAQVPAGADASEAQATEEIVIELDRKTTTVPYRSGNTLLQTARTAGLRAPSSCETGSCGTCMAQVVSGSARMLNNDALDDDEVADGWVLTCQSLPTSRSVHVVYE

SEQ ID NO: 8181 - protein, 383 aa, Mycobacterium sp. JLS
MRETVIVEAVRTPVGKRNGGLSGMHAADLSAVVLSELVLRAGIEPDVVDDVIWGCVSQVGDQSSNIGRFAVLAAGWPEHIPGTTVNRACGSSQQALDFAVHAVMSGQQDIVVAGGVEVMSRVPLGSARATGMPYGPKVLERYRDFSFNQGISAELIAEKWGFSRTRLDEYSARSHELAAKAQDAKAFDAQIVPVFTGEDTAPVVADEGVRRGTSVEKLAGLKPAFRDDGVIHAGNSSQISDGAAALLVMTADNAVQLGLTPIVRYRAGAVAGADPVLMLTGPIPATEKVLHKAGVGIDEIGVFEVNEAFAPVPLAWLADTGAAEERLNPLGGAIALGHPLGASGAVLMTRMVHHMRDNGIRYGLQTMCEGGGTANATLVELIA

SEQ ID NO: 8182 - protein, 393 aa, Mycobacterium sp. JLS
MTTSVIVAGARTPVGKLMGSLKDFSGSDLGGIAIKAALEKAGVAPSSVDYVIMGQVLTAGAGQMPARQAAVAAGIPWDVPALTINKMCLSGIDAIALADQLIRAGEFDVVVAGGQESMTQAPHLLVNSRSGYKYGDVTALDHMAYDGLHDVFTDQPMGALTEQRNDVDQFTRAQQDEFAATSHQKAAAAWKDGVYADEVVPVSIPQRKGDPIEFSEDEGIRANTTAESLAGLKPAFRKDGTITAGSASQISDGACAVVVMNKAKAEELGLTWLAEIGAHGVVAGPDSTLQSQPANAIKKAIAREGISTDQLDVIEINEAFSAVALASTQELGVDPERVNVNGGAIAIGHPIGMSGARITLHAALELARRGSGYAVAALCGAGGQGDALILRRP

SEQ ID NO: 8183 - protein, 345 aa, Mycobacterium sp. JLS
MPIPNWPLTVADVVAETADAVTIVFDPPNGCDVGYRPGQFLTLRVPSERTGFVARCYSLCSSPDTDKRLAVTVKRTAEGYASNWLCDNVRSGDEFECLPPAGVFSPDHLDRDLLLIAGGSGITPMMSITKSVLAQSHGRVVLIYANRDPDAIIFAAALRELVAEHPDRLTVIHWLESVQGLPNDATLTPLLAPFADHDVFICGPAPFMKSARSAIEGLGTPRTQIHIENFVSLSGDPFVDRPVSVDQIGDSADDPLTAEVVVELNGSTHTLTWTPKDTLIDLLVDQGIEAPYSCREGDCGTCQCVLIDGKVEMDTHGALDDDDIADGIVLGCQARPASERIRIEF

SEQ ID NO: 8184 - protein, 541 aa, Mycobacterium sp. JLS
MTVLAAETIGNPVANMSIFAVFVLVTLFIVIKASKKNATATEFFTAGRAFTGPQNGIAISGDYLSAASFLGIAGAIAVYGYDGFLYSIGFLVAWLVALLLVAELLRNTGKFTMADVLSFRLKQRPVRLAAATNTLAVSLFYLLAQMAGAGVLVALLLNIESDLGQSIVIAVVGVLMIVYVLVGGMKGTTWVQIIKAVLLIGGAGIMTIMVLAKFNFNFSEILGSAQAMVSSSTDAKVASRDVLAPGAQYGASLTTQINFISLALALVLGTAGLPHVLMRFYTVPTAKEARRSVVWAIALIGAFYLFTLALGYGAAALVGPDRILAAPGGVNSAAPQLAFELGGVVLLGVISAVAFATILAVVAGLTITASASFAHDIYASVMKSHQVTESEQVKISRITAVVLGTLAIGLGILAREQNVAFLVALAFAVAAAANLPTILYSLYWRRFNTRGALWSMYGGLISTIVLIVFSPAVSGTATSMIKGADFAWFPLANPGIVSIPLAFILGIVGTLTSPDDEDPTIAAEMEVRSLTGVGAEKAVSH

SEQ ID NO: 8185 - protein, 385 aa, Mycobacterium sp. JLS
MAEAVIVEAVRSPVGKRNGGLSGVHPAELSAQVLNGLVERAGVDPALVDDVIWGCVMQAGEQALDIARTAVLSAGWPETVPGVTVDRQCGSSQQSLHFAVAGVVAGHYDVVVAGGVESMSRTPMGSSLANGGNPYGESFKARYSQTPNQGVGAEMIAEQWGFSRTELDEFSLRSHEKAAAAQDSGAFKDQIVGIETKDADGNDTVVLEDGGIRRGGTVESMAKIKPAFREDGVIHAGNSSQISDGSAALLIMSAEKAKDLGLKPLAKVHTAVLAGADPVIMLTAPIPATQKALKKSGLSLDQIGAFEVNEAFAPVPMAWLKDIGADESKLNPNGGAIALGHPLGGSGARILTTLLYHMRDNNIQYGLQTMCEGGGQANATILELL

SEQ ID NO: 8186 - protein, 405 aa, Mycobacterium sp. JLS
MPEAVIVSTARSPIGRANKGSLVDMRPDDLAAQMVRAALDKVPSLDPRDIDDLIMGCGQPAGESGFNIGRAVAVQLGYDFMPGTTVNRYCSSSLQTSRMAFHAIKAGEGHAFISAGVETVSRFAKGNADGWPDTKNPKFAEAQERSNQAAAGGDEWHDPREDGNLPDVYIAMGQTAENVALFTGVSREDQDHWGVRSQNRAEEAINNGFFEREISPVTLPDGTVVSKDDGPRAGTTYEKISQLKPVFRPNGTITAGNACPLNDGAAAVVIMSDEKARDLGLTPLARIVATGVSGLSPEIMGLGPIEAVKKALGNAGMGIADIDLYEINEAFAVQVLGSARALGMDEDKLNVSGGAIALGHPFGMTGARITATLLNNLQTHDKQFGLETMCVGGGQGMAMIIERLS

SEQ ID NO: 8187 - protein, 574 aa, Mycobacterium sp. JLS
MTDLVADALVARLRDWGADRVFGYAGDGVNTLLGALQRSGAPEFISTRHEELAAFMACGHAKYTGRVGVCMATQGPGAIHLLAGLYDAKLDKRPVVAVVGQVVSTALGSGYLQEVDLHTLFKDVCGQYVQTVFAPEQALMALDNAMRTAIATSTPTCLIIPHDVQQAEMPDELAHSHGVVPSAAVSAPTRITAPDDQIRSAADILNAGRRVALLVGRGAAGAADEIARVVETLGAGVTTSLLGKPVLDEGQPWHTGVMGHLGTTASAELMANCDTLLIVGSNDPWTEFYPAPGQAKAVQIDIQPRVIGAKYPVDAPVVGQAAQALSALSALLEPKPDRAWQEQVRQWREQWHAEAARRAAAETSDANPEAVVRALSDHLPADARVAVDTGSSTYWYARHLRLPPGVPAHLSGYLASMGCALPYGVAAKLDAPQRPVVALVGDGAMQMSGLLELVTIADRWRSWQDPRFVVLVLHNADLTEVSWEQREMEGNPRFAPSQDVPRFPYAGYAELLGLRGIRVTSSQEADDAWATAFSADRPTVIEAVVDAATPLLPPLMPDSKADKVRAALEQEART

SEQ ID NO: 8188 - protein, 470 aa, Mycobacterium sp. JLS
MTHPDTVREQPELRRVMGPGLLLLFVVGDILGTGVYALTGDVAAEVGGAAWLPFLVAFLIATITAFSYLELVTKYPQAAGAALYAHKAFGLQFVTFLVAFVVMCSGITSASTASRFFGANLIEGFGLEWGTAGVAAVALGFMALLAAVNFRGVGESIKLNVVLTIIEATGLMLVLFVGLWAFTRGGDVDFSRVVAFDTAGDKNAFMAVTAATSLAFFAMVGFEDSVNMAEETKDPVKTFPKVLLSGLTIAGIVYMLVAVVAVALVPVGRLEESDTPLVEVVKAGAPNLPIDTLFPFISMFAVSNTALINMLMASRLIYGMARQHVLPPVFGTVHPRRLTPWVAILFTTLIAFGLIFYVSVFASSSAISVLGGTTSLLLLAVFAVVNVAVLRLRRDVQAGGAHFKTPTVMPVVGFIASLYLVLPFSGRPAQQYYVALILVAIGIVLFFINRLINRRLGVRDTEITDPTHLA

SEQ ID NO: 8189 - protein, 483 aa, Mycobacterium sp. JLS
MAPEGDQRVGSGDSDFVVVANRLPIDMERLPDGSTSIKRSPGGLVTALEPLLRKRRGAWIGWAGIPDSPEDPIEEDGLQLYPVALSADDVADYYEGFSNATLWPLYHDLIVKPIYHRKWWDRYVEVNRRFAEATARAAAQGATVWVQDYQLQLVPKMLRMLRPDLTIGFFLHIPFPPVELFMQMPWRTEIIEGLLGADLVGFHLPGGAQNFLYLSRRLTGANTSRASVGVRSRFGEVQVGFRTVKVGAFPISIDSAELDSKARNRSVRQRAREIRNELGNPRKILLGVDRLDYTKGINVRLEAFSELLEDGRVDRNDTVLIQLATPSRERVESYIAMREDIERQVGHINGEFGDVGHPIVHYLHRPVPRDELIAFFVAADVMLVTPLRDGMNLVAKEYVACRSDLGGALVLSEFTGAAAELRQAYLANPHHLEGVKDAIEAALNQDPEEGRRRMRALRRQVLAHDVDRWARAFLDALADTKSA

SEQ ID NO: 8190 - protein, 356 aa, Lotus japonicus
MSLLSDLINLNLSETTDKIIAEYIWIGGSGLDMRSKARTLPGPVSDPSQLPKWNYDGSSTGQAPGEDSEVILYPQAIFRDPFRRGSNILVICDAYTPAGEPIPTNKRHAAAKVFSHPDVVAEVPWYGIEQEYTLLQKEVNWPVGWPIGGFPGPQGPYYCGIGADKAFGRDIVDAHYKACLYAGVNISGINGEVMPGQWEFQVGPSVGISAGDEVWVARYILERITEIAGVVLSFDPKPIKGDWNGAGAHTNYSTKTMREDGGYEVIKKAIDKLGLRHKEHIAAYGEGNERRLTGRHETADINTFLWGVANRGASIRVGRDTEKEGKGYFEDRRPASNMDPYVVTSMIADTTILWKP

SEQ ID NO: 8191 - protein, 350 aa, Mycobacterium sp. JLS
MTDEPLGSHVLELEVADVVEETADARSLVFKAGADIPAERLRYSPGQFLTLRVPSDRTGSVARCYSLCSSPFTDDPLTVTVKRTADGYASNWLCDNAHPGMKLHVLAPSGTFVPKSLDTDFLLMAAGSGITPMLAILKSALVEGSGKVVLVYANRDESNVIFAGTLRELGQKYSDRLTVVHWLESVQGLPTATALAGLAAPYTGHDAYICGPGPFMAAAEEALTSAGTAADKIHIEVFKSLESDPFAAVVIEEDDSDEGPATAVVTLDGETHEIRWPRNAKLLDVLLDKGLDAPFSCREGHCGACAVLKKSGEVEMEVNDVLEQSDLDEGLILGCQAMPRSDSVEVTYDE

SEQ ID NO: 8192 - protein, 259 aa, Mycobacterium sp. JLS
MSATRDGHRLIPDAAPAWLKPLVHNTDSVPRAYRRRVPPDVLAAITAANATATVTRAKRDAAVLVLFSGPEKAGEGLPHDADLLVTVRASTLRHHAGQAAFPGGATDPDDEGPVHTALREATEETGLDTSRLQPLATLQRMFIPPSGFHVVPVLAYSPDPGPVAVVDESETAIVARVPVRAFVNPENRLMVYREANSRRWAGPAFLLNEMLVWGFTGQVISAILDVAGWAVPWNTDDVRELDEAMALVGDDDRYGESQQ

SEQ ID NO: 8193 - protein, 417 aa, Mycobacterium sp. JLS
MDTGTTAFMLCCIIGLTLMIPGLALFYGGMVSVKSSTNMMMMTFGAVAAVGLLWVLFGFSMVFGTSYGGFVGSFTEFAGMTDLLEPMTTVDGLPISLFAVFQALFAAITVALISGAVADRMKFGAWMGFATLWAVLVYFPVAHWVFAFDGVVTENSVGGWIANTLGAVDFAGGTAVHINAGAAALAVAIVLGKSAMFGQLRKPHNVPLTLLGAGLLWAGWYAFNGGSALAAGNSAAIVMVTTFVATCAAVLAWLAVEKIKDGHVTGVGAASGAITGLVAITPACGAVTPIGAIFVGGIAGAVCVYAVGLKTRFGYDDSLDVVGVHLVGGVIGTLLIGFFASEGMPNGVNGLFYGGGIDQLWKQAVAAGAVMLYSFVVAYVIAFALKKTVGIRVSPDEEEQGIDAKFHRESSYDWQPA

SEQ ID NO: 8194 - protein, 451 aa, Mycobacterium sp. JLS
MSPETSSEATEQVQDEPATGGKLKRKITGSLLFLFILGDVLGAGIYALMGVLAQDVGGVLWAPLLVALLLALLTAGSYAELVTKYPKAGGAAVFAERAFKRPVVSFLVGFSMLAAGVTSAAGLALAFAGDYLSTFIDVPAIPAAMVFLGLVAALNARGINESVKSNVVMTVIELSGLLIVIVAVAMMVGGGRGEVGRVVEFPDGATPALAILAGAIVAYYSFVGFETSANVAEEIRNPSKVYPTALFGALIAAGVVYALVGVASAVALPADQLSESSGPLLDVVSAAGVGVPDWLFSAIALVAVANGALLTMIMSSRLTYGMAEHGLLPSVLSRVLPQRRTPWVAIVATTVVAMCLTLVGELSTLAETVVLLLLFVFISTNVAVLVLRRDHVGHDHFRVWTAVPVLGVASCVLLMTQQTAKVWAFAAIMLAVGAVLYGLARIATKREGTAV

SEQ ID NO: 8195 - protein, 367 aa, Mycobacterium sp. JLS
MFNWFSLDIIYYPVSAIMWVWYKAFAFLLGPDNFFAWALSVMFLVFTLRAILYKPFVRQIRTTRQMQELQPQIKALQKKYGKDRQRMALEMQKLQKEHGFNPILGCLPMLAQIPVFLGLYHVLMSFNRTQTGIGRLGLSVEENRSLPNYLFSATDVGHFLDANLFGAPLGATMIQQHGLEAFTEFNRVAVVVVGVPIMLLAGIATHFNSRASVARQTPEAAANPQTALMNKLALYVFPLGVVVGGPFLPLAVIMYWLANNIWTYGQQHYVFGKIEKEEEAKKVEALERRAANAPAPGAKPKRTRKAQEGADAGAEAVDGSVTDAAGTDEAAGGPAAKASGNGAAKPSGGQAVSRTPKPGARPKKRKR

SEQ ID NO: 8196 - protein, 1629 aa, Arabidopsis thaliana
MALQSPGATGASSSVSRLLSSAKLSSTKTIFSVDFVRSYCISKGTKRRNELSGFRGYSPLLKSSLRSPFSVKAILNSDRAAGDASPSFSDLKPQVAYLEDIISERGACGVGFIANLENKATHKIVNDALIALGCMEHRGGCGSDNTSGDGSGLMTSIPWDLFNEWAEKQGIASFDRTHTGVGMLFLPRDDNIRKEAKKVITSIFEKEGLEVLGWRDVPVEASIVGHNAKQTMPNTEQVFVRIVKDDKVDDVERELYICRKLIERAVASESWASELYFSSLSNQTIVYKGMLRSEVLGLFYPDLQNDLYKSPFAIYHRRFSTNTSPRWHLAQPMRFLGHNGEINTIQGNLNWMTSREASLRSPVWHGRENDIRPISNPKASDSANLDSAAELLIRSGRTPEESLMILVPEAYKNHPTLMIKYPEAVDFYDYYKGQMEPWDGPALVLFSDGKTVGACLDRNGLRPARYWRTSDNVVYVASEVGVLPMDESKVTMKGRLGPGMMISVDLENGQVYENTEVKKRVASYNPYGKWVSENLRNLKPSNYLSSAILETDETLRRQQAFGYSSEDVQMVIESMAAQGKEPTFCMGDDTPVAVLSQKPHMLYDYFKQRFAQVTNPAIDPLREGLVMSLEVNIGKRGNILEVGPQNVSQVVLSGPVLNERELEGLLGDPLLKSQILPTFFDIRRGIEGSLKKGLLKLCEAADEAVRNGSQVLVLSDRSDNPEPTRPAIPMLLAVGAVHQHLIQNGLRMSASIIADTAQCFSTHHFACLIGYGASAICPHLALETCRQWRLSNKTVNMMRNGKMPTVTMEQAQKNYRKAVNTGLLKVLSKMGISLFSSYCGAQIFEIYGLGNEVVEFSFRGSASQIGGLTLDELARETLTFWVRAFSEDTAKRLENFGFIQFRPGGEYHGNNPEMSKLLHKAVREKSETAYAVYQQHLANRPITVFRDLLEFKSDRNPIPVGKVEPASSIVERFCTGGMSLGAISRETHETIAIAMNRLGGKSNSGEGGEDPIRWKPLTDVVDGYSSTLPHLKGLRNGDTATSAIKQVASGRFGVTPTFLVNADQLEIKVAQGAKPGEGGQLPGKKVSAYIARLRNSKPGVPLISPPPHHDIYSIEDLAQLIFDLHQVNPKAKVSVKLVSETGIGTVASGVAKANADIIQISGYDGGTGASPISSIKHAGGPWELGLAETQKTLIGNGLRERVIIRVDGGFKSGVDVLIAAAMGADEYGFGTLAMIATGCIMARICHTNNCPVGVASQREELRARFPGLPGDLVNFFLYIAEEVRGILAQLGYEKLDDIIGRTDLLKARDISLVKTHLDLSYLLSSVGLPKRSSTSIRKQEVHSNGPVLDDTLLQDPEIMDAIENEKTVHKTMSIYNVDRSVCGRIAGVIAKKYGDTGFAGQLNLTFTGSAGQSFACFLTPGMNIRLVGEANDYVGKGMAGGEVVILPVESTGFRPEDATIVGNTCLYGATGGLLFVRGKAGERFAVRNSLAQAVVEGTGDHCCEYMTGGCVVILGKVGRNVAAGMTGGLAYILDEDNTLLPKMNKEIVKIQRVTSPVGQTQLKSLIQAHVEKTGSSKGAMIVEEWDKYLAMFWQLVPPSEEDTPEANSDHILKTTTGDEEQVSSTLAEK

SEQ ID NO: 8197 - protein, 1517 aa, Spinacia oleracea
CGVGFIANLDNKGSFQIVKDALTALGCMEHRGGCGSDNDSGDGSGVMTAIPWDLFNDWGKDQGIGPFDRSHTGVGMVFLPKDDLLAEEAKKVVLDTFAQEGIEVIGWRSVPTNVSVVGRNAKETMPNIQQVFVRIIKEDSTDDIERELYICRKLIERAASSHTWASELYFCSLSNQTIIYKGMLRSEVLGMFYYDLQNERYTSPFAIYHRRYSTNTSPRWPLAQPMRFLGHNGEINTIQGNLNWMRSREPSIQSPVWRGRENEIRPYGNPKASDSANLDSAAELLIRSGRTPEEALMILVPEAYKNHPTLMIKYPEAVDFYDYYKGQMETWDGPALLLFSDGKTVGACLDRNGLAPARYWRTVDNVVYVASEVGVLPMDESKVTMKGRLGPGMMISVDLSSGQVYENTEVKKRVASSNPYGKWVKENLRSLKAVNFLSRALLENDTILRNQQAFGYSSEDVQMVIESMASQGKEPTFCMGDDIPLAVMSQKPHMLYDYFKQRFAQVTNPAIDPLREGLVMSLEVNIGKRGNILEVGPENASQVILPSPVLNEGELEALVNDPLLKAQMLPIFFDIRKGVEGTLEKRLNRLCEAADEAVRNGSQMLVLSDRSEELEPTRPAIPILLAVGAVHQHLIQNGLRMYTSIVVDTAQCFSTHQFACLIGYGASAICPYLALETCRQWRLSNKTVNLMRTGKIPTVTIEQAQNNFCKAVKSGLLKILSKMGISLLSSYCGAQIFEIYGLGKDVVDIAFQGSVSKMGGLTLDELARETLSFWVKAFSEDTAKRLENFGFIQFRPGGEYHVNNPEMSKLLHKAVRNKSESAYAVYQQHLANRPVSVLRDLLEFKSDRAPISVGKVEPATSIVERFCTGGMSLGAISRETHEAIAIAMNRLGGKSNSGEGGEDPIRWRPLTDVVDGYSSTLPHLKGLQNGDTATSAIKQVASGRFGVTPTFLVNADQIEIKIAQGAKPGEGGQLPGKKVSAYIARLRNSKPGVPLISPPPHHDIYSIEDLAQLIYDLHQINPKAKVSVKLVAEAGIGTVASGVAKGNADIIQVSGHDGGTGASPISSIKHAGGPWELGLSETHQTLISNGLRERVILRVDGGLKCGVDVMMAAAMGADEYGFGSLAMIATGCVMARICHTNNCPVGVASQREELRARFPGVPGDLVNFFLYVAEEVRGILAQLGFEKLDDIIGRTDILKPRDISLMKTQHLDLSYILASAGLPTMSSTAIRKQEVHTNGPVLDDQILSDPEIIDAIENEKIVNKTVKIFNVDRAVCGRIAGVIAKKYGDTGFAGQLNLTFEGSAGQSFAVFLTPGMNIRLVGESNDYVGKGMAGGELIVTPAENPGFRPEDATIVGNTCLYGATGGQIFVRGKAGERFAVRNSLAEAVVEGTGDHCCEYMTGGCVVILGKVGRNVAAGMTGGLAYILDEDDTLIPKVNKEIVKIQRVTAPVGQMQLKNLIEAHVEKTGSSKGASILKDWDKYLPLFWQLVPPSEEDTPEASAMFEQMTSEGASLQSA

SEQ ID NO: 8198 - protein, 279 aa, Vibrio harveyi
MKKQRAFLKWAGGKYGLVEDIQRHLPPARKLVEPFVGAGSVFLNTDYDHYLLADINPDLINLYNLLKERPEEYISEAKRWFVAENNRKEAYLNIRAEFNKTDDVMYRSLAFLYMNRFGFNGLCRYNKKGGFNVPFGSYKKPYFPEAELEFFAEKAKKATFVCEGYPETFSRARKGSVVYCDPPYAPLSNTANFTSYAGNGFTLDDQAALADIAEKAATERGIPVLISNHDTTLTRRLYHGAELNVVKVKRTISRNGSGRNKVDELLALFRAPDADKSDS

SEQ ID NO: 8199 - protein, 365 aa, Klebsiella pneumoniae
MLKVIQSPAKYLQGPDAAVLFGQYAKNLAESFFVIADDFVMKLAGEKVVNGLQSHDIRCHAERFNGECSHAEINRLMAILQKQGCGGVVGIGGGKTLDTAKAIGYYQKLPVVVIPSIASTDAPTSALSVIYTEAGEFEEYLIYPKNPDMVVMDTAIIAKAPVRLLVSGMGDALSTWFEAKACYDARATSMAGGQSTEAALSLARLCYDTLLAEGEKARLAAQAGVVTEALERIIEANTYLSGIGFESSGLAAAHAIHNGFTILEECHHLYHGEKVAFGTLAQLVLQNSPMDEIETVLGFCQRVGLPVTLAQMGVKEGIDAKIAAVAKATCAEGETIHNMPFAVTPESVHAAILTADLLGQQWLAR

SEQ ID NO: 8200 - protein, 255 aa, Petunia integrifolia subsp. inflata
MSTSNASTSGVRKGAWTEEEDLLLRECIEKYGEGKWHLVPVRAGLNRCRKSCRLRWLNYLRPHIKRGDFSLDEVDLILRLHKLLGNRWSLIAGRLPGRTANDVKNYWNTHLRKKLIAPHDQKQESKNKAMKITENNIIKPRPRTFSRPAMNHVSCWNGKSCSKNTIDKNEGDTEIIKFSDEKQKPEESIDDGLQWWANLLANNIEIEELVSYNSPTLLHEETAPSVNAESSLTQEGGSGLSDFSVDIDDIWDLLS

SEQ ID NO: 8201 - protein, 255 aa, Petunia integrifolia
MSTSNASTSGVRKGAWTEEEDLLLRECIEKYGEGKWHLVPVRAGLNRCRKSCRLRWLNYLRPHIKRGDFSLDEVDLILRLHKLLGNRWSLIAGRLPGRTANDVKNYWNTHLRKKLIAPHDQKQESKNKAMKITENNIIKPRPRTFSRPAMNHVSCWNGKSCSKNTIDKNEGDTEIIKFSDEKQKPEESIDDGLQWWANLLANNIEIEELVSYNSPTLLHEETAPSVNAESSLTQGGRSGLSDFSVDIDDIWDLLS

SEQ ID NO: 8202 - protein, 254 aa, Petunia integrifolia
MSTSNASSSGVRKGAWTEEEDLLLRECIEKYGEGKWHLVPVRAGLNRCRKSCRLRWLNYLRPHIKRGDFSLDEVDLILRLHKLLGNRWSLIAGRLPGRTANDVKNYWNTHLRKKLIAPHDQKQESKNKAMKITENNIIKPRPRTFSRPAMNHVSCWNGKSCSKNTIDKNEGDTEIIKFSDEKQKPEESIDDGLQWWANLLANNIEIEELVSYNSPTLLHEETAPSVNAESSLTQGGSGLSDFSVDIDDIWDLLN

SEQ ID NO: 8203 - protein, 255 aa, Petunia integrifolia
MSTSNASTSGVRKGAWTEEEDLLLRECIDKYGEGKWHLVPVRAGLNRCRKSCRLRWLNYLRPHIKRGDFSLDEVDLILRLHKLLGNRWSLIAGRLPGRTANDVKNYWNTHLRKKLIAPHDQKQESKNKAMKITENNIIKPRPRTFSRPAMNNFSCWNGKRCNKNTIDKNEGDTEIIKFSDENQKREETIDDGLQWWANLLANNIEIEELVSYNSPTLLHEETAPSVNVESSLTQEGGSGLSDFSVDIDDIWDLLG

SEQ ID NO: 8204 - protein, 255 aa, Petunia integrifolia
MSTSNASTSGVRKGAWTEEEDLLLRECIDKYGEGKWHLVPVRAGLNRCRKSCRLRWLNYLRPHIKRGDFSLDEVDLILRLHKLLGNRWSLIAGRLPGRTANDVKNYWNTHLRKKLIAPHDQKQESKNKAVKITENNIIKPRPRTFSRPAMNNFSCWNGKSCNKNTIDKNEGDTEIIKFSDENQKREESIDDGLQWWANLLANNIEIEELVSYNSPTLLHEETAPSVNAESSLTQEGGSGLSDFSVDIDDIWDLLG

SEQ ID NO: 8205 - protein, 255 aa, Petunia integrifolia
MSTSNASTSGVRKGAWTEEEDLLLRECIDKYGEGKWHLVPVRAGLNRCRKSCRLRWLNYLRPHIKRGDFSLDEVDLILRLHKLLGNRWSLIAGRLPGRTANDVKNYWNTHLRKKLIAPHDQKQESKNKAVKITENNIIKPRPRTFSRPAMNNFSCWNGKSCNKNTIDKNEGDTEIIKFSDEKQKPEESIDDGLQWWANLLANNIEIEELVSCNSPTLLHEETAPSVNAESSLTQEGGSGLSDFSVDIDDIWDLLG

SEQ ID NO: 8206 - protein, 255 aa, Petunia integrifolia
MSTFNASTSGVRKGAWTEEEDLLLRECIEKYGEGKWHLVPVRAGLNRCRKSCRLRWLNYLRPHIKRGDFSLDEVDLILRLHKLLGNRWSLIAGRLPGRTANDVKNYWNTHLRKKLIAPHDQKQESKNKAMKITENNIIKPRPRTFSRPAMNNFSCWNGKSCNKNTIDKNEGDTEIIKLSDENQKREETIDDGLQWWANLLANNIEIEELVSYNSPTLLHEETAPSVNVESSLTQEGGSGLSDFSVDIDDIWDLLG

SEQ ID NO: 8207 - protein, 255 aa, Petunia x hybrida
MSTFNASTSGVRKGAWTEEEDLLLRECIDKYGEGKWHLVPVRAGLNRCRKSCRLRWLNYLRPHIKRGDFSLDEVDLILRLHKLLGNRWSLIAGRLPGRTANDVKNYWNTHLRKKLIAPHDQKQESKNKAMKITENNIIKPRPRTFSRPAMNNFSCWNGKRCNKNTIDKNEGDTEIIKFSDENQKREETIDDGLQWWANLLANNIEIEELVSYNSPTLLHEETAPSVNVESSLTQEGGSGLSDFSVDIDDIWDLLG

SEQ ID NO: 8208 - protein, 274 aa, Solanum chilense
MNSTSMSSLGVRKGSWTDEEDFLLRKCIDKYGEGKWHLVPIRAGLNRCRKSCRLRWLNYLRPHIKRGDFEQDEVDLILRLHKLLGNRWSLIAGRLPGRTANDVKNYWNTNLLRKLNTTKIVPREKTNNKCGEISTKIEIIKPQPRKYFSSTMKNITNNIVILDEEEHCKEIKSEKQTPDASMDNVDQWWINLLENCNDDIEEDEEVVINYEKTLTSLLHEEKSPPLNIGEGNSMQQGQISHENWGEFSLNLQPMQQGVQNDDFSAEIDLWNLLD

SEQ ID NO: 8209 - protein, 757 aa, Marinobacter sp. ELB17
MLLATDLDGTFLAGDPENRLKLYRLIVAHPEIDLVFVTGRGLEAVLPLLSDPTIPQPDYIICDVGCTVVHGASQQAIQPLQGEIDELWPGEQVVESALSSFEGLQRQEVPQERRVSYFCDNDLVSEDMLARVSALSCDVLFSAGKYLDILPRGVNKGRTLSRLVEHLGVDPESVLVAGDTLNDLSMYQHEFKGVCVGESEAGLLAATEHQARVLHAGASGCGGILEAFEHFGYLGHLGIEAEIPDYMNRGKSDLVIVYHRLPYEEVVENGELIRRRPKSPNGIIPTLLSFFSDGKAGSWVAWSVDDPDLGPFQTHTEVDTSRYEKLVAARVALSEEDVEIFYKRFSKEAFWPTLHTFWERATFRDDHWQVYLKVNRLFAERAAEEAAENAVVWIHDYNLWMVPAYLREMRPDLTIAFFHHTYFPSADVFNVLPWRREIIGSLLQCDHIGFHIPRQAENFVDVARGVTPLEVTHKMGCAPRFLTYGCAVGLDEMSTEITVNDRKIGLGAHPVGLDLNRVRTALSDQSVIAQMETLREEFKDVRLILSVERLDFTKGIIEKLQAYERILNEHPELKTKVTLMLICVPAAAGMTIYEELLSQIEQTVGRINGQFAQVGWTPVQFFFRALPFEELVAYYTIADVMWITPLRDGLNLVAKEYIATQGLTQGSGVLVLSEFAGAAAELRGAILANPHHPQDLADTCYYALAISRSEARNRLSEAFEVVCRYDIEYWGREFINEVERRRATKLNKILAIGHRAA

SEQ ID NO: 8210 - protein, 68 aa, Marinobacter sp. ELB17
MSTVTGTVKFFNEAKGFGFITREGGPDVFVHYSSIQGGGFKTLAEGQQVEFTVTQGQKGPQAENVVAV

SEQ ID NO: 8211 - protein, 444 aa, Marinobacter sp. ELB17
MSFSSLGLSEPLVRATLDQGYETPSPIQLKAIPAVLAGKDVMAAAQTGTGKTAGFVLPILQMLEQNPRTGKGPRVLILTPTRELAAQVHDSVNLYSRYVPTRAAVVFGGVKINPQMMKLRKGLDVLVATPGRLMDLYQQNAVRFNEVEFLVLDEADRMLDMGFIRDIRKILAMLPAKRQSLLFSATFSNEIRTLAKGLLNDPVQIDVAVRNTTAESVIQSVYPVDQSQKTALLSKLVRDNSWEQVLVFTRTKHGANRLTEKLGKDGITAAAIHGNKSQGARTRALAEFKQGDIRVLVATDIAARGLDIKQLPQVVNFELPNVPEDYVHRIGRTGRAGESGHALSLVSADELSMLVGIEKLIKKQLPRKEVEGFEPKNNVALKPKAKADPSKARNRSGGNGGGNGRPSDKPRSFGDKPGGRSAGRSQNGNGGQRGRSGQRQNQGA

SEQ ID NO: 8212 - protein, 861 aa, Marinobacter sp. ELB17
MIRVELPALIGRLNDVCRQALEASAALCISRQGAEITPAHLLFQLLDQPLCDVRQILQQADIGYSPLQQQLGDSLAGSVQNAEPYPAFSPLLIELLQDAWLLASAELGQQQLRSGAITLALLLNPQRYLPAQVCDTLAPINREQLRRQFEACTRGSAEQPTIAQQGSAADSRQVSVDDGPLQRYAQDFTALARQQKLDPVLCRDREIDQIIDILCRRRKNNPMVVGDAGVGKSAVVEGLALRIAHGEVPERLRKVALWGLDLGALQAGASVKGEFEKRLKSVIDTVKNSATPIILFIDEAHTLIGAGNSEGGSDAANLLKPALARGELSTIGATTWREYKKYFEKDPALSRRFQPVALDEPSPQQAVHILRGLRPVYEKAHQILIADSALQAAAELSARYLAGRQLPDKAIDVLDTACARVSLNLTTPPRQLSHIRSELAQLALEQELLQREQQLGQATDSARQIALDEALASLQVAATDLEQRWQAQRELVGRLIKVQEQLLAGNSELAAEAGTIEQQLAQLQADEPLVYARVDERQIAAVIADWTGIPVNRMSRDELEKITHLPAYLFAHIKGQDSAIAAIHQHLLTARADLRRPGRPMGAFLLAGPSGVGKTETVIQLAELLYGGRQFLTTINMSEYQEKHTVSRLIGSPPGYVGFGEGGLLTEAMRQKPYSVVLLDEVEKAHPDVLNLFYQAFDKGEMADGEGRLIDCSNIVFFLTSNLGHQTIVQNAAEPQALIAAIYPELAAFFKPALLARMQVVPYLPLNDSTLDCIVVDKLERLANQISQRYQAEVVLDGNLAGAIRERALHSENGARMLEAVIEGELLPKVSLALLEKLARREPVVRVTLSAGENGFSGTVA

SEQ ID NO: 8213 - protein, 68 aa, Marinobacter sp. ELB17
MSTTTGTVKFFNEAKGFGFITREGGPDVFVHYSAIQGGGFKTLAEGQQVEFTVTQGQKGPQAENVVPL

SEQ ID NO: 8214 - protein, 213 aa, Marinobacter sp. ELB17
MATILKPIDDRTKHLDYFLSQCHRRRFPAKSTIIYAGDKSDSLFFIVKGSVTVIIEDENGREMIMAYLNVGDFFGEMGLFDNLDSRSAWVKAKTECEVAEISYTKFREIAQQDPKVLYFIGEQVASRLRETTRKVGDLAFLDVTGRVARTLLDLCKQPDAMTHPDGMQIKITRQEIGRIVGCSREMVGRVLKTLEEQGLVRVKGKTMVVYGTR

SEQ ID NO: 8215 - protein, 542 aa, Marinobacter sp. ELB17
MDNKKDYIRSTGWLAGTHPVMSVGAGILVLAFVLFTVSDPEYANALYGAAKNFIAKELAWYYVGLVSVILFLVIGLVFTRFGSIRLGKDTDRPEFSNFSWFSMLFGAGIGIGILFWSIAEPISYFQGNPFIAENQQLTVEAAQVAMRVSIFHWGLHGWALFAMIGLILAYFSYRKGLPLSIRSSLYPIFGERIYGPIGHVADLLAVFGTVFGIATSLGMGAQQMNTGLNYLLGVEVSTSTYILLIAVISVIAMISVITGVDRGIRILSELNMRLTMVILGLFVVFGPTAYLLGALVTNFGDYVVHAVELGFWVDPDPESQWQGWWTIFYWGWWLSWSPFCGIFIARISKGRTVREFILGVLIAPTLLAVAWITIFGNTAMFIELFGNGGVVAAANADTTMALFKTIELMNTNSLVVTVMAGICTFMLVTYFVTSADSATLVVCTLISMGDSEPLARYRVFWSVAIGAVASTLLLTGGLAALQTATIVAALPFSFILIMAIYGLFKSLLEEPIPGQLHKAAAVVSDAELLTRRPEVAVATVSL

SEQ ID NO: 8216 - protein, 316 aa, Marinobacter sp. ELB17
MSDFNQPMGGNEMPRFGGPATMMRLPAQDTAEDLDVAFVGIPMDIGTSNRPGTRLGPRQIRDESRMLRPYNMATRAAPFDSLQVADIGDVPINTFNLLKSVEIITAFYDRLLEHNCIPLTLGGEHTITLPILRAIAKRHGPVGLIHIDAHADVNDHMFGEPIAHGTPFRRAQEEGLLDAQRVVQIGLRGTGYSADDFDWCREQGFRVVTAEACWYRSLAPLMAEVREQMGDGPVYITFDIDGLDPSVAPGTGTVEMGGLTASQGLEIVRGAAGLNIVGGDLVEVSPPYDTSGNTALMGATLLYEMLCVLPGVMRRD

SEQ ID NO: 8217 - protein, 641 aa, Marinobacter sp. ELB17
MSRIIGIDLGTTNSCVAVMDGGKVKVIENSEGDRTTPSIIAYTDDNEILVGQSAKRQAVTNPYNTLYAIKRLIGRRFQDDVVQKDIKMVPYKIAKADNGDAWVDVKGQKMAPPQISAEILKKMKKTAEDYLGEKVTEAVITVPAYFNDSQRQATKDAGKIAGLDVKRIINEPTAAALAYGMDKKGGDRTIAVYDLGGGTFDLSIIEIADVDGEHQFEVLATNGDTFLGGEDFDMKIIEFLADQFKKDSGIDLRGDSLAMQRLKEAGEKAKIELSSSQQTDVNLPYITADASGPKHMNVKLTRAKLESLVEDLVQRTLEPCKVALKDSGLSLDQIDEVILVGGQTRMPLVQEKVKEFFGKEARKDVNPDEAVAMGAAIQAAVLSGDVKDVLLLDVTPLSLGIETMGGVATSLIDKNTTIPTKKSQTFSTADDSQTAVTIHVVQGERKQATQNKSLGRFDLADIPPAPRGVPQIEVTFDIDANGILNVSAKDKATGKEQSIVIKASSGLNDEEIEKMVRDAEANADEDRKFEELVQARNQGDAMVHAVRKTLKDAGDKVSDSEKESIEASVTELEEALKGSDKDDIQAKTEKLTEVSGELAKKMYADQAEQGQPAEGQEKAQSNTADDAVDAEFEEVKDDDKR

SEQ ID NO: 8218 - protein, 385 aa, Marinobacter sp. ELB17
MRVEKSIYLDYQSTTPVDDRVMQAMLPYFTDSFGNPHSASHALGWKSSDAVETARAVVASTVGALPEEVVFTSGATESNNQAMFGVMFGNTTPRNRVLVSAIEHKCVKESALFFGNKLGFVMEEIPVLSTGKIDLQAYQSMLSDDVLLVSIMAVNNEIGVIQDISCLSDLAHRAGALFHCDAAQALEAMDVDVADWGVDLLSLSAHKLYGPKGIGALYIDSSIQNNFPALIQGGGQQWGLRAGTLPTPLCVGFGVAASLIQSEGEAHRSALRVLSDRFLERLSNEGVGFRVNGDRQCRHPGSLSIELIGVDAESLLMSLQPKICASTGSACNSGMIQSSYVLRAIGVSEESAASCVRFSLGRFTDESQVDEAAKLIADGVRSCLI

SEQ ID NO: 8219 - protein, 408 aa, Marinobacter sp. ELB17
MNTEIILGVVMFTVIVLALVAIILAARSQLVSTGDVTIEINDDPEHTVKTEAGGKLLNTLSGSGIFLSSACGGGGTCAQCKCKVFEGGGAMLATEKTHFTNREEKEGWRLSCQVPVKQDMKIEVPEEFFGVKKWECEVVSNHNQATFIKELVLKLPEGEEVAFRAGGYVQLECPAYEIDFKEFAIEEEFREDWNKHDIWRYKAINKEDTIRAYSMANYPEEKGVLKFNIRIATPPPGTDHNPGIMSSFVFDLKLGDKMTVMGPFGEFFAKKTDAEMVFVGGGAGMAPMRSLIFDQLKRLNSKRKISFWYGARSVREMFYVEDFDGLAKENDNFVWHVALSDPQPNDDWSGDTGFIHNVLFENYLKDHPAPEDCEFYMCGPPIMNASVIKMLKDLGVEDENIMLDDFGG

SEQ ID NO: 8220 - protein, 403 aa, Marinobacter sp. ELB17
MSDINKVVLAYSGGLDTSVIVRWLQDTYGCEVVTFTADIGQGEEVEPARVKAKALGVKEIYIEDLREEFVRDYVFPMFRANTVYEGEYLLGTSIARPLIAKRLIEIANSTGADAISHGATGKGNDQVRFELGAYALKPGVKVIAPWREWDLNSREKLLAYCAERDIPVDMKKGKSPYSMDANLLHISYEGMNLEDPWCEAEDDMWRWSVSPEEAPNTATYIEVTYAKGDIVAVDGKAMKAHEVLEHLNKVGGDNGIGRLDIVENRYVGMKSRGCYETPGGTIMLRAHRAIESLTLDREVAHLKDSLMPRYAEVIYNGYWWSPEREALQALIDQTQAYVNGTVRLKLYKGNVDVVGRKSDDSLFDEKIATFEEDEGAYNQKDAEGFIKLNALRLRIAASKGRKL

SEQ ID NO: 8221 - protein, 108 aa, Marinobacter sp. ELB17
MDMNDTIKSQLEENSVILYMKGSPQAPECGFSAKTVQALMACGEKFAFVNILDNPELREALKVHSSWPTYPQLYISGELVGGCDIIMEMSENGELATAVKAACKKTEA

SEQ ID NO: 8222 - protein, 316 aa, Marinobacter sp. ELB17
MSKLMIFAGNANPDLAHAISKQLHIPVGNATVGCFSDGETTVEINENVRGHDVFIIQPTCHPTNDNLMELIVMADALRRASASRITAVIPYYGYARQDRRVRSSRVAISAKVVADMISSIGVDRVLTVDLHADQIQGFFDIPVDNIYATPVLIEDIEKQRFENFVVVSPDVGGVVRARAVAKRLDDADLAIIDKRRPKANVSQVMHIIGDVRGKVCILVDDIVDTAGTLCKAAEALKKHGASRVVAYITHPVLSGKAIDNINNSELDELVVCDTIPLGDKARQCDRIRPLSMAGLLAESIRRVSNEESISAMFENV

SEQ ID NO: 8223 - protein, 504 aa, Marinobacter sp. ELB17
MSELSFAELGLNPAVLEAVTAVGYETPTPIQAQSIPALLSGRHLLGVAQTGTGKTAAFALPLLSRVDPNVNAPQILVLAPTRELAIQVAEAFSTYASKLPNFHVLPIYGGQDFFPQIKGLRRGAHVIVGTPGRMLDHLRKGTLKLDNLKALVLDEADEMLRMGFIDDVEAILSKTPDNCQRALFSATMPPQIKKVAQTYLKDAVEVRIESASRTVDAISQYVLPVYAERKLDALTRILEVEPFDASIIFVRTKAETIVLAEKLAARGHAAAPLNGDLNQRQREQTVEDLKRGKKDIVVATDVAARGLDVPRITHVINYDVPYDTEAYIHRIGRTGRAGRDGKAILLVTPRERSWLRTLERATNATMEAYELPSPAALQKMRVDQFESQLVGFAEDRKLSKAMAMLDDIAERNEMDITMVAGALACMLEATQPGSLPLEQPEALPAVSTTQPNRDRKAGRPGEFRKGPKPGSYNKRPGSGAPGGKGKFAGKPSGKRPPRQSDAKR

SEQ ID NO: 8224 - protein, 374 aa, Marinobacter sp. ELB17
MIIGVPKEIKNNEFRVGLGPEAVHELVAHGHHVVVQASAGAGIDFTDEQYLAAGASLVASAEEVFEQAELIVKVKEPQPSERALLRSHHTLFTYLHLAPDVAQTKELLESGATCIAYETVTDGKGGLPLLAPMSEVAGRMSIQAGARCLEKSQNGRGLLLGGVPGVQAATVAIIGGGVVGFAATQMAVGMGARVLVLDKSMEVLRRFDAIFGNRVQTLFSCAKTVEEAVLQADVVIGSVLIPGAAAPKLVTRELISRMKPGSVVVDVAIDQGGCFETSKPTTHADPTYVVDGVVHYCVANMPGAVARTSTYALNNATLPYVLQIANKGPRKALEDNEHLLNGLNVVKGQLTCPSVGVAQSIESISPTQGLKLID

SEQ ID NO: 8225 - protein, 342 aa, Marinobacter sp. ELB17
MSYNIALNFEDGVTRFVSCNEGETVLDAAYRAKINLPMDCSDGVCGTCKAACHQGEFDLGEEYLDEALSEEEVEQGMVLTCQMVPSGDCVVEVPVASNMCKTGNAKKTGTVTEVNLISPTTIELKITADEDLAFLPGQYVKIQVPDTEETRSYSFSSKPGSRDLSFLIRNVPGGLMSSWLVGKARTGDKLTLTGPMGSFYLRPVDRPILMLAGGTGLAPLLAKLEHMKANECNVPTHLVYGVRNDDDLVCLDALDRFAEDIDNFSYVTCVSSDESNHPRKGYVTHHMEKAPLNEGDVDVYLCGPPPMVDSVLGYFREQGIKPNSFHYEKFTPSAPGPEEKVA

SEQ ID NO: 8226 - protein, 400 aa, Marinobacter sp. ELB17
MTDVFLCHPRRSAIGRFGGALASVRPDDLAADIFKAVLNEAPDLDPAAIDEVIMGCANQAGEDNRNVARMSALLAGLPTSIPGTTMNRLCGSGMDAVGTAFRAIRAGEMELVLAGGVESMSRAPYVMGKADSAFSRNQSIEDTTIGWRFVNPLMQRQYGTDAMPETAENVAEQFNVTREEQDLFALRSQQKAADAQERGIFAEEIVAISIPRRKQDPLVFDTDEHPRSTTLEKLAALPAPFREGGSVTAGNASGVNDGAAAMLVASENAVKAHGLKPMARILGMATAGVEPRVMGIGPVPAVRKLLKKQGISINDIDVIELNEAFAAQGLAVLRELGVADDDPRVNPNGGAIALGHPLGMSGARLLLTAAHQLQRTNGRYAMCTMCVGVGQGIATLIERV

SEQ ID NO: 8227 - protein, 575 aa, Marinobacter sp. ELB17
MNLSRYLPVLQWSTQYNRQQAGSDLVAALIVTVMLIPQSLAYALLAGLPAQIGLYASILPLVVYALFGTSRTLSVGPVAVASLMTAAALAPLAQAGSAEYIVGAVVLALMSGLMLVLMGVLRLGFLANFLSHPVISGFITASGIVIAASQLKHVFGITGSGHNLFDIGRSLWASANNINPATLAVGVSTLVFLVLARTRLKLGLLALGVAPQLADVVTKTAPILAVVLTTLAAWFWQLQLQGVKLVGHVPSGLPQLTWPQADWALWQQLAVSALLISVVGFVESVSVGQTLAAKRRQRIDPDQELIGLGAANLGSGISGGMPVTGGFSRSVVNFDAGAETPAAGIYTAVGIAVATLFLTPAIAWLPQATLAATIIVAVSTLIDMPALRRTLHYSRADFGAMLTTIVLTLGHSVEAGIIAGVALSLGLFLYRTSRPHCAVVGRVPGSEHFRNVLRHKVDVCPTVTFLRVDESLYFANARFLEETVLDIVNREPQLTDLVLVCPAVNLVDASALESLEAINERLKDAGVRLHMSDVKGPVMDRLKRTEFCQHLSGGVFLSAHEGWKALVTGAKNDDS

SEQ ID NO: 8228 - protein, 359 aa, Marinobacter sp. ELB17
MNKFYSLALKEVRPETRNAVSLSFDLPTDVAEKFKYKQGQHLVVRTKVDGEEVRRTYSICSSVNDQELRIAIKRVPGGVFSSFANDLLKPGSVLDVMPPQGHFSVELDPERKGNYLAVAAGSGITPILSIIKTTLETEPRSEFTLFYGNKGTSSTMFRDHLQDLKNEYMTRFNLVYIFTREEQDIDLYNGRIDSDKCDRLFDHWIDAKNLTAAFLCGPQMMTETVRDSLARHGMDKSKVHYELFTPAGGVPKARKDRAETKVDLQAVSVVTVKADGRSLTFDLVRDTKSILQAGNDEGADLPYSCQAGVCSTCRAKVIEGEVEMDQNFALEDYEVAAGYVLSCQCYPVSDKVVLDYDEM

SEQ ID NO: 8229 - protein, 415 aa, Marinobacter sp. ELB17
MSHNKPLQNAYIVDAVRTPVGRYGGALAAVRADDLGAIPIKALKDRYPDLDWAAIDDVLYGCANQAGEDNRDVARMSLLLAGLPVDVPGATINRLCGSGMDAIGSAARALRTGEAELMLAGGVESMSRAPFVMGKADSAFSRAAEIFDTTIGWRFVNPLLKKQYGVDSMPETAENVAADFKISRADQDAFALRSQQRTAAAQQAGRFNCEIVPVSIPRRKQDPLVVDTDEHPRATSLEKLASLATPFREGGSVTAGNASGVNDGACALLLASGDALKKHNLKPRARVVAMATAGVEPRIMGMGPAPATRKVLKTAGLELADIDVIELNEAFAAQALAVLRDLGLPDDAEHVNPNGGAIALGHPLGMSGARLVTTAMNELELRHRQGQKARYALCTMCIGVGQGIAIIIERVDSAD

SEQ ID NO: 8230 - protein, 392 aa, Marinobacter sp. ELB17
MRDVVIVAAKRTAVGGFGGGLSTLRADQLGTAVIKALMEETGVAGDQVSEVVMGQVLTAGCGQNPARQASINAGLPATVPAMTINKVCGSGLKAVHMAVQSIRNGDAEIVIAGGQESMSQAPHVLPNSRNGQRMGNWALVDTMVNDGLWDAFNDYHMGITTENIVEKYGISREEQDQFAAASQQKAVAAQKAGRFDNEIVPVSIPQRKGDPIIVAKDEGPRDGTTAEGLSKLRPAFKKDGTVTAANSSTINDGAAAVMVCSAEKAKELGLTVLATIKAQSSAGVDPSVMGTGPIPASKRCLKLAGWDVSDLDLIEANEAFAAQAISVNRDMGWDLAKVNVNGGAIAMGHPIGASGCRILVSLLHEMVRQDAKKGLATLCIGGGMGVALAVER

SEQ ID NO: 8231 - protein, 254 aa, Marinobacter sp. ELB17
MLSIKNLHASVEGKQILKGINLEIKAGEVHAIMGPNGSGKSTLSQVLAGNDAFEVTEGEVTLNGDNLLELPTEARAREGVFLAFQYPVEIPGVSNLQFLRTAVNAMRKHQGKDDMNAAEFMKLAKEVSKQVDLDPAFLKRGVNEGFSGGEKKRNEIMQALLLQPKLAILDETDSGLDIDALKVVSDGVNALRAPDRAILMITHYQRLLDHIVPDYVHVLADGKIIKSGGRELALELEAKGYGWLGVKDNTTASH

SEQ ID NO: 8232 - protein, 320 aa, Marinobacter sp. ELB17
MSAFNAVFLDVTSLNQNDLDLEPLRNVFSKLDCYEHTSSAEIIPRLQGAQVAIVNKVVLSADVLKACPALKLILVAATGLNNVDLQAAEEAGVTVCNCQGYGTATVAQHTLMLLLAMATRLPDYQSAVREGRWQTSSHFCFLDFPIVELDGKTLGVLGSGEIGRAVARLGEALGMRVIAANLPGRLPKAGRLSLDEVLQQADAITLHCPLNENTRHLIGEAELAKMKPHAFIVNTARGGLIDEQALAAALRRGHLGGAATDVLVQEPPVDGNVLLAQDIPRLIVTPHTAWGSQEARQRIVGQVAENAAAFRSGKPVRQVV

SEQ ID NO: 8233 - protein, 533 aa, Marinobacter sp. ELB17
MLNRLQRLLGLQTIPGVFFTSAGIAVLFVALAIPFDEAVAGFFGGLTAWVARNLGWFYIATVSFLLVFLLGLAFSRFGAIRLGADDSRPDYSNLTWFTMLFAAGIGTILMFWGVAEPVSHFANPPFSDVLPGSDRAARDAMALSLYHFGLHTWTIFAMPGLAIAYFAYRHHLPMRISSLFYPVLGDRINGPLGWAVDVTAVLGTLFGVATSLGLGTLQLNSGLNYLLGVPVSGSVQVMLIAVIASIAAVSVALGLDKGVRRLSQLNIVLAATLVIFVAVVGPTVFIAEGMVQSVGDYLDALPWLAFWTETFSETDWQRNWTLFYWAWTISWAPYVGIFIARISRGRTIREFIAGVLLAPTVFTLVWFGVFGLSAIHVEMNGQVALAAQVEQNPAVAIFAFLQALPFAQFSSSLSIIIIVIFFTTSSDSASLVIDMLTRRDDQPSLVRQRIFWAAAQGVVAASLLLAGGLDALQNVITALGLPFCILLIFMAVSLFRALRADSRGYSVDELVQGRAYAPVSSNKDVKQEHHDVS

SEQ ID NO: 8234 - protein, 542 aa, Marinobacter sp. ELB17
MNSTTKKVVKKQEAQIDSHIFWPACIIVTAVIIVMVMFESQTQAAIKVAFDFVTNQLGFAYIWAGAFFFGAVLWLSLGRYNQVRLGGPDAKPEFSRLSWIVMFFCSGIGTALIFWSSIEWTYYFTAPPFYLEPKSDLAADYAAMYGMFHWGPLAWAFYCLTAFPIGYAFYNRKQSGLRLSLGCAGLIGDKHANGLVGKGIDILMVFGLVGGIGTVLASGTPMLAEAISRLLGIEHTFKVDIGVVLIWGVIFITSVVLGLKRGIQRLSQINLYALSILCVIIFIVGPTFFMLNSFTNSMGLLITDFARMAFYTDPVGKSMFPQWWTIFYWAWWAAMGPYMGIFIARISRGRTFRDMGLTVIGAGSAGCILFFVLFGSLSMHAELSGTFPVLDTIANESPSAAILGTLEQLPLYNVILVLFIFVGFVYSGTTVDSSAYVLASVTSRNLSEGIEPHVANRFFWAVALGASGLVLMNIGGLEPLKTASLIVGVPLMVVMFMSFFSLLRWLRVDHPELQPSSTVEVGRGMAGKASQIRVREPVTGAK

SEQ ID NO: 8235 - protein, 525 aa, Marinobacter sp. ELB17
MKIGIPKEIYLDERRVAATPPSVHKLIGLGYQVTVEAGAGEAAHYHDSAYEAVGATIAADAGALWSDSDFILKVRAPMENPALGKHEADLMKEGGFLVSYIWPGQNPELLQNLAARKITTFAIDSLPRISRAQKMDALSAMANIAGYRAVVEAASHFGRFFTGQMTAAGKVPPAKVMVIGAGVAGLAAVGAANSLGAIVRAFDTRLEVKEQIESMGAEFLQLDFGEEEGSGTGGYAKQMSDEFIKAEMALFAEQAKEVDIIITTALIPGRPAPKLITADMVKSMKPGSVIVDLASERGGNCELTEPGKIVEKHDVTLIGYTDLPSRMAKVASDLYATNLFHLVTELTPEKNGQPQVNMEDDVIRGLTVVLDSEITWPPPQPHTPVSPKAAPGTEEPSAEQKAAARKDSERRSLIGKGVLLIVTVAALYGIGAHAPDSFLRHFTVFVLACFIGWQVVWNVTPSLHTPLMSVTNAISGIIVIGAILHLAQAENLAVGIMAFVAVLIASINVGGGFRVTHRMLKMFRR

SEQ ID NO: 8236 - protein, 1133 aa, Marinobacter sp. ELB17
MSEKEAIDVLWLILAGILVLTMQAGFLCLESGLTRSKNAINVALKNAFDLLVVMAVYWFIGFNLMFGEHSAWALDWRWVATDFSQLDFWDAGFFFFQMTFCATAATIVSGAIAERSRFITYVLVTILIAGVIYPVVGHWSWSGIFNGSNGWLQQKGFVDFAGSSVVHGVGGWVALAAVIVIGPRQGRFKDGQVREISGSNLPMAMLGLMFFIIGWLGFNGGSVLAFDARVPGIMVNTLMAAATGGMVALLISYCLSGRHRVTTMTINGTLAGLVAITAGVHSVSTLAAMVIGALGCLCMLAAEQLLLKFELDDPVGAVPVHLVAGIWGTLAVAFFGRAEQLQTGLSFSGQLQAQLFGIVAIGLFSFSLALVFLWLLKQLMPLRVSAEGERDGLNVSEHGARTELVDLLQAMAGQEKSGDLQHKVHAEPFTEVGLIAAQYNRVMARLNQVITRTRLIVRDIRDGVITFNSKGIISSVNPGAEHLFARSRAQLIGQSTALLLHRNNSALYTHANPEQVFPRLAASENVGPHELIARGADDQPFYIEVTTAASPTEAGVQYSAVIRDISERKRIEEQLHRHSELAQVTLEAITEGVITFDAQMHTVYLNPIAAALTGWSSQQAFGKPAEHILCLKSIEGDNMAVLPLFQQQKKQCLQLIKKGGKFSDIELTPAPLHNHAGEPVGWVVVMQDVTNSKLLQQQLSFQAIHDPLTGLINRREFERSLQSLIQDVEHNASEHLLCYLDLDQFKIVNDTCGHQAGDELLKQLANTLKPLLRQSDILARLGGDEFGVLLSHCPLNQGQEIAEQLREAVCGFHFSWDGQVFAVGVSIGIVHLTQPCGDLGIMLSKADTACYLAKNLGRNRVHLHLPDSSEVKLQTDQVQWVNRIRQALNEDHFRLFCQPIMALDQADADPTHYEILLRLKDARGHMVPPGAFLPSAERFNLMPQIDLWVIRNTLAWMGGQLRGSHLDLHCAINLSGASIGHPECLQTIREQLTKHRVPAHRVCFEITETTAMADLKKAQDFIGELRTLGCKFALDDFGSGLSSFGYLRHLSVDYLKIDGIFIRELAQSPIDRAIVDSINTIGHIMGLKTVAEFVEDGATHEILHQLGVDYAQGYHLGRPQPLESLGNAHVMPR

SEQ ID NO: 8237 - protein, 426 aa, Marinobacter sp. ELB17
MSWFAMLFAAGMGIGLMFWSVAEPVAYLTDWYGTPLGVEPNTPEAAKLAMGATMYHWGLHPWAIYAIVGLSLAFFTYNKGFPLTIRSAFFPILGDRVWGWPGNVIDIIAVLATIFGLATSLGFGAQQAAAGLAFLFPEAIEGGLNVQVGIIAGVTAIATLSVIRGIDGGVKLLSNINMIIAGLLLAFVFFAGATLGIIEQMWTTTAAYVGNMLPLSNPFGREEDTTWFHGWTVFYWAWWISWSPFVGMFIARVSKGRTVREFVIAVLLVPTVISIVWMSTFGGSALAQIQAGVGTLASDGLTDVSLAMFQMLENIPFTAITSFMGIVLVLVFFVTSSDSGSLVIDSITSGGRIDAPKAQRIFWAVTEGMIAGVLLFVGGADALSALQAGAVSVGLPFTFVLLGMCYSLMKGLNHERRLLIAEGKMT

SEQ ID NO: 8238 - protein, 540 aa, Marinobacter sp. ELB17
MKNNKIKAGGDYSLAQLGDPVLLALSVGFIVLFVGFSLFDLKGVADLIGTGFAWTAKVFGTYFQMLLLATFFIAIGVACSPAGRAKIGNLDRPEMSTFRWLSIIMCTLLAGGGVFFAAGEPIYHFVVTPPAFTSEPGTAAAVSNAMAQSFMHWGFLAWAVLGTLSAIVLAHAHYVNDKPLQPRTLLYPVFGERVMRGWLGSVVDACCVIAVVAGTVGPIGFLATQMSFGLSELFGLADGLGTQMAILVVLAAIYVTSAVTGIHRGIQVLSRLNVFLALAVAAIIFIFGPTLFLTNTYFQSMGQYVSSFIEMATMTSESAPAWWMKWWTVFFFAWFIGYAPLMAIFVARISRGRSIREMIMAVAVMAPIATTVWFTLLGGSGIYYQMTGVIDLADALNNFRFDVATLTVAQALPGGSFMALAILVLTTIFVATTGDSMSYSIAVVSSGHDDPNTFVRAFWGLAMAGMAGVLLYMGAGQISVLQQFIVITAIPVSLVLLPSLWLGPKAAYAMAREQNLIPQLSGATAATGSVTPAEYSKVRS

SEQ ID NO: 8239 - protein, 250 aa, Marinobacter sp. ELB17
MVKRKRTTPLSDEHVEPGHCSSELRARILSDVPYFKGLAAPALDAVNHYFRAFNYAAGAALHHENEPAEALFLVAHGTVKLLQYSASGEEVLLDLLGQSDLFGGLTMLGQRCYPQNAFAQTPCCVLVITITDFRYLLRTYSEVALNVLDAVARDLEAAQATIRAISTLPVEARIARVLVRLADRLGEADDGGILIQSPLSHQDLAAMEATTSETVSRVISGLRRSGDIETGRQWIRIRNRTNLARLAGEI

SEQ ID NO: 8240 - protein, 390 aa, Marinobacter sp. ELB17
MAARIWSINTFDWLFLSSVNIFVVFCLALIVLPVGKIRLGGDTAKPDYSRSSWFAILFAAGMGIGLMFWSVAEPIGYYTEWYGSPLNIASGTVEAERAAMAATMYHWGLHPWAIYGVVGLALAFFTYNKGLPLTIRSTFYPLLGNRIYGPIGNIIDITAVIATIFGPATSLGFGAQQAAGGLNYLFGIPADLGTQTGIIVVVTAVALFSVTRGLDGGVKLMSNINMVLAAALLLFVIFAGSLMTFLSTLGTTFVAYAEYFLPLSNPVGREDETFYHGWTIFYWAWWISWSPFVGMFIAHLQGSYGSGISHHRSHRTHPGNVRLDECLWWQWTSTDKSTRWCPGRWHQRFFTDPVSDAGEPAAVRNHVCPGDCAGAGILRDLLRLWLIGHR

SEQ ID NO: 8241 - protein, 364 aa, Marinobacter sp. ELB17
MTTQFLNPVNTQTWSNGRHVVRCTQAVQETWDVRTFCFVAEQPILFYFKPGQFVTLELEIDGEQIMRSYSISSSPSVPYSFSITVKRIPGGKVSNWLHDNLVEGFELAVHGPIGDFNAIDYPTENILMLSGGVGITPVMSMARWFFDTNANVNACFIHSARTPQDVIYSRELDHMCSRIDSFNVHVICERQEPGQPWVGYRGYLNQQMLELIAPDFMDFEVFCCGPTPYMRAVRQILGNAGFDMAHYHEESFGSTPAAVAEDVIEHAEAAAEALDQADLVSVTFVDSDKHVRVPRGETVHAAAAKVGLHIPKACGMGLCGTCRVELKAGTVDMQHNGGITEEDEEVGFILACCSRPLGDVVVGY

SEQ ID NO: 8242 - protein, 422 aa, Marinobacter sp. ELB17
MESNVFQLQYAMDTFYFLMCGALVMWMAAGFAMLESGLVRAKNTTEILTKNVALYSVACIMYLVCGYAIMYDGSILLSGIGETDTASVLADFAGREGGFEGGSIYSAPSDFFFQVVFVATAMSIVSGAVAERMKLWAFLVFAVVMTGVIYPMEGSWTWGGNDVFGLYNLGDLGFSDFAGSGIVHMAGAAAALAGVILLGARKGKYGPNGEIRAIPGANLPLAALGTFILWMGWFGFNGGSVLKLGDIASANSVAMVFLNTNAAAAGGSIAALITARILFGKADLTMLLNGAIAGLVVITAEPSTPTALQATLWGAIGGIAVVFSIIGLDKLRIDDPVGAISAHGVCGLLGLLLVPVTNGGASFSGQLIGAATIFGWVFLASLITWGIIKAVMGLRVSEAEEYEGVDIVECGMEAYPEFVSSK

SEQ ID NO: 8243 - protein, 572 aa, Marinobacter sp. ELB17
MELLSGADMLIRSLQDEGIENIYGYPGGAALHIYDALFRQDTVKHILVRHEQAAVHMADGYARATGKAGTVLVTSGPGATNTITGIATAFMDSIPMVVLCGQVASTLIGEDAFQETDMIGVSRPVVKHNLSVRHPSEIPEIIRKAYYIATTGRPGPVVVDIPKDMTAPNDRYEYVFPKKTKLRSYNPAIRGHAGQIKKAVDMLLAAKRPIVYAGGGVILGKASGQLTEMVRGLGYPITNTLMGIGCYPASDKQHIGWLGMHGTYEANMVMHHADLILAIGARFDDRVTNATEKFCPGARIIHIDIDPASISKTISADVPIVGPVDSVLKEMQSLIKESKVRPDADALASWWKQIDEWRAFHGMRYETSDDVIKPQEVVEMLHRLTNGDAYVTTDVGQHQMFAAQYYKFDKPNRWISSGGLGTMGFGLPAAMGIKLNFPDEEVLCITGEGSIQMNIQELSTCKQYNLPVKIINLNNQALGMVKQWQDMNYGARHSHSYMDSLPDFVKLAEAYGHEGIKITRKEDLEPMLKKALAMKDKLVFVDIYVDPSEHVYPMHVARGSMKDMWLSKTEKV

SEQ ID NO: 8244 - protein, 328 aa, Marinobacter sp. ELB17
MTEEEIAEIVSKWTGIPVSKMLEGERDKLMRMEEALHKRVIGQNEAVEAVANAVRRSRAGLSDPHRPNGSFLFLGPTGVGKTELCKALASFLFDTDDAMVRIDMSEFMEKHSVARLIGAPPGYVGYEEGGYLTEAVRRRPYSVLLLDEVEKAHPDVFNILLQVLDDGRLTDGQGRTVDFRNTVIVMTSNLGSGIIQRHAGEENYDAMKALVMDEVGTHFRPEFINRVDEVVVFHPLAANQIRGIAKVQIELLDKRLQQQDIALELDESAMTLLANVGYDPVYGARPLKRAIQRMIENPLAQQLLQGSFGPGDTIRTRVEEGALVFSKA

SEQ ID NO: 8245 - protein, 520 aa, Marinobacter sp. ELB17
MRIDKLTSRLQSALADAQSLAVGKDHNFIEPLHLMQALLDQDSSSIKPLLKQAGGEPTRIRQAVIKEIESLPEVKGSAGDVAMSNDMGRLFNIADKLAQKRKDQFVSSELMLLAALEDRGSLGRVLREQGVDKAALEKAIENARGGESVDDAGAEENRQALDKYTIDLTEMAESGKLDPVIGRDDEIRRTIQVLQRRRKNNPVLIGDPGVGKTAIVEGLAQRIVNGEVPEGLKNKRVLSLDMGSLIAGAKFRGEFEERLKAVLKELTKQEGQIILFIDEIHTMVGAGKAEGSMDAGNMLKPALARGELHCVGATTLDEYRKHIEKDAALERRFQKVLVDEPSEEDTVAILRGLKERYEVHHGVEITDSAIIAAAKLSSRYIADRKLPDKAIDLVDEAGSQIRMEMDSKPEPLDRLERRLIQLKIEREALKKETDPASKKRLEELSSVIDGVEREYADLEEVWNAEKAALHGSQKIKSELEHARTELESARRAGDLGRMSELQYGRILSLSASWIWQAKPR

SEQ ID NO: 8246 - protein, 397 aa, Marinobacter sp. ELB17
MKFVDEATIIVEAGTGGHGCLSFRREKYVPRGGPDGGDGGDGGSVYLEANDALNTLIDYRFQRQHRAHNGEQGSGRNCTGTKGEDLVLPVPVGTTIVDMDTHEVLGDLTRIGQRQKVAQGGFHGLGNTRFKSSINRAPRQTSKGSEGETRNLRLELKVLADVGLLGMPNAGKSTFIRSVSAATPKVADYPFTTLVPNLGVVRVQNHQSFVIADIPGLIEGAAEGAGLGIRFLKHLVRTRLLLHLVDVAPYDGSSPAYAVKAIAHELEKFSETLANRDRWLVLNKVDMVPEDEREDRCQAIVDELEWKGPVFSISALSGEGTKPLTQAVMRWIEERAAEEAENPEAAEQEAVRRRQMDEEARARITEEKMARRAAREEDNDDDFDDDDGDVEVVYAPE

SEQ ID NO: 8247 - protein, 103 aa, Marinobacter sp. ELB17
MYAVIVSGGKQHRVKEGETLKLEKLEVETGSNIEFDRVLLIANGDDVKVGAPVVDGAKVTAEVVSHGRHDKIQIIKFRRRKHSMKRQGHRQWFTEVKITGIQG

SEQ ID NO: 8248 - protein, 1482 aa, Marinobacter sp. ELB17
MTTGLYQLGEFKDNCGFGLIAHTKGEASHQLLQTAIESLTCMTHRGGIAADGKTGDGCGLLLQSPDSFLRKVARAQFGKEPGDLFAVGQVFLSSEEGQAAAAKAVLERRLCEQGLEVMGWRDVPVDTSCLGPMALDCMPRIEQVFVLPAGKPESNFAISLFVGRRFAERDLADDSEFYICSLSHRTLAYKGLMMPADLANFYRDLDDPDLQTAICVFHQRFSTNTMPRWPLAQPFRYLAHNGEINTIDGNRNWAIARAAKFSSPRLPDLKTLQPLVNLTGSDSSSMDNMLELLLAGGVDLFRAARMMVPPAWQNVDTMDADLRAFYEYNSMHMEPWDGPAGLVLTDGRYALCMLDRNGLRPARWVHTKNDFLTVASEIGTYGYKPDDVVAKGRVGPGQMLAIDTETGEILHTRDIDQRLKTAQPYKRWLRENALRVESTLHQDAPDFELLGADELLIHQKMFNVSFEERDQILRPLGENGQEAVGSMGDDTPMAVLSSKVRHLADYFRQKFAQVTNPPIDPLREAIVMSLETCLGAERNVFEEAAEHADRVILNTPVLSPAKFQRMLVSDRPGFAVEAIALSYVPEEGLQQAIRRVCATAEQAVRDGKSQILLRDSVLQQGHLPVNALMATGAVHHHLVAQGLRCDSNIVVETGWARDPHHFAVLFGFGATAVYPYLAYQVLNDLIRTGEMLVDPIDAKNNYRKGINKGLLKILSKMGISTIASYRGAQLFEAIGLADEVADLCFKGVPCRIQGADFYDFQHDQEQLAKLAWKPRKPLSPGGILKYVHGQEYHAFNPDIVAKLQDAVTSGDYRQYQEYAGLVNHRPVATLRDLLGFREGIQPVDLAEVEPVEQIFTRFDSAGMSLGALSPEAHEALAVAMNTLGGRSNSGEGGEDPARYGNEKRSKIKQVASGRFGVTAEYLRSADVMQIKIAQGAKPGEGGQLPGGKVNALIARLRYSVPGVTLISPPPHHDIYSIEDLAQLIFDLKQVNPQALVSVKLVSEPGVGTIAAGVVKAYADLITVSGYDGGTAASPLTSIRYAGSPWELGLAETQQALRANDLRGRVRLQTDGGIKTGLDVVKAAILGAESFAFGTTPMVALGCKFLRICHLNNCATGVATQNEQLRDEHFKGTVGMAMNFFRFVAEETREWMARLGVRSLQELVGRTDLLVRLPGDTERQRKLDLNRLLNNDQIPADKPQTCQVPRNEPFDKGTLAEKMLSDVRSAIDNKSGGAWSYRVTNCDRSIGARLSGEIAALHGNQSMADAPITLDLTGTAGQSFGVWNVAGLNLILEGDANDYVGKGMTGGKLVLYPPRGSVFKARETAIIGNTCLYGATGGNLFAAGTAGERFAVRNSGAHSVVEGAGDHCCEYMTGGLVTVLGQTGHNFGAGMTGGFAYVLDQDNTFVDKYNHELVEIQRISSESMEAYRNHLRSIIRGHIAETASEWGQHLLANFDDYIGRFWLVKPKAANLRSLLANTRARPE

SEQ ID NO: 8249 - protein, 182 aa, Marinobacter sp. ELB17
MKRKAVFLDRDGVINVDHGYVYRPEDFEFIDGVFDTCRHFHQLGYLLIVVTNQSGIARGMYTEQDFQALSHWMQKRFAEEGAPIAHVYHCPHHPKFGTEAERGCQCRKPMPGMIQAAIADYDLDPEQCAMVGDKRGDMEAATAAGLGRKFLVTSGQSLSPADRNTADGVWQSLKEAHQAICD

SEQ ID NO: 8250 - protein, 530 aa, Marinobacter sp. ELB17
MSLSMASTTDNPRSTSSDSSPAGSADAHRFGDPVVLVLTIGFILLFVGWSLTDADSLAAVIDVGFAWTARYMGTFFQLLLLLTFFIAMGVAVSRAGAARLGGMEKPEFSTFRWLSMILCTLLAGGGVFFAAGEPVYHFVVTPPAFDTEAGTAQAVAPAMAQAFMHWGFLAWSVLGSLTAMVLAHAHYVQGKPLQPRTLLYPVFGERIMSSWLGGVVDAMCVIAVVAGTVGPIGFLATQMSFGLHELFGVADEFSTQLVILGLLAAVYMASAVSGIHRGIQLLSRFNVILALVIGAVIFAFGPTLFLVNTYVASMGEYLTSFFAMATMTSETAPEWWMKWWTVFFFAWFIGYTPLMSIFVARISRGRTIRQTILAVSILAPIATTIWFTLLGGSGVYYQLTGVFDLTEALNAFRFDQATLTVAKNLPGGVVMAAAVLLLTTIFVATTGDSMSYAIATVGAGHDEPHYAIRAFWGGAMAIMAAILLYMGAGQIGVLQQFIVLTAIPVSLIILPSLWTGPQAAFAMARAQKLI

SEQ ID NO: 8251 - protein, 409 aa, Marinobacter sp. ELB17
MSNTSLQKRKIRILLLEGVHQSALDSLHAAGYTNIESLSHSLAEDELIKKIADAHFVGLRSRTQLTEAVFEAAKKLVAVGCFCIGTNQVDLQAATRRGVAVFNAPFSNTRSVAELVLAQAILLLRGVPEKNAKAHRGEWIKSAKNSYEIRGKKLGIIGYGNIGTQFSVLAEGLGMEVYFYDVVSKLSIGNATQVGSMQELLNLCDVVSLHVPETAATKYMFKAEQLAQMKPGSILMNASRGTVVDIEALADSLRSGKLLGAAVDVFPVEPKSNSEEFVSPLREFDNVILTPHVGGSTIEAQENIGREVAEKLSMYSDNGTSVSSVNFPEVALPSHPNQHRLLHIHENVPGVMSEINQVFSANGINVCGQYLQTKDDIGYVVIDVDKAYGELALEKLLEVKGTIRCRVLF

SEQ ID NO: 8252 - protein, 395 aa, Marinobacter sp. ELB17
MNSSDQVVIVSGVRTPMGGFQGSLSSVPAPELGAVCIAEAVRRAGLQPSDVQEVIMGNVLPAGLRQGPARQAMRKAGLPDSTGATAINKLCGSGMKAAMLAHDLIKAGSNDIMVAGGMENMSSAPYLLLKARSGYRMGPGDAPQDHMFFDGLEDAETGRLMGAFAQEMADKKGYTREDMDNYAINSLKRAQRAIEQGLLKDEIVPVTVKTRKGDILVEHDEQPFNANLEKIPTLRPAFSKDGTITAANASSISDGASALVLMRESEAEKRGLKPLARVVAHSTQSQHPSEFTCAPVGALETLFAKTGWSKDDVDLYEINEAFAMVAMMPIQELGLDPDKVNVHGGACAQGHPVGSTGSRILVTLMYALQRYGKKKGVAALCIGGGEATAMAIEML

SEQ ID NO: 8253 - protein, 305 aa, Marinobacter sp. ELB17
MTDTTRPQDPDSRCGFVAIVGRPNVGKSTLMNHILGQKLSITSRKPQTTRHQVLGIKTIGPVQAVYVDTPGMHEEEPRAINRYMNKAATSALKGVDVVVFVLDQLAWTTADELVLEKLSSLKCPVILAINKVDKIEKRETLLPHLDMLSRKRDFAEMIPVSALRETNLVPLEECVGRFLPQSVHFYPDDQITDRSERFMASEMVREKITRQLGAELPYSVAVEIEEFKHDGKTLHVAAVILVEREGQKKIIIGDKGDRLRSIGQDARIDMERMFDNKVMLRLWVKVKRGWADSERALKSLGMNDF

SEQ ID NO: 8254 - protein, 408 aa, Marinobacter sp. ELB17
MVASANHESSQAKSRTVKYRKTKASWNPAMQAVPVPGIRRMVNLAATMKDVIHLSIGQPDLPTPKHIIDAYVDALHAGQTGYTMDAGLPELVIALRDYYSKRYNRKLTRDNILVTNGATEAMYLAIAATAAPGRQFLVTDPSFLLYAPLIRMNGGEVKYVPTHVENNHQLDPNDVIRAIGPRTYALILNNPNNPTGAVYPRSTVEAILEECAYRGVQVYADEVYDHFIFDDDKFASVLNCAVDLDNIMCISSFSKTYSMAGLRVGWVISSQAAIKSLRRYHMFTTSVANTPAQFAGVAALNGDQQCVTDMLNIYRERRDKIVDLIAQTPHLNGYKPGGAFFAFPDLPPHVDGTDLALRMLKETGVCVVPGDSFGEGCTNALRFSFSTTCEKLDAAFDRIIPWMAKQNL

SEQ ID NO: 8255 - protein, 295 aa, Marinobacter sp. ELB17
MAIISFIGLGNMGGPMASNLLKAGHQVTVFDLSADAVSALKAKGASSADTAHEAVKGAECVITMLPAGQHVEAVYLGAEGLLAALPEGTLVIDSSTIAPETAKKVAAQASEHKVRFLDAPVSGGVGGAKAGTLTFICGGSEVDYAAAQPILQDMGKNIFRAGEHGSGQVAKICNNMLLAILMAGTSEALALGVKNGLDPAVLSEIMKQSSGGNWALNVYNPWPGVMEAAPASRNYEGGFLVKLMTKDLGLAFDNAVKNQASIPMGSLARNLFSLHAGQGNADLDFSSIQRLYSPE

SEQ ID NO: 8256 - protein, 579 aa, Marinobacter sp. ELB17
MPEGSWHTYKRLLRYVKPFWIAFTLAIIGNVIYAAASTGMAAAMEYVIKAIENPTDQNRLILTLLIVGVFAFRGLGTFMSQYFISYVGRNVINALRTDVFDCMLTLPSRYFDDNAAGRLVSKLTFNVEQVAEAATDAITITLREGLTIVGLMGYMLYTNWKLTLVFLAVGPLIGAVVSYASKRFRKISKRIQGSMGDITHVASESISGYRVVRTFGGEDFERKRFQKVSESNLKQSLKMSSTQAISVPVIQVLVAIAIAALVWTMLSPTIRGEMSTGQLVAFITAATTMAKPIRQVTSVHSKIQKGLAAAYDVFETLDERPEPDSGIFAPQRVKGDIEFRDVGFSYRDQLDKVLNNISLTVPAGQSVALVGRSGSGKSTLVSLLPRFYDYTDGEIRIDGHLLEDFTLQALRAQIALVTQSVVLFNDTIAANIAYGALRDCSPEAIREAAGKAHALEFIDRMPEGLNTMIGDNGVMLSGGQRQRLAIARALLKDAPILILDEATSALDTESERYIQNAMETVMKGRTTLVIAHRLSTIENADRILVMDNGRIVESGRHQELLDQGGAYAQLHQMQFSEHA

SEQ ID NO: 8257 - protein, 404 aa, Marinobacter sp. ELB17
MQNYHKSTKLDNVCYDIRGVVLREARRLEEEGHRVLKLNIGNPASFELDVPEEIQQDVIYNMHLAQGYVESKGLFSARKAVMHYCQQRGIDKVDIDDIYLGNGVSELIVMSMQAMLNTGDEVLIPAPDYPLWTAAVALSSGKPVHYHCDEQQGWFPDIDDIRRKITKRTRAIVLINPNNPTGAVYSTEVLHQVIELARAHNLIILSDEIYDKILYDGVTHVSTASLADDVLFFTYNGLSKNYRAAGYRSGWMIISGAKHKATDLVEGIEMLSNMRLCANVPAQLAIQTALGGYQSINDLVIPGGRLFEQRQAAWELLNDIPGVSCVKPQGALYLFPKLDPKRYPIVNDEKLVLDLLIQEKILLVQGSAFNVKDRQHLRVVFLPRKDTLADAVGRLGRFLEQYKQ

SEQ ID NO: 8258 - protein, 631 aa, Marinobacter sp. ELB17
MCGLAGFLRTASTPDRDAHKGWLENMGQAIIHRGPDAGSTWLDDAVGLVHRRLSILDLSDAGTQPMVSASGRYVVAYNGEIYNFQELRDELISQGHSFRTRTDTEVLLALYEIHGPKCLQLLNGMFALAIWDRKAQKLFLARDRLGKKPLYFYEADGQFAFASELKALTPAPFVKTELRYDAIKDFFFYQYIPDPKTIYKNVHKLAPGHWLMTDGISTHQEQYWDVSFGAPSSASLGELEDGLFNLIDDAVRLRMVSDVPLGAFLSGGIDSSAVVGLMAGHTNKPVTTCAIGFDSKRFDEVHWAKKVAEQFKTDHHEFTVKDNVAESLSSIARFFDEPFADPSFVPTYFVSQLARQKVTVALAGDGGDENFAGYSKYYTDHVENRLRGMFPTALRHNLFPGLARLAGMVNSGPTRKAKSLLGTLALDPDEAFFVTNSFFRRDVWNSLVKGELKRETQDYDPADITRAHYRNADTDDHLSSILYTDIKTYLPGDILVKVDRMSMANSLETRAPLLDYRVVEYAAQIPAALKLHGKEKKYILKKAFERMLPEDILYRKKMGFSVPLAQWLRQELKPIVEQLLLSPNSGVANLFEPAGIRNLWQRHLAGDDQFTQELWSLLAFELWWQQYQVGA

SEQ ID NO: 8259 - protein, 410 aa, Marinobacter sp. ELB17
MALYVQKFGGTSVGTTERIEAVAEKVFSFRKAGHDIVVVVSAMSGETNRLIGLASNITDEPGQREMDVLLSTGEQVTIALLSMALQKLGCEARSYTGSQVRILTDRAHTKARIQHIDEQHVREDLNAGRVVVVAGFQGVDDLGDITTLGRGGSDTTAVALAAALKADECQIYTDVDGVYTTDPRVVDSARRLTHITFEEMLEMASLGSKVLQIRAVEFAGKYNVPLRVLSSFQEGEGTLITIEDDSTMEQPIVSGIAFNRDEAKLTISGVPDTPGSALRILKPISDANIEVDMIVQNVGEDDRTAFTFTVLRHDFKRAGDVLRSVAAELGAREVIGNEKIVKVSIVGVGMRSHAGVATKMFEALSNEGINIQMISTSEIKISVVIDEKYLELAVRALHSAFELDKPLVEA

SEQ ID NO: 8260 - protein, 555 aa, Marinobacter sp. ELB17
MYQYNQIDQTLVDERVEQFRDQTRRYLTGELPEDEFSALRLMNGLYIQRQAPMLRVAVPYGLLSSTQMRKLAHVARTYDRGYGHFTTRTNIQFNWPELAAVPDILAELAQVQMHAIQTSGNCIRNTTTDPYAGVAESELEDPRPYCEIIRQWSTLHPEFAYLPRKFKIAVTGATEDRAASQVHDIGLQMVQNADGEIGFEVLVGGGLGRTPIIGKSIRKFLPKQHLLSYLDAILRVYNLKGRRDNKYKARIKILVEALGPDEFRRLVEEEWAHIRDGELTLTDAEIARAKSFFTLPDYDANAASADAHASLSDSLATDIEFNAWYRHNTLAHRVDGYRIAIVSLKPYLEAPGDITDSQMDAVADLADRYSFGETRATHHQNLVLTDVRKGDLYAVWQALAANNLARSNIGTLTDMIVCPGFDFCSLANARTLNISDQINEHFDDMDHLYDLGEIRLNMSGCINACAHHHVADIGILGVDKKGEDWYQISLGGSSKEDARLGKILGRSVPASDVAITVEKILAVYVDQRGEDESFAQVVQRVGIKPFKERVYATAH

SEQ ID NO: 8261 - protein, 397 aa, Marinobacter sp. ELB17
MTDTANDNFVVIAGAARTPMGGMMGSLSSVPSPQLGAVAIKAAIERSGLKPADIDEVIMGCVLPAGLGQAPARQASRGAGIPDSSGCTTVNKMCGSGMQAVIIAHDQIKAGTNNIMIAGGMENMSQAPYILPKARGGMRMGHGQVMDSMFLDGLEDAYEGGLMGVFAQKSADDYKITREQMDNFAIESLNRANAAIDNGWFAPEICAVSIAGRGGDTVVDTDEQPGNARPDKIPTLKPAFKKDGSVTAANASSISDGASALVLASAKEAKARGLHPQAKIIAHSTHAQLPAEFTLAPIGAIDKVLKKAGWGKDDVDLYEINEAFAVVSLLAINELGLDANKINVFGGACALGHPIGSSGSRILVTLINALKQKGLKRGVAALCIGGGEATAVAIELI

SEQ ID NO: 8262 - protein, 581 aa, Marinobacter sp. ELB17
MNGAQHILKAFQQHGITTVFGYPGGCIMPLYDALVGDVSVEHVLCRHEQGCALAADGYARASGNLGVCIATSGPGATNLITGVANAFQDSVPLLVITGQVPAALIGTDAFQETDVLGMTLGIVKHSYLVDDADSLPGILIEAIALAQSGRPGPVWIDIPKDILLTQVNPQAADQQEREGCESAEPRTDSATHNGAIDKDINELMRLLRAARKPLLYSGGGITLASAEDSFREFAEQSALPGVVTLKGIGNPGRHNPNHLGMLGMHGCRAANRAVDECDLLLVFGARLDDRATGKPETFAPNAKIIHIDADSAEFHKIKAAVLTISADLNDVLRTLTLGVKAQPLNIEAWQKQCRTWLTTGGFQAADNEEALAPITGPAFVRQLSRIAGDDTIISCDVGQHQMWVAQHYQFNHPRQHLTSGGLGTMGFGLPAAIGAQFAKPGTAVINVAGDGSFMMNAQELATIRRYRLPLKIIILDNQCLGMVRQQQELFYDNRESHINLDDNPDFVAMARAFNIPALHINRTDQVRRGIETILAYKGPMLLHVAIAREENVWPTVRPGGSNRDMMENTKPAKKKTEENAA

SEQ ID NO: 8263 - protein, 556 aa, Marinobacter sp. ELB17
MSAEPKKAHNFIQSLIEDAVAKGAHTATVVTRFPPEPNGYLHVGHAKAICLNFGIANTFGGECNLRFDDTNPEKESQEYINAIKADVEWLGYQWQGKVHFASDYFDALYNFAEELIERGNAYVCALSADEMADYRGSLKEPGRNSPYRERAVEENLKLFRQMRDGNFQNGEMVLRAKIDMTSPNINMRDPILYRIRYAEHHQTGNKWCIYPMYDYTHPISDALEGVTHSLCTLEFEDHRPLYDWVLDNISVPCHPRQIEFARLNLNYTITSKRKLRRLVDERIVDGWDDPRMPTISGLRRRGYTPESLRTFCDMIGVNKAGGTVDVGMLEFAIREDLNIRSPRAMCVMRPLKVTLTNYPADKTETLVLPVHPQNPDMGSREVTWSQTLFIDREDFALEAPRKWKRLAPDQAVRLRGGYVMTCREIIRDQSGEIVELKCEYDENTLGVNPEGYKPNGVIHWVSATNSVECDINVYDRLFNAETPDSDKEGDMLDHLNPQSLVVLKGARAERNLASPASDLPYQFEREGYFFFDQKLTENAGKPVFNRTVTLRDSWGK

SEQ ID NO: 8264 - protein, 186 aa, Marinobacter sp. ELB17
MLIILDRDGVINQYEGGYICSPDDWHPIPGSIKAIARLCSAGHRIAIATNQSGIARGYYDRDTLDAMHRKLGRLLRIAGGHIDFIAYCPHHPDEHCACRKPEPGLLQQIQRHFNLKTLAGSVMVGDSRKDLEAAAKKGCQPILVRTGNGLDTEQELQTRPLAESAQVLVYNNLRSFTDAFLSGRDW

SEQ ID NO: 8265 - protein, 578 aa, Marinobacter sp. ELB17
MKLVVGFIHPYRKAVAGAIVALVITAGITLGLGQGLRILVDQGLATESPANLARAVGLFFVLVIGLAAGSFARFYLVSWIGERVVADIRKRVFNHLIDLNPGFFESNRALEIQSRFTADTTVLQSVIGSTVSIALRNALMLVGGLLLLFITNAKLASVIVLGFPLVIVPIVIFGRRVRQLSRLSQDRVADVGSYVGENLTQIKTVQAFNHQPHDRQHFSEVSENAFDIAHARIRQRAWLTTMAITLVMGAVGVVIWIGGLDVIYGRITPGELAAFVFYSLLVGVAAGAISEVIGELQRAAGSAARLFELLQTQSEFQRPIDLPEQFPQPVKGEIRLEHLTFSYPGRSAQPALHNVCLEVRAGETLAIVGPSGAGKSTLFDLLLHFYQPSGGCVRIDGTDTRDVSLQALRSCFALVPQNPALFYGTVADNIRYARPQATQADVEEAAGIAHAHEFIVALPDGYQTRLGDGGLGLSGGQKQRLAIARALLADAPILLLDEATSALDAHSENLVQQAMPALTTGRTTLVIAHRLATVRNADRIAVFDQGRLLAVGSHQQLMQENSLYQRLAQLQFRSQTGE

SEQ ID NO: 8266 - protein, 553 aa, Marinobacter sp. ELB17
MAKSLFIAPTSTDSGLTSVCLGLLRALEQVGVSVGFYKPFCQVVHQADATHNKGKDSSVEFVRSHSHLKPPTPITLKEAQHALNHNKSDLLLERVVGEYQKVACTVDVVIIEGLEPDQDGTYITRLNAEVARNLGSEIILLTSPKGCNPIELDEQLGFSARLFSGQNEADVLGVILNKIGAPKERKIPGMTTLTAIPPEDYRNKCNVFSSGQYRLLAEIPWEPSLLAPRVSDIARELKVDVLHEGQMQTRRVHRVSVCARTISNMTEILKSGTLLVTPGDREDIVVAAAVAALNGVPMAGILLTGGLLPDQRVIELCRRAMETGMPVLSTTTNTYETAHMLAGLSRSIPIDDPERIDTAMNLIAPRIDTDWLQEHLKVPRQTRMSPPAFRHQLSERARAANKRIVLPEGHEPRTVQAAIICHQRQLARCALIGSAAEIRAVAASLGMELPPDLEIIEPSEVRKRYVAPMVELRKHKGTSAEMAESMLEDNVVLGTMMVALDEADGLVSGAIHTTANTVRPALQLIKTHNNAKVVSSVFFMLLPQQLWFTETAP

SEQ ID NO: 8267 - protein, 395 aa, Marinobacter sp. ELB17
MENTLLVVNCGSSSLKIALFDKDRQKIASMLAGRLNTPNARFRIGKQRDVTRLPPNTTHKEALAVLMDTAQKKGLMPKQPAAIGHRIVHGGETFREAVLIDDEVLVAIKACNLLAPLHNPVNVEGIMATRELFPLVPQVAVFDTAFHQTLPEHAFHYALPQNYYRDWGVRRYGFHGTSHAYMLQQAALRLEQSTAETSIISAHLGNGCSITAIRDGKSVDTSMGLTPLEGLVMGTRSGDVDPGLFDYLQSKGVSAEQLHNELNHSSGLLGLSGQTNDMRTLSDLADQGDPSAQLAIDVFCFRLAKYVAAMMVSLNRLDALVFTGGIGQNSARVRQQTVNQLGLLGFAIDQQNNDDNGLNRDGRIDCKESRFPILVIATDEERVIAGEAARLAELN

SEQ ID NO: 8268 - protein, 391 aa, Marinobacter sp. ELB17
MSLNPRDVVVIDCVRTPMGRAKNGCFRNVRAETLSATLIDALFERNPKLDPKEVEDVIWGCVNQTREQGFNVARHISLLTKVPHEAGAQTVNRLCGSAMSAIHTAAQAIMTGNGDMFVVGGVEHMGHIGMTDGFDHNPAASKYTAKASNMMGLTAEMLAKMHGITRQQQDEFGARSHRLAQEATDEGRFKNEIVPIEGHDENGFKVLIEHDETIRPETTVESLGQLRPAFDPKNGTVTAGTSSQLTDGAAAMVLMSAERAQALGLKPIARIVSMAVAGVDPAIMGYGPVPATKKALKRAGLKIEDIDFWELNEAFSGQSLPVLKDLKLMGVVDQKVNLNGGAIALGHPLGCSGARISTTLLNIMQANGGKYGVSTMCIGLGQGISTVWERL

SEQ ID NO: 8269 - protein, 290 aa, Marinobacter sp. ELB17
MTTVSFIGLGVMGYPMAGHLAAAGYDVQVWNRTNSKSQQWAKDYNGKACASIAEAVQGSTIVLTCVGNDDDLLAVYQGDAGILANATQGTLLIDHTTASATAAERLAELAAQRQLGFMDAPVSGGQQGAEKGLLTIMCGGSSSDFTTAEPVLSTYAKALNLMGPAGAGQKTKMVNQIAIAGLVQGLSEALHFAEQAGLDASKVVEVISKGAAQSWQMENRSGTMIAGEFEHGFAVNWMRKDLAICLEEARKNGARLPVAALVDQFYGDVQQMGGERWDTSSLITRLRLKK

SEQ ID NO: 8270 - protein, 254 aa, Marinobacter sp. ELB17
MLNIKNLHASVGGEEILKGINLEIKAGEIHAIMGPNGSGKSTLSQVLAGSETFEVTEGEVTFNGENLLDLKTEERAREGVFLAFQYPVEIPGVSNLQFLRTAVNSMRGHRGEPEMNAAEFMKHAREVSMQVDLDPAFLKRGVNEGFSGGEKKRNEILQALLLQPKLAILDETDSGLDIDALHVVSDGVNALRAKDRAILMVTHYQRLLNHIVPDYVHVLADGKIVKSGGRELAYELEERGYGWLNVKDKEATAS

SEQ ID NO: 8271 - protein, 105 aa, Marinobacter sp. ELB17
MNVQEKILSQVTADTIVLYMKGKPQSPLCGFSATTVQVLNACGVQDFAAVDVLADPEIRDGIKVYSNWPTIPQLYIKGEFVGGADIVREMYEQGELQKLLQSALA

SEQ ID NO: 8272 - protein, 69 aa, Marinobacter sp. ELB17
MSETTTGHVKWFNEAKGFGFIAQEDGSDVFVHFSAINADGFRTLAEGQKVQFTVTDGPKGPQAENVTPV

SEQ ID NO: 8273 - protein, 395 aa, Marinobacter sp. ELB17
MKKPVYLDYAAATPADFAVAEEMMRYLTLDGVFGNPASRTHGYGWQAEAAVETARRQVATLINADPREIVWTSGATESDNLAIKGAVAGHNAPHIITSMIEHKAVLDTCGWLQEQGVKVTWLKPDACGRIHVGQVVEALTPETVLVSLMLVNNELGSISDIAAIGAQLRGRGVLFHVDAAQAPGKIPVDVKALNADLLSLSAHKVYGPKGIGALYVRRSPDVRIQAQIHGGGHERGMRSGTLPAHQIVGMGKAFELAADSLSADSARLEQLRGRFLGALAELEGVSLNGSLNTGLNGSESNDDAKLRVPGIINLSFAGVDAETLMLGLRELAVSSGSACSSATLDPSYVLRGIGLDDKQAHCALRFSFGRYTSGEEVDFAAAQIIDVVGRLRSAR

SEQ ID NO: 8274 - protein, 231 aa, Marinobacter sp. ELB17
PDVLTETTADTGFALIMSTARRVVELAELVKLGNWVEHIDKPLYGLDVHSKVLGIIGMGRIGAAVARRGALGFGMRVLYSNSSPKPALEKELGALRCDTDELLAQSDFVCITVPLTAETHHMIGADAFLRMKSSSILINIARGKVVDEAALIAALNEGQIGGAGLDVFEEEPVSAESPLLQMPNVVALPHIGSATHETRAAMAKLAVENLILALQGKSPRNAVNEQVLLAK

SEQ ID NO: 8275 - protein, 326 aa, Marinobacter sp. ELB17
MTDPVPKDFRESALNTIRIERDAITSLEQRIGESFTSACQTIMACRGRVVVTGMGKSGHIGNKIAATLASTGTPAFFVHPGEASHGDLGMITSQDVVIAISNSGNTNEVVTLLPLLKRMGTPLISMTGDPQSLLAQEALANLDVSVLKEACPLGLAPTSSTTATLVMGDALAVALLEARGFSAEDFAFSHPGGRLGRRLLLRVLDIMHSGHSVPIVSEGTTLSGALLEISRKGLGMTTVVDSNGALIGVFTDGDLRRSLDKNVDVHTTAIEQLMTRNGKTIRADQLAVEALNIMEEMKISALPVVGEHGELVGALNMHDLLRAGVI

SEQ ID NO: 8276 - protein, 450 aa, Marinobacter sp. ELB17
MTKDQDRTSRYDEGSLTLPGTVMLGTGVMIGAGIFALTGQMAQMAGALFPLAFLAAAIVISFSSYSYIKISNAYPSAGGIGMYLHKAYGDRLSTGFNALLMYFSMVIAQSFLARTFGSYTMQLFGGDEGGRMVPILGVSLILTAFVINLLGNRWIQGVVSFIGILKITGILVFGLVGVWLADSLAVDFPSSGETGVVGNFVGATALGILAFKGFTTITNSGAEVKDPKRNVGRAIVISIAACVVIYTLVGFAVASNLSLAEIIETRDYSLAAAARPALGDYGLWFTVAIAMMATAGGILASIFAVSRMLAMLTEMKLVPHSHFGMPGSIQKHTLVYTVVLGLVLTAFFDLSRIAALGIIFYLIMDISIHWGVLRYLYQDVKAKRWVPAVAIVLDLVVLGGFVWVKLNSDPFVIGVAVVTMIVIAVAEQIFLKSSARRKAMNSDEANAHHH

SEQ ID NO: 8277 - protein, 593 aa, Marinobacter sp. ELB17
MIRFRAPVLPSIIKFQQLTNPDSKFMDIKRIVLFAGLAVVSYLMVLAWNEDYHQPVPVAQTSEPVDFSAAGNNDTMTLPEAGDANTDSTGEFATPESETSLSNTNNVNNVSNQYVHVITDVFDITIDQVSGNLVSSSLLQYDRELNGDEPLKLLSNTQNRLYVLESGLIGRDGPDNSRNGDAPVYSSTQNSYQMAEGENQLAVDLNYTTNSGVNIIKRFTFNRDDYQIDIRYLIDNRSENEWQANFTGKIVRDQAGDQTSQNSMGIKAFLGLVVSTPEDPYEKYDFDDLKDKPINQSVTNGWMAFLQHYFLTAWVPEPDQQAQFQTTRRGPLAVMGFVYPATNVPVGETVEVGASAYVGPKIIDRLETVAPNLDRTVDFGWLFFISLPLFVVLNWFHGIIGNWGVSIILLTVLVKGLFFHLSATSYRSMARMRAVAPKLARMKELYGDDRQRMSTEMMALYKREKINPLGGCLPILVQMPVFISLYWVLFESVQLRHAPFALWIHDLSVMDPYFILPIIMGASMMLQMHLNPTPPDPMQAKIMKLMPVVFTIFFLWFPAGLVLYWVVNNVLSISQQWYITRKIEAQMAEKKHS

SEQ ID NO: 8278 - protein, 394 aa, Marinobacter sp. ELB17
MDLQLSSRVQSIKPSPTLAVTNKAAELRAAGQDIIGLGAGEPDFDTPDHIKAAAIEAIHNGQTKYTAVDGTPALKKAIIAKFKRDNGLDYEANQILVSSGGKQSFFNLALAVLNAGDEAIIPAPYWVSYPDMVLVAEGKPVILESTAETRFKITPQQLEDAITDRTRLFVINSPSNPSGMAYTLEELQALGQVLKKYPQVMIATDDMYEPILWTGKPFCNILNATPELYDRTFVLNGVSKAYAMTGWRIGYAAGPAKVIGAMKKIQSQSTSNPASISQAAAQAALDGSQDCVQTMVTAFHERHDYLVEALNTLPGVECLKGDGTFYVFPSFQGAIDADSSVSNDVEFAEKLLKEAGVALVPGSAFGMPGHMRLSFATSQKILTNAIERLKKALG

SEQ ID NO: 8279 - protein, 423 aa, Marinobacter sp. ELB17
MATSNVRHALFCAIVTIVISYPILGLNLEAEGVNIVLTGTDATTIVAIACAALIVFLFQLFRDSVMGKLGAVSDLNPLTGRKPMEQDKRAKLESWVLTGLVVVALFWPFFSSRGAVDLATLVLIYVILALGLNVVVGLAGLLDLGYVAFYAVGAYTFALLSQYYGVSFWMALPLGALLAGLFGLLLGFPVLRLRGDYLAIVTLGFGEIIRILLNNWTNVTGGPNGIGGIPDPTLFGMEFGRRVKGEGNTSFHETFGIAYSGEHKVIFLYLIALVLAIITALIIRRLMKMPVGRAWEALREDEIAARSLGLSRTAVKLSAFTIGAFFAGFAGTIFASKQGFISPESFVFLESAIVLAIVVLGGMGSQIGVILAAIAVTILPELAREFSEYRMLIFGATMVLMMIWRPQGLVPMRRLHITLKTQE

SEQ ID NO: 8280 - protein, 194 aa, Marinobacter sp. ELB17
MKHLLHSRLAGYRPNELALDYPEAGILVPITDNSGNPEMLFTLRSAHLKTHRGQVAYPGGRRDPEDENLMVTALRETHEEIGLPPDQVQIVSSLSQVASHARILVTPYVGVVPEDHPLRPNPAEIESVFRVPIAWLLEDRRERTDALPFTGGTIYVPCYRWEKYQIWGLSAVVLVDFMNAVYDAGIDLERPPSR

SEQ ID NO: 8281 - protein, 261 aa, Prochlorococcus marinus str. MIT 9301
MQSKMNESDPILEVKNLSASTDNLPILKGVSLTVYPGEIHAIMGRNGCGKSTLSKIIAGHPSYNITNGDIKFLGENINSLEPEARSQSGIFLGFQYPIEIPGVSNLEFLRVSTNARRKFLNKEELDTFDFEELVKEKLEIVKMDQAFLSRSVNQGFSGGEKKRNEILQMALLEPKIAILDETDSGLDIDALRIVASGIKKISNAQTGIILITHYQRLLDEIKPNYVHVMSDGQIIKTGESDLALELEKKGYEWTDNFIKET

SEQ ID NO: 8282 - protein, 381 aa, Prochlorococcus marinus str. MIT 9301
MLSTPILLDYQSSTPCSKDVVDSMKPFWSEIFSNPANKSNLAGINASAILEASREKIEQSLFLKNKKVIFTSGATESNNLALLGFARNFYKKTGNYGHIITLKTEHKAVLEPLNQLKKEGFMVTEINPEKDGLISEEQFKKNIREDTFLVSVMLANNEIGVIQPLENISKICKSRGITLHSDFAQCLGYIELDNLLSDVNMITISSHKIYGPKGIGLLLIDEEINLEPLIVGGGQEYGLRSGTLPLPLVVGFAKAIEIAVLNQKNNAEKLLFYRNNLLEGLLKNNSGLIINGSIEKRLPHNLNLTVLDLNGAKFHKLLKSKIICSTGSACSSGQPSHVLLALGRSLKEAESSIRLSIGLSTNSKDIKQAIHILTNTIRSLR

SEQ ID NO: 8283 - protein, 327 aa, Prochlorococcus marinus str. MIT 9301
MQFIDQANIILKAGKGGNGIVSFRREKFVPAGGPSGGNGGRGGSVILMADNNLQTLLDFKFKREIIAEDGCKGGPNKRSGASGQDTILKVPCGTEIRDIKTGIILGDLTKDKQSLTIAIGGRGGHGNAYYLSNQNRAPESFTEGKDGEIWEVQLELKLLAEVGIIGLPNAGKSTLISVVSSARPKIANYPFTTLIPNLGVVRKMDGNGCLFADIPGLISGAADGVGLGHDFLRHIQRTKILVHLIDAIAENPLHDFEIIEQELKKYGKGLLDKERIIVLNKMELVDDDYLQIITKKLEDLSKKKVLVISSSLKKGLSSLLSEVWKRI

SEQ ID NO: 8284 - protein, 391 aa, Prochlorococcus marinus str. MIT 9301
MELQQKTKTDPNGLIPPYGGELKNLIIKDNSFKNDLISKATYEFECSERNACDVELLMVGAFSPLEGFMDENNYKSVIENNRDTSGLLFGLPIVFDSNNDEVKAGETILLTYKNQKIAILEVSSIWEPDKSLEAEFCYGTNSLDHPAVKMIFNERGRFYIGGKVYGFELPVREFPCKTPEEVRSSLPSNYDVVAFQCRNPIHRAHYELFTNALLSDNVSSNSVVLVHPTCGPTQQDDIPGKVRYLTYKELEEEISDERIKWAFLPYSMHMAGPREALQHMIIRRNYGCTHFIIGRDMAGCKSSSTGEDFYGPYDAQNFANKCADELMMQTVPSKNLVYTKEKGYITAEEAKEFNYEIMKLSGTEFRKKLRNGEPIPEWFAFKSVVDVLRRS

SEQ ID NO: 8285 - protein, 244 aa, Prochlorococcus marinus str. MIT 9301
MIPASRGFNRFSSQQSGQSKINSVGERFPINRTLMEVIKGLDGANTEMVERSKTIFFPGDPAEKVYLIRRGAVRLSRVYESGEEITVALLRENSLFGVLSLLTGHRSDRFYHAIAFTRVEMITAPANSVLRAIEEDASVGLLLLQGLSSRILQTETMIETLTHRDMSSRLVSFLMVLCRDFGVAGEKGITIDLRLSHQAIAEAIGSTRVTITRLLGDLKDSGLLNIERKKITVFDPIALAKRFN

SEQ ID NO: 8286 - protein, 486 aa, Prochlorococcus marinus str. MIT 9301
MTTALQTPQRRSRSKLQDASLVNGPMLLLRSIRGFSSNRSMLWLATVPLALFGLGIFNLSAHAADLPELNAAFLANNLWLLIATILVIFMNAGFAMVEAGMCRSKNAVNILAKNLFVFALAVTSYWFIGYSLMYGGSVADGWLYFGGLFFDPTVTADMVTDAGLVPTVDFLFQSAFAGTAATIVSGLVAERVKFGEFVVFAVVLTAFIYPIAGSWKWNGGWLDSLGFVDFAGSSIVHSVGAWAGLVGAMLLGPRIGKYSDGKPQAMPGHNMAIATLGALVLWIGWYGFNPGSQLAMDQWVPYVAVTTTLAAAAGAIGATIVSTLTSGKPDLTMIINGILAGLVSITAGCGDMTLAGAWFAGLVGGIIVVFSVAALDAAEIDDPVGAFSVHGVCGVWGTVVIGLWGTAVQGDGAGMGLFNGGGITLLLVQALGAAAYAIWTLVTCWIAWSVIGGLFGGIRVSEEEETQGLDIGEHGMEAYPDFASAK

SEQ ID NO: 8287 - protein, 587 aa, Prochlorococcus marinus str. MIT 9301
MTLTSRSFSQGSSKHENPVWITGADALMDSLKIHGVKVIFGYPGGAILPIYDAVHKAEQDGWLKHYMVRHEQGGSHAADGYARSTGEVGVCFGTSGPGATNLVTGIATAQMDSVPLVVVTGQVPRPAIGTDAFQETDIFGITLPIVKHSWVIRDPSDIAKVVSEAFFIASSGRPGPVLIDIPKDVGQEFFNYQRVLPGEIIPKGFKRNGEINDCDINKAIKLIEDSKRPLLYVGGGAISSGAHDEIKTLAKNYQIPVTTTLMGKGAFDEKDNLSVGMLGMHGTAYANFAVTECDLLIAIGARFDDRVTGKLDTFAPNAKVIHIDIDPAEVNKNRRVDVAIVADVSKAVLKINEQSLKNKFTCQTKNWLEKIDFWKHKHPLYDPPKEGEIYPQEVLLKVRELLPEAYITTDVGQHQMWAAQYLRNSPRKWISSAGLGTMGFGLPAAIGVKAALPNSDVICIAGDASVLMNIQELGTLSQYGLKVKLIIINNRWQGMVRQWQESFYDERYSSSDMSCGEPDFVKLAESFGVKGYLISDRKELQNDLKNAFDHDGPALINILVRRGENCYPMVPPGKSNAQMVGYVNCED

SEQ ID NO: 8288 - protein, 860 aa, Prochlorococcus marinus str. MIT 9301
MKIVPSEFSNSAWNYFIFAKEIAYKNYQQNVDSDNLLLTLIKEDNITKNILIKNNINLKNLEREIISSLNAKAKMKNKQDNLYIGDTLHKIFLKANDIKNKLNDVVISTEYLVYGFAYDNKYGFQILNQKGILEFLEIIKKMKSDPAVKNEFNSSNESLEKYGIDLTQSARDGILDPVIGRDEEIRRTIQILSRRTKNNPVLIGEPGVGKTAIVEGLAQRIINGDVPSALQDRQLISLDMGSLIAGAKYRGEFEERIKNILKKVKESDGKIILFIDEIHTVVGAGASGGSLDASNLLKPMLARGELRCIGATTINEHKQNIEKDPALERRFQKIKIDAPSIEDTVSILRGLRERYEVHHSVRISDNALVAAATLSERYINDRFLPDKAIDLIDEAASRLNMVITSKPEEIDEIDRKVLQFEMEKLSLKREIDDFSVERLEKINHELLSLKDKQAELGAKWKKEKDEIDEISTIKEEIESVQLQIDQAKRSFDLNKAAELEFGTLNSLQKKLKEKSESLVNSQKNGDTSLLRQEVTFDDIAEVVSKWTSIPVQNLNQSEKDKLLSLESILKEKIIGQDCAIRAVADSIKRSRTGLNDPSKPLASFLFLGPTGVGKTELSKVTAKIIFDSNSSITRLDMSEYMEKHSVSKIIGAPPGYLGFESGGQLTEAVRKNPYSLILLDEIEKAHKDILDILLQVLDDGIITDGQGRTINFKNSIIVLTSNLGSQSINDLSVRKEDKNEIKKVVDNEIKKFFKPEFLNRLDEIVIFNNLELSDIKEIAKIQLQHLEKRLNKKNLKFKITDEAINQLVENSFDHAYGARPLKRIIQKQIETKISNNILNNHYLNKDEINIYLVNGEINVD

SEQ ID NO: 8289 - protein, 392 aa, Prochlorococcus marinus str. MIT 9301
MSQVNLSDRALSIEPSLTLQISAKANQLSAEGVDICNLSAGEPDFDAPKEVIEATSKAIFDGFTKYGPAAGNLDLRKAIANKLQIQNDLNYEFENVMVTNGAKQAIYNLFQVLLNTGDEVIIPSPYWLSYPQMVRLAGGKPIFTNSSAEDGFKINIEDLKSKISSKTKFIIINSPNNPTGRVMSKEELLQIADLARENPNINILSDEIYELILKKEFKHYSLSSLANDLKNRIFIINGFAKGWAMTGWRIGYLVGPKDVIKASSALQSQSTSNVCSFVQKGALEALKINNEFFSMINSHYDQRRRILYEGLNNINGIYIEEPNGAFYAFPKLPNSSITSVDFCNKALQDYGLVVVPGKAFGADQCIRISCAASEIKIKDGLQRIEKAISEYY

SEQ ID NO: 8290 - protein, 637 aa, Prochlorococcus marinus str. MIT 9301
MNQKFKTLILWALPILLVIALSYQFLSSSNVDALKSNGTTVAPRNSAVARVSYGRFLDYINSGRVTSVDIFEGGRNAVIETIDSDLDNKVQRLRVDLPGLTPELINILKNEGISFDVHPVKTAPPALGILGNLLFPAILIGGLILLARRSNGMPGGPGQAMQFGKTKARFAMEAETGVVFDDVAGVNEAKQDLQEVVTFLKKPEKFTSVGARIPKGVLLVGPPGTGKTLLAKAIAGEAGVPFFSLSGSEFVEMFVGVGASRVRDLFKKAKENSPCLIFIDEIDAVGRQRGAGIGGGNDEREQTLNQLLTEMDGFEGNSGIIIIAATNRPDVLDSALMRPGRFDRQVTVDAPDIKGRLSILEVHARNKKLDGDLTLESIARRTPGFTGADLANLLNEAAILTARRRKDSISISEIDDSVDRIVAGMEGSPLTDGRSKRLIAYHEVGHALIGSLVKAHDPVQKVTVIPRGQAKGLTWFTPDDEQTLVSRAQLKARIMGALGGRAAEDVVFGKGEITTGAGGDFQQVASMARQMVTRFGMSNLGPIALESGNQEVFVGRDLMTRSEVSDSISKQIDESVRVMVKECYKETYDIVNKNREAMDKIVDLLIEKETLDGEEFVNILSKFTKIPKKERTPQLLT

SEQ ID NO: 8291 - protein, 390 aa, Prochlorococcus marinus str. MIT 9301
MENNFIYLDNASTTPLSENVLNIINSTYRDYWHNPSSTYELGIKCSTYLEKIRSKIACIFEADPEDIIFTSGSSESTYIVFDNIYEKFKNGRVVISNVEHQATTICANKLRKQNWDIYEWTVNNDGILNISNIEKFLNNNTKLVSIIWGQSEIGTIQPVQFIGSKCEELNIMFHLDGTQILSNGIFSWKDLKCDFLSLSAHKFGGPKGIGILLTKEKSRQILKNNDISLTQEFSIRQGTQALPLIAGMYESLKNIEGKIKLYDYITEFPSNNINKLKNYFFQKIKDNNHIKITGSINHRLPSHISFLLLNKIFEPIRAYKIVNFMSENKIAISSGSACSSSSGKPSSTLKNIGLKDDELYSNIRVTLGSINNKSEIDKFLELIQICIDKF

SEQ ID NO: 8292 - protein, 321 aa, Prochlorococcus marinus str. MIT 9301
MEPKKAIVSETEAPKTEAPKVVKKKHADVPVNIYRPKTPYEGTVIENYSLLKEGAIGRVNHITFDLKDSDPFLNYVEGQSIGIMPAGEDANGKPHKLRLYSIASTRHGDDFNGNTVSLCVRQLQYEKDGETINGVCSTYLCDIKPGDKVKITGPVGKEMLLPEEEDANIVMLATGTGIAPMRAYLRRMFEPTEKEKNKWNFKGKAWLFMGAPKSANLLYEEDLQRYLSDYPDNFKYTKAISREQQNTKGGRMYIQDRVLESANELFNMIEDEKTHIYLCGLKGMEPGIDEAMTKAAEEKGLNWSELRPQLKKAGRWHVETY

SEQ ID NO: 8293 - protein, 331 aa, Prochlorococcus marinus str. MIT 9301
MTSFITAMQSKESNFNLTNSRLRLVSGTTNPKLAEEIASYLGIENVPLISKRFADGELYVQIQQSIRGCDVFLIQPTCAPVNDSLMELMIMVDACKRASARQITAVIPYFGYARADRKTSGRESITAKLTANLLEKSGVDRVLAMDLHSAQIQGYFDIPCDHIYGSPVLIDYLETLDLEEIVVVSPDVGGVARARAFAKLMKDAPLAIIDKRRSAHNIAESLTVIGEVKGKTAILIDDMIDTGGTICSGANLLKQEGANRIFACASHAVFSPPSYERLSAKNLFEQVIVTNSIPVLHKDNFPQLKVLSVANMLGEAIWRIHEESSVSSMFR

SEQ ID NO: 8294 - protein, 465 aa, Prochlorococcus marinus str. MIT 9301
MSISSFLTKKFLKSLFFPAHNRGAALPKKLVRLLKNPPGYWDLPELPEIGSPLSQSGLIAKSQREFSDKFGAKGCFFGVNGASGLIQSAVIAMANPGENILMPRNVHISVIKICAMQNINPIFFDLEFSTRTGHYKPITKIWLENVFKKLNFDENKIAGVILVNPSYQGYAGDLEPLIDCCHQKNLPVLVDEAHGSYFLFCENLNLPKPALSSNADLVVNSLHKSLNGLTQTAILWYKGNLINEGNLIKSINLLQTTSPSSLLLSSCEESIRDWLNKKTLSKYQKRILEAKSIYKKLIQKNIPLIETQDPLKIVVNTSKAGIDGFTADKFFYRNGLIAELPEMMTLTFCLGFGNQKDFLNLFEKLWKKLLLNSRKSKSLEVIKSPFKLVQAPEIEIGIAWRSKTRSIPFSQSLNKISGDIICPYPPGIPLLVPGEKVDIDRFNWINNQSLCNKDLVNFNIKVLET

SEQ ID NO: 8295 - protein, 363 aa, Prochlorococcus marinus str. MIT 9301
MQSISPETIYRGNSAWEKSLPQITKLTKRPLILGRGFQTNNLRNNIFNDLKSQKLTVNSANLQFDCCYEDISRVKNIISNNNNDSVIAAGGGKVLDSGKYIAESLNIPCITVPLSASTCAGWTALSNIYTKDGQFIKDVALGSCPKILVFDHKFIQTAPSRTLASGIADALAKWYESSITSSKIDDGLVQQAIQISRVLRDQLLIDGGKAFKGQFENNISWQNTVEACGLTAGLVGGIGGEKCRTAAAHAFHNAITQIITPNKFLHGEIVGVGLLLQLRLEEMKNNNKLADQSIKQLFVLMEELNLPTTIGQLGINVFENNNLEKIADFTCRDKSEIHFLPFEISKGEIIEVITNFEKQKIKT

SEQ ID NO: 8296 - protein, 593 aa, Prochlorococcus marinus str. MIT 9301
MAFKKDSNSLGSEQENSQNDDSSLLEFKNLDNKKEIESQLLEVSKGEDNDNGFLEFGFNQSILNSLINKGYKNPTPIQKAAIPELMLGRDLLGQAQTGTGKTAAFALPLIEKLTDNKELNAKVLVMTPTRELATQVAESFKSYSSESSNFKTVAIYGGTDYRNQISALKRKVDVVVGTPGRIMDHIRQGTFKIKDINCLVLDEADEMLNMGFLEDIEWIIDQLPENKQMVLFSATMPNEIRNIAKKYLNDPAEILIKSVKKETQLISQKFLYVQRHHKLDALKRILELNNEGVIIFVRTKLLTTSIAEALENSGHTVAVLNGDIPQNQRENTVDRLKKGFINILVATDVAARGLDVERIKLVVNYDFPFDKETYTHRIGRTGRAGRSGEAILFVNLREKHFLRNLENSTRTKIEEINIPSNKIINEKRMEKLIDSFNESSLAKDENEENKALIIDVLDNLKEKYSMDDSNIAMAAINLVIGNKSFFVNDDDSWINKQNNTDRNRSNRNNNNRMRNSSRRNNYQNDSFETYKFNFGKFDGVRVANIISSICNSTNINGRSIGKIQIFNDYSLVDLPRDLHRETKNKLKKIKVRN

SEQ ID NO: 8297 - protein, 107 aa, Prochlorococcus marinus str. MIT 9301
MDKLTKDKIQKLIDSNPVMVFMKGTKLMPQCGFSNNVVQILNSLGVEFGTFDVLSDFAIREGIKEYSDWPTIPQVYLKGEFLGGSDILIEMYNSGSLKEKIEIELAS

SEQ ID NO: 8298 - protein, 318 aa, Prochlorococcus marinus str. MIT 9301
MKKVVISNKVHTEVIELLEKNFEVISNQNDKPLTYEKLKFLCKDAHGVMVFMPDRIDKNFLDNSKNLEIISGALRGFDNIDLEECIKRNIKFTMIPDLLASPTAELTLGLLIGLSRNLLIGDEYVRSEKFKGWEPKFFSNGIEGKNVCLLGMGKLGVEVARKIKGFNVKLFYYDLQKLDSIDEQQLNTKYLELNDLFEKADYLVILLPLKNDTYHFINFENILKIKKNCLIINTSRGSVVDESAIAQAINSGHIGGYASDVFEFEDLSIKDRPKKINQELLNLKDKTFFTPHLGSAVDEVRLFIELEAAQNIINFLYH

SEQ ID NO: 8299 - protein, 376 aa, Prochlorococcus marinus str. MIT 9301
MTKILIPSETSSGERRVSATPEAVKKLKSLGCDVYIESSAGKLSGFSDLSYEESGGIIINNFNQKIWSEADLIFCVQTPSNDNLTKLKKGAVLLGLLNPYGNKELLRIINSNKISALSLELLPRISRAQSSDVLSSQANIAGYKAVLLAASELDRYFPMLMTAAGTVQPAKVVVLGGGVAGLQAVATAKRLGAIVFVSDIRPAVKEQVESLGARFIELPEVEEKPGEAGGYAKAVTPEFLTKQKATLTKYLSEADVAICTAQVLGKKAPVLIDLPMIEKMRPGAVVIDLAVSQGGNCEGTKSNETIMKDGVKLIGAGELPSSVPYDASSLYAKNLTSLITPFIKDGVIKLDKEDELISGCLLSDEGVVLQNKVFEN

SEQ ID NO: 8300 - protein, 303 aa, Prochlorococcus marinus str. MIT 9301
MANYRSGFVTLLGRPNVGKSTLINKLIGEKITITSPIAQTTRNKLKGILTTDNGQIIFVDTPGVHKPHHRLGEILVKNAKSAINGVDMVIFVIDSSEEPGRGDEYILNFLISNKTEFIVALNKWDLVNKEFRNLRLDQYRRFFGINRNFQIVSASQGEGCSELVDMALNFLPEGPKLYGEETICDQPLDNLLSDLVREQVLKNTREEVPHSVAVKIEKMEEMKRKNGKVFTAILATIIVERSTQKGILIGKKGSMLKMIGQSARANMSKLIDCPVHLELFVKVIPNWRKKESRLIEFGYEEDF

SEQ ID NO: 8301 - protein, 528 aa, Prochlorococcus marinus str. MIT 9301
MTKVLITDPIDQKGIDILSQVAQVDHKIGISDSELASIIGDYDALMIRSGTQVTEEIINSSSKLRIIGRAGVGVDNVDVKAATQKGVLVVNSPGGNTIAAAEHTIAMMLALSRHIPIANSSTLLGKWERKKFVGNELYKKKLGVVGLGKIGAHVAKVANALGMEVCGYDPFVSTERAQQIQVKLSDLEDLFQQSDYVTLHLPRTPETENLVNMDVLKNMKSSAKLINCARGGLIDEEALAQALNQSLIAGAAIDVFSKEPLESNSPLLKVEKNLILTPHLGASTREAQENVAVDVAEQIRDVLLGLSARTAVNIPGLSPDIMDSLKPHLQLAETMGLLISQLSGGQIQKLEVKLQGEFVQHPSQPLIIASLKGLLSKALGDRINYVNASLEADSRGISVVENKDEARPEFASGSLQLTTYGDNGDHSVAGSIFADGELRIISIDQYPVNVSPSRYMLVTRHRDMPGIIGKLGSLLGSNNVNIASMQVGRKIVRGEAVMVLSIDDPIPNKLLDTIIEVDGITNANPVTL

SEQ ID NO: 8302 - protein, 1523 aa, Prochlorococcus marinus str. MIT 9301
MGESIKRIVSPYQDSYSPNGIIGEKDACGVGFIANIKGVESNWILKQSLKGLNCMEHRGGCGGDSDSGDGAGILCSIPWGYLEEKINLENTQEFNRGLGMVFMPNKKEKIEICKSICDEEAEKLKVNKTYWRTVPVNNEILGPLAKANAPFICQWILYIDKKNHQDVERLLFQLRKRIEKKIRETFKNDVGDCEFYFASLSSQTVVYKGMVRSEILSEFYQDLKEESFKVSFSVYHRRFSTNTLPKWPLAQPMRFLGHNGEINTLLGNINWAKASETHIDDFWGDLSNEIKPIVDVNKSDSSNLDATLEINIRSGQPITDSLLKLVPEAFRDQPELEQREDIKAFYEYSASLQEAWDGPALLVFADGNFVGATLDRNGLRPARYSITNDGFVIMGSETGVVDLEEERVIEKGRLGPGQMLAVDFHQNRILRNWEVKSEAAQRHDYKNLLSSRTIKIENNKWVKDCKLKDLELLQQQTAYGFSAEDNDLILDSMASLAKEPTYCMGDDIPLAVLSSKPHILYDYFKQRFAQVTNPPIDPLREKLVMSLEMHLGERCTPFEIKDAKPFVHLQSPILNEEELISIKKSTIKSQTISSLFDLEEGTQGLENQLNAICKQSELSIKEGCSLIIISDKGINPKKTFIPPLLAVGAIHHYLLKKEIRLKASLIIETGQCWSTHHLACLIGYGASAVCPWLTFEAGRHWLKHPKTQKLIDSKKINPLSIVDVQENIKKALEDGLRKILSKIGISLLSSYHGAQIFEAVGLGSDLIKIAFDGTTSRIAGITLKELTNETLSIHTKAYPEIDLKKLEFLGFVQFRNNGEYHSNNPEMSKVLHSAVKQGPGYDHFETYKKLISNRPTTSLRDLLTINSKRKSIPLEEVESVESICKRFCTGGMSLGALSREAHEVLAVAMNRIGGKSNSGEGGEDPARFNVLNDIDENTQSATLPFIKGLENGDTACSAIKQIASGRFGVTPEYLRSGKQLEIKMAQGAKPGEGGQLPGPKVDSYIAKLRNSKPGVALISPPPHHDIYSIEDLAQLIHDLHQVHPKAKVSVKLVSEIGIGTIAAGVSKANADVIQISGHDGGTGASPLSSIKHAGLPWELGVAEVHKSLLENNLRERVILRTDGGLKTGWDVVIAALLGAEEYGFGSVAMIAEGCIMARVCHTNKCPVGVATQKEELRKRFKGIPENVVNFFLYIAEEVRQVMSSIGVSNMKELIGNQEFLSTRNIDLPKTSNIDLSSLVNDHSTPDRSWLKHSKTAHSNGSVLEDEFLSDTEFIDSIKNHEILTKEIEIKNTDRSVCAKISGEIAELHGNTGFNGELNLNFKGYAGQSFGAFLLKGMNVQLIGEANDYVCKGMNGGILTIIPPKINEISSEQVILGNTCLYGATGGKLFALGKSGERFAVRNSGATAVTEGAGDHCCEYMTGGKVVILGSTGRNIGAGMTGGIAFIIDENNDLSSKVNKEIVSIHQITSSKQENILLEIIREYQAKTNSLKAAKIIENWSHFKSTFKLIVPPSEEEMLGIKKM

SEQ ID NO: 8303 - protein, 586 aa, Prochlorococcus marinus str. MIT 9301
MALLVKKFGGTSVGDIRKIKNIASSICQSKEAGNEIVVVVSAMGQTTDDLNCLAESISKNPNRRELDMLLSTGEQVTIALLSMALNEYGIPAISMTGSQVGIITESIHGKARILDIKTERIQNYINQGFVVVVAGFQGTTLSHTGSMEITTLGRGGSDTSAVALSTALGAETCEIYTDVPGVLTTDPRIVPNAKLLDEISCEEMLELASVGASVLHPRAVEIARNYGIKLCVKSSQSDSSGTLLESQIKALPLKRGSLELTKTVNSLEVLENQAVFSLSNIPDRPGIAAQIFEKLSEASISVDLIIQATNDGNKNDITFTVSELEVKKTAEQCELITSQLGGEYNLKTNMTKLSIQGAGIMGRPSVSADLFDTLSQANINVRLIATSEIKVSCVIEINNIPKAIRFVAEKFKLSDTQIFVNPINKKQDQPEVRGIALDKNQVQVSFRKLPDRPGVAASICLALAENNLLIDTIVQSERISSLKTKDISLTMNKQDREKANLVFEALTKKLPGSYIEDGPAIAKVSTVGAGMAFKVGTAGKIFRALADQKINIEMIATSEIRTSCIVLEKDCDKAVNAIHNHFELDK

SEQ ID NO: 8304 - protein, 293 aa, Prochlorococcus marinus str. MIT 9301
MTKNLFNNENAIYMGSKRNPKNCSIGIFGVNYDGTCSFKPGARFGPEAIRQVSSCLETYCPKLNKDLEDIMYVDFGSILIDKNDSKSVIESVKSATNYLISRRLSPIMLGGEHSITRGAIEALVKKYPDLILVQLDAHADLRESYIGNEHSHACTMKRCLEVLPEKKILQVGIRSGTKEEFEIMHNNNQLVNFCPGGNVHELKQALLPYSKSPIYLTIDLDWFDPSLLAGTGTPEPGGFFWNDFEEILKTLKGFRIVASDIVELSPEIDKSGVSSIVAAKVLRSLILSLENMQ

SEQ ID NO: 8305 - protein, 635 aa, Prochlorococcus marinus str. MIT 9301
MGKVVGIDLGTTNSCVAVMEGGKPTVIANAEGFRTTPSVVAYTKNQDQLVGQIAKRQAVMNPENTFYSAKRFVGRRVDEVNEESKEVSYSVEKSGSSVKLKCPILDKQFSPEEVSSQVLRKLADDAGKYLGEKVTQAVITVPAYFNDSQRQATKDAGKIAGLEVLRIVNEPTAAALAYGLDKENEKILVFDLGGGTFDVSVIEAGDGVTEVLSTSGDTHLGGDDFDRCIVDHLANTFKSNEGIDLRQDKQALQRLTEAAEKAKIELSNATQSEINLPFITATPEGPKHLDLNLTRAKFEELAASLIDRCKTPVERAISDAKISTSEIDEVVMVGGSSRIPAVLDLVKKIIGKEPNQTVNPDEVVAVGAAIQGGVLAGEVKDILLLDVTPLSLGVETLGGVMTKMINRNTTVPTKKSETYSTAVDGQTNVEIHVLQGEREMASDNKSLGTFRLDGIPSAPRGVPQIEVTFDIDANGILSVTAKDKGSGKEQSISITGASTLSDNEVEKMVKDAESNASADKEKREKIDLKNQAETLVYQTEKQLGELGDKIDAAAKSKVEEKSNALKEATSKEDFDSMKKLLEELQQELYAVGSSVYQQPGNQAPSPGAAGGPDESDSNEKGGDDVIDADFTETKD

SEQ ID NO: 8306 - protein, 404 aa, Prochlorococcus marinus str. MIT 9301
MQQVKKVVLAYSGGVDTSVCIPYLKKEYGVSEVVTFVADLGQGEDLELIRQKALNSGASQSIVGNLVNSFVERYAFPAIRANALYLDKYPLSTALARPLIAENLVNIAREISADAVAHGCTGKGNDQVRFDLAINALGPDLKIITPAREWNMSREEAIEYGEKFGIPAPVSKKSPYSIDVNLLGRSIEAGILEDPMKEAPEDIFAMTSSIENSPDSPQEVEIIFKNGFPVGINDESLTPVEIIKKANVLAGEHGFGRIDMIEDRVVGIKSREIYETPGLLLLIKAHKELESITLNPDVVDFKGIVEKKWGQLVYQGFWFGPLKDSLDSFISSTQTAVNGRVKIRLHKGNAIVIGRMSENNSLYREDLATYSEEDVFNHSLAEGFIYMWGMSNKIWAELNSKTKD

SEQ ID NO: 8307 - protein, 394 aa, Clostridium difficile 630
MLSKRLNFITPSYTIGISSKVKEMESNGVKVINLSIGEPDFNVPNNAKSYGIDSLNKDYTKYDLVPGLKILREEICKKLIEENNCNYSIDEIVVSSGAKNSITNTLLALTDEGDEVLLPKPYWVSYPEMIKLVNAVPVFIDTKKENGFKLTKEELEKSITDKTKILVINNPSNPTGSVYTKDELIEIVDVCIQNKIYILADEIYEKICYTGEFTSIASLSEEAKDITITINGFSKSAAMTGLRLGYTASNKTIAKAMSSIQGHLISHPSLTAQYIAYGALKDCSIDIDNMVKTYKSRRDLIKSKLDSIDNVGYVNPNGAFYIFIDLSKVSEKFEYKDSFSIEFCNQFLEEYNVAVVPGIAFGMDKYIRISYACSENTFLSGLDKLKEFVYKIMA

SEQ ID NO: 8308 - protein, 359 aa, Clostridium difficile 630
MSKIFKILTINPGSTSTKIAVFDNEDLVFEKTLRHSSEEIGKYEKVSDQFEFRKQVIEEALKEGGVKTSELDAVVGRGGLLKPIKGGTYSVSAAMIEDLKVGVLGEHASNLGGIIAKQIGEEVNVPSYIVDPVVVDELEDVARISGMPEISRASVVHALNQKAIARRYAREINKKYEDINLIVAHMGGGVSVGAHKNGKIVDVANALDGEGPFSPERSGGLPVGALVKMCFSGKYTQDEIKKKIKGNGGLVAYLNTNDAREVEERIEAGDEKAKLVYEAMAYQISKEIGASAAVLKGDVKAILLTGGIAYSKMFTEMIADRVKFIADVKVYPGEDEMIALAQGGLRVLTGEEEAQVYDN

SEQ ID NO: 8309 - protein, 449 aa, Clostridium difficile 630
MEKAKKLGLFSMILLGINSIIGSGIFLLPGKVYNLAGQNSMFIYIFATLLVLSILLCFAEVGSMFDKNGGAYLYSKKAFGDFIGFEVGTMSWVIRIISWSTLAVGFATALGSFWPESATEYKGYIAAILVTLLSINSLFGIKSTKIMNNVITIAKLVPLIVFVIVGIFFIKFVNIVPSGNVVNSSMGPAIILVFYAFTGFESFIVASGEMENPKKNLPVALITTIFICAIIYILIQIVCMGILGDRLFENSIPIADASSVFVGNYGKVFISVATLISIFGINIGSSIVTPKCGSSLAEEGSLPAFIGKTNKYGAPYVAIIISLICCIPLVLTGSFEQLAVMSVIARFAQYIPTCLSVIVLRKRTDVKASFKIPFGPVIPIVAILGSLWLLQQAWAEDISKPITQNRVLIGLGAMLLIAPLYIFMKKNKEIEHKNKSEDSKLYISREKIQ

SEQ ID NO: 8310 - protein, 230 aa, Clostridium difficile 630
MYKILLIDDDKDLCNLLERELKNENFEVIVCHDGQTGLDTFKKQNYQLIILDIMLPAMNGYDVLTEIRKLNNVPVLMLTAKDSEIDKVSGLRLGADDYLTKPFLMAEFVARVQSLIRRFTVFNNHTEENITLKFKGLQIDVTLRTVLLNDNQIYLTAREFDLLYFLASNQGRVFTKEQIYTHVWNNEYSYDDRNIMSFVSKLRKKIKNEKLDIDYIQTIHGIGYRFCLGV

SEQ ID NO: 8311 - protein, 527 aa, Clostridium difficile 630
MINLEEKYLTRKDTYMIKILEYNGHIRNWKVLCEELGIDSSLCRDERERAILVEAYKTWGYDMANHMHGMFAFALWDTVEKKLFCLRDQFGVKPFYYYETENGKLLYGSSIRKIMEQPGFVKELNEDMLQIYMSFTYVAGENTFFRGVKKLMPGHYLVYQNKTVCIGRYWKPEFHPDNSKSIEEWTDEIHTTLQKIMPEVKSENETAELFLSGGVDSSYILAMSDIEKTGSCGYEEERFDESKLAQQTANILGCKNSRYIITPEEYFASVPYVMYHMEQPTGDASAIVFAIGCKAAAENTNICYSGEGADEFFGGYNIYHKAECYGENLKTFYIGNTNIMNEGEKRKILKKYNPDVLPIEVVKGIYEETEELDTLTNMSNVDIQIWLEGDIYFNIDKMSTAVGLEVRMPLTDTRIFDIASRIPSEYKVKGKENKIAFRTAASKTLPEEIAFRNKLGFIVPIRIWMADDQYNKDIRDKFNSEIADKFFNIDEINEIFNDYISGNSDNWRKIWMIYTFLVWYEIYFVKC

SEQ ID NO: 8312 - protein, 467 aa, Clostridium difficile 630
MKMLNNFFKKINNPAPVFAQTKMERDNQTDDSLSTKPKTTFRDVAGLDEVKEELFEIVDFMKSPQKYQKMGAKIPKGVLFYGPPGTGKTLLASAVAGETNSSFFNVTGSEFVEKYVGVGAKRVRTLFEKARKEAPSIIFIDEIDAVGAKRHLESNNEKDQTLNQLLVEMDGFNKDSNVLIIGATNRLDLLDEALLRPGRFDRHIHIGAPNYHTRFEILKVHTDDKPIDKSVNLELLAKKTHGFNGAHLSNIANEAAIFAVRDDSECITSEHFDKALERVIAGLESKNSALVEKEKKIVAYHEAGHALVSDIVGICPIQKISIVPRGQALGYVLQLPDEDRYIYTKDELIGKIKILLAGKASEELIFNHKSTGAKDDLKKVTEIANQMVCEYGMSNLGFMTIDGNDKTFLCDKVQKEANRIVEICYKETLEMLKDNLEDLHSVSKFLFEKETMTHEELKDLIGKEAVN

SEQ ID NO: 8313 - protein, 383 aa, Clostridium difficile 630
MEIYLDNSATTKPYQEVIDKMVYALNTEYGNPSSVHRKGVEVEKAIKEVRQDIAKSLGAKEKEIYFTSGGTECNNTIIRGITSLNKKRKNHIISTNIEHPSVLNTLKDLEEDGFEVTYLEVGKDGKINIEDLKNAIKSTTCLVSMMHVNNEIGTIQPIGEVGKYLKGLKEKIYFHVDAIQSYGKINFRPSKYNIDFMSVSAHKFHGPKGIGFMYIKENNRLKPMLTGGGQEIGIRSGTENVPGIYGLGEAVRILNKDLDAVISKVDNLKNILKNEIIDNIEDIKINSPEDGVCHILNVSFRGTKGEVLLHYLEQKGIYVSTGSACSSKKKGSYVLNAIGLTNEEINGTIRFSLSDMNTEEEMLEAVKVLKESICDLRSIMKRK

SEQ ID NO: 8314 - protein, 480 aa, Clostridium difficile 630
MSIYKCSVCGYIYDESKNDKTWDELSEDWECPVCTKGRSYFGKISTVYYEEDEKIAEDIVEDESKLNTEKEGDLNYLSTYLRRDDEVEKHMDIIHEMAVTGKSIIEPMRTKLPVISWDDILIMGAQLNPLPLNEHDEVNTTTIIGKKAKKPMIIENPVYISHMSFGALSKELKIALAKGAAQNKTAMCSGEGGILPEEKEASYKYIFEYVPNKYSVTEENLKNSDAIEIKIGQGTKPGMGGHLPGEKVTEEIAKVRNKPVGQDVISPSCFEEIQSKEDLKKLVDELREVSEGRPIGVKISAGHIEKDMEFIAYAKPDFVTIDGRGGATGASPKLLKDATSIPTIFALYRARKYIDTHGLDIDLVITGGLRISTDFAKAIAMGADAVAIASSALMAAACQQYRICGSGKCPVGVATQDEELRKRLHIENSANRVANFLNVSLEELKTFARISGHKDIHDLSVDDLYTVNSEISNYTNIQHV

SEQ ID NO: 8315 - protein, 491 aa, Clostridium difficile 630
MDSEFANAVELSYECAPLLESLKEYSEKDIACFDVPGHVKNRGVAILNKYLGESLMKMDINSSPTMDNVSAPNGIIKNAQDLLAQAYMADEAFFITNGTTQAIHAMILSVIKPGEKVLLPRNIHKSVINALILCGGIPIFIQPEFDEKLGISLNITLEKVRTEIEKDCNIKALFFLNPTYYGVCADLESIIELCHKNNVLVLVDEAHGAHFPFHLDLPPSAISLGADMVAVSIHKTGGALTQSSALLLNRDNVSFEKVLQSINMLQSTSASYLLMASIDGARVNLVENGEKQLSKALNLSRYAKSKLNKIDGIKVLSTEILKQKGVKFIDETKLCINVKELNLTGFEVYDLLYKNFSIQVELGDSYNILALVSIGTNKSDIDRLVKALSIIAKVYRKESTLNEFNMVQINPIIKLNPREAFYAPKESVEINSCIDRICGESIMAYPPGIPIIAPGELITEEIMEYIIFLKNSNAYLTDVQDKNLDRILVIK

SEQ ID NO: 8316 - protein, 292 aa, Clostridium difficile 630
MKNNFYHMNTFMSMDKNYEESNLIVFGVGFDGTTSNRPGARFASSSMRKEFYGLETYSPFLDLDLEDYNICDYGDLEISVGSTEQVLKEIYQETYKIVRDSKVPFMIGGEHLVTLPAFKAVHEKYNDIYVIHFDAHTDLREEYNNSKNSHATVIKRIWDIVGDNKIFQFGIRSGTKEEFKFATEEKHTYMEIGGIDTFENIVNMLNGKNIYLTIDLDVLDASVFPGTGTPEPGGVNYREFQEIFKIIKNSNINIVGCDIVELSPDYDTTGVSTVIACKILRELCLIISDKIK

SEQ ID NO: 8317 - protein, 66 aa, Clostridium difficile 630
MKNGIVKWFNNEKGFGFISVEGEDDVFVHFSAIQNDGYKTLEEGEKVSFDITQGNRGPQAENVNRI

SEQ ID NO: 8318 - protein, 620 aa, Clostridium difficile 630
MSEKRIDEQDIEVLSFEDDMSAEKAKDAKKTTKRLLKYMAKQKFKILIIFISVLISSALTVLAPMVMGKAIDQLFNGIKTAVQTGTKFSVNFSTMGGIVSILLGLYLISAVFIYIQQYIMSGVAQNLVLSMRKDLSDKLNKLPLKYYDSHKKGETLSIVTNDLEKVADSLQEGLMQLITAVVTVVGSIVMMISISVPLTIVSAITLLVSLGITVVIARKSQERFSENQKALGELNSNIEEIFTGQIVVKAFSKEKDTIRNFKILNQNLYNASRKAQFSSYAISPIIRFINLIGYVIIAVVGGIFASTGAMTLGSIQAFIQYVNQASEPTTEISYIVNMLQAAIASAERVFTVMDEVEEIKDEESSKVISMPKGKVQFEHVKFGYSDDFILMKDININLNAGDKIAIVGPTGAGKTTLVNLLMRFYEIQGGRITIDGVNIKDLKRGELRTMFGMVLQDTWLFNGSIKENIAYSKSDATMDEIVRAAKSARVDHFIRTLPQGYDTILTEDSSNLSQGQKQLLTIARAILSDPSVLILDEATSSVDTRTEVEIQKAMNNLMKGRTSFVIAHRLSTIRDADLILVMKEGTIIEQGSHKELIEKKGFYEELYNSQFTSEYDEDVV

SEQ ID NO: 8319 - protein, 391 aa, Clostridium difficile 630
MREVVIASAARTAVGSFGGAFKSVSAVELGVTAAKEAIKRANITPDMIDESLLGGVLTAGLGQNIARQIALGAGIPVEKPAMTINIVCGSGLRSVSMASQLIALGDADIMLVGGAENMSMSPYLVPSARYGARMGDAAFVDSMIKDGLSDIFNNYHMGITAENIAEQWNITREEQDELALASQNKAEKAQAEGKFDEEIVPVVIKGRKGDTVVDKDEYIKPGTTMEKLAKLRPAFKKDGTVTAGNASGINDGAAMLVVMAKEKAEELGIEPLATIVSYGTAGVDPKIMGYGPVPATKKALEAANMTIEDIDLVEANEAFAAQSVAVIRDLNIDMNKVNVNGGAIAIGHPIGCSGARILTTLLYEMKRRDAKTGLATLCIGGGMGTTLIVKR

SEQ ID NO: 8320 - protein, 103 aa, Clostridium difficile 630
MYAIVKTGGKQYKVSEGDVLFVEKLEANAGDVVTLNEVLACSKDGELKLGSPVVEGASVQAKVVEQGKAKKVIVFKYKAKKDYRRKQGHRQSYTKIVVEKINA

SEQ ID NO: 8321 - protein, 425 aa, Clostridium difficile 630
MFIDKARIFVKAGNGGNGSVAFRREKYVPAGGPDGGDGGRGASIIFEVDLGLRTLMDFKYQKKYQAQNGGDGSKGKRAGKNGENLVLKVPAGTVIRDEATGLVLADLKKEGDTAIVAKGGIGGKGNQHFANAVRQAPAFAKSGTDGEERWITLELKMIADVGLLGFPNVGKSTFLSVVTKAKPKIANYHFTTLTPNLGVVQTKFGDSFVLADIPGIIEGASEGIGLGHEFLRHVERTKVLIHIVDISGLEGRDPIEDFDKINDELKLYNEKLSKRPQVVVANKFDILEDESKFEKFKSELEGRGYTVFKMSAATRQGIDEVIAYVSKMLKEVEDVELVSEEEMYRPELDIGTEEELSIDIEDGVYVVTGKALRRIMYSVNFDDMESLQYFQKAMESQGVFDRLREMGIEDGDVVKIYELEFEFYN

SEQ ID NO: 8322 - protein, 398 aa, Clostridium difficile 630
MKILVLNCGSSSLKYQLIDMNNEEVLCIGLVERIGIEGSILKHEKAGRDDKYVVEQPMKDHKDAIALVLEAVAHPEFGAVKEMKEIDAVGHRVVHAGEKFATSVVITPEVEEALKECIDLAPLHNPANIMGIDACKAILPDVPMVGVFDTAFHQTMPKSSYLYGLPHELYTKYGVRRYGFHGTSHNYVSQRAAEILGKDIKDLKIVTCHLGNGASIAAVDGGKCVDTSMGFTPLEGLIMGTRCGDIDPAILPFLMRKEGLDADGLDKLMNKESGVYGMTGISSDFRDIEDAAKNGDERAQATLEAYVKKVQKYIGAYAAEMNGLDVVVFTAGVGENGKAIRADIASNMEFLGMKLDKEANDVRGKETVISTADSKVKMLLIPTNEELMIARDTLRLVK

SEQ ID NO: 8323 - protein, 442 aa, Clostridium difficile 630
MGGLSMNEKNKMGLISIILLGINAVVGAGVFLLPGDAMKSFGVASIFVYIFDMLLVLSMAFCFAEVAGKFNKNGAAYVYTKEAFGDFCGFEVGLMKWVIGCISWGALIVGFPTSLSAVWAPAGEPHIQKIIIVAMIVGLTIINLLGVSLSKIVQNVITVGKLIPLILFIGIGIFFIKGVNFTSSTMVPPGAGATEFGAAALLMFYSFTGFESIAVAAEDMENPQKNIPIAIISVIVIASIIYILNQVVCVGILGDSLSSTSTPVADAARICFGNMGAGLVTFGTLVSVGGICMCGAFVNPRSCVALADDKMLPRIFARKDKKGTPYVAIIATMLITIPIALSGSFAELAAISAVARFIQYIPTSLSVLVFRKKRPELVGTFKTPFGAVIPLIAVCVGTWLLFQASMHQLIMGLGALAIGVPLYFIMKSYNRKVYGENLKKIV

SEQ ID NO: 8324 - protein, 397 aa, Clostridium difficile 630
MEKRRLYMDYSATTPIKKEVLDAMMPYLTDYFGNASSFHTFGREAKDALDKAREQVAALINAEPSEIYFTAGGSESDNWTLEGIAYANKNKGNHIITSKIEHHAILHTCEYLAKHHGFEITYLDVDSEGKVDLKQLEDSIKDTTILISIMFANNEIGTIQPIKEISEIAKKHKILFHTDAVQATGNIPVDVKELGIDLMSMSSHKIYGPKGVGALYIRKGVRLHNFVHGGAQEKSKRAGTENIPAIVGYGKAAELAKENMQNHVETLTRLRNKLIDGVLERIPYTRVNGSLENRLPGNANFAFQFIEGEGILLLLDMLGIAGSSGSACTSGSLDPSHVLLAIGLPHEIAHGSLRLTVGDFTTDDDIDYILENLPKVIERLRSMSPLYDDAKKQGLVK

SEQ ID NO: 8325 - protein, 407 aa, Clostridium difficile 630
MSILVQKFGGTSVESYEKMNEVCKIVKAYKKNDEELQLVLVVSAMGRKGAPYATDTLINLCSAVNDEPSKRELDLIMSCGEIISGTILANLLNAQGIDSVFFTGQQAGIITSDEYSNAKIKYINPKKVKRALDDGKVVVIAGFQGVTDDGEITTLGRGGSDTSAVAIGKALECETVEIYTDVDGIMTADPRVEPNAKVLSFIDYEEVFQMADKGAKVIHPRAVQLAKSGNITLAIKNTMNPTFEGTKIGSLCRHLEDNIEYEQERDFKVAVANKDSVAQVKIKSAEEVFTEVLNEIEKKLITIDMINFFISEKAFVVEDADIKSLKEILDKFELDYEVNRDCAKVTLICSRIADEMSGIMSKVVRGLSKAGVSLLQTSDSNMTISCLVSEEDMHTAVHAIHQQFYLK

SEQ ID NO: 8326 - protein, 398 aa, Clostridium difficile 630
MNYSNRVSAMQASPIRKLVPFAQAAKDKGIKVYHLNIGQPDIKTPKGFFDAVKNFDSEVLEYATSEGIPELLEALQNYYKTYDMNFEKDELLVTNGGSEALLFTMMAVCDPGDNLLVPEPFYTNYNGFGQSVNVEVNAVTTKAENGFHLPSKEEILSKVDDKTKAIILSNPGNPTGAIYTKEELNILAEIAKEKDLWIIADEVYREFVYDGLEYTSCGNLEGVQDRVIIIDSVSKRYSACGARIGSIACKNKGLIAQILKLCQGRLCVPTLEQIGAVELYKTPVSYFKEVNEEYKKRRDVLYNELMKVEGVICKKPTGAFYIVAKLPVENAEDFTIWMLKEFNKDNETVMVCPAEGFYATPGLGRDEIRLAYILNEKDLHRAATLLKEGLEQYVALQK

SEQ ID NO: 8327 - protein, 66 aa, Clostridium difficile 630
MKTGVVKWFNNEKGFGFISVEGEGDVFVHFSAITGDGYKTLEEGQSVEFEVVDGAKGPQAANVVRL

SEQ ID NO: 8328 - protein, 607 aa, Clostridium difficile 630
MNLSTGNQKVSRLKKKEKPKDFKKTFKRIFMYFKKDKKITRFIFLLVIIDSIISTVIPYTIGKVVDIIDIDTYSKSIFLKGIIILLSFYIIEFSVKLSKGICTARLSQSIVKEMRSNLFLKFKNLPITFFDKSSTGDIMSRVTNDVDNISTGISNSLVQLITGILNILMTFIMMFVLSPILTFCSVILIPIVMFVSNFIAKRTRVFFKQQQVELGKLNAHIEEMISNINVVKSFNYERKSVNDFKEVNDRLLNISLKSQIYTSLLMPIMNVISNIGFATICIIGGILASKDIITIGVIASFLSYVRQFTRPLNELANLFNTLLSAIAGCERVFEIIDEQEEQEVHNMFKSEINDNKDGNLNSHFVKGEIELKDLSFSYDSKKKILDNINLKIKAGTSNAIIGETGSGKTTIINLITNFYHIDEGSIFLDGKDIYSINRNYLRTCFGVVPQEGYIFNDTVMENIRYGNLEATDEEVIYASKIANAHKFIVKMREGYSTVLSDRGEDLSEGQKQLISIARAVLKNAPILILDEATSNIDIATEAKIQEAINNLTYGKTSIIIAHRLSTISNCDNIIVLENGRIVESGNHKELIKLKGHYYRNILLTQGK

SEQ ID NO: 8329 - protein, 447 aa, Clostridium difficile 630
MRRKKMGSNELKKTLGVSAALSTVVGSVIGAGVFFKPQAVYTLTGGAPGLGILAWLIAGIITITAGLTAAEVSVAIPKTGGMMVYIKEIYGEKLGFLTGWMQIVLFYPGMMAALGVIFGEQASALIGSPSLLLPIAIGIIIIVAGLNMLGSKTGGVIQTVSTICKLIPLILIMVVGFIKGGGNNPILTPMVGEGLSLGSVLGQVLIAILFAFDGWMNVGTLAGEMKNPGKDLPKAIIGGLSVVMAVYFIINLAYLWVLPANELANYASPASAVAEVIFGSMGGKIISVGILISVFGALNGFLLTGSRVAYTLATDKTLPKYGIFSKLNSAQVPANAIALVSVIASIYALSGQFNLLTDLAVFATWIFYVLTFIGVMKLRKTHPNIPREYKVPLYPIVPIIAIASGIFVVVNQLCFAGMKTTMISIGGLVITAIGLPVYAYMTRGVKR

SEQ ID NO: 8330 - protein, 564 aa, Clostridium difficile 630
MRMNGAKVILECLKKEGIDTIFGYPGGAVIPLYDALYDYSDDFKHIRTSHEQGLVHAADGYARSTNTVGVCFTTSGPGATNAITGIATAFMDSSPMVVISGQVPTSLLGKDSFQEIDITGATLSMTKHNYLVRNTKELVPTIKEAFRVANSGRKGPVLVDVPKDLFLAEMDFSGEDYDLCQIDDYMDYKSDFDLDDETNIKLLNEAIDIIKESKKPVIYAGGGVKSSDSEEILEKFATKIDTPVLNTLMGLGNIDRKNELSLGMVGMHGSRESNLALSNSDLVIAIGARFSDRVISKSSEFAKNAKIIHIDIDPSEISKNIESNVSLVGDVKLVLSLLIERVESKNNSNWKEEIKRFRKSEGVQTYEFHPQNILKKINEKYETLKKPTVVVTDVGQHQMWAAKYWNFKGNKSFITSAGLGTMGFGLGAAIGTKVGNVDKNVVLVTGDGSFRMNCNELATVANYNVPMLILLLNNRTLGMVRQWQKLFSNQRYSQTDINENVDYVKLVNAYNIDGYKVSSMEELGKALDMIDFNKPVFLQCDIDKDYDVYPIVAPNDALENLICN

SEQ ID NO: 8331 - protein, 498 aa, Clostridium difficile 630
MSKILEMQQIYKSFGKVDVLKGINFELEKGEVRALLGANGAGKSTLIKILGGVHSQTKGKVILTGNDIMFKNPHHSKENGISIIYQELSLIPTLTVLENIFLGREILKGSVFLNKKDMLEEYMKICEDFDFNIDPHIVVSNLSVANQQMVEIMKAVSCNSEIIIMDEPTTSLTNNEKDGLFKIISRLKSKGKTIVYISHILEEVFKVCDSASIMKNGIMIGTYDVEDLTKLKITQLMTGNDNHKLIEKKDYTFAKYEEPPVLEVKNISWSNKIKNVSFKVYRGEVVGLAGLVGSRRTEIINLIFGIDNKDSGDIFINGKKVDITSPKVAIKNKIGLIPEDRKNLGLILEQAIYTNSSSVQIDKFKKFLFIDRNKEIEFSKKGVKELGIKVSDVKQEVKELSGGNQQKVVVSKWLEKDLDLIIYDEPTKGIDIAAKEDIFNTIKEFSSKGIGVIFISSDLEEVIRVSDRILVTREGSIVDDLKNENIQVQDIMNSIFNV

SEQ ID NO: 8332 - protein, 624 aa, Clostridium difficile 630
MDGNISIYYKGDISKKEDIKFKIKESVNNTRLSSRIEYKDEEKTFDFERFNVIDAIYGNKPFEKDGKVIVFNGNIYNYHEIKEELIKKGHNFTTNDDIEVLLASYIEFGKNCVHKIKGMFNFIIYDRENESIFGARDLFGIKPLYYINKENAIIFSSEYKFLLEYMKNLNINERSLQSYFSFQYVLPEDTMIQGIRLIPAGHYFRVENGILSLKRYNKLEFRSSTKFFYTKNHLGNRDVNEDDIRNIVVDSIVTHMEEEKEIGTFLSGGIDSSIITTVASQINPNIKSFSAGFSVKGYSELEVAKKTADKLGIENIQINITQDEYIKSLPNVIYSLDDPIADPSEVGLYFLIKEAGKHVKVALSGEGADELFGGYNIYKEYSTMKSVVNSPTYIKSILGRVSELMPNIKGRNYLYRATTPLEKRYIGNAKVFENSEVKRFFFKYKEKNIYEYLLSNLYRDAQKNNYDYISKMQHIDVNTWLQGDILQKISKLSTAEQVELRVPFLYKDVFDVAKNLRMEQKINKNNTKVLLREAFREIVPEHVVQRKKLGFPTPIRVWLKDSLGDIVKETIYNSNVDEFIDKKYAIKLLDTHLKGHRDNSRKIWTIFTFCLWHQLFIEHKNVEY

SEQ ID NO: 8333 - protein, 417 aa, Clostridium difficile 630
MITLSFDIVQTLTLSIFFFLIGNLLKNKVNFLNNFCIPAPVIGGLLFCFLNLFFKYFNIADISISGNLMPNFITFFFTTIGLEISINLIKKGGSVLFRYWILCGVLAFCQNILAITISKIIKLEPLLGLMCGNVSMEGGHGYSAAFGLTIENLGIEGAVGVGLSAATIGLIMGGILGCPVAKFLINKYKLKPSSNIDLSIPRYNRNLNRFGSKFFRNKNRIKNNNFSKTITPSVFLEQVLLIFICINTGEIISRCFYITFNILLPSVVTCMFSAVIFRNLNDKINILELNFKLIDFLKELSLGIFLTLSLMNIDLFELSTLLPPILLIVTFQVIFIILFSIFICFRVLGKDFDSAIIISGLIGHGIGATPNALANMSSLTQKYGDSPKAFLVVPLVSGFLLDAISIPCILFFINILT

SEQ ID NO: 8334 - protein, 399 aa, Clostridium difficile 630
MKEKVVLAYSGGLDTSIIIPWLKENYEDIDVIAVCGNVGQEDKMEDVYEKALQSGASKAYVDDISEEFVTETIFKAVKAEAKYEGKYLLGTSLARPIIAKKLVEVAHKEGAKYICHGCTGKGNDQVRFEATIAALDPTIKVIAPWRIWDIKSREDAIDYAEKHNIKVTATKAKIYSVDANLWHVSTEGGDIEHLENEHKKDVYKQCVDPEDACDVAEYVEVYFEKGVPKKVNGEELSPVALIHKLNELGCKHGIGVIDIVENRLVGMKSRGIYETPGGTILYEAHNILESATLDKDTLHFKQMVSYKYGELIYNGLWYCKLRESIDAFMEQTQDNVTGTVKVKLYKGNIKPAGIFTENALYDEGISSFGNSELYDHKDAEGFINLFTLPLKIRAMKAGK

SEQ ID NO: 8335 - protein, 66 aa, Clostridium difficile 630
MNNGIVKWFNNEKGFGFISMEGRDDVFAHFSAIQTSGFKSLEEGQQVSFDIVKGARGPQAENITIL

SEQ ID NO: 8336 - protein, 397 aa, Clostridium difficile 630
MSIIVQKYGGSSVADTEKIKSIAENIIERRKENPQMVIVVSAMGKSTDEYITLAKELSNEPSKRELDALMSTGEMISASLLSIALNALGCKAISYNAYQLNIKTSGLHGKSQIDDINVNRIKNSLDEGNVVIVTGFQGINEDGDVTTLGRGGSDTSAVALAVKLNGKCEIYTDVDGIYFTDPRKYSKASKLDEIEYEEMLELASLGAQVMHSRSIELAQKYGVEIYVGRTCGTEKGTYIRGGKDMKLEDKVITGLATSDDDSSITIKDFKAENISSLFEDIATIGISVDMISQTAPILDKISVSFTVPKEELGECKKIVSKYTDEEHVVIDNNITKFSLVGLGMKNTSGVAAKVFKIFNENGIMIKLITTSEIRITCAINSDDKQVAIEKIAEVFNI

SEQ ID NO: 8337 - protein, 554 aa, Clostridium difficile 630
MSNETNSSNFIKNIIINDLETGKHDSIITRFPPEPNGYLHIGHAKSICLNFGLAKEFNGKANLRFDDTNPLKEDVEYVESIKEDVKWLGFDWNELNFASNYFDEMYKRALILIKKGKAYVCDLTQEEMREYRGTLTEPGKESPHRNRTIEENLDLFERMKNGEFKDGEKTLRAKIDMSSPNINLRDPIIYRISHSTHHNTGDKWCIYPMYAFAHPIEDAIEGITHSICTLEFEDQRPLYDWFVKECEMENIPRQIEFARLNINNTVMSKRKLKQLVDEGIVDGWDDPRVPTISGIRRKGYTAEALRNFCSEIGVSKVNSTVDSQMLDYFLRENLQPKAPLTMGVLRPLKLIITNYPEDKIEMLEIENNAKDESQGKRLVPFSRELYIEQDDFMEEPVKKYFRFFPGNEVRLKGAYFVKCTDVIKDENGNVVEIHGTYDPETKSGSGFTGRKVKSTIHWVDAKSAIPCEFRLFEPLILDDIPENEGKHFLEQINPNSLEILQGFVEPTQIKDAKPFDKFQFVRNGFFSIDNKYTTDEKFVFNRIVPLKSSFKPGK

SEQ ID NO: 8338 - protein, 224 aa, Clostridium difficile 630
MQLILDTGNVEEIKELCTCLPIDGVTTNPSIVSKEKKNFKQLINEIGEIIGEDMPIHAQVLSTKYEEILEEALYISSLRKNIYVKIPVTQDGLRAIKDLHRKGVKITATAIFTAHQGFLAAKAGANYIAPYVNRLDNISGDGVAMVSELIKIIDTYKMDTKVLAASFKNAQQVIELMQHGVHSVTVPYDICKSMMNHPLTDWSVDKFIEDWENTFGKGSKTNNI

SEQ ID NO: 8339 - protein, 610 aa, Clostridium difficile 630
MSRMGRGPMGKSMGAGQKANDFKGTMRKLIAYLSKFKISIILVIVFAIGSASFSIVGPKILGKATTKIFEGLVSKVSGGNVGIDFNAIGKILTFLLFLYLISALFSFIQGFIMSGISQKVSYNLRKEISAKLDRLPMKYFDTKTHGEILSRITNDIDTLNQSLNQSMTQLITSVTTMIGVLIMMLSISGIMTLVAVLILPISMFVISRIIKKSQKYFRYQQEYLGNVNGQVEETYSGQTIVKAFNREDEVIEEFDKLNDSLYNSAWKSQFLSGIMQPLMMFIGNLGYVMVSILGGWLAIKKTIEVGDIQSFIQYVRNFTQPMTQIAQVANLLQSTAAASERVFEFLEEEEEVQIVENAVSIDGLEGKIDFENVNFGYNPNKTIINDFSVNVKPGQKVAIVGPTGAGKTTIVKLLMRFYDVNSGSILIDGHNIKDFNRSELREMFGMVLQDTWLFSGSIMENIRYGKLNATDEEVIEAAKSAHVHRFIKTLPDGYKMKLNEEASNVSQGQKQLLTIARAILADPKILILDEATSSVDTRTEVLIQKAMDNLMEGRTSFVIAHRLSTIRDADMILVMNEGDIVEQGNHEELLKKGGFYANLYNSQFEEDEAM

SEQ ID NO: 8340 - protein, 258 aa, Clostridium difficile 630
MHKETLDKLTNAAINKINLLNTSKVKYLVSSAFAGLYVGIGILLIFTIGGLLTDAGSPMTKIVMGLSFAIALSLVIMTGTELFTGNNMVMSAGMLNKGVSIKDTSKIWAYSWVGNLIGALVLGIIFVGTGLVDKGPVAEFFANTAASKASMPFTALFFRGILCNILVCVSVLCSFRTNSDTAKIIMIFLCLFAFITSGFEHSVANMTIYSVSLFSPTISTVTIGGAIYNLVAVTLGNIVGGALFMGLGTYILGKEKLN

SEQ ID NO: 8341 - protein, 66 aa, Clostridium difficile 630
MNNGIVKWFNNEKGFGFISMESGDDVFAHFSAIQTSGFKSLEEGQKVSFDIVKGARGPQAENITIL

SEQ ID NO: 8342 - protein, 216 aa, Clostridium difficile 630
MRFFIDTANIEEIKEANDLGVICGVTTNPSLIAKEGRDFIEVVKEISEIVDGPISAEVISLEHKGMIEEAEKLSKIHKNIVIKIPMTAEGLKAVKVLSSKGIKTNVTLIFSAGQALLAARAGATYVSPFVGRLDDISQNGLDLIEEIVDIFSVNSIEAQIIVASVRNPIHVLQAARMGADIATVPLKVINQMIKHPLTDKGIDSFMKDWEGASLKL

SEQ ID NO: 8343 - protein, 352 aa, Clostridium difficile 630
MKVLVINPGGTSTKISVFQDENEILKKNITHTREDLKNFSKVFDEYDYRKQLIVDILSSENHSINSFDAVVGRGGLMKAIKGGTYTVSEEMIEDMRNEINGEHASNLGALLAKTIADEIGVQSFVVDPVSVDEFDDVSRITGISDIEKASWLHALNHKAVSRKIAQKLGGKYEDYNFIVAHLGSGISIVAHKQGKMIDGSGGRSDGPFSPERSGGLLAYPLIELCYSGKYTHDEMVAKVSSIGGMYDYLGTKDMIEIENRIKEGDEKAKLIMDAFIYQVAKEISMYGASLSGNVDRVILTGGISHSEMVVKGVAEKVSYLAPIEIVPGEMEMEALALGALRVLNGEEIAKTY

SEQ ID NO: 8344 - protein, 515 aa, Clostridium difficile 630
MDNFKKILLNELPNFKEYSSKFLNGEINKMQYKGFSGGYGVYAQRDKKSFMIRLRVSAGVLSQYQLNKIYEIAIKHNLDKIHLTTRQAIQLHDLSINSIVDIMEEGIKNDIFTRGGGGNYPRNVGLSPLSGVDPSEVFDVTPYAVATDKYFIKNATTYHLPRKLKVSYSNCYTDTAHCSIQDLGFVATLKNDEPYFRVFLGGGLGKQPKVALELDELIKPKDALYCVEGMIKFFMDYGNYENKNRARVRYMVESLGEELFLEKFKEYYKLEKENGSLELNIEEIDYSKPGVKIDIQDSRLIPQKQDGLYTVYIHPVGGILLTKDLSTLLKELDNVENPMIRLGMTEGLYILNLNGNEAKRILEISKTISCNSQLEQSISCIGVPICQMGIQNSQKMLHEIIDYFRLQNNEEILNKAPKLYISGCLNSCGVHQVGSIGLCGKKKNVDGISTDAFELFVGGSFEIGKTRLGKSLGDFKASDIPEMLYKISDASSGNFYEWVNSNDNILNKITDKYKI

SEQ ID NO: 8345 - protein, 297 aa, Clostridium difficile 630
MFKSGFVSIVGRPNVGKSTLMNNVVGEKIAIMSDKPQTTRNTIQAVYTDEEMQIVFLDTPGIHKPKNKLGEFMVKAATEAFKNVDLILFVVDDSKKIGPGDRKIIEDLRSVKTPIILVVNKIDQLDQKDELFDIIKMYDREGIFKEIVPISALKGKNTDTLIKVIQNYLEEGPKYFPDYMITDQPERVLIAELIREKVLHYLNDEIPHGVAVEIEKMKARNDKEIVDVSAVIYCERDSHKGIIIGKNGRKLKGIGKSARQDIELLLGSQINLQLWVKVKENWRNLQNYINNFGYNDK

SEQ ID NO: 8346 - protein, 615 aa, Clostridium difficile 630
MGKIIGIDLGTTNSCVAVLEGGEAQIIANSEGMRTTPSVVAFTKDGERIVGEPAKRQAVTNADKTITSIKTHMGTDYKVNIDGKSYTPQEISAIILQKLKSDAESYLGQTVTEAVITVPAYFTDAQRQATKDAGRIAGLDVKRIINEPTAAALAYGMDKLDQEKKILVFDLGGGTFDVSILEIGDGTFEVLATAGNNRLGGDDFDQIVIDYLAEEFKKAEGVDLRNDKMALQRLKEAAEKAKKELSSTMSSNINLPFITATAEGPKHLNIDLSRAKFEELTRGLVEKTMEPTKTALQDAGLSTGDIDDVLLVGGSTRIPAVQEAVKKFIGKEPHKGINPDECVAAGASIQAGVLAGDVKDLLLLDVTPLSLGIETMGNVMTKIIERNTTIPTKKSQIFSTAADNQTAVDIHVLQGERSMAYDNTTLGRFQLTDIPPAQRGIPQIEVTFDIDANGIVNVSAKDLGTGKEQKITITSNTNLSEAEIEQKIKEAEMNAEADKQKKEKIEAFNQAESTIYQTEKTLNELGDKISSGEKEDIEKAIADLKAVKDNQDATAEELKKATDEVMTKFQKVSQEMYQKAAQEQQAAQGAEQAQDNGPKDDNVVDADFKEVDEDK

SEQ ID NO: 8347 - protein, 437 aa, Clostridium difficile 630
MHTQLQKTIGLSAALSTVVGMVIGSGVFFKPQAIYTTTNGAPGLGIIAWLLGGFITITAGLTATEISAAIPKTGGMMIYIEEIYGEKLGFLTGWMQTVLFFPGTSAALGVIFAQQASELLGMSPNNMANVLPIAIGVILFLALLNIIGSSLGGKVQTVATIGKMIPLILIIVFGFIKGQSSEVLNPFVGDGVNASNALGQVLIATLFAYDGWINVGAISGEMKSPEKDLPRAIVGGLSLVMAVYIIINIAYLWVVPASELATVTSPATLVATRLFGNIGGKVITVGILISVFGTLNGYLLTGSRIPYTLAEMGTLPASKTLLKVNSGGSPVNSILLITVLACVYALSGQFNLLTDLTIFSIWVFYVLTFIGVMRLRRQKPDLHRPYKVPLYPIIPIIAILGGLFVIINQILTSTVISLGGIFITLLGLPVYYYMKKR

SEQ ID NO: 8348 - protein, 392 aa, Clostridium difficile 630
MKDVVIVSAVRTPIGSFGGVFKNTSAVQLGTIAVKEAISRVGLNLSEIDEVIIGNVLQTGLGQNVARQIAINAGIPNSVPSYTVNKLCGSGLKSVQLAAQSITSGENDVVIAGGTENMSQAPYIVPTARFGSKMGNITMVDSMLTDGLIDAFNQYHMGITAENIATKFEFTREMQDKLALESQNKAENAIKNNRFKEEIVPVDVLIRRGKIETIDKDEYPKLGMTFEGLSKLKPAFKKDGTVTAGNASGINDGAAMLILMSQQKADELGIRPLAKIKSYASAGVEPEVMGTGPIPATRKALKKAGLSINDIDLIEANEAFAAQALAVKNELQIDSSKLNVNGGAIALGHPIGASGARILVTLIYEMQKRKVETGLATLCIGGGQGISMVVSR

SEQ ID NO: 8349 - protein, 336 aa, Clostridium difficile 630
MNDMSTIIPKDYKSSLNVIDTQIAIKKLKDFFEMRLSNELNLIRVSSPLFVLPETGANDNLNGEKAVSFDIPFMNKNAEIVQSLAKWKRLALKKYGFEVGSGLYTDMNAIRKNEELDNIHSLYVDQWDWELVIDKSSRNEKTLKDVVKRLYGVFKDTEIFVCSMYEGIKEILPEEITFITSQELEDMYPELSPKEREDKIVKEKKAVFITQIGKTLISGEKHDGRSPDYDDWELNGDILFYNPVLDSALELSSMGIRVDEESLDRQLKLAGCEERKEFDYHKMLLNGELPYTIGGGIGQSRICMYFLQKAHIGEVQVGVWPQDMIQNCSSAGIELL

SEQ ID NO: 8350 - protein, 296 aa, Clostridium difficile 630
MKLGFIGLGIMGKPMAKNLLKDGCNLLVYDINKSAVDELISCGAKYASVLEMGQECDIVFTILPNGTIVQDILFGMDGLAKTLKEGSIVVDMSSVTPTESILCANKLKDMGLEFIDSPVSGGEPKAIDGTLAFMAGGKEEIYKKVEPFFNIMGSSSILIGDNGSGSVTKLTNQVIVNLTIAAVSEAFVLAAKAGADPEKVYKAIRGGLAGSTILDAKIPMIMNRDFKPGGKISINLKDIKNVMQTAHNLDVPLPMTSQLLEIMQTLKVHGHLEDDHSGIAQYFEKLAGVEIKKHDN

SEQ ID NO: 8351 - protein, 596 aa, Clostridium difficile 630
MKKSKGFKKTIGRLLPFVKKYKFSFIIAIICIISAATMNALAPKTEGLIITQLTKDVISIAKGVPGASVNFDYVTKILVILACIYFANAIFTYTSSFLLTNAIQNTMRDLRNEVENKIRRLPISYFDSNSFGDVLSRISNDVDTISNALQQSFMQIVNSILVIILALSMMFTINIYMALIALFIIPISYFVSKFVVKKSQSRFSLQQNALGKLNGKVQEMYTGFNEIKLYGKEEDSIKEFKKVNQELCENGFKAQFISSMMNPMVSLVTYFGIAAVAVVGSIYAVSGGITVGNLQAFVRYIWQINQPLSQMTQLSTVIQSSFAAIERVFEILDEEEEIPDVENPVKIENVKGNVTFEHVNFGYGENSTLIEDLNAEVKSGQMVAIVGPTGAGKTTLINLLMRFYDVKKGAIKIDGVDIRDMKRKDLRSMFGMVLQDTWLFNGTIFENIEYGRFGATKEEIIQAAKVANVHHFITTLPDGYNMFLNEEASNISLGEKQLLTIARAFISDPSILILDEATSSVDTRLELMLQKAMRNLMNGRTSFVIAHRLSTIRNADLILVMNNGSIIEQGNHDELMEKGGFYEKLYNSQFADKESE

SEQ ID NO: 8352 - protein, 399 aa, Clostridium difficile 630
MLHMISNKMQTLVANSSVIRAMFEEGKKLSDIYGEENVFDFSIGNPSVEPPETIKAVINDILNEESPNLVHGYMNNSGYEDVRDAIAEHINKKDGLNLTRENLIMTCGAAGGLNIILKTLLNPGDEVIAFAPYFGEYKNYTENYDGKLIEVPTNIETFEPDLDALKNAITPKTRALIINTPNNPTGVIYSEELLKNLGELLDSKQKEFNTSIYLISDEPYREIIYDGAKVPCVLKYYRNSFIGYSYSKSLSLPGERIGYIVANGQMDDFDDVMSSLNVANRILGFVNAPSLFQRVIARSLDAEVDVNIYKKNFDLLYNSLIDMGYSCVKPNGTFYLFPKAPIEDDKKFCNDAKQFNLLLVPGSSFGCPGHFRVSYCVSYDKVKSSLPAFEKLAKLYNLK

SEQ ID NO: 8353 - protein, 199 aa, Clostridium difficile 630
MGYLKTMVDVMTTEMNAIRCLIDEAGIEYESIVSEIANCEGKVIFMGVGKSAHIGKKLAATFASTGTPSFFVHATEAVHGDLGMIESKDITILISNSGNSMEVVNCIKYIKAIGSKTIAFTSNRNSVLAKECDYALIYPAKDEADHLNLAPTTSSTITLVLGDSIACALSKSSNFGSSDFYKYHPGGSLGEKLKTANNG

SEQ ID NO: 8354 - protein, 446 aa, Clostridium difficile 630
MALGGITMEKGIKLGFWSIVLLGINAIIGSGIFGLPGDAYTDIGPASILVLVFCMLLAVSIALCFAEAGSWFDTDGGPYLYAKEAFGDFVGFEVGFMKWIVSMIAWATMANFFAVTLSSVWPQAAEPLIKNIIIGILVVGLGIINFMGMKQSKHLNNIMTIGKLLPIVLFIAVGLFFIKGSNFTPFVIIQKGQSASSAFVAVSITLFYAFTGFESLAVAAKDMENPKKNVPKALVMVMFVVSVIYMLILGISIGVLGNGLAGSATPVADAAIKMLGPIGGYIITIGTIVSVGGINIASSIFTPRSAAALVEQGLMPKSIRKTNKNGAPYIAIIVSVIGTLLIAWSGSFTTLSQISVVSRFIQYIPTCLAVLILRKKYAGKDVNFRIPGGAIIPIFAVIISILLLIKAGIDEPMKIVWGLGGMIIVVPVYFYMTKVYSKKYNDVEVK

SEQ ID NO: 8355 - protein, 256 aa, Clostridium difficile 630
MSKGFLTPGETAQATISAGIKKANISTQNAILLGLFGGAFIGFGALGSMIVSQTFGKIDPGVASFLSAMVFPVGLMLVVVAGAELFTGNTLMAIALMDKKITLGKMLRNWGLVYFANLVGSILLVALVFYSSTLTGDAATKAIAVAEAKVNSTIASMFLKAILCNILVVLAVWMATASQDIMSKLASCWTVIMLFVLCGFQHSVANMFFIPMGMALGANITMVQFITNLVFVTLGNIVGGSIVVGGIYYLCYVKNS

SEQ ID NO: 8356 - protein, 316 aa, Clostridium difficile 630
MNTSGSEIKIIAGNSSKELAQKIADYIGVSVLDCEVGTFSDGEICVNMNETVRGCDVFVVQSTNSPVNDNLMELLILIDALKRASAGRITAVIPYYGYARQDRKAKARDPITAKLVANLITAAGADRVLTMDLHAAQIQGYFDIPLDHLLGGTILANYFNEKKIEDLVVVSPDLGSVTRSRKFANTLNGEVPIAIIDKRRPKANVCEVMNLIGDVKGKNVILLDDMIDTAGTIVNAANALKEFGAKDVYACCTHGVLSGPAIERIANSEISELIVLDTIQLPEEKRIDKIKIKTVAPLFGDAIRMIFSNESVSKLF

SEQ ID NO: 8357 - protein, 469 aa, Clostridium difficile 630
MFIINELNKIVNEEVISFHMPGHKKGQVYKKLGYKDILKNLYKMDTTEILGTDNLHFPEGIIKNSQKKASRVFKSDYTCYLVNGSSCGIQSAIMSVCSPKSKIITNRDCHQSVINGCILGDIDIEYVPCEISEETNVLKGISISNVIDIIDKNLDAKAVLLTYPTYYGMTYDLEYICNYAHSKKMVVIVDEAHGAHLGLSERLPKTALEQGADIVVQSTHKTLPAFTQSSMIHIQGDRVDIDKILNMLRITESSSPSYLLLSSLELAVDIYENKGKELMEELLNNIITFKNKVDSNINIYDTNDKTKIFISSKNMGLTGYELENILRNKYNIQVELSNYYGVLLICTIGNTAEDFSSLETALNNVVKEDFKFEKLENKKYPVVIPKKILTPREAFYKTKKSVKIYDSIGKVCGECIVPYPPGISVISPGEVISKEIIDYLMFCHSKGMIVSGLKDVDLNFIQVIDLEDI

SEQ ID NO: 8358 - protein, 664 aa, Clostridium difficile 630
MYERRASILNKLLKGAGFYLLVFIIIVGIVQFSGKPTEKIKDLKFSEVYRELTDENISRLYFVNQTSVEGTIKDTNTKFKSYVPTEVMGNKLADEVLDQAKAGKLTFGGEAKPSTPWFVEMLPTLLLIFFMVIIWFVFMNQSQGGGGKVMSFGKSKAKVHKDDEKTRVTFKDVAGLDEEKEDLQEVVDFLKNPKKYIELGARIPKGMLMVGPPGTGKTYLSRAVAGEAGVPFFSISGSDFVEMFVGVGASRVRDLFEQAKKSAPAIIFIDEIDAVGRKRGAGLGGGHDEREQTLNQLLVEMDGFGVNQGIIIMAATNRPDILDPALLRPGRFDRQVVVGTPDVKGREAIFKVHSRNKPLSDDVKMDVLARRTPGFTPADIENLMNEAAILTARKREKKIKMETIEEAITKVIAGVAKKSKVISEKERRLTAYHEGGHAVCAHVLEEVSPVHQVTIVPRGRAGGFTMQLPVEDKFYATKNEMKENIVVLLGGRVAEELVLKDVSTGASNDLERVTATARSMVTKYGMSSKLGPMSFDSDDEVFLGNSFSSKRNYSEEVAFEIDQETKRIVDGAYDKTRSILQENMDRLEYVAQALLIYETLDAEQFVKAFNKELPLNEIENAVTEENSSKEVEEQLTIKLEKDEEERNNVIDINKNLEDKSDKDK

SEQ ID NO: 8359 - protein, 228 aa, Clostridium difficile 630
MKRIFLVEDDKAIAKNLILLLNSEGFIVTHVSTRSEALVEIAKNKFDLALIDISLPDGNGFTICTEIKEKQDIPVIFLTASGDESSVVTGLNMGADDYITKPFRPRELIARIRTALRKSGRFGSTFEICGLYVDTATGVVKKNGNEVFLSALEYRLLLVFISNPKSIITRVRLLDELWDAAGEFVNDNTLTVYIKRLREKIEDDPSSPQIILTVRGTGYRLGGSYVSK

SEQ ID NO: 8360 - protein, 242 aa, Clostridium difficile 630
MLEIKNLSFNVESNNEELGIINDVSLSFERGKLIVITGPNGGGKSTIAKLIMGIEKATSGQIILDGEDITNLSITERAKKGIGYAFQQPPRIKGMTVENLLTLAHGKPLSTDVCCQYLTDVGLCSKDYLNREVDNSLSGGEMKRIEIATLFARDLKVSIFDEPEAGIDLWSFGKLNESFKKIHEESNQTIIIISHQERILELADEIIVLQDGSVKSHGTKEAILPEIMCQVNSSCELMKDMN

SEQ ID NO: 8361 - protein, 207 aa, Clostridium difficile 630
MISRRIHLMENTLSEFLDNISNELSEFIASIDETSINKACELILEAEKNHGRVHVTGIGKPGHVSGYISSLLSSTGTSAYILHGTEAVHGSSGQVVEGDVVIAISNSGETQELKATLKTLKVNGAKIIGVSGNESSFLKNISDIFLFAGVKQEGDCLNKAPRASILAETIILQSLSVVLQYAKGLNTQQYLKWHPAGSLGKSIREGI

SEQ ID NO: 8362 - protein, 235 aa, Clostridium difficile 630
MNIIGNFLGLILKVIFEFVNHYGISIILFTILVKIILLPLTIKQTKSTKAMQDIQPRIKEIQEKYKNKPEKQNEEIVKLYGEAKINPLSGCLPLLIQFPILIGLFSVLREPVAHGVFANKAAFLAADNGFLWIKSLTSPDYVLAVFSGASAYVMQKVMTPKDQLQGSMKVMTYVMAGMSFYWGFIFPAGLTLYWTVSNLFSIAQYYLIMNPLKAKLAANSKEEKVNEKKPKINKK

SEQ ID NO: 8363 - protein, 245 aa, Prunus persica
MGRGRVELKRIENKINRQVTFAKRRNGLLKKAYELSILCDAEVALIIFSNRGKLYEFCSSSSSILKTLERYQKCSYGQVEVNKPAKELESSYREYLKLKGRFESLQRTQRNLLGEDLGPLNTKELEQLERQLESSLKQVRSTKTQYMLDQLSDLQNKEQMLIEANRDLSLKLDDISSRNQIRQSWEGGNQGGMAYGSQHAQSQGFFQPLDCNPTLQIGYSNVGSEQMSATTHAQQVNGFIPGWML

SEQ ID NO: 8364 - protein, 1207 aa, Solanum pimpinellifolium
MKAHKTVFNQHPLSLNKLFFVLLLIFFLPPASPAASVNGLYKDSQQLLSFKAALPPTPTLLQNWLSSTDPCSFTGVSCKNSRVSSIDLSNTFLSVDFSLVTSYLLPLSNLESLVLKNANLSGSLTSAAKSQCGVTLDSVDLAENTISGPISDISSFGVCSNLKSLNLSKNFLDPPGKEMLNAATFSLQVLDLSYNNISGFNLFPWVSSMGFVELEFFSLKGNKLAGSIPELDFKNLSYLDLSANNFSTVFPSFKDCSNLQHLDLSSNKFYGDIGSSLSSCGKLSFLNLTNNQFVGLVPKLPSESLQYLYLRGNDFQGVYPNQLADLCKTVVELDLSYNNFSGMVPESLGECSSLELVDISYNNFSGKLPVDTLSKLSNIKTMVLSFNKFVGGLPDSFSNLLKLETLDMSSNNLTGVIPSGICKDPMNNLKVLYLQNNLFKGPIPDSLSNCSQLVSLDLSFNYLTGSIPSSLGSLSKLKDLILWLNQLSGEIPQELMYLQALENLILDFNDLTGPIPASLSNCTKLNWISLSNNQLSGEIPASLGRLSNLAILKLGNNSISGNIPAELGNCQSLIWLDLNTNFLNGSIPPPLFKQSGNIAVALLTGKRYVYIKNDGSKECHGAGNLLEFGGIRQEQLDRISTRHPCNFTRVYRGITQPTFNHNGSMIFLDLSYNKLEGSIPKELGAMYYLSILNLGHNDLSGMIPQQLGGLKNVAILDLSYNRFNGTIPNSLTSLTLLGEIDLSNNNLSGMIPESAPFDTFPDYRFANNSLCGYPLPIPCSSGPKSDANQHQKSHRRQASLAGSVAMGLLFSLFCIFGLIIVAIETKKRRRKKEAALEAYMDGHSHSATANSAWKFTSAREALSINLAAFEKPLRKLTFADLLEATNGFHNDSLVGSGGFGDVYKAQLKDGSVVAIKKLIHVSGQGDREFTAEMETIGKIKHRNLVPLLGYCKVGEERLLVYEYMKYGSLEDVLHDRKKIGIKLNWPARRKIAIGAARGLAFLHHNCIPHIIHRDMKSSNVLLDENLEARVSDFGMARLMSAMDTHLSVSTLAGTPGYVPPEYYQSFRCSTKGDVYSYGVVLLELLTGKQPTDSADFGDNNLVGWVKLHAKGKITDVFDRELLKEDASIEIELLQHLKVACACLDDRHWKRPTMIQVMAMFKEIQAGSGMDSTSTIGADDVNFSGVEGGIEMGINGSIKEGNELSKHL

SEQ ID NO: 8365 - protein, 1206 aa, Solanum tuberosum
MKAHKTVFYQHPLSLNKLFFVLLLIFFLPPASPASVNGLFKDSQQLLSFKAALPPTPTLLQNWLSSTDPCSFTGVSCKNSRVSSIDLSNTFLSVDFNLVTSYLLPLSNLESLVLKNANLSGSLTSAAKSQCGVSLDSIDLAENTISGPISDISSFGVCSNLKSLNLSKNFLDPPGKEILKGATFSLQVLDLSYNNISGFNLFPWVSSMGFGELEFFSLKGNKLAGSIPELDFKNLSHLDLSANNFSTVFPSFKDCSNLQHLDLSSNKFYGDIGSSLSSCGKLSFLNLTNNQFVGLVPKLQSESLQYLYLRGNDFQGVYPNQLADLCKTVVELDLSYNNFSGMVPESLGECSSLELVDISNNNFSGKLPVDTLLKLSNMKTMVLSFNKFVGVLPDSFSNLLKLETLDVSSNNLTGVIPSGICKDPMNNLKVLYLQNNLFEGPIPASLSNCSQLVSLDLSFNYLTGRIPSSLGSLSKLKDLILWLNQLSGEIPQELMYLQALENLILDFNDLTGPIPASLSNCTKLNWISLSNNQLSGEIPASLGRLSNLAILKLGNNSISRNIPAELGNCQSLIWLDLNTNFLNGSIPPPLFKQSGNIAVALLTGKRYVYIKNDGSKECHGAGNLLEFGGIRQEQLGRISTRHPCNFTRVYRGITQPTFNHNGSMIFLDLSYNKLEGSIPKELGTMYYLSILNLGHNDLSGMIPQDLGGLKNVAILDLSYNRFNGPIPNSLTSLTLLGEIDLSNNNLSGMIPESAPFDTFPDYRFANNSLCGYPLPLPCSSGPKSDANQHQKSHRRQASLAGSVAMGLLFSLFCIFGLIIVAIETKKRRKKKEAALEAYMDGHSHSATANSAWKFTSAREALSINLAAFEKPLRKLTFADLLEATNGFHNDSLVGSGGFGDVYKAQLKDGSVVAIKKLIHVSGQGDREFTAEMETIGKIKHRNLVPLLGYCKVGEERLLVYEYMKYGSLEDVLHDRKKIGIKLNWPARRKIAIGAARGLAFLHHNCIPHIIHRDMKSSNVLLDENLEARVSDFGMARLMSAMDTHLSVSTLAGTPGYVPPEYYQSFRCSTKGDVYSYGVVLLELLTGKQPTDSADFGDNNLVGWVKLHAKGKITDVFDRELLKEDPSIEIELLQHLKVACACLDDRHWKRPTMIQVMAMFKEIQAGSGMDSTSTIGADDVNFSAVEGGIEMGINESIKEGNELSKHL

SEQ ID NO: 8366 - protein, 1214 aa, Nicotiana benthamiana
MKPHKSALYQHHCSLKKIFLLSFYLQPLFILLLIIFFLPPASPASVNGLLKDSQQLLSFKSSLPNTQAQLQNWLSSTDPCSFTGVSCKNSRVSSIDLTNTFLSVDFTLVSSYLLGLSNLESLVLKNANLSGSLTSAAKSQCGVSLNSIDLAENTISGSVSDISSFGPCSNLKSLNLSKNLMDPPSKEIKASTLSLQVLDLSFNNISGQNLFPWLSSMRFVELEYFSLKGNKLAGNIPELDYKNLSYLDLSANNFSTGFPSFKDCSNLEHLDLSSNKFYGDIGASLSSCGRLSFLNLTSNQFVGLVPKLPSESLQFMYLRGNNFQGVFPSQLADLCKTLVELDLSFNNFSGLVPENLGACSSLELLDISNNNFSGKLPVDTLLKLSNLKTMVLSFNNFIGGLPESFSNLLKLETLDVSSNNITGVIPSGICKDPMSSLKVLYLQNNWLTGPIPDSLSNCSQLVSLDLSFNYLTGKIPSSLGSLSKLKDLILWLNQLSGEIPQELMYLKSLENLILDFNDLTGSIPASLSNCTNLNWISMSNNLLSGEIPASLGGLPNLAILKLGNNSISGNIPAELGNCQSLIWLDLNTNLLNGSIPGPLFKQSGNIAVALLTGKRYVYIKNDGSKECHGAGNLLEFGGIRQEQLDRISTRHPCNFTRVYRGITQPTFNHNGSMIFLDLSYNKLEGSIPKELGSMYYLSILNLGHNDLSGVIPQELGGLKNVAILDLSYNRLNGSIPNSLTSLTLLGELDLSNNNLTGPIPESAPFDTFPDYRFANTSLCGYPLQPCGSVGNSNSSQHQKSHRKQASLAGSVAMGLLFSLFCIFGLIIVAIETKKRRKKKEAALEAYMDGHSNSATANSAWKFTSAREALSINLAAFEKPLRKLTFADLLEATNGFHNDSLIGSGGFGDVYKAQLKDGSVVAIKKLIHVSGQGDREFTAEMETIGKIKHRNLVPLLGYCKVGEERLLVYEYMKYGSLEDVLHDRKKNGIKLNWHARRKIAIGAARGLAFLHHNCIPHIIHRDMKSSNVLLDENLEARVSDFGMARLMSAMDTHLSVSTLAGTPGYVPPEYYQSFRCSTKGDVYSYGVVLLELLTGRTPTDSADFGDNNIVGWVRQHAKLKISDVFDRELLKEDPSIEIELLQHLKVACACLDDRHWKRPTMIQVMAMFKEIQAGSGIDSSSTIAADDVNFSAVEGGIEMGISESIKEGNELSKHL

SEQ ID NO: 8367 - protein, 339 aa, Burkholderia sp. TH2
MFRSIALRFEDDVTYFITSSENETVADAAYQQGISIPLDCRNGVCGTCKGFCERGEYDGGDYSEDALSADEAREGFVLPCQMRARTDCVIRILASSSACQVKKSTMTGQLTEIDRGSSSTLQFTLAIDPSSKVDFLPGQYAKLRIPGTTESRAYSYSSKPGSSHATFLVRDVPNGKMSGYLRDQATITETFEFDGPYGAFYLREPVRPILMLAGGTGLAPFLSMLQYMASLERNDLPSVRLVYGVNRDDDLVGLHKLDKLATQLSGFSYITTVVDETSAQPRRGYVTQQITKDDMNGGDVDIYVCGPPPMVEAVRSWLVAEKLNPVNFYFEKFAPTVGD

SEQ ID NO: 8368 - protein, 443 aa, Pseudomonas aeruginosa
MSESIAGASLKRTLGPFSVLLFGLAFLAPLIVFGTYGVITQASGNTTAMAYLIAAIGVVFTALSYGRLVRVFPVAGSAYTYTRKMLSANLGFMVGWAALLDYFFIPMLIWLLGASYLNMAFPEVPQWVWIIGFIVSTSLLNILGIQVANRFNVLLMVAQLAIIVVFIGLCVHYIVAVNGPGGLLSAKPFFNPDVSFATSMAGAAIAAYSFLGFDALSTLSEETRDPGRTLPRAILLVALIGGSVYVGSSYFMYLAHPSPAFEHVDGAAFEIARMIGGDLFFAVVLAGIIIAHFAAGMSFQASVGRLLYALGRDNQLPRKLFGALHPRYKTPAFNILLCGIFGCAGFALTIATATSLVNFGAFLAFSAVNLCALRLSFDTRLGDGAGLLRGVLCPLVGLVTAGWMLVSLDKDALIMGCSWLGLGAVYLACRTSFFRNPVPDALA

SEQ ID NO: 8369 - protein, 437 aa, Lactococcus lactis subsp. lactis Il1403
MSLFLDTARIEVKAGKGGDGAVAFRREKYVPDGGPAGGDGGKGGSVIFKVDEGMSTLMDFRYNRIFRGKPGEKGMNKGMHGRGAEDLIVHVPQGTTVKDNETGDVLVDLIEKDQEFAVAKGGRGGRGNIRFATPRNPAPEVAENGEPGEDKILLLELRVLADVGLVGFPSVGKSTLLSVVSNARPKIGAYHFTTITPNIGMVQVGYGDSFVMADMPGLIEGAHSGAGLGIQFLRHIERTRVLLHVLDMSELEGRDPYEDYKTINDELESYNLRLMERPQIIVANKMDMPEAAERLAEFKEKLAADLGPDKEMPEIFEVSGLTKTGLQGLLARTSELLAQTPEFLLYDEDELADETAYYGFEEEEKPFKVSRDDDGGWRLSGDKIERLFIMTNFDHDESVMKFARQMRAMGVDETLRSMGAKDGDYVRIQKFEFEFVD

SEQ ID NO: 8370 - protein, 647 aa, Planomicrobium okeanokoites
MRFIGSKVNLLDNIQEVIEENVKDDAHVFMDLFSGTGIVGENFKKDYQVLSNDSLYFSYILLKAKIENNSIPNFSELKKIGIKEPLHYLENEEFEISHEFFLTHNYSPYMGCERMYFTVENASRIDFIRLTLNRWKNESLINELEFAYLLAILIEAVPFISNISGTYGAYLKHWDKRALGKLKLRTLDIGNNHYANKTYNEDANSLIEKVYGDILYIDPPYNGRQYISNYHLLETIALYDYPEIYGKTGLRPYVESKSLYCQKKEVGNAFNHLIEKANFRHILVSYSSEGLLLEEEIESILKSHGLPETYRIYKMPYRKYKSKHKQEASELHEYIFYIQKDIALTNSVKSNKKIEVGKHKTNSYIKSPLNYVGGKHKLLNQIVPLFPDKIDTFVDLFSGGFNVGINVNANKIIATDINTYVVEVLDTMKKTSVEEVIAHIERRIEEYGLSKSNEEGFKAFRNYYNKTKKPLDLYTLICYSFNYQFRFNNNQEYNNPFGRERSQFSPALKKKLVLFIEALHEKNVQFVCSEFEHFNFSQLDQNDLVYCDPPYLITTGSYNDGNRGFKDWNRLQEIKLLDILDHLNSKGVYFALSNVLSHKGLENELLLEWSKKYNIHHLQHSYSNSSHNTTRGESQEVLITNYTNYTK

SEQ ID NO: 8371 - protein, 660 aa, Hordeum vulgare subsp. vulgare
MPRTVSDGGEDFDGDVCSQTASQRHTDSTHHHHGYKVGFPPAKGVFAEFAEGVKETFFADDPLREYKDQPRSKKLWLSLVHLFPVLDWSRSYTFGKFKGDLVAGLTIASLCIPQDIGYAKLANLQPHVGLYSSFVPPLIYALMGSSRDIAIGPVAVVSLLLATLLQEEIDPVKNPLEYSRLAFTATFFAGITQAMLGFFRLGFIIEFLSHAAIVGFMAGAAITIALQQLKGLLGIAKFTKKSDIISVMESVWGNVQHGWNWQTILIGSSFLAFLLTTKYIAKKNKKLFWVSAIAPLISVVISTFCVYITRADNQGVAIVRNIKQGINPPSFDLIYWSGPYLAKGFRIGVVSGMVALTEAIAIGRTFAAMKDYQIDGNKEMVALGTMNIVGSMTSCYVATGSFSRSAVNYMAGCKTAVSNVVMAIVVMLTLLLITPLFKYTPNAILASIIINAVVNLVDYETAYLIWKVDKMDFVALLGAFFGVVFASVEYGLLIAVAISLGKILLQVTRPRTALLGNLPRTTIYRNVEQYPEATKVPGVMIVRVDSAIYFTNSNYVKERILRWLRDEEEQQQEQKLSKTEFLIVELSPVTDIDTSGIHALEELLKALEKRKIQLILANPGPAVIQKLRSAKFTDLIGDDKIFLSVGDAVKKFAPKSSLNV

SEQ ID NO: 8372 - protein, 341 aa, Pinus taeda
MGSMGKMVMRFLQKRSLATLPSQMIEKGQNRVVEASLTLIRERAKLKAELVQALGGSIATTCLLGVPLGHNSSFLQGPAFAPPRIREAIWCGSTNSATEKGKELKDSRVLSDAGDVPIQEMRDCGIEDERLMKTVSDSVKIVMEEPPLRPLVLGGDHSISYPVVKAVTDHLGGPVDILHLDAHPDIYDAFEGNKYSHASSFARIMEGGHARRLLQVGIRSITKEGREQGKRFGVEQYEMHSFSKDRDFLENLKLGEGVKGVYISIDVDCLDPAFAPGVSHLEPGGLSFRGVMNLVQNLQGDIVAADVVEFNPQRDTVDGMTAMVAAKLVRELTSKMSKLAH

SEQ ID NO: 8373 - protein, 338 aa, Neurospora crassa
MRANTRFCKQLLAQRRTFSSTARRLDNYAFIGLGQMGYQMARNLQSKLPPSDTIRLYDINRGAAEKLAQEMSAQQAGGASAHVANSAADASREADTVVTCLPEPQHVKAIYESILKDELPPRPGPRLFIDCSTIDPTSSRVVAAAVDKALPNGQGHFVDAPMSGGVVGATAGTLTFMLGAPDSLVARSEIVLQRMGKRVLHCGPQGAGLAAKLANNYLLAIENIATAEAMNLGARWGLDPKVLASVINVSTGKCWPSEVNNPVPGVVKTAPANRDYQGGFGIGLMRKDLRLAILAAKEADAKLVLADKASEVYETAESEERCKGRDFSVVYRWLGGKE

SEQ ID NO: 8374 - protein, 356 aa, Avicennia marina
MSLLSDLLNLDLSETTEKIIAEYVWVGGSGMDLRSKARTISGPVSDPSKLPKWNYDGSSTGQAPGEDSEVILYPQAIFRDPFRRGKNILVMCDTYTPAGEPIPTNKRHAAAKIFSHPDVAAEEPWYGIEQEYTLLQKNVKWPMGWPTGGYPGPQGPYYCGVGADKAFGRDIVDAHYKSCLYAGINISGINGEVMPGQWEFQVGPAVGISAGDELWMARYILERITEIAGVVLSFDPKPIQGDWNGAGAHTNYSTKSMRKEGGFEVIKKAIEKLGHRHKEHIAAYGEGNERRLTGRHETADINSFKWGVANRGASVRVGRDTEREGKGYFEDRRPASNMDPYIVTSMIAETTILGKH

SEQ ID NO: 8375 - protein, 396 aa, Azotobacter chroococcum (strain mcd 1)
MADVYLDNNATTRVDDEIVEAMLPFFTEQFGNPSSLHSFGNQVGLALKRARQQRAGVLGEHDSEIIFTSCGTESDHAILSALSPARAQDLITTVVEHPAVLSLCDYLASEGYTVHKLPVDKKGRLDLDHYASLLNDDVAVVSVMWANNETGTLFPVEEMARMADEAGIMFHTDAVQAVRKLPIDLKNSSIHMLSLSGHKLHRKGVGVLYLRRGTRFRRCCRGHQERPAGGTENAASIIAMGWAAERALAFMEHENTEVKRLRDKLEAGILAVVPHAFVTGDPDNRLPNTANIAFEYIEGEAILLLLNKVGIAASSGSACTSGSLEPSHVMRAMDIPYTAAHGTVRFSLSRYTTEEEIDRVIREVPPIVAQLRNVSPYWSGNGPVEHPGKAFAPVYG

SEQ ID NO: 8376 - protein, 301 aa, Geobacillus stearothermophilus
MKPILKYRGGKKAEIPFFIDHIPNDIETYFEPFVGGGAVFFHLEHEKSVINDINSKLYKFYLQLKHNFDEVTKQLNELQEIYEKNQKEYEEKKALAPAGVRVENKNEELYYELRNEFNYPSGKWLDAVIYYFINKTAYSGMIRYNSKGEYNVPFGRYKNFNTKIITKQHHNLLQKTEIYNKDFSEIFKMAKPNDFMFLDPPYDCIFSDYGNMEFTGDFDEREHRRLAEEFKNLKCRALMIISKTELTTELYKDYIVDEYHKSYSVNIRNRFKNEAKHYIIKNYDYVRKNKEEKYEQLELIH

SEQ ID NO: 8377 - protein, 402 aa, Azotobacter vinelandii
MADVYLDNNATTRVDDEIVQAMLPFFTEQFGNPSSLHSFGNQVGMALKKARQSVQKLLGAEHDSEILFTSCGTESDSTAILSALKAQPERKTVITTVVEHPAVLSLCDYLASEGYTVHKLPVDKKGRLDLEHYASLLTDDVAVVSVMWANNETGTLFPIEEMARLADDAGIMFHTDAVQAVGKVPIDLKNSSIHMLSLCGHKLHAPKGVGVLYLRRGTRFRPLLRGGHQERGRRAGTENAASIIGLGVAAERALQFMEHENTEVNALRDKLEAGILAVVPHAFVTGDPDNRLPNTANIAFEYIEGEAILLLLNKVGIAASSGSACTSGSLEPSHVMRAMDIPYTAAHGTVRFSLSRYTTEEEIDRVIREVPPIVAQLRNVSPYWSGNGPVEDPGKAFAPVYG

SEQ ID NO: 8378 - protein, 397 aa, Klebsiella pneumoniae
MKQVYLDNNATTRLDPMVLEAMMPFLTDFYGNPSSIHDFGIPAQAALERAHQQAAALLGAEYPSEIIFTSWPRATPRHAAIALLPERREIITSVVEHPATLAACEHLERQGYRIHRIAVDSEGALDMAQFRAALSPRVALVSVMWANNETGVLFPIGEMAELAHEQGALFHCDAVQVVGKIPIAVGQTRIDMLSCSAHKFHGPKGVGCLYLRRGTRFRPLLRGGHQEYGRRAGTENICGIVGMGAACELANIHLPGMTHIGQLRNRLEHRLLASVPSVMVMGGGQPRVPGTVNLAFEFIEGEAILLLLNQAGIAASSGSACTSGSLEPSHVMRAMNIPYTAAHGTIRFSLSRYTREKEIDYVVATLPPIIDRLRALSPYWQNGKPRPADAVFTPVYG

SEQ ID NO: 8379 - protein, 289 aa, Agrobacterium tumefaciens
MRQKYKNEKRSINNDETKGTAAMTNSFSMISRTATALGTIAALMLASAPASAQTLPKAIKDAGIIRIGVKCDSPPFGASGTDGKPAGIEIDIAKQIGIAAFGSANKAELSCVATDARIPSLTGGKIDLIIATLGKTPSREQVIDYSNIYYWGSSRVIVPKESKVQKLADLDGKSMLIIKGGSQLKWLKERIPTLEFIQLNTNADNLQALQQGRADGYVGDAITIATLASSYPQFRALEEPVDLGFNGVGIRKGEDELKAFVNGVLKKLKDEKFYSKTVPTYVKDPPATK

SEQ ID NO: 8380 - protein, 569 aa, Zea mays
IPGRTGRARAAVSVPPPAGEQVPTERLEPRVEERAGGYWVLKEKYRAGLNPQEKVKLEKEPMALFMEGGIQDLARVPMEQIDAAKLTKDDVDVRLKWLGLFHRRKHQYGRFMMRLKLPNGVTTSEQTRYLASVIEAYGADGCADVTTRQNWQIRGVTLPDVPAILDGLRAVGLTSLQSGMDNVRNPVGNPLAGVDPHEIVDTRPYTNLLSSYVTNNSQGNPTITNLPRKWNVCVIGSHDLYEHPHINDLAYMPAVKDGEFGFNLLVGGFISPKRWAEALPLDAWVAGDDVVPVCKAILEAYRDLGSRGNRQKTRMMWLIDELGMEVFRSEVEKRMPNGVLERAAPEDLVDKRWERRDYLGVHPQKQEGLSYVGLHVPVGRLQAADMFELARLADEYGTGELRLTVEQNIVLPNVSNERLDALLAEPLLQEQRLSPRPSMLLRGLVACTGNQFCGQAIIETKARALQVAREVEKRVAVPRPVRMHWTGCPNSCGQVQVADIGFMGCLTKDSDGKIVEAADIFVGGRVGSDSHLADVYRKSVPCKDLVPIVADLLVERFGAVPREREEDEE

SEQ ID NO: 8381 - protein, 594 aa, Spinacia oleracea
MASLPVNKIIPSSTTLLSSSNNNRRRNNSSIRCQKAVSPAAETAAVSPSVDAARLEPRVEERDGFWVLKEEFRSGINPAEKVKIEKDPMKLFIEDGISDLATLSMEEVDKSKHNKDDIDVRLKWLGLFHRRKHHYGRFMMRLKLPNGVTTSEQTRYLASVIKKYGKDGCADVTTRQNWQIRGVVLPDVPEIIKGLESVGLTSLQSGMDNVRNPVGNPLAGIDPHEIVDTRPFTNLISQFVTANSRGNLSITNLPRKWNPCVIGSHDLYEHPHINDLAYMPATKNGKFGFNLLVGGFFSIKRCEEAIPLDAWVSAEDVVPVCKAMLEAFRDLGFRGNRQKCRMMWLIDELGMEAFRGEVEKRMPEQVLERASSEELVQKDWERREYLGVHPQKQQGLSFVGLHIPVGRLQADEMEELARIADVYGSGELRLTVEQNIIIPNVENSKIDSLLNEPLLKERYSPEPPILMKGLVACTGSQFCGQAIIETKARALKVTEEVQRLVSVTRPVRMHWTGCPNSCGQVQVADIGFMGCMTRDENGKPCEGADVFVGGRIGSDSHLGDIYKKAVPCKDLVPVVAEILINQFGAVPREREEAE

SEQ ID NO: 8382 - protein, 255 aa, Galdieria sulphuraria
MDNLRRKEKILIADDESSIRRILETRLSIIGYEVLTAPDGRSALFLFHKEHPNLVVLDVMMPKIDGYGVCQEIRKESDIPIIMLTALGDVTDRITGLELGADDYVVKPFSPKELEARIRCVLRRVDKFYFSNTFTNSGIINIGFLKIDINRKQVYKNEERIRLTGMEFNLLELLISNSGEPLSRTTILEEVWGYTPERHLDTRVVDVHISRLRAKLEDDPSNPELILTSRGTGYLFQRIMEINKNYNPIIQIQKI

SEQ ID NO: 8383 - protein, 240 aa, Porphyridium aerugineum
MQKEKILVIDDEASIRRILETRLSIIGYDVISAADGEEALSIFKREHPNLVVLDLMMPKLDGYGVCQELRKESDVPIIMLTALSDVSDRITGLELGADDYIVKPFSPKELEARIRSVLRRVDKASSNNNLPNSGIINIGFLKIDVNKHQVYKNNERVRLTGMEFSLLELLISKAGQPFSRATILQEVWGYTAERQVDTRVVDVHISRLRAKLEDDPSNPDLILTARGTGYLFQRLNDSIV

SEQ ID NO: 8384 - protein, 390 aa, Pseudomonas syringae
MAQSYSARSRAIEPFHVMALLARANELQAAGHDVIHLEIGEPDFTTAEPIIAAGQAALAAGKTRYTAARGLPELREAISGFYQQRYGLDIDSSRILITPGGSGALLLASSLLVDPGKHWLLADPGYPCNRHFLRLVEGAAQLVPVGPEVRYQLTADLVERYWDQDSVGALVASPANPTGTILSRDELASLSAAIKARNGHLVVDEIYHGLTYGCDAASVLEVDDSAFVLNSFSKYFGMTGWRLGWLVAPPEAVADLEKLAQNLYISAPSMAQYAALACFEPQTLAILEERRAEFGRRRDFLLPALRELGFGIAVEPEGAFYLYADISAFGGDAFAFCRHFLETEHVAITPGLDFGRFQSGHHVRFAYTQSLPRLQEAVERLARGLQSWKG

SEQ ID NO: 8385 - protein, 711 aa, Solanum chacoense
MRLLLLLPILIGILLYCANYAIADTDPNDASALRVLYSSLNSPGQLTKWNANGGNPCGESWTGITCSGNRVTEIKISGLGLSGSLGYQLASLTSVTNFDISNNNLGNQLPYQLPPNVQRLNLAANGFNGALPYSVSQMTSLRYLNVSHNQIQGQVTVAFDSLSSLDTLDFSFNAMTGDLPQSFKALTSMNKMYLQNNQFTGTIDILANLPLDDLNVENNRFTGWVPNHLKGITKSNGNSWNSGSAPPPPPGTPPASRPHHKSGGNNSATDGASSGDGGGKSGIGGGAIAGIVISVLVVGAIVAFFVIKKRLKRSSTDIEKHDNQPFAPLAPPQEVHELKTNEASSAPIVKVFEAPAVVNLRPPPIERHKSFDEVDIAAKPIVPPKKVNTAKIDARQYSIADLQMATDSFNVDNLIGEGSFGRVYRAQFDDGKVLAVKKINSSALQNPEDFLDIVSEISRLHHPNVTELVGYCSEHGQHLLVYEFHKNGSLHDFLHLSDEESKPLTWNSRVKIALGTARALEYLHEVCSPSLVHKNIKSANIVLDAELNPHLSDCGLASLIADADQALNHNTGSGYGAPEVAMSGLCTIKSDVYSFGVVMLELLTGRKPFDSARTRSEQSLVRWATPQLHDIDALAKMVDPALEGLYPVKSLSRFADVIALCVQPEPEFRPPMSEVVEALVRLVQRANMSKRTFGADQGTSRGETDGPDYEP

SEQ ID NO: 8386 - protein, 152 aa, Solanum lycopersicum
MSSFSEEQEALVVKSWGSMKKDAGEWGLKFFLKIFEIAPSAKKMFSFLKDSNVPLDQNPKLKIHAKSVLVMTCEAAVQLRKAGKVVVRDSTLKKIGATHFKYGVVDEHFEVTKYALLETIKEASQEMWSVEMKNAWGEAYDQLVSAIKTEMK

SEQ ID NO: 8387 - protein, 431 aa, Beta vulgaris
MAQILAPNMQCQMKLSKSLTNSMIPNSWTSILLKGSQKGSIKCSTKFKVCAALKTEHGTVNRMEQLLNLDVTPFTDKIIAEYIWIGGSGIDLRSKSRTLSRPVEDPSELPKWNYDGSSTGQAPGEDSEVILYPQAIFKDPFRGGNNILVICDAYTPAGEPIPTNKRHKAAEIFSNPKVASEVPWFGIEQEYTLLQPNVQWPLGWPVGAYPGPQGPYYCGVGADKSFGRDISDAHYKACLYAGINISGTNGEVMPGQWEFQVGPSVGIEAGDHIWCARYLLERITEQAGVVLTLDPKPIEGDWNGAGCHTNYSTKTMREDGGFEVIKKAILNLSLRHKEHISAYGEGNERRLTGKHETADIDTFSWGVANRGCSIRVGRDTEKEGKGYMEDRRPASNMDPYVVTGLLAESTLLWEPTLEAEALAAQRLSLNV

SEQ ID NO: 8388 - protein, 471 aa, Rhizobium leguminosarum bv. trifolii
MSRLVVVSNRVPMPAKDGSAAAGGLAVALQAALQERGGIWMGWSGESSGDREPGPLSQLQKGNITYALTDLTDTDVEEYYRGFANRVLWPICHYRLDLAEYGRKEMAGYFRVNRFFAHRLAPMIEPDDIIWVHDYHLIPLAAELRQMGLKNRIGFFLHIPWPPADILVTMPVHEEIMRGLSHYDLVGFQTDYDLQNFAGYLRREGIGDDLGNGLFDSHGRIFKAGAYPIGIETAGFAEFAERAANHIMVQKTRRSVEGRDMIIGVDRLDYSKGIIQRLEAFETFLTSNPAYQNKVTYLQVTPKSRSEVPEYEHMQKMVAEQAGRVNGAIGTVDWVPIRYVNRSISRNVLAGLYRLATIGLVTPLRDGMNLVAKEYVAAQDPDRPGVLVLSRFAGAARELKGALLVNPYDVEGTANAIAKGLAMSLEERRNRWSMMMEHLLTHDVSLWCENFLGDLVLAPEPRLERDSRTGS

SEQ ID NO: 8389 - protein, 315 aa, Hordeum vulgare
MASSSYTSLLVLVALVTAASAQLSPTFYDTSCPRALATIKSGVMAAVTSDPRMGASLLRLHFHDCFVQGCDASVLLSGMEQNAIPNAGSLRGFGVIDSIKTQIEAICKQTVSCADILTVAARDSVVALGGPSWTVPLGRRDSIDANENEANTDLPGFNSSRAELEAAFLKKGGLNTVDMVALSGAHTIGQAQCSTFRARIYGGDTNINAAYAASLRANCPQTVGSGDGSLANLDTTTANTFDNAYYTNLMSQKGLLHSDQVLFNNDTTDNTVRNFASNPAAFSSSFTTAMIKMGNIAPKTGTQGQIRLSCSRVNS

SEQ ID NO: 8390 - protein, 364 aa, Solanum lycopersicum
MGFRLSHLSLALSFVALALAGVAIYRNTYEAIIMKNGSLLKNVSPDFDSLESGVASILTLNNNKKRNSDKYLRQQLTPEACVFSAVRAVVDSAIDAETRMGASLIRLHFHDCFVDGCDGGILLDDINGTFTGEQNSPPNANSARGYEVIAQAKQSVINTCPNVSVSCADILAIAARDSVAKLGGQTYSVALGRSDARTANFSGAINQLPAPFDNLTVQIQKFSDKNFTLREMVALAGAHTVGFARCSTVCTSGNVNPAAQLQCNCSATLTDSDLQQLDTTPTMFDKVYYDNLNSNQGIMFSDQVLTGDATTAGFVTDYSNDVNVFLGDFAAAMIKMGDLPPSAGAQLEIRDVCSRVNPTSVASM

SEQ ID NO: 8391 - protein, 363 aa, Solanum lycopersicum
MGFRLSLLSLAVSLVALALAGVAIYRNTYEAMIMNNGSLLQNISPDIDSLESGEVSILILNDKKKNSDKYLSQQLTQESCVFSAVKGVVDSAIDNETRMGASLIRLHFHDCFVDGCDGGILLDDINGTFTGEQNSPPNNNSVRGFEVIAQAKQSVVDSCPNISVSCADILAIAARDSLAKLGGQTYTVALGRSDATTANFSGAINQLPAPSDNLTVQIQKFSDKNFTVREMVALAGAHTVGFARCSTVCTSGNVNPAAQLQCNCSATLTDSDLQQLDTTPAVFDKVYYDNLNNNQGIMFSDQVLTGNTTTAGFVTTYSNNVTVFLEDFAAAMIKMGNLPPSAGAQLEIRDVCSRVNPTSVASM

SEQ ID NO: 8392 - protein, 1129 aa, Avena sativa
MSSSRPASSSSSRNRQSSQARVLAQTTLDAELNAEYEESGDSFDYSKLVEAQRDGPPVQQGRSEKVIAYLQHIQKGKLIQTFGCLLALDEKSFNVIAFSENAPEMLTTVSHAVPSVDDPPRLGIGTNVRSLFSDQGATALHKALGFADVSLLNPILVQCKTSGKPFYAIVHRATGCLVVDFEPVKPTEFPATAAGALQSYKLAAKAISKIQSLPGGSMEVLCNTVVKEVFDLTGYDRVMAYKFHEDDHGEVFSEITKPGLEPYLGLHYPATDIPQAARLLFMKNKVRMICDCRARSIKVIEAEALPFDISLCGSALRAPHSCHLQYMENMNSIASLVMAVVVNENEEDDEAESEQPAQQQKKKKLWGLLVCHHESPRYVPFPLRYACEFLAQVFAVHVNREFELEKQLREKNILKMQTMLSDMLFREASPLTIVSGTPNIMDLVKCDGAALLYGGKVWRLRNAPTESQIHDIAFWLSDVHRDSTGLSTDSLHDAGYPGAAALGDMICGMAVAKINSKDILFWFRSHTAAEIRWGGAKNDPSDMDDSRRMHPRLSFKAFLEVVKMKSLPWSDYEMDAIHSLQLILRGTLNDASKPKREASLDNQIGDLKLDGLAELQAVTSEMVRLMETATVPILAVDGNGLVNGWNQKAAELTGLRVDDAIGRHILTLVEDSSVPVVQRMLYLALQGKEEKEVRFEVKTHGPKRDDGPVILVVNACASRDLHDHVVGVCFVAQDMTVHKLVMDKFTRVEGDYKAIIHNPNPLIPPIFGADEFGWCSEWNAAMTKLTGWNRDEVLDKMLLGEVFDSSNASCPLKNRDAFVSLCVLINSALAGEETEKAPFGFFDRSGKYIECLLSANRKENEGGLITGVFCFIHVASHELQHALQVQQASEQTSLKRLKAFSYMRHAINNPLSGMLYSRKALKNTDLNEEQMKQIHVGDNCHHQINKILADLDQDSITEKSSCLDLEMAEFLLQDVVVAAVSQVLITCQGKGIRISCNLPERFMKQSVYGDGVRLQQILSDFLFISVKFSPVGGSVEISSKLTKNSIGENLHLIDLELRIKHQGLGVPAELMAQMFEEDNKEQSEEGLSLLVSRNLLRLMNGDVRHLREAGVSTFIITAELASAPTAMGQ

SEQ ID NO: 8393 - protein, 1129 aa, Avena sativa
MSSSRPASSSSSRNRQSSRARVLAQTTLDAELNAEYEESGDSFDYSKLVEAQRDGPPVQQGRSEKVIAYLQHIQKGKLIQTFGCMLALDEKSFNVIAFSENAPEMLTTVSHAVPSVDDPPRLGIGTNVRSLFSDQGATALHKALGFADVSLLNPILVQCKTSGKPFYAIVHRATGCLVVDFEPVKPTEFPATAAGALQSYKLAAKAISKIQSLPGGSMEVLCNTVVKEVFDLTGYDRVMAYKFHEDDHGEVFAEITKPGLEPYLGLHYPATDIPQAARFLFMKNKVRMICDCRARSIKVIEAEALPFDISLCGSALRAPHSCHLQYMENMNSIASLVMAVVVNENEEDDEAESEQPAQQQQKKKLWGLLVCHHESPRYVPFPLRYACEFLAQVFAVHVNREFELEKQLREKSILKMQTMLSDMLFREASPLTIVSGAPNIMDLVKCDGAALLYGGKVWRLRNAPTESQIHDIAFWLSDVHRDSTGLSTDSLHDAGYPGASALGDMICGMAVAKINSKDIIFWFRSHTAAEIRWGGAKHDSSDMDDSRRMHPRLSFKAFLEVVKMKSLPWTDYEMDAIHSLQLILRGTLNDASKPKREASLDNQIGDLKLDGLAELQAVTSEMVRLMETATVPILAVDGNGLVNGWNQKAAELTGLRVDDAIGRHILTLVEESSVPVVQRMLYLALQGKEEKEVRFEVKTHGPRRDDGPVILVVNACASRDLHDHVVGVCFVAQDMTVHKLVMDKFTRVEGDYKAIIHNPNPLIPPIFGADEFGWCSEWNAAMTKLTGWNRDEVLDKMLLGEVFDSSNASCPLKNKNAFVSLCVLINSALAGEETEKAPFGFFDRSGKYIECLLSANRKENEGGLITGVFCFIHVASHELQHALQVQQASEQTSLKRLKAFSYMRHAINNPLSGMLYSRKALKNTDLNEEQMKQIHVGDNCHHQINKILADLDQDSISEKSSCLDLEMAEFVFQDVVVAAVSQVLITCQGKGIRISCNLPERFMKQSVYGDGVRLQQILSDFLFISVKFSPVGGSVEISSKLTKNSIGENLHLIDLELRIKHQGLGVPAELMEQMFEEDNKEQSDEGLGLLVSRKLLRLMNGDVRHLREAGVSTFILTAELASAPTAIGQ

SEQ ID NO: 8394 - protein, 495 aa, Avena sativa
MSSSRPASSSSSRNRQSSQARVLAQTTLDAELNAEYEESGDSFDYSKLVEAQRDGPPVQQGRSEKVIAYLQHIQKGKLIQTFGCLLALDEKSFNVIAFSENAPEMLTTVSHAVPSVDDPPRLGIGTNVRSLFSDQGATALHKALGFADVSLLNPILVQCKTSGKPFYAIVHRATGCLVVDFEPVKPTEFPATAAGALQSYKLAAKAISKIQSLPGGSMEMLCNTVVKEVFDLTGYDRVMAYKFHEDDHGEVFSEITKPGLEPYLGLHYPATDIPQAARFLFMKNKVRMICDCRARSIKVIEAEALPFDISLCGSALRAPHSCHLQYMENMNSIASLVMAVVVNENEEDDEAESEQPAQQQKKKKLWGLLVCHHESPRYVPFPLRYACEFLAQVFAVHVNREFELEKQLREKNILKMQTMLSDMLFREASPLTIVSGNPNIMDLVKCDGAALLYGGKVWRLRNAPTESQIHDIAFWLSDVHRDSTGLSTDSLHDAG

SEQ ID NO: 8395 - protein, 1124 aa, Cucurbita pepo
MSTSRPSQSSSNSGRSRHSTRIIAQTSVDANVQADFEESGNSFDYSSSVRVTSDVSGDQQPRSDKVTTAYLHHIQKGKLIQPFGCLLALDDKTFKVIAYSENAPEMLTMVSHAVPSMGDYPVLGIGTDVRTIFTAPSASALLKALGFGEVTLLNPILVHCKTSGKPFYAIVHRVTGSLIIDFEPVKPYEGPVTAAGALQSYKLAAKAITRLQSLPSGSMARLCDTMVQEVFELTGYDRVMAYKFHDDDHGEVISEVAKPGLQPYLGLHYPATDIPQAARFLFMKNKVRMIVDCRAKHLKVLQDEKLQFDLTLCGSTLRAPHSCHLQYMENMNSIASLVMAVVVNEGDEENEGPALQQQKRKRLWGLVVCHNSSPRFVPFPLRYACEFLAQVFAIHVNKELELENQIIEKNILRTQTLLCDMLMRDAPLGIVSRSPNIMDLVKSDGAALLYKKKIWRLGLTPNDFQLLDIASWLSEYHMDSTGLSTDSLYDAGYPGAIALGDEVCGMAAVRITNNDMIFWFRSHTASEIRWGGAKHEHGQKDDARKMHPRSSFKAFLEVVKTRSLPWKDYEMDAIHSLQLILRNTFKDTDATEINRKSIQTTLGDLKIEGRQELESVTSEMVRLIETATVPILAVDLDGLINGWNTKIAELTGLPVDKAIGKHLLTLVEDSSVEVVRKMLFLALQGQEEQNVQFEIKTHGSHIEVGSISLVVNACASRDLRENVVGVFFVAQDITGQKMVMDKFTRLEGDYKAIVQNPNPLIPPIFGSDEFGWCSEWNPAMAKLTGWSREEVIDKMLLGEVFGVHKSCCRLKNQEAFVNLGIVLNNAMCGQDPEKASFGFLARNGMYVECLLCVNKILDKDGAVTGFFCFLQLPSHELQQALNIQRLCEQTALKRLRALGYIKRQIQNPLSGIIFSRRLLERTELGVEQKELLRTSGLCQKQISKVLDESDIDKIIDGFIDLEMDEFTLHEVLMVSISQVMLKIKGKGIQIVNETPEEAMSETLYGDSLRLQQVLADFLLISVSYAPSGGQLTISTDVTKNQLGKSVHLVHLEFRITYAGGGIPESLLNEMFGSEEDASEEGFSLLISRKLVKLMNGDVRYMREAGKSSFIITVELAAAHKSRTT

SEQ ID NO: 8396 - protein, 1131 aa, Zea mays
MSSSRPAHSSSSSSRTRQSSRARILAQTTLDAELNAEYEESGDSFDYSKLVEAQRSTPPEQQGRSGKVIAYLQHIQRGKLIQPFGCLLALDEKSFRVIAFSENAPEMLTTVSHAVPNVDDPPKLGIGTNVRSLFTDPGATALQKALGFADVSLLNPILVQCKTSGKPFYAIVHRATGCLVVDFEPVKPTEFPATAAGALQSYKLAAKAISKIQSLPGGSMEALCNTVVKEVFDLTGYDRVMAYKFHEDEHGEVFAEITKPGIEPYIGLHYPATDIPQAARFLFMKNKVRMICDCRARSVKIIEDEALSIDISLCGSTLRAPHSCHLKYMENMNSIASLVMAVVVNENEEDDEPEPEQPPQQQKKKRLWGLIVCHHESPRYVPFPLRYACEFLAQVFAVHVNKEFELEKQIREKNILRMQTMLSDMLFKESSPLSIVSGSPNIMDLVKCDGAALLYGDKVWRLQTAPTESQIRDIAFWLSEVHGDSTGLSTDSLQDAGYPGAASLGDMICGMAVAKITSKDILFWFRSHTAAEIKWGGAKHDPSDKDDNRRMHPRLSFKAFLEVVKTKSLPWSDYEMDAIHSLQLILRGTLNDASKPAQASGLDNQIGDLKLDGLAELQAVTSEMVRLMETATVPILAVDGNGLVNGWNQKVAELSGLRVDEAIGRHILTLVEDSSVSLVQRMLYLALQGREEKEVRFELKTHGSKRDDGPVILVVNACASRDLHDHVVGVCFVAQDMTVHKLVMDKFTRVEGDYKAIIHNPNPLIPPIFGADQFGWCSEWNAAMTKLTGWHRDEVVDKMLLGEVFNSSNASCLLKSKDAFVRLCIVINSALAGEEAEKASFGFFDRNEKYVECLLSVNRKVNADGVVTGVFCFIHVPSDDLQHALHVQQASEQTAQRKLKAFSYMRHAINKPLSGMLYSRETLKSTGLNEEQMRQVRVGDNCHRQLNKILADLDQDNITDKSSCLDLDMAEFVLQDVVVSAVSQVLIGCQAKGIRVACNLPERSMKQKVYGDGIRLQQIVSDFLFVSVKFSPAGGSVDISSKLTKNSIGENLHLIDFELRIKHRGAGVPAEILSQMYEEDNKEQSEEGFSLAVSRNLLRLMNGDIRHLREAGMSTFILTAELAAAPSAVGR

SEQ ID NO: 8397 - protein, 1124 aa, Pisum sativum
MSTTRPSQSSNNSGRSRNSARIIAQTTVDAKLHATFEESGSSFDYSSSVRVSGSVDGDQQPRSNKVTTAYLNHIQRGKQIQPFGCLLALDEKTCKVVAYSENAPEMLTMVSHAVPSVGDHPALGIGTDIRTVFTAPSASALQKALGFAEVSLLNPILVHCKTSGKPFYAIIHRVTGSLIIDFEPVKPYEVPMTAAGALQSYKLAAKAITRLQSLASGSMERLCDTMVQEVFELTGYDRVMAYKFHEDDHGEVIAEIAKPGLEPYLGLHYPATDIPQAARFLFMKNKVRMIVDCNAKHVKVLQDEKLPFDLTLCGSTLRAPHSCHLQYMANMDSIASLVMAVVVNDSDEDGDSADAVLPQKKKRLWGLVVCHNTTPRFVPFPLRYACEFLAQVFAIHVNKEIELEYQILEKNILRTQTLLCDMLMRDAPLGIVSQSPNIMDLVKCDGAALFYRNKLWLLGATPTESQLREIALWMSEYHTDSTGLSTDSLSDAGFPGALSLSDTVCGMAAVRITSKDIVFWFRSHTAAEIRWGGAKHEPGDQDDGRKMHPRSSFKAFLEVVKARSVPWKDFEMDAIHSLQLILRNASKDTDIIDLNTKAINTRLNDLKIEGMQELEAVTSEMVRLIETATVPILAVDVDGTVNGWNIKIAELTGLPVGEAIGKHLLTLVEDSSTDIVKKMLNLALQGEEEKNVQFEIKTHGDQVESGPISLIVNACASKDLRENVVGVCFVAQDITAQKTVMDKFTRIEGDYKAIVQNPNQLIPPIFGTDEFGWCCEWNAAMIKLTGWKREEVMDKMLLGEVFGTQMSCCRLKNQEAFVNFGIVLNKAMTGLETEKVPFGFFSRKGKYVECLLSVSKKIDAEGLVTGVFCFLQLASPELQQALHIQRLSEQTALKRLKVLTYMKRQIRNPLAGIVFSSKMLEGTDLETEQKRIVNTSSQCQRQLSKILDDSDLDGIIDGYLDLEMAEFTLHEVLVTSLSQVMNRSNTKGIRIANDVAEHIARETLYGDSLRLQQVLADFLLISINSTPNGGQVVIAASLTKEQLGKSVHLVNLELSITHGGSGVPEAALNQMFGNNVLESEEGISLHISRKLLKLMNGDVRYLKEAGKSSFILSVELAAAHKLKG

SEQ ID NO: 8398 - protein, 668 aa, Arabidopsis thaliana
MARSFGANSTVVLAIIFFGCLFAFSTAKEEATKLGSVIGIDLGTTYSCVGVYKNGHVEIIANDQGNRITPSWVGFTDSERLIGEAAKNQAAVNPERTVFDVKRLIGRKFEDKEVQKDRKLVPYQIVNKDGKPYIQVKIKDGETKVFSPEEISAMILTKMKETAEAYLGKKIKDAVVTVPAYFNDAQRQATKDAGVIAGLNVARIINEPTAAAIAYGLDKKGGEKNILVFDLGGGTFDVSVLTIDNGVFEVLSTNGDTHLGGEDFDHRIMEYFIKLIKKKHQKDISKDNKALGKLRRECERAKRALSSQHQVRVEIESLFDGVDLSEPLTRARFEELNNDLFRKTMGPVKKAMDDAGLQKSQIDEIVLVGGSTRIPKVQQLLKDFFEGKEPNKGVNPDEAVAYGAAVQGGILSGEGGDETKDILLLDVAPLTLGIETVGGVMTKLIPRNTVIPTKKSQVFTTYQDQQTTVSIQVFEGERSLTKDCSLLGKFDLTGVPPAPRGTPQIEVTFEVDANGILNVKAEDKASGKSEKITITNEKGRLSQEEIDRMVKEAEEFAEEDKKVKEKIDARNALETYVYNMKNQVSDKDKLADKLEGDEKEKIEAATKEALEWLDENQNSEKEEYDEKLKEVEAVCNPIITAVYQRSGGAPGAGGESSTEEEDESHDEL

SEQ ID NO: 8399 - protein, 363 aa, Bacillus subtilis
MKVLHDEKRILTINPGSTSTEIGVFHNERSIFEKTLRHNIEELQRFDRIIDQYEFRKNHILETLHEQGINISKFDAVCARGGLLRPIEGGTYVVNDEMIEDLKSGYAGQHASNLGGIIAREIADGLNIPSYIVDPVVVDEMSVLAKVSGMPEIERKSIFHALNQKAVARKAAASLGKRYENMKMIITHMGGGITIGVHDRGRVVDVNNGLHGEGPFSPERAGTVPAGDLVDLCFSGEYTKEEIMKKLVGTGGLLGYLGTNDAVKVEQMIQGGDEKARFIYDAMAYQVAKEIGAASAALKGEVEAIVLTGGLAYGKSFVSAIRSYIDWISDVLVYPGENELQSLAQGALRVLQGEEQSKQYRIE

SEQ ID NO: 8400 - protein, 386 aa, Cucurbita cv. Kurokawa Amakuri
MANRVQVEVWNPNGKYRVVSTKPMPGTRWINLLIEQDCRVEICTEKKTILSVEDIVALIGDKCDGVIGQLTEDWGEVLFSALSRAGCKAFSNMAVGYNNVDVNAANKYGIAVGNTPGVLTETTAELAASLSLAAARRIVEADEFMRAGHYDGWLPNLFVGNLLKGQTVGVIGAGRIGSAYARMMVEGFKMNLIYFDLYQSTRLEKFVTAYGEFLKANGEVPVTWRRASSMDEVLREADVISLHPVLDKTTFHLVNKESLKAMKKDAILINCSRGPVIDEAALVEHLKENPMFRVGLDVFEDEPYMKPGLADMKNAIIVPHIASASKWTREGMATLAALNVLGKIKQYPVWADPNRVEPFLDENAPPPAASPSIVNAKALELPVSKL

SEQ ID NO: 8401 - protein, 381 aa, Cucurbita cv. Kurokawa Amakuri
MANRVQVEVWNPNGKYRVVSTKPMPGTRWINLLIEQDCRVEICTEKKTILSVEDIVALIGDKCDGVIGQLTEDWGEVLFSALSRAGCKAFSNMAVGYNNVDVNAANKYGIAVGNTPGVLTETTAELAASLSLAAARRIVEADEFMRAGHYDGWLPNLFVGNLLKGQTVGVIGAGRIGSAYARMMVEGFKMNLIYFDLYQSTRLEKFVTAYGEFLKANGEVPVTWRRASSMDEVLREADVISLHPVLDKTTFHLVNKESLKAMKKDAILINCSRGPVIDEAALVEHLKENPMFRVGLDVFEDEPYMKPGLADMKNAIIVPHIASASKWTREGMATLAALNVLGKIKQYPVWADPNRVEPFLDENAPPPAASPSIVNAKALGI

SEQ ID NO: 8402 - protein, 322 aa, Hyphomicrobium methylovorum
MSKKKILITWPLPEAAMARARESYDVIAHGDDPKITIDEMIETAKSVDALLITLNEKCRKEVIDRIPENIKCISTYSIGFDHIDLDACKARGIKVGNAPHGVTVATAEIAMLLLLGSARRAGEGEKMIRTRSWPGWQPLQLVGQRLDNKTLGIYGFGKIGQALAQRARGFDMNVHYYDIYRAKPEVEAKYNATYHDSLDSLLKVSQFFSINAPSTPETRYFFNKETIEKLPQGAIVVNTARGDLVKDDDVIAALKSGRLAYAGFDVFAGEPNINEGYYDLPNTFLFPHLGSAAIEARNQMGFEALDNIDAFFAGKDMPFKLA

SEQ ID NO: 8403 - protein, 579 aa, Glycine max
MCGILAVLGCSDSSQAKRVRVLELSRRLKHRGPDWSGLHQYGDNYLAHQRLAIVDPASGDQPLFNEDKTVVVTVNGEIYNHEELRKQLPNHTFRTGSDCDVIAHLYEEHGENFVDMLDGIFSFALLDTRDNSFIVARDAIGVTSLYIGWGLDGSVWISSELKGLNDDCEHFESFPPGHLYSSKERAFRRWYNPPWFSEAIPSAPYDPLALRHAFEKAVVKRLMTDVPFGVLLSGGLDSSLVAAVTARYLAGTNAAKQWGTKLHSFCVGLEGAPDLKAAKEVADYIGTVHHEFHYTVQDGIDAIEDVIYHIETYDVTTIRASIPMFLMSRKIKSLGVKWVISGEGSDEIFGGYLYFHKAPNKDEFHQETCRKIKALHKYDCLRANKSTFAWGLEARVPFLDKDFIRVAMNIDPEYKMIKKEEGRIEKWVLRRAFDDEEHPYLPKHILYRQKEQFSDGVGYGWIDGLKAHAEKHVTDRMMLNAANIFPFNTPTTKEAYYYRMIFERFFPQNSARLSVPGGPSVACSTAKAVEWDAAWSNNLDPSGRAALGVHASAYGNQVKAVEPEKIIPKMEVSPLGVAI

SEQ ID NO: 8404 - protein, 255 aa, Solanum lycopersicum
MRIFVFLVLLTVAIGTENLNSHVFPRPLIIEYPEKQLRDELKCTTWRFVVETNNLSPWKTIPEECADYVKEYMVGPGYKMEIDRVSDEAGEYAKSVDLGDDGRDVWIFDVDETLLSNLPYYSDHRYGLEVFDDVEFDKWVENGTAPALGSSLKLYQEVLKLGFKVFLLTGRSERHRSVTVENLMNAGFHDWHKLILRGSDDHGKTATTYKSERRNAMVEEGFRIVGNSGDQWSDLLGSSMSYRSFKLPNPMYYIL

SEQ ID NO: 8405 - protein, 830 aa, Lactobacillus reuteri
MDNMFTPSAKHVLAIAQEQAKYFKHQAVGTEHLLLALSMDKDGIANKIFEQFSITNDDIREEIERLIGYGTMENLGASDYLPYSPKAKQVLSLAGKEAQQMHALKIGTEHLLLALIADESVLSSRILYSLDVVPRQMRKVILRRLGIADSQQRNPNRQSSRRRIQQTGTPTLDKLARDMTELARNGQLDPVIGRNKEVKRVEQILSRRTKNNPVLIGEPGVGKTAIAEGLAQRMVDGKVPAELANKRLMMLDMGSLVAGAKYRGEFEDRLKKVIDEIQNDGHVILFIDELHTLIGAGGAEGAIDASNILKPALARGELQTIGATTLDEYQKYIESDAALERRFATVQVDEPTTDQTLQILRGLRPKYEEHHHAKITDEALEEAVKLSDRYISDRFLPDKAIDLIDESAAMVRIDAEDKKNHQPSLESQLEDLRTQKEEAIDNQDFDRAATLRQQELALKDKIDRKKQRTQQKDSHNYKLKVTGENIAQVVAEWTGVPLTQLKKSESERLVNLEKVLHQRVIGQDEAVTVVAKAIRRARSGLKDPSRPIGSFMFLGPTGVGKTELAKALAAAMFGSEDNMIRIDMSEYMEKYSTSRLIGAAPGYVGYDEGGQLTEKVRQHPYSVVLLDEAEKAHPDVFNLLLQVLDDGYLTDAKGRRVDFRNTIIIMTSNLGATQLQDEKEVGFGAKDMSQDYNAMAAAIKQQMRLYFRPEFLNRIDETIIFHSLQKKELHQIVKLMVNDLNKRVSEQGINLKVTPAAIDVIAKLGYNPAYGARPLRRALQDHVEDDLSTGLLSGEINVGDDVTVGAHHGKITFKVKKPDEDKAVELKLNR

SEQ ID NO: 8406 - protein, 342 aa, Pseudomonas resinovorans
MSHKVAFSFADGKTLFFPVQSHEILLDAALRNGINIPLDCREGVCGTCQGRCESGQYSQDYVDDEALSAEDLRQRKMLTCQTRVSSDAAFYFDFASSLCNAPGPGRLKGIVRAVEQVSPNTAILHLDAGADGQQLDFLPGQYARLQIPGTHGQRSYSFANRPNSGNQLQFLIRLLPDGLMSNYIRERSLIGDEILLEAPLGAFYLRHVDKPLVFVAGGKPLSAFLGMLDEIAERGGCGHPVHLYYGVRNAADLCETQRIAAYAERIPGFRLHPGSSATPARTWHGKRGYITEHFDLAEFRDQALDMYLCGPPPMVESIKQWLDTQALDQTRLYYEKFTQSNT

SEQ ID NO: 8407 - protein, 315 aa, Pseudomonas resinovorans
MHAQPVLAYRTNRPAHPAHSPPDPGGGCQQPLPGFTPGAHIEIQIAGSKPQWRAYSLVNLPGHAHYEIAVQLEEQSSGGSRWIHQLQVGQPLQVRAPKNHFPLVTQASDYLLIAGGIGITPMLGMARALAAGQQPFTLHYAGREAQGMAYLEEVRALGSAHCWISGGDPARRLPLASLLATPHNGRQLYVCGPKALIASVLHSARELGWDDSHVHSELFTGSLDAAGDASFEVELRSSGITLQVPAGKSVLEAMLDADLDPLFDCRRGDCGVCVAQVLEGSAEHRDICLSARERSDGRFCTCVSRASSARLVLDL

SEQ ID NO: 8408 - protein, 160 aa, Manihot esculenta
  misc_feature (52)..(52): Xaa can be any naturally occurring amino acid
  unsure (1)..(160): unsure at all Xaa locations
MSDEEHHFESKADAGASKTFPQQAGTIRKNGYIVIKNRPCKVMEVSTSKTGXHGHAKCHFVGIDIFNGKKLEDIVPSSHNCDVPHVNRTDYQLIDISEDGFVSLLTETGNTKDDLRLPTDENLLSQIKDGFAEGKDLVVSVMSAMGEERICSLKDIGPKN

SEQ ID NO: 8409 - protein, 303 aa, Nostoc sp. PCC 7119
TQAKAKHADVPVNLYRPNAPFIGKVISNEPLVKEGGIGIVQHIKFDLTGGNLKYIEGQSIGIIPPGVDKNGKPEKLRLYSIASTRHGDDVDDKTISLCVRQLEYKHPESGETVYGVCSTYLTHIEPGSEVKITGPVGKEMLLPDDPEANVIMLATGTGIAPMRTYLWRMFKDAERAANPEYQFKGFSWLVFGVPTTPNILYKEELEEIQQKYPDNFRLTYAISREQKNPQGGRMYIQDRVAEHADELWQLIKNQKTHTYICGLRGMEEGIDAALSAAAAKEGVTWSDYQKDLKKAGRWHVETY

SEQ ID NO: 8410 - protein, 439 aa, Thermus aquaticus
MKGAEALLKALEREGVEVIFGHPGGAIMPTYDALYDSPIRHILVRHEQGGIHAATAYARASGRVGVVMATSGPGALNLVTGLADALMDSTPVVAITGNVPRALIGTDAFQEADVTGVTMPITNHNYLVQDVNEIPRVVKEAFHIASTGRPGPVLIDLPKDVQLAEFTGEFDVELDLPGYKPTLRGHPKQIERALDALEKAERPILMVGGGAQHAHAELLAFAEKTGLPVITTLMGLGAFPGNHPLWLGMPGMHGTVAANRAIHHADVILAIGSFDDRVTGKVSRFAPTPTPSSTWTLTRRRSARWVRTHIPIVGDSRLVLKEMLKGAKPLRLAAWWRELEECAPATPSAIGPGPPQARRSSAPSTEATGGNAIVTTGVGQHQMFAAQYFTVTRPRSFLTSGGLGTMGVGLPFAIGAQIARPEELVIDFDGDGSFQMTLQ

SEQ ID NO: 8411 - protein, 599 aa, Zea mays
PPSPLPANGAPLPATPRRHKSGSTTPVHHHQAATPGAAAWPSPYPAGGASPLPAGVSPSPARSTPRRFFKRPFPPPSPAKHIKATLAKRLGGGKPKEGTIPEEGGAGAGAGAGAGAGAGAAVGAADSAEADRPLDKTFGFAKNFGAKYDLGKEVGRGHFGHTCSAVVKKGEHKGHTVAVKIISKAKMTTAISIEDVRREVKILKALSGHDNLVRFYDACEDALNVYIVMELCEGGELLDRILARGGRYTEEDAKAIIVQILSVVAFCHLQGVVHRDLKPENFLFTTRDESAPMKLIDFGLSDFIRPDERLNDIVGSAYYVAPEVLHRSYSMEADIWSIGVITYILLCGSRPFWARTESGIFRSVLRADPNFDDSPWPSVSAEAKDFVKRFLNKDYRKRMTAVQALTHPWLRDEQRQIPLDILIFRLVKQYLRATPLKRLALKALSKALSEDELLYLRLQFKLLEPRDGFVSLDNFRTALTRYSTDAMRESRVLEFQHALEPLAYRKMDFEEFCAAAISPYQLEALERWEEIAGTAFQHFEQEGNRVISVEELAQELNLAPTHYSIVQDWIRKSDGKLNFLGFTKFLHGVTIRGSNTRRH

SEQ ID NO: 8412 - protein, 774 aa, Rhodopseudomonas palustris
MAGERMASYSEDLQAAALGYHRRPKPGKLEIQASKPLANQRDLALAYSPGVAAACNAIAADPAQAAELTVRSNLVAVVTNGTAVLGLGNIGPLAAKPVMEGKAVLFKKFAGIDVFDIEIAAETVDRVVETVAALEPTFGGINLEDIKGPECFEIEAMLKDRMKIPVFHDDQHGTTIIVGAAVKNALALTGKDISKVKIVAAGAGAAALACLNLLVSLGAQRKNIFVCDLEGLVYQGRNVLMDRWKEVYAQKTDKRTLAEVIPGADIFLGLSGPNVLSQDMVKQMAELPLVMALANPTPEIMPEDVRKVRPDAMICTGRSDFPNQVNNVLCFPYIFRGALDVGATAINEAMKHAAVDAIVQLAREAPADPVSVGLDNDEAFGFGPGSLIPSPVDPRLILRIAPAVAMAAMDSGVATRPITSFDDYYAQLERFAFRSGLVMKPVFAKAKGQPVRVINAEGEDEKVLHAVQTILEEKLARPILVGRPSVVEARIKRSGLSIRPGEDFDLVNPQDDPRYRSYVQSYIDIAGRAGVTPAAARAVVRTNSTVIAALAVARGEADAMICGLDGRYMNHLRHVRDVIGRRPGVSDYAALALLITKKGPIFIADTQVRPNPTAEELAELAALAAVHVQRFNIKPKIAFLSHSDFGSFPTDSSLKMRRATAILAEKHPEIEADGEMQGDSALSETSRQMILPHSRLTGVANVLIMPNLDTAIVAYQMIKVVGEALPVGPILIGPALPAHILTPSATARGILNMTAVAVVEAQERAGRHQGTLFA

SEQ ID NO: 8413 - protein, 356 aa, Beta vulgaris
MALLNDLINLNLSETSDKIIAEYIWIGGSGLDMRSKARTLTGPISDPAKLPKWNYDGSSTNQAPGEDSEVILYPQAIFKDPFRRGDNILVMCDAYTPAGEPIPTNKRYNAEKIFSHPDVVAEEPWYGIEQEYTLLQKDINWPLGWPTGGFPGPQGPYYCGVGADKSFGRDIVDAHYKACIYAGVNISGINGEVMPGQWEFQVGPTVGISSGDQVWVARYILERIAEIAGVVVSFDPKPVKGDWNGAGAHTNYSTKSMREDGGINVIKAAIEKLSLRHKEHIAAYGEGNERRLTGRHETADITTFSWGVANRGASVRVGRDTEKDGKGYFEDRRPASNMDPYVVTSMIAETTILGKP

SEQ ID NO: 8414 - protein, 876 aa, Arabidopsis thaliana
MTRLRLLSWISITSCVCLVFAQDQSGFISIDCGIPDDSSYTDEKTNMKYVSDLGFVESGTSHSIVSDLQTTSLERQFQNVRSFPEGKRNCYDIRPQQGKGFKYLIRTRFMYGNYDGFSKTPEFDLYIGANLWESVVLINETAIMTKEIIYTPPSDHIHVCLVDKNRGTPFLSVLEIRFLKNDTYDTPYEALMLGRRWDFGTATNLQIRYKDDFYDRIWMPYKSPYQKTLNTSLTIDETNHNGFRPASIVMRSAIAPGNESNPLKFNWAPDDPRSKFYIYMHFAEVRELQRNETREFDIYINDVILAENFRPFYLFTDTRSTVDPVGRKMNEIVLQRTGVSTLPPIINAIEIYQINEFLQLPTDQQDVDAMTKIKFKYRVKKNWQGDPCVPVDNSWEGLECLHSDNNTSPRSIALNLSSSGLTGQIDPAFANLTSINKLDLSNNSLTGKVPDFLASLPNLTELNLEGNKLTGSIPAKLLEKSKDGSLSLRFGGNPDLCQSPSCQTTTKKKIGYIVPVVASLAGLLIVLTALALIWHFKKRSRRGTISNKPLGVNTGPLDTAKRYFIYSEVVNITNNFERVLGKGGFGKVYHGFLNGDQVAVKILSEESTQGYKEFRAEVELLMRVHHTNLTSLIGYCNEDNHMALIYEYMANGNLGDYLSGKSSLILSWEERLQISLDAAQGLEYLHYGCKPPIVHRDVKPANILLNENLQAKIADFGLSRSFPVEGSSQVSTVVAGTIGYLDPEYYATRQMNEKSDVYSFGVVLLEVITGKPAIWHSRTESVHLSDQVGSMLANGDIKGIVDQRLGDRFEVGSAWKITELALACASESSEQRPTMSQVVMELKQSIFGRVNNRSDHKDPVRMVTMNLDTEMVPRAR

SEQ ID NO: 8415 - protein, 336 aa, Lactobacillus delbrueckii
MAKLVIPSDYDPKMTIAKRKRQSATSGKPSSEFGTAMNLERISAPMFVKKSSGLNDNLSGWEKPVSFTLHDGNEGELQIVHSLAKWKRWALKHYGFSHGEGLFTNMNAIRKDEEVLDNLHSVYVDQWDWEKVIDKSERTEATLRQTVQRIFETIKGMEYHVRALYPQAAYHLPEEISFVTSEELEARWPSLTPSEREDKICQEKGAVFLEHIGGALPLSKKPHDLRAPDYDDWTLNGDLLFWYEPLQRAFEVSSMSIRVDEDRLQEQLKLAGAEDRLDLPFHQALLKGDLPYSIGGGIGQSRLCMLLLQGPHGEVQASIWPDEIVEKCQAAKIQLL

SEQ ID NO: 8416 - protein, 271 aa, Cucurbita pepo
IEQDCRVEICTEKKTILSVEDIVALIGDKCDGVIGQLTEDWGEVLFSALSRAGRKAFSNMAVGYNNVDVNAANKYGIAVGNTPGVLTETTAELAASLSLAAARRIVEADEFMRAGRYDGWLPNLFVGNLLKGQTVGVIGAGRIGSAYARMMVEGFKMNLIYFDLYQSTRLEKFVTAYGEFLKANGEVPVTWRRASSMDEVLREADVISLHPVLDKTTFHLVNKESLKAMKKDAILINCSRGPVIDEAALVEHLKENPMFRVGLDVFEDEPY

SEQ ID NO: 8417 - protein, 284 aa, Aggregatibacter actinomycetemcomitans
MPEPAKPATPAKSRPFLKWAGGKYRLMDEINRLLPKRKQCLVEPFVGAGAVFLNSNFKRYILADINPDLINLFNIVKLDVERYIQACKPIFFHPEANTEIYYYGKRKEFNQSTDVFQRAVLFLYLNRFGFNGLCRYNSKNEFNVPFGDYKTHYFPEEELRFFAAKAQSAVFICADFQQTFEMADENSVIYCDPPYAPLSQDSNFTNYAGNEFSIGHQRDLANLAKHTMEQRNIQVLISNHDTPFTREIYQGAKIRRLKVQRSISQAPHKRIKVRELIAMFKQGK

SEQ ID NO: 8418 - protein, 397 aa, Pseudomonas putida
MTLANDPIVIVSAVRTPMGGLQGDLKSLTAPQLGSAAIRGAVERAGIDAASVEQVLFGCVLPAGLGQAPARQAALGAGLDKHTTCTTLNKMCGSGMQAAIMAHDLLVAGTAYVVVAGGMESMTNAPYLLDKARGGYRMGHGKIIDHMFMDGLEDAYDKGRLMGTFAEDCAQANAFSREAQDQFAITSLTRAQDAISSGRFAAEIVPVEVTEGKEKRVIKDDEHPPKARLDKIPQLKPAFREGGTVTAANSSSISDGAAALVLMRRSEAEKRGLEALAVIHGHAAFADTPALFPTAPIGAIDKLMKRTGWNLADVDLFEINEAFAVVTLAAMKHLDLPHDKVNIHGGACALGHPIGASGARILVTLLSALRQNNLRRGVAAICIGGGEATAMAVECLY

SEQ ID NO: 8419 - protein, 1107 aa, Acetabularia acetabulum
MLCSSQLISRPQYFFQKLSQAKHRGVSLLKQQQKCQIRRGKFGARVRLIPNAVIADKPSVVQEVEEEKKGVPATAVTVGIPKETKEGEKRVAATPDSVKMLVKEGFKVIIESEAGFHASFSDDMYRDAGADILDGDTVLSTADIVLKVRPPFEEVNKFKEGATVISFIQPGENIELVKQLQAKNITAFALDCMPRTLSRAQTFDVLSSMANVAGYRSVVEASNAFGRFFAGQFTAAGKIPPAKVLVIGAGVAGLAAIQQAKNMGAIVRAFDVRSSVKEQIQSVGAEFLEVKIEEEGEGTGGYAKQMSQEFIDAEMELFRQQARDVDIIITTALIPGRPAPKLILKDMIESMKPGSVVVDLAAENGGNIETTKPGEIYEYSGVTHIGITDLPSMPAQSSTLFANNVTKYLLSMGEKGQFYIDHEDEAVRGAMVVENGEMMWPPPKKEVPPPPPPSETPATPAPVAEVVPEPVPNIFLDKLSDAVLAGISVSALLAIGAFGGKALTDMFSTLALACLAGSQVVYGVTPALHSPLMSVTNAISGMTAVGGIILMGGNILPQTTAQYLAAIAVLVSMVNVSGGFIMTSRMLGMFKIKGAEEDSSEKYKFLYFLPAALFLGLYVYGMYNGLSNLNQMAYLISGMCCIFAIGSLASQETAEFGNALGAVGVAGGLVATLGITSFTNQVYKQVAGVMLAGAAIGASIANSIEVTGLPQLVAAFHSLVGLAACFTAFGSLLVSGDHTMSAVHSVSTFIASIIGAVTVSGSIVAFGKLQGILSGKPLKFGGQNLFNFGLVAVTGAMFYKFIEQISVMSSALTYLGAATAVSLVLGYLVTSQVGGADMPVVITLLNSASGWRSVEGSVLDNNLLTIVGALIGSSGAILSAIMCKAMNRTIWKCCRLPRNPRRQAVSLPVSVLLLVSAQNVVLMMLLVHWLLLRKVVIVPGYGVAVSKGQYAFRKMMQLLAANNIDVKVCIHPVAGRMLGQLNVLLAEAGIPYDRVFEMEEMNEPEDWADVDISLVVGANDTVNSSAEDDPNSPIAGMPVIRVWKSDNVVVLKRSMGTGYAALENPVFYNDNTNMLLGDARCSLEAVRDKLRDIYEGICVMPNVLSQV

SEQ ID NO: 8420 - protein, 277 aa, Streptococcus thermophilus
MIFKKILRYLTAVSLVIATVFLITNHKTEAEDTSKLLDSKTVQKIVNRGTLNVGVKQDVPNFGYYSAKTNRYEGMEVDLAKKIADELRVKVNYIPVTTQTREPLMDNGTIDLLIGTYTINDERKASYAISNPYYRDQIGFLVLKDSGINKISDLNGKTIGVAQGASTKAALQEYSSAHNLKFNYVQLGSYPELAVSLYAHRVDAFSVDKSILSGYESKKTKILNEGFKTQDYGIASSKSNQELIDYTNDLIAKWQKDGSLQKLYDKYNLKPAKAENK

SEQ ID NO: 8421 - protein, 492 aa, Prunus mume
AALEAIDMDVAEEVMRVGCVTGDRINGLVDGVSGTWYVKFDTFTPAVERGLPVTRVISRIALQQILARAVGEEIIINDSNVVNFEDLGDKVNVILENGQRYEGDMLVGADGIWSKVRKNLFGLNEAVYSGYTCYTGIADFVPADINSVGYRVFLGHKQYFVSSDVGGGKMQWYAFHKESPGGVDSPNGKKERLLKIFEGWCDNVIDLLLTTEEDAILRRDIYDRTPILTWGKGHVTLLGDSVHAMQPNMGQGGCMAIEDGYQLALELDKAWKKSSETGTPVDVASSLRSYENSRRLRVAIIHGMARMAALMASTYKAYLGVGLGPLSFLTKFRIPHPGRVGGRVFIDKAMPLMLSWVLGGNSSKLEGRSPSCRLSDKASDLLRTWFEDDDALERAIDGEWYLIPCGQDSDASQLICLNRDEKNPFIIGSAPHGDVSGISIAIPKPQVSEMHARISYKDGAFYLTDLRSEHGTWIADIEGKRYRVPPNFPARF

SEQ ID NO: 8422 - protein, 809 aa, Escherichia coli
SVIAQAGAKGRQLHKFGGSSLADVKCYLRVAGIMAEYSQPDDMMVVSAAGSTTNRLISWLKLSQTDRLSAHQVQQTLRRYQCDLISGLLPAEEADSLISAFVSDLERLAALLDSGINDAVYAEVVGHGEVWSARLMSAVLNQQGLPAAWLDAREFLRAERAAQPQVDEGLSYPLLQQLLVQHPGKRLVVTGFISRNNAGETVLLGRNGSDYSATQIGALAGVSRVTIWSDVAGVYSADPRKVKDACLLPLLRLDEASELARLAAPVLHARTLQPVSGSEIDLQLRCSYTPDQGSTRIERVLASGTGARIVTSHDDVCLIEFQVPASQDFKLGHKEIDQILKRAQVRPLAVGVHNDRQLLQFCYTSEVADSALKILDEAGLPGELRLRQGLALVAMVGAGVTRNPLHCHRFWQQLKGQPVEFTWQSDDGISLVAVLRTGPTESLIQGLHQSVFRAEKRIGLVLFGKGNIGSRWLELFAREQSTLSARTGFEFVLAGVVDSRRSLLSYDGLDASRALAFFNDEAVEQDEESLFLWMRAHPYDDLVVLDVTASQQLADQYLDFASHGFHVISANKLAGASDSNKYRQIHDAFEKTGRHWLYNATVGAGLPINHTVRDLIDSGDTILSISGIFSGTLSWLFLQFDGSVPFTELVDQAWQQGLTEPDPRDDLSGKDVSRKLVILAREAGYNIEPDQVRVESLVPAHCEGGSIDHFFENGDELNEQMVQRLEAAREMGLVLRYVARFDANGKARVGVEAVREDHPLRSLLPCDNVFAIESRWYRDNPLVIRGPGAGRDVTAGAIQSDINRLAQLL

SEQ ID NO: 8423 - protein, 353 aa, Salmonella enterica subsp. enterica serovar Typhimurium
SQKYLLIDRDGTLISEPPSDFQVDRFDKLAFEPEVIPVLLKLQKAGFKLVMITNQDGLGTQSFPQADFDGPHNLMMQIFTSQGVSFDEVLICPHLPADDCDCRKPKVKLVERYLAEQAMDSANSYVIGDRATDIQLADSMGITGLRYHRETLNWTMIGEQLTKRDRYAHVVRNTKETQIDVSVWLDREGNSKINTGVGFFDHMLDQIATHGGFRMEITVKGDLYIDDHHTVEDTGLALREALKLALRDKRGICRFGFVLPMDECLACALDISGRPHLEYKAEFTYQRVGNLSTEMIEHFFRSLSYTMGVTLHLKTKGKNDHHRVESLFKAFGRTVRQAIRVEGDTLPSSKGVL

SEQ ID NO: 8424 - protein, 152 aa, Streptococcus suis
DPAIIPYLIANVEELKDAADVVNMLNKQSGLFGVSGFSSDMRDIEAGIQAHNPDAVLAYNIFIDRIKKFIGQYLAVLNGADAIVFTAGMGENAPLMRNDVVEGLSWFGIELDLQKNVFGNYGDISTAESKVRVLVIPTDEELVIAREVERLK

SEQ ID NO: 8425 - protein, 134 aa, Streptococcus suis
ADVVNMLNKQSGLFGVSGFSSDMRDIEAGIQAHNPDAVLAYNIFIDRIKKFIGQYLAVLNGADAIVFTAGMGENAPLMRNDVVEGLSWFGIELDPQKNVFGNYGDISTAESRVRVLVIPTDEELVIAREVERLK

SEQ ID NO: 8426 - protein, 330 aa, Ureaplasma parvum serovar 3 str. ATCC 700970
MSKNDDILLFSLSNSHQLANKIANLLKIELSPIRIDKFADGELIVAPQVPVRGRRVIIIQSTSKPVNDSLMELLIAIDSIKRASAKAISVVIPYYGYARQDRKAKPREPITARLVAKMIESAGATSVLTWDIHSLQTQGFFDIPFDSLEAVWVLMKHYFSAYKDSSNITIVSPDYGGVKRAREISIATGATLAIVDKRRSGKNQVEINNVLGDVKDRDCVIVDDMIDTGGTILGAAKIVREKGAKSITIIATHGLFNNNARQHFQQAIKDRIINKICIADTIENEPFDGLEIVSIAPAIAKCIEIYSEGTGSMSFVHDENSKVLFAKKIY

SEQ ID NO: 8427 - protein, 510 aa, Ureaplasma parvum serovar 3 str. ATCC 700970
MRIVSTIITTSWGVDPNIYFSKHELTWVPATADANTLALTNFNPTSTLLVALAIAFVLLMTPGLALFYGGLTRRKSTLTIINQCVASLGITTLIWIFGGFSLAFGPSVGKGIIGDISTYFAFRNLLFADGWSGDVGIVFANFTNGVPLILFFAYQLAFAIITPPLMVGAFADRMKFKNYLVFLVLWQYLIYIPFAHWIWGQGFLAAAGVIDFAGGIVIHTTAGFGALAASLVLGKRVLLKNDKSRPHNIPMTIIGATLLFFGWFGFNVGGSGFVAGGNAATWSAATSAWINTIIALAIGMVGWAVLETIFNKNHKATGVGLVTGAIAGLATITPAAGYVPIWASVPIGVAAVLVCYTSAKTLHHFHKIDDTLEVWGVHGMGGVTGSLLIGAFASKSVNPSIMYEAIGPTTTGVLFGVQLGAVLLAAVYGFVFTILLVYITRPRLSARQQLGHIDYINHGEDAYSFDIEIPSEKEMEQYELADSTWHSSTGVKYSLLNNKNQQNHKVANDH

SEQ ID NO: 8428 - protein, 521 aa, Ureaplasma parvum serovar 3 str. ATCC 700970
MKIVSTWGLNKDIYFSTHELTWVPADASQSTLNAIGFNPTNTLLVALAIAFVLLMTPGLALFYGGLVRRKSALTIINQCVASLGITTLIWIFGGFSLAFGPSVGKGIIGDISTYFAFRNLLFADGWSGGAVLVFANFTNGVPLILFFAYQLAFAIITPPLMVGAFADRMKFKNYLVFLVLWQYLIYIPFAHWIWGQGFLAAAGVIDFAGGIVIHTTAGFGALAASFMLGKRTTLITDKKRANNLPMVVLGAALLFFGWFGFNVGGAGFVKENTNHISQAISSWLNTIIALAIGMIGWVTLETIVNKNHKPTTVGLVTGAVAGLATITPAAGFVPVWASVPIAIMGVLVCYSVSRLLDYFRFDDSLEVLPVHGMGGVIGSLLIGAFATNTVAHGIKYDAVGLDNNGNPIYGILFGLQLGAVLLAATWAFAFTCLIVYITKPRLSVRQQLGHIDYINHGEDAYKFDFIIPSESEMFEYESFDQTWECKASGCKKSNLAAKKNPVFIENENDCTWQSKSRECTK

SEQ ID NO: 8429 - protein, 329 aa, Ureaplasma parvum serovar 3 str. ATCC 700970
MDQLQKAKINQTQKAIVEIKNSFQKHFAKNLNLSRVTAPLFVEGQSGLNDHLDHKQKAVSFYAKKLDKTLEIVQSLAKWKRLALLDYGFSLYEGLYTDMNAIRADDDIDEIHSIYVDQWDWEILINNQDCNLDFLKSIVNKIYSTIRIVQLEIDQLYNPKQIILPDSITFISSQELEDLYPHLSPSRREYEFAKIHKAIFIYQIGYPLKSGYIQSIRSPEYDNWNLNGDLIVYHKLNDQAIELSSMGIRVSKQDFIKQTNFANLKNDQENNFYHQMILNNQLPQTIGGGIGQSRLCMFLLNKKHIGEVQVSVWPNEYKDELLKKGIKLL

SEQ ID NO: 8430 - protein, 704 aa, Ureaplasma parvum serovar 3 str. ATCC 700970
MEFKQKNSNNPLEEFGRNLNKEILDNKIDPIIGRDEEIRRTIEILSRKTKNNPVLIGEPGVGKTAIVEGLAYRIVHKDVPSNLLDKTIIELSLSSLIAGASYQGQFEERINSILKEVKKADGNIILFIDEIHQIVGMGRNQGSNMDVANILKPMMARGEIKLIGATTLDEYRLYIEKDQALERRFTKVLVNKPTIQETLTIMRGLKPRWEAFHGIKIHDNALIAAVNLSERYINDRNLPDKAIDLIDEAAAKIKTQINSQPIYLDEIKRDLQHLQTEKAALEPEKDEKSIKRLNEILEKIKLKQDEFNNLNDLYLKEKKQIDDLKNLRQKIERIQHDIEFYQSEGKYEKASRLLYSDLPLFEKQREELENKINENNNQKMIIDSLTENEIADVIARATGIPLSHLLADEKTKLLSLNKRIASHVIGQDEAVKLISDAVIRGRAGINNPNQPIGSFLFLGPTGVGKTELAKTLAKELFNSEKALIRFDMSEYMEKHSVSKLVGAPPGYIGYENAGVLTESVKRKPYSILLFDEIEKAHPDILNILLQILDEGSIKDAKNNEINFKNTIIIMTSNIGAEALLENNKTKALLDLQKTFKPEILNRISEIIFFNKLSKEIIFKISENLLKELENLLAKQDYLIKFDDNIAQIMVEDAYSSNYGARPLKRWITKHLENEIAKLIIENRITKNINYKINYDRELDQVLIK

SEQ ID NO: 8431 - protein, 435 aa, Ureaplasma parvum serovar 3 str. ATCC 700970
MAFIDKCKIVLIAGNGGDGIVSWRRETHVPEGGPAGGNGGNGGSIWFVGNHNETSLEFLKYKKIIRAKHGEKGDIKNQHGANAEDVFINVPLGTVVYNPITNEILADINIDQQKYLVAQGGLGGHGNTHFKSPFNKAPNLYELGELGENVEVLLELKTIADIGIIGLPNAGKSTLISTFTNAKPKTANYMFTTLNPVLGTIYRDQNRIIFADIPGLIEGAHTGVGLGHDFLKHIERCFLLIHLISLDPNDNPDIINAYETIVNELKQYKQNLVNKPIVLVANKIDQIGALENLQILKEYLKNNQEIKIISALTNLHVDNMLDDVIKIYFAQKKIYEQRLKEQLPVDQILKWTSDIPKSKELDKTIEIIKVDDHIFEVFGEYLKYWAHRIPLKTQDNLIRFNQKLQSINFNQQLLQAGAVAGDSIKIYDITLEFEE

SEQ ID NO: 8432 - protein, 361 aa, Ureaplasma parvum serovar 3 str. ATCC 700970
MITNKKCKGCGAFLNDQINTIGYTPKINETKTNLCQRCFKLIHYNKLEKVSTNLNQSIKETINTLNFSNLQIFAVLDILDLEHTIIDELKEYQNKIIFLVNKIDLLPQRYNSELVNENVVKTLINHGFIDPKIIYVSTHSNTSLKKVMDYIKNATNKKQKSIFFGKSNVGKSSLINALLALNKIKTKLTISSYTNTTINLNKINIQEHQILDAPGVCFDENILNYVRDEDNKSIMISYGAKAINYQINPQQALMISGLVGIQYLKGQKTTFTLYVSSQLDIHRCKLENFIMNFNKRYLLAKFNYLNQDLEFVDHLITLNKDQKTNICIAGLGLLVINAHAEQICIRLPKSVGLKVAKYAII

SEQ ID NO: 8433 - protein, 387 aa, Ureaplasma parvum serovar 3 str. ATCC 700970
MMLIINIGSSSWKFCLFDMNLKQIFSGKIRLDVSPHQLKYIFDKNEYVYLLDDDHNNHVDLIIKFLINKKIIKKLEDITYFGIRAVYVKNFYGASAFLNNEIYNDLNQHTDLCPIHNQNTIMLINDIKHLNTSAKIIIIFDNWFHRSINKNKYTIAIDQTIAIKHKIRKYGFHGISFSYSNKIMQNYLGKQDVNLIILHLGSGSSVCAIKNGKSFDTSMSYSPLSGIIMNTRSGDIDPSVLLTLKKVKNQSLKQLILFLNQQSGLYGLTKHHSISEVANNLHNKNNELALEMYTDSIVDYFIKYLNHLQKIDAIVFSGGISEFEHLVLEKIISKIHLINLEINDHLILTNTLNKISTSKSQIPIYLCLVNEEHEIAYEMLNLINKTK

SEQ ID NO: 8434 - protein, 304 aa, Ureaplasma parvum serovar 3 str. ATCC 700970
MVLEMIKKYGIVAIVGKPNVGKSTLINAIMKKKVSIISNKPQTTRNAVKEIYEDDESAIIFTDTPGFHEPSNKLDLFLNHEIEISYKEANVILFVTTMDKELDANDFEIINLIKEANKENIILVISKAEMAKNQDQIDERIHFLKKHIAFKDVVQISALHVINIDKLINTIKNYLHKDVVTDYFRQKAEKEDKFVITEIIREQCLLNLNHEVPHGVGVEIDESKYNQEANHWIIKASIIIEKNSHKPIIIGQNGTMIKKISMGARKQLHEIYDCHISLTIFVKVENNWRDNNNIIKSLGYKIKK

SEQ ID NO: 8435 - protein, 398 aa, Cuphea wrightii
MVAAAASSAFFSVPTPGTSPKPGKFGNWPSSLSVPFKPDNGGFHVKANASAHPKANGSAVNLKSGSLETPPRSFINQLPDLSMLLSKITTVFGAAEKQWKRPGMLVEPFGVDRIFQDGVFFRQSFSIRSYEIGVDRTASIETLMNIFQETSLNHCKSIGLLNDGFGRTPEMCKRDLIWVVTKIQVEVNRYPTWGDTIEVNTWVSESGKNGMGRDWLISDCRTGEILIRATSVWAMMNQNTRRLSKFPYEVRQEIAPHFVDSAPVIEDDRKLHKLDVKTGDSIRDGLTPRWNDLDVNQHVNNVKYIGWILKSVPIEVFETQELCGVTLEYRRECGRDSVLESVTTMDPAKEGDRCVYQHLLRLEDGADITIGRTEWRPKNAGANGAISSGKTSNGNSVS

SEQ ID NO: 8436 - protein, 408 aa, Cuphea wrightii
MVVAAAASSAFFPVPAPRPTPKPGKFGNWPSSLSQPFKPKSNPNGRFQVKANVSPHPKANGSAVSLKSGSLNTLEDPPSSPPPRTFLNQLPDWSRLRTAITTVFVAAEKQFTRLDRKSKRPDMLVDWFGSETIVQDGLVFRERFSIRSYEIGADRTASIETLMNHLQDTSLNHCKSVGLLNDGFGRTPEMCTRDLIWVLTKMQIVVNRYPTWGDTVEINSWFSQSGKIGMGREWLISDCNTGEILVRATSAWAMMNQKTRRFSKLPCEVRQEIAPHFVDAPPVIEDNDRKLHKFDVKTGDSICKGLTPGWNDFDVNQHVSNVKYIGWILESMPTEVLETQELCSLTLEYRRECGRESVVESVTSMNPSKVGDRSQYQHLLRLEDGADIMKGRTEWRPKNAGTNRAIST

SEQ ID NO: 8437 - protein, 437 aa, Chlamydomonas reinhardtii
MVPRAAAGPVARGVAARVRAAPAPVVAAKSSRRSSVVVRATAAPVAQVRTAEGLQVPHGPAAKLVNLMAPASEHAALKAACNKRIELSDRTCDVELLTVGAFSPLEGFMNKAEYDSVVANMRMTNGLLFGLPIVLDTDSEDIVPGDKLLLTYQGQDLAVMTVDSKFTPNKPLECLKCYGTSSLEHPAVQMVAMERGKYYIGGPIKGLALPTRVFPCASPADVRSTLPANQDVLAFQCRNPIHKAHYELFIRALDRNVRNPGAVCLVHPTCGPTQDDDIPGVVRFRTYEVLKEETKNPRLRWAYLPYSMHMAGPREAIQHMIIRKNYGCTHFIIGRDMAGCKSSISGQDFYRAYDAQDLANKHAAELNMQTVASLNIAYTEEKGYVTADIAKAENLHVLNLSGTKFRQMLRAGDDIPEWFAFKSVVAVLREQIQSEAN

SEQ ID NO: 8438 - protein, 138 aa, Helianthus annuus
MEDSTDSIAVDMETIYLGGKEHVIRTGHGCVSVILYGDEEKPPLITYPDVALNHMSCFQGLFFSPEAASLLLHNFCIYHITPPGHELGAASICPDVPVPSVDDLCDQILEVLNHFRLGAVMCMGAMAGAYLLTLFAVY

SEQ ID NO: 8439 - protein, 311 aa, Lactococcus garvieae
MEKTFIPEDYKSILDVYDTQTAIGFIKRCFEEALTGSLKLKRVSAPLFVDDRSGLNDNLSGSERPVKFDVPVLNYNGEIVHSLAKWKRAALKQYDFHVGNGLYADMNAIRRDEELDNLHSIYVDQWDWERVISKEQRSLDYLKETVQNLVNAIAETSSRLHTKYPKVKSVIDTNIAFITSQELVDLYPNLTAKERENAYVKEHPTTFILQIGDVLSHGEPHDQRAPDYDDWSLNGDLLFWHEPLGCAIELSSMGIRVDDKALLTQLEKANANDRLAYPFHQQILNNELPLTIGGGIGQSRMCMLLLSKVHI

SEQ ID NO: 8440 - protein, 465 aa, Akebia quinata
SGKPFYAIVHRVTGSLIIDFEPVKPYEVPMNAAGALQSYKLAAKAIARLQSLPNASMDRLCDTVVQEVFELTGYDRVMAYKFHDDDHGEVVSEITKPGLEPYLGLHYPATDIPQAARFLFMKNKIRMICDCNATHVKVFQDEKLPLDLTLCGSTLRAPHSCHSQYMENMGSIASLGMAVVINEGDEEDNGSGSAQPQRRKRLWGLVVCHNTTPRFVPFPLRYACEFLIQVFAIHINKELELGNQVLEKSVLRTQTLLCDMLMRNAPLGIVSQSPNIMDLVKCDGATLLYKNKIWRLGLSPSEFHIRDIASWLYEYHMDSTGLSTDSLHDAGFPGALSLGDGICGMAAVRITSKDMIFWFRSHTAAEVRWGGAKHDPCEEDDGRKMHPRSSFKAFLEVAKTRSLAWKDYEMDAIHSLQLILRNAFKDGDTADLNPSVIHSRLDNLKIEGMEELEAVTNEMVRLMET

SEQ ID NO: 8441 - protein, 392 aa, Akebia quinata
DLEPVNPAEDPVTAAGALKSYKLAAKAISRLQSLPSGDISLLCDVLVHEVSDMTGYDRVMVYKFHEDEHGEAVAECLRSDLEPYLGLHYPATDIPQASRFLFLKNKVRMICDCSARSVEIVQDKRLTQPLSLGGSTLRAPHGCHAQYMENMGSVASLVMSVTINEDDDEMETNQQKGRKLWGLVVCHHSSPRFVPFPLRYACEFLIQVFGIQLNKEVELAAQLREKHILRIQTVLCDMLLRDAPVGIFTQSPNVMDLVKCDGAALYYKNKLWLLGVTPTEAQIREIAAWILEYHDRSTGLSTDSLMEAGYPGASVLGDAVCGMAAINITSKDFIFWFRSHTAKEIKWGGAKHDTVDKDDGRKMHPRSSFKAFLEVVQWRSLPWEDMEMVAIQ

SEQ ID NO: 8442 - protein, 466 aa, Aristolochia grandiflora
SGKPVYAIIHRVTGSLIIDFEPVKPYEAPMTAAGALQSYKLAAKAISRLQSLPSGSMERLVDTVVQEVYELTGYDRVMAYKFHDDDHGEVISEVTKPDLEPYLGLHYPATDIPQAARFLFMKNKVRMICDCYAKPVKVFQDEKLSFDLTLCGSTLRAPHSCHLQHMKNMSSIASLVMAVVVNEGEEDDNPDPNQQQQVPKRKRLWGLVVCHNTTPRFVPFPLRYACEFFMQVFAIHVNNEIELENQIREKNILRTQTLLCDMLLRDSPLSIVTRSPNIMDLVKCDGAALMYQNKVYTLGLSPTESQISEINRWLLEYHMDSTGLSTDSLHDAGYPNAPSLGDIVCGMAAVRITSTDMLFWFRSHTAGEVRWGGAKHDPSDKDDGRRMHPRSSFKAFLEVVKNRSLPWKDYEMDAIHSLQLILRGSTKETAAIDTKTVISSQLNNLKLDGLHELQAVTNEMVRLMET

SEQ ID NO: 8443 - protein, 392 aa, Aristolochia grandiflora
DLEPVNLADAQVSASGALKSYKLAAKAISRLQSLPSGNIVLLCDVLVREVRDLTGYDRVMAYKFHEDEHGEVIAECKRPDLEPYLGLHYPATDIPQASRFLFMKNKVRMIYDCSATPVSVIQDKGLAQPLCLGGSTLRAPHGCHSQYMANMGSIASLVMSVTINEDDDEKGSGQRGRKLWGLVVCHHCSPRFIPFPFRYACDFLMQVFGIQINKEVELAAQVREKHILRTQTLLCDMLLRDAPMGIVNKSPNVMDLVKCDGAALYYQNKFWLLGTTPTEAQIRDLAQWLLQYHNNTTGLSTDSLVEAGYPGAQDLGDAVCGMAAVKITSRDFLFWFRSHAGKEIKWGGAKHDPKEHDGDGKKLHPRSSFNAFLEVVKWRSTPWEDVEMDAIQ

SEQ ID NO: 8444 - protein, 554 aa, Asparagus falcatus
PYEVPMTAAGALQSYKLAAKAISRLESLPGGSMEKLCNAVVEEVFELTGYDRAMAYRFHEDDHGEVFSEVTKPGLEPYLGLHYPATDIPQAARFLFMKSKVRMICDCRAKPVRVLQDEKLPFDITFCGSTLRAPHSCHLQYMENMNSIASLVMAVVVNEGGEDEGEGEAGQASSPAQQQQGLRRKRLWGLVVCHNESPRFVPFPLRYACQFLMQVFAIHVNKEFELEHQIREKNILRTQTLLCDILLREAGPLGIVTARSPNVTDLVRCDGAALLYEDKIWRLGRTPTDSEIRDIAYWLVEYHADSTGLSTDSLLEAGYPGAFALGDLVCGLAAARINSRDILFWFRSHTAAEVRWGGAKHDPSDEDDGRRMHPRSSFKAFLEVVKTRSLPWSDYEMDAIHSLQLILRGSFNDVKKSEGLDSRMRSLRVEGMEELQAVTNEMVRLIETATVPILAVDVDGVINGWNLKIAELTGLPVDEAIGKHLLALVEDSSVAQVRRMLLLALQGTEEQNVEFQMKTCGDRGDDGPVILVVNACASRDLNEKVVGVCFVAIT

SEQ ID NO: 8445 - protein, 444 aa, Asparagus falcatus
  misc_feature (59)..(59): Xaa can be any naturally occurring amino acid
  unsure (1)..(444): unsure at all Xaa locations
DLEPVNPADVPVTAAGALKSYKLAAKAISRLQSLPSGNISLLCDVLVREISDLTGYDRXMAYKFHDDEHGEVIAECRRSDLEPYIGLHYPATDIPQASRFLFMKSKVRMICDCSAHPVKIIQDKKLAQPLSLCGSTLRAPHGCHAQYMSNMGSVASLVMSVTINEDDDESGSDQKGRKLWGLVVCHHTNPRFVPLPLRYACEFLLQVFGIQLNKEVELAAQAREKHILRTQTVLCDMLLRDAPIGIFTQTPNVMDIVKCDGAALYYKNQIWVLGTTPAEPQIRDISAWLLECHDGSTGLSTDSLMEAGYPGALALGDAVCGMAAIKITDKDFIFWFRSHTAKEIKWGGAKHEPANRDDEGRKLQPRSSFKAFLEVVKWRSLPWEDIEMDSVHSLQLILRESLHNEIAVGESKTLVNSTLDDMKRIQGMDELRAVTNEMVRLIET

SEQ ID NO: 8446 - protein, 463 aa, Ceratophyllum demersum
GKPFYAVVHRVTGSLVIDFEPVRPYEVPTTAAGALQSYKLAAKAITKLQSLPSGSMQRLCDTIVKEVYELTGYDRVMVYKFHEDDHGEVVAEVTKPNMEPYLGLHYPATDIPQASRFLFMKNKVRMICDCHAKAIKVYQDGNLPMDLTLCGSTLRAPHSCHVQYMHNMGSVASLVMAVVVNEGEDDQGESTESGQQRKKKLWGLVVCHNTSPRFVPFPLRYACEFLMQVFAIHVGKQIELENQLQEKNILRIQTLLCDMLMRDSPLGIVSKSPSIMDLVKCDGAALLYKNKVWLLGLTPSELQIHDIASWLSTHHMDSTGLSADSLYDAGYPGALSLGNAVCGMASVRITSKDMIFWFRMHTASEVRWGGAKHYPDDKDDGQKMHPRSSFKAFLEVVKTRSLPWKDYEMDAIHSLQLILQGTFKEIENGGIKNTIDSQFDGLKIDQMEELQVVANEMVRLMET

SEQ ID NO: 8447 - protein, 356 aa, Ceratophyllum demersum
ILHRIDAGIVIDLEPVNPSDVPVTAAGALKSYKLAAKSISRLQSIPSGNISLLCDVLVREVSELTGYDRVMAYKFHEDEHGEVIAECKRSDLEPYLGLHYPATDIPQASRFLFMKNRVRMICDCMVKPVKVIQDKRLNQSLSLCGSTLRAPHGCHAQYMANMGSIASLVMSVTINDDEEEEAPGEVQNQKTRKLWGLVVCHHTSPRFVPFPLRYACEFLIQVFGIQLNKEVELAVQLREKHILRTQTMLCDMILRDTPIGIVTRSPNVMDLVKCDGAALYYQNQFWLLGITPTEVQIRDILLWLLEYHKGTTGLSTDSLMEAGYPGALVLGDAVCGMAAIEITPKDYLFWFRSHTA

SEQ ID NO: 8448 - protein, 465 aa, Coptis trifolia
SGKPFYAIAHRVTGSLIIDFEPVKPYEVPMTAAGALQSYKLAAKAITRLQSLPGGSMERLCDAVVQEVYELTGYDRVMAYKFHEDDHGEVVSEVTKEGLEPYLGLHYPATDIPQAARFLFMKNKIRMICDCRAKHVRVLQDEKLSFDLTLCGSTLRAPHSCHLQYMENMDSIASLVMAVVVNDDDEDDEGTRPSQPQKRKRLWGHAVCHNTTPRFVPFPLRYACEFLIQVFAIHVSKEFELENQILEKNILRTQTLLCDMLMRNVPLGIVSQSPNIMDLVKCDGAALLYKNKIWRLGSSPNEIQIRDIASWLSDYHMDSTGLSSDSLYDAGFPGALSIADTVCGMAAVRINSKDMLFWFRSHTAAEVRWGGAKHDPGEKDDGRKMHPRSSFKAFLEVVKTRSAPWKDYEMDAIHSLQLILRSAFKDIETTDGNTKAFHSQLDNLKINGMEELEAVTNEMVRLIET

SEQ ID NO: 8449 - protein, 391 aa, Coptis trifolia
DLEPVNPADVPVTAAGAMKSYKLAAKAISRLQSLPSGNIAVLCDVLVQEVSDLTGYDRVMVYKFHEDDHGEVIAECRVPELEPYLGLHYPATDIPQASRFLFMRNKVRMICDCSAAPVKVIQDNKLEQPLSLGGSALRAPHGCHAQYMANMGSVASLVMSVTINENDDQMETDQQKGRKLWGLLVCHHTSPRFVPYPLRYACEFLIQVFGMQINKEVELATQVRERHILQTQTVLCDMLLRDAPIGIVTQSPNIMDLVKCNGAALYYRSRFWLLGVTPTEAQIRDIAEWLLQYHNASTGLSTDSLMEAGFPGASVLGTAVCGMAAIKITLKDFLFWFRSHTAKEIKWGGAKHNPTEKDDGWKMHPRSSFKAFLEVVKHRSLPWEDVEMDAI

SEQ ID NO: 8450 - protein, 366 aa, Dioscorea elephantipes
SGKPFYAIVHRVTGCLIFDFEPVKLSDIPTSTTASGALQSYKLAAKAIARPQSLPGGSMDTLCETLVEEVFQFTGYDRVMVYKFHEDDHGEVYQEITKPGMVPYLGLHYPATDIPQAARFLFIKNKVRMICDCRAKHVNIHQDETLLFDITFCGSTLRAAHNCHLQYMSNMNSIASLTMAVVVNEGEEEDDHLEPGQSSQQQQQQQQQQQQQQQKRKHLWGLVVCHNESPRFLPFPMRYACQFLMQVFSVHVTKELELENQIREKNILRTQTLLCDMLLRDTAPVGIITQSPNIMDLVKCDGAALLYDDRIWRLGLTPTKEQIRSIAHWLAEHHMAPTALSTDSLQDAGYPDAQALGDLVCGMAAA

SEQ ID NO: 8451 - protein, 463 aa, Dioscorea elephantipes
SGKPFYAIMHRIDVGLVIDLEPVNPADVPVTAAAALKSYKLAAKAISRLQSLPSGNIPLLCDVLVKEVSELIGYDRVMAYKFHEDEHGEVIAECRRSDLEPYLGLHYPATDIPQASRFLFMKNKVRMICDCSAPPVKVIQDKRLPQPLSLGGSTLRAPHGCHAQYMANMGSIASLVMSVTINEDDDETGSGDQQQNGMKLWGLVGCHHTSPRFVPFPLRYACEFLLQVFGIQLNKEVELATQQREHILRTQLSCDMLLRDAPIGYLLNSPNVMDLVKCDGAALYYKNQFWLLEITPTEAQIRDIFAWLLEYHNSTTGLSTNSLTEAGYPGAVELGDAVCSMAATKITSKDFIFWFRSHTSKEIKWGGAKHDPGDRTDEGRKMHPRSSFKAFLEVVKRRSLPWEDVDMDAIHSLQLILRGSLQDEPVTDNSKTIVNATPDDAKQIQHMDELRIVTTEMVRLMET

SEQ ID NO: 8452 - protein, 466 aa, Hedyosmum sp. SM-2000
SGKPFYAIIHRVTASFIIDFEPVKPYEVPMTAAGALQSCKLAAKAISRLQSLPGGSMERLCETVVQEVFELTGYDRVMAYKFHEDDHGEVFSEITKPGLEPYLGLHYPATDIPQAARFLFMKNKVRMICDCHAKPVKVFQDEKLTFDLTLCGSTLRAPHSCHLQYMANMSSIASLVMAVVVNEGEDEGENVDSGQQQQQKRKRLWGLVVCHNTTPRFVPFPLRYACEFLIQVFAIHVNKEIELESQIREKNIFRTQTLLCDTLMRDAPLGIISQNPNILDLVKCDGAALLYKSKVWRLGLTPNEPQIHDISLWLSEYHMDSTGFSTDSLHEAGYQGAVALGNIVCGMAAVWITSKDMLFWFRSHTAAEVRWGGAKHDPDDTDDNRRMHPRSSFKAFLEVVKKRSIPWKDYEMDAIHSLQIILRGNFSDSEKTHANTTFDSRLNDLKLEGMEELQAVTNEMVRLIET

SEQ ID NO: 8453 - protein, 397 aa, Hedyosmum sp. SM-2000
DLEPVNPAEVPVIAAGALKSYKLAAKAISKLRSLPSGNISLLCDVLVREVSELTGYDRVMAYKFHEDEHGEVIAECRRSDLEPYLGLHYPATDIPQASRFLFMKNKVRMICDCSAPPVKVIQDKRLGQPLSLCGSTLRAPHGCHAQYMTNMGSIASLVMSITINEDDEETDNEQQLQQEKPKKLWGLVVCHHTSPRFIPFPLRYACEFLIQVFGIQLNKEVELAAQVREKHTLKTQTVLCDMLLRDAPMGILTQSPNVMDLVKCDGAALNYKNQFWLLGTTPTEAQIKDLAEWLLECHDGTTGLSTDSLTEAGYPGSYVLGDAVRGMAAVKITSKDFLFWFRSHSAKEIKWGGAKHDPIDKDDDGRKMHPRSSFKAFLEVVRQRSVPWEDIEMDAIQ

SEQ ID NO: 8454 - protein, 465 aa, Heuchera canadensis
SGKPFYAIVHRVTGSLIIDFEPVKPYEVPMTAAGALQSYKLAAKAITRLQALPSGSVERLCDTMVQEVFELTGYDRVMAYKFHDDDHGEVVSEITKPGLEPYLGLHYPATDIPQAARFLFMKNKIRMICDCRAKHVKVLQDEKLPFDLTLCGSTLRAPHSCHLQYMENMNSIASLVMAVVVNDGDDESESSNPAQPSKRKRLWGLVVCHNTTPRFVPFPLRYACEFLAQVFAIHVSKELELENQILEKNILRTQTLLCDMLMRDAPLGIVSQSPNIMDLVKCDGAALLYKDKIWRLGVVPTDSQLQDIASWLSKYHMDSTGLSTDSLYDAGFSRALSLGDVVCGMAAVKINSNDILFWFRSHTAAEIRWGGAKHETGEKDDNRKMHPRSSFKAFLEVVKTRSLPWKDYEMDAIHSLQLILRNTFKDIETVDANTNKIHTKLSDLKIEGMQELEAVTSEMVRLIET

SEQ ID NO: 8455 - protein, 435 aa, Heuchera canadensis
SGKPFYAIIHRIDVGLVIDLEPVNPADVPITAAGALKSYKLAAKAISRLQSLPNGNITLLCDVLVKEVSDLTGYDRVMVYKFHEDEHGEVIAESCRPDLEPYLGLHYPATDIPQASRFLFMKNKVRMICDCLASSVKVIQDKRLPQPLSLCGSTLRSPHGCHTQYMANMGTIASLVMSVTINEEDDEMVTDQPKGRKLWGLVVCHHTSPRFVPFPLRYACEFLIQVFGVCINKEVELASQTREKHILQTQTVLCDMLLRNAPVGIVTQSPNVMDLVKCDGAALYYKKKAWLLGSTPTDAQIRDITDWLLEYHGGSTGLSTDSLVEAGYPDALNLGDAVCGMAAIKITSNDFLFWFRSHTAREIKWGGAKHDPDEKDDGRKMHPRSSFKAFLEVVKRRSLPWEDVEMDVIHSLQLILRGSLQDETVDDSKTIVNES

SEQ ID NO: 8456 - protein, 578 aa, Houttuynia cordata
  misc_feature (481)..(481): Xaa can be any naturally occurring amino acid
  misc_feature (504)..(504): Xaa can be any naturally occurring amino acid
  misc_feature (574)..(574): Xaa can be any naturally occurring amino acid
  unsure (1)..(578): unsure at all Xaa locations
SGKPFYAIVHRVTGSLIIDFEPVKPFEVPMTAAGALQSYKLAAKAISRLQSLPSGSMERLIDTMVQEVFELTGYDRVMAYKFHEDDHGEVISEVTIPHLDPYLGLHYPATDIPQAARFLFMKNKVRMICDCRAKPVKVYQDDKLSFDLTLCGSTLRAPHSCHLQYMENMGSIASLVMAVVVNEGGEEDRGGPADSSQQQLGRYRRKKLWGLVVCHNTRPRFVPFPLRYACEFLTQVFAIHVSKELELEETNSRKEILRTQTLLCDMLLRDAPMGIVNQTPNIMDLIKCDGAALFYKDKVFRLGIAPSETDIREIAQWLSAYHMDSTGLSTDSLHDAGYPKAAFLGDLVCGMAAVKITCSDMLFWFRTHTAAEIRWGGAKHDHSDRDDGKRMHPRSSFRAFLDVVKTRSLPWKDYEMDGIHSLQLILRTSVKEPEQVDSNKVIHAQLGDLKLDEMNELHAVTTEVVRLIETATVPILAVDVXGLINGWNAKISELTGMSLEQVMXKHLLTLVEDCSINVVRRMLCLALKGEEEQNIEFQVKTHGTRSDHGPVVLVVNACASRDVHGNVVGVCFVXQDVT

SEQ ID NO: 8457 - protein, 415 aa, Hypecoum imberbe
SGKPFYAIVHRVTGSLIVDFEPVKPYEVPMTAAGALQSYKLAAKAIAKLQSLPSGSMERLCNTVVQEVFELTGYDRVMAYYFHEDDHGEVIAEVTKPGLEPYLGLHYPATYIPQAARFLFMKNRIRMICDCRAKHVKVLQDEKLPADLTLCGSTLRAPHTCHLQYMENMGSIASLVMAVVVNESNDEEESSEPPSQAPKKKKLWGLVVCHNTSPRFVPFPLRYACEFLIQVFAVHVNKEFELDNQIHEKRILRTQTLLCDMLMRDAPFGIISQSPNVMDLVKCDGAALLYKNKIYRLGLTPSEFQINDIASWLTEYHMDSTGLSTDSLYDAGFPGALSLGDAVCGMAAVRITCKDMLFWFRSHTAAEVRWGGAKHDPDERDDGRKMHPRSSFKAFLEVVKTRSLPWKDYEMDAIH

SEQ ID NO: 8458 - protein, 392 aa, Hypecoum imberbe
DLEPVNPSDVPITAAGALKSYKLAAKAISRLQSLPSGNIPLLCDVLAREVRELTGYDRVMVYKFHEDEHGEVIAECRELDLEPYLGLHYPATDIPQASRFLFLKNKVRMICDCSAQPVKVIQDEKLAQPLSLCGSTLRAPHGCHSQYMTNMGSVASLVMSLTINEDDDEMETSTQKGRKLWGLVVCHHTSPRFVPYPLRYACEFLIQVFGIQLNKEVELASQLMEKHILKMQTVLCDMLLRDAPVGIVAQSHNVMDLVKCDGAALYYRNKLWLLGVTPTEAQVRDIARWLLECHYGTTGLSTDSLMEAGYPGASGLGDAVCGTAAISITSKDFLFWFRSQTAKEIKWGGAKHDPMDKDGLRKMHPRSSFKAFLEVVKCRSVPWEDIEMDAIQ

SEQ ID NO: 8459 - protein, 459 aa, Illicium oligandrum
SGKPFYAIMHRIDVGLVIDLEPVNPADVPITAAGALKSYKLAAKAISRLQSLPSGNIGILCDVLVREVSELTGYDRVMAYKFHEDEHGEVIAEYRRTDLEPYLGLHYPATDIPQASRFLFMKNKVRMICDCYAPPVKVIQDKKLAQPLSLGGSTLRAPHGCHAQYMANMGSIASLVMSVTINEDYDETSSNQQKGRKLWGLVVCHHTSPRFVPFPLRYACEFLLQVCGIQLNKEVELVAQMKEKHILKTQTLLCDMLLRDAPIGIMTKSPNVMDLVKCDGAALYYGKQLWLLGITPTEAQIRDITEWLLECHDSTTGLSTDSLMEAGYPGATTLGDTVCGMAAIKVASKDFLFWFRSHTAKEIKWGGSKHDPADKDGKKMHPRSSFKAFLEVVKRRSLPWEDVEMDAIHSLQLILRGSLQQVLESETKAIVDARLDDEQIQGPDELRIVTNEMVRLIET

SEQ ID NO: 8460 - protein, 464 aa, Lardizabala biternata
SGKPFYAIIHRVTGSLIIDFEPVKPYEVPMNAAGALQSYKLAAKAIARLQSLPNASMDRLCDTVVQEVFELTGYDRVMAYKFHDDDHGEVVSEITKPGLELYLGLHYPATDIPQAARFLFMKNKIRMICGCNATHVKVFQDEKLPLDLTLCGSTLRAPHSCHLQYMDNMGSIASLVMAVVVNEGDEENDGSGPAQPQKRKRLWGLVVCHNTTPRFVPFPLRYACEFLIQVFAIHINKELELENQVLEKTFYVPQTLLCDMLMRNAPLGIVSQSPNIMDLVKCDGAALLYKNKIWRLGLSPSEFHIRDIASWLYEYHMDSTGLSTDSLHDAGFPGALSLGDGVCGMAAVRITSKDMIFWFRSHIATEVRWGGAKHDPSEKDDGRKMHPRSSFKAFLEVAKTRSLAWKDYEMDAIHSLQLILRNAFKDGDTADLNSSVIHSRLDNLKIDGMEELEAVTNEMVRLME

SEQ ID NO: 8461 - protein, 394 aa, Lardizabala biternata
DLEPVNRADVPVTAAGALKSYKLAAKAISKLQSLPSGNISLLCDVLVHEVSDMTGYDRVMVYKFHEDEHGEVVSECLRSDLEPYLGLHYPATDIPQASRFLFLKNKVRMICDCSARSVEIIQDKRLTQPLSLGGSTLRAHHGCHTQYMSNMGSVASLVMSITINDDDDDDETETTKRKGRKLWGLVVCHHTSPRFVPFPLRYACEFLIQVFGIQLTKEVELATQLREKHILQIQTVLCDLLLRNAPVGIFTQSPNVMDLVKCDGAALYYKNKFWLLGVTPTEAQIREIAAWILEYHDGSTGLSTDSLMEAGYPGASVLGNAVCGMAAINITSKDFIFWFRSHTAKEIKWGGAKHDPVDKDDGRKMHPRSSFRAFLEVVQWRSLLWEDIEMDAIQ

SEQ ID NO: 8462 - protein, 466 aa, Lilium superbum
SGKPFYAIVHRVTNCLIIDFEPVNHTESPTTAAGALQSYKLAAKAIAKLQSLPGGSVRRLCETVVQEVFELTGYDRVMAYRFHEDDHGEVFTEVTKPGLEPYVGLHYPATDIPQAARFLFMKNKVRMICDCRARPVKIHQDDKLPAEITFCGSTLRAPHSCHLQYMENMNSIASLVMAVVVNDDDEVLDEQGAPSRQQSGRKKLWGLVVCHHLSPRFVPFPLRYACEFLMQVFAIHVNKEFELENQIREKNILKTQTLLCDMLLRDGDPIGIVSQSPNIMDLVKCDGAALLYNNRIWQLGMAPTGSQIHDIAFWLAESHMDSTGLSTDSLLDAGYPGALALGDTVCGMAAARITTKDIVFWFRSHTASEIKWGGEKHDPEEEDDGRRMHPRSSFNAFLQVVKNRSLPWNDYEMDAIHSSQLILRGTLDDNGKSKKGSLDSGMGDMRLDGMVELQAVTNEMVRLIIT

SEQ ID NO: 8463 - protein, 394 aa, Lilium superbum
DLEPVNPDDIPVATAGALKSYKLAAKAISRLQSLPSGNISLLCDAMVREVSELTGYARVMAYKFHEDEHGEVIAECKRPDLEPYIGLHYPATDIPQASRFLFMKDKVRMICDCTAPSVRVIRDRQLLQPPSLCGSTLRAPHGCHAQYMANMGSIASLVMAVTVNEDDDETDSNNQPKARKLWGLVVCHHTSPRFVPYPLRYACEFLLQVFGIQINKEVELAAQAKEKHIFRIQTVLCDMLLRDAPIGIFKKSPNVMDLVKCDGAALYYKNQFWRLGTTPTEAQIKDIVNWLLECHDGTTGLSTDSLTEAGYPDASSLGDEVCGMATISITLKDFIFWFRSHTAKEIKWGGAKHEPTDKDDDGRKMHPRSSFKAFLEIVKLRSLPWEDMEMDAIQ

SEQ ID NO: 8464 - protein, 465 aa, Pachysandra americana
  misc_feature (232)..(232): Xaa can be any naturally occurring amino acid
  unsure (1)..(465): unsure at all Xaa locations
SGKPFYAIVHRVTGSLIIDFEPVKPYEVPMTAAGALQSYKLAAKAIARLQSLPSGSMERLCDTMVQEVFELTGYDRVMAYKFHEDDHGEVVSEITKPGLEPYLGLHYPATDIPQAARFLFMKNKVRMICDCNAKHVKVLQDEKLPFDLTLCGSTLRAPHSCHLQYMDNMGSIASLVMAVVINEGDEDGEGSDPAQPQKRKRLWGLVVCHNTSPRFVPFPLRYACEFLAQVFXIHVNKEIGLENQILEKNILRTQTLLCDMLMRDAPLGTVSQSPNIMDLVKCDGAALLYKNKIWRLGMAPGDFQINDISSWLSEYHMDSTGLSTDSLYDAGYPGALALGDVVCGMAAVRITTKDMLFWFRSHTAGEVRWGGAKHERGEKDDGRRMHPRSSFKAFLEVVKTRSLPWKDYEMDAIHSLQLILRNAFRDVETMDLDTNTIRMQLNDLKIKGMEELEAVTNEMVRLMET

SEQ ID NO: 8465 - protein, 412 aa, Pachysandra americana
SGKPFYAIMHRIDVGLVIDLEPVNPADVPVTAAGALKSYKLAAKAISKLQSLPSGNISLLCDVLVKEVNELTGYDRVMVYKFHEDEHGEVVAECRRTDLEPYLGLHYPATDIPQASRFLFLKNKVRMICDCLAPPIRVIQDKRLEQPLSLCGSTLRAPHGCHAQYMENMGSIASLVMSVTINEDDDDDDVESDQQKGRKLWGLVVCHHTSPRFVPFPLRYACEFLIQVFGIQINKEVELAAQTKEKHILRNQTMLCDMLLRESPVGIVTKSPNVIDLVKCDGAALYYKNKFWLLGVTPTEAQIRDISEWLIEYHNGSTGLSTDSLMEAGYPGASVLGDAVCGMAAIKITSKEFLFWFRSQTAKEIKWGGAKHEPFNKDDARKMHPRSSFKAFLEAVKQRCLPWEDVEMDAIQ

SEQ ID NO: 8466 - protein, 554 aa, Pleea tenuifolia
  misc_feature (346)..(346): Xaa can be any naturally occurring amino acid
  unsure (1)..(554): unsure at all Xaa locations
DLEPVNPADVPVTAAGALKSYKLAAKAISKLQSLPTGNISLLCDVLVREVSDLTGYDRVVAYKFHEDEHGEVIAECRRSELEPYLGLHYPATDIPRASRFLFMKNKVRMICDCSAAPVKVIQDKRLAQPLSLCGSILRAPHGCHAQYMASMGSVASLVMSVTIIEDDNETGSDQQEKGRKLWGVVVCHHTSPRFIPFPLRYACEFLIQVFCMQLTKEVELADQMREKHILQTQTVLCDMLLRDAPVGIFTQSPNVMDLVKCDGAALYYRNQFWLLGISPREAQIRDIAGWLLEYHDGTTGLSTDSLLDAGYPGASALGDEVCGMAAIRITDKDFLFWFRSHTAKEXTWGGAKHDLVEKDSDGRKMHPRSSFKAFLEVVEGRSLPWEDVEMDAIHSLQLILRDSLQGERASIDSKAIVNAPLDDAKKIQGMDELSLVTNEMIRLIETAAVPILAVDVLGNVNGWNIKAAELTGLVVQQAIGMPLIDLVEGDSIDVAKNMLFLALQGKEERDVEIKLKTFGHQEKNGPKILVVNACCSRDMKEDIVGVCFVAQDVT

SEQ ID NO: 8467 - protein, 467 aa, Pseudowintera axillaris
SGKPFYAIIHRVTGSLIVDFEPVKPYESPMAAAGALQSYKLTAKAISRLQSLPGGSLKRLIDTVVQGVFELTGYDRVMAYKFHEDDHGEVISEVTKPDLEPYLGLHYPATDIPQAARFLFMKNKVRMICDCNAKPMKVYQDEKLTFDLTLCGSTLRAPHSCHLQYMENMGSIASLVMAVVINEREEKDENSGSEQQQEQPKRKRLWGLVVCHNTTPRFVPFPLRYACEFLAQVFAIHVNKELELENQIQEKNILRTQTLLCDMLMRAAPLGIVTQSPSILDLVKCDGAVLLYQNKIWRLGIAPTESQILDIALWLSEYHMDSTGLSTDSLHDAGYPGALSLGDVVCGMAAVRINSKDTLFWFRSHTAAEIRWGGAKHDPNQKDDGRKMHPRSSFKAFLDVVKTRSSPWADYEMDATHSLQLILRGSLKEAEKVDTGTMIHSRLNDLKLEGVVELQAVTNQMVRLMET

SEQ ID NO: 8468 - protein, 395 aa, Pseudowintera axillaris
  misc_feature (154)..(154): Xaa can be any naturally occurring amino acid
  unsure (1)..(395): unsure at all Xaa locations
DLEPVNPADVPVTAAGALKSYKLAAKAISKLQSLPSGNISLLCDVLVREVSELTGYDRVMTYKFHEDEHGEVIAECRRNDMEPYLGLHYPATDIPQASRFLFMKNKVRMICDCTARPVEVIQDKKLAQPLSLCGSTLTAPHGCHAQYMANMGSXASLVMSVTISEDDDEASSEEHRQKGRKLWGLVVCHHMTPRFVPFPLRYACEFLIQVFGIQLNKEVELAAQLREKNMLRTQTMLCDMLLRDAPVGIVTQSPNVMDLVKCDGAALYYRNQFWLLGTTPTEVQIRDIAEWLLEYHNNTTGLSTDSLMEAAYPGASILGDAVCGMAAVKITNKDFLFWFRSHTAKEIKWGGAKHDPSDKDGDGRKMHPRSSFMAFLDVVKRRSLPWEDVEMDAIQ

SEQ ID NO: 8469 - protein, 441 aa, Pteridophyllum racemosum
  misc_feature (157)..(157): Xaa can be any naturally occurring amino acid
  unsure (1)..(441): unsure at all Xaa locations
PYEVPMTAAGALQSYKLAAKAIAKLQPLHSGNMERLCDTVVQEVFDLTGYDRTMAYKFHDDDHGEVISEVTKPGLEPYLGLHYPATDIPQAARFLFMKNKIRMICDCNAKQVKVLQDEKIPFDLTLCGSTLRAPHTCHLLYMKNMGSAASLVMAIVXNEGDEEEEASGPSQPQKKKRLWGLVVCHNTTPRFVPFPLRYACEFLLQVFAIHVNKEFELENQILEKNILRTQTLLCDMLMRDAPLGILSQSPNIMDLVRCNGAALLYKNKIHRLGLTPSDFQIHDIASWLSEHHMDSTGLSTDSLYDAGFPGALSLGDQVCGMAAVRITSKDMLFWFRSHTAAEVRWGGAKHNPSEEDDGRKMHPRSSFKAFLEVVKTRSSPWRDYEMDAIHSLQLILRNAFKDAETADLNATVIHSGLNNLKIEGMEELEAVTNEMVRLIET

SEQ ID NO: 8470 - protein, 461 aa, Pteridophyllum racemosum
SGKPFYAILHRIDVGFVIDLEPVNPLDVPVTAAGALKPYKLAAKAISRLQSLPSGNISLLCDVLAREVSELTGYDRVMVYKFHEDEHGEVVSECRKIDLESYRGLHYPATDIPQASRFLFMKNRARIICDCSATPVKVIQDEKLAQPLSLCGSTLRAPHGCHAQYMANMGSIASLVMFVTINDDDDDIKIETHKGRKLWGLVVCHHTSSRFVPYPLRYACEFLIQVFGIQLNKEVELAVQSREKRILRTQTLLCDMLLRDSPVGIVTQSPNVMDLVRCDGAALYFRNKFWLLGVPPTEKQIRDIVGWLMEHYVGTTGLSTDSLMEAGYPDSSVLGDAVCGMAAINFTSKDFLFWFRSQTAKELKWGGAKHDPVDMDDVRKMNPRSSFNAFLEVVKWRSLPWEDVEMDAIHSLQLILRESMKNEIVNDVKTIVNTTPVIDARLRGMDQLCVVTGEMVSLMET

SEQ ID NO: 8471 - protein, 464 aa, Sarcandra glabra
SGKPFYAIIHRVTASLIIDFEPVKPYEVPMTAAGALQSYKLAAKAIARLQSLPGGSMEKLCDTVVQEVFDLTGYDRVMAYKFHEDDHGEVISAITKPGLEPYLGLHYPATDIPQAARFLFMKNKVRMICDCDAKPVKVFQDEKLVFDLTLCGSTLRAPHSCHLQYMANMNSIASLVMAVVVNEGEEDDSLEPGQQQQRKRKRLWGLIVCHNTTPRFVPFPLRYACEFLMQVFAIHVNKELELESQIQEKNIFRTQTLLCDMLMRDTPLGIVSQNPNVMDLVKCDGAALLYKKKIWRLGLTPSETQIHDISFWLSEYHMDSTGFSTDSLNDAGYPGALAIGDAVCGMAAVWITSKDMLFWFRSHTAAEVRWGGAKHDPDDKDDNRGMHPRSSFKAFLEVVKTRSLPWKDNEMDAIHSLQLILRGTFKDVENSHTKTMIYSQLNDLKLEGMEELQAVTNEMVRLIE

SEQ ID NO: 8472 - protein, 465 aa, Sarcandra glabra
SGKPFYAIMHRIDVGPVIDLEPVNPADVPVTAAGALKSYKLAAKAISRLQSLPSGNISLLCDVLVREVSELMGYDRVMAYKFHEDEHGEVIAECRRSDLEPYLGLHYPATDIPQASRFLFMKNKVRMICDCSAAPVKVIQDKRLGQPMSLCGSALRAPHGCHAQYMANMGSIASLVMSVTINEDDDETESDPQQQQEKPRKLWGLVVCHHTGPRFVPFPLRYACEFLIQVFGIQLNKEVELAAQLREKHMLKTQTVLCDMLLRDAPMRIVTQSPNVMDLVKCDGAALYYRNQFWLLGTTPTEAQIRDIAEWLLDYHDGSTGLSTDSLMEAGYPGASVLGDAVCGMAAVKITSKDFLFWFRSHSAKEIKWGGAKHDPINKDDDGRKMHPRSSFKAFLEVMKQRSLRWEDVEMDAIHSLQLILRGSLQEESENDSKAIVNASLDVAKIQGMDELRFVTNEMVRLIET

SEQ ID NO: 8473 - protein, 423 aa, Smilax rotundifolia
SGKPFYAIVHRVTGCLIIDFEPVTPTEVPMPAAGALQSYKLAAKAIAKLQSLPGGSMEGLCSTVVQEVFELTGYDRVMAYKFHEDDHGEVFAEITKPGLEPYRGLHYPATDIPQAARFLFMKNKVRMISDCRAKPVKVYQDEKLPFDITFCGSTLRAPHSCHLQYMENMNSIASLVMVVVINEGEEDEEQGQQQHNRKRLWGLVVCHHESPRFVPFPLRYACEFLMQVFAIHVNKEFELENQIREKNILRTQTLLCDMLLRDSDPLGIVTQSPNIMDLVKCDGAALLYENEIWQIGLTPTESQIREIAFWFAEFHADSTGLSTDSLYDAGYPGAVALGDTVSGMAAARITSTDILFWFRAHTAAEIRWGGAKHDPSDKDDGKRMHPRSSFNAFLEVVKGRSLPWNNYEIDAIHSLQLILRGTL

SEQ ID NO: 8474 - protein, 394 aa, Smilax rotundifolia
DLEPVNPADVPVTAAGALKSYKLAAKAISRLQSLPSRNISLLCDVLVREVSELTGYDRVMAYKFHEDEHGEVISECRRSDLEPYLGLHYPATDIPQASRFLFMKNKVRMICDCSAASVKVIQDKKLAQPLSLGGSTLRAPHGCHAQYMANMGSIASLVMSVTINEDDEEMDGDQQQKGRKLWGLVVCHHTSPRFVPFPPRYACEFLLQVFGIQLNKEVELAAQAKGKHIFWMQTLLCDMLLRDAPIGIFTQSPNVMDLVKCDGAALYYRKQFWLLGITPTEAQIKDIVAWLLECHDGTTGLSTDSLTEAGYPGSSALGNAICGMAAIKITSKDFIFWFRSHTSKDIRWGGAKHEPADRDDESQKMHPRSSFKAFLEVVKLRSLPWEDMEMDAIQ

SEQ ID NO: 8475 - protein, 392 aa, Spathiphyllum wallisii
PYEVPMTAAGALQSYKLAAKAISRLQSLPGGSMQKLTDTVVQEVFELTGYDRVMAYKFHEDDHGEVVSEITKPGLEPYLGLHYPATDIPQAARFLFMKNKVRMICDCHAKPVKVYQDEKLTFDLTFCGSTLRAPHSCHLLYMKNMNSIASLVMAVVVNEGDEEDEPLEHGQQLQQKRKRLWGLVVCHNTTPRFVPFLLRYACEFLMQVFAIHVNKEFELENQIREKNILRTQTLLCDMLLRDAPLGIISRSPNIKDLVKCDGAALLYQNKIWRLGSTPTESHIRDIASWLSEYHMDSTGLSTDSLYDAGYPGALTLGDAVCGMAAARITSKDILFWFRSHTAAEIRWGGAKHDPADEDDGRRMHPRSSFKAFLEVVKTRCLPWKDYEMEAIH

SEQ ID NO: 8476 - protein, 465 aa, Spathiphyllum wallisii
SGKPFYAIMHRIDMGLIIDLEPVNPADVPVTAAGALKSYKLAAKAISRLQSLPSGNISLLCDVLVREVRELTGYGRVMAYKFHEDEHGEVVSECRRPDLEPYLGLHYPATDIPQASRFLFMKNKVRMICDCSAQPIKVIQDKRLAQPLSLCGSTLRAPHGCHAQYMANMGSIGSLVMSVTINEDEDDDSSGEQQQKGRKLWGLVVCHHTSPRFVPFPLRYACEFLMQVFAIQLNKEVELAAQTREKHILRTQTLLCDMLLRDTPVGIFTQSPNVMDLVKCDGAALYYQNQFWLLRVTPTEAQIRDIAAWLIDCHNSTTGLSTDSLSEAGYPSASTLGDAVCGMAAIKITSRDLIFWFRSHTAKEIKWGGAKHDPVDRDDDGRKMHPRSSFKAFLEVVKRRSLPWEDVEMDAIHSLQLILRSSLQDENVRDNSKGIVNVISDDAKKIQGVDELRTVANEMVRLMET

SEQ ID NO: 8477 - protein, 467 aa, Tacca chantieri
SGKPFYAIIHRVTACLIVDFEPVKPSELPMTAAGALQSYKLAAKAIARLQSLPGGSMERLCDTVIEEVFELTGYDRVMVYKFHEDDHGEVFREITKPGLEPYQGLHYPATDIPQAARFLFMKNKVRMICDCRAKPVKIYQDDKLPLDLTFCGSTLRAPHSCHLQYMENMNSIASLVMAEVVNEGEEDDENLEPGQTQQQKKKRLWGLVVCHHESPRFVPFPLRYACEFLMQVFAIHVNKEFELENQIREKNILRTQTLLCDMLLRDTTPVGIMNQSPNIMDLVKCDGAALLYQNKVWRLGLTPTEAQIRDIAYWLAEYHMDSTGLSTDSLHDAGYPGALGLADVVCGMAAARITSKDMLFWFRSHIAAEIRWGGAKHDPADKDDGRRMHPRTSFKAFLEAVKMRSLPWKDYEMDAIHSLQLILRGTFSDSRNVNSRASLDARVNDLKLEGMVELQAVTNEMVRLMET

SEQ ID NO: 8478 - protein, 465 aa, Tetracentron sinense
SGKPFYAIVHRVTGSLIIDFEPVKPYEVPMTAAGALQSYKLAAKAIARLQSLPSGSIERLCDTVVQEVFELTGYDRAMVYKFHEDDHGEVVSEITKPGLEPYLGLHYPATDIPQAARFLFMKNKVRMICDCRAKHVKVLQDEKLPFDLTLCGSTLRAPHSCHLQYMENMNSIASLVMAVVVNEEDEEGESSSSEQSQKRKKLWGLLVCHHTTPRFVPFPLRYACEFLAQVFAIHVNKELELENQILEKNILRTQTLLCDMLMRDAPLGIVSQSPNIMDLVKCDGAVLLYKNRIWQLGSTPSEFHIHDITSWLSEYHMDSTGLSTDSLYDAGFPGALALGDGVCGMAAVRITSKDMLFWFRSHTAAEVRWGGAKHEPGEKDDGRKMHPRSSFKAFLEVVKTRSLPWKDYEMDAIHSLQLILRNAFKDVENEGLNTSTIRTQLNDLSIEGTEELEAVTNEMVRLMET

SEQ ID NO: 8479 - protein, 390 aa, Tetracentron sinense
DLEPVNPADVPVTAAGALKSYKLAAKAISRLQSLPSGNLSLLRDVLVQEVSDLTGYDRVMVYKFHEDEHGEVVAECLISDLEPYLGLHYPATDIPQASRFLFMKNKIRMICDCLAPPVKVIQDKRLVQPLSLCGSTLRAPHGCHAQYMENMGSIASLVMSVTINDDDDEIESDKRGRKLWGLVVCHHTSPRFVPFPLRYACEFLIQVFGIQLNKEVELVAQLREKQTLRTQTVLCDMLLRDAPVGIVTQSPNVMELVKCDGAALYYRSTFWLLGVTPTEAQIRDIAEWLLEYHNGSTGLSTDSFMEAGYPGAAVLGDAVCGMSAVKITSKDFLFWFRSHTAKEIKWGGAKHDPFDKDDGKKMHPRSSFKAFLEVVKWRSLPWEDMEMDAI

SEQ ID NO: 8480 - protein, 465 aa, Xanthorhiza simplicissima
SGKPFYAIVHRVTGSLIIDFEPVKPYEVPMTAAGALQSYKLAAKAIARLQSLPSGSIERLCDTVVQEVFELTGYDRAMVYKFHEDDHGEVVSEITKPGLEPYLGLHYPATDIPQAARFLFMKNKVRMICDCRAKHVKVLQDEKLPFDLTLCGSTLRAPHSCHLQYMENMNSIASLVMAVVVNEGDEEGESSSSEQSQKRKKLWGLLVCHHTTPRFVPFPLRYACEFLAQVFAIHVNKELELENQILEKNILRTQTLLCDMLMRDAPLGIVSQSPNIMDLVKCDGAVLLYKNRIWQLGSTPSEFHIHDITSWLSEYHMDSTGLSTDSLYDAGFPGALALGDGVCGMAAVRITSKDMLFWFRSHTAAEVRWGGAKHEPGEKDDGRKMHPRSSFKAFLEVVKTRSLPWKDYEMDAIHSLQLILRNAFKDVENEGLNTSTIRTQLNDLSIEGTEELEAVTNEMVRLMET

SEQ ID NO: 8481 - protein, 391 aa, Xanthorhiza simplicissima
DLEPVNPADVPVTAAGAMKSYKLAAKAISRLQSLPSGNITVLCDVLVQEVSDLTGYDRVMVYKFHEDDHGEVVAECRVPELEPYLGLHYPATDIPQASRFLFMKNKVRMICDCSAAPVKVIQDNKLAQPLSLGGSALRAPHGCHALYMANMGSVASLVMSVTINEDDDQMETDQQKGRKLWGLLVCHHTRPRFVPYPLRYACEFLIQVFGMQINKEVELATQFREKHILQTQTVLCDMLLRDAPIGIVTQSPNIMDLVKCNGGALYYRSRFWLLGVTPTEAQIKDIAEWLLQYHNASTGLSTDSLMEAGFPGASVLGNEVCGMAAIKITTKDFLFWFRSHTAKEVKWGGAKHNPTEKDDGWKMHPRSSFKAFLEVVKHRSLPWEDVEMDAI

SEQ ID NO: 8482 - protein, 246 aa, Petunia x hybrida
MGRGRVELKKIENKINRQVTFAKRRNGLLKKAYELSVLCEAEVALIIFSNRGKLYEFSSTSNMVKTLDRYQKCSYGTLEVNHRSVKDNNEERIYREYLKLKAKYESLQRYQRQLLGDELGPLNIDELEHLELQLDSSLKLIKSTRTQLMLDQLSDLQTKEKLWVEANKVLERKLEQIYAENNIQQSWGGGEQSGAYGQQHAQTQGFFQPLECNSTLQIGYDPATSSQITAVTSGQNVNGIIPGWML

SEQ ID NO: 8483 - protein, 245 aa, Petunia x hybrida
MGRGRVELKRIENKINRQVTFAKRRNGLLKKAYELSVLCDAEVALIIFSSRGKLYEFCSTSSMMKTLEKYQQCSYASLDPMQSANDTQNNYHEYLRLKARVELLQRSQRNLLGEDLGSLNSKELEQLEHQLDSSLKQIRSKKTQHMLDQLADLQQKEQMLAEANKQLRRKLEESAARIPLRLSWDNGGQPMQHNRLPPQTEGFFQPLGLNSSSPQFGYSPMGANEVNNAVSTAQNMNGFIPGWML

SEQ ID NO: 8484 - protein, 216 aa, Petunia x hybrida
MVRGKTQMRRIENATSRQVTFSKRRNGLLKKAFELSVLCDAQVGLVIFSPRGKQYEFSSSSMQEIIERYKGHTKDKVQTENQAGEQNLQHETAGLMKKIEFLETSKRKLLGEGLGSCTLEELQKIEKQLERSVSIIRARKMQVFKEQIEKLNEKEKALAAENAMLREKFGGLQQRQASSGEKEGEVVCTEGSDKSDVETELFIGPPECRIRHRLQN

SEQ ID NO: 8485 - protein, 218 aa, Petunia x hybrida
MVRGKTQMRRIENATSRQVTFSKRRNGLLKKAFELSVLCDAEVGLVIFSPRGKLYEFASSCMQEIIERYKRHTKDKVQNENQAGEQNLQLQHEAASLMKKIELLEISRRRLMGEGLQSCTLQEIQQLEKQLERSVSTIRARKIQVFKEQIARLKEKEKILAAENAMLKEKFGGFQERQVSSGEQVGEALCAEGNEKSDVETELFIGPPEGRIRRPSQN

SEQ ID NO: 8486 - protein, 218 aa, Petunia x hybrida
MQEMVRGKVQMKRIENATSRQVTFSKRRNGLMKKAYELSVLCDAEVAVVIFSQRGRLYEFSSSSMQKTIDRYRECARETLTNNSIQAQQQIQYLKEETENMAKKIEVLEVSRRKLTGQSLGSCSMNELQQIDSQLERSLKNIRARKSQLFEDEIERLKAKKNLLLEENARLSEKCGQMSREPALAPPDPLIQQQEKGNCSLSIKNSEVETDLFIGLRS

SEQ ID NO: 8487 - protein, 215 aa, Petunia x hybrida
MVRGKTQMRRIENATSRQVTFSKRRNGLLKKAFELSVLCDAEVSLIIFSTRGKLYEFSSSSMQEIIERYRRHSEDVQGEKPAVEQNNMQNLKLDAASLMKKIEILETSKRKLLGEDLGSCSLEELQQIEKQLERSISTIRARKMEVFREQIERLKGNVKVLATENAMLWEKCGDLEMQQTSGGEDLSIEGSEKSDVETELFIGLPECRTKRPLQN

SEQ ID NO: 8488 - protein, 226 aa, Candida glabrata
  misc_feature (112)..(112): Xaa can be any naturally occurring amino acid
  misc_feature (139)..(139): Xaa can be any naturally occurring amino acid
  misc_feature (173)..(173): Xaa can be any naturally occurring amino acid
  misc_feature (183)..(183): Xaa can be any naturally occurring amino acid
  unsure (1)..(226): unsure at all Xaa locations
MSTGDFLSKGIDLVQKAIEYDTATQYEEAYTAYYNGLDYLMLALKYEKNPKSKELIRAKFTEYLQRAEQLKQHLDEEQEAKKKESTSVGAGSGSGSGSGKGDEDTEDGKKLXVGALSGAILSEKPNVKWEDVAGLEGAXQEALKEAVILPVKFPHLFKGNRKPTSGILLYGPXPGTGKSYLAXQALATEANSTFFSVSSSDLVSKWMGESEKLVKQLFTMARENKP

SEQ ID NO: 8489 - protein, 268 aa, Medicago truncatula
MYGNSNFDSDLALLDSIRRHLLGESEFIFGAPTNVSGNTRVFSRSSSFSSLYPCLSDNWGELPLKEDDSEDMVLYGVLRDAVNVGWVPSLEVGSPESVSSVFPLEMTVKPEPDVMPVENVLPVASTAEQVVPEGPKAAPVKGKHYRGVRQRPWGKFAAEIRDPAKNGARVWLGTFETAEDAALAYDRAAYRMRGSRALLNFPLRVNSGEPDPVRIASKRSSPERSSSSESNSPAKRKKVMTAQSGLKTGQVGSQVAQQCTRGGQLLVS

SEQ ID NO: 8490 - protein, 523 aa, Clitoria ternatea
MFLLREIGVSILIFMITHLVIRLVLKEKEQRKLPPGPKGWPIVGALPLMGSMPHVTLSEMAKKYGPVMYLKMGTNNMAVASTPSAARAFLKTLDLNFSNRPPNAGATHLAYDAQDMVFADYGSRWKLLRKLSNLHMLGGKALEEWSQVREIEMGHMLRAMYDCSGGGDGNNDNDGNKKKGTRHEPIVVAEMLTYAMANMIGQVILSRRVFETKGSESNEFKDMVVQLMTVAGYFNIGDFIPFLARFDLQGIERGMKTLHNKFDVLLTTMIHEHVASAHKRKGKPDFLDVLMAHHTNESHELSLTNIKALLLNLFTAGTDTSSSIIEWALAEMLINPKIMKKVHEEMDKVIGKDRRLKESDIENLPYLQAICKETYRKHPSTPLNLPRISSQACQVNGYYIPKNTRLSVNIWAIGRDPNVWENPLEFNPERFMGANKTIDPRGNDFELIPFGAGRRICAGTRMGIVLVQYILGTLVHSFDWKLPNGVVELNMEETFGLALQKKIPLSALITPRLPPTAYNVINS

SEQ ID NO: 8491 - protein, 201 aa, Saccharum officinarum
MAPKRSTSPTGSSSGGVRAAATEQPRLRGVRKRPWGRYAAEIRDPVLKARVWLGTFDTPEQAARAYDAAARRLRGPGATTNYPAASEPMVPAVSGSAVLSESSSSSSWSLLPESVTAAVAAPPPSLDLSLALPASAAAANTYQVFMDPTPALLQFLPPKSEEEQSCSGSLSSSSGVFDAAPPVGLGLDLNLALLPPAEMVM

SEQ ID NO: 8492 - protein, 397 aa, Rhizobium etli
MSNSSVVIASAGRTAVGSFNGAFATVPAHELGAAVIKGALARAGVDAGEVDEVILGQVLAAGEGQNPARQAAIKAGLPKETTAWGVNQLCGSGLRAVALGMQQIATGDAKIIVAGGQESMSMAPHAVHLRGGVKMGDTKMVDTMIKDGLTDAFHGYHMGITAENIARQWQLSRDEQDRFAVASQNKAEAAQKAGRFTDEIIPYVIQTRKGDVTVDADEYIRHGATLEAMAKLRPAFDKEGTVTAANASGLNDGAAAAVLMSEAEAVRRGIQPLARIVSWATAGVDPSIIGHRPDPRFAQGARKAGWSVNDLRLVEANEAFAAQACAVNKDLGWDPAPGGSLVNVNGGAIAIGHPIGASGARVLNTLLFEMKRRGAKKGLATLCIGGGMGVAMCFEAL

SEQ ID NO: 8493 - protein, 80 aa, Leptolyngbya boryana
MSSNLSRRKFILTAGATAAGAVIVNGCSTGLNKSASSGASSPAASPAANISAADAPEVTTAKLGFIALTDSAPLIIALEK

SEQ ID NO: 8494 - protein, 548 aa, Synechocystis sp. PCC 6803
MGQMNTADLLVQCLENEDVEYIFGVPGEENLHILEALKNSPIRFITTRHEQGAAFMADVYGRLTGKAGVCLSTLGPGATNLMTGVADANLDGAPLVAITGQVGTDRMHIESHQYLDLVAMFDPVTKWTRQIVRPSITPEVVRKAFKLAQSEKPGATHIDLPENIAAMPVDGKPLRRDSREKVYAAFRTLGTAANAISKAKNPIILAGNGTIRAEASEALTEFATSLNIPVANTFMGKGTMPYTHPLSLWTVGLQQRDHITCAFEKSDLVIAVGYDLIEYSPKKWNPTGDLPIIHIGATPAEIDSSYIPQVEVVGDITDSLMDLLKRCDRQGKPTYGASLRAEIRAEYECYANDTGFPVKPQKIIYDLRQVMGPDDVVISDVGAHKMWMARHYHCDSPNTCLISNGFAAMGIAIPKRSPLSWFILSEHCCSDGGRRFYDELSGVETAMRVGTPFVTLIFNDNGYGLIEWKQINQFGESSFIKFGNPDFVKFAESMGLKGYRVEAAADLIPILKEALAQPVPTVIDCPVDYRENIRFSQKAGELACEIWE

SEQ ID NO: 8495 - protein, 408 aa, Marinobacter hydrocarbonoclasticus
MNTEIILGVVMFTVIVLALVAVILAARSKLVSTGDVTIEINDDPEHTLKTAAGGKLLGTLANSGIYLSSACGGGGTCAQCKCKVLDGGGAMLPTEKTHFTNREEKEGWRLSCQVPVKQDMKIEVPEEFFGVKKWECEVISNHNVATFIKELVLKLPEGEEVDFRAGGYVQLECPPYEIPFKDFNIEEEFHEDWDKHDIWRYKGVNKEETIRAYSMANYPEEKGLLKFNIRIATPPPGTDHPPGIMSTYVFNLKPGDKVTVMGPFGEFFAKDTDAEMVFIGGGAGMAPMRSHIFDQLKRLNSKRKISFWYGARSVREMFYVEDFDGLAAENDNFEWHVALSDPLPTDDWNGPTGFIHNVLYENYLKDHPAPEDCEFYMCGPPIMNASVVKMLKDLGVEDENIMLDDFGG

SEQ ID NO: 8496 - protein, 668 aa, Emericella nidulans
MADGLNMGSLTLNDSQHAPAPGGPPSGGRAAYIPPHLRQRQVNANGDGASAPPPGPTGGSWGGPRGPRGGNWANANAPDFNPRGPNGNTNTNSGWTATEAGRPLFNPNAYGNPGHGGGYAGASARGSGDGQWRDGKHIPGPPNPRLERELFGVPNDPTKQNTGINFANYDDIPVEASGHDVPEPVNTFTNPPLDDHLISNIALARYQTPTPVQKYSIPIVMNGRDLMACAQTGSGKTGGFLFPILSQAYQNGPAAPPPSAAGQFGRQRKAYPTSLILAPTRELVSQIFDEARKFAYRSWVRPCVVYGGADIGSQLRQIERGCDLLVATPGRLVDLIERGRISLVNIKYLILDEADRMLDMGFEPQIRRIVEGEDMPNVNDRQTLMFSATFPRDIQMLARDFLKDYVFLSVGRVGSTSENITQKVEYVEDHDKRSVLLDILHTHGTTGLTLIFVETKRMADALSEFLINQRFPATAIHGDRTQRERERALEMFRSGRYPILVATAVAARGLDIPNVTHVINYDLPTDIDDYVHRIGRTGRAGNTGIATAFFNRGNRGVVRDLIDLLKEAHQEVPSFLESIAREGSGYGGRGGRGGRGRGANATRDMRRMGGGMGGPPSYGGGSGFGAPASNYGGGYGGAPSYGGAGYGGGYGGGGYGNPSGSTGPSSWW

SEQ ID NO: 8497 - protein, 135 aa, Microcystis aeruginosa PCC 7806
AERVYFLLKGAVKLSRVYEAGEEITVALLRENSVFGVLSLLTGQRSDRFYHAVAFTPVELLSAPIEQVERSLRNNPDLSMLMLQGLSSRILQTEMMIETLAHRDMGSRLVSFLLIFCRDFGVPTTDGIRVDLKLS

SEQ ID NO: 8498 - protein, 240 aa, Liquidambar formosana
EFPNQSSEGSSSQKKMGRGEIEIKRIENTTNRQVTFCKRRNGLLKKAYELSVLCDAEIALIVFSSRGRLYEYANNSVKSTIERYKKASDTSIPGSVSETNAQFYLQESSKLRRQIRDIQNLNRHIMGEALSSLTFRELKNLEGRLEKGISRIRSKKNELLFAEIEYMQKREIELQNANMYLRAKIAENERNQQQTELMPGPVYETMPSSQPYDRSFLAANLLEPPNHHYCRQDQTPLQLV

SEQ ID NO: 8499 - protein, 275 aa, Gossypium hirsutum
MAFPPHAFMFQPHEDHHNDHLPSPTSLNFLPSCPPQLFHGGGAPFMMKRSVSFSGVDKSEEVHGDDELSDDGSHLGEKKKRLNLEQVKALEKSFELGNKLEPERKVQLAKALGLQPRQIAIWFQNRRARWKTKQLEKDYDALKKQFEALKADNDALQAQNKKLNAELLALKTKDSNETSCIKKENDCSWSYGSDKNSCDVNLDISRTPLTSSSKHLFPPSVRPTSMTQLLQGSSRPDLQCVKLDQVVQEESFCNMFNGVDEQQAFWPWSEQQSFH

SEQ ID NO: 8500 - protein, 176 aa, Herminiimonas arsenicoxydans
MTSSSKSKTVAASDKPAFIVRNSPIHGRGVFATRNIPADTLLIEYEGERISDKEAAKRHGSDPENPYHTFFFSLESGKMIDGGVDGSDARWINHACEPNCEAREEKKRVYIYTLRDIKRGEEFNYDYGLVVDERQTKALKKAYECRCGAASCRHTMLAPKVRKSAKKPGKKKDQKD

SEQ ID NO: 8501 - protein, 561 aa, Herminiimonas arsenicoxydans
MNSAFDIKRFFPFLRWPRPTLATLKSDAWAGLSVGMVLIPQAVAYATLAGMPAATGLYAALIPSLVGVLWGSSALLAVGPAALSSLLVFGSLSPLAVPASGQWVALAIWLSIYSGGIQFLLGAFRLGRLSNLVSQPVIVGFINAAAIIIMMSQLPTLLGIADIFNSHPLQVLERVGAAPSHMLMTTAFGGGTLLLLVLGKRFFPRFPTILFVTILATALSWAFGYAAAGGEVVGDIARGLPPLVLPSAISFEQHRELWSAGLVLALISFTEAMSSCRVLARKRRERWDENQELIGQGLAKVASGFSGAFPVSGSFSRSALNLYAGATSAWATLFTLICVLVCLLFFTDMLYYVPRSVLAALIIMPVFSLFDFGAFKRLFSISRDDGAIAVVTFAVTIAAMPRLHWGVMVGITLTMVSYLYRHMQPRIIEVSQHADGTLRDRQRFHLPRLADDMLVVRIDAALNFLTGGVLDNFVVEQCSRDPQIRRLLLCVGSVNDIDATGVDTLESLQITLKSMGIDLYVSAIKKQVWDVLEDAGWLRGLSPEHIFMTDREAIAALATVR

SEQ ID NO: 8502 - protein, 466 aa, Herminiimonas arsenicoxydans
MSIKKIFASALATGALLVAVGFAAPAIAEEAATAPAASATVAAPAPAATTEAPATAAPAAPAPVLNTGDTAWMLTSTMLVILMTIPGLALFYGGLGRSKNMLSVLMQVFVLFALITVLWAIYGYSMVFAGGGSFYGTFEKLFLGGIKPDTLSGTIPEYVFVAFQSTFAAITCALIVGAFAERMKFAAVIAFSVLWFTFSYIPIAHMVWATGGLLFVEGALDFAGGTVVHINAGVAGLVGAYMVGKRVGFGKEAMPPHSLTLTMVGASLLWVGWFGFNAGSALGANGVAGLAFINTILATGAATLSWIGAEAVLKGKASMLGAASGAVAGLVAVTPAAGFVGPMGSIVLGLLAGMICLWGVSGLKRMLGVDDAFDVFGVHGVGGIFGAIMTGVLAAPSLGGTGAADYAMAHQLMVQVKGVLITIVWSGIVAFVAYKLVDMVIGLRVADEAEREGLDISSHGESAYHS

SEQ ID NO: 8503 - protein, 287 aa, Herminiimonas arsenicoxydans
MGKPMATRLLQAGYEVTVWNRTRSKADELAPLGAKVAEQAAAAVRAADIVITMLEAGPIVAQVIAAALPGLQRAALVVDMSSTRQSEAQEAHTLLAAHGVRFIDAPVSGGVVGAQAGSLAIMAGGSADDFAEAEAVLATMGRPTLVGPAGCGQIAKLCNQLIVGGTLNIVAEALLLAQAGGADPTAVRAAIRGGFAESRILEVHGQRMLERNFMPGGQVKSQFKDLENVLIAAANAGLRLPVTELVTENYHSVLQRSPQADQSAVLLALENINPGQRLGDLADQLPG

SEQ ID NO: 8504 - protein, 300 aa, Herminiimonas arsenicoxydans
MKSTTLLKTLIGAAMMSTLMTAAQAQELSGTLKKIKETGEITIGYRESSIPFSFLDDKQQPIGYAMDLCMKIVGTVKADLKLPALKVKLQPVTSSNRIPLLNNGTIDLECGSTTNSIARQEQVAFGPTYFVINVTAAVKKSSNINTIAQLDGKTVSTTSGTTSVPLLKAYKKAGNAQVKEIYGKDHAEAFLLMADDRAAAFVMDDILLAGQIANAKRPGDYKILPESLRQEPYSMMLRKGDPQFKALVDKSITAVMQSGEIDKIYAKWFTTPIPPKGLNLNFPMTPAIKEAFKHPNDKGI

SEQ ID NO: 8505 - protein, 119 aa, Herminiimonas arsenicoxydans
MQRIMLRAKIHRAKVTQADLHYEGSCGIDADLLEAADIKVGEKIELYNINNGERFSTYAIQGARGSGEISLNGAAARCAHLGDLMIICTYGPMTDEEIATYTPKIVFVDEDNHFAGMKK

SEQ ID NO: 8506 - protein, 532 aa, Herminiimonas arsenicoxydans
MSLVIGVPRESFPGEKRVATVPEVVEKLIKLGFSVSVESGAGDDANFSDDTYRAAGAQIVQGAANLWSTSDIVFKVRAPSAEEIGLIREGSTLIGFIWPAQNPELMQQLAAKRVTVLAMDSLPRTLSRAQKMDALTSTAGVSGYRAVIEAANAFGRFFNGQITAAGKVPPAKVFIAGAGVAGLAAIGTSASLGAIVRANDTRAEVADQVVSLGGEFVKVDYDEEGSGGGGYAKVMSEGFQAAQREMYAQQAKECDIIITTALIPGKPAPKLITAEMVQSMKPGSVIVDMAAEQGGNCELTEPGKVVVKHGVTIVGYTDLPSRLPKQASTLYSTNLLRLTEELCKDAEGKKTTDGIINVNMEDEAIRGLTVIKEGNITWPPPPLKQVAAPAAKPAAAPAPAHGHGPSTTVSSPKRVVTMFVFATLLFALIGYGAPTAFLGHLTVFVLGCFIGYMVVWNVTPALHTPLMSVTNSISSIIVIGALVQVAPPLADGMARPEMLIKCLAAAGIALTAINMFGGFAVTRRMLDMFRKN

SEQ ID NO: 8507 - protein, 295 aa, Herminiimonas arsenicoxydans
MAKVGFIGLGIMGAPMALNLQKGGHQLFLHDQKAPAQELVDGGATVCASGAEVAKNADIIITMVPDTPHVDAVLFADNGVAAGLSKGKIVVDMSSISPIATKEFAKKINALGCEYLDAPVSGGEVGAKAASLTIMVGGSEAAFATVKPLFELMGKNITLVGGNGDGQTTKVANQIIVALNIQAVSEALLFASKAGADPAKVRQALMGGFANSRILEVHGERMIKRTFNPGFRIELHQKDLNLALQGAKAMGVSLPNTAATQELMNACAANGMSGLDHSALCRAIEIMSNHEIAKA

SEQ ID NO: 8508 - protein, 185 aa, Herminiimonas arsenicoxydans
MKLIILDRDGVINHDSESCIKSPHEWIPIPGSLEAIARLNQADYRVVVATNQSGIARGMFNIMALNAIHQKMHAAALSVGAEIDAVFFCPHAADDGCDCRKPQSGMLHAIGKRFDVSLKGVPTVGDSLRDLQAGFVAGCSPYLVLTGKGEKTLGKGGLPPGTTSYANLAAVVDHLLKKPAPGHAI

SEQ ID NO: 8509 - protein, 271 aa, Herminiimonas arsenicoxydans
MSEIFGSDAFSPKEIAARVEEVGVTKAHLPFLSMLMLSILAGAFIGLGALYFVIVKSDPTLGFAVRQILGGAVFSLGLILVVVAGAELFTGNNLLAMAWADGKISTLDVLRNWAIVCCGNFIGAAGLALLVYLSRHADMNHGAIAQEYLTIAAAKAAMPFWTAFFKGVMCNVLVCMAVWMAFAGRSVVDKVVAIIFPISAFVAAGFEHSVANMYFFPLAMLLQGDGATAGAITWTGFFSNMLPVIMGNIIGGSVLVGLVYHIIYRRASLPK

SEQ ID NO: 8510 - protein, 416 aa, Herminiimonas arsenicoxydans
MTTNDRKFNMTRRTVLKAGTAITASAFGGLATQGVWAAGSDKPEKEEVKVGFIPLTDCASVVMASVMGFDKKYGIKIVPTKESSWAGVRDKLVNGELDAAHVLYGLIYGVHGGIGGAKKDMAVLMSINNNGQAISLSKKLADKGAVNGAGLAKLMQMEKREYTFAQTFPTGTHAMWLYYWLATYGINPMKDAKVITVPPPQMVANMRVGNMDGFCVGEPWNHRAIVDGIGITAATSQDIWKDHPEKVLGTTSEWVAKYPNTARAMTAAVLEASRWIDASLSNKNKMAETIAAKSYVNTSVDVINQRILGRYSDGMGKTWDDPNYMKFYNDGAVNFPYLSDGMWFMTQHKRWGLAKGEPDYMGTAKSINRIDLYKEAATMANVPVPKNVMRSSKLIDGVVWDGKNPKAYAESFKIKA

SEQ ID NO: 8511 - protein, 502 aa, Herminiimonas arsenicoxydans
MSDNQSALPTETPIVIPDVAPAIRFQDFGLAPEILKALNDQGYVHPTPIQAEAIPVVLKGMDVMGAAQTGTGKTAGFSLPIIQLLMAHANSSASPARHPVRALILTPTRELADQVAANVKAYSRHTPLRSLVVFGGMDMTPQTAALRGGVEIVIATPGRLLDHVQQKTINLSQTQILVMDEADRMLDMGFLPDLQRIINLLPKQRQNLMFSATFSPEIKKLAATFLKDPVTIEVARSNATAENVTQIIYKVEEEAKRDAVSFIIRERGLKQVIVFSNTKIGASRLARQLESEGVKASAIHGDKSQSERMQALEQFKNGTIEVLVATDVAARGLDIAELPCVINFDLPYNAEDYVHRIGRTGRAGASGDAISLFSDKDARLLVDIEKMIKHKFVPAELIGFTPSSGRTAERSHDRRAHERSPRKDESAPRPSRAPERSPGAASNGSRSAYAAAPRKEKIDPFFTRPYEPAPSTMVSDNKLADQVPAKPQKHKMAALLGGAPKR

SEQ ID NO: 8512 - protein, 581 aa, Herminiimonas arsenicoxydans
MTISPHLKRLYGMLGPYKKRLAVAFIGMIMTALTEPMFPAVMRLLLDKGFGGKPTFSLWLVPLAIIGIFVLRGISTFTTTYTMTWVSSRLLSTLRKKMFERILDVPLGFYGTHSVGRVINSMMFEVQQIIEMITKVYTSIIRDSLTVIVLLAFLFWLNWRLTLVALVLLPLIAIVVRFTGKRVRRLTREYQAVNAEMTQVIEESTRANQVIKIFGGHQYENDRFEVRADKLRSYTMRMASTLAATTPVTQIMASCAVAIVIVIALIQSEQNQTTVGGFVSFITAMLMLLAPLKNIAEVNGPLQKGLTAAEAVFGLIDAKPERTSGKTLEARAAGKLDFINLGFSYPGHQSMALEDINLSVLPGETIAFVGMSGGGKSTLVNLVPGFYPATVGEIRLDDVPIEEIALTSLRRQIAMVSQHVVLFDDTIAANIAYGDETPDRARILAAATAAHLDDVIAGLPQGLETMIGDNGSRLSGGQRQRLAIARAIYKDAPILILDEATSALDSESERAVQAALDALMKGRTTLVIAHRLSTIERADRIAVLAEGRIVELGSHQELLEKNAVYANLYHLQFAKEEPDAV

SEQ ID NO: 8513 - protein, 391 aa, Herminiimonas arsenicoxydans
MEEIVIVAAGRTAVGKFGGALAKIPAADLGAHIIRNLLLRTGIAADAISEVILGQVLTAGCGQNPARQASIRGGLPDMVPAFTINKVCGSGLKATHLAAQAIQCGDAHIIIAGGQENMSASPHVLQNSREGIRMGDGKLVDTMIIDGLWDVYNQYHMGTTAENIAKKFGISRQEQDEFALASQHKAEAAQNAGKFKDEIIPLEIPGKKGAVIVDSDEYIKPGTTLESLAALRPAFSKDGTVTAGNASGINDGAAAVIMMTAKKAAELGLKPLARIKAYSSAGVDPAIMGMGPVPAAQLCLKKAGWSHQDIDLMEINEAFAAQAIAVNREMGWDTGKINVNGGAIAIGHPIGASGCRILVTLLHEMMRRDARRGLASLCIGGGMGVALAIER

SEQ ID NO: 8514 - protein, 582 aa, Herminiimonas arsenicoxydans
MSNDTKNGSTNPTPASSNFLRGIIEADLAAGKHEKRVDKDGQPLPTVITRFPPEPNGYLHIGHAKSICLNFGLARDYAGRCNLRFDDTNPTKEEQEYVDTIIDSVKWLGFDWHVGDKEHLYFASDYFDQLYAMAEYLITAGHAYVDSQSADDMAKNRGNFGEAGKNSPFRDRPAAESLDLFRRMKAGEFKDGEHIVRAKIDMASPNMNMRDPAIYRIRHAHHHRTGDAWCVYPMYDYAHPIEDAIENITHSICTLEFQDHRPFYDWVLERLAEGGFFTKPLPHQYEFARLNLTYAITSKRKLLQLVEENIVDGWDDPRMPTIVGIRRRGYTPASIQLFAERIGVAKVDSWIDMSTLEGALRDDLDDKAPRAIAVLRPLKLIIDNFPEDETVECTAPVHPHHPERGNRTFPISKELWIEQEDFMEVPSKGYFRLFPGNKVRLRYGYVVECVGADKDADGNIIAVHCTYFPDSKSGTEGSANYKVKGNLHWVSAAHALEAEVRLYDRLFTDAHPDAGGKDFKLALNPNSKEVITAYVEPGVSAVQADEKLQFERHGYFVADRVDSKAGKPVFNRVVTLKDSWGK

SEQ ID NO: 8515 - protein, 221 aa, Herminiimonas arsenicoxydans
MNTLHFDPELLPVDSLGGEDAITLEQLKAEALRARFLNPPVWSPEIRVERLVRQLNRPLMDAAVLLPIVMRDPGPTLLLTQRTAHLHDHAGQISFPGGRVEPGDGSPIETALRETEEEVGLARRHIDVIGALPDYHTGTGFRVTPVVGIVQPPFDVHPDTFEVAEIFEVPLAFLMNGAHHQRRTAQFETGSRTFYVMPYERHFIWGATAGMLRNLFHFLRA

SEQ ID NO: 8516 - protein, 770 aa, Herminiimonas arsenicoxydans
MDSNIDKKEELRLQLRQAALEYHEFPTPGKISVTPTKQVTNQRDLALAYTPGVAVACEEIAANPADSYRYTSRGNLVAVITNGTAVLGLGNIGPLAAKPVMEGKGVLFKKFAGIDVFDIEINETDPDKLCDIIASLEPTFGGINLEDIKAPECFYIERTLRERMKIPVFHDDQHGTAIIVAAAILNGLKVVGKTIQNTKLVVSGAGAAALACLDLLVDLGFPLENIFVTDLAGVVYHGRVELMDPAKERFAQKTDARKLADVIGGADVFLGVSGGGVLKPDMVAAMADRPLILALANPTPEILPEEVRAVRSDAVIATGRSDYPNQVNNVLCFPYIFRGALDCGATTITREMEIAAVHAIAQLAQAEQSDIVATTYGINNLSFGPDYIIPMPFDPRLMIKIAMAVAKAAEECGVAARPIKDMEAYADKLQQFVYRSGTFMKPIFQIAKSTPSDLKRIVYAEAEEERVLRAVQVVVDEKLARPILIGRPAVLLQRIERFGLRIKPDIDFTIINPEHDDRYRDFWQTYLAMTLRKGVTEQYAKLEMRRRHTLIGAMAIHKKYADGMICGTFGTTDLHLKYVEQVLGKRAGVNSYAAMNCVIMSDRQLFLVDTHVNENPSAEQLAEITILAAEEMRRFGMPPRAALLSHSNFGSSNSESAQKMRKVLQLVRERAPDLEIDGEMHGDLAMNAVELKKAMPDSALKGDANLLVFPNIDSANIAYNLLKTTVGNGVAIGPILLGCDKPVHILTPSATVRRIVNMTALCVADAVAER

SEQ ID NO: 8517 - protein, 397 aa, Herminiimonas arsenicoxydans
MLSAESRPYIDASVPVLREHGLAITQVFYKNLFESHPQLHHIFNAGNQANGSQQQSLASAVFAYAANIDNQAALAPVISRIVHKHVSLGITAAHYPIVGEHLLGAIKQVLGDAATPALIAAWAEAYGLLAQALIDEENRLYQAAGVEPGDLFNMRVVAVEKESAQVTSYSMVAVDRQLPEFQPGQYVSVAVFLPDGLRQLRQYSLSESPDHQHLRISVKREVAGAETPAGVVSNWLHDNVVVGSILPVSMPAGDFTPDTDGEDPIVLLSAGVGITPMISALNRIAKVSPRRRVIFAHAARNAHHHPHRADIAKAVASMPNLHSVTFYEEAEHDDETSLAGRMELQKLPQWDVKKSQVYMCGPLPFMQAQWADLLAQGVPAQHLHREVFGPDMLDHLI

SEQ ID NO: 8518 - protein, 508 aa, Herminiimonas arsenicoxydans
MKLLTLGIFILILALTLLVTYWAARRTNTASEFYAAGGNLSAKENGFALAGDWMSAAAFLGFTGLTALYGMDGSLYAVSALAAFLLILMVVAEPIRNTGRYTLGDVIAYRMQRPQARLAAVVGTAIVNIAYMIPQLAGAGALMKLLLGVPYSTAVIFVGIGMVVYVRFGGMIATTWVQIIKAVLLLATATVLVTWLLAEVGFNPLKLFSIAEDKYGLQMLAPGNYLKHPLDAFSLSLSLIVGTAGLPHIMTRFFTVPDAKTARKSVIWLMFLAGTFFLATTLIGFAAAIFVGQDAIRAVDKGGNLALPLLAQTLGGGAGSIGGEIFLAVVCAVAFATILAVVAGLTLATSGTVAHDLYVNVIRQGKVSEADQVRIAKLSTLAIGVIATALGLLAEGVNVAVLVILAISIAASANFPVIVLSLFWRRFNTAGVIGGITVGLVSAAGLAFIGPAFMGKAAIFPIVNPTILSLPLGLLGAVVGTFLGGRDLANEERFEEVLYRAQTGAEIH

SEQ ID NO: 8519 - protein, 205 aa, Herminiimonas arsenicoxydans
MSFENLNKKVPMLNQEALETLFTHAHTNTVWLDKPVTNGQLREIYELMKWGPTSMNCMPARIAFIKSPQAKEKLAACVSAGNVQKVLTAPITAIIGMDMAFPRKLPQLFPHADGQAIFAGNDKLIAETAFRNSSLQGGYFIMAARAIGLDCGPMSGFDAEKVNAEFFVGTQVKANFLCSIGYGDHEKIKPRLPRLTFEASCAIVL

SEQ ID NO: 8520 - protein, 327 aa, Herminiimonas arsenicoxydans
MKQKILVARATFPDVIERLQQQFEVESNQEDRIFSPAELHEKMQGKDGVIITSSEKLSGEVITANPQLKAICNVAVGYNNIDVAAATKAGIMVTNTPDVLNETTADYAWTLLMANARRTSESEHYLRAGKWKNWRFDQFLGADVHGATLGILGMGRIGQAIARRSMGFDMQVIYHNRSRLTPDQEAHANNARYVSKEELLRTADHLILVLPYSEQTHHIIGAAELALMKPTATLVNIARGGIVDDVALIAALREHRIASAGLDVYENEPALHPDFLTLSNVVLTPHIGSASEKTRRAMSDCASLNMVAALSGQRPPNLLNPEVQAKK

SEQ ID NO: 8521 - protein, 445 aa, Herminiimonas arsenicoxydans
MSNILQSVPVNQKVGIAFSGGLDTSAALHWMRQKGAIPYAYTANLGQPDETDYNAIPEKAKAYGAELARLIDCREQLVAEGIAALQSGAFHISTAGVTYFNTTPLGRAVTGTMLVAAMKEDNVDIWGDGSTFKGNDIERFYRYGLLMNPALRIYKPWLDDAFINELGGRKEMSEFLIKSGFDYKMSTEKAYSTDSNILGATHEAKDLEELSSGMQIVEPIMGVAFWRDDVEVKRETVTVRFEEGRPIALNGVVYTDLVELMLEANRIGGRHGLGMSDQIENRIIEAKSRGIYEAPGLALLFIAYERLITGIHNEDTIEQYRESGRRLGRLLYQGRWFDPQAIMLREAAQRWVARAITGEVTIELRRGNDYSILNTVSANLTYAPERLSMEKVEDAPFSPADRIGQLTMRNLDITDTRHKLAIYSSAGLLTGNSSVALPSFEKDKK

SEQ ID NO: 8522 - protein, 565 aa, Herminiimonas arsenicoxydans
MKPFRFSFRPSLLKDLRGYDVPAFFRDLSAGLTVGIVALPLAMAFAIASGVKPEAGIFTAIIGGFLISALGGSRIQIGGPAGAFIVIIYGIVEKYGVANLLIATIFAGLMLCAMGFFRLGSLIRYIPVPIVIGFTNGIAVLIALSQMKDFFGLHIEKMPGDFFAQIQTLTANAHSFNLASIAIALVSLLLIFIWPKLWQAKPNTMDEVIGGKDKRILRILRAFPGTILVLVLATLAVSLFDLQVDTIGSKFGGIPQGLPSFALPHFTWELVKQLFPPALTIALLGAIESLLCARVADNITGDRHDPNQELMAQGCANFIVPFFGGIPATGTIARTVTNIRAGAVSPIAGILHALTLLVIVLVAAPLASNIPLAALAAILLYVAYNMGEWHEFARLRHFSMNYRILMLATFLLTVIVDLTVAVQVGLVLACVFFIYRISSLTRIELIPPDRLSTPLPHGVLAYSIFGSLFFGAVDKLEGLIEAESMPEQALILELHQLINLDATGLDALETVRKTLQKKGSQLILCGPNRQPLDLMRRSGFLARLGPQNCLDNLPDALARSAALAA

SEQ ID NO: 8523 - protein, 368 aa, Herminiimonas arsenicoxydans
MAAELERQGRHIIHMGIGEPDFTAAPSVLAAAAQAMADGRMQYTSATGLPELRAAIAAHYRDMYGVDVAPSRIIITAGASGALLLACAALVEKGAEVLMSDPSYPCNRHFVAAFDGSAKMIASGPEHRFQLSADMVQQNWGEQTRGVLLASPSNPTGTSIDEDELRKIVEVVRGKQGFTIVDEIYHGLRYDAAPFSALSLGDDVIVINSFSKYFNMTGWRLGWLVVPETLVPPIEKLAQNLFICASSLAQHAGLACFAPAAMTVYEARKAEFKRRRDYIVPALEELGFKVPVMPDGAFYVYADCSALSDDADELTIAMLNEAGVVMVPGLDFGPSTAHRYVRISYATSMENLQEAIARLRIFLSGRTQ

SEQ ID NO: 8524 - protein, 579 aa, Herminiimonas arsenicoxydans
MRGLLKFLLPYKKQFALAGIALIVAAAATLAIPYAFRQMIDLGFGANGIHDTGSINTYFLALFGVACILALATAARFYMVSWLGERVTADVRNAVYSHVVTQSPQFFETTQSGEVLSRLTTDTTLIQTLIGTSISMALRNTLLFAGGLVMLFVTSIKLSSIILVMLIATVLPIVWFGRRVRSLSRASQDRVADSSALAGEILNAMPTVQAFTHEKIESERFSKTVEDAFKTAMRRIRARSLLTMIAILLIFGAIVFVLWLGAHAVIDGTMSGGELGQFILYSAIVAGAIGALSEVVGDAQRAAGATERLLELLAVQSPISSPAVPLPLPPRRANGSSLALDLVSFYYPSRPLTPAISNFSIAIKAGETVAVVGPSGAGKTSLFQLLLRFYDPQEGVIELDGVDIRQLDLHALRNTIGIVPQDTVIFSANAMENIRYGRPDASDEEVIAVAKMAAAHEFIDRLPEGYQSFLGERGVRLSGGQRQRIAIARALLKNPPLLLLDEATSALDAESERLVQSALEAAMVGRTTLVIAHRLATVQRAHRIIVMEHGHIVETGTHASLVAAGGLYASLAALQFGQH

SEQ ID NO: 8525 - protein, 579 aa, Herminiimonas arsenicoxydans
MTSETNNAVGEELTGAEIVVRCLAEEGVEHVFGYPGGAVLYIYDAIYNQDKFQHILVRHEQAAVHAADAYSRSSKKVGVSIVTSGPGVTNAVTGLATAYMDSIPMVIISGQVPTHGIGLDAFQECDTVGITRPCVKHNFLVKDVRDLAATMKKAFYIATTGRPGPVLVDIPKDVSMHKCMFSYPKEVEMRSYKPVDKGHTGQIRKAVQLLLQAERPMIYTGGGVILANASEELTQLVDKLGFPCTNTLMGLGSYRASSDKFVGMPGMHGTYEANMAMQHSDVMIAIGARFDDRVIGNPKHFSSNPRKIIHIDIDPSSISKRVKVDIPIVGNVKEVLVELLAQLDAAEAKPNSVALSNWWKQINEWRKRDCLKFENSTTVIKPQSVIQKVWDVTKGDAFVTSDVGQHQMWAAQYYPFDKPRRWINSGGLGTMGVGLPYAMGVQMANPDATVACITGEASIQMCIQELATCKQYHLTPKIILLNNRFLGMVRQWQQLEYGSRYSESYMDSLPDFDKLVEAYGHVGMTIENPADVDGALKEAFAMKDRLVFMNFITDQTENVWPMVKAGQGLTEMLLGSEDL

SEQ ID NO: 8526 - protein, 417 aa, Herminiimonas arsenicoxydans
MALIVHKYGGTSMGSTERIKNVARRVAKWHDAGYQIVVVPSAMSGETNRLIGLAKELMPHPNPRELDMLASTGEQVSVALLAMALHSIGKEAVSYTGWQAGIKTDSAFTKARIQSIDDVKVKKDLDAGRIVIITGFQGVDEDGNIATLGRGGSDTSAVAVAVALEAKECLIYTDVDGVYTTDPRVVSEARRLNTVTFEEMLEMASLGSKVLQIRSVEFAGNYKMPTRVLSSLTDPMMSLEEEAKSGTLISFEEDTKMEQAAITGIAFSRDEAKITVLGVPDRPGIAYQILGPIAAANIEVDMIIQNQSVDGKTDFTFTVPRADYAKAVDVLNDSVKAHIGAASIQGDTKVSKVSVVGVGMRSHVGIASQMFRTLSEEGINIQMISTSEIKISVLIDEKYMELAVRALHKTFDLEKSN

SEQ ID NO: 8527 - protein, 396 aa, Herminiimonas arsenicoxydans
MSDLILVLNCGSSSIKFALFDTSVSPLPRQPLWNGKVDGIGSKMPTFGETGIKPGPVALDENQPYPAALACIQERVLARLGHHRILAVAHRVVHGGAKYSTPVQIDAGILADLRNYIPLAPLHQPFALEAIASLLETHPNPPQIACFDTAFHHTLPRVEQMLPLPYSAWERGLRRYGFHGLSYEFISLVLAERYGEKARGRTIVAHIGSGASLCAMQELRSVATTMGFSALDGLMMGTRCGALDPGALLYLMQIEKLTVDQVGQLLYHESGLLGISGISSDPRELLRQESGNVRVQDALALYVRRIVREIGALVALLGGLDMLVFTAGVGEHNAEIRARICRELGFLEASMDEAANKNDAELISTAQSRLTIAVIPTNEEWIAASHAQALLGCAPP

SEQ ID NO: 8528 - protein, 477 aa, Herminiimonas arsenicoxydans
MTDRHSPAASLLTDDLLIVRNCTFDEIAIGDTAVMERTLRLEDIQLFALLSGDGNPQHLDADYTASTRFHGVIAHGMLGGGLISALIGTRLPGPGTIYLGQTLKFLIPVRIGDTLTISVTVIERDETSKRLKLACLCTNQNSEQVISGEAEVIAPSERIEQSRSTLPEVRLKVGGGLTRLLDHVRPLGRIHVAVVHPCDALSLAAVLDAREAGLIEPVLVAPRAKLEAVAAQAGLNISGIQIVDVAHSHAAAAQAVEMAVQKKVVALMKGSLHTDELMHAVIAHPGLRTKRRISHCFLMQTPAYPRPFIITDAAINIAPTLEEKADIVRNAIDLAHVIGVAQPRVAILAAVETVNTEMQATLDAAALCKMADRGQIAGGIVDGPLAFDNAVSAAAAHIKGIVSEVAGRADVLVVPDLESGNMLAKQLEYLGGASSAGIVLGAKVPIVLTSRADSRESRLASCAIALLLANRYKDAPP

SEQ ID NO: 8529 - protein, 67 aa, Herminiimonas arsenicoxydans
MATGIVKWFNDSKGFGFITPDEGGEDLFAHFSAIQSSGFKSLQENQRVSFEVTAGPKGKQASNIQPI

SEQ ID NO: 8530 - protein, 300 aa, Herminiimonas arsenicoxydans
MTESTALSHFRCGYIAIVGRPNVGKSTLMNELIGAKVSITSRKAQTTRHRITGIQTVDDAQFVYVDTPGFQTRHSNALNKTLNRTVTTTLTASDVILFVIEAGTFGQADQQVLDLIPKNVPCILVINKSDRVKDKAVLLPFAQQIAAKRDFTAVVPVSAKLRFQLENLQGEIKKHLPENPPVFGEDDITDRSEKFLAAEIVREKLFRFVGDELPYTSTVLIEKFELEGNLRRVFAAILVERDTHKSMVIGNKGERLKDISTQARLDMERLFGGPVYLEIWVKVKSGWADNEAGLRAYGYE

SEQ ID NO: 8531 - protein, 860 aa, Herminiimonas arsenicoxydans
MRLDKLTTKLQEALADAQSHAVGNDNQYIEPVHVLVALLSQDDSSTRSLLQRAGANINGMVTALKSALERLPKVSGTGGQVQISRDLTALLNLADKESQMHGDEFIATEMLLLALTEDKSEAGKIARENGLTRKALQAAIKAVRGSSKVDSAEGEGQREALKKYTMDLTERARIGKLDPVIGRDDEIRRTIQILQRRSKNNPVLIGEPGVGKTAIVEGLAQRIVNGEVPESLKGKRVLSLDMASLLAGAKYRGEFEERLKAVLTELAEDEGQTIVFIDEMHTLVGAGKAEGAMDAGNMLKPALARGELHCVGATTLDEYRKYIEKDAALERRFQKVLVDEPTVEATIAILRGLQEKYEVHHGVDITDPAIVAAAELSHRYITDRFLPDKAIDLIDEAAAKIKIEIDSKPEVMDRLDRRVIQLKIEREAIRKEKDEASQKRLALIEEEIEKLGREYADLEEIWKAEKSAAQGSQHIKEAIEKARLQMEEATRQSDWQRVSELQYKTLPELEAQLKNAVTGEASAGKPQLVRTQVGAEEIAEVVSRATGIPVSRMMQGEREKLLQMEDALHKRVVGQHEAIVAVSDAIRRSRAGLGDPDRPYGSFMFLGPTGVGKTELCKALASFLFDTEDSLVRIDMSEFMEKHSVARLIGAPPGYVGYEEGGYLTEAVRRKPYCVILLDEIEKAHPDVFNVLLQVLDDGRMTDGQGRTVDFKNTVIVMTSNLGSHKIQAMEGNEPALIKMAVMAEVQSHFRPEFINRIDEIVVFHALDEKNIGAIAKIQLHTLEQRLARMDMSMDVSEDALQKIAEAGFDPVYGARPLKRAIQQQIENPLSKAILEGKFGPKDVISVDVKNGELEFAKAQ

SEQ ID NO: 8532 - protein, 449 aa, Herminiimonas arsenicoxydans
MSFTDLGLADGIVRAVTEHGYSIPTPIQAQAIPAVLAGGDLLAGAQTGTGKTAGFTLPILHRLATSGTPHASASAQRPIRALVLTPTRELAAQVEESVRTYSKYLNLNSAVIFGGVGINPQIKLLKHGVDILVATPGRLLDHMQQGTVNLSKVEILVLDEADRMLDMGFIKDIRRVLAVLPKNRQNLLFSATFSNEIKALADGLLNSPAMIEVARRNSTVEVIEQKIHPVDRDKKHPMLAHLIKTNNWSQVLVFTRTKHGANKLVEQLEKDGISGMAIHGNKSQSARTRALSEFKDGSLQVLVATDIAARGIDIDQLPHVVNYDLPNVPEDYVHRIGRTGRAGATGEAVSLVCVDELDMLKDIEKLIKRKLPSEVIVGFEPDLNAKPQPIQRRSNDAPGRRPQGRGNAPAKSAKAPGAKPSGPNGQVRSFGGNANARPAAPHRSGGRGR

SEQ ID NO: 8533 - protein, 417 aa, Herminiimonas arsenicoxydans
MNAPLDKSLLDTIKAPHFPIYMDYSATTPIDPRVADKMIPYLREQFGNPASRSHMYGWTAEKAVEDAREQVAKLVNADPREIIWTSGATEGNNLALKGAAQFYKTKGKHIITVKTEHKAVLDTVRELERQGFEATYLQPQDNGLITIEQLAEAIRPDTILVSVMLVNNEIGVIQPIDEIGELCRSKGIIFHCDAAQATGKVKIDLEKSKVDLMTFTAHKTYGPKGIGALYVRRKPRIRIEAQMHGGGHERGLRSGTLATHQIVGMGEAFRIAREEMDEEIVRITALRDRLAKGLMDMEEVYINGDMDHRVPHNLNVSFNYVEGESLIMAIKDLAVSSGSACTSASLEPSYVLRALGRSDELAHSSIRFTFGRFTTEEDVDFTIKLIKEKVAKLRELSPLWDMYKDGIDISTIQWAAH

SEQ ID NO: 8534 - protein, 67 aa, Herminiimonas arsenicoxydans
MQTGTVKWFNDSKGFGFITPDSGGEDLFAHFSAITMEGFKTLKEGQKVSFEVTQGPKGKQASNIKNA

SEQ ID NO: 8535 - protein, 564 aa, Herminiimonas arsenicoxydans
MYRYDQYDHQIVKERIAQYRDQVRRRLSDELAEDEFRILRLQNGLYMQRHAYMLRVAVPYGLLSSAQMRMFGHIARKYDRGYGHFTTRQNIQFNWINLEETPDILTELASVEMHAIQTSGNCIRNTTSDELAGVAADEIVDPRPYAEIIREWSTFHPEFAYLPRKFKIGINGAVEDRVATAIHDIGLHVIKNEQGEIGFRVLVGGGMGRTPIIGSVICEFLPWQHIMTYLEAILRVYNQYGRRDNIYKARIKILVKAIGIDEYRRQVEQEWLDIKDGPGTLTAEELSRVAAFFTMPAYAALPATDAEFEKNKTENKAFKNWLSRNVKQHKVPGYAAVVLSLKKTGVPPGDATAEQLDFMAELADRYSFGELRVTHEQNVVLADVRIADLYAVWEAAKSHGLATPNIGLLTDMICCPGGDFCSLANAKSLPIAAAIAERFDNLDFQHDIGDIELNISGCINACGHHHVGNIGILGVDKDGAEWYQVSIGGAQGNESSIGKIIGPSFSAYQMPTVIERLLQVYVRDRIEDERFIDTARRIGIAPFKEHVYATPIKVVQATGEDAYA

SEQ ID NO: 8536 - protein, 400 aa, Herminiimonas arsenicoxydans
MDALKHGTDALFIMLGAIMVLAMHAGFAFLELGTVRKKNQVNALVKILVDFAVSTIAYFFVGYSVAYGVSFFGSAEVLTQRNGFELVKFFFLLTFAAAIPAIISGGIAERARFHPQLLATALIVGLVYPLFEGIAWNQHFGVQAWLHATFGANFHDFAGSIVVHAVGGWIALPAVLLLGARRGRYTKEGGIAAHPPSSIPFLALGAWILTIGWFGFNVMSAQTMEQMNGLVAVNSLMAMVGGTLAAFLAGKNDPGYVHNGPLAGLVAICAGSNIMHPLGALVTGAVAGFVFVGMFSLTQNKWKIDDVLGVWPLHGLCGAWGGLAAGIFGLKAFGGLGGVSFMSQLFGTALGIAIALIGGTLIYGGLKLTMGLWLDAEQEFNGADLSIHNVSATPERETYW

SEQ ID NO: 8537 - protein, 67 aa, Herminiimonas arsenicoxydans
MATGTVKWFNDSKGFGFITPDDGGEDLFAHFSAIQMNGFKTLKEGQKVQFEVTQGPKGKQASNIQAP

SEQ ID NO: 8538 - protein, 505 aa, Herminiimonas arsenicoxydans
MQLIFSAGLILLVVLWGVFSPLSLSAVFDTALVSVTKNFGWLYLWTVLALVAFAFFLAVSRYGNLKLGGEDDEPEFSISAWFSMLFAAGMGIGLVFWGVAEPISHYSSAPPGIQSGTPEAANAAMRYAFFHWGLHPWAVYGIVALAIAFFQYRRQGVALISESTRALPWAPIQRMSGLFNVLAIVATAFGVAASLGMGALQINSGLEAVFGLPVSKTAQVGIILVTTAVFVTSAVTGVAKGIKMLSSLNMLVAAALTLAVFLLGPTVAIIDTLTNTLGSYLSEFIRMSLRMTPFRDSSWVGGWTLFYWAWWISWSPFVGLFIARVSRGRTIREFIIGTVLAPSLAAFIWFSVFGGTALYMEIWGHVPIVDAVKADVSTALFTMFSAMPLGMLMSIVATLLVFVFFVTSGDSATLVLGIMSTGGNPDPSAKIKMIWGVLVAGIAISLLLAGGLKAIQTATILFALPFTLVILLMVVSLWRAIREDWDEEQRQERELRRRIREMTSK

SEQ ID NO: 8539 - protein, 649 aa, Herminiimonas arsenicoxydans
MGKIIGIDLGTTNSCVAIMEGGKPKVIENSEGARTTPSVIAYQEDGEILVGAPAKRQAVTNPKNTLYAVKRLIGRKFDEKEVQKDIGMMPYQIVKADNGDAWISVRDKKLAPPQISAETLRKMKKTAEDYLGEEVTEAVITVPAYFNDAQRQATKDAGRIAGLDVKRIINEPTAAALAFGLDKTGKGDRKIAVYDLGGGTFDISIIEIADVDGEMQFEVLSTNGDTFLGGEDFDQRVIDYIIDEFKKINGLDLSKDAIALQRIKASAERAKIELSSSQQTEINEPYIAMANGAPVHLTMKITRAKLESLVEELISKTLAPLSIAIKDAGVKVSDIDDIILVGGMTRMPKVQEKVKEFFGKEPRKDVNPDEAVAVGAAIQGSVLSGDRKDLLLLDVTPLSLGIETLGGVMTKMIQKNTTIPTKFSQVFSTADDNQPAVTIKVFQGEREMAVGNKALGEFNLEGIPPSARGTPQIEVTFDIDANGILHVGAKDKATGKENKITIKANSGLTEEEIQKMVQDAEANAEEDKRLKEVAEAHNHGDALVHSTRKSLTEYGDKLEAGEKEKIEAAIKDLEEALKGSDKAAIDEKSAALSAAAQKLGEKMYADMQAQQAAGAAAGDAHAAGADGQADAKAQHDDVVDADFKEVKDK

SEQ ID NO: 8540 - protein, 369 aa, Herminiimonas arsenicoxydans
MKFIDEAKIEVIAGDGGNGVASFCREKFRPFGGPDGGDGGKGGSIWAVADRNINTLVDFRYSKMHKARDGENGRGADCYGKGADDIKLRMPVGTLIIDNNDGELIADLTEHGQEVLIAKGGEGGWGNIHFKSSTNRAPRQKSEGKEGERRELRLELKVLADIGLLGMPNAGKSTFISAVSNARPKIADYPFTTLHPNLGVVRVSHEKSFVIADIPGLIEGASDGAGLGIQFLRHLQRTRLLLHIVDLAPFDNVDPVKEAKAIVKELKKYDESLFDKPRWLVLNKLDMVPEEERKKRVKDFIKRFGWKGPVFEISALTHEGCSELVTEIYDYIAVQRQAEQRSEETPQMVEAARGIDSIDPDDPRFKIID

SEQ ID NO: 8541 - protein, 171 aa, Herminiimonas arsenicoxydans
MSGIIRRQTQGAAPCCGQGTGYCSKYPCLQFLTGAVSPCIIGGFPDSVWVSSGDSKREKSLNHLMRFHMYAVIKTGGKQYKVVAGEKFKVEQIPADIGSEITLDQVLALGAGETIKFGAPLVEGATVLATVVSHGRHDKVKIFKMRRRKHYQKHQGHRQNYTELQIVSING

SEQ ID NO: 8542 - protein, 398 aa, Herminiimonas arsenicoxydans
MSKQLQDAYIVAATRTPIGKAPRGMFRNTRPDDLLVRVLQSVLSQVPDLDPNLIEDAIIGCSFPEAEQGLNMARMGVLLAGLPKTVGGVTVNRYCASGLTAIAMAADRIRVGEADVMIAGGAESMSMVPMMGHHPAMNMGIFKDENIGMAYGMGLTAERVAEQWKVSREAQDQFALNSHLKALAAQQSGEFNNEMTSVDIVERFPNLSSGEIDITTRMVNMDEGARADTSLEALAKLRPVFAPKGSVTAGNSSQTSDGAGALILVSEKILRQFNLTPLARFVSFAVRGVPPEIMGIGPKEAIPAALRAAGLKQDQMDWIELNEAFAAQALAVIQDLGLDPARVNPVGGAIALGHPLGATGAIRSATVVHALRRKNMKYGMVTMCVGTGMGAAGIFERM

SEQ ID NO: 8543 - protein, 316 aa, Herminiimonas arsenicoxydans
MALENLMVFTGNANPDLALGVAKHLGIPLGKAVVSKFSDGEIVVEINENVRGKDVFVLQSTCAPTNDNLMEIMLMVDALKRASAGRITAAIPYYGYARQDRRPRSARVAISAKVVANMLQEAGVERVLIMDLHADQIQGFFDIPVDNIYASPILLSDLVAKNYDDLLVVSPDVGGVVRARALAKRMNCDLAIIDKRRPKANVSEVMNIIGEVEGRNCVIMDDMVDTAGTLTKAAEVLKERGAKKVVAYCTHPVLSGPAIERITNSPLDELVVTDTIPLTDAAKACPKIRVLSCASLLAETFKRISTGDSVMSMFAE

SEQ ID NO: 8544 - protein, 104 aa, Herminiimonas arsenicoxydans
MSDDVQSWIKETVTQNPVVLFMKGTAQFPQCGFSGKAIALLKESGVTDLVTVNVLDDAEVRQGIKDFSQWPTVPQLYVKGEFIGGSDIMNEMFASGELQALLKA

SEQ ID NO: 8545 - protein, 342 aa, Herminiimonas arsenicoxydans
MSVPHAKKPPATFDAKSATRALQFARDTLQIEADAILALKQRISNESGEQFIQAVALLLNCTGRVVVSGIGKSGHIARKIASTLASTGTPALFVHAAEASHGDLGMITADDALIAISYSGEAGELVAIVPIIKRMGATLITITGNDDSTLAQLADVHLNVRVDKEACPLNLAPTASTTATLAIGDALAVALLDARGFGEEDFARSHPGGALGRRLLTHVRDVMRTGDAIPTVGKDASLYTALLEISRKGMAMTAVVDAGGRAIGVFTDGDLRRLIENQRDFSTLSIAEVMHANPRSVQPDQLAVDAVKMMEEFRINQLLVTNADGKLVGALHIHDLTRAKVI

SEQ ID NO: 8546 - protein, 336 aa, Herminiimonas arsenicoxydans
MKPKIVITHWVHPEIVEMLSSVAEVVTNDTLETLPREELLRRSKDADAVMAFMPDSVDDSFLAACPKLKIVFAALKGYDNFDVDACTKRGVWFGIVPDLLTVPTAELTVGLLLGLTRHVMAGDDHVRSGTFHGWRPKLYGAGLAGSTIGIIGMGRVGKAIAKRLSGFEMNAVYCDSVPLNPVDEQAWNARQVSFDELLTCSDFVVPMLPMTSDTFHLIDAHAISKMRRGSYLLNTSRGSVVDENAVVEALNQGHLAGYAADVFEMEEWARPDRPLTVPQALLNNRTQTLFTPHVGSGVKKVRLEIERYSAHSILQALAGQRPDGALNEPLKASVAA

SEQ ID NO: 8547 - protein, 826 aa, Herminiimonas arsenicoxydans
MSDPSFPLFSDLNLSEPLLRVLKELGYEAPSPIQAATIPLLLNNSDVLGQAQTGTGKTAAFALPILSRIDIKQTTPQALVLAPTRELAIQVAEAFQRYASHIPGFHVLPIYGGQSYGAQLSALRRGVHVVVGTPGRVIDHLEKGSLDLSKLKTMVLDEADEMLRMGFIDDVETILQKTPEARQTALFSATMPSAIKRIATTYLRDPELITVAAKTGTADNIRQRYWLVSGMQKLEALTRILEAETFDGMIIFARTKLGTEELAGKLQARGFSAAAINGDIQQQQRERTIQQLKDGKIDILVATDVAARGLDVERISHVINYDVPHDPESYTHRIGRTGRAGRSGEAILFIAPRERNLLKAIERATRQPIAVLDLPSVEVVNDVRISKFKDQIAETIAAGGLEVFHSLIEDYEREHNVPAVEIAAALAKMARGDVPLLIDKNKPAPRESWGSEKPVSGGRFERAERFERNDRPERSERFERPERTERSAAPRKERVPRAPDEGMQTFRIEVGHAHGVKPGNIVGAIANEANLDSKYIGRIEIYDDYSTLDLPNSLPSDMLDHLKKVWVAGQQLNITADSEAASAPTAKPAPKKSESPAQVPFSDRPARSDFAAHFDKPAQSESRERPARTERPAPASPLAAAATPKKEHFESDEPLVKEPGAQKRERTAQKKAGAVDMEAFRIEIGHAHGVKPANIVGAIANEAGLEAKYIGRIEIFEKHSLLDLPAGMPDEVFDQLKNVSIAGQPLRISHSGLRPMEEKTMDKRVTLAPPSKGGDRRVADKARGNKPVSKRVAVASGKSFDAPRSASKPSTGPSGKPMIKLGTKRK

SEQ ID NO: 8548 - protein, 172 aa, Herminiimonas arsenicoxydans
MKTSPVCAPDATSEPLYIVNTSTIHGTGIFARCMIAPGTCIVEYQGERIQWEQALDRADAQGPLNHTYFFSLNDGRIIDGGKDGNAARFINHSCEPNCEAIEHEDGRVYIYALQEIEAGEELSYDYALIYEERHTPTVKRAFACHCGAPGCSGSMLMPKRSARYRAQKALAK

SEQ ID NO: 8549 - protein, 726 aa, Herminiimonas arsenicoxydans
MSKDEIILAHLDLDLDSSLHFVPGIVILTNMRLLSRSRTETGWHSWPCHAELTLKHYDHAGVGTLELHDATSRLASWRYTLAQNPAALQLITSFEQLQHAIASGVATPLAEPDARNEEEDADVDGVAEEQPPSTASLFRLWRFAKPYRGQLLLGFLLTLGSTAATLVPPYMTLPLMDNVLIPYQNGVEIDSSLVVLYLSGLFGSAVLAWGLGWARTYILALVSERIGADLRTTTYEHLLRLSLEYFGGKRTGDLMTRIGSETDRICVFLSLHLLDFFTDVLMIIMTAAILISINPWLALVTLLPLPFIAWMIHVVRDKLRNGFEKIDRIWSQVTNVLADTIPGIRVVKAFAQEKREAVRFREANKHNLAINDRVNKVWSLFSPTVTLLTEIGLLVVWALGIWQVSQGLITVGVLTAFLAYITRFYTRLDSMSRIVSVTQKAATGAKRIFDILDHVSSVPEATNPVHLTNVQGKITIKNIGFRYGNRAVIRGLDLDIQPGEMIGLVGHSGSGKSTLVNLICRFYDVSDGAILVDGIDVRSIPIPEYRRNIGLVLQEPFLFFGTIADNIAYGKPDASREEIIAAARAANAHEFILRLPHGYDSMVGERGQTLSGGERQRISIARALLIDPHILILDEATSSVDTTTEREIQKALDNLVRGRTTIAIAHRLSTLRRADRIVVMDRGQIVEVGSHDELLAREGAYYKLYQAQQRQAEQDMLEDSAEEGLA

SEQ ID NO: 8550 - protein, 317 aa, Herminiimonas arsenicoxydans
MNAPHEGGTRIVITEFMDDTAVALLASTFETTYKPALVDDRPALLAMLGNVDALIVRNRTKVDIALLDAAPKLRVVGRLGVGLDNIDVDACKARGIDVFPATGANAGAVAEYVIGTAMALLREAYTRSAETAAGTWPRTALSNGREIAGKTLGLIGFGGIGQLTARLAQALGVTVIAHDPLLAPDAAIWQQAGVACKQLHEVLEQADIVSLHIPLTTNTRNLIGADALARMKPDAVLINTSRGEIVDEAALAQALHSANLGGAAIDVFAQEPLAPGNALANAPRVILTPHIAGVTTESNTRVSALIAQRVAAYLQKK

SEQ ID NO: 8551 - protein, 563 aa, Herminiimonas arsenicoxydans
MRVDFRRLLPFLHWPRPSADSLRRDIWAGLSVGLVLIPQALAYATLAGMPPQTGLYAALLPSVIGILWGSSALLAVGPVALTSILTFGSLSPMAAAGSADWVALAIWLSVYAGAIQFLLGACKMGKITYLVSQPVVMGFINAAAVIIVLSQLPGLLGLDLHAGSAMTQVGNLLAGAPAMLLTTAFGLGALFLLLALKRYAPHVPGMLIVTVLGIAASWAIDYAGHGGAIVGTLPVGLPPLSLPPAISWGAHQALWPAATILAIISFTEAMSSCRVLARKTNERWDENQELIGQGLAKITSGFSGAFPVSGSFSRSALNIYAGATSAWASLIAAACVLLSLYFLTTPIAYLPYSVLAAMIMVPVFRLLDFRAFPRLLRISRDDGLVAIVTFGVTLWCTPSLHYGVFAGVGITMVSFLYRHTHPRVIEVGVHKDGTLRDRKRFHLPPLAPDILAVRMDSTLNFLTAATLERFITEYRGRDKGIRRVLLCASGINDIDASGIETLESLRQSLRAEGLELYFTAVKKQVWDVLERAGLIAAMGPDHMFQTDREAIAVLHADAANTMN

SEQ ID NO: 8552 - protein, 569 aa, Herminiimonas arsenicoxydans
MDIKRTVLWVIFSFSLLMLWDNYNRYTGKPSIFFDSTTTQQAAAPAATGNNAAKTADAPTAATTAATSGANTPGVPDGAAAVKSEVITITTDLMKIGIDTAGGEVRHLELLKHHESGDESKNVVLFDENGQHTYLGQTGLIGGAYPNHKSMFAAVPGPRTLDSANQVQLVLQSEQQGVKLIKTFTFKRGEYKVDIKHDVVNNTSTAITPSLYLQLVHDGSALGGGSMFMASAFTGPAIYTEADKFQKVTFESIEKGKAEHAMKGESGWIALVQHYFVSAFVPPANTPREYFTKKLATNLYAVGTILPMGTVAPGATASMDTTMYSGPQESKRLEAVAPGFELVKDYGWLTIIAKPIFWLMMQIHQILGNWGWTIIVLTIVIKLAFFPLSAAGYRSMAKMKLVTPKMTDIRTRYKGEPQKMNAAMMELYKKEKINPIGGCFPMLVQIPVFISLYWVLLASVEIRNASWLWIHDLAAPDILFGSYHIGTFHLTIGILPILMAISMFIQTKLNPTPPDPIQAKVMMFMPIAFSVMFFFFPAGLVLYWVVNNILSIAQQWFINEKLLGGKAKA

SEQ ID NO: 8553 - protein, 262 aa, Lactobacillus plantarum
  misc_feature (2)..(2): Xaa can be any naturally occurring amino acid
  misc_feature (55)..(55): Xaa can be any naturally occurring amino acid
  misc_feature (75)..(75): Xaa can be any naturally occurring amino acid
  misc_feature (119)..(120): Xaa can be any naturally occurring amino acid
  unsure (1)..(262): unsure at all Xaa locations
GXATLGANASLYSEQHRITYYECDRTGRATLTTLIDIAVLASEDQSDALGLTTEXVQSHGVGWVVTQYAIDITRXPRQDEVVTIAVRGSAYNPYFAYREFWIRDADGQQLAYITSIWVXXSQTTRRIVKILPELVAPYQSEVVKRIPRLPRPISFEATDTTITKPYHVRFFDIDPNRHVNNAHYFDWLVDTLPATFLLQHDLVHVDVRYENEVKYGQTVTAHANILPSEVADQVTTSHLIEVDDEKCCEVTIQWRTLPEPIQ

SEQ ID NO: 8554 - protein, 782 aa, Cryptococcus neoformans var. neoformans B-3501A
MSPDIKPSFRPEVVKSKIKHYFGYTETTPETVSVFDWARSQTPALGPGIKAYILSLFPFIQWVPRYNLTWLFGDLVAGITVGMVLVPQSLSYAKIAELEPQYGLYSSFIGVLTYAFFATSKDVSIGPVAVMSLETGNIILSVQDKYGDLYSKPVIATALAFICGFIVLGIGLLRIGWLVEFIPQPAVSGFMTGSALNIAAGQFPAVFGLSKKFDTRAATYKVIINTLKYLPQASLDTAFGMTALAALYGIKWGFTWLGKRYPRYGRITFFCQSLRHAFVIIIWTIISWRVNVHAASPRISLVGNVPSGLQHVGRPFIDSQLLSAIGPHIPVATIILLLEHISIAKSFGRLNGYKINPNQELIAIGVNNTIGTLFSAYPSTGSFSRSALKSKAGVRTPAAGLATGVVVIVALYAVAPAFYWIPNAALSALIIHAVADLVASPKHSYSFWRVAPIEYVIFVGAVLWSVFYTIESGIYWSLATSVVLLLLRIARPKGHFLGRVRIKPEAGNTLEHIRDVYVPLDEESSGEDVKVENPPAGVIIYRFEESFLYPNASYINDRLIEQAKKVTRRGGDYSKVAAGDRPWNDPGPSKKNAAAVIEADMVKPVLKAVILDFAAVANLDTTGVQNLIDTKTEMEKWADGPVEFHFCGILSPWIRRALVAGGFGQGRAKEGAALEVAPAVIENLENAASPGMERERYNEHEVSFIHEVGQASNSTSAGTSFSEEEKRIGSGATTPSPQLDGVNERRPSGVSTKTVPLLDRSTPFFHFDLADALNSLNLPENE

SEQ ID NO: 8555 - protein, 446 aa, Cryptococcus neoformans var. neoformans B-3501A
MSVDPIVIIGAGPSGLLLARYLQLHHIPVVIYERDSSPTHRPQGGSLDLHDETGLKALKETGLLDEAKSYMRAEGEAMKIVDKSGKIWYDENGKEVKAHTEFQDGEPVTGRPEIDRTDLRNILIKCLNSDTIKWDHAVSSCSKISSSHYQINFISQPYITTPYLIGADGAFSRVRPLIHSTLPSYSGVSMYELTIPPKNMTPELKTYVGQGCLLALDEGMTVLPQMNSGGLCKVYVGLRCPENWTDENPLPDKGKREWLANLFQGWHDQVRDVIMASEEDKLVIRRIWQFDPDLKWDTDLTGVTVMGDAAHVMSPFAGEGKSIFLPVALADALELGISLVSLFTVPTPRASSPPFPLSLLPISQPRSKPLISSPSPADLHHALRHFERKMMRRARKEMIGSKENMDMFFGENAARNLTHWMSTFMIRFVWQTVTEWPVDFLKAIWD

SEQ ID NO: 8556 - protein, 575 aa, Cryptococcus neoformans var. neoformans B-3501A
MVNITYGALLSSSDGAVHFEPLGTDIISTLAGQPTAFDPGDIAWVLTCSALIVFMLPGLGYLYSGLARRKNALSMLFLSLVSLGIVSFQWFFIGYSLVFSETGGSFWGDGRNIGFRQVLERPIPEANGKLPEIVFATFQLMFACLVPAVLLGAAAERSRILPAMIFMFCWTTLVYDPLAHWIWSANGWANKWGVLDYAGGVPVEIASGTAGLAYSYFIGKRRGYGTDRVLFKPSNVGNVVLGTVFLWVGWLGFNGGSCYCASLKAALAIFNTNLAGSVGGVVWLIMDFRLERKWSMVGYCTGAIAGLVAITPAAGYVGAPAAALIGLVSAAVSNLATRLKVTMRVDDPMDIFAVHALAGIVGVLMTGLFAQSSVAANDGFSDIDGGWLDRHYVQLGKQIAWACVGMAWTFVVTYAIMFFINLIPGCHFRATDEAEIVGMDEVELGEYVADYAFHQRDLEGEYEAHTLSQCPSATKLHLQEFRHNKDGESSSSSQPKELPPTMPRGGAVVGDLDGDTAVESQHSRSRSRGRSQHRVRIEKEGDNEAMEMSDVRHTKTSDQRQEGSNLEGSYMGHRE

SEQ ID NO: 8557 - protein, 318 aa, Cryptococcus neoformans var. neoformans B-3501A
MSPRFGYIGLGNMGVPIVRNLAKYAAASGFPSISIWNRSSAKYALVKDAIPDAFYADNVEEVVMKSDIVLSSLIDDKAAEDVYEKMFKATEGRNVIFVDQSSLKAVTSAKLAEQAKSIGATYIASPVFGRPPAAEASKLLIVLSGPANVKSEVKKHLIPAIGDRFVDVGEDVKLASSLKSMGNMVLLGWIELLAEAFTLGDAVGLEPSVFNGFIQQFFPAPPLTAYSNLISKGEFPSGSGFSVNGGLKDARNMMSLGADLGHPCPLPTIQRAHDNLERAKELGGPDQDWSALAAAVREQAGFSPYREGTNNGQGEKQI

SEQ ID NO: 8558 - protein, 657 aa, Cryptococcus neoformans var. neoformans B-3501A
MASFRGLPLCGAVNFIFSFSLLLPHPKKASNPKSHTANHLYTNMSAEDVFEGAIGIDLGTTYSCVGVWQNDRVEIIANDQGNRTTPSYVAFTEGERLIGDAAKNQSAMNPLNTIFDAKRLIGRRYDDADVKKDMKHWPFSVIDKDGSPYVEVDYLNEKKTFSPQEISAMVLTKMKEIAEAKIGKTVKKAVVTVPAYFNDSQRLATKDAGAIAGLEVLRIINEPTAAAIAYGLDEKTEEERNVLIFDLGGGTFDVSLLTIQGKVFSVKATAGDTHLGGEDFDNNLLEHFKAEFKRKTKLDISDDARALRRLRSACERAKRTLSSVTQTTVEVDSLYQGNDFSSNITRARFEEINAVAFKSTVDPVEKVLKDSKIPAAKVDDIVLVGGSTRIPKIQSLVSEYFGGRQLNKSINPDEAVAYGAAVQAAVLTGQTSDKTADLLLLDVAPLSLGVAMQGDVFGVVLPRNTPIPSNKSRVFTTVEDNQTTVMFPVYEGERTQCKDNRLLGEFELSGIPPMPRGQAELVCTFEVDANGLLKVSAQDRASGRKAQITIQNSVGRLSSEEIQAMIKDAEQFKNADKDFSARHEAKSDLEAYLHTCEQSISAPELSMKIKRGARAAVESEIAKALEKLEQEDATADELKKAQLGVKRAMQKAMASAR

SEQ ID NO: 8559 - protein, 418 aa, Cryptococcus neoformans var. neoformans B-3501A
MASTIQNITNSIPSLGRARLLINSSDDVVIVSAVRTPIAKAKKGGFKDCCPEDLLAAVFTEAVKRGKVNPSQIQDVAVGNVLPPGGGANVARMAQLYAGIPYTLIYSSTPINTVNRQCSSGLTAVVQIANEIKAGEIDIGAGVEHMTAHYGAGVLPEKMSEEILSNPESADCLTPMGITSENVAKQYNISRDVQDTFAANSFGKAAAAQKAGKFKEEIVPVKVRWTDPKTNDEKEIIIDSDEGIREGVTAESLAKLKPAFAKDGSTHAGNASQVSDGAAAVILARRSVAQKLGLPILGKFVISAVVGVPPKLMGIGPAFAIPKVLEKAGISKDDVDFFEINEAFASQAVMSIQHLHIPFEIVNPVGGAIAIGHPLGCTGARQIATAFSEAKREKKKIFVTSMCIGSGMGMAAVFVNEQ

SEQ ID NO: 8560 - protein, 510 aa, Cryptococcus neoformans var. neoformans B-3501A
MSIPIPDRNRRQSVSASDPPNNIPIPANTRGIPVSSFAPHSPPTGTSPRNSSFSFSTSPSTSYLRNASGAFHGIARQLTAFLPPDYPTQENHEKRQGKTKILLLENINLDAADYLKSQGYEVDHVTKAYTEEELIAKLPNYHAIGIRSKTKITAKVIDANPQLLAIGCFCIGTNQVDLEHAAKRGIAVFNSPFSNSRSVAELVISEIIALSRQIIDRTHEMRAGIWNKLSKNCWEIRGKTLGIVGYGHIGSQLSVLAEAFGMSVIYFDVVPIMPLGSARQVDTLEDLLSRADFITLHVPEIPDTIGMMGAEQFSQMKKGAFFINNARGKVVDLSALCDALESDHLAGAAIDVFPKEPGSNGPGFNETLGDFIPRLRKIPNLILTPHIGGSTEEAQRAIGTEVSNALTRYLNYGTTLGAVNFPEVDLRAITAADERHIRVCHVHKNEPGVLRGINNILADHNIEKQFSDSKGDIAYLMADISGVGQEEVEGLYSAIKNTRSNILTRLLFVE

SEQ ID NO: 8561 - protein, 378 aa, Cryptococcus neoformans var. neoformans B-3501A
MHFDEPISPRSQPSNLPGFESRRAFSLPSITMPFNNYGNNNAPLLPLTRHSFSGPSSRRSAARRLSYGIKNRASQYPYSVTIGGILTLALFFFVYTSPGSDLGRYNSAASRLHIRTPNEDILPLPTSERVIHRPDSKMDNGVMLLTVDENELIAEDDLFWDTYTEAEPLSAEEAAAEAELQAHKQNVQAQNVAQSLRALVWWLAEGGVLPNDFEVPSKSHLKKIGSSGFEKLLSSIDAGEGDEIIFEDGWADFANKRYRIVVFSKTYCPYSKNAKSILGKYHLSPAPFIIELNQRSDMEALQGLLQRFTNRRTVPNVLLDFICIGGSDDITLLHSEGGLHRKFEEMGAFPGLVRRATSLLPDSEENRRDEFEDHEDRS

SEQ ID NO: 8562 - protein, 944 aa, Cryptococcus neoformans var. neoformans B-3501A
MSSLASAPPTASIPASDSYNSPVQSSGPGLGNGNSTPSKWKSVFKLGRTATIGRGKENRSALGGESFVLDNKEQQSFAGEVSPAVPTEPYLPPRKTQLRAHTDPYPPKSPSVKNNPGSVSVEHFDSKVLHEEGMPKTREEGSSESFNVHLNSSNGNLQTTSTSGEQSRPYSSVTDSASASTTERTSHSSGGHFLPGDGSLHGVASSNTYGTASTRSPTGGPLGIGNLKSRFFSAPLSAPAGKNKHDKSKSEKYRGLGKVATDFPQSTAPPSSAGGASSSGGGRKKSDGSSSLSSRGAASPRTPAKSKREPSANSSRRMPFGQTNDNGSNSGSVAARFLRRVVSAPNTKALFSNNLFSNAPDVPPLPAPKNQPNSSTSSKEKSSSPVVIVGNSGGHIDLTSSPDSDHPPSISPLSNSSTMYTSQTSHTPSASASATPTPSPLKQKNHFLSPTASPSPGQGSGLSAKGTRASRSLTTGTAPVLKNIRQLQGYSGSSPGGGGYMDGESRHKQVFKRTYSSNSIKTKQVEVTASSFQKIKLLGKGDVGKVYLVREKKTDKLFAMKVLSKKEMIKRNKIKRALAEQEILATANHPFIVTLFHSFQSQDYLFFVLDYCMGGEFFRALQTRPGKCLSEEHAKFYAAEVTAALEYLHLNGYIYRDLKPENILLHQSGHIMLSDFDLSKQSGEAGGAPAAIRHGGPNGQTILVDTRSCIADFRTNSFVGTEEYIAPEVIKGHSHSSAVDWWTLGILVYEMIFATTPFKGPNRNATFANVMKNEVLFPESVPVSSNCKSCIRKLLIKDENKRLGSASGASEVKQHKWFASVNWGLLRNMTPPIIPEESNGIDTINFRPLRESKSIDFDRDDITTDIIHAKAGSPSVSGNSTPGMLTPKELVQTTSSSSPIGGGAGGTSGHSSSAMPIPGSMRGYDKEKNPFGEFSSVTRDFGEC

SEQ ID NO: 8563 - protein, 883 aa, Cryptococcus neoformans var. neoformans B-3501A
MTNRPAEPATPCLPTPETFPFPYPKPYDIQLDLMRVVFRAIEDGKIAIIGQVESPTGTGKSLSLLTSTLTWLSQHQARLDTAAEVSLREQFSADDPDDPPWVIEHAIKAKMNELRAVQLEREERLEKARKKEKQMRREGGVGAFRHGLGGGKRVKTGAEGVGKAKTGETKEDDFLPEDKEEDNEEGPYLSREVRELMSKFEPSGTTRKEADEDEEDAPKVYYTSRTHTQLRQLTSELLKTSFASYDSVPESSSAEAPSHGVSLVPLGSRKQLCINEKVRALARNGGDERMNEACLDMQKSGKARCEFLPAKADEITMLDARDTILASVKDIEDIVTMGKKSCVCPYYATRKAVKQSQIVTLPYNLLLQKNSREALGIKLKNQVVVIDEAHNLIDTLLSIHCTTLTSTNLANAVSQLQQYLQRFKSRLKPIHSLWIQQILSLLQGLIRVCDKFFQDAKSQTKESKPVGKPKVEVLDVNNLMGRIGGGSDQVNPIELLAYLKESRLARKISGFSEHVAEQAALKDAKTSRSATARHASIAAFHNVESFLLSLVDAKDDGRIILSIDDLDKSEPVVVIKYVLLNPSERFKEVVEEARSVILAGGTMEPITDFLQQLFPSIPKDRLSTLSCSHVIPKVNLLTQVVSVGPRKSEFEFKFGNRNDEALLTDLGAVLQATIGVVPDGVVVFLPSYAFLDKVRAFWTKSGLLQRLGERKQLFYEPQTSGDVETILRDYALAISSCYATSTSGQKSRKTGALMFAVVGGINFSDNLGRCVIMVGLPFANVSSVELQERMRYVETVPGAGQGASREMYENLCMRAVNQSIGRAIRHANDYATILLVDKRYATSRIRNKLPKWIGKDVKVPQDFGGVARGVAAFFKEKKDRGLT

SEQ ID NO: 8564 - protein, 511 aa, Cryptococcus neoformans var. neoformans B-3501A
MALVDVEEQSTAGPSHSRSSSVLAATAAESVSSSRRESRRGSKDREVGDGGRGGDDHVSFKTAEEDIELQDSATAPLLAGAAASPRLLESEERHLLEAEGHNSVSRGSILDAVTNMANSIIGAGIVGLPYAVSEAGFVMGVFLLIALAAISDWTIRLVILTSKLSGRESYTETMYHCFGPLGAMAVSFFQFSFAFGGTAAFHVIVGDTIPRVVSYIFPSFAENVFLRLFVNRQAVIIMCTLFISFPLSLHRDIVKLSKSSSFALVSMVIIIVSVLFRSVAVDPSLRGSSTDVFSIVKPGVFQAIGVISFAYACHHNSNYIYKSINVPTLDRFDMVTHISTGISLIACLLVAVCGYVVFTDKTEGNILNNFSSEDWLINIARFCFGANMSTTIPLEVFVCREVIEETFYKSKPFSKLRHVIITSSVIFIAMGLALTTCDLGVVLELAGGLSASALAFILPASAYFVMLSGPWSSRRKLPALLVASFGVIVLVLSCGLSLKKAWSGEGGKSVC

SEQ ID NO: 8565 - protein, 776 aa, Cryptococcus neoformans var. neoformans B-3501A
MPSYFFFSLIIFNCISRMASPSSMRDDHLTFTTSTSDSDTLPSTSHNPNTGTNSRIARNLSDVLFGKTTMSGTSLNTTANESTPLLTELPSHEGRTPRRNFTASLDQVAEAEARNRVVKLNNASIILSESGELGDARSPQKRASITMAYAKRIKQRSKYYVPVTDWLPKYNWSLFSGDLVAGVSVACLLIPQAMSYASGLARLTPVAGLWSTAIPALIYGALGTCRQLSIGPEAALSLLIGQMIQEAVYGDPHSRPAHPEAEAAAIALITTLQIGVITSVLGLLRLGFLDVVLSRALLRGFITAVAVIIFIEQLVPMLGLTALLAQPTDPSQEPPTRPLSKLFFTINNIHSINVPTALLSFISLGFLIVVRVTKQKIAQTPGGKWVRYVPEILILVVGTTVLTNVLKWDDMGVEVLGKIKGGSSLPFGWPIYKKTMKYFNFTLPTAFVSSVVGVVDSIVAARENAAKYGYAVSPNRELVALGASNLVGSSIVGTGAIPVFGSITRSRLNGQIGSRTQMASIITSICMIFSIFFLLPYLYYLPKAVLAAIVTVVVYAILNEAPHEILYFWRMGAWTDFLQMVGTFFLTLCFSIELGLVASVVFSLILVIQSTSQPRIKIIGRVPGTNEWVPIDEDESAQEEIPGVLVVRIRENLSFANTGQLKERLRRLELYGMDKSHPSDEPRRESAKALILHMGDVEQIDASATQILYELTKAYHERGVGVHFAHLRPGQVNAFGIAGITDIVGPSHFHRDLSNAMREVESMGYGTSIFARWDPS

SEQ ID NO: 8566 - protein, 760 aa, Cryptococcus neoformans var. neoformans B-3501A
MPSYFFFSLIIFNCISRMASPSSMRDDHLTFTTSTSDSDTLPSTSHNPNTGTNSRIARNLSDVLFGKTTMSGTSLNTTANESTPLLTELPSHEEAEARNRVVKLNNASIILSESGELGDARSPQKRASITMAYAKRIKQRSKYYVPVTDWLPKYNWSLFSGDLVAGVSVACLLIPQAMSYASGLARLTPVAGLWSTAIPALIYGALGTCRQLSIGPEAALSLLIGQMIQEAVYGDPHSRPAHPEAEAAAIALITTLQIGVITSVLGLLRLGFLDVVLSRALLRGFITAVAVIIFIEQLVPMLGLTALLAQPTDPSQEPPTRPLSKLFFTINNIHSINVPTALLSFISLGFLIVVRVTKQKIAQTPGGKWVRYVPEILILVVGTTVLTNVLKWDDMGVEVLGKIKGGSSLPFGWPIYKKTMKYFNFTLPTAFVSSVVGVVDSIVAARENAAKYGYAVSPNRELVALGASNLVGSSIVGTGAIPVFGSITRSRLNGQIGSRTQMASIITSICMIFSIFFLLPYLYYLPKAVLAAIVTVVVYAILNEAPHEILYFWRMGAWTDFLQMVGTFFLTLCFSIELGLVASVVFSLILVIQSTSQPRIKIIGRVPGTNEWVPIDEDESAQEEIPGVLVVRIRENLSFANTGQLKERLRRLELYGMDKSHPSDEPRRESAKALILHMGDVEQIDASATQILYELTKAYHERGVGVHFAHLRPGQVNAFGIAGITDIVGPSHFHRDLSNAMREVESMGYGTSIFARWDPS

SEQ ID NO: 8567 - protein, 404 aa, Cryptococcus neoformans var. neoformans B-3501A
MNSTPTPTPQPDTDNPHSNDANHADDRRPLAAHIPDYAGKSPFPAPPSRFTPRTPLQFLSNSPTNTDASAISCPSYILPTLPSSAASLPSLDPPSSNDRLAMINRIKSLGSYTNSPATVKIPLPTPSPSVSLSLSSRGPATPSSSIIRNKPHMPSPLNKLDYLYDIPPSPPISADADPGQLLVMPRMPNPDVESPIASPFVNLNLQTSTSSNRKPGVGVVIFDSPPRRRISGNSHGPRRGSALANEWGHTLLARHSGADASLLRSLLTQHASPSAPLSTSSAQPQAPAAAQRPRTEAEIVARCHELMNKHKVVLFMKGNPTAPKCGFSRQTVGLLREQGVEFAWFDIFSDEDVRQGLKKVNDWPTFPQIIVNGELVGGLDILREMIENGEWQELMDSIEEGKAE

SEQ ID NO: 8568 - protein, 414 aa, Cryptococcus neoformans var. neoformans B-3501A
MPTKLPRIHTTGWIGLGAMGHPMALNLFLKTHQFYQKVSPSVTPTFLFCEHEDSRAESFIRELRNRGGQDLASRAERVGTGKEMVMGASKVFTMLPSTPQVQAVYLDQDNGILAGLAKLPMNTPPLSETLLLSDTSLLSNTVTQEEGVKKESPSMIDASTPATQPIQVHTMLVDQTTLDPTVSLSISSLIHDSTSRAALMIDAPVSGGTVAAERGELTIMFGSPAPIATRLAMPLLQMMAREGGVIECGGSGTGVGVKVCNNLVLASNQIALSEGLALGRSLNIDIALLQSVINTSSGSSWSSRVNPPISSIPGTPASRGYSGGFQTRLMLKDVNLALQAANKHNLATPLTSASKSIYEAICSDGDGDWASKDFSWVKSMLEIDKTESFFSVAYEWVQKKQQEAMDMAWKDGLP

SEQ ID NO: 8569 - protein, 335 aa, Cryptococcus neoformans var. neoformans B-3501A
MSKPQVLIAANPKTGIVWSKEEQSSKLGAVAEVLELASASRSEFFQDLAPNGKYANIVAIYRHNDSVSAIGLFDEELINKLPASVKYICHNGAGYDQIDVAACTARGIQVSHTPQAVDDATATVGAFLAISAMRQFWRAEVNVRSGKWKAGLSPARDPEGKTLGIIGMGGIGSALARRLLAFDMKVIYYNRRPIQPPPNFPCTYVSSIEELLKQADVVSLNLPLNEKTKGSFGRQEFGLMKDGSVLINTARGAVIDEEAFIEALESGKLYSAGIDVYPDEPNVNPKLLAMDNITLLPHMGTETRDSQKKMEILVLDNMISALAGKGLLNQVPEQK

SEQ ID NO: 8570 - protein, 345 aa, Cryptococcus neoformans var. neoformans B-3501A
MPKILVTRNLGEHAMTILRQSGYDLIVNPDDAPPSREWVLNHLADPQVYAACIMHSQPSDKVDKELIATANDNLRCISTFSVGYDHIDVKAANARGIKIGHTPGVLSDAVADIAVILVLSTLRRIGEGINLVKSGNWKQQPWAPFVNCGLSIGHPSLTIGFLGFGRISQATVQRLLAFTNKEQPPRILYTSSYRRDNQDEIDAGFSKTFGVEVRREERETLASQADILIVLCDLNPSTKDLVNKNFLQKMKKSAILVNVARGPIVNSEDLHEALVSGQIFGAGLDVLTGEPDIPADHPLLTLDNCLVLPHLGSADYDTRNAMAERCVRNAIAAANGEPLVAEVKV

SEQ ID NO: 8571 - protein, 644 aa, Cryptococcus neoformans var. neoformans B-3501A
MTKAIGIDLGTTYSCVAVWQNDRVEIIANDQGNRTTPSYVAFNDSERLIGDAAKNQVAMNPYNTVFDAKRLIGRKFNDAEVQADMKHWPFKVVEKGGKPVIKVEYKGEEKTFTPEEISSMVLTKMKETAEAYLGGTVSKAVVTVPAYFNDSQRQATKDAGAIAGLDVLRIINEPTAAAIAYGLDKKSEGEKNVLIFDLGGGTFDVSLLTIEEGIFEVKATAGDTHLGGEDFDNRLVNHFVQEFKRKNKKDLSSNARALRRLRTACERAKRTLSSAAQTTIEIDSLFDGIDFYTSITRARFEELCQDLFRSTMDPVEKVLRDSKIDKSSVNEIVLVGGSTRIPKIQKLVSDMFSGREPNRSINPDEAVAYGAAVQAAILTGDTSEATQDLLLLDVAPLSMGIETAGGIMTPLIKRNTTVPTKKSEVFSTYSDNQPGVLIQVFEGERAKTKDCNLLGKFELSGIPPAPRGVPQIEVSFDIDANGILNVNAADKSTGKTSKITITNDKGRLSKEEIERMLAEAERFKAEDEAAAATVQAKNGLESYAYSLKTTLSDNKDKFDSADHETLSKKVEEVINALDTMQSASKEEFESLQKELEGIANPIMTKFYGASGGMPGGAGAPGGFPGGGAGGGAAQEEGPSVEEVD

SEQ ID NO: 8572 - protein, 657 aa, Cryptococcus neoformans var. neoformans B-3501A
MSSRFCEPLSPECPNPFHLLIPHVCPPSCPSASANPPLPLPSVLQAASAQAANAVAPPPKRPEPFPPPEERVKDKSRGKRKTRRPSSSPAPAQPEARKENEKTRKRARVSDAEDDKASKKLEPEREPEREALQVPSTQPSRATSPDKSRRPSPRSKVNTSASTSAKTDEIGVWTEHRDVVSNVAWNPKNVDLLATGSADGFVRLWDFLPLSASSSATAPLTLPSRPTGISHKGIESSKKTITSVAWHPDGTILATGSQDGVGRLFTPSGQLQAIMSYGRGAVNAMKWSPSGTQILVGKDDFTVCKWMDRGGSMAMKMCYDAHTKEVNDVDWLDDEVFASAGNDHTIHVHHGDDKRPRFTFRGHTDDVTRIKWSPLGAAERLLASVSDDGNCMIWKLPFYPSARGKSASVGLGGTRSLSPMKKMEPPSDEDDYFHQQPQPQSHPNPNPNSADSGPNARSNSTSAISIENCLHRLNVVSGSENKRMSMLEWMPVDDGARARMILAAGGQDSTIKLFDALSGETLHVLPGLESGTGSLAFSPFSLNSLVGSLFPTTTTTTTAAENGTAAATAERLGVGKYGLLAGGGWDGVLRIWDVETGRVLWGTEVEEEEGKRMVRERPMMLSMAWREDGKHLACGLFNKTLMVVNVIKALEAGKEKN

SEQ ID NO: 8573 - protein, 501 aa, Cryptococcus neoformans var. neoformans B-3501A
MLATMNPIRPLFRSTPLRLCHNSLSSRIPRRTLVTPTNLVHATVSNVTVDHVKEDPAEHQSGEQIAGEHPSGKEMFGFKLNPVATKTGGSAKSGGRPIYLDMQATTPMDPRVLDKMLPLFTEQYGNPHSRTHAYGWEAEKAVDEARQQVAQLVGAQPKDIVFTSGATESNNMLIKGIAKFHQSKKKHIITTQTEHKCVLDSCRWLSTQGFEVTYLPVLPNGLVSINELKAALRPDTSLVSIMAVNNEIGVIQPLAEISQAIKSWAKENGVTKPLFHTDAAQAVGKIPIDVEALGIDAMSISGHKLYGPKGVGAAYVRRRPRVRLEPLIHGGGQERGLRSGTVAAPLVVGLGEACRIAENEMAADHARIKALSDRLIEGITSKVEHIVRNGDVNGYPGCVNLSFSYVEGESLLMALKDIALSSGSACTSASLEPSYVLRALGAAEDMAHSSLRFGIGRFTTEEEIDLVVQRIVSVVNKLRDMSPLWEMVQEGIDISKIEWNQ

SEQ ID NO: 8574 - protein, 473 aa, Cryptococcus neoformans var. neoformans B-3501A
MSSQNVSGLMAGLSLYAPQSPKGSKAQQAGKTQESSHSSQSQNRLPPVLKKYMNPGLVRPPNSGLANNSHPSSSYSDPSSRGPLLTLAGVNVSYPKSGTVSPMNKSKGAIGHHSAHGIHGPAHSTSSRAMASSINPGASKHAVTTSSSHITNLVSENCKSLELGRYDGGLEEDEANHGDASGPTAKMLELSSVSEGAIPLSLPSFTIGRPLGKGKFGRVYLARSKAPPHFIVALKCLHKAEIIQGKVESQVRREIEIQQNLRHPNILRLYGYFHDSKRIFLVLEFAAKGELYKQLSRLGRFDEKKSSRYIAQMADALSYLHRKHVIHRDIKPENLLIGLNGELKIGDFGWSVHAPSNRRSTLCGTLDYLPPEMVEGKEHTAAVDLWALGVLTYEFVVGGPPFEDLSGNAATYRRIRNVDLHVPSWISPEATDLIKRLLRYKPEDRLPLSQVMIHPWIKMYEKKRSASNGIRRS

SEQ ID NO: 8575 - protein, 398 aa, Cryptococcus neoformans var. neoformans B-3501A
MYGRLGVSILLMAAASNVLAKIQEDDGYSEQLDPWNDEYANTPDLSFSGVASFAHLPHKRCLDVKDAAFDIALLGVPFDSAVSFRPGARFGPYALRSGSRRQRPDRGYNSRLEVNPYSGDLSILDCGDVPVTPFDPATAVKQINSAYRSLLHHPVVSPEKMQNLNMQRGLDGKIHPRIITLGGDHTIVLPILNAVHEVYGPVSVIHFDAHIDTWNPHRYVGSVSVQADLNHGTFFWHAYEKGFIKPNSSIHAGIRTRFGGPQDLEDDVTAGFDLIHTFDLDDFGIDWITEKIKNRIGDGPVVISLDVDVMDPAFVPATGTPESGGWTSRELRRILHSLIGLNIVALDIVELSPAYDTNAEISAIAAADMVYDFLSILALGVEHRNDGVSGTKTLKDEL

SEQ ID NO: 8576 - protein, 146 aa, Cryptococcus neoformans var. neoformans B-3501A
MSFTALHRLSTLSTHIIRAPISTRYFATTQTAKIGSSISTPNMTADVKSLVDKAIADNKVVVFSKTYCPYCKRAKSYLAEDTKDIEILELDEREDGAAIQAYLKELNGQGTVPHVYINKEFIGGSSDLLKLSHEQVKQKISAAASA

SEQ ID NO: 8577 - protein, 429 aa, Cryptococcus neoformans var. neoformans B-3501A
MVATGEKKGKVILAYSGGLDTSCILLWLIEQGYEVVAYMADVGQEEDFEAARAKAMQCGAVGFHLADLKREFVEELIYPAVQCNAIYENVYLLGTSLARPVIARGMIEAAVKEGCDFVSHGCTGKGNDQVRFELAFYGLAPNIKVIAPWRLPEFYERFDGRSALLEYAAKNGIPVTQTAAKPWSTDENLFHISYEAGILEDPNQTPPDDMWKLTVSPEKAPDAPERVHIEFAKGLPVKVTFPADGNTVTDSVDIFLTLNALARRHGVGRIDIVENRFIGVKSRGCYESPAATILRAAHMDLEGLTLDRNVRALRDQFVTTQLSQILYNGFFFSPEREFITAAIPASQKTVNGVVRLKLYKGNVVVEGRDADEGLYDAKFTSMDEMGGFEPTATSGFIEISSIRIKAWGRANIKRGQDGVSPKDVYHREN

SEQ ID NO: 8578 - protein, 752 aa, Cryptococcus neoformans var. neoformans B-3501A
MSSPENDRVLDNLWTTEDESFEVQMPDFHFDWGLEKGKTADQGIKAPTASLRSLSINEITPPLPSGSSSTSTPPHSTISARSSISSAQILPKRDISNASSSPHIPTPPGSIANPGHRSLSAQNFANSGGSSGGESSGERGKTYGGRKFQRVVSAPISPENGTDTEGVEFQVSGNVCSLPSAPLVDASTVASRSNLVTPALPERTLPFARSTVRRLGGLSKFGGPARRVILPQGSEDVQVQESGDVNELQGRHSSAPITEHGVSRTSAAVPSEGEDRLFRPFGKLEETLRPVAGPSKASGLRYMDSLPETGPEVRGIQINNPRSSDVGKPASPPYRNLRAARPPPVAESRRNAPMVSTATVVNAPASHPAMPSEILQPQPTQSAPQGKTLFHVNGVPYERLQRLGKGGSSTVYSVLYSGPKKRIIYALKVVQLDRADSETYQSYTNEIELLKRLRGHDRVIQLIDHQITFNQHNRPHRLLMVMECGEIDFAALLDEQRGKAINMNFVGLYWEQMLEAVQAVHRENVVHTDLKPANFVLVKGRLKIIDFGIAKAIANDTVNIQRDQQIGTVNYMSPEAIQRMNNQKVLKLSYPSDVWSLGCILYQMIYGSPPFQHVSGGPLAKMGVIADPNHVVTYPEVAVPKAAVGFSLDGHPTDPASLSVPVSPSAIDSMKRCLAYRKEHRLTIPELLQHEFLKPRIRAPAVPPGSTPITQYQMERLVNFILSENGLPELSEGNHTAEDLFSQLEAQNALSR

SEQ ID NO: 8579 - protein, 791 aa, Cryptococcus neoformans var. neoformans B-3501A
MPINPLEAEAYELPPLSQAAISPAEQYFEDLVAEEESAKLLDTEGQLKQDDEDELVDDSALYMRRTQDEEVIGRGSKVEELIARTVPSHDDPTLPTLTLRVIFLGSSFCILGACASQIFYFKSNAPSFSSYFVVLATYPLGHLLANERLVPRGNKIFGWEINPGRFSIKEAILISVLSSSGASSAYAADILAIMDLYFDTPLSPLPSILLLLTTQCIGFGLAGMLQNLLVNPPAMYWPSTLVTVQLFTTLYSTTSSTLSLTQQQLTLTRLRVFLVIFLAIFLYQFLPFLFFPTLTSVSLLCLVNNRSWWMRTLGSAYQGLGIMDFSFDWSSIGSSGPLYTPYWALGNYFGGLVGMLWIILPLLLMLNFWDARSFPSPVSAGLFNATFQKFDVASILKPDLSLDEAAWEEKKPLLLTPYLISALTYGLSFAALSSVLVHVWLWHRDEIKQGNSMMFTINLCDHTYQCLRYGMWVFWLLILVLQASVLPSFRITIILIESKVILVKTTSLQMPIWALVLAMAIATIFLVPVGIIAAVSNTQIGLNVLTEFVAGILMPGKPIGNVTFKCYGYMAMSQALALTADLKLGWYTSIPPREMFTCQIIGTVLGALTNYATLVSVMAAKRPYLNGSLTDPTGQWTGRAPSIFYSASIIWGAVAPARFFSGGYEVLYLGFLVGALVPVGFWLAHKKWPGYKLNKVVFPIICSGATVVPQYPSNIILTSLLTAVLVNSWFAKRHPKLHRQYVYVASSALDAGTSITALAIYVLFGGVFWSWNGWEWWGNSGVDSEHCVPGS

SEQ ID NO: 8580 - protein, 728 aa, Cryptococcus neoformans var. neoformans B-3501A
MPDVVLPLVQTPPFVIIALAALQGIPVTWDAQSGEQGQTTYGDIVGAENVRAELEKGVDGKEIPLPPLPTLLTSTSSFQDVSAVLDAFDDYLAYRTYFAGPKFGFGDATIWGTIRGNNSAIGSIKKPGRPHLQRWFNHVETLDVPKAALESHRQAKSEMEKGKKTKRLESIDVVLPNAIKGKVVVRFAPEPSGYLHIGHLKAAILNRYLADQYQGKFILRFDDTNPLKEEGEFEEAIQEDLKMIEISFDKIVHTSDHFDKIQAYAEQLIKQGDAFMDDTEGETVKEQRRAMIPSKNRDLSIEENLVKFKEMCEGTEEGKRWSLRAKIDYQHKNGTLRDPVIYRYVEGSHHVTGTKYKSYPMYDLACPIIDHLDGVTHALRANEYWARHEQYQWFLKTLGFANIEIFDFSRVDFVYTVLSKRKLKYLVEKNVVKGWDDPRFPTVRGIRSRGMTVQGLKNYILGQGASQQAVQLEWDGIWTVNKKVIDPVAPRYWAIAEDRMVSVNVIGRETEEPEVVSRPLHKKNPEVGEKKLVFASKLIMEQEDAKTFGENEEITAMDWGNAFVTSKITTPSGDVSSLTITLHLAGDFKKTSKKVTWLAAPTDANPLIPVVLIEYDYLITKKKLEEDDSLPEVLNPKTEYRTYALASKEVEGLKKWDIIQFERKGFYICQGTRDNQGRMEFGFIPDGRAATVALKAEPAKEKTKVPGTAKGSWGKPGPKAVSTAAAAP

SEQ ID NO: 8581 - protein, 339 aa, Cryptococcus neoformans var. neoformans B-3501A
MSTSHLRIPPAEPFTPSLEATVYLHTPFHPKAEIYAETKFKKVLRPKDGKVDDLMKQIDGILLRTGDVTAEMVLAAPNLRIISRNGTGVDNVPLPTCLSRGIAVTNIPGSNAFAVAELAIALMLTVLRRVVEVDKRIRGGERVPSIEALAPGLGGKKVGLVGMGDIAYELAKLLRAFGCEVLIHSPSSPELRWTVEDTRYPVTISHTRMPSLRSLLEQCDVLSLHCPLNANTRYMIGREELGWMKSTAVVINTARGGIIDERALEEALKERKIGGAGLDVFEKEPAYGESLGGLRDLDNVVLLPHLGGSTDSVTLDGCIKAVDIMASYLDGKGAINRVI

SEQ ID NO: 8582 - protein, 328 aa, Cryptococcus neoformans var. neoformans B-3501A
MASAAYSTIKLFSGSSHPELAALIAKRLRIPLARANISQPPSGETKVTIVESVRDCDVYILNTGAGAVNTNLMELCIMIHACKIASARRITAIIPHFPYARQDKKDKSRAPITAKLVANMLREAGCDHVITMDLHASQIQGFFDVPVDNLYAEPSMIQYMRNNIDVHDCVIVSPDAGGAKRATSIADRLNVEFALFHKERKKANEVSRMVLVGSVTGKIAILVDDMADTCGTLGLAAKNLLEAGATKVYAFATHGILSGNALKVISESGMEKLIITNTIPQSENCEKCEKIEVIDVSRVLAEVIRRSHFGESVSYLFHEVPYSNGVGA

SEQ ID NO: 8583 - protein, 834 aa, Cryptococcus neoformans var. neoformans B-3501A
MLARKHLIRTARLSIPRPSVATRAVALGFVRTYAQGPPRPPPGGPGGPPGGGFGGMRFPGGGMMGQQPEKGETLKQFSIDLTKLARDGKLDPTIGRDEEIRRTIQILSRRTKSNPVLLGLPGVGKTAILEGLATRIVNKEVPESLHGKRLLTLDLSSLMAGTGVRGEFESRFKSLLKDIEEEEGNVIVFIDELHTLLNLGKAEGSLDAGNMIKPALARGLQLVGATTLDEYRKSIEKDAALQRRFQPIMINEPSVESTISILRGLKSRFEVHFGVQIADSALVTAAVYSDRYISDRFLPDKAIDLVDEASSALKLAQESRPTELEKLDREIVTLEIERESLKNEEDPFSVSRMEKVEKELEEKKQEQRRLADLWAQERERVAEIKGIKEQIEQANVDLENAQRNGEFEKASKLRFSTIPQLQAKLPKAQAELKSENEEEPGMAVRDRVTSEDIAVVVAKSTGIPVANLLKGERERLVHMEESLKQRVVGQDQVIHAVADAVRLSRAGLQAPTRPLASFLFLGPTGVGKTELTKSLAEFLFADEKRALIQLNMSEFHDKHTVSRLIGATAGFVGYEEGGQLTEAVRRRPYAVVVFDEIEKAHPDVANILLQILDEGCLTDGQGRLVNFKNTIICLTSNLGSEALYEPDATHPDGSITEATRASILSHVGRFFRPELVNRLDELLIFNKLPPSVILDIVSLRLSELQSRLDGRRITLEVSDDARAWLAKKGFSEEYGARAVGRVVRDQVISKVAGRLLDGTIKDGDIINIRLEGERLEISSAPNPNIPHPSQEGGDHISPSARGASTEAESRPLNILEDGVEEEGDEDIPRRTVYY

SEQ ID NO: 8584 - protein, 803 aa, Cryptococcus neoformans var. neoformans B-3501A
MSAIVTLRAIPTEADTGALKSIVSRDVRRAYISPETLRTHKVAAGDWMRFKSGSTFIMAQAWPKASIDDDVVALSSAQINNLCGSEVEMHHFKAGQSQGRLVSIVLKEVPLTEAPSSSKLNVVTRPPINLDSPREWVWCKAAIKEALTSLHYVRTGYSLIVGDTEKAPRKFEIISVEVSPKDIEKRLASIEDGMEELAIDEENQRLYEMHWKTSVSLEGEKLQENKEVREAIPDEKKVLSTKDFSKMSTSSVPHYINFFTPAESPVSAYTFLGGLQSQIDQIKTLLDLPMLHPDLYIKFGLNPPRGILLHGPPGTGKTALARAVASSAGCSCIVVNGPELSSAYHGETEERLRGVFTEARKRSPCIVVLDEVDALCPRRDGGEGGEVERRVVATLLTLMDGMSHESLEGERVFVVAATNRPNSIDPALRRPGRFDREIEVGVPDVKGRREILDIMLSKIPHSLSEKDLSSLAARTHGYVGADLFSLVRESASAAISRFHLSPSSTLSEPVLTNADILSTLPSIRPSAMREVFIETPTVRWSDIGGQQDVKQKLRECIEWPLMHRDTFKRLGVEAPRGVLLYGPPGCSKTMTAKALATESGINFIAVKGPELLNKYVGESERAVREIFRKARAASPSIIFFDEIDALGSARSDDHAHSGVLTSLLNEMDGVEELSGVTVVAATNRPDVLDSALMRPGRLDRILYVGAPDFETRKDIFRIRLATMAVEPGVNVEQLAEITEGCSGAEVVSICQDAALAAMNESLDAPYVKASHLVNSAHTVRRRITPEMIAFFEEWRDLSGVRSA

SEQ ID NO: 8585 - protein, 421 aa, Cryptococcus neoformans var. neoformans B-3501A
MAQERSKIPSHVLILGGGLAGTCFALALSKSGIRSTIFELRSDPGDIGGALMLAPNALRVLDKLVGVYEEIKDNGFSFEKINFYSEDGMKLGGFAQGDQERWGYKALRIKRPILHKKLLEACAASDKIDFKYGMIWKSIDESETGVMIHFEDGTRTSGDILVGCDGIHSRLRNYLLPDPPTPTYAGLAGIGGEVSRSSLDIPPYMTLPAFIYTRPGMVMLVPCDSSGESIGWAAQKSVPDRTRSGWREYEESGDAIKGIKEDYKDVQNETLQSLLKVASEEAGQARVWAPYQIPRLPTWHSKRICLIGDAAHAIPPSGGQGAAQAFEDGGLLSMFLSNEEAVGKGYEKLFEQFEKKRKKRFEIVESLTKASGSSRQEGMTGLEWFIKKWGMWAYLLTKGGYMKDDALMSYDVTKESVVVPS

SEQ ID NO: 8586 - protein, 654 aa, Cryptococcus neoformans var. neoformans B-3501A
MTRDFGSLFFTGPIFVDYSFTARHLESFLSSFPPQVSHAMSSASTPTAPYLEDLVRNSLDQTLPWVVQKYGGTSVGKSLDNITKIVGSYIDNGSKVAIVCSARSTQTKSLGTTNLLLQASREALQPALSSSGDGRSGSMSGTATPFYPKRVGSGFFGKDQSTSMVSSVSSLSQLEPQLGRSGSPSPFQSSSSRSPPRSPATPSQDSSVSQEPAFHATVDLIKKGHLEAARASLKEGPLRDELEEEIERDCESLRSFLYAAQIIDEISPRSQDSIVGTGERLACKIVAAALRDRGVDSELVVLDNIVDASMSAASEAISVDAGDQGVAQLGQEFYDQLSFRLGERLRECGQRVPVVTGYFGPVPGSLLAQIGRGYTDLCAALCAVGLKASELQVWKEVDGIFTADPRKVPSARLVPIITPDEAAELTYYGSEVIHPFTMEQVIRARIPIRIKNVENPSGAGTVIYPDLGFPRGLDTEPPKAERIVEGVDERMPTAVTIKDEIIVLNIHSNRKTLSHGFLARIFGTLDRAGVVVDLISTSEVHVSMAMQDFLNRKRLERLVKDLEKIGEVTVSKDMAILSLVGRNMRNAIGSAGLMFASLARAMINIEMISQGASEINISCVIENKDAIKALNVIHESCLSYPRSPATEMAGLQLQ

SEQ ID NO: 8587 - protein, 1210 aa, Cryptococcus neoformans var. neoformans B-3501A
MLMELPPLWAQVEPLLVAQSPSSPFAHQTARANSILWNRLRTTRRWETEGGDNNRVCVAIKWPEDGRLRRGKGKMKGKSTVVWVEEGEEDKRLESIILVHPSLIPSFYPTPLPISLLVHQPINLSLAVLQPAFDNPDDRSSSNTSEDIDFSDIWRDSNYPIIRQGAIISCKSGITTNQYKVLMLEPVYQGILTAETNIIISNTFFFADSYPLIQTPLGDGMSEGSFSKTHLSLANFDADAFLSSSLSLSLKDDLPDGEALEDEELMALSSTTSGSLTPRPPGAGVRPISPVAPVEEVLQHEELEDRGVRFNPVVAEGKAVDGGGDDVCWMGVGGLGRAGIFEGDWVLVKPIGQAQASGRLVKALAWELLDESDDELPANTILLSPSLYRSLIPSSSSSSLPQLTVVPTPFGARSPTLPIANKITLTRIATAEAVDKRYERSWLRGQTTLFVPKNRKRRGDAQEYVSMVRRGDILGIPVWLDKTVTDDERQKSIAAESEDDTDSGSESDSPSPFFSKIPSTPTSIVYFAVTSISYNPLVPIEEDFRSSTTAKARAGELGCWIGDGTELVYEGLEKARIEQKGWDKRWCGIRSNPPPFSRSAYTKLSDILNSAFFQTSTAFRPQLSIIVKGSRGAGKRSLIECIADDIGFNIVTVKVDCYDITGDTPEVTSGTLLARLSKSISCSPSLLVLHHVEALSSKSNSPFGRPPSVVKILEEVIDGARQTSDSSSGSSSSWPVIVVGTTADADAVPSEVLACFKQEIELKAPNEDERLAIMEYKLEDYEVAPDVDTRALARQTAALNAGDINSLVHLAWIAAVKRSTSSCVSFPQAQQAGISITSEDFRHALSKARAAYSDSIGAPKIPNVSWDDVGGLVSVKQDILDTIQLPLERPEMFGEGLKKRSGILLYGPPGTGKTLLAKAVATSFSLNFFSVKGPELLNMYIGESEANVRRIFQRARDAAPCVIFMDELDSIAPKRGNQGDSGGVMDRIVSQLLAELDGMSSSRGGVFVMGATNRPDLLDPALLRPGRFDKMLYLSIPTTHTAQASILTALTRKFNLHPDLDIGKIAEQCPFNYTGADLYALCADAMLGAMTRQAEAVDRTIAKLNASASMGEDPSLKTWPGELTSQYYLAKMATKEETEVIVKQKDFEEALIKLVPSVSKEELKHYERVQKEFQGYAIGKKDSANEVKDKGKGKGKEKGKSVVVNGEAGG

SEQ ID NO: 8588 - protein, 525 aa, Cryptococcus neoformans var. neoformans B-3501A
MRRIAPVLLRPLAARAYAAKPLDIDHVQDPDFEDVAGELTRRRRKADAKRRQYGSSFVDHAIVTVRGGKGGNGAAALEASLRGPSFPSGGNGAHGGSVYITTSPELTSLATVKKRLIAGAGGSGGGAFKHGRKGEDLVVQVPVGTIVRELKREGEEERMEREEDDLGLSDAEKKKKRWQRWFIAHPSTKGEVSEEEYADGEDLLRRERRWIAHTPSFDQTPPFHLDISEPLDEPVLIASGGSGGLGNPFFPSPRLASRGTLPPTHTFEFELKLLADVGLVGFPNAGKSTILRALTGRRAEVAGYQFTTLNPQIGVVRVYEDGSWGVGKEEVVETWIEREREDFSRQTGGPFPASRIKNGREDKMERLRFTLSDNPGLLPMASQNVGLGHSFLRSIERSPVLAYVLDLTKPSPVQDLQVLKTELEAYKPGLSERAGVVVLNKGDAVPEEEGRKRVEEVTAFVSEHKSGQVIVLSGRYGLGMETLVALLADNVEKARIERAEMLDRERKAVKEEPVSHRVSGFGLKK

SEQ ID NO: 8589 - protein, 725 aa, Cryptococcus neoformans var. neoformans B-3501A
MLSRQGLGLAANFIRTPLRRRFPANIPVPAHAATLQPQLRALLLQSRLRYYSQSSKKQEKIDKEKEPEEERAPSPIPIHPPASIKLPSATASPTTSPTSPGKDAKPDTSSILKLLTLAKPQWKLLTVGVAFLSVSTAVNLSIPWAIGRIIDFFAPGSEETLLFGLPLEHATGALAVVLLIGAAANSGRSVCLRLAGQRTVARIRNKTYDKYLSMPPSHIEASGVGDALSRLGQDTSIVGQSLSENLGEGLKAVLGAGAGIGAMWLISPTLTVVMLCIIPPIALGTFFYGRFIRKLSLKTQEAMGGMSKLAEERLSAHRTITSSNTQAMEKGLYASKVDGVYKLQKKETVANGIFQGANEVAGDIGMIGLLIYGGVLVKRGEISVGDMTSLFIYVNWIEWSLNTLAGFFTGLMKGVGASQRIIGLHALPSPIPLSSGKLLPKTDAGSIELRNVDFAYPSRPDAKVLNGLNLKINKGERIALVGGSGSGKSSIQLLLLRFYDPTSGSVLFSDNDIRKYIPESWRSRIGVVQQDPVLFGGTIEENIAYGHPNATRGDIKRAAQVAHCDFIEKLPQGYDTLITKNSLSGGQRQRIAIARALVGNPSVLLMDEATSALDSESEHAVNAALNDLFANSDITVILIAHRLSSIASANRVVLLEDGRVVEDGTYEDLITRRDGKFRKMVDGQLAKIQVGEVEEGPEPVSEEEGQHQVEEVKEDAEVKVERKKE

SEQ ID NO: 8590 - protein, 319 aa, Cryptococcus neoformans var. neoformans B-3501A
MSLGSEFQGFKQWKSLEERGISSEVLETLTDESRECLERLANYDSHSVHDFGIVKQAAVLVVLFQREADDKLHVLLTTRAKTLRRHPSQTALPGGKVDPEDRDATHTARREAFEEVNLPLEHPSIHNLTVLEPVMTILPLNAHMKNHIIVIPTVCFLSDTSLLEHLRPSPDEVDAIFTHPLKGCLTGTVEGKDLEGLAEKGSEWWPHKEEFHSIEDRIGTTGGYRMHRFRTKRTPIKGLTSDVLIHAASVAYGSPPAFGQFAPNQPPFSSAISNVVLELPCVIDQSTAASIPGEPPRVLEWGGTEAGIRIISREQYELV

SEQ ID NO: 8591 - protein, 623 aa, Cryptococcus neoformans var. neoformans B-3501A
MSDNEQVAFFTYILERLKQCGVKQIFGVPGDFNLTALDYIEKDPELQWVGNANELNAAYASDGYARVKGTLAVVITTFGVGELSALCGIAGCLSERVPVLHIVGAPSTSLQAKQSLLHHTLNLPESFSTFSSMSAPLSCSQALINNIEPKTPTSWTEAFDKTLKAVLEQCRPGYVEVPTDAVHAKVSAEGLKQPLPPPHSAPPPESMGTSLSNTSASAASRGAAQVSLSTAPTNVPSAPSSDDVTAHVVEDITKRFGEAKKPIILVDACAGRFGMAIEVRKLVDACGIRFFETPMGKSLMDERHPLYGGCYAGANSLPTVQKEVESADFVLYVGALKSDFNSGSFSVNIDPKVIVELHSFTTTIGYASYPTTDIRTILPLLRPAFEKLGRGKQSEGQSVEQKVEDKSVDSPVVPDPKGDEIKHEWLWPRVGKWFQDTDIIITETGTSSFGLTNVVLPSNSTYIAQILWGAIGWSVGACLGAAMAAKENGNNRRTVLFVGDGSLQLTLQEIGTMLRRGVHPYIFVLNNDGYEIERQIHGWTAEYNDIQLYDHQLLLPFLAGKKTKTPYQSYAVHTPQEFSKLLDDEEFNKPDRLRLIEVFMPRGDAPAGLIRQAKLTAEANDRI

SEQ ID NO: 8592 - protein, 797 aa, Cryptococcus neoformans var. neoformans B-3501A
MSASYNGIEAPIPRDQATDFPIQTFYASTESPELDQKQEDNVDLEKNESTDNVEVKVESIKDPGVELTPNEAFRWNVDGDQSPFPEVAACVPNTDDPSIPCNTVRAWILLTVFVVLFAGVNQFFGLRYPSLTIGYVVCQLLVFPIGRAWEKLPKWVVPLGPFSFYLNPGKFTIKEHALIVICVNLTASTAYAMGSLVAIISPVYWNSDFGAGFSFVYLLTTQALGFGLAGLARRWLVYPAALIWPSSLASTVLFRALHEPQSRSPANGWTITRYRFFVYLTIGAFIWFWFPDYIWTSLSTFAFITWIVPHNQKVNTIFGMNSGLGLLPISFDWTQINYAGYPLTTPFYITCNAFAVVVFFYLFLSPILYYKNVWHSAYLPLLSSSTFDNTGSSYNISRVVDEKLDFVLAKYQEYSPMYISMSYSLTYGLSFAAVTSIVFYTYLYSGKEIWAKFKDAKHGGEDIHKRLMSSYKEVPDWWYGVLTLVVLGLGIFTCRYWDTQLPVWGFIVVCFGMGLVLIVPEGILEGTTNQRIFLNIITELIAGYAWPGKPIANMLVKCYGYNSVKHGMDFAQDLKLGQYMKIPPRTLFWAQIYSTLLATMTQTGVLRWMIGNIKDLCQPTNSDRFTCAGAKVVYNASLIWGTIGPQRMFQAGQVYNGLMYFFLIGPVVTVLVYLVYRRYPSSWVKYINVPVFFNAAGNIPPANTTQYSLWFIFGFIFNYLIRRRAFAWWKRYNYLTQAAMDTGTALATIIIFFALSYNGVKLNWWGNTVGSDTDDAKGTPWLTVPSGSYFGRGPGEF
